United States Patent Application Publication US 2008/0276334 A1 - sequence listing, part 2

SEQ ID NO: 6677 - DNA, 395 bp, Glycine max
  unsure (1)..(395): unsure at all n locations
  Clone ID: LIB3030-008-Q1-B1-H5
gcagcatcgtagagaaataagggaaaaatggtgtcgctgaaactgcagaagcgcctctccgcaagcgtgctcaagtgcggcagaggaaaggtttggcttgaccccaatgaagtcaacgaaatctccatggccaattctcggcaaaacatcaggaagttggttaaggatgggtttatcatcaggaagccaaccaagattcactcccgctcacgtgctcgtaggatgaaggaggcaaagaggaagggccgccactccggttatggtaaacgtaagggtacaagggaggcaaggcttcccaccaagatactctggatgagaaggatgcgtgtgctcagacggttgcttcgtaagtacanggaatcanagaaaattgacaagcacatgtaccatgatat

SEQ ID NO: 6678 - DNA, 388 bp, Glycine max
  Clone ID: LIB3030-008-Q1-B1-H6
caaccacttagtggccagacctgtattaattgcagtaatacatgacaattgacatatatattattactctagtagtgacacgcatgcatttttattaagtactagtagtttttaccacacctatgaaatcacaccattatcaccccgttggatcgatggtattggtttcatggtggtccataatgtattgggcggacgggaactggatctcgatggccataggcgggaaatggatctggccggcgataacgacctgttgggcggacgggaactggatctcgatggccatagtcgggaactggcccgccataaccttgttgatttcgctaaatctgcatcaatcaatcaatctttgtcttcctcacaaccaacaccattctccgccggt

SEQ ID NO: 6679 - DNA, 390 bp, Glycine max
  Clone ID: LIB3030-008-Q1-B1-H7
aacggcaccggaggcgagtcgatctacggcgccaagttcgccgacgagaacttcgtgaagaagcacactggtcccggcatcctctccatggcgaacgccggtcccggaaccaacggatctcagttcttcatctgcacgacgaagacggagtggctcgacggaaagcacgtcgtgttcggacaggtcgtcgaggggatggacgtcgtcaaggagatagagaaggtcggatccagctccggcaggaccgccaagcctgtcgtcgtcgccgactgtggtcaactctcttagatagacgacgttgaccctaggcttttatctctgtgtcggtggctctgaatgtgtcgtttctttcggtgtcgtttttgcctttttttctctttcccatgtcgt

SEQ ID NO: 6680 - DNA, 385 bp, Glycine max
  Clone ID: LIB3030-008-Q1-B1-H8
gtaaattattcatagcatatttcaaaccacactcaaaaggcttccctccctgacttggatttgattgatttcattacattgctacactatattctttttattggtgaattgctatttgctacactatattttaaggacaattatacatagactatatggggttgatggctgcgaaccaaactcaattgttgtctaagatggccatcggagatggacatggtgaagcatccccatattttgatggatggaaggcttatgatgaaaacccctttcatcccaaagagaatcctaaccgggttattcaaatgggtcatgctgagaatcagcttacttccgatttggttgaagattggatactgaataacccagaggcctccattttcac

SEQ ID NO: 6681 - DNA, 280 bp, Glycine max
  Clone ID: LIB3030-008-Q1-B1-H9
gtgaaaggggaaaaaaagagtgagatggtgccacggtgatgcgtgggtgttattcatagaaccgaatactcatctttgatcagttgatgaaccgagttcttcagcgggatctaattttcatagattttgccaaaaagatcaaattttgaagcaattgtttttgtgggcaacgttcattctttctgatccttcgaaaaatcaattttcggctttgggatcaatcggaaatggagaaggtgatgaacattctgaagccaaagcaaatccgcagcaactattg

SEQ ID NO: 6682 - DNA, 391 bp, Glycine max
  Clone ID: LIB3030-009-Q1-B1-A11
acaaagcaaagctcatccttgagttaaaaaatggcagcagcttcttccatggctctctcatccccatccttggctggcaaggccgtgaagctgggcccatcagccccagaagtgggaagggtgagcatgaggaagaccgtcaccaagcaggtctcctcaggaagcccatggtacggcccagaccgagtcaagtacttgggcccattctctggcgagcccccgtcctacctaaccggtgagttcccaggcgactacggctgggacactgctgggctttccgcagacccagaaaccttcgccaagaaccgtgaactcgaagtgatccactccaggtgggccatgctcggagccttgggctgcgtcttcccggagttgctgtcccgcaacgggg

SEQ ID NO: 6683 - DNA, 379 bp, Glycine max
  Clone ID: LIB3030-009-Q1-B1-A12
tatgtctgttgcaaagacaagagtcctgtttgtagagaattattctttgcatgagctgcttagcctcattgaagattttcttattgagggaaaagtaatagtaaacaatagagtatatgctgaaactttgtcttgtgatttgagagttaatgattttctggattgtgttaatcaagtatcatccgatgtagcttcaagtgaacaattggcggaagcaagtattatattagcatcagtatgtgctgcaactgattatgttggatttatttgtgatgcttcatatcatattcttcagtcatgcaagtgggattctctgatggtgctgactattctccatatttttgcttaattgggcggagagaagttttttaacatggat

SEQ ID NO: 6684 - DNA, 330 bp, Glycine max
  Clone ID: LIB3030-009-Q1-B1-A2
gatcttatagagagtacaacagtcgcccaatcaagcctcagcaaatttgccaaggacaaccccgggattaaaaccgggcaatggatacttgcaatcaacgtgacaaggaatgataataaaagcttgaaccccccagtgatgagcccttttgcaaaatacagactgttcatgaatccaagatctaagaatgctgggacaatgttggcgttatcagatttcgtgtccatgagaaataatcagacgtctctatcaagtgtcgctagcaatggtgacaatggagcctatcttgcagacaagcaaggattaagtgtgactgatgccgtcatcggt

SEQ ID NO: 6685 - DNA, 339 bp, Glycine max
  Clone ID: LIB3030-009-Q1-B1-A3
ggctcgagcttctcatttttatgatgcaatcttgaatgcaatggacatattcataattaatgactctacaggtattctggcaggggcaaatcctattcctcctcctgtgcaagacatagttgacccatcaacggctagagcatctcatcatggtaaatcaaagaatcatacgggcataattgcaagatgtgttgctggaggaattgttttactacttgtagatgggctatttgcttttgctgcatcccatcttcgtacgcaaggaaaggattctggtacaagtgaagggccatctggctggcttctactttctccttatggtaattcacactctgcagc

SEQ ID NO: 6686 - DNA, 427 bp, Glycine max
  Clone ID: LIB3030-009-Q1-B1-A5
gcgaggactattttaaaatccggaccgtcgaatcggaccaccatcgttccaccggcgccgtcgacctcaaaggctcgaaccaccttccttctactcaactgcactcgcactcgtcggcgcaagctcccaccgtcgcacgcctcagccgcttccagttaacaagggaaatagcatttggtcataagaaaggaaggaaggaaaatggtgtttgggcaaatagtggttggtcctcctggctctggcaaaacaacttactgcaatggcatgtctcagtttcttagtcttattggaaggaaggttgctgttatcaatttggatcctgctaatgattcgttaccatatgattgtgctgtgaacattgaggatcttgtgaaactaagtgatgtaatggtggaacattcgcttggaccaaatgggggtcttgtgt

SEQ ID NO: 6687 - DNA, 437 bp, Glycine max
  Clone ID: LIB3030-009-Q1-B1-A6
atttgcctgctccaccattcctacttctcatatctctatcgttagtcccttgtttaattactctcatatcatagcagttgctgaatctagcttttctaagtttttttcaaaaatcaaaatggcacttcccaatctttgctttgtcgttttaatcctaaaagtttccttttttctccttgcatcaacccaagttagagccgccacctctgactcaagcttgttccgagaatacattggagcattgttcaatggtgtcaaattctcagatgtacccataaacccaaatgtaaagtttcacttcattttgtccttcgctattgactacgacacatcatctggttcaccttctcgcaccaacggaaaatttaacatcttttcggacaatcaaaacctcacccctacccaagtttcttccattaaggccaaaaatccaaacg

SEQ ID NO: 6688 - DNA, 240 bp, Glycine max
  Clone ID: LIB3030-009-Q1-B1-A7
gtttccatgatctattactctgctgcttcatattcgccttcattgtcactggtttgatgacccatcatcatggagcttcttctacagcactatcttggattagtactttgcttcaaggatccatgcgagaccgtccagcggcacatctcacattcatctacaaatcgccatccatggcgttcactccttcgtgttgaccgaatgcttcgcatgctcatgtgttttacgatgttaggttca

SEQ ID NO: 6689 - DNA, 426 bp, Glycine max
  Clone ID: LIB3030-009-Q1-B1-A8
gagaaaggcaacatggacggcgctcgaatctacgcggagaacgcgatccgtaagcgcacggagcagatgaactacctccgcctggcctcgcgcctcgacgccgtggtcgcccgcctcgacacgcaggcgaagatgacgacgatcagcaagtcgatgggcaacatcgtgaaatcgctggagtcatcgctggccacggggaacctccagaagatgtcggagaccatggactcgttcgagaagcagttcgtgaacatggaggtccaggccgagttcatggagagcgccatggccggatccacctccctctccactcccgaaggagaggtcaacagcctcatgcagcaggttgccgacgactacggcctcgaggtctccgtcggcctcccgcagcccgccgctcacgccgtccctgccaaggaggccgac

SEQ ID NO: 6690 - DNA, 404 bp, Glycine max
  Clone ID: LIB3030-009-Q1-B1-A9
ctctgctcgtgcctctagggttatcatatctccatttccatttcctctctctcagtttccaagaatcttaagctatgggaaagtcttacccaaccgtgagcgctgattaccagaaggccgttgagaaggcgaagaagaagctcagaggcttcatcgctgagaagagatgcgctcctctaatgctccgtttggcatggcactctgctggaacttacgacgtgagctcgaagaccggtggtcccttcggaaccataaagcacccctccgaactcgctcacggcgctaacaacggtcttgacatcgctgttaggcttttggagccactcaaagcggagtttcctattttgagctacgccgatttctaccagttggctggcgttgttgccgttgaggtcaccggtgga

SEQ ID NO: 6691 - DNA, 435 bp, Glycine max
  Clone ID: LIB3030-009-Q1-B1-B1
gattcagatcttagggtttcttcttcttttctttctgtggagccccattgaccatagccgccagccagagagagaagagaagccttcgatcgtaggttttcttaccctcctttctcccaaatcggacctttccgcttctcgattcgcttccgcagctgagcgatctggaaaacccagaaaagaaccaaccgaacgttttatatttttcggataatcaatcaattgaagatgtctcgttgcttccctttcccccctcctgggtatagggcacgtggcgaggccttgatcaaatcgattaaggtttgttgagccgtttcgattttgcgtttgtgctcaactctctctgcatgttgtttctctgcataaaactgccaccccccctttttgcgcttgggttgtatattagtgccaaacgctgccgttttaaatgtgttt

SEQ ID NO: 6692 - DNA, 423 bp, Glycine max
  Clone ID: LIB3030-009-Q1-B1-B10
ctaacacaaaccctaaccctagccccaaacacctccccttccccttcccggaccccgcccctctgggccctccccctcctcccgcctacggcttccacatgcttgaacgccgcaccatcgtcctcgccgacggtagcgttcgctcctacttcgccctccctcctgattaccaagacttcgccccccgccctctcgacctccctccccgcttctgcctccccgactactcataccgccgccgccgccaagcgaaaatacggtgatgatgacggcggtcccagggatgacctcgccaggcagagggagcagcttctccgtaacgccaatggcatttccagggagcagttctctgcgggccccagtgacttgaggccctccaagcactccaagctcgatgggttgtcgaaatctacgagacactcg

SEQ ID NO: 6693 - DNA, 352 bp, Glycine max
  unsure (1)..(352): unsure at all n locations
  Clone ID: LIB3030-009-Q1-B1-B11
caagaatatactaatcaattatatatatatacatcatcctcccgtacaagaaatcaataaaagggaggaaatctatatttcatctttcctattgttctatcattataaaaaaaaaaaaaatctcaaaaaggaaaaaaaaaagaaaaaagaaaaatggtaaacggaaaaatacttgtatctggagtttccctaatccttgtggtgggtgttgccatcggtgtggtggttgttgttaatagaaaggacacatctgatcctgaagtagcagctcagcaaaaatctgtgaaggcaatgtgtgaanggaccgatgaccctaaactttgtcatgatactcttagtaccgttaaaagct

SEQ ID NO: 6694 - DNA, 356 bp, Glycine max
  Clone ID: LIB3030-009-Q1-B1-B12
ctcgagccggctcgagaatacaatgaataaaaatcaacccttagtcaacacaatcatcatggccacctctgctattcagcaatcagcattcactggtcaaactgctctgaagcagctcaatgagttcgtccgcaagaccggtggcgccggcaaatgtcgcactaacatgcgccgcaccgtcaagagtgctcctcagatcatttggtatggccctgaccgtcccaagtacttgggtccattctcggagcatattccatcatacctgaccggcgaattccctggtgactaccgatgggacactgctggattatcagctgacccggaaaccttcgccaggaacccggagctggacgtga

SEQ ID NO: 6695 - DNA, 427 bp, Glycine max
  Clone ID: LIB3030-009-Q1-B1-B2
ggcatttctgtccgtaacctctgtaactgtggagaacgtgacattccctcccaccgtgaagcctccctgctcccccaacaccttcttcctcgccggcgccggcgtcaggggcctccaaattcatcacgctttcgttaaattcactgccatctgcatttacctccaatacgacgccctttccttcctctccgttaagtggaaaaccaagtctgctcaccacttaacggaatctgaccaattcttctcagatatcgttacaggtccattcgagaaatttatgcacgtgacaatgatcaaacccttgactgggcagcaatactcatagaaagtggcagaaaattgtgtggccatctggaggtctctcgggatttatacagattcagaagccgaagcaatagacaagtttctttctgttttcaaagaccta

SEQ ID NO: 6696 - DNA, 437 bp, Glycine max
  Clone ID: LIB3030-009-Q1-B1-B3
aagcaaaaacaatatggaagtaaagaaagttttttttgttgctctatcctttgctttggttctgaaagttgctgaaagctttgagttcaatgaaaaggacctggaatccgaggaagggttgtgggatttgtacgagagatggaggagccaccacacggtttctcgaagcctcgatgagaagcacaaccgcttcaacgtgttcaaaggcaacgtgatgcatgtccacagttccaataaaatggacaagccttacaagctgaagttgaacaggttcgctgacatgaccaaccatgaattcacgagcatctatgctggctccaaggttaatcatcacagaatgttcataggcacgccacgtgggaatggtactttcatgtatcagaacgttgacagggttccttcttccgtagaatggaggaaaaaaggtgctgtcactg

SEQ ID NO: 6697 - DNA, 194 bp, Glycine max
  Clone ID: LIB3030-009-Q1-B1-B4
gatcgcaagcggcaaccctttttttttttgttttttttgttgctctatcttttgctttggttcagagatttgctgacagctttgtgttcattgaaaaggagctggtatccgtcgaacggttgtgggatttgggggagagatggatgagacaccacactgtttctcgaagcctcgatttgaagcacaaccgcttc

SEQ ID NO: 6698 - DNA, 441 bp, Glycine max
  Clone ID: LIB3030-009-Q1-B1-B6
gtgatttcagtgagtgatcggtgttcacttgatctcatcataatcgtcagcgtcaattgaagaagatgccgatcagaaacatcgccgtcggaaggcctgaagaggcgactcaccccgacacgttgaaggcggctttggctgagttcatctcaaccttcatcttcgtgttcgccggctcaggctccggcatcgcctacaacaagctcaccgacaacggcgctgccacccctgccggcctcatctccgcctccatcgcccatgcattcgccctcttcgtcgccgtctccgtcggcgccaacatctccggcggccacgtcaaccccgccgtcaccttcggcgccttcgtcggcggcaacatcaccttcctccgcggcatcgtctacgtcatcgcccagctcctcggctccatcgtcgcctccctcctcctggccttcgtcaccg

SEQ ID NO: 6699 - DNA, 414 bp, Glycine max
  unsure (1)..(414): unsure at all n locations
  Clone ID: LIB3030-009-Q1-B1-B7
cacatggctacggctgcgtaggataacatctaacaaacctagcgcacgatagtcttccttcacccatgcttggagtactctgcgccactcgccccaaaccttggcttctctctacctcattccaccgcctgcaaactttttctctccggcggcgctgccgcctccatatggcacgctatcatgccccgaggtgatgacggattacggcgcggcgttgttgccgtccatgacttgaagggagagggatcgtggaatgtcgcttgggacgcgcggccggcacggtggctccaccgccccgactccgcgtggctcctctttggtgtctgtgcttgtctggcgccgccgccgggttgcgtggatgctgacactaattctgctggaatcgctgtggatganagttgcggccttctcgat

SEQ ID NO: 6700 - DNA, 437 bp, Glycine max
  Clone ID: LIB3030-009-Q1-B1-B8
aaaccacacacctcacctattagaagtaacaaaagaccctccctctcaaaagaataaacaagtataaaaaagaaggcacttccctcaaacagaaactaccctctatctctctcttttcaagccttaaatgagtaaaaaagagtgaagaaaggaaagaaaggagcaccatttttggtttgagaaacataattagcaagagagttcaaaatggggaagagagagtttaatggggtggtgttgatgatgctgtgtttgtgggtttgtggtgtcacagcctctgtgacttatgaccacaaagccattgtggttgatggcaagagaagaattttgatctctggctccattcattatcctagaagcacacctcaaatgtggccagaccttattcaaaaggccaaagatggaggccttgatgtcattcagacctatgtgttttg

SEQ ID NO: 6701 - DNA, 434 bp, Glycine max
  Clone ID: LIB3030-009-Q1-B1-C1
ctggtgaccagggtcacatgtttgggtatgccaccgatgaaacccccgagtacatgcccctcagccatgtccttgcaaccaaacttggtgctcgcctcacagaggttaggaagaatggcacctgtgcttggttgaggccagatggtaagacacaagtaaccgtcgagtactacaatgacaatggtgccatggttccagttcgtgtccacactgtcctaatttccacccaacatgatgagactgtgagcaatgatcaaattgctgcggaccttaaagagcatgttatcaagcctgtcattcctgagaagtaccttgatgagaagaccatcttccaccttaacccttctggccgttttgtcattggtggccctcatggtgatgctggtctcactggaagaaagatcatcattgatacctatggtggctggggtgct

SEQ ID NO: 6702 - DNA, 358 bp, Glycine max
  Clone ID: LIB3030-009-Q1-B1-C10
ggtttcaggacacgttctgttagtctggatcactctatgtggtttcatcgatccgtaaaagctgatgactgggtgctattcgcgatctttactccaagtgcctatagtgcacgtgtctttgtcaccggccaaatgttcaatcagaagggagagcttcttgtatcattggttcaagaaggactagccaggaaaattaatcccggaaattcagccattaaatctaagttatgaactgctgaaaaatgcacagattagcatgtatccattttatagttattttagaaaattccacgtatccataacatcttaatatctaaattatatatgtaaatttttgtattgctctaaaaaaaacaag

SEQ ID NO: 6703 - DNA, 372 bp, Glycine max
  Clone ID: LIB3030-009-Q1-B1-C11
cacacccctcccaccgattcattaacttcacacacagacacggtgtttccaccacaccatagcatatagtactagtagattaaacgccaaagaaataaattactcactttcacgtaaaccataacgtgcttccaccgcaaccaaccacaatgggtgccgttaggtccataacggtgttgctactagtgttatttatggccatgagctccggcgtgcgctcgtgtccgccgtcggacagggcggcgctgctggcattcaaggcggcgctccacgaaccctacctgggaatcttcaactcgtggaccggcgccgactgctgccacaagtggtacggcgtgagctgggaccaggagacccgccgcgtcgccgaca

SEQ ID NO: 6704 - DNA, 371 bp, Glycine max
  Clone ID: LIB3030-009-Q1-B1-C12
gctttttctgtattcagaatgtggaagctcaagttcgccgaacgacggaatccatggcttcggacattgaccaatcacgttggaagacaggtgtgggagttcgatcctaagcttggatcgccgcaagatctcctcgagattgagaaagcccgccagaattttcacgataaccgctttacccagaaacacagcgctgatctacttatgcggatgcagttcgcaggagagaacccaacacgtgaagtcttgcccaaagtcggagttaaagatattgacgatgtgacccaagagattgtgacaaatacattaagaagggccgtaagtttcgattcaactctccagtgccatgacggacactggcccggagatta

SEQ ID NO: 6705 - DNA, 407 bp, Glycine max
  Clone ID: LIB3030-009-Q1-B1-C3
tgtttgtgaacaagcacctaggagatgatgcagtgcccaaagacattttgatgccaattattgatgcattgttggcgggtggtaaagcaggagcatctgatgttgaagactgtccattgatgtatagatggcatggaactaggtacttgggtgcagcaaatggacttgctggtatccttcatgtgctgctacattttccacttcctagagaggatgctgaggatgtcaacggaactttgaggtacctcatgagtaagcgtttccctcacagtggaaactacccctccagtgaacggaatccgagggataagttagtgcaatggggtcatggtgcaactggcatggccatcacattgtctaaagcagcacaggtatttccaaatgacagagaactacgagatgctgca

SEQ ID NO: 6706 - DNA, 431 bp, Glycine max
  Clone ID: LIB3030-009-Q1-B1-C4
ctaaaagataaaagataaggactttactttccaaagttgatgtgctcaaactcaaacttatatatctacttgccactttaaccccaccagaggcacaggtgcaagttgagattttgattggtgtttggctccaaaattccaagaacattgatggtctcaagtaaaaaaaatgtttttggcaccatgggggaaatgggtatagatttcatggttttggtgttatcagtgtcatgagtttgttgaccagtatatgtgtctctgccacaagacatgcatacccgccaacaacacaaccgaatcattaacttaatgtttgaccacacatggagaaatcacgatattgcaggtggcagatatgcactatgcaaatggcatgaccacaccttgcttggatgtgcttccttcccacaatttctcttgctccgacctca

SEQ ID NO: 6707 - DNA, 238 bp, Glycine max
  Clone ID: LIB3030-009-Q1-B1-C5
gttgaggaaatcaaagctctttatgctgctgctgagggtgaacaagaatgaaattggaaaggtttcttgtatctttcgctacttacaagcgcttgttttctaattgttactagcaggtgcttataagaaaactagttatctggtcatgtatatgttaataaaattggttgatgtgcctgtcagggctatagaatttatttagataaaatacttagattaaagtatcattttgttgctg

SEQ ID NO: 6708 - DNA, 440 bp, Glycine max
  Clone ID: LIB3030-009-Q1-B1-C6
cacaaaagaaaaaaaatgggttcttctctgtggacctgtctgattttgttatcacttgcttctgcttccttcgccgccaacccaagagcaccaattgatgtgccatttggcagaaactatgtgcctacctgggcctttgatcacatcaaatacctcaatggtggttctgagattcagcttcatcttgataaatacacaggtactggcttccaatcaaaagggtcctacttgtttggtcacttcagcatgtacataaaattggttgctggtgattcagctggcacagtcactgctttctatttatcatccacaaactcagaacatgatgaaatagactttgagttcttgggaaacagaaccgggcaaccttatattttgcaaacaaatgtgttcaccggtggcaagggtgacagagaacaaagaatctacctctggtttga

SEQ ID NO: 6709 - DNA, 432 bp, Glycine max
  Clone ID: LIB3030-009-Q1-B1-C7
gcgatacatttatacaaaacttctaccccaagcacacgcaatggagccgtagacagtcaagtaaaatccaatccacgaaatcatttgatctatggacagcatcgttgtggtaaaggccgtaatgccagaggaatcattaccgcagggcatagagggggaggtcataagcgtctataccgtaaaattgattttcgacggaatgaaaaaaacatatatggtagaatcgtaaccatagaatatgaccctaatcgaaatgcatacatttgtctcatacactatggggatggtgagaaaaaatatattttacaccccagaggggctataattggagataccattgtttctggtacagaagttcctataaaaatgggaaatgccctacctttgaccgatatgcccttaggcacggcaatacataacatagaaatcaca

SEQ ID NO: 6710 - DNA, 441 bp, Glycine max
  Clone ID: LIB3030-009-Q1-B1-C8
gttctgggctttggctttggtaagcctctgtggccagctaccttccaatgcccaagcacctgcaactgcgccggcaaactcaccacctacaaccccagctgcaacatcaccatcttccggcacgccactggcggtaacactaccaccaacagtggtggcatcccctcccaccacaagtacaccaccaactacatcccagccacctgcaattgtagctcccaaacccgcacctgtgacaccaccagctccaaaagttgcacctgcttcaagcccaaaagccccaccaccccaaactccacaaccacaaccaccaaaagtatcaccagttgtaactcccacatcgccacccccgatacctccaccacccgtttctacgccaccgccattgccaccaccaaagatagctccaacaccagccaaaacatcccctgcacctgcacc

SEQ ID NO: 6711 - DNA, 377 bp, Glycine max
  Clone ID: LIB3030-009-Q1-B1-C9
gttcaggacggtaaagatggcgaggatggttcagaagaacaagctgtgattggattatggagtggcattgcttggttggttggaatgactgtattcattgctgtgttgtctgaatatgtggtggatacaattgaggatgcatcagattcatggggtttgtctgtgagcttcctaagcataatcttgctgccgatagttggcaatgcagctgaacatgcaggagcaattatatttgccttcaagaacaagctggacatctcattgggtgttgcattaggttcagcaactcagattgccatgtttgtggtcccattatgtgtaatcgttgcttggataatgggtatcaatatggacatgaacttcaacctcttagagac

SEQ ID NO: 6712 - DNA, 366 bp, Glycine max
  unsure (1)..(366): unsure at all n locations
  Clone ID: LIB3030-009-Q1-B1-D1
acagttggctcctgtatttttcacattttctcttggaacaaaaacacactattatggaaggacattgcttcatggaggtgcagagtacaaaggcactggtcgtggttttgtggtgtttcatgccaaatttgctgataactataggctctattctcgcagccattttgttaaagggattgaattgatgattctgcttgtggtctaccatatatttggccatggatacagaggagtggttgcctatattttaattaccgtaaccatgtggttcatggtanggacatggctttttgctccattccttttcaatccatcaggttttgagtggcagaagatagttgatgactacacagaattggcaaaaat

SEQ ID NO: 6713 - DNA, 423 bp, Glycine max
  unsure (1)..(423): unsure at all n locations
  Clone ID: LIB3030-009-Q1-B1-D10
agaagttctccctcaatcacagcgtgttgatgggacctactgaggttccttctcagtccacggagactattaagattccaactgctcactatgagtttggctcaaccttcattgatcaccctaggttgttgctctgggggagaattttgactgatgggaggctcaatgccagagtcaagtgtgatttgtccgaaaatctcacttttaaagccaatgctcagctcacaaatgagccgcatatgtctcatgcgatgatcaactttgattacaagggaaaagactatagaacccaatttcaacttggtaatggagccttgctaggagcaagttatattcagagtgtgacacagcatttatcattgggtggggaggtattttgggccggtcagcatcggaagtctggtantggttatgctgctcgct

SEQ ID NO: 6714 - DNA, 394 bp, Glycine max
  Clone ID: LIB3030-009-Q1-B1-D11
ccggaatctccgattccggcaaccacattccctcctccaagaaaaaccacaagaagctccttctctctctattggccaccctcctcgtggcggcctccgtggtggccattgttgccggagtaaaaaacaaaaccaaaaactccgacaactccgacaccaccagcacctccctctccctctcccaccactcgcacgtgatcgttaagagcgcctgtagctccacattctatcccgaactctgcttctccgccatagcctctgagcccaacgtcactcacaaagtcaccaaccaccgcgacgtcatccaactctccctaagcatcaccttccgcgcggtggagcgcaactacttcaccgtgaagaaactcctaaccaaacacgacctaacgaaacg

SEQ ID NO: 6715 - DNA, 425 bp, Glycine max
  Clone ID: LIB3030-009-Q1-B1-D12
ccagattctattggtgaatttgttgtgtgtattgccttggttcttcaaggtgaaagagtgttgggtttaatctcacgcttcatgcaggccagagccagagcacgaaagggtagtgatcatggaattaaggcacaaggagaaggatggatgctaactgtggccttaattgaaggaagcaatttagctactgttgattctagtgcattctgtgatccatatgtggtgtttagttgcaatgggaaaacaagaaccagctcaattaagttcaagaaatctgatgctttatggaatgaaatatttgaatttgatgcgatggatgaccctccttctgtgctggatgtggaagtttatgattttgatggaccctgtgatggagctgcatctctcggacatgttgaaatcaaattccttaaaacaaacatctc

SEQ ID NO: 6716 - DNA, 282 bp, Glycine max
  Clone ID: LIB3030-009-Q1-B1-D2
ctaacacaaacccgaaccctagccccaaacacctcgccttccccttcacggacaccgcacgtctgggccctcaccctcgtcacgcctacggctgtccagatgcttgaatgcctcaccatcctcctcgccgacggtggcgttcgctcgtacttcgctctcactcctgattatcaagacatcgccctgcgcactctgcatgtcgctcaccgcatctgcgtccacgactactcatagagccgctgccgacaatcgaaaaaacggtgatagatactgcagtcccag

SEQ ID NO: 6717 - DNA, 439 bp, Glycine max
  Clone ID: LIB3030-009-Q1-B1-D3
caaggaaacaaaaaagggcccctgtgggaaatgggcaaattgcttaacttaaaattgccaaccttttggcaataatccacgtcggattcttggactttacagatcatgtttggacagagtgcttctctcaatacttgggaagatggatgcatcttgacccatgtgaaggaatctatgacaagccattattatatgaaaaagggtgggggaaaaaactaaattatgtaatagccatagcacaagatggagtttatgatgtcaccaaacgatacacaaggaagtggcatgaggtcctatctcgacgtactatccttacagagccttctttgtcaactttactccccaatataacaaaagaaagtcgaagaggctttgcatcccaactactttcaattattgaatcccatgatatggaggaaaacacagaacttgagaggag

SEQ ID NO: 6718 - DNA, 435 bp, Glycine max
  Clone ID: LIB3030-009-Q1-B1-D4
atgggttcaacaggtgagactcagattactccaacccatgtatctgaataagaggcaaaccttttcgccatgcaactagccagtgcctcagtactccctatggttctcaaatcagctcttgagcttgatctgttggaaatcatagccaatgctggccctggtgttcacctttccccctccgacattgcttctcggctcccaacacacaaccctgatgcacccgttatgttggaccgtatattgcgcctcttggcttgctacaatatcctctctttttctcttcgcactctccctcatggcaatgttgagaggctctatggtctcgcccctgttgctaagtacttggtcaggaacgaagatggtgtctccattgctgctctcaacctcatgaaccaggacaaaatcctcatggaaagctggtactattttaaagat

SEQ ID NO: 6719 - DNA, 423 bp, Glycine max
  Clone ID: LIB3030-009-Q1-B1-D5
acaaggcagaaagcaagctcatcctagagttttaaaaatggcagcagcctcctccatggctctctcttccccatccttggctggcaaggccgtgaagctgggcccatcagcccccgaagtcgggagggtcagcatgaggaagaccgtcaccaagcaggcctcctccggaagcccatggtacggcccagaccgcgtcaagtacttgggcccattctctggcgagcccccgtcctacctcactggcgagttcccaggtgactacggctgggacactgctgggctttcggccgacccagaaaccttcgccagaaaccgtgagctcgaagtgatccactccaggtgggccatgctcggggccttgggctgcgtcttccccgaactgttgtcccgcaacggggtcaagtttggagaagctgtgtggtt

SEQ ID NO: 6720 - DNA, 434 bp, Glycine max
  Clone ID: LIB3030-009-Q1-B1-D6
gatggccaccgttccagggcagctcgtgtgggagatcgtcaagaaaaacaattccttcttggtcaagcagtttggaaggggcacccagagcgtcgaattcagcagagagagcaacaatctctacaaggtcaattcgttcaagtactctggtttggcaaacaagaaaactgttactgttcagcctgagggcaaagatcaggctgtgttgttggctacaaccaagacaaagaagcaaaacaagcccgctgcattgctccacaaatctgtgatgaagaaggagttcaggaggatggcaaaagctgttgaaaaccaggtggccaaaaattactacaggcctgatctcaagaacgctgcccttgcaaggttgagtgctgttcacagaagcctcaaagttgccaagtctggtgtcaagaacaggaattgacaaggcctta

SEQ ID NO: 6721 - DNA, 434 bp, Glycine max
  Clone ID: LIB3030-009-Q1-B1-D7
aaacactcttcttcatattcttcttcttcttcttgttcttgttctatctgtgacgagcatcatggcctcgagagcagtgctattgttggctatgtgtgtgcttccggccatggttgtggccattcgcccagcaaagaaccctttttgcgtgaagggtcgcgtctactgtgacccttgccgtgctggttttgagacctcagcaaccacctacattgccggtaactgctaaccctttttctctctttactctttttattcttaaaaaaaaaaaatactagtatttatgttatacggttccaagtttcagatctgcttcttaaagtgaatatctgttgcttcaatgcaatctttgagcttttcgttcatatgcttttgttttcttacttaaatttcattcctttacgcttaagaaccttcagtttcgaaaaaatgca

SEQ ID NO: 6722 - DNA, 444 bp, Glycine max
  unsure (1)..(444): unsure at all n locations
  Clone ID: LIB3030-009-Q1-B1-D8
cactgctctaatgggtgtcactggtgcaggcaaaacaactctgatggatgtacttgctggtagaaaaactggaggatatgttggaggtaacatcaaaatctctgggtatcggaagaagcaagaaacatttgcaaggatttctggatactgtgagcaaaatgacattcactctcctcatgttactgtgtatgaatccttgctttattcttcttggctccgattgtctctagatatcaatgttgaaaccaggaagatgttcattgaggaagtcatggaacttgtggaattgaaaccactaaggcatgtattagtcggatttcctggtgttactggtctctcaacagagcaaagaaaaaggttgactattgcagttgaacttgtancaaatccttccataatattcatggatgagccaacttctgggttagatgcaagagctgctgc

SEQ ID NO: 6723 - DNA, 405 bp, Glycine max
  Clone ID: LIB3030-009-Q1-B1-D9
gaagaaaccacgacacaagtccaaagtttgattccaaaatgcgatcctcaagcattcgcagcttcaccatcttcaccctctttctcattgcgatcctcccccacggacacgcaacaactccaacctccaaacttcgcctcaaacctctctcttctcccttttcaacctctggacttaattttcctttcttcttcccttcattccaatctgttacccatagtgttttctagaaccacaaaatgcttcaacaccaaattgttcagtcccctgctatgctaggccttgcaaatcctaactccccatcaattccgaaccctacccctccaaagctccctccaacacagacccatcacccccaagaccgcaactcttcaaccccttcttcagctctcttgtctctcctcc

SEQ ID NO: 6724 - DNA, 379 bp, Glycine max
  Clone ID: LIB3030-009-Q1-B1-E1
ccatgttccccttcagtctcactctcactcaacaacaataagatccttttccctctctttcttcacaaaacaaacctaaccaaacaatcgaatttcaatttcaatttgatcgctccgataacttccatctatggcggcggcgaaaccccaacgcactccgcaggaagtggaggacatcgtcatccgcaaaatctttcttgtctcgatcaccgaaatcgccaccactacggattcgagaatcgtgtatttagaactgaccgcggccgagattctcagcgaggacaaggagctccgcctctcgcgcgattgcatggagagggttttaatcgaccgtctctccggcgaattcgccggggccgtagacgagtctccgttccag

SEQ ID NO: 6725 - DNA, 355 bp, Glycine max
  Clone ID: LIB3030-009-Q1-B1-E10
tgaatgtatacatcctaagtgaagccttgttcgagggcgtattctcatgattggacagagtgcccctttgttcatccaggggaaaatgcaaggcggcgtgatccaaggaagtatcattacagctgcgtcccttgtctcgagtttaggaagggatcttgcagcaagggcgatgcctgtgagtatgcacatggcatttttgagtgctggcttcaccctgcccagtaccggactcggctttgcaaagatgacggtcgatgcacaaggagggtatgcttctttgctcacaagcttgacgagcttcgctccttgtatgcttctactggttctgctattccttccccgaggtcctattcag

SEQ ID NO: 6726 - DNA, 410 bp, Glycine max
  Clone ID: LIB3030-009-Q1-B1-E11
tctctctctaacacggagtgatggctgtgcagctgtgggaaaccctgaaggaagccatcgtagcctacactggcttctctccttccaccttcttcacggtgctggcgcttctttttgccgtttactacgtcgtcacgggtctctttggctcctccgacgatcaccatcaccgccaccgccacgtcgaggaggaggaggagatgccgcctctgcgccccccggttcagctcggcgagatcacagcggaggagctcaaggcctacgacggcaccgatcccgagaagcccttgctcatggccatcaaggcccagatctatgatgtctcccagagcaggatgttttatggacctggtggacctttatgcctattttctggcaaggatgctagcaaagccttagcaaagatgtct

SEQ ID NO: 6727 - DNA, 311 bp, Glycine max
  Clone ID: LIB3030-009-Q1-B1-E2
accttccctctcttctgttaccaatggctccctcatcaaactacatttctttccttttcctcaccacccttttgtttgctcttcaaatcagtgcaagagacagccagttcttcagcaaagtcacccattttgacaaaaacagtgtcaaagagacagaacttcccaacagagaagcaccagaagtgaacaagccagagcagcaaccacctttcattccggagactgaaaacagctatggcctatatggtcatcatgatgagtataaccaagtcccttcaaccaccaccaaccccacttccttacacccctac

SEQ ID NO: 6728 - DNA, 426 bp, Glycine max
  Clone ID: LIB3030-009-Q1-B1-E3
gtgatttcagtgagtgatcggtgttcacttgatctcatcataatcgtcagcgtcaattgaagaagatgccgatcagaaacatcgccgtcggaaggcctgaagaggcgactcaccccgacacgttgaaggcggctttggctgagttcatctcaaccttcatcttcgtgttcgccggctcaggctccggcatcgcctacaacaagctcaccgacaacggcgctgccacccctgccggcctcatctccgcctccatcgcccatgcattcgccctcttcgtcgccgtctccgtcggcgccaacatctccggcggccacgtcaaccccgccgtcaccttcggcgccttcgtcggcggcaacatcaacttcctccgcggcatcgtctacgtcatcgcccagctcctcggctccatcgtcgcctccctcctcc

SEQ ID NO: 6729 - DNA, 277 bp, Glycine max
  unsure (1)..(277): unsure at all n locations
  Clone ID: LIB3030-009-Q1-B1-E4
ggatgcttcagattgggcaaccaatggaggcaaatatagagtanattacaagtatgcaccctatgttgctgagttctctgacctggtcctgcatggttgtgcagttgattccattgagcatgtggccaagtgtgacagtgccctaagttctgaagaagttccctctggtggtcaccaagtacanataaccanaatgagaaacttcaggttgaggcacatgacatattcctactgctatgacactgttagatacaaagtccctccaccggagtgtgtc

SEQ ID NO: 6730 - DNA, 443 bp, Glycine max
  Clone ID: LIB3030-009-Q1-B1-E5
gagagaagaagaaacttaatcgatcatcacttcacttcactaatacatcatggcagacgagacccagaacaagtatgagagctctgaggttgaggtccaggatcgtggtgtttttgactttctcggtaagaaaaaggatgaagaagacaagcctcatcctcaggaggaggtcatcgccaccgagtttcaaaaagtcactgtctcagaccaaggagagaacaagcacagcctcttagaaaagcttcaccgatctgacagcagctctagctcttcaagtgaggaggaaggagaagatggagagaaaaggaagaagaagaagaaggaaaagaaagggctgaaagagaagatcgaggagaaaatagagggtgatcatcatcatcacaaggatgaggacacaagtgtccctgttgagaaagttgaagttgttgaaacagcacatgctg

SEQ ID NO: 6731 - DNA, 406 bp, Glycine max
  unsure (1)..(406): unsure at all n locations
  Clone ID: LIB3030-009-Q1-B1-E6
tttgagttccaacacctttgctttggaaattgattccaactgatcaagtgaaagagattcttcaggcttcatctttgtttctttcacagaatttgtccaatttagagcagagaaaatgaatggccacaaaaagttgaattctccaaggggagaggttggagagatagacactagggcaccattccaatctgtcaaagctgctgttagtttagttggcgaagtagccatcactagagacagattttctgtcaagagaagatcatcagagaatgtatttgagaaggagacgcagcttatcttggcccaaaaggaattaancaagataaagaaacacgtggataatgctgaggcgatcaaatgcaaggcactttctgagcttgagaatgccaaggagatctttcacagt

SEQ ID NO: 6732 - DNA, 395 bp, Glycine max
  Clone ID: LIB3030-009-Q1-B1-E7
ataatttcttccaacaaattatatttttcttacaaacaaaatggcaggtgaggtggtgaagaaggaagagtctctcaacctgaaagtcactaacaagagccatgttcaatcagaggagaaaattggaagaaaagagtaccaattggtcacttttgatcttccctacttgagccttttactacaatcagaagctcttgttttacaagggtgaagatttcgagggcatggtccaaaaactcaaagttggacatggagtggtgctgaaggagttccaccaacttgctggcaagttagggaaagatgaagagggggtgttcagagtggagtatgatgatgagatgcttggtgtggaggttgttgacgctgttgtagctgacgatgaaattggtgtggat

SEQ ID NO: 6733 - DNA, 404 bp, Glycine max
  Clone ID: LIB3030-009-Q1-B1-E8
gggctttgcagttagttaggcccaataatatattcaaggcccttgatcttgttaaccaaaacggaacttttttttccttccccaataattggtgtaaccgtcgtcccggtgcttaagtgtgggtttggagatgcaatgttatatgtgaataatgtgatactaatcctcatggagaaacaaggaaacaaagagatttgatttatttcaaaaaaaaaaaaaaaaaaaaaaaaaaaaaaaaaataaaaaaaaagaataaaaataaaaaaaataaaaaaaaaaaaaaaaaaaaataaaaaaattataaaaaaaaaaaaaaggggcggcccccaataattgacccctccaacccggaaataatttcgggccggttacttgaggggttacaatttttcccaaaagggggc

SEQ ID NO: 6734 - DNA, 415 bp, Glycine max
  Clone ID: LIB3030-009-Q1-B1-E9
ctcaaacctgatatggagtttgtggataccagaaaactacaattacaacatcaacaacaactgcaacaacagccgcaacattttcatgtgttggcagtggacgacagtgtcatagataggaagctattggagaggctccttagaggttcttcatgcaaagttacctgtgtggactctggagacaaggctttgaaatatcttgggctaatagatgagcttgatgatacttcttcaacctctttagaatcagaatcttctcatcctccacctcaaccattacaacgagagggaatcaaagtgaatttgatcatgacagactattgcatgcctgggatgagtggctatgatttactcaaacgagtcaagggatcttcttggaaagatgttccagtcgtgattatgtcatcagaaaatg

SEQ ID NO: 6735 - DNA, 363 bp, Glycine max
  Clone ID: LIB3030-009-Q1-B1-F1
cattaagtaagcattctacaaatatcttggttcaagcgccaagaagtaaagctgaaattcagagggaacttttgggtttaaagagaaaggcccttgctttcaagcgtgaagggaaagctgaagatgctgaggaagttcttaaaatggccaaagcattagaagcccagatggcagagatggatgctgcaaagagtaaagcacaagttgaggccactgtcatgaaagacagacttttcaatcctccagttgatgaagaaagggacatggttgtttcagaacaggatatgcatgaccctacattgaattcaatgcttactaatctaagttggaaggatgatgaatctgaacctatgactataaaag

SEQ ID NO: 6736 - DNA, 411 bp, Glycine max
  Clone ID: LIB3030-009-Q1-B1-F10
gaactaacaaatgggtgcttctacggtgatgaaggcaaacctgagattattctccccactccaagatctgaaggggacatactttcttccccgcatttaaaacccttcacattgcatgatcttaagaaggccactagaaatttccagcttgatagtcttattggagaagggggatttggttatgtgtataaggggttgattaatgatggtaaatcctttgggcctacaatgcctaaatctggaactgttgtagctgtgaagaagcttaagcctgaaggttttcaagggcataaggagtggctgtctgaagtcaactatcttggacaacttcgccatccaaatcttgtcaaacttattggatactgtctagaaggagataaccgacttctagtatatgagtacatgcccaac

SEQ ID NO: 6737 - DNA, 416 bp, Glycine max
  Clone ID: LIB3030-009-Q1-B1-F11
tgtggatggaatcaaccacgttatcctctcaatattttctctctttcctctctaaccaaaaacaaaaagaaaaggaagctaactaaacaaaattctgatctcactgtacagtatcaaccaaaccaacaatccaacaccatgaaactctctgtgttccaccatcagcaccatcctatgattctcaattgcccccttaccttgacaaggacacacaaaagactttacaacaatggttcatataggtggttaccatgccactgctcacattcttccacaagtaaaactgctgcagaaccagttacagtttctttaagtattgaaggaaggagagcattactcagttgtctcctcacaactgttgctggagtctatgcatgtgatgtggctggagctgttagcacaagtagaagagctct

SEQ ID NO: 6738 - DNA, 371 bp, Glycine max
  Clone ID: LIB3030-007-Q1-B1-G4
cagggatgaacttctgcaattctcattatcagctgggagcaattatgggcagtttgaagcacatgggaatcagtttgcatttattcacatttgttgaaaagaattttgctgtatttccttatgcaatttgtacgcttcaaagcaacaggaagtggatcagtgaaacggattcgctgttgtctacaacagcatctgctaccagtgttcgttgtacagaaaataacttctaatagccaaattgtggatatttatcaatgaagataacaacaactgaagttatttctagccgttggagctcacagtaaattgcttttaacgtgttccatcaaaaagttggtacaaatccctgtaatcttcatttttggtaaaaa

SEQ ID NO: 6739 - DNA, 371 bp, Glycine max
  Clone ID: LIB3030-005-Q1-B1-H5
cgctctgtttctgtctctgtgtttgcggctgaggattccgaacgagcgaccttcttcgtttctcgcaaagtttaagtcatcatgggtaaggaaaagactcacatcaacattgtcgtcattggacatgtcgactctgggaagtcaactaccactggtcatttgatctacaagcttggaggtattgacaagcgtgtgattgagaggttcgagaaggaggctgctgagatgaacaagaggtcattcaagtatgcctgggtgcttgacaagctcaaggctgagcgcgaaagatgaattaccattgatattgctttgtggaagtttgaaacgacaagtactacggcacagtcatcgatgcccccggacatcgtgac

SEQ ID NO: 6740 - DNA, 359 bp, Glycine max
  Clone ID: LIB3030-005-Q1-B1-H6
agaatatattagtcgttttgggaatgaagtgtgtgttttgtgtgactcaggtggatcctagtaagagaccgttgccggattatgttcagaaagttcaaagggatgttaatgccaacatgcgtggtgttcttgtggattggttggtggaagttgcagaagaatataaacttgtttcggacacgctttatttttgtgttgcttaaatagataggtttttgtccttgaatgctttgtcgaggcagaagttgcaattgctcggggtcgcttcaatgctcattgcttcgaaatacgaagagattaagccgcctgatgtggaagatttttgttacattaccgataacacatactccaaaggaaaa

SEQ ID NO: 6741 - DNA, 343 bp, Glycine max
  Clone ID: LIB3030-005-Q1-B1-H7
cccctttagacctctctctcacttgaaactccacaaccccattttcctttcctatgaccctattccaaatcaccaattctaattccattcttcaggtgttcaattgaattcgtgatgaagagggatcaccgagatagctgcggcggcggcggcggagggagtgtgaagggtgagtgttcctcaatgccgtcgaacgggaaggcaaatatgtgggaggaacaacaacaacaacaacaggggatggacgagttgctggcggcgttggggtacaaggttcgtgcttccgacatggccgacgtggcacagaagctggagcagttggagatggtcatgggttgtgccc

SEQ ID NO: 6742 - DNA, 330 bp, Glycine max
  Clone ID: LIB3030-005-Q1-B1-H8
tgcacaaccaccacaatcgctgaaacctttttcttttctctttctttctcctatcaaagcacccccacttttccgatggccgccgtagcatcatcaccgacgccacgtaagtctcgatccaaaaacctcgagaatttcgatcccaacaaacaacaacaaagccctgttttcaaaccctcttgttcctcttcttcttctcctctcgtgaaaccaaagaaccctaataataaagtcaagtacttctcccctcagaacaagatccggcagagaaagttcttggtcgcaaagaagaagaaagagacgaagaaggaagaaaaagagggttcgggt

SEQ ID NO: 6743 - DNA, 220 bp, Glycine max
  Clone ID: LIB3030-005-Q1-B1-H9
ttcatccttggcactctcaggcttttttgcgcctttcgtccggtgatcactcctcattggtctttcccctcgcagcaatctcgttccaatacagttcatcgtcaagtcaaccatggggaagatccgttctagaaatgtgaatgatcagttggcattatgggtggcgatgtgcagtaattccaagtgctgttaaagttctcggaagattgactgcctttag

SEQ ID NO: 6744 - DNA, 401 bp, Glycine max
  Clone ID: LIB3030-006-Q1-B1-A1
cttgaccatgatgatactgaaaagcagatgctgagaaagttaagtaaacaacttagtggtgaggaccagatatagatcctattgcccagcacagtgtgttcaaattgttccaaaacatttccctgctacttcatcttcttcttcttcttcttcatcaccggtggttctgttcattcttccttgcaccttcttctttgaagatcgaaattgtgtttttgaaaaaatgggagttccagagaaagaccctctttcccaattgagtttgcctcctggttttcggttttaccccaccgacgaggagctcctcgttcagtatctatgccgcaaggtcgctggccaccatttcgctcttccaatcattgctgaaattgatttgtacaagttcgacccatgggtttctc

SEQ ID NO: 6745 - DNA, 142 bp, Glycine max
  Clone ID: LIB3030-006-Q1-B1-A10
tgccaatgctaggtcggcttataattattgtaaagaagaaagcaggcaaagataaattagatagcatgtaaattgtagcttgcacttactgaaatggatcatatgtttaattttatttattttgcaactattcagtttttgt

SEQ ID NO: 6746 - DNA, 382 bp, Glycine max
  Clone ID: LIB3030-006-Q1-B1-A11
caggtttgggaatatggatgggtttcgttagcctgtgtcttctgtctgtatcagtatcaggtctgctccaacgcctagagcaccctgtcaaagctgatggctcacttagccttatggtcattggagactggggaaggaaaggaacatacaaccaatctcaagttgccactcagatgggaagggttgctgcaaagttaaatatcgactttgtgatatccactggagacaatttctacgatgatggattgactggtatagatgaccctgcatttgaaatttccttctcaaaaatctacactgccaagagcctccaaaagcaatggtatagtgtgttgggcaaccatgactacaggggtgatgttgaagctcaattgaatccaat

SEQ ID NO: 6747 - DNA, 368 bp, Glycine max
  Clone ID: LIB3030-006-Q1-B1-A12
ctgctttcttttttcttcatttgcggttttgatttggatttggatttggatttggactttggtcgtcaacacagcttttggtccttcgcttcgtttacgaatcctcttcttgttgttcctgcaacgcactgcattcgatcaatccatccatcttcacttgcttggtttcgatcggagggaaatggccgatcagttatccaaaggagaggaattcgagaagaaagctgagaagaagctcagcggttggggcttgtttggctccaagtacgaagatgccgccgatctctttgataaagccgccaattgcttcaagctcgccaaatcatgggacaaagctggagcgacatacctgaagttggcaagttgtc

SEQ ID NO: 6748 - DNA, 382 bp, Glycine max
  Clone ID: LIB3030-006-Q1-B1-A2
atcaagaacagagagagagagagagaaagagaaagaaagaagggtacatttttatgcttgttaaccatagaggcaaaaacccaaaagagcagcttcgtcatcttgatcgaagtccaaacctttgtacccttttgtgtttccctctcgtttttgtgtcacaacacaatccttaaccacacaaaacctttcctatttgtggggttgattgagccatttttggaggctgcaagaggatatttccctctctttgttgggtggctatatagggaaagtctttgggttcaaaaggggtgggttagttcccagaaaaaaaaagcagtgaaaggaagaaccttgtaaaccgcgtcattgtgaacaagggtggctttgtgcgttggacaag

SEQ ID NO: 6749 - DNA, 322 bp, Glycine max
  Clone ID: LIB3030-006-Q1-B1-A3
gtttattttctcctgataaaaagaggaagttgaagttgggttgctgcaacaatggaacctgctactaataacaatccttctccttccgctcaagcctcaataaattgaaacaaaatatattgagagggtgaaacatgccctgatcgactttggagtccaaaaaaagctaaggtttccgaatgtaacaattaaaaaggtcccttgcaacccccaaaaggtaaaggaaattgctaaaatcctcaatggaactcaataagttcaaattacttcaaaaaagaagaactcaagccaatgcaagagcataagctaagatactaccaat

SEQ ID NO: 6750 - DNA, 391 bp, Glycine max
  Clone ID: LIB3030-006-Q1-B1-A4
tgaagaaggaagactctctcaacctgaaagtcactaacaagagtcatgttcaacctgaggagaaaattggaaggaaagagtaccagctggtcacttttgatcttccctacttggccttctactacaaccagaagctgctgttttacaagggtgaagattttgagggtatggtccaaaaactcaaagttggacttggtgtggtgctgaaggagtttcaccaacttgctggtaagttagggaaagatgaagacggggtgttcagagtggagtatgatgatgacatgcttggtgtggaggttgttgaagctgttgttgttgatgataatgagattggtgtggatgatcgaactgtggctgaaattagtaacactaatttgaaggagctgatacc

SEQ ID NO: 6751 - DNA, 318 bp, Glycine max
  Clone ID: LIB3030-006-Q1-B1-A5
ccctaacaagaaaaaagaaagagcgatgatgcgttggtagatcgtgatctggtgcgggcgcgatcattggtcgatcggtgcgtccgaatttcgcaatgacgtttgggagttgagtgaaggaatcgctattacgtctgaattggtggcccgtacgggccggcatcagcagcggtacgagaacggttaccgtcttgtgtccgggtgtgtcccacttagatataaaagttctaatgattgtggagaccctacttctgacaagattgttgaactgcttatgattaattcaccaagccgacctggtcttttgtttccaaaggg

SEQ ID NO: 6752 - DNA, 354 bp, Glycine max
  Clone ID: LIB3030-006-Q1-B1-A6
ctcaaaactgaactatgccgattcagtggtgccaagatctaccccggaaagggcatcagatttgttcgtggtgattctcaggttttcctgtttgccaactcaaaatgtaagcggtatttccacaaccgcctgaagccctcaaagctcacctggactgctatgtacagaaagcaacacaaaaaggacattgctcaagaagctgtgaagaataggagacgcgctgccaaaaagccttactctaggtccattgttggtgccactctggaagttatccagaaaaagagagctgagaagccagaagttcgagatgcagctagggaagctgctcttcgtgaaattaaggagaggatcaag

SEQ ID NO: 6753 - DNA, 372 bp, Glycine max
  Clone ID: LIB3030-006-Q1-B1-A7
tccaaaccttaaattcggtcctcgaatctttctgatcattggttgttttttattctttcaaatacattccaaaatctcttggaaattgcgagattcactgcttatcctagcagcagattttgggttctgacccaattattcattttccccaactgggtcttgtggattttttgttggggttttaaatttcgtgttgctgggtttgaaagttatttcctttcttccccgtctggattcaactcccaagtatttgctttaattggggtatttttttatttatcagaattgttaggttgctttgaggttttccaaggcttgaaagctgaaaatgacgattagtagtcttgcacctaaggcagagaggaagaaatc

SEQ ID NO: 6754 - DNA, 388 bp, Glycine max
  Clone ID: LIB3030-006-Q1-B1-A8
ccaaaacgaaaaaacaagcgtcatcaccttcttcactccctgtttctgttggttccatcccttcattcacaccttgatccgtgatctcctaatttctcacttgaaagtatgaagcaggaatagataagtaatggcaggagcagaagcaagggctctgtggcagagaactgctaatcgttgctttgtccaagaagatgcaaaaagagctcccaagttggcttgttgccaatcttcatgtgcaacatcaaaatcagttgatgctggacctgccagtacagcagatgaatctgatcatactacagttaatgttacccattttaacaggaaatcgtcaatttcgaagctatcaccagactctaggtggtggttgcatttgcaacctaattat

SEQ ID NO: 6755 - DNA, 366 bp, Glycine max
  Clone ID: LIB3030-006-Q1-B1-A9
caaatattctcactcgtcgtcttcgtctgcgccctaaccaaattcaattcaaactcttctcatcaaaatccaatgctcgttcttgaaaccctaattcgatatcctcctcctcagaagaagaaggatcgatgtgggcagcttcttgcctggcgtcatgctgcgcggcctgcgcatgcgatgcctgcaggaccgtcatatcgggaatcagccgccgttccgccaggatcgcctagtgcggcctcttcggcttctctctcgtcatcgcctggatcctccgtgaggtcgccgctcccctcatggaatcacttccctggattaatcacttcaaacacacacctagccgagaatggtttgaaacggatgcaa

SEQ ID NO: 6756 - DNA, 378 bp, Glycine max
  Clone ID: LIB3030-006-Q1-B1-B1
ccagaacgaacaaaaatggagaattcgacccaagaatcccacttccgatccgaaaactccgtgagctacgaatccccctacccaatctacggcatgtcgttctccccttcccacccccaccgcctggccctcggcagcttcattgaagaatacaccaaccgcgttgacatcctctccttccaccccgacaccctctccctcacccccaacccttctcgctcctttgaccacccttaccctcccaccaaactcatgttccacccccgcaaacccccctcctcctcctccgacctcctcgccacctccggcgactacctccgcctctgggaggtccgcgacaactccgtggaggccgtctcccttttcaacaacagcaag

SEQ ID NO: 6757 - DNA, 349 bp, Glycine max
  Clone ID: LIB3030-006-Q1-B1-B10
aaagtgacacaccaaatcaaagacacctgagccattcaattcccctcctttattgctttcaagtttcaacactaattttattatctgaaaaaatggctttcaaagtttcgtttttccttgcacttgttctagtttccaatatcctcctccttgatacaacagctgctggacgcagcattggcgaaaactccaactcagaggaaaagaaagagcctgagttcttgttcaagcatgaaggtggggtgtatattccagggattggacctgttggatttccacataaatttcatctcacacctcaaaatccattacctggtggcaatggaaatggaggagcaggaaccgcaac

SEQ ID NO: 6758 - DNA, 372 bp, Glycine max
  Clone ID: LIB3030-006-Q1-B1-B11
gttggaacgcaaagaaaactattagggtacgtgccagaggcaaagaaagctgcattgcaaaacctacaagacgtgcttcttgagcccccacgtgcagcttcagggaaatcaagggtgtacttgaagcgtacgaaatacttgcctgatttgatgggtgattctcttgagagttaccctcgtcgcgttttcattgatgtgggcctgccagagaaggatggagggagtgccactgattggtttcgcaagacataccctacgaggaacaaggactttgagatgtataagattgagacagtggcggagggtggtccacagatagagatgtcggattggttgaggaacaatttgtgtgacgcagattaagtggtgatg

SEQ ID NO: 6759 - DNA, 350 bp, Glycine max
  Clone ID: LIB3030-006-Q1-B1-B12
acggagtggcggtagatccgggcctcctactggatatgacagcacttatggtgctggtaatcgaggtggatttggtggatcttctgctgagccccctgctgcagtgagacagtgtgatgagaattgtgatgatacatgtgacaactctagaatctacatctcaaacctaccaccagatgtgactattgaagaattgagggaactttttggaggcattggacaagttggaagaataaagcagaagaggggctataaagatcagtggccttggaacataaagatttacactgatgataatggaaacaataagggtgatgcttgccttgcttatgaagacccttctgcagcac

SEQ ID NO: 6760 - DNA, 384 bp, Glycine max
  Clone ID: LIB3030-006-Q1-B1-B2
atagtaacactaagagtagttactactatccctaaatataatagccatgcaattagtactattgtgtctactgatactgaagctcactccagcctttgcaaccaccccgaatgatgcctatggtggtgatagtagtggctgtccattagggactgacatataccaatacacttgccctgaagctgaggccatcatattctcttgggtggagcaggcagtgtctcaagactcaagaatggcagcctcacttcttaggctacatttccatgattgctttgttaatggttgtgatgcttcagtcttgctagatgacacacaggactttgttggtgagaaaactgcgggtccaaatttgaattccctgagaggattcgaagtaatcga

SEQ ID NO: 6761 - DNA, 368 bp, Glycine max
  Clone ID: LIB3030-006-Q1-B1-B3
aaccgtagcagaaccaaacaatgagaacccaacggcttaaccatctccttctctccctcttcctcttcgcagccgcattctccagcctccacccgacggccaccgccggagacgaaggcgcaccgtctgcaggcgacggcgaccgcgacgccgatttcatccgcactagctgcaacaccacgctctacccggaagtgtgtttcacctccctctctcgctacgccaatgcggtgcagcagaaccccggccatctggcgcgtgtggccattgccgtaagtctctcgaaggttcaccgtgcggcgtcctacgtctccaacctcacgcgcgacgccgactacggcggaagcacgcgcgccgctcttgctctg

SEQ ID NO: 6762 - DNA, 349 bp, Glycine max
  Clone ID: LIB3030-006-Q1-B1-B4
tgatgaacctcaaacaaaggttcagacacgcaaacaattccttgcactgtatcaactatcaaaaaatgtatggtcggtaacagaagagccgcgtgatggaaagaaacacataaattccacacctcaagcttgttaactacactttctctctttctttttcatcaataataaattttaatcacaatattagtatttaaggagccaaaataacaatgcgctgcgcgaaccacataagaacaacacgtagtacctaactatatgagtgaacagttgcaaacgatttttctgtctaacttggatgatgcacccgctacacagggtgctcgtgaggcttttaaggatactcaac

SEQ ID NO: 6763 - DNA, 385 bp, Glycine max
  Clone ID: LIB3030-006-Q1-B1-B5
ttcgtcctccctctgcttctttctttcttagttgcagcgcgattgctgcatcgtcctccaataagagctcgctgctagtgaaccctaacacggcggcaacgagaggtgttcggttgaagctcagatcagcgatggcagcagcaacccgcacttctctgcggttcctcctctcagtctccgtaaccctaactctcgctcacctcgccgcctcaaattccgaaggcgacgctctctacacgctgaaacggagcctctcggaccctgacaacgttctccagagctgggatcccactctcgttagcccctgtacttggttccacgtcacctgcaaccagtatagacgagtcactcgagtggatcttggtaactctaacctatctggaca

SEQ ID NO: 6764 - DNA, 357 bp, Glycine max
  Clone ID: LIB3030-006-Q1-B1-B6
aaagcattgaattcaaaaacttaagttcattccttgtgttttgctttcttcctcaaaaccaaacatgtcgaacacatgcggcaactgcgactgcgctgacaagactagctgcaccaagggaaacagctatggtgttattgtagagactgagaagagttacatcgagactgttgtcatggatgttccagcagctgagcatgatgggaagtgcaagtgtggcactaactgcacttgcacggactgcacctgtggccattaaggaatatgtatgaaaatgtaattgccatgtgtttggcaatacaaatatccaaataatgtaatcttcgtatgaataaatgtgtgtgctgttatcctact

SEQ ID NO: 6765 - DNA, 380 bp, Glycine max
  Clone ID: LIB3030-006-Q1-B1-B7
cttcgggttttccctgtcaatacccgggaggagatagaaggtcccgtgtctgaggtggggtttgaggcgatttctcgaggttgtaggaaactgcagtcgattctgtttttctgccaaaggatgacgaatgctgccgtggtagccatgtcgaacaactgcccggatcttgtggtgtttcggttgtgtataattgggcggtataggccagacccagagacgctagaacccatggatgagggttttggtgccattgttatgaactgcaagaagctcactcggcttgctgtgtctggtttgctgactgatcgggcttttaactacattgggacgtatgggaggttgattacgacgctgtcagttgcctttgctggagacactga

SEQ ID NO: 6766 - DNA, 399 bp, Glycine max
  unsure (1)..(399): unsure at all n locations
  Clone ID: LIB3030-006-Q1-B1-B8
tagtaagcactatagtaaaaaaaggacattcattcatctatggctacccttattgctcccagcaaccactctccccaagaagatgctgaagctctcagaaaggcttttgaaggatggggaactgatgagaacactgtcatagtaattttgggtcatagaactgtgtatcagaggcagcaaatcagaagagtttatgaggaaatttaccaggaggatcttgtgaagcgcctagagtctgagatcaaaggagactttgagaaagccgtgtaccgatggatactggaacctgcagatcgtgatgctgttttggccaatgttgccatcaagagtggcaaaaactacaatgtcattgtggaaattgccactatcctctcnccggaagagcttttggcggttaga

SEQ ID NO: 6767 - DNA, 369 bp, Glycine max
  Clone ID: LIB3030-006-Q1-B1-B9
aaactgctgagtcatatcttggaaagtcagtttcaaaagctgtaattactgtaccagcttacttcaatgatgctcagagacaggcaacaaaagatgccggtagaattgctggtcttgatgttcaaagaatcatcaatgagcccactgctgctgcactttcatatgggatgaacaacaaggagggtctcattgcagtttttgatcttggaggtggaacatttgatgtgtccatcttagagatttctaatggtgtttttgaggtgaaagccacaaatggtgacacgttcttgggaggagaggattttgataatgctttattggattttctagtgaatgaattcaaaagaactgagaatattgatctttcaa

SEQ ID NO: 6768 - DNA, 366 bp, Glycine max
  Clone ID: LIB3030-006-Q1-B1-C1
gaaatgttgtcaccccttcttctatttctatgcctaactcttcctttgtttttgttgtccttcttcaaataccgtaaaaccttcaagaatccaccacttccaccaggtcctagaggccttcccataatagggaatcttcatcaactagatagtccttctcttcatgagcagctatggcatctctcaaagaaatatggtcctttattttcccttcaatttggattaaggccagccatagttgtttcctctccaaaattggccaaagaggtaatgaaagacaatgaccttgagtgctgtggacgacctaaattactaggccaacagaaactaacctataatgggttagacatgggattttcctcatac

SEQ ID NO: 6769 - DNA, 347 bp, Glycine max
  Clone ID: LIB3030-006-Q1-B1-C10
acgcttcccatcttggtgagtaacacgaatctgaggaaaaaaatgtcgattatgcaactttacgggcgcagcaagagcgtggtgaagcggtcgaagaagtacttggaagaagcgctttacatgaagctcttcaaagatggaagctcccagctcatcgttcgccagagcctcaacaacttcgtcaagagccgaaagcgcgtttacaaatgggaggtaggcgacacgctcaagaagcttcgcgatcgcaagctctatcaacccgctcttaagctatcagaaaccatggctaagaggaacatgatcaagaccgtcagtgaccatgcgatacatcttgaccttcttgcaaa

SEQ ID NO: 6770 - DNA, 377 bp, Glycine max
  Clone ID: LIB3030-006-Q1-B1-C11
ctcgagccgattcggctcgagttctcttctcactcctaagaattcctcaattcgtactccatcaccccaccatgtccaacaggttttgcaagttctatgcccgtggagcatgtttgaagggggatcactgtgattttgctcatgagaaaaaggatgatatttgcagctattatcagaaaggattctgtgcatatggtattagatgcagatataagcatgtcaaagcttcccaaccgtcatcttcagcacatggacgccattctcctgttttggatcctgtggtgaatcatatcactaaaggaacatcaagttgggttctgaaggctgtgaagtcatcttcatcggacaagcgtgcaatgagctcgcaaaaaaagaat

SEQ ID NO: 6771 - DNA, 379 bp, Glycine max
  unsure (1)..(379): unsure at all n locations
  Clone ID: LIB3030-006-Q1-B1-C12
ggcacagcacagcgcagcgccgcctcaacatctcaactttcccttcgatctcattctcaggtgttgttgaagcttcctgtgttggcttggtatccctgcaagttctgctgtagcagattccaaggtgaaggtgtcacgttaaagtttctttcatgtttgaacaggctactatccatttgggagcaactgagctgcttggagagtatttttcttcctctaggaaaaattacagaccctcaccacagagacttagttgtatgaacggttggccaccttccattatccttgaaggagattgttcaaggatacagactacctttgaggttganattgcngctgcatataatttgaattccagcattttctgcctccgaatatc

SEQ ID NO: 6772 - DNA, 392 bp, Glycine max
  unsure (1)..(392): unsure at all n locations
  Clone ID: LIB3030-006-Q1-B1-C2
gaagaatatgactctcattctgaacaaaataagagataatgttgccatgactgcaaaggattcaaaggggcagcctgtgatggaggaaaatccacttatgagagaaacattcttggatggccctgaaaattttgaagttgaactggacattacagagattgatggtgctgatattgacaccataatctcatcatttggaaagattgtgaaaggatttcagtcaagaaacaaacacattgcagataagtttcatgaattttcagattgtatggatgagtttatttctcctctccatgaaaaactactggaaacagagaccatgtcaacgactattgttgagaacatggaaattatgaaaattaaagcaaatagcatgggaaaattganagaac

SEQ ID NO: 6773 - DNA, 443 bp, Glycine max
  Clone ID: LIB3030-006-Q1-B1-C3
tgacaacgcactgcagcctacttaaccccgaaatccggtccaaaaacccccgaagggtcccccaaggaaaatggcaccccaaaaacaattttgggaagcaatgtctcataaaatgcatgtagacaacagtgtaaaacttattgggaagcttttatttggtattgaaaagggtccagaagtactcaacgctgttagaccggcaggatcggcacttgttgatgattggcactgccttaaaaccatggtatcatttttgttctgaagccatatgatagatagacttttcgtataaaaatgagcttaagatctatctctgaacagtgtaaaattttttacactgtcaattgataaaaagttatctcaaagatgacttaaaaataattattataaaaacttttacactgtgaattgataaaaaaaattatgtcaaagatgactttaac

SEQ ID NO: 6774 - DNA, 392 bp, Glycine max
  unsure (1)..(392): unsure at all n locations
  Clone ID: LIB3030-006-Q1-B1-C4
aaaattcccacttcctttttctttttttctttaataagaaacctcgagaagaaagtaaaaggttcgtttttacccttctttcttcccagaagcgatctctaaagccgacccatttcggaattcggaaaacccagtgctgatcgctctctgggtgttcccaaaatgaagcttcggagatcttcgctgtgcgtctttctagggtttctggcgctgttcctttcgccgccgccgtcaatggcgaaattcgtggtggagaagaacagcttgacggtgacgtcgccggacaacatcaagggcacgcacgatagcgcgattgggaacttcgggataccccaatacggaggcagcatggctgggaacgtgttgtacccaaaggacaacanaaagggttg

SEQ ID NO: 6775 - DNA, 205 bp, Glycine max
  Clone ID: LIB3030-006-Q1-B1-C5
ctttaggtgtgaaattccacgtgccaaaagaagttttgaagacaaaccaacgatctcaatcaagggcctgatatattgttggcagtctagcggtcagatgaaattctaccagtggagcaccagaggggttaaggttcatgttcagggaaattcttcacggaagcttaatgtcgtcatgaggaagcggatcatagtactgatgtat

SEQ ID NO: 6776 - DNA, 62 bp, Glycine max
  Clone ID: LIB3030-006-Q1-B1-C6
aaacaattgatgagtacaaattgccaccccataaacacacataaagttatgggttcttgctc

SEQ ID NO: 6777 - DNA, 387 bp, Glycine max
  Clone ID: LIB3030-006-Q1-B1-C7
ctctttcaaaagggagaagaataggaaaggaaacaaaacgcacaaaggattattatagcaatggcagaacaaaaccaaaaccagacaactgaagctggaaggcaccaagaggttggccacaagagccttctccagagtgatgctctttaccagtatattctggagaccagtgtctacccaagagaacctgaatccatgaaagaactgagagagttgacagcaaaacacccatggaacatcatgacaacctctgcagacgaagggcaattcttgaacatgctccttaagctcatcaatgccaagaacaccatggaaattggtgtctacactggatattcacttcttgccaccgctctcgctcttcctgaagatggaaagatcttggca

SEQ ID NO: 6778 - DNA, 399 bp, Glycine max
  unsure (1)..(399): unsure at all n locations
  Clone ID: LIB3030-006-Q1-B1-C8
gttggcccgaagagtcctcaaaacacttgaaatggatgaggagtatgaaggaaatgttgaggctactggagaggattattcagtggaacctgccgagagcaggaggccattccgtgcactccttgatgttggtcttgttaggactacaacaggaaatcgcgtctttggtgcccttaagggagctctggatgggggtttggatattcctcacagcgacaagaggtttgctgggtttgataaggagaagaaggagcttgatgctgaggttcatcgcaaatatgtttttggtggacatgttgctgcctatatgaagatcttggcagaagatgaaccagagaaataccagtcacacttcagcgaatacatcanacgtgggatagaggctgatggtattgaggc

SEQ ID NO: 6779 - DNA, 372 bp, Glycine max
  Clone ID: LIB3030-006-Q1-B1-C9
acgtgattctgggacctatgctgtctcttttcatatgcctcttcgtgaagctcgacgcgccacccacaagccagaaaatgcttggtgtgattgcgtgggtcttcgcttggtgggtcacgcaggccgtgccacttcccgtgacttccatgtgtcctctgtttttgttcccaattttcgggatagcttcagctgatagtgtggcgcactcttacatggatgacgtcatcaccctcgttttgggaagcttcattctcgccctcgccgtcgaacgctacaacgttcaccggagattggccttgaatgtaacactgctgttttgtggcgacccggttaatccagcgctgttactgctggggctgtgcgcgacgatat

SEQ ID NO: 6780 - DNA, 392 bp, Glycine max
  unsure (1)..(392): unsure at all n locations
  Clone ID: LIB3030-006-Q1-B1-D1
ttcaaatttcagggtttaaaaggaaggtttagagtgtttgctgtatatggagaagagatagataagaagaatgcatggagtgccctctttgatgtggaggatccacgatctaaagtgccgcagtataaagggaagtttttggatgtatatcaagcccttgaagttgcaagatatgatattcaatactgtgattggcgagctaggcaagacttgcttaccatcatgcttcttcatgaaaaggtggtggaggttcttaatcctttagctcgtgattataagtccattggcaccatgaaaaaggagctagcagagttgcaggaagaattggcacaagcacaccaacaggttcatatatctgaggcaagggtgtccaatgctttanataaactagc

SEQ ID NO: 6781 - DNA, 334 bp, Glycine max
  Clone ID: LIB3030-006-Q1-B1-D10
tgctttgccacatgaagttcggcttgttcatcttctttgcctttttcgtgttgatcatgacattcttcatctacttcttcttgcctgaaaccaagggcattcccattgaagaaatgaaccaggtttggaaggcacaccccttctggtccagattcgtggagaatgatgattatggcaatggtgttgagatggggaggggaactgctatcaaagaagtgtagttacttgtttatttttctcaatgactagcgttttagcttttgttggtaaatcatactattggtggtgtcaatgtattgaattgttcctataaattaaaaagggttattttctc

SEQ ID NO: 6782 - DNA, 377 bp, Glycine max
  Clone ID: LIB3030-006-Q1-B1-D11
agaattccccatctcatccttcttctcttcaatgtcctccttcaaccctttctcccctccaccacccaccccttacctcaccaacctcggcttcgggtactccatcgccatcgccctcggcgtcctcttcctcctctccaccctcatcctctcctcctacctctgctgccgcaccctccgccaccgcaacaacaaccgccacaccccccgtaacaacacctccgatggcatcgtcctcccgcgcgtgatcttcgtcgccgaggacgacgacgatgacgccacccgccagaacgacgccgtcaccggcctcgaccaggccgtaatagactcctaccccaagtttccttacgttaaggaaggtgattacgacagcacct

SEQ ID NO: 6783 - DNA, 357 bp, Glycine max
  Clone ID: LIB3030-006-Q1-B1-D12
caaggagttctctggtctttgctccttggctccttcactatctgagagcattttgtgcactactgggttgaaaatgtatatgctggagagcaaaggaggtgccatagcatgcatgttcttgtctcttttcttcttggggacatggcctgctcttttgactatgttagagaggcgtggtcgtcttcctcagcatacctaccttgattactcaatcaccaatttcttggctgctttactcattgcttttacacttggtgggataggcaagggcacacatgatcagccaaatttcttagttcaacttgctcaggataactggccctccgttcttttcgcaatggggggtggtttgttcct

SEQ ID NO: 6784 - DNA, 350 bp, Glycine max
  Clone ID: LIB3030-006-Q1-B1-D3
ttcaccttgttcaatcggtgacaaccatcatggcctcaagagcattgttattgttggcaatgtgtgtgcttccggcgatggttgtggccattcgcccagcaaagaaccctttttgcctgaaaggtcgtgtctactgtgacccttgccgtgctggttttgagacctcagctaccacctacattgctggtgctgagattatgttgcaatgcaagagcagggttagcaacgaggttgtgtacacgaagaatgggtacaccgactcaaccggagcatacacaatgtacgtggatgaggatcacgcagattagatctgcagtgccaagcttgtaagcaagcctcagcctcaatgc

SEQ ID NO: 6785 - DNA, 391 bp, Glycine max
  unsure (1)..(391): unsure at all n locations
  Clone ID: LIB3030-006-Q1-B1-D4
ttctcctccttccttgttgagagaagaattgatttggtctatggaggtggtagcgtgggtttgatgggtctagtttctcaggcggttcatgatggtgggcgccatgttctgggcgttatcccaaaaagcctcatgccaagagagataactggtgatcctattggggaagtgagagcagtatctgatatgcatcaaaggaaagctgagatggctcgtcaagctgatgcattcattgcccttcctgngggatatggaacactcgaagaattgctggaaatcattacatgggctcagcttgggatccacagcaaaccggtgggcctattgaatgtggatggattttacaattccttgttgtctttcattgacaaggccgttgatgaaggcttta

SEQ ID NO: 6786 - DNA, 332 bp, Glycine max
  Clone ID: LIB3030-006-Q1-B1-D5
agttaaccaacaagcttacttttatgccagagacctcgaagtccatcccaaggacacatttgtgttcagtatagatggcaccgtactctctaatattccatactacaaaaaacatggatatggggtggagaaatttaactcgaccttgtatgatgaatgggttaacaagggcaatgcaccggcactgcccgagactcttaagaattacaacaagctggtgtctcttggcttcaagattatattcttgtcaggaagaacactggacaaacaggccgtaacaagaagcaaacttaaggaagggctggctacacacatgggaaaaaattaattct

SEQ ID NO: 6787 - DNA, 376 bp, Glycine max
  unsure (1)..(376): unsure at all n locations
  Clone ID: LIB3030-006-Q1-B1-D6
ggcgcggttgatcacagtggtgtggtgcgcggtggcggtgctattatgcgccgcggccggtgcgtcatgggtggaggaggcggcgaacccgatacgaatggtgtctggcgtggaggcggaggtggttcgggtgatcggggagtgccggcgtgcgttgaagtttgctaggttcgtgagcaggttcgggaagagttaccaaagcgaggaagagatgaaggagaggtacgagatattctcgcagaatctcaggttcatccgctcgcacaacaagaagcgtttgccctatactctctctgttaatcattttgctgattggacttgggaggagttcanaagacacagactaagagctgcccaaaattgctctgccactctt

SEQ ID NO: 6788 - DNA, 285 bp, Glycine max
  Clone ID: LIB3030-006-Q1-B1-D7
cttgttttttgatgctgtcaaaattgagaattgcacatccgtgctgatcagcacttgtgcgtctacacatgcatgcgacgagcttgcacgacaaaatgccctgcttatctacacaccagagcaatgtttccaaggctacaactcaataccattcgtgaggaccatgccagttaaatgctctccatatacagcacatttgaccaccgtgtagccatatgccctcgttttaggtgtgtccaatggatctactgcagtatccaagtttgtctcatagaagtagactac

SEQ ID NO: 6789 - DNA, 352 bp, Glycine max
  Clone ID: LIB3030-006-Q1-B1-D9
aaaataaaaaaaaaatttaaccctagcaattttctcttattgcctaaaaacatttcaatcactctactttaaacgatccgctaaaaaaaacctctcgcaaaacccacactcccaagccaaatcgatgtcgtcttcggagtcccaagaccccgccgccgccgcagcatcgtcggaggcccaagtcagcaaaaaggccgccaagaaggaggccgccaagctggagaagctccgccgacgccaggaaatcgccgccgcgtccgccgccacggccaacctctccgtcgacgaggaggaccccctcggcgggaactacggcgacgtgccgctggtggagctgcagtccaagacgccg

SEQ ID NO: 6790 - DNA, 306 bp, Glycine max
  Clone ID: LIB3030-006-Q1-B1-E1
atgcgagtgaagacacatacacagacatagagtgacagtgatacaaagagcggaagagagagagagagagagagagagagagagttaggcatggctgggttactggcatgggcggtaggaggtggcggatgaaaagaagcggacgacgacagcatcatcccaatcctgttttctgcagatcagcaaaagtacgtcaacgaactcgatcagaacgcgagctctctccggcgttggatccatgatctatggcaatcattgcctctccaggacatctcccagagcctcccatacctccacgcccactcc

SEQ ID NO: 6791 - DNA, 383 bp, Glycine max
  Clone ID: LIB3030-006-Q1-B1-E10
ggcttttgtttctattcccctgcggttggctgctgacgaatctcttatctgcgtccttaaattaaaatggagtctggagccctagtgtcgtccgagaaagaagggcagcaaggagcctcgtatacgtactgggttaggaaaataacggaagatgcagcgcctttgcctgtgcctcgtaagctcaacccagaagatgttcccccttgtcattctcaatctcaatctcggtctgccacgcttggctcagcttggaatcgcgctgggacatgggaggagaaaagtctaaacaattgggcaactccgagaattaaggagttgcttatctcattaggctccatacagttctcctttggcagagcagaagtagaagatgtaacaaaatg

SEQ ID NO: 6792 - DNA, 380 bp, Glycine max
  Clone ID: LIB3030-006-Q1-B1-E11
cttccaacgctcctcctccttctcatagccttcgccacctctgtctccggccgccgtgacctcgtcggagactttctccggctgccctccgaaactgataacgacgacaacttcaagggcacccggtgggccgtcctcctcgccggttccaatggttactggaattacagacatcaggctgatgtttgtcacgcctatcaaatattgaggaaaggtggtctgaaagaagaaaatattattgtttttatgtatgatgacattgcattcaatggggaaaacccaaggcctggagtcatcattaacaaaccagatggaggtgatgtttataaaggagttccaaatgattacaccggggaagatgttactgttgaaaacctttt

SEQ ID NO: 6793 - DNA, 375 bp, Glycine max
  Clone ID: LIB3030-006-Q1-B1-E12
ctcaaatctctcatacttcttacgccacatacacccttctcttcatttctcactctccggaacatttttttttttaaaaaagaaaaggggaaaatagaaagaaaagaaaaagggagaaggagtgagaataacatgaacaaacaactcacgctgctctgtctctttatcctcttctcatttctcagtgtgggtttcgccggcgccggagacgcggcggagaaaaaccctttcaccccaaaagccttcgccattcgttattgggacaaagagatccgcagcgggttggcgaagccacagtttcttctgtctaaggcgtcgccgctaaacgcggcggaggcggcggcgtttgtgaagcttgcctccgggaacgcgctc

SEQ ID NO: 6794 - DNA, 292 bp, Glycine max
  Clone ID: LIB3030-006-Q1-B1-E3
ttcaaggtcggcaaaaagcagatttctattgataagatggttaaacttggacgtttgtgggacgtcccttcttccatttggatttcgcttggtcattaggtcaggtttcatcatagtaactggtgcccttgcctggagcacagagggtcatgtcatgagatgccaatttgaacacgcacttttagagcctgaggcatcataagccgtgtacgatttgttacctgactatgtgaaaggtgacttatcatccctatgcatatggcctgacgaaattagacactggtacaaatat

SEQ ID NO: 6795 - DNA, 391 bp, Glycine max
  Clone ID: LIB3030-006-Q1-B1-E4
aaaaacatttccctgctacttcatcttcttcttcttcttcttcttcatcaccggtggttctgttcattcttccttgcaccttcttctttgaagatcgaaattgtgtttttgaaaaaatgggagttccagagaaagaccctctttcccaattgagtttgcctcctggttttcggttttaccccaccgacgaggagctcctcgttcagtatctatgcggcaaggtcgctggccaccatttctctcttccaatcattgctgaaattgatttgtacaagttcgacccatgggttcttccaagtaaggcgattttcggtgagaaagagtggtactttttcagccctaagaaaaggaaataccttaacgggtcccgacccaacagagtagccgggtc

SEQ ID NO: 6796 - DNA, 362 bp, Glycine max
  Clone ID: LIB3030-006-Q1-B1-E5
ctctctttgaattggcattggaattcaactcttctctttctctgtcgaagaacaagtagtttcagaaagatgctagagaatcttcaggctcctccgtcaacaacggaatcggccccagtggtgaagcgctatgctccacccaaccagaggaaccgttctgctaacaggcgcaaatcatctggtcagctcactccttattttctcccaatctttttattcacctgccctttgctaacttttttctgttcttttttcaaatgggtatttaataatgtcaaagaaatatagcccctttttttctcatgagcatgatgtgctttatttactttttttagttgcgcaagtcaagtttccgttgccaa

SEQ ID NO: 6797 - DNA, 401 bp, Glycine max
  unsure (1)..(401): unsure at all n locations
  Clone ID: LIB3030-006-Q1-B1-E6
cgcttctcttctcttcaaagtgaactttgcaactttgagcagaaaatctcacagtcgaaggaagaaataatcgccaatggcaattgagcacgaagacgatctcaaagacgagaagaacccacgacccctcgacgaggatgacatcgccctcctcaaaacctacggtttgggaccttattccacaagcataaaaaaggcggagaaggaaatcagagatatggccaagaaagtgaatgacttatgtggtatcaaggagtctgatactggattagcagcaccaagccagtgggatcttgtttctgataagcaaatgatgcaggaagagcagcctcttcaggtggcacgatgcacanagatcataaatccanactctgaagatgccaaatatgttagcaggggga

SEQ ID NO: 6798 - DNA, 249 bp, Glycine max
  Clone ID: LIB3030-006-Q1-B1-E7
attatcgccaagattctctgctggtgttctcaactggaaggtcacctacactctacaaacaactgaggaaggaaaagcctctgataactcctgatatagccattatgtctgtggggactgagattacttatgggaaatcaatggtgcctgatgatggatgggttcggtgtttgaaccagaaatgggataaggacatagtcatcgaggaaacaagcaagtttcccgaacttaagcgtcaggctgaaacag

SEQ ID NO: 6799 - DNA, 53 bp, Glycine max
  Clone ID: LIB3030-006-Q1-B1-E8
ccttgaacttagtcccgggctagaagttgttatactagaaactaaactacgca

SEQ ID NO: 6800 - DNA, 378 bp, Glycine max
  Clone ID: LIB3030-006-Q1-B1-E9
aaatgagtggtttttgagcagaagcagttaaaagagaaagggattcagcgaagatgacatcggttggtgtggcaccaacttcgggtttgagagaagccagtgggcatggagcagcaggtgttgatagattgccagaggagatgaacgatatgaaaattagggatgatagagaaatggaagccacagttgttgatggcaatggaacggagacaggacatatcattgtgactaccattgggggtagaaatggtcagctcaagcagactataagctacatggcagagcgtgttgtagggcatggatcatttggagttgtcttccaagctaagtgcttggaaacgggtgaaactgtggctatcaaaaaggttcttcaagaca

SEQ ID NO: 6801 - DNA, 300 bp, Glycine max
  Clone ID: LIB3030-006-Q1-B1-F1
ggcagatcaagtctctgtggttattcccatcttgaaactcaaaagatcaacaaaggttgtattctactgccattttccagacttgttgctggctcaacattcaactttcattaggagaatgtatcgaaaaccaatagaccttgcagaagaaataacaactggaatggctgatttgatacttgttaacagcaagttcactgcatctacttttgcaaatacttttaagtatctagatgctaaaggaattcgaccagctgttttatatccagcggttaatgtggatcagttcaatgaacccag

SEQ ID NO: 6802 - DNA, 374 bp, Glycine max
  Clone ID: LIB3030-006-Q1-B1-F10
ccgcaacagagagtagaaaagatggcgcggttgatcacagtggtgtggtgcgcggtggcggtgctactgtgcgccgcggcgggcgcgtcgtgggtggaggaggcggcgaacccgatacgaatggtggcgggggtggaggcggaggtggttcgggtgatagggcagtgccggcgcgcgctgaagtttgctaggttcatgagcaggttcgggaagagttaccgaagcgaggaagagatgagggagaggtacgagatattctcgcaaaacctcaggttcatccgctcccacaacaagaaccgcttgccctacactctctctgttaatcattttgctgattggacttgggaggagttcaaaagacacagactaagcgc

SEQ ID NO: 6803 - DNA, 376 bp, Glycine max
  Clone ID: LIB3030-006-Q1-B1-F11
tctacatccactctctctttctctcttcttcttcttcttcctcctctaagacgaataataatggagcagcttcaaacccccaccatcacccataataacacgaacccagaaaccaacaatggcgaatcccttttcttccaagacttcgacagcacctgctccaccccttacgtcagcgccccttccagccccggccgtgggcccctccccggcttcttctacagcgctccggcgagtccaatgcacttcgccatcacagccgcatcgtcttacgagaaaactccttcttccgcaccaatgggtttcgagttcgaattctccgcccggttcgggtgctccggttcggccgggtccggttcgatgagctcgggcgacg

SEQ ID NO: 6804 - DNA, 335 bp, Glycine max
  Clone ID: LIB3030-006-Q1-B1-F12
cgccgcctcagagtctttcgtcgaatacgatgctgttttctcggatatcgagaaacctcagaggcagcttcaactcatgtcggtggtttctgtccatcggagaccacaaccaccgcttcctttcgctgcacaattttcattcacgtggtggagactctactcaacaggttatgagaagtttaattatttcaaagggcctgccagcattgcatagtagtagatatctgatccatcatcaaagcagctccatagttgaggatgaacatgatccattttcactggttgcagatgaactgtcacttcttggtaacaagttgcgagcaatggtagttgct

SEQ ID NO: 6805 - DNA, 403 bp, Glycine max
  Clone ID: LIB3030-006-Q1-B1-F2
ttcacataccacgtagaaacagttcaatcattcttagccctaagcagacttcacatactcatccacttagtggcagtgttgtctctctgttactaccgcatcacccacttcttcctccaacctccaacagcgccatggcttctcatgactgctgcggagcttcttctctcgctgctctggttcttcaaccaagccttccggtggcgaccggtgtcgcggagcgtcatgactgagaagcttccgagtgaggagaagctgccggggcttgacatcttcgtgtgcacgctcgatcccgagaaggagcccaccgtggaggtcattgacaccatcatctccgccgtgtccatggattacccctccgacaagctttccgtctatctctccgacgacggcgggtgcgacg

SEQ ID NO: 6806 - DNA, 397 bp, Glycine max
  Clone ID: LIB3030-006-Q1-B1-F4
cgaaaacccccaactccaacctctgttcatcgtcgaccgcgctttcttttcaaccagaactatgattaagctttttaaagtaaaggaaaagcagagagaacttgcagaaaatgcaagtggcggaccacctgttaagaagcaaagtgctggagagttgcgtcttcacaaagatataagtgagctgaatctaccaaaatcatgtaccatgcaattccccaatggcaaagatgatctgatgaactttgaagtttcaattcgacctgatgatggatattacttaggtggcacatttttgttttcctttcaagtgtctcccatctatccacacgaagcaccaaaggttaagtgtaagacaaaggtctatcatccaaatattgacttggaaggaaatgtttgt

SEQ ID NO: 6807 - DNA, 272 bp, Glycine max
  Clone ID: LIB3030-006-Q1-B1-F5
gtttgctcaaggctaaacaacaatgaataaatattagttcactgtaatagtgtgtgtatctcaacattcaacaaggatagaaccaggcttaggttcgattgtctacattatgcttcttgatgcgtgagatgtaaattcgactagaagctcttgttgtagttaaggatgttgccctgacctagcaattgaatcaccttcccacgccccatcctaaattttttaagttctaaaaagggggcaaaacctatagtttaagcgatgtgactttgttg

SEQ ID NO: 6808 - DNA, 372 bp, Glycine max
  Clone ID: LIB3030-006-Q1-B1-F6
attttagtcagtttgcacatgagttttcattctcgaaagaaagctttcttcgcgctctccctctctcttttttggcatgaatagtcttcaaggtacaatatataggcataaacgctaaggacgtaactgtttcaaatgatgtttatttagctagctactgttcaaattcaaaccacagccattaaaaaatgtgttgaggaatatttaacatacgtcgttgagtttagatggacatgtcatccatctttgatgacaattctgatgtggagtaacatccttcaccttcgtctgtggatcaaaatgatcattcagtcacttaatacgttggttactcacctttattcagtggggataccttcgcgtattgtcggt

SEQ ID NO: 6809 - DNA, 386 bp, Glycine max
  Clone ID: LIB3030-006-Q1-B1-F7
cgacgccatctccggccacctcagagagtgaagaaggtcgttgacgatgagcaacgtgttcgagggatacgaacgccaatactgtgagctctcggcgaatctagcgaaaaagtgcactgctgctggtgttcttaatggagagcaaaagaaacagaaagtttctgaagtaaaggctggaattgatgaagcagaagctttgattagaaaaatggaccttgaggcaagaagtttacagccaaacatcaagggtgtgcttcttgctaagttgcgagagtataaatcggatctcaacaatcttaaaagtgaagttaagaaaattgtatctggtaacttaaacccttctgcacgggatgaattgttggaatcaggcatggcagatgctatga

SEQ ID NO: 6810 - DNA, 405 bp, Glycine max
  Clone ID: LIB3030-006-Q1-B1-F8
ctgaattgtgttgtgttgcaaacagaaaggaaaaaagaagaaaataagagaaagaagaaaaatatgagttacttgaatcgtgtttggatggcggcaacggtggcggtagcgcaaggccacaccgatcccggccacaagtgcaagacggcgctcaactccatccaccacaaccggagccgcctcttctccggcggagccctgtctgatctccggccgctgtccggcgtcgttggacctgacgtctctggcgcggcagcggggagctccgacgcgaagaatagggtgagccaagccgatgactctctgaggaaagtgatgtactttagttgctggggtcagggctgaaccacacgtgatgaacggtggagattaaagtagtcgccggagaaagtgaagcgggtctgt

SEQ ID NO: 6811 - DNA, 348 bp, Glycine max
  Clone ID: LIB3030-006-Q1-B1-F9
cttgaattcattggcttgtgtggctttctccctccaaaaaactcccctcttttccgtcggagaatggcgtcatcttcacaaagccgctgtggcagcggcagcgccgcctcacgactgaggaacgcagcttccaccttctgctccgactcacagcctctccttgccgatatccgaaaaaccgtgcttatgatgaaggacatcgcagttcaattggagaaagacaacctccctgacaaggcgaaggaactggaagatgcggttattgagttagtagggctatctgagctcagtgtgcaattttcatcagcggttcaagcttttgctaacgcataccaacctaagggaaaa

SEQ ID NO: 6812 - DNA, 270 bp, Glycine max
  Clone ID: LIB3030-006-Q1-B1-G1
agcctcttttacagttcagtctcttgttaaagcaaaatggtcttagaagagtgtgtagtgcatgatgtgaggctatcctcagttgggccaggccgggccaccaggtcggaggtgttccacagcccgggtggcttggacttggccatgaagcttcactatctcagggtggtgtacttctttgctagtgaggctgcacaagacctaaccatcatgaaaattaaggaggccatgttcactttgctcaaccattacttcatcacatgtggccgc

SEQ ID NO: 6813 - DNA, 93 bp, Glycine max
  Clone ID: LIB3030-006-Q1-B1-G10
gttacagtgacactgcagcttctgtcggagacactggatcccttcacgctttggcgacttctctgagtctgtgtcagtgacagtgacttattc

SEQ ID NO: 6814 - DNA, 348 bp, Glycine max
  Clone ID: LIB3030-006-Q1-B1-G12
attaattgcaagaatggcacttcgttgcttggtgatgtccctttctgttctcttcactcttggtcttgcgagagaaagccatgccagagacgaagatttttggcatgctgtttggccaaacactcccattccaagttcattgcgagatcttctaaagcctggccctgcaagtgttgaaatcgatgatcaccctatgcaaattgaagaaacacagtacccgaaaaccttcttctataaagaagaccttcatccaggcaaaacaatgaaagtacaattcagcaagcctccctttcaacaaccatggggtgttggtacatggttaaaggaaattaaagacactactaaaga

SEQ ID NO: 6815 - DNA, 394 bp, Glycine max
  Clone ID: LIB3030-006-Q1-B1-G2
aaattttccaccttctactgcactccgagtaacagctcgcactatttatgttgcggtgacaatgttaattggcatatgtgttccgttctttggctctcttcttggatttcttggaggctttgcgtttgccccgacatcatattttttgccctgtatcatatggcttaagcttaaaaagcccaagaaatttggcttgtcttggacaattaactggatctgcattattcttggggtagtgttgatgatattatctccaattggtgctctaaggaatatcatactatcggccaagaactacaagttcttctcgtagactattgatgcaatcattgatttcccaactgtgttaaaagttagatgggtgaaactaaataacaagaaagcatttacatac

SEQ ID NO: 6816 - DNA, 380 bp, Glycine max
  Clone ID: LIB3030-006-Q1-B1-G3
gatgaggctcagggaagaggggtggttgagcctcactgcccggtgccatttgttaaactcaatactgatattctcgagactgagtctttgaacttgctcgcagaagccacatttgtagatactctcttgactgcattgcctgttttgtccgaggaggagcagcacgccctatctgctactccggctcacccggctggtttacacgctttttatgctagttgcttaactgcaaatgtagtggagcagctttggaattttgcttggccttctgccattgccttgattcatccaagccttttgccagttgctgtaatgagtttcttcaccaaagtggctatagttgttggcggtcccttggttggcaaacttatgggacattt

SEQ ID NO: 6817 - DNA, 385 bp, Glycine max
  Clone ID: LIB3030-006-Q1-B1-G4
gtcttgttggtgttatttgtaatggaaccctttacatagcaaaccttggggattcccgggctgttttgggaagagcagtcaaggcaactggcgaggttttagccatgcaattatcagcagagcacaatgcatcgatagagtctgtaagacaggagctgcatgcttcgcatcctgatgacccaaatattgtggttttaaagcataatgtatggcgtgtgaagggtcttattcaagtttctagatctattggtgatgtatatttgaaaaaggccgagttcaatagagaaccactatatgctaagtttcgacttcgtgaaccatacaagatgccaatactaagctcagaagcatcaatatcagtgcatcatttgcagccacatgatca

SEQ ID NO: 6818 - DNA, 344 bp, Glycine max
  Clone ID: LIB3030-006-Q1-B1-G5
ctcgagccgattcggctcgagagtacattgattctgaccactttgctgtgcccgagggaaaaagagctattgaacttgttgcagggaaagagagtgcacttgcacaggtagtgattactacaatcggcaagacttatgacctcactttcgccgtgggtgatgccaacaatgaatgcgaagcttccatgatggtagaagcatttgctggcgcaaacactgtccaagttccatatcaatctaagggtaaaggaggttttgtcagaggcaagcttcggttcaaggccgtctcaacacgtactcgtcttaggttcctaagcacattttacaccatgaagagtgataac

SEQ ID NO: 6819 - DNA, 388 bp, Glycine max
  Clone ID: LIB3030-006-Q1-B1-G6
caaaatatcacgcctaattttccatttaatgtaactgatcagtgttctgaagctgatgatgatggaaagattaaaattacttggctaccagcaccagaaccgccctgtactgagctaatagattgccacaattggccccattcgacatgcagagaaacaagtgaaggaggaagcaggtgccgttgtgactcaaactataagtggaataacacaatcatgagttgcaccttagaagagcattcaaccaaccagctggaattgattcttatagtaattcttagtggcatggctattctggcatgcacaatagcatttgccatagtgcggagaaagaaaaaagctcatgagcttggtcaggcaaatgctcggattcaggagagcttatatg

SEQ ID NO: 6820 - DNA, 378 bp, Glycine max
  Clone ID: LIB3030-006-Q1-B1-G7
ctcaagactataataatgggttcttcttctcctccggacactagcaagagcataaagctagagcgatacaacagctacatcatgagactcaacagcaccaaactcctcaacgcctcctccaaactcgtcttccgtgccactatcttagtcggactcatcctcgtcatcctcttcaccttcacctaccgtcgcctcgcaccagacttcagctcgcagcgccacctccactcgcactcgcacttcctctcctcctcctcctccttcgcctcctgggagaagcacgtccgccactcctccacccctcgccgccccaatggcctcaccgtcctcgtcaccggcgccgctggcttcgtcggcagccactgctcccttgccctc

SEQ ID NO: 6821 - DNA, 397 bp, Glycine max
  Clone ID: LIB3030-006-Q1-B1-G8
gttctaaatacgttgccaattgtagtgctggcgattcatccactgaaccctatatcgttggacactacttattacttgctcatgaatctgctgccacattatacaagacaaaatatcaggctcgtcaaaaaggacaaattgggatcactaatccaacacactactttttgccaaaatctcaaagtgctgcagattacaaggcagcaagtagagctctggacttcttctttggttggtattctgatccggttttctatggtgactatccggagagtatgaaatcttcagtaggttctaggctcccaaaattcacaaaagctgaatctgaaggtctaaaaaattcgatagattttcttggtgtgaattactacaccacttattatgcggaacatgctga

SEQ ID NO: 6822 - DNA, 375 bp, Glycine max
  unsure (1)..(375): unsure at all n locations
  Clone ID: LIB3030-006-Q1-B1-G9
agcgcagtggcagtgaagcggaggtggcggagaagggaggcagagaggttttggcaatttctctgttctactggtaagcgaaaatgaattattcagtgcgacgagtgttgccaatgtcaagggttgttcttcggtcctacgccactgtcactgcgaaacccaacgatattccatttcagcccaaacttgctaactccgttaacctcatcggtcatgtccagtccccgattcagttccatgtctctcccaacgatggctacgtctgggcctccaccgttatcacgcgtcaagactcctctgacctctctttctcgattccggttatatttgagggtgatctcgctcatactgccaaatttcatcncaatccaaatg

SEQ ID NO: 6823 - DNA, 383 bp, Glycine max
  Clone ID: LIB3030-006-Q1-B1-H1
cctggtccccattttgaccctccatcaaaagacagagtcagagaagtcaaacagagctgtgatatcaacctcgatggtgatattgaccgtgatgaattttaggatttcatcctgataatgacagctgatacattcactattgttagccaaaaacttattctcacattggttgtagcaccaacagttgcagtggcaacaaagaaagctactgaaggtgttccaggtgttgggagactggtgcaaaagataccgaattcagtttatgcttccctcgtgacaattgcagctgtgtggttccaaaaaaaggctcagagttctccactgtagccattgctcatcatgtgtttcacacagaaagatagaattctcttgattgtacacat

SEQ ID NO: 6824 - DNA, 364 bp, Glycine max
  Clone ID: LIB3030-006-Q1-B1-H10
atacatagctatctagctagcaagtgggacaagagatatatatacgtggtaccctagagtgccattctgtagtttatttctgctcaccaaggcttatcacatcacaatttgtgcattgcctcgtgtcctttttcttctttgcttgccaaaaatcttacacacacaggtatctagcaaatgggttctcaccagcaagaaccatggctattggagaatgggaaaccgagggtgttgaccaaggagaataggcatggccgttctgcacacagcatgtcctccacgtctttgcgcaagaagtctagccgaactcttgtctccaagcttccatgtgccacactcagaagcatccttttaaatttgcaag

SEQ ID NO: 6825 - DNA, 379 bp, Glycine max
  Clone ID: LIB3030-006-Q1-B1-H11
cttacctcttggcatggccattcaaatgtcttcttttgtctttgtttctcttacaattttattttgcttctcttccttggagaagagttttgcctttcaaacaacaaaggaggacacagaaagcaacaatcttcatcaatatactcatcttgttcacctcagctcactccttccttcatcttcctgcagctcttctgccaaaggtcccaaaagaaaagcatcattagaagtggtacacaagcatgggccatgctcccaactgaataatcatgatggcaaagcaaagtctacaacaccacacagtgagattctgaaccaagacaaagaaagggttaagtacattaactcaaggatctcaaagaacttgggccaagatagt

SEQ ID NO: 6826 - DNA, 317 bp, Glycine max
  Clone ID: LIB3030-006-Q1-B1-H12
cttttcccctcagttcttggcgggacttgtgccatacctggagcttttggttgtggtaaaactgtcattagtcaggctctttctaagtattccaattctgatgccgttgtttatgtcggctgtggggaacgtggaaatgaaatggcagaggttctaatggactttccccaacttacaatgacattacctgatggtcgtgaagaatctgtcatgaagcgtacaacactagtggctaacacttcaaacatgccagtggctgctcgtgaagcttcaatttatacaggaatcacattagctgagtatttcagagatatggg

SEQ ID NO: 6827 - DNA, 386 bp, Glycine max
  Clone ID: LIB3030-006-Q1-B1-H2
atttgataaatgatgataatcatgagtaggtgaaaagctttgtggtaacacctctctggagaataaagcctgaaaggcaagacgcccctcgtcagagacctccttctaagaatcagtaaggttgttaatgcatcgggagtcatgaaatgcgtcaatagtacccaagttctggacagtttcagcatagtctaaaagatggtcgatatttgccaaacttgactattgcacaaagatcaggggttggctctcatctatcaaataatgcatatcatgatggcgaatcagacaatgcatctaatgatagtcgatatagagctacacttgaggaattagataatttctgcatccacggtaacgtgaaggaatcacttaatgttttggaattg

SEQ ID NO: 6828 - DNA, 380 bp, Glycine max
  unsure (1)..(380): unsure at all n locations
  Clone ID: LIB3030-006-Q1-B1-H3
caaagggccacacttgggcaccctgctgagacgaagtctgagaacaagactgagaacactcccagccaggtcaaggctctttccagtgttaaaattgttcacgcggctattggggggtggcactgtttggccgttgatgatcagggcagagcttatgcttggggtggaaatgaatacgggcagtgtggcgaagaacccgagcgcaaggatggcactggtagacctttaaggagagatatagagatccctcagcgctgtgctcctaagcttgttgttcggcaggttgctgcangaggaactcactcagtggtacttacacgagaagggcatgtttggacatggggtcagccatggccgcctggtgacatataacagatttc

SEQ ID NO: 6829 - DNA, 353 bp, Glycine max
  Clone ID: LIB3030-006-Q1-B1-H4
gagaataatgagaaaccaattgatcaaaagagcaaggttaagtttaatattatgagcttaaaagtgcaaggtgaaatggactaagtaccggaactgtttgatgagcaaagagatcaagtggcaatagagcaaattctgcgggttatttttctggaccctgaaaagcctaatcctgtcctggataagcttaaacgaatgttggctgaggccgacgctgcacttgaagcgcgaaagaaaccactggaggagaaacgtccttgtgttgctggggatggccttgttatagatgaatgggagagacagaagagaaagatacttggctcaacagcatgtccaaggtgttgattcagtgt

SEQ ID NO: 6830 - DNA, 369 bp, Glycine max
  Clone ID: LIB3030-006-Q1-B1-H5
cttcgtgatagggggagatgtgtttctcgtgatcttcagctctggattctgagcttggttgcaaaaaggtcctttttttgggcttatgagagtgcggtcctttgcaggttttcagcagataagtagcttagcttccttgttgataagccttgaaggtttttgatgctgtttttctgcacttgttgaacctttttcctttgttttgcatctgggtgttgttttggaactgtgtcactctgttggcatgtgagttttttatgtatgtggatttgagatattggtctaatggtctctctgaaatgatatttggtagagagatttctgttagaatgatggctatttttatttgaagatatatagtgtaatgga

SEQ ID NO: 6831 - DNA, 318 bp, Glycine max
  Clone ID: LIB3030-006-Q1-B1-H6
aagaaagtagcaaagatgacaggtgggatgtttggaaggaaggggcaaaagataaaggggacagtggtgttgatgccaaagaatgtgttggacttcaacgccataacctccgtcggaaaaggcagtgctaaggacaccgccaccgatttcttgggcaaaggcttggacgcattaggtcatgcagttgatgctctcactgccttcgctggccatagcatctccttgcagcttatcagtgctactcagactgatggtagtggaaaaagaaaaattggaaacgaagcctatttggaaaaacatcttccgaccttgccaacg

SEQ ID NO: 6832 - DNA, 341 bp, Glycine max
  Clone ID: LIB3030-006-Q1-B1-H7
tacctgtactcaagaagagtggcagtagtattggatcaatgggtgctggaataggtttctagcagccattttaggaataaacttctgtaaaaaagaaaatcacgtctgaatcaaaatatgattctttgtagtcttgtccagcattgggtttgtagatagttgtcaatgttggtgaattgtgtgacgatggatgggccatcacattgaatgtgatttttgtgcatagtagttgtcaggggttctattagaagacaagggtgtaattttatgattttaagaacctgccgattatgcagggtagaaccatcagtatattccattagagaggattgcagtggttc

SEQ ID NO: 6833 - DNA, 391 bp, Glycine max
  Clone ID: LIB3030-006-Q1-B1-H8
gtagaagtagaagcttcacttcactctgttcagttcttattgttgcatagataatttgtctctatttttgttattttctttctctctcctctttgtgcattttaatagcaactcttagtttccaatgtccaagatgttgggagtgtttgtgggacttttgctgttggtggggttggctgcctctgccaagtttgatgaactcttccagcccagttgggctatggaccatttcatccatgaaggagaacttctcaaactcaaacttgataactattctggtgctggatttggatctaagagcaaatatatgtttgggaaagtgaccatccagctcaagcttgtggagggtgactctgctggaactgtcactgctttctatatgtcatcagac

SEQ ID NO: 6834 - DNA, 351 bp, Glycine max
  Clone ID: LIB3030-006-Q1-B1-H9
caaaaatcagattcaaattcaatggattgattattgtttcatgatctgatcactttgtcatatccataaagaagggagaaaaagaaagtttggaatttgcagaagctttgcaagtattttaagttgcaatagctgtgagaaatgaaccactgtgcaagatgttcaatataatacatacgtgtgttctatcagagagctgcttttgatcctgttctactacggtagatgccaaatgagtggaagttgttcttgtttgagtttgctttagtaagaaatccctttttcagtttgcagaatctcttgtatttattgtgtgagaaataaaaattctattaatgcttgtttcttctt

SEQ ID NO: 6835 - DNA, 290 bp, Glycine max
  Clone ID: LIB3030-007-Q1-B1-A1
tggagatggaaaatcctgaggataaaaaggaaacttagaaaagagagtacatatacaatacaagacaacttcacacacacaacactttcctctctctctctctctctctctagggttccgagtttgaagttgaaagtgttgaactatctctagctagcttttcacaaatttggttgcacttgcaactgaggcaggaaagaggggcacgagaggaggaagaggaaagagaagaaaaacaagaaaagtggagaaagggataggtgttgtacagaaatagaaattaaaattga

SEQ ID NO: 6836 - DNA, 388 bp, Glycine max
  Clone ID: LIB3030-007-Q1-B1-A10
gcgttgagaacttgcgctcggattaaaataaccgacccgaaagcgaattgggtgatggaaaccatgccgggtgcgagagttatgagtgacatggttttactccccaacggcgacgttttgattgttaatggagcagctgtggggactgcgggctgggaattgggccgtaacccggtgttaaacccgtttctttataaacccaacaagcgggtcgggatgagatttgaggtccagaacccgtctcatattccgaggatgtaccactccggtgccgttttgcttcgcgatgggcgagttcttctcgctgggagcaaccctcacacgtattacaatttcaccaaagtgttgtttccaacggaactgcggttagaagcgttttctccttggt

SEQ ID NO: 6837 - DNA, 376 bp, Glycine max
  unsure (1)..(376): unsure at all n locations
  Clone ID: LIB3030-007-Q1-B1-A11
aaaggagaaatggtgagctgtgaagaccaatatggagaaaagcttccacttgtccaaccagacccggtggtgttggagattaatcgtttgcaaaaccaactaaaagaaaaagaaaaggaactagcgacttgtcagggtgaaatcaaagctttaaggtcaactgaagctctaaaggataaggccatagaagagttgagaaatggagtcagtaaactggacgaaagacttagaattacagaggatcatcttaaacaaaagaatctagaaatcaaganactgacagatgaaaagaaaaatgcattggcttcgcaatatgctgcagaagcaacacttagaagggtacatgcaaatcaaaaggatgaagattttgttcaat

SEQ ID NO: 6838 - DNA, 391 bp, Glycine max
  Clone ID: LIB3030-007-Q1-B1-A12
gcatgatgcataatataagcagtgagtccattgcttttccccacagaagaggaaacctgtttacaattcagtacctgatctattggaaagaagctgacaatgacaaaagcagcgattatgttgattggataagagggttctatgctgctatgactccctttgtttcatggggtccaagggctgcatatattaattacatggactttgaccttggagtgatggaggggattggtaatggtgctaatatgaaagatgctgtggaacatgcaagggtttggggtgaaaagtacttcttgagtaactatgacagattggtgagggccaaaactctgattgatcctaacaatgttttcaccaatgatcagggcattcctcccatatctttgaccag

SEQ ID NO: 6839 - DNA, 374 bp, Glycine max
  Clone ID: LIB3030-007-Q1-B1-A3
tcaacatgctgagagtgggcgcaaagagggttttggaaacgacgttgtttggggttagggttccggcgaggctgtaccacgagagggttgtggatcactacgacaacccccggaacgttggatcgtttgacaagaacgacccgagcgtggggacgggtttggtgggggccccggcgtgcggcgatgtgatgaagctccagattaaggtcgacgacaaaaccggaaaaatcgtcgatgctcgattcaaaactttcggctgtggctccgccattgcttcttcctccgtcgctactgagtgggtgaagggaaggcaaatggaggaagttctgactataaaaaatactgaaattgcaaagcatctttcacttccacca

SEQ ID NO: 6840 - DNA, 376 bp, Glycine max
  Clone ID: LIB3030-007-Q1-B1-A4
gcgaagaagaaccaaacaacgaaaaaacagaacgacattcacaaatctgcgcgaacctctcaatctcatttcctgagaattctctctcactgcgctgcgctgcgttttgtctccgccaccgtcgtcgtttcggcttctcaaaagcatttcgcgcgcgagggagataaagatatgagtcgtttagggttcaagcacgaggtttacgacggcgacaagcacgttggcgaactcgacgtgattcctctgtcgtcgtcgtcgacaacgacgccgtttcacaatagcttccgcttcccgaacaacgagattcgcatccaccacttcagcgcgaagagcgagcgctgccctccgctctcgatcctccaaaccgttgccgcat

SEQ ID NO: 6841 - DNA, 378 bp, Glycine max
  Clone ID: LIB3030-007-Q1-B1-A5
attataaccaaacactcttcttcatattcttcttcttcttcttgttcttgttctatctgtgacgagcatcatggcctcgagagcagtgctattgttggctatgtgtgtgcttccggccatggttgtggccattcgcccagcaaagaaccctttttgcgtgaagggtcgcgtctactgtgacccttgccgtgctggttttgagacctcagcaaccacctacattgccggtgctgagattatgttgcaatgcaagagcagggttagcaacgaggttgtgtacaccaagaaggggtacactgactcaactggagcatacacaatgtacgtggacgaggatcacgcagatcaaatatgcagtgccaagcttgtaagcagccc

SEQ ID NO: 6842 - DNA, 407 bp, Glycine max
  Clone ID: LIB3030-007-Q1-B1-A6
cagttcactcgaaccacagaaaaccaattgaagtaagaaaatccgtggagtccactaatggatcagagtcgagaagaaggcacgatcaaaaacagattgttgatctcaatcaaattgaaagtagaagggtcccggctgaaaaatcaactccgggtgggcgcgagtccatgggaaacaagatatacctctcaggtccattaatggtttcgtcaagcaacatggatcagatgctcaaagagcatgacagaaagatccaagagttttcaagacgagccagaattgacaagtcaagagcaagaggtgagaaagtttttgcacagcggaagtagtcgaattaagataactatttcggattgttcagctgcttacatatttttatgacaccatttaattatctcaaacctaaa

SEQ ID NO: 6843 - DNA, 388 bp, Glycine max
  Clone ID: LIB3030-007-Q1-B1-A7
catttcactcgacacacatcttcccaattgtgctattaagcttcgtggagtccacgactggttcaggtctcgtcaacgccgcgcgactgaggtcagattgttgatcgcaatcatcccggaggtcgctgggtcccgggctgaatgtcacatcacggtgggcgcgactccatgggacaccagtgacacctctcaagtgcatgcatggattcgttcagcaacatggctcacatgctcaagaatcaggtcagcaaagtcgaagagttgtcatcacgagcgacacttgatgggtcaagggcagtaggtgaccacgttgttgcacagcggtagttgtcgaatttcgataactatatcggattgtgcatctgcgttcagccttttatcgcccccc

SEQ ID NO: 6844 - DNA, 380 bp, Glycine max
  Clone ID: LIB3030-007-Q1-B1-A8
cttcctccgatggctaatctctcactcttgttcttcggtctcctcctattctccgctgccgtagccaccgtcgaacgaatcgacgatgaagacaaccttctgatccgtcaagtggtgccggacgcggaggaccaccacctgctcaacgcggagcaccacttctccgccttcaagacaaagttcgccaagacctacgccacgcaggaggagcacgaccaccgcttccgtatcttcaagaacaacttgctccgcgccaagtcgcaccagaaattggacccctccgccgtccacggcgtcaccaggttctccgatctcactccgtctgagtttcgcggccagttcctcggcctgaagccgctccgccttccctccgacgctca

SEQ ID NO: 6845 - DNA, 338 bp, Glycine max
  unsure (1)..(338): unsure at all n locations
  Clone ID: LIB3030-007-Q1-B1-A9
caagtttctctctccaacttggacgaatgaattagattcatcatcaagatgtcctccctgaaaacaaaagaatgtaagagcagattaaaagtgtaccaccgggaccaaatgttccaagttaaatccaaagagcctcccaaaggaatccccctccccaaacggcctcctccccccaaaggacatgaagaattccggctacaacagacaaaccggcttcgtctggctcaaacanaagaagagttacacccacaagttcgacaagatcggaaagcttgtctcctacgcgccccaaggtaactgctcatgtccaacaaggtaaaatttacanactcaccggg

SEQ ID NO: 6846 - DNA, 372 bp, Glycine max
  Clone ID: LIB3030-007-Q1-B1-B1
cagatagtgtgggagagagaagagcggaagagaaaatgacgaccaggttcaagaagaacaggaagaagagaggtcacgtcagcgccggacacggccgtatcggaaagcaccgcaagcatcccggaggtcgcggtaacgccggtggcatgcatcaccaccgtatcctcttcgacaagtaccatcctggtttcttcgggaaggtaggcatgcgctacttccacaaacttcgcaacaaattctacaatccgatcatcaacatcgacaagctgtggtccctcctcccccaggaggccaaagacaaggccaccgccgacaaggcacccttgctcgatgtcacccagttccgttactttaagggtttgggtaaagggg

SEQ ID NO: 6847 - DNA, 389 bp, Glycine max
  Clone ID: LIB3030-007-Q1-B1-B10
gaaaagattaacaataaaagtgtggagtactgttgatagcaaagatgtttgggatcttcgacaaggggcaaaagataaaggggacagtggtgttgatgccaaagaatgtgttggacttcaacgccataacctccatcggtaaaggtggtgttattgacacagccaccggcatcttaggccaaggcgtcagcttagttggtggagtaattgatactgccacttccttcttaggccgtaatatctccatgcaattgatcagtgctactcagactgatggcagtggaaatgggaaagttggaaaagaagtctatttggaaaaacatcttccgaccttgccaacgttgggagcaaggcaagatgcgttcagtattttctttgaatgggatgct

SEQ ID NO: 6848 - DNA, 398 bp, Glycine max
  unsure (1)..(398): unsure at all n locations
  Clone ID: LIB3030-007-Q1-B1-B11
ctctagagaattatcataccctttaagatgaaaccgtacctacgtccaatattcctattattccttatccttctcgaccaatccacttcggcgagtgcttctaatagtaggtttatagaattcttttcaaaattaaagaattcttttaatcctaagtctgaagaactaaaatcaaaagatataaagaagctcccgagcgtcgaatttttgaagaagaaacatgacggagttaaggacttctctcaagaagctatcctgaaactaccaattatacactggccgttcnncgatacaaaaataccaaaaaacttctggaaaccaaagtcncagaaaccaaagcaccctcncccaccgccagactaccgtgtacaactaaagtccgatcccccagcgccaaa

SEQ ID NO: 6849 - DNA, 393 bp, Glycine max
  Clone ID: LIB3030-007-Q1-B1-B12
ggaagaaccaccactaccttatccatttccactcctcaccaagccacaccatggcctcaaccaacgccctctcttcagcttccattctacgctctcccaaccgccagtctctgaccagaagagcgaaccacaacggaagagtaaattaccgtcaaccgaatagccgtttctccgtcaaagcctccgccaaagagattgcctttgaccagcattcccgctctgctatgcaggccggcattgacaagctcgccgacgccgtcgggctcactcttgggcccagggggaggaatgttgtgttggatgagtttggaagtcctaaagtggttaacgatggtgtcaccattgctcgcgccatcgagcttccagatcctatggaaaatgccggtgcagctc

SEQ ID NO: 6850 - DNA, 366 bp, Glycine max
  Clone ID: LIB3030-007-Q1-B1-B2
gtgaggtctgattcgggtccattgtccctgcaaaagcacaaccattggtgtgtgaagttaggagtctcaatcttcttggtgggtcttgtcgttcgccttctcttgtgggattcattcagtttctcatcagtggtggtggagacacctcctcctctggaagaggcaaaagcagagtccccggttttcgcttcctctgttcttcaggattctgatgacttcccagaaaatgatcagaaccagacacaaatctccaagaatgaaaaatgtgatctttttgtgggaaattgggtgcaagacctatctgggccagtgtacactaatgagagctgccgtgtgattgagcctcatcaaaattgtatgaaaaat

SEQ ID NO: 6851 - DNA, 361 bp, Glycine max
  unsure (1)..(361): unsure at all n locations
  Clone ID: LIB3030-007-Q1-B1-B3
ggtataccatttgaaaatggcttcttgtgtgtcatccatgtcttctaccatcctcatcctaattgccatctgcacactgtcctcacttctgtcagctgcatctgcagcaacagaggagggacgaacaaggcccttcaaaagggtctatgcctttggagactctttcacagacactggcaacaccaaaaatgccgaaggtccaagtggctttggtcatgtttcaaactctccctacggcaccactttcttcaaccactccacaaacaggtactcagatggtaggcttgtgattgattttgtagctgaagcactttcactgccttacttgcccccctaccgtcacagcanaggcaatgacact

SEQ ID NO: 6852 - DNA, 364 bp, Glycine max
  Clone ID: LIB3030-007-Q1-B1-B4
aggaaaaaacgaaagctcatccaagggttcccctccccgttggaaacgggtcctccctcccccccttacttcccgaacccagacgggaccccatccttccaaaattctttctccccaaatcccaaaatcctaaaccgtcacgcctcctgacggtgcgcgcggaggtgaaagagacctcctccgccgccgccaccaccaccaggaccacttcctccgacgacaagatccgcgaaatcctccgcaaccgcgactacgacaagaaattcgggttcagcgtggacatcgagtctttgacaatcccaaaagggctctcgaaagaaaccatccgtctgatctcgtccctgaaagaggagccccagtggat

SEQ ID NO: 6853 - DNA, 376 bp, Glycine max
  Clone ID: LIB3030-007-Q1-B1-B5
gtggccatgaaggtggtgggaaaagaaaaggtgataaaggtcggaatgatggagcaggtgaagagggagatctcggtgatgaagatggtgaagcaccaaaacatcgtcgaactccacgaagtcatggccagcaagtccaagatctatattgccatggaactcgtccgcggcggagagctcttcaacaaggtctctaaaggccgcttaaaggaggacgtggcaagactctaattccagcagttaatctccgccgtcgacttctgccacagccgcggcgtctaccaccgcgacctcaagccggaaaacctcctcctggacgaacacggcaacctcaaagtctccgacttcggactcaccgctttctccgaacacctca

SEQ ID NO: 6854 - DNA, 382 bp, Glycine max
  Clone ID: LIB3030-007-Q1-B1-B6
ctctcttcaggtcaccatctagactgcaatcatggctgatggaccacagcatccatcagttgttcagaagctagctggacagtcttacctggtgtccaggcttagccccaactttaactctaggaattattctgcaactggttcttacgtcaatggcggaatgcactcgcctgggttggctgttgtgtcacctgtatcgccagttactgtgcatgctccagcagagaaaggagtgagtggatttctagtggattttctgatgggtggagtatccgctgctgtatcgaagacagctgctgctccaattgaacgagtcaaattgcttatccaaaatcaggatgaaatgataaaaagtggtcggctatctgagccatacaaggga

SEQ ID NO: 6855 - DNA, 376 bp, Glycine max
  Clone ID: LIB3030-007-Q1-B1-B7
gagggaaaaaccgattaccgtgccaggattcggttgattaatcaggacaagaacaaatataacactccgaaataccgatttgtggttcgctttagcaacaaggacattgttgcacaaataatatctgctagcattgccggcgatttagttcttgctacagcatattcacatgagctgccacgatatggtcttgaagtaggacttacaaattatgcagcagcttattgcactggtctcctgttggcccgaagagtcctcaaaacacttgaaatggatgaggagtatgaaggaaatgttgaggctactggagaggattattcagtggaacctgccgagagcaggaggccattccgtgcactccttgatgttggtcctg

SEQ ID NO: 6856 - DNA, 366 bp, Glycine max
  Clone ID: LIB3030-007-Q1-B1-B8
ttccattctctctgtgtatttccctacctctcccttcaagatgcagatcttcgtcaagaccctcaccggcaagaccatcacccttgaggtggaaagctctgacaccatcgacaacgtcaaggccaagatccaggacaaggaaggaatccccccggaccagcaacgtctcattttcgccggaaagcaacttgaggacggccgtacccttgctgactacaacattcagaaggagagtactcttcacctcgtcctccgtctccgtggtggcatgcagatcttcgttaagacactcaccggcaagaccataaccctagaggttgaaagctccgacaccatcgataacgtcaaggccaagatccaggacaa

SEQ ID NO: 6857 - DNA, 236 bp, Glycine max
  Clone ID: LIB3030-007-Q1-B1-B9
catgcactcctgatcaagctccgaattcagcacatgacggcagggaacaaggggaaaagcaaatgcggagtctaaagtaacaacgccgtctcgaaaacctaatgattttccgtcctgtattcagagcgtgcctccttcctccgtccctataaccatccacgccaaacctggtgccaaatccgcatctataactgatataagccgacaagcggtgggagtgcaaattgacgcacctg

SEQ ID NO: 6858 - DNA, 301 bp, Glycine max
  Clone ID: LIB3030-007-Q1-B1-C1
gaccttttagcttccatgtagaggtttatgtatgtatatatttttctttttctttttttcccatctcatgtaaggtataatctttcttctgctctatttaattttatttattcaatgaagtgtatcttctttgttgttttatttgtttgaaacgagcattttaacgtgtcttcgaatgaatgggatgaacgagtatcttgcttatttgtaagcattttctagatttacgagtggcaataacgtatcagcttaacactgtatattcattttagcttattttgaaaaaataaatcgttttatt

SEQ ID NO: 6859 - DNA, 391 bp, Glycine max
  Clone ID: LIB3030-007-Q1-B1-C10
atcattgcccggctgcttccaccggaagatccgaatccgcaaaatggatcaatctccggagcggtgttcaacataacaaccaccatgatcggtgccggaatcatgtccattccggcgaccatgaaggttttaggcatagttccggggttggtggtgatcgtgttggtggcactgataacagatgtgactgtggagtttatgctaaggtacacaagttccggtaaatcctctacttacgctggcatgatggcagagtcctttgcctccataggatccctcgccgttaagatttgcgtcatcatatccaatttgggggtcctcatcatctatttcattatccttggagacgtgctctctggaaacgagtcgaacggaatcacacacttgggta

SEQ ID NO: 6860 - DNA, 392 bp, Glycine max
  Clone ID: LIB3030-007-Q1-B1-C11
ttcttctcttcgatccactacgtgcctgatcctctgcttcaggcacatactcccgcaggttaaatggcgaggatcaaacctcaggctctgctacagcaaagcaaaaggaagaagggtccttctcggataagtgccgtgactgttatattttactttttgattcttgccttggttgggtttttcctgtttgcttcgtacagacattggtccagcagatcaagattacaatccgaagatcacttgtcagtctccgagggtgaaaatacttttgtggactccaagaaatctgagctgcctggatatgctgttttaaatacctctaaaggttctataataatagaactgtacaaggaaagtgctcctgaagttgttgatgaattcattgacttatg

SEQ ID NO: 6861 - DNA, 389 bp, Glycine max
  unsure (1)..(389): unsure at all n locations
  Clone ID: LIB3030-007-Q1-B1-C12
ggaagaatcactcccttatccatttccacaccacaccatggcctcaaccaacgctctctcttcagcctccattctacgctctcccaaccgccagtctctgacccgaagagcgaaccataatggaagagtaaattaccggaaaccgaataaccgtttctccgtgaaagcctccgccaaagagattgcctttgaccagcattcccgctctgctatgcaggccggcattgacaagctcgccgacgctgttgggctcactcttgggcccagagggaggaatgttgtgttggatgagtttggaagtcctaaagtggtcaacgatggtgtcaccattgctcgcgcaatcgagcttcncgatcctatggagaatgctggtgcagctcttatcagag

SEQ ID NO: 6862 - DNA, 360 bp, Glycine max
  Clone ID: LIB3030-007-Q1-B1-C2
gtttccagagttttccaacttatcaatccacacaacttcattcattcagagaaagaacaaaaatgatcgagctgttcctgtcggaaccgaattggaacgacgtcgtaaacgacgacgattcaactcgttcgagaatctccattctcaacgacttggaaaccgttatttggtctacggtgggtcgctccgaggcgcggttgtggctctgcaacactgtcgcgggattgaactgcgtaacttccctcgattagcgtgacctgtttcggaatttgctcagaaccagtggggtgaagcgggatttggcctctcagctcctgcatttgatgttcgacacggcgccgcacaaaccacgttccgttt

SEQ ID NO: 6863 - DNA, 249 bp, Glycine max
  Clone ID: LIB3030-007-Q1-B1-C3
ctcgagccgctcaattttgctttgtaaaccaactcagacacgcagatcgatcgattcgtcaacgcgtaatttttggaaggaaaagcccacccccacccaggtgagtgatgtgcaatgcatagatcacgtgaagctcttctacatagaaggagagctaaaactgggtctggctataaactctctcactcaatgcgttttcatttgtggcctctaatcttccgcgctcatggataccccgcacccacagag

SEQ ID NO: 6864 - DNA, 382 bp, Glycine max
  Clone ID: LIB3030-007-Q1-B1-C4
aaaggcaacattaggcaatttcagagtattgtggatgagaaattgaaagaaattggacctctgcagcaagcactgggcaagctgaggactacaaataatgccggtcggggtggtttgtgttcatctgaggatgaacttaacagtgttatatatagtttacagtaccgcatacagcatgagagcattcctttgactgaggaaaaacaaatcctccgagaaatcaaacagcttgaggggacaagggagaaagttattgctaatgctgcaatgagggccaagttacaggaatctatggggcagaaagaaccattcaagatcaggttaagcttaatggtggggatttggatggagtgaagaaagagagagaagccattcggtcaaa

SEQ ID NO: 6865 - DNA, 383 bp, Glycine max
  Clone ID: LIB3030-007-Q1-B1-C5
tcaagattcaggtactgcgtttcggaagcagacacagatggctcgtacgaagcaaaccgctcgtaagtccacaggaggaaaggctcctaagaagcagcttgcaaccaaggctgcacgtaagtctgcaccaactactggtggtgtgaagaagccccaccgttatcctcctggtaccgttgctcttcgtgagattaggaaataccagaagagtaccgagcttttgatccggaagctccccttccagaggctggttcgtgaaattgctcaggacttcaagactgatctgcgtttccagagccacgccgtgcttgcattgcaagaagctgctgaggcataccttgttgggctctttgaggacactaacctgtgtgccattcacgcca

SEQ ID NO: 6866 - DNA, 350 bp, Glycine max
  Clone ID: LIB3030-007-Q1-B1-C6
gtgtaagataagagggcagccaacaagaagcaaaacactgaaacaaaagcaaaaaagagctgtgagacagtgatggctcacggtgcttacagcaagcggcgcgtgagcgcaacgcgtcgatccaactccaagcctctgggcatcgccaagaagcccaagcccaagcccaagccctccgtttccctcaaaaaccagattcgatcccttgagcgcatgctccgcaagaatctgcctcccgaggtgcgagacgcgcaggaacagaagttggaggcgctgaagaagcagcaggagattcacactcgcctcgccgccgaacgcaagatattcttacgcgaccgaaagatcaagtt

SEQ ID NO: 6867 - DNA, 367 bp, Glycine max
  unsure (1)..(367): unsure at all n locations
  Clone ID: LIB3030-007-Q1-B1-C7
cttctgcgaagataactagaatgaggaaccaggatgatgttgtgaacagtattagggcgatgctggagaaggcagaggcacccgtaactgatgagtgttgcatctacagagtcccctttgatatccgcaagctcaacgaagatgcctacacccccaaggtcgtttccataggcccttttcaccacaaaggcaatcctcgccttcaaaacatggagaaacacaaactcatctattgcaacgcatttcttaaacgttccaacacaggcttggagacctggatccgctacatacaggacgtagagccccgattccgtagctgttactcagacgcccttgagttcaccaatgangagctgctgaaaatcat

SEQ ID NO: 6868 - DNA, 394 bp, Glycine max
  Clone ID: LIB3030-007-Q1-B1-C8
taataatcacttggaaacaaccgcgctaaggttggaacttggaggaacttgtgtctgtgtgtccttttttccagagtcatggctatggctttgagtctctcccaattccctgttcgtgggtctgtttctttgcccaaaagaagactacccagaagaagcttttgcattaggggcatgtcagaaacctcttccacttcttctgtgagcacccaacaagaacaaccaacttctgataatgcttcttcagtgacaattgctcctccccctaacttcaagccccctgagcctaaacgctttgcaattaggcctgataagaccagtgaagtgtttggagctttgcttcctttgatctttcgttttgccactggagttttcgtttctgggtaatcctttt

SEQ ID NO: 6869 - DNA, 394 bp, Glycine max
  Clone ID: LIB3030-007-Q1-B1-C9
catcgttctccctctccctccctctctctctctctctctctctctctctctctctaagctctttcttgttgaaactgtgagtctatgttatttgtggcggagcatgaactccaccaccaacacttcgaattctcagtcaatggctgcagcagcaccgagtgatggttctgggaagaaggtaagaaagccttacaccataaccaagtccagagagagttggactgaggaagaacatgataagtttctcgaagctctccaactatttgacagggactggaagaaaattgaagattttgtaggttcaaaaacagttattcagattcgaagccatgcccagaaatacttcttgaaagttcaaaagaatgggactgtggcacatgtgcctcctccccgt

SEQ ID NO: 6870 - DNA, 388 bp, Glycine max
  unsure (1)..(388): unsure at all n locations
  Clone ID: LIB3030-007-Q1-B1-D10
tcccaatcgattaaattaactatgaagcctaccctactattatcnctttccttcctgcctctctttgctttcctggctctttcagaagatgttgaacaagttgtggacataagtggcaaccccattttcccaggtggcacatattacattatgccatcaacttggggcgctgccggtggtggattgaaactaggccggacaggaaactcaaactgcccagttactgttttgcaagattactcagaaatcttccgtggcacaccagtcaaattcagcatacctgggataagccctggaatcatctttacaggtactccacttgaaatcgagttcgcagagaaaccttattgtgctgaatcctccanatgggtggcgtttgtggacaatg

SEQ ID NO: 6871 - DNA, 391 bp, Glycine max
  Clone ID: LIB3030-007-Q1-B1-D11
ctcggacccggcaccggcatgggtcaagcttttcgaaagctctttgacaccttcttcggcaacaccgagatgagggttgtgatgcttggtcttgatgctgctggcaaaacaactatactttacaagtttcacattggagaagttttatccaccgttcctacaattggtttcaatgtggagaaagttcagtataagaatgttattttcacagtctgggatgttggaggacaagagaaactaaggccactttggaggcactactttgacaacacagatggcctgatttatgttgttgatagcctggaccgtgagagaattggtaaagcaaagcaggaatttcagacaatcataaatgacccatttatgctcaatagtgtcatcttggtgtttg

SEQ ID NO: 6872 - DNA, 394 bp, Glycine max
  unsure (1)..(394): unsure at all n locations
  Clone ID: LIB3030-007-Q1-B1-D12
aagctcaacccgctaaaagctgttaaaaaagtggcaaagacagagaaagatgctcaaataagacttcaactctatgacccatcggaatttcatgtggtgaacccattgaagaagacaaggatatggaaccctgttgggtacaaattggttccaggtgccacagcagctagcctgctggatccagaagatcctccacagaaaagagcagcttttacaaacaatcaaatatgggttactccttacaacagaagtgagcaatgggctggtggtttatttgcttaccagagcanaggggatgatactcttcaagtctggtccaacaaggatcgtccaattgagaataaagacattgttttgtggtacacaataaggttccatcatataccctgtcaag

SEQ ID NO: 6873 - DNA, 383 bp, Glycine max
  Clone ID: LIB3030-007-Q1-B1-D2
ccctgcaggtggaatctcaatggccacgcttagcttcggcatcgccacgacatgtctgagtgctgccgctgattatcgtagaagaagcaactggaaatggagcagacccagaattgtgtgtgttggatgggacccggaaggcgtgcttggtccaccccaaactgggcacctcgccaggttcgagtttaagaggcgcctcgagagagacgcagatgcccgcgaagccttccaacgtcaagtccgtgaagagaaagaacgccgtcaatcccttcgacaatctcgtcctcttcccgatactccgcaagacctcattgaatacttccttgacactgaagctcaggagattgagtttgagattgcaagaatgagaccaagattgaatg

SEQ ID NO: 6874 - DNA, 111 bp, Glycine max
  Clone ID: LIB3030-007-Q1-B1-D3
gacaaataaggagactagagtacgtactacctagtccactactgcttaattatgtacgtacgtgtctgttatttcacttttataagtaatgaatatgaatattatgttatt

SEQ ID NO: 6875 - DNA, 393 bp, Glycine max
  Clone ID: LIB3030-007-Q1-B1-D4
gttgacctgtaattttcttggtctactgaacagtttctcaagtttgctcttctgggttctcttattagcttctctctttgcactgctaatacttgtgagttgtgatatcttgattagaggaatgttttccattaagtggagttattcacattaaactcttgggctgttagtgcattgtagcaaatgtccttccgcagtattgttcgtgatgtaagggatgggtttggaagcttatcaaggaggagttttgatgtaaggatttctggtgggggcaagttgaatagtttggtccatgaggcgcatgaacgccagctagttatacagaacagcaggtgggctagccttccgcctgagcttctttgtgatgttattaaaagattggaagaaagtgag

SEQ ID NO: 6876 - DNA, 385 bp, Glycine max
  Clone ID: LIB3030-007-Q1-B1-D5
tgatttcattagtaatcttcccaaggaaattattgtcacttatcctcaaatcaattttctggccacattccaacagagattgggaagttgaccaatttagaaaaactcgttctgtcatccaatggattcacaggagcattgccacccgtgctttccaagttaaccaagttgattgatttgaggataagtgacaataatttccttgggaagattcctgatttcattagtaattggacattgattgaaaagctgcatatgcacggttgctctcttgagggtcccataccttctagcatttctgccttgacaagattaagtgatttgaggataactgacctaaaaggtagtaaaagctcagctttcccaccactaaataacttgaaat

SEQ ID NO: 6877 - DNA, 399 bp, Glycine max
  Clone ID: LIB3030-007-Q1-B1-D6
gccgttcctaagtgctgatgatccatctagagaattcaatgactttcgtacaaagctagctggattgactagtgtgactagaaactactttgagaatttagtaagggcattagagaatggtctatctgatgtgggaagtaatggagctgccttcagcaaagcaacgagctcaaaaaatgctgctggtagcagtaagggtagagctggaagaggaaagggaacttttcgaactagcttgtccagcaaattgaatgatgatagtcattggtattgtgagcattgtacctatgcaaatgtcaaatctgcctccacatgccagatgtgctatcaacaacgtcgatgaaaacttggttctccatttgaagcacttgtctcctgcccaaggcctctgcaccaaaa

SEQ ID NO: 6878 - DNA, 380 bp, Glycine max
  Clone ID: LIB3030-007-Q1-B1-D7
cagaaaaccacccctctctctctaagcacagcctaagatgtcttactcatgatttcctgctatctcaaattgctgctacaagcaagaagaagtggagtctgattgaactctgaagtgggcagaatgcgttttgaaatcaagtggaccttgagtgcttaccgtagtgtacaattttgaattgctttgccaatattgctgggtgaattgatacagtgggaggcaatcaatagttgtaacttggatattcttaaggaaatgtaaacttgataagttggagctccaccaaagtagtaaagatacattccaaagatgatgaagaaacaattgacaggcatacggggtgattctcccctacaatcggcaatccgagttggaaattt

SEQ ID NO: 6879 - DNA, 378 bp, Glycine max
  Clone ID: LIB3030-007-Q1-B1-D8
ggcgtgccaaggtcttgttaattttgagcgttaagtgctgcaactaatcagatcccaagaccttggcctaccttgccatacagaaaaaaaaaaagcaaaaaaaaagccaaggtttggagccaacaaaaataaacacaaagcacaagtcatggaaagaataatggttggaagtgcaacaaaggttgctttcaccctcttggccactttcgccattgtcattccatgccttgaggctggcattgctgagtttgacgattttctcaaagcccaagctgatgaagcccataaaattgctcttgattcctatgtcccagagccccacgatgtcgcccatgaactcaatttccatgttcatatggcactggaaaactccacaag

SEQ ID NO: 6880 - DNA, 394 bp, Glycine max
  Clone ID: LIB3030-007-Q1-B1-D9
ctccggtgaaacagaaacagagagagagagtgagaaaaaacgaaacgatggagggaggagtctcctacgcgcgcatgcctcgtgtcaaaatccgcgagctgaaggacgactacgccaagttcgagctccgcgacaccgacgcgagtatagccaacgcgctgcggcgcgtgatgatcgcggaggtgccgacggtcgccatcgacctcgtggagatcgaggtcaactcgtcggtgctcaacgacgagttcatcgcgcacaggctcggcctcattcccctcacgagcgagcgcgccatgtccatgcgcttctcacgtgactgcgatgcctgcgacggtgacggacagtgcgagttttgctccgtcgagtttcatcttagggtaaagtgcatgaccga

SEQ ID NO: 6881 - DNA, 373 bp, Glycine max
  Clone ID: LIB3030-007-Q1-B1-E1
ttcttgtcctagacaaaaagcaatgttggtatcaagggaacaagcactggctaaatctgtgccagcagccacaatccaattgttgtctgaatcacgtaacaatatttggaggatagactttgtattcaattccaacttttatgttgtaggtgtcaaagaagctcccagtgccccatgtgttggcagcctatcagtctcaaagatccaacaagccaagaattacttgaggcagtggaaagagagcgaaactttaggttcaatccatctagaaatgccacaatatttcatcatccaacactgggggattttgagttacaacatttgccagttggagctagtgacgctgatcttgaagagcgtataatccaacact

SEQ ID NO: 6882 - DNA, 392 bp, Glycine max
  Clone ID: LIB3030-007-Q1-B1-E10
gacattctgttggtgattgtgagtgagtgtatcaatcggccacacagaaatgggcagtgcttctctgattccagtttcctggttgccttggcggccactttctcctttcaagggaacggtgaaaaccttggtcgcaaaaccatggctgaagaagattcagcaagcatgacccctcatttccgtggttaacaaggctgcctctctatcttcccccgtgacagcacccagcgtctgcgttcggtttcggctggacaatttggggccgcaaccgggttcgaagaacagggctaagagaaatggtataggaatatccgcatggcaatgggcaagttgtggttttgggatgagaggtcagaaatctcgatctggacctggcgttaagaatggtttca

SEQ ID NO: 6883 - DNA, 389 bp, Glycine max
  Clone ID: LIB3030-007-Q1-B1-E11
tgacatcgctgttaggcttttggagccactcaaggcggagttccctattttgagctacgccgatttctaccagttggctggcgttgttgccgttgaggtcacgggtggacctgaagttccattccaccctggaagagaggacaagcctgagccaccaccagagggtcgcttgcccgatgccactaagggttctgaccatttgagagatgtgtttggcaaagctatggggcttactgaccaagatatcgttgctctatctgggggtcacactattggagctgcacacaaggagcgttctggatttgagggtccctggacctctaatcctcttattttcgacaactcatacttcacggagttgttgagtggtgagaaggaaggtctccttc

SEQ ID NO: 6884 - DNA, 390 bp, Glycine max
  Clone ID: LIB3030-007-Q1-B1-E12
agagagataggtcaattaatcaagaaataaagagcaaattaaagcatacccagtatggtgcactgtgtggtcttagcatatccagctcaaggccacattaaccctatgcataatttctgcaagctcttgcaacatcaatgtgtgaaagtaacactagtcaccaccctttcctacagcaagaacttgcataacatacctgcttctattgcacttgagaccatttctgatggttttgacaatcgtggatttgctgagtcaggaaactggaacgcctacttggaacgtttttggcaagtaaggccaaatactcttgctgagcttcttgagaaacttggtagattaagtgaccctgttgattgtgttgtttataattcattcttcgcttgggct

SEQ ID NO: 6885 - DNA, 378 bp, Glycine max
  Clone ID: LIB3030-007-Q1-B1-E2
tggtggcttgcgaaacatgaagaggggcactgtgttatgcatgttcaatggcatgtcattgtgcttcttacaatgccttttcattttcaccaaccagagagttcttcgccaccaaccacatcatgtcaaaaccatcatccactactactagatgcagaccctttctcttgtccatcaccaatgccacaccatcctacaacacccttgtttctgaggctgttaggctcttggttccttcagcaagatttgaaccttcaaaactgaaggttgttctattggaagatcagataaacaaacatgcaagttttactcctagaacctacattctatcccattgtgactttacagctaatctgactttagctgtgtccaatgtga

SEQ ID NO: 6886 - DNA, 391 bp, Glycine max
  Clone ID: LIB3030-007-Q1-B1-E3
aaaaaaaattcataaatttcataattagggatgatgcataattgaaagaaattaaattatttttaaattttataattagggttatgcataattgaaagaaattaaatcatttttggagaattataaatttcataacacacgctctgatatcacatgtaaaacttgaagggttttctagattatcaattatagaaaaccaatagaatcttgaaacttattattctcacaaacaatagataaacaaataatatagataaacaaataatgcgtacctctccggtgtaatttgatttccttggaagaggagagaaataagatttcacttccttagacttttttttgtctgcctctctctgttcgtgatgattataagtgagagagaacacttttc

SEQ ID NO: 6887 - DNA, 349 bp, Glycine max
  Clone ID: LIB3030-007-Q1-B1-E4
ccccctcttgcaaaacctaattttcatttcttccctcaaatttcaaaatgcgtgagatccttcacatccagagtggccaatgcggcaaccagatcggcgccaagttctgggaagtggtttgcgcggagcacgggatcgaccctaccggaaggtacggtggggactcggagttgcagctcgagaggatcaatgtctactacaacgaggccagttgcggtcggttcgtgccgcgcgcggttctcatggacctcgaaccgggcaccatggacagcgtccggtccgggccgtacgggcagatcttcaggcccgacaactttgtgtttgggcagtccggggcaaggaacaactg

SEQ ID NO: 6888 - DNA, 359 bp, Glycine max
  Clone ID: LIB3030-007-Q1-B1-E5
cagtgggagccttaaacattatattttcgagcttaaatagtactagcaccatatttaagtggcagactaattagaaaattttcatgtgccttggtagcaagttttgttattagataataaatcatttttttattttgtgttttggtaaagaatactatagacagatgcattttcatgttccaaagagtcgtgtgctgttctaactaaactcattttgtttgatcatatagaacaacttttaaattttttaatgagccatttacgaatgtgaaaatgagcatttttagcctagaattttcatatagatgtggttctgtagcaacctgattaaagggttcatttgcctcctaattatgttg

SEQ ID NO: 6889 - DNA, 378 bp, Glycine max
  Clone ID: LIB3030-007-Q1-B1-E6
atcgagacacagatcatagtgatcattttttaatttctcagatttatccgacgtcgctgcagatccaccaaccgttatggctgccttcagcggtgatgaaacggcaccgtttttcggcttccttggcgccgcagctgccctcgtcttctcctgtatgggagctgcctatggcacagcgaagagtggcgtgggcgtggcttccatgggtgtaatgagacctgagctggtgatgaagtcgattgttcctgttgtcatggctggagttttgggcatttatggccttattattgctgttattatcagtaccggtattaatccaaaggccaaatcctattacctctttgatggttatgcacatctctcttctggtcttgcctg

SEQ ID NO: 6890 - DNA, 353 bp, Glycine max
  Clone ID: LIB3030-007-Q1-B1-E7
gggtattcacggtctcggaggaagattgggaaccagagtcgtcgatcctcatcctttgaaattcgatcatgcggctcagttctttactgtcagcgattctcgcttcgctgagatcgtcgacgcgtggatggagaagggtttggtgcgcgagtggctgggtaccgttggagaccttaacaatggtggtgaatttgttccctttctaccctctcctgcgagatatgtcgccaccaaaggaatgcgcttccttgctgattctttactgtcgcatagtcgcttggttaatgtggtgaggccgtgctggatcagtaaattggagccgttcaatgggatgtggcacttgagtgaaaatg

SEQ ID NO: 6891 - DNA, 110 bp, Glycine max
  Clone ID: LIB3030-007-Q1-B1-E8
gaatgtttggcctgtgttcatggtacttgtagaagattagatgtgcagttattgttaccaaagttatactttgatataatgatgcgattttcgtctgtggttgctcgaat

SEQ ID NO: 6892 - DNA, 378 bp, Glycine max
  unsure (1)..(378): unsure at all n locations
  Clone ID: LIB3030-007-Q1-B1-F1
gcccgaatatggcaccctcaatctccgacgaaatgccaagcaccaccacctctctcctccgccgcaaccggtggctcccctccagcatcaaactgaaaacaacccttttctcagaactctccggcgcggtgggtgacctaggcacctacatccccatagttctagccttatccttagtgaacaacttggacctcaccaccacactggtcttcactgctctctacaacatcgccaccggtctcctcttcggcctcnccatgccggtccagcccatgaagtccatcgccgccgtcgccatctccgcagcgcnccccctcaccatcncccaaatctcggccgctggcctctccgtcgccgccgtgctcctcctcctccgtg

SEQ ID NO: 6893 - DNA, 395 bp, Glycine max
  unsure (1)..(395): unsure at all n locations
  Clone ID: LIB3030-007-Q1-B1-F10
ccaactatcacataatttaattaatccgttaaatgccaactgatatataaggataataaccaattaaggaaggaaaataatttaagttaaatcaaccaagggaaacaaggattaacgttgttccaacaattcaaccattatcaaaacaacaaagaaaagaacgggtagaagaagtccaacatcggataagctcaagaatcaacaccgcgagaagcagtcgatgaaaccttaccgtggaataaggatgcgggagttgggggaagtgggtggcggagatcagagaaccnaacaaaaggtcnangatatggttgggttcttacacgacacccgtggccgccgcacgtgcctacgacaccgctgtcttttacctccggggttccaccgcgcgccttaac

SEQ ID NO: 6894 - DNA, 397 bp, Glycine max
  Clone ID: LIB3030-007-Q1-B1-F11
ccgagtggttatagaaggcttcaagagaagcttgtctcggacattttggatatcagtgagttttcgcacggtcctttgaggttgaaggagtctgaattctgttctgaggagtttgaaaactttgttccttgttacaatatttctgaggatgtggaattgggagtttctgataacaatgaagtggaccggcaatgcagccacgagcttaggcagaattgtttggttctgccaccggtgaattacaaaattcccttaaggtggcctactggaaaagatgttatctgggttgctaatgtgaagatctcagctcaagaggttctttcttctggaagcttgacaaagaggatgatgatgctggatgaagaacaaatttcatttcgttcagcttctcatatgt

SEQ ID NO: 6895 - DNA, 401 bp, Glycine max
  Clone ID: LIB3030-007-Q1-B1-F12
ttcaagacaggccagctttggataaggagaaagtctaccctgataataaggtgccatcctttggacaaaatggcaaggtgttgggagaaagtccgtgatttgatcaaatatgtagattgcacacttttgaacggacacctttgtttcccagtgatcctgccatgagagatttcggtgagcaattgatatcccatgttgatacattcagcaaagacctgttcgtttcattgaaaggggatgctgtacagcaagccattcccgcttttgaatacttggagaatgctcttgtaaaatttgatgatgggcaattctggcttggccaattcagtttggtggatattgcttatattccatttgttgaaagattccaaattgtctttgctgaggtgttcaaacatgac

SEQ ID NO: 6896 - DNA, 398 bp, Glycine max
  unsure (1)..(398): unsure at all n locations
  Clone ID: LIB3030-007-Q1-B1-F3
ggcacagctggagaaactgaagaagtatgctactgtggttcgtgttttggctcacacccagatcaggaaaatgaaagggttgaagcagaagaaagcccatatcaaggaaattcaaggtaatggtggtactattgcacagaaggtggactttgcatacagtttctttgagaaacaggttcctattgatgccgtgttccagaaggatgagatgattgacatcattggtgtgaccaagggtaagggttatganggtgttgtcactcgttggggtgttacccgccttccccgtaagactcacagaggcttgaggaaggttgcttgtattggtgcctggcatcctgcaagagtttcattcactgttgccaaagctggtcagaatggataccaccaccgaactg

SEQ ID NO: 6897 - DNA, 377 bp, Glycine max
  Clone ID: LIB3030-007-Q1-B1-F4
acccattgtgattatgattcgcttgcaattgtcaaccagttcattaatggagaggaatacagaatttttgattgaatgcatggatgacttgtcactagaacaacaaaagttccaattctactatcggagcctgtctcgtcaacaagctcagcagcaagcatggcttcaaaagagaagggcggagaacatggctcgtaaagcgctggagaagaacctttgaaggatcttcctccggcaaaggttcttctccagcagctttaccggaggaagatccttcaaatccaattttcaagccgctcccagagccatcccggttggagagcttcctcataacaaatcaaattttcaactactgcaatcaaatcaatggggtgtca

SEQ ID NO: 6898 - DNA, 386 bp, Glycine max
  Clone ID: LIB3030-007-Q1-B1-F5
aaagaaaagaaaaagggagaaggagtgagaataacatgaacaaacaactcacgctgctctgtctctttatcctcttctcatttctcagtgtaagcacagcttttcctcactgtcactgttccaagtctcgatttttccaattgttttattcctcccattgccagttctgaaatgggtgtgtgttcattcaatgcaggtgggtttcgccggcgccggagacgcggcggagaaaaaccctttcaccccaaaagccttcgccattcgttattgggacaaagagatccgcagcgggttggcgaagccacagtttcttctgtctaaggcgtcgccgctaaacgcggcggaggcggcggcgtttgtgaagcttgcctccggcaacgcgctct

SEQ ID NO: 6899 - DNA, 401 bp, Glycine max
  unsure (1)..(401): unsure at all n locations
  Clone ID: LIB3030-007-Q1-B1-F6
aaaattcagagttgatccacctctaggggagccaaataagttcattcctgcacctcaactcaagtgcttcagttatgaattctctgctgagaggtttgaaataaccccaggtcatggacaagctgctgcttgtgacctgtgtggtgttagccaagattattctgatggattgaaacttggccttggattgtataatcctggaacatctgaggtcgggcctagtcaatctaaggacgaacctgagacagatgaaattaatgatgcagattggagcgatctcacagaagcccagctggaagaacttgtcctgactaatttggacacaattctcaagagtgcaattaanaaaattgtagcatgcggctacactgaagacgttgctactaaggccattttaagac

SEQ ID NO: 6900 - DNA, 393 bp, Glycine max
  Clone ID: LIB3030-007-Q1-B1-F7
gcagaatacaaagaaaaatgcgaaagcacgctcgaagaagccctaaagaaggaccccaaattggctcaacccaaggatcttatcatggtgtcaatgattcttgcggagaaggaggttaccaatgccttcgatggaactgcaaagatgatgggcaatgcgtccgaggaagagaagggtgcgtacgaggattgcaagggtttgttcaaggacgccaaggaagagcttgagctgtcgatcaccgaggttggcgacaacgacgcggacaagctctccacaaagggtgctgaactgaacaactggctcagtgcggttatgtcttaccaacaaacctgcattgatggtttccccgaagggaagatcaaggatgatttcaccagcatgtttactaactct

SEQ ID NO: 6901 - DNA, 395 bp, Glycine max
  Clone ID: LIB3030-007-Q1-B1-F8
atgataatcatctctactgaccaaatctgaagaaaattgctttctctttggttcctagctcgcactctctctacgcacgcctcaacatcccttctctgctccattcattatgtctccgtcgttggatcttccccccaagggtggcttcagttttgatctatgccgaagaaacgcaatgcttcaaaacaagggcctcaaagccccaacctttctcaaaactggcaccactattgtcggtttagttttccaggatggtgtcattcttggggctgatactagggcaactgaaggacctatagtggctgataaaaactgtgagaaaattcattatatggcacccaacatatattgctgtggagcaggcacagctgctgatacagaggctgttacagaca

SEQ ID NO: 6902 - DNA, 395 bp, Glycine max
  Clone ID: LIB3030-007-Q1-B1-F9
aagccttaagaaggcaggcaaaatcatcaaataagcaaccagaaaaagatctgtatgctatcatatcacaacgcaaacatgagaggaaagaccgctttgattctatgttctcatctctaatttcaaagtatggtgggggtcaaatgccagaaccctctgaagaggaatttgaagctgcacagagaaaggtggaaagcggaaggtcctcaaaaaagtcgaagcaaaaatagcaaaggctgtgtacaattcgtttgagtgcgaatgatacttcatcctttgttagtggaaattcttcttttctgagtatgggaagttagctattttcatgtgtatgttaatagtaccggttactgtcaatggtgaaatagccgcaactttcctgaaagttttaggga

SEQ ID NO: 6903 - DNA, 138 bp, Glycine max
  Clone ID: LIB3030-007-Q1-B1-G1
tctgcttcgtgtgaggcagatattcaatgaatgccaaccaaccccacgcttctggggagccggattggcccatgggagcgtggggttggcgggcaggcattggcggggctgggtcgccgggggggcggtcggggggcg

SEQ ID NO: 6904 - DNA, 422 bp, Glycine max
  Clone ID: LIB3030-007-Q1-B1-G10
gctagagtgatacaacaggtacatcaggtagactcagacggcacgatggctcctgcaagcgcctacctcatatgactcgatcttctagtgcacactatgctgaggtcgcactgcatcactgcgtcttcagtcttcgaggttcaacgtattcggctgcatcgccagtagacttcaccatcgtaggccatctcgagtcgcagtccgagttccacacctcttactgctcattcgcctcctgggagaagcaggtccgccactcctccacccctcgccgccccaacggcctcaccgtcctcgtcaccggcgccgctggcttcgtcggcagccactgctcccttgccctcaaaaaacgcggcgacggcgttctcgggctcgacaacttcaacagctactacgatccctccctgaaacgctcccgtcag

SEQ ID NO: 6905 - DNA, 390 bp, Glycine max
  Clone ID: LIB3030-007-Q1-B1-G11
aaaattctgaagacaaaaccgctcaggaattattcacaagggaacatgaaggattgcgcagaaaagcagaagattggatgaaacgcactgctgagttctgtatacttatttcaactgtcattgctacagcagtgttctctgctgcgattaacataccaggtggcatcgatgatcaaacgaaaaaaccaaattacttggacaaaacatcgttcctggtgtttgcaatatcagatggaattgcattcatctcatctgcaacttcaatattaatcttcttgtcaattctcatctcgcgttatgcggagtatgattttcacaagtcactgcccttcaagttaatatgtggattggtaactctgttcatctccataacatgcatgatggtagcct

SEQ ID NO: 6906 - DNA, 404 bp, Glycine max
  Clone ID: LIB3030-007-Q1-B1-G12
gaggcctgtgagtggcaggcctctcaacgatgacaaggtattggaacgctgccctgacttgaaccttgagctaaccattagtcctccccgtcaacctcaatctgatcagcatcacttgaagcccgttgggagaaactcaaacctttgctttgcctgcagtttgggtttgcaaaatagcaaagatcattgtagctgtgcgctcaacactgccaacgctgcttctggccatgatttcttggccttgaaaaccagcgttttggaaatgaaatgagtcaaattcatttggaatctttcttccctaattaattagttgttaatggatgcaaatgattgcctgcccaatttcctcgtggagccctttctattattcctatgttcatgtacatgtgcgtaagactacaaac

SEQ ID NO: 6907 - DNA, 367 bp, Glycine max
  Clone ID: LIB3030-007-Q1-B1-G2
caagaatagtgtaacgcagagaatcagaaaaaaaatatgaagttcgctataatcacaatattgttctctttatttcttcttgactttggttttgcacaacagggggatcttgacatatcaagatttggaggaaaaccaaatacaaatataggccaggctttcttaagtgcctggactcaagcatgtgcatcaccaactgctgtcaaaattgtgattccagctggcacataccaaatgggtgcagttgatgtcaaaggtccttgcaaggctcctattgaggttcaagttgatggaacaattcaagcacctgcaaacccaactgaccttaaggcggctcatcaatggtttgttgttcaatatgttaact

SEQ ID NO: 6908 - DNA, 380 bp, Glycine max
  Clone ID: LIB3030-007-Q1-B1-G3
cgttctttctctcgcaatcttcactacattcaccgagcatttgcattcacattgaatatggctgagactacacaatctaatgctgagttgttggagtggcctaagaaagataagcgccgcttcctgcatgttgtgtatcgtgttggtgatcttgatcgcaccattaagttttatactgaatgttttgggatgaagcttttgaggaaaagagatattccagaggagaaatatgccaatgcttttcttggatttggccctgaacaatcccattttgttgtggaattaacatacaattatggggtgacctcatatgatattggaactggatttggacattttgctatcgcaactccagatgtttacaaattggttgaagacat

SEQ ID NO: 6909 - DNA, 319 bp, Glycine max
  Clone ID: LIB3030-005-Q1-B1-H4
aaggcatacttggagtatttgaaacacaaatgcaaaggccagatgttcgagcaaaccagaatgtgccaccaggcccaccacaccaaccttggggtcctcctcaatgttttccagctcctgggcctggtagtggtggtggacctgcttttccacccaatactcagtatatgccgccttcacataattatgagaattactacccacctgctgacctatctcccatggacaaacaccttcatcaaggtccaccacctgcctatgtaagagatgtttctatgggaattcattcatccaatgcacaggcacaacaatctgttgt

SEQ ID NO: 6910 - DNA, 268 bp, Glycine max
  Clone ID: LIB3030-003-Q1-B1-H9
cgcgagcggccgcccttttttttttttttttctggttacatgtgatcttttatgaggtttagttattctttgtgttagaattgtttggggaaaatgttaattttatcagaatttagctagtttcatgtatccgttttctagatatctgccatatccatagctagctttgtatattttgagtttctaacttgaaaggtagcaaaacacaagacatgattttttgtaataatttacccttggaagtaatgtcatctctaaagtagatggg

SEQ ID NO: 6911 - DNA, 266 bp, Glycine max
  Clone ID: LIB3030-004-Q1-B1-A1
atcattactacctcttgaaaccacgagggtcactctgtgctatgacctcagtttcaaacgaaagccttgttcatttccgtgacattccttcctatcacagtcatctaacctacaactcagataattcatttactctatatcctcagttgagttacaaccgtttcgaatgtgaatacctgcagataccagctattcagttagggtatcacatcaggccaccactcttatattgattattacagagcaagatgcaccagctcacacat

SEQ ID NO: 6912 - DNA, 132 bp, Glycine max
  Clone ID: LIB3030-004-Q1-B1-A10
taattaattgagaactaaagctgtatttgttgttcactctaaaaaagaagctgtgttttgtttattaaaaagagtgctctgttttctctgttttggttacacgacgttcattaaaatatagtatttgatatc

SEQ ID NO: 6913 - DNA, 405 bp, Glycine max
  Clone ID: LIB3030-004-Q1-B1-A11
ctcgaaactctgaaaaaagtaaaaaccgctgcgaacaatggcaacgatcaaggccgtgaaagctcgccagatcttcgacagccgtggaaatccaaccgttgaagttgacgttattctcagcgatggaaccttccacagagctgctgtccctagcggcgcttcaacaggtgtttatgaggctttggaattgacggatggaggctcagactacctcgggaaaggtgttcttaaggctgtggagaatgttaattcaattatagcacctgctctgcttggcaaggacccaaccaagcagactgaaattgacaattttatggtacagcagcttgatggaactgttaatgaatggggatggtgtaagcagaagcttggagctaatgctattttggcagtgtcacttgctgt

SEQ ID NO: 6914 - DNA, 397 bp, Glycine max
  Clone ID: LIB3030-004-Q1-B1-A12
ctcgaaactctgaaaaaagtaaaaaccgctgcgaacaatggcaacgatcaaggccgtgaaagctcgccagatcttcgacagccgtggaaatccaaccgttgaagttgacgttattctgagcgatggaaccttccacagagctgctgtccctagcggcgcttcaacaggtgtttatgaggctttggaattgatggatggaggctcagactacctcgggaaaggtgttcttaatgctgtggagaatgttaattcaattatagcacctgctctgcttggcaagtgatcatccaagcagactgaaattgacaattttatggtacatcagcttgatggaactgttaatgaatggggatggtgtaagcagagacttggagctaatgctactttggcagtgtca

SEQ ID NO: 6915 - DNA, 357 bp, Glycine max
  unsure (1)..(357): unsure at all n locations
  Clone ID: LIB3030-004-Q1-B1-A2
aacaagaaaaaaaaagaaaacatttccttccgaattgaggaaggaaaaggtgtcttggatggccaagtcatcttccttagctatcacgttgatctgcgccgccacggtattggtggcgatgagtcggtggccgacagccgtgggcggcggggaacaccacttgggaatgggatgggtttccagcacgtgcaaggggaccattgctgattgcctgngaggggaggagtacgagttggattcggagattaaccggcgcatcttatccaccaacaagtacatcagctacgttgcactgcagaggaacactgctccctgctctcgccgcggcgcctcctactacaattgccgacccggagc

SEQ ID NO: 6916 - DNA, 362 bp, Glycine max
  unsure (1)..(362): unsure at all n locations
  Clone ID: LIB3030-004-Q1-B1-A3
gaaaatctgaatcatgtcgtggcaagcgtacgtggatgatcacctgctgtgtgaaatcgnaagtaaccacctcactcacgccgctattatcggccacgacggcagcgtttgggctcagagcgccaacttccctcagttcaaagctgaggaaataactgctatcatgaatgactttaacgagcctggatcacttgctccaactggattgtttctcgctgccaccaaatacatggtcatccagggcgagcctggtgccgtcattcgaggcaagaatggtcctggtggtgttactgtgaagaagaccggtgcggccttgatcattggcatttatgacgaaccaatggctccgggtcagtgcaaca

SEQ ID NO: 6917 - DNA, 399 bp, Glycine max
  Clone ID: LIB3030-004-Q1-B1-A5
cacgtatcagaaatatggcactcgaaggtcactaaagcagctagggtggttgcttgctgtggttcagagtcttttgatagtagcatctcgcaaacattacacggttgacgtagttgttgcctggtacactgttaatttggtggtgttttttattgacaagaaattgccagaattaccagacaggtcaattgcagctgcaaccttgctacctttgagcaccaaagacaaagacagcaggaccaaagaggagaaccacaagctattgaatgggaattctggagaccctgtagattggaggcagagaacacaagtgaatggcaagatcatggaagatggcaatacactccatgcagactctgccatgaatggtgcatagatattggagcctctgctgtacaa

SEQ ID NO: 6918 - DNA, 424 bp, Glycine max
  Clone ID: LIB3030-004-Q1-B1-A6
aacagatgatgcctgtaagctagccacccttgccttgcggtgcctatcaatagaatccaagttcaggccaaacatggatgaagtggttacaacattggagcagctgcaagttcctaatgtaatggaggccatcaaaatgggtctcgtgttcgtagaagaagtgctgatgtgaatagaggctatcaaaatccttctgttaatggatctcgagttcgtagaagaagtgccgatgatattagccctatggagactcccacagcttatccccggccttctgcatcccctctctatacttgatattgcaaacttatcatcatgcatctgttgctggtgatctcatcccacaactcagtcacctcagtagctattagcctattgcactctagtattgtacatatcttatttcacataatgtattcagtat

SEQ ID NO: 6919 - DNA, 381 bp, Glycine max
  Clone ID: LIB3030-004-Q1-B1-A7
attaattgcaagaatggcacttcgttgcttggtgatgtcgctttctgttctcttcactcttggacttgcgagagaaagccatgccagagacgaagatttttggcatgctgtttggccaaacactcccattccaagttcattgcgagatcttctaaagcctgtgccctgcaagtgttgaagtcgatgatcaccctatgcaaattgatgaaacacagtacccgaaaatcttcttctataaagaagaccttcatccaggcaaaacaatgaaagtacaattcagcaagcctccctttcatcaaccatggggtgtaggtacatggataaatgacattagatacactactacagaacgatatacttttgaacagctatgcatcaaga

SEQ ID NO: 6920 - DNA, 387 bp, Glycine max
  Clone ID: LIB3030-004-Q1-B1-A9
cagagagagagagagagagagagagagagagagagaatgggagggtgggctatcgcggtgcatggtggcgctggtgtcgaccctaatctcccactcgagcgccaagaagaagcgaaacaacttctcacgcgctgtctcaatcttggaatctctgctctaaattctaatcttcccgccatagatgtcgtcgaacttgtggtgagggaattggaaacggatccgctgttcaattcgggccgtggatctgccctgacagaaaaaggaacggtggagatggaggctagcatcatggatggtccaaaacgacgatgcggcgccgtttcgggtcttaccaccgttaagaacccgatctcgcttgctcgtttggttatggacaaatccccgcat

SEQ ID NO: 6921 - DNA, 348 bp, Glycine max
  Clone ID: LIB3030-004-Q1-B1-B1
gtcaaagcttctcgagagcaatcttctgctccatcttcttcagtaaccgaaccccagaccccagtttcagatactgttgcttttggaaatactagagctacatttaatggtgttgctacagctgcagagttttctctttccaggagtccttactttcttcctagtgaaccagcttggaatcaagaaccggtttggaatcaagagtttgggtataatgaacctttatgagaggacaatgttggtcaaaccataatcacttcaccttctgagctttcaatttgttcatttgctgctgctggaaactgtccacgaggggaaaaatgccctcatattcatggggatctatgt

SEQ ID NO: 6922 - DNA, 403 bp, Glycine max
  Clone ID: LIB3030-004-Q1-B1-B10
cccattctctctctctctctctctctccgacctagcgagaccgagcgatccgaccctaatctcgcgatgctccgccgcgcaacctcctccctcctcaccggcgcctcccgccgccgcctctcctccgacgtgccggcgacccccgccgcggattccgccttcgcggaggcgtggaagaaagtgagccccaacatcgacccgccgaagacgccgctggcgtacatgaagccccgaccacccactccctcggctctcccttccaagctcacagtcaacttcgtcttgccctactcttctcaattggccgcaaaagaggttgatatggtcattgtaccagcaacaactgggcagatgggtgttctcccaggacatgtagcaacaattgcagagttgaaacctggtg

SEQ ID NO: 6923 - DNA, 390 bp, Glycine max
  Clone ID: LIB3030-004-Q1-B1-B11
ggcctggtggctgccacaggattaagtccactgatagattgttcagttattactggcgatcctggacttatatccgcatttgtggagaggtggcacagtgagactagcaccttccaccttccagtaggagagctgacgatcacattggatgatgtgtcgtccattctacatttgcccatcactggcgccttgcacagtttccacgctctttctacggaggaggccagattcttgctcacggagttgctggaagtgtctgcggaggaggccagagccgagacagcgctcacacgtggagcatatgtacgattaggatgggttcgtgacatttatgagaccagatgtcaggcccggcggtggattgtcgcagctcgcgcttatttgctgcac

SEQ ID NO: 6924 - DNA, 311 bp, Glycine max
  Clone ID: LIB3030-004-Q1-B1-B2
cgagatttgttcaacaaggtgaaaatttaaggcatgggcaacctaagtttggcaaaattgcaactattggattcacatccttgggatgcaccacttactgtgcttcgagcagcaggagttgagctgggccagaattacccatagccaatcattgatatagatttggccagagaaagactcactgaagctatattcaagatgtgggaatctgaagcagcagcaaaagctgctggctctgaaccaagggatgaagttgttgtagacaactctcacactgttgaaaatttggacactcacaaagttgtcgtcct

SEQ ID NO: 6925 - DNA, 350 bp, Glycine max
  Clone ID: LIB3030-004-Q1-B1-B3
acttaaacccagaattcggtccaaggcctaaccagaaagggcccctccattgatggaacctgtggccctcaaacctgcccctttcactgttgagaagtcctcatttaaaggccttccctccctctcaaggaactcctcttcattcagagttgtggccattggtggcaagaagatcaagactgacaagccttatggaattaatggtggcatggctttgagggaaggagttgatgcatctggcaggaaaggaaagggaaagggcgtttaccagtttgtagacaaatacggtgctaatgtcgatggttacagtcctatctacgacaccaaggactggtctccaaccggtgatg

SEQ ID NO: 6926 - DNA, 309 bp, Glycine max
  Clone ID: LIB3030-004-Q1-B1-B4
ttcaagcaaacccgtccctcaaactctccaaaccctagcggaactacacactagttctatcgctatctccccaagatgtcgagcgccgatcccgagcacagagaagaggaggaggcacccgccgttggcgacgacgaggacaccggagctcacgtcgctccaatcgtcaagctcgaggaggttgctgtcaccaccggcgaggaggacgaagatgcaatcctggatctcaaatcgaagctttaccggttcgacaaggacggggaacagtggaaggagcgtggcgccggcactgtgaagttcctgaagcat

SEQ ID NO: 6927 - DNA, 398 bp, Glycine max
  Clone ID: LIB3030-004-Q1-B1-B6
cgttcacataaaatatcgacagagatcgacgagaaaaagctaagcgaacaatgtggagctccaaaacgacgatgatgctggccattgcagccattgctctgatgatgtttctctcatcggcttcagccgacgacgtcgttgcactcacagaggaaaccttcgaaaacgaggttggcaaggatcgcgccgctctcgttgagttttacgctccctggtgtggacactgtaaaaggcttgccccggagtacgaacagctcggagcgagttttaagaaaacgaagtccgttttgattgccaaggtggactgtgatgaacataaaagcgtttgcggtaaatatggggtatctggttaccctaccattcaatggtttcctaagggatctctagaacctaaaaag

SEQ ID NO: 6928 - DNA, 363 bp, Glycine max
  unsure (1)..(363): unsure at all n locations
  Clone ID: LIB3030-004-Q1-B1-B7
atttgaccttatgtatgccaagagagcgtttgtgcactggtatgttggtgagggcatggaagagggtgagttctctgaggctcgtgaagatcttgctgcccttgagaaggattatgaggaggtcggagcagaggctaatgaaggtgatgaaggagaggatggagatgagtattgattagggagttactttttcgtgatggggttcttttatgtactttccttggctttattttgtaagttgttgccatatatgcttgctgttatctgcatgaatggtttgtccatttgatggagcttgttctgtcccagcactaaataatttcaatgacatgattgtggcgctttagttaaaaaanaaaacac

SEQ ID NO: 6929 - DNA, 378 bp, Glycine max
  Clone ID: LIB3030-004-Q1-B1-B8
atcgatcaaaaccacggatatacattggatgcatgaaatctgggcctgtcctatcccaaaaaggggtaaggtaccatgaacctgagtactggaagtttggagaggctggaaacagatacttccgtcatgccacaggacagttgtatgccatttcaaacgatttggctacatacatatcaattaaccagaatgttcttcacaagtatgccaacgaggatgtgtcactaggatcctggtttattggacttgatgtggagcatatagatgatcgaagactttgttgtggcactcctcctgattgtgagtggaaggcccaagcagggaacatttgtgttgcatcatttgattggagctgcagtggaatttgcaagtctgctg

SEQ ID NO: 6930 - DNA, 340 bp, Glycine max
  Clone ID: LIB3030-004-Q1-B1-B9
attgacttcaacttgtgtgttcatcaatcatcacaatagtaatattaatatttggcatttgatttgaatcgattaacatcgaataaaaataataaggatggtgctgccactgctgaaactgggaactctggccgtgacaaccctaagcatcacccgtggcgagcatactgaatcagcaagccactcttcatcctatattccgcgaactcatcgttagaatggctcattctaatcatcacatcactactaagatgcaaatgcgcatttacagtgactccacagacgttgagattcaccccttgaacgaggaatatgccgttcacaccaccgttgaccttat

SEQ ID NO: 6931 - DNA, 348 bp, Glycine max
  Clone ID: LIB3030-004-Q1-B1-C1
tagaagtggaaagtggttgcagagtagaagtcgagatggccaaccttccaaattcaaagctttatgggaaagagaagatgaaaggagagcaagaattagaagatgaagaaagcttctcgcgtgctatgctgctttgcagctccgttgtggtttccatggcgctgcaatcggcaacggagctgggcgtatttgacgtgttgcaagaagcgggggctaagctctctgcgaaagagatagcatccaagctttcctgcgacaacaaccctgaagcagactcaatgctggatcgccttctagcccttctagcctctcactccattcttaactgttctctcattctcgaccacc

SEQ ID NO: 6932 - DNA, 405 bp, Glycine max
  Clone ID: LIB3030-004-Q1-B1-C10
cccaattcttccccctccacccacccagcatatctctctattcctatttattagcacccctcacattaccttgtgtcaccaactactttgactcctttaccataccattacaataattatcaaacctaaccagtaaaaatggtgaccgtggaggaaatccgcaacgctcagcgttcccatggacccgccaccatcttggccttcggcaccgccacgccgtccaactgcgtctcccaagccgattaccctgactactacttccgcattaccaacagcgaacacatgactgatctcaaagaaaagttcaagcgcatgtgtgaaaagtccatgataaagaagcgatacatgcacctgacggaggagtttctgaaagagaacccgaacatgtgcgagtacatggcgcca

SEQ ID NO: 6933 - DNA, 392 bp, Glycine max
  Clone ID: LIB3030-004-Q1-B1-C11
gtttgcgagatagaagcgtaagcagcggctaccctaacctcgtcttcctctctactaatttcagctatggccgacgaagctgtggttgttccagatcccacccagatcgatgtcaagctctttaaccgctggagcttcgaggatattgaggttactgacatttcactggctgattacattggagttgcggcatccaagcacgccacatatgttcctcacaccgccggaaggtactccgtgaagcggttcaggaaggcgcagtgccccattgttgagaggctcaccaactctctcatgatgcacggtagaaacaatggcaagaaactcttggctgttaggatcatcaagcatgctatggagattattcatttgttgactgaccagaatcccat

SEQ ID NO: 6934 - DNA, 404 bp, Glycine max
  Clone ID: LIB3030-004-Q1-B1-C12
catctgttgtggtcaattcagcaacaaagaatgcaaaggagccgtggaagcatgtgtttcatgttgtgaccgataagatgaaccttggagcaatgcaagtgatgtttaagttgaaaaattatcatggtgcacacattgaggttaaggctgtggaggattacaagttcctgaattcatcttatgtgccagtcctaaaacaattggagtctgctaaccttcagagattttacttcgagaacaagcttgaaaatgctacaaaggacacaaataatatgaagttcaggaaccccaaatatttgtcaatattgaaccatttgaggttctacttgccagaaatgtatccaaagctgcataaaattttgtttttggatgatgacatagtggttcagaaggacctaactggg

SEQ ID NO: 6935 - DNA, 353 bp, Glycine max
  Clone ID: LIB3030-004-Q1-B1-C2
cgaagatagacttcattttggcgaagcaccctgagattgacgtgccgaatctgcaggtgattaagctgatgcaaagtttcaagtctcgcgagtatgtgagggagacttttgcttggatgcactattactggttcctcaccaacgatggaatcgagtttctcagaacttaccttaaccttccttccgaaattgtccctgctactttgaagaaacaggccaagccacctggcaggccctttggcggcccatccggtgatcgccctaggggtccaccacgctttgaaggggagcgtacgtttggtggtgatcgtgatggataccgtggacgtccccgatgaggacctggtggtgac

SEQ ID NO: 6936 - DNA, 293 bp, Glycine max
  Clone ID: LIB3030-004-Q1-B1-C4
tggtgaccctgcaatgggtgcctacaattatgtttcaaagctatggcgcaaaaaccattctgatgtcatgcgcttcttgcaacggttgaggtgctgggagtataggcagcaaccttccattgttcgtttgacaaggtcaacccgccctgacaaggctcgtcgcttgggcttcaaggctaagcagggctatgtgattaccgtgttcgtgttaggaggggtggccgaaagagaccatttcccaaaggtattgtttatgggaagcccacaaaccagggagttacccaactgaaatt

SEQ ID NO: 6937 - DNA, 404 bp, Glycine max
  unsure (1)..(404): unsure at all n locations
  Clone ID: LIB3030-004-Q1-B1-C5
ataaaaacctagtattttatctggaggcatgtgaatctgggagtatctttgaaggtcttcttcctgaagatatcaatatttatgcaaccactgcttccaatgcagaagaaagtagttggggaacatattgccccggggagtatcctagtcctcccccagaatatacaacctgtttgggtgacttgtacagtgttgcttggatggaagacagtgacagacacaatttgcgaacagaaactctgcaccaacaatataaattggttaaagagaggactatatctggagattcatactatggctctcacgtgatgcagtatggtgatgtanggcttagcagagatgttctcttccattatttgggtacagatcctgctaatgataatttcacttttgtggatgaaaac

SEQ ID NO: 6938 - DNA, 361 bp, Glycine max
  Clone ID: LIB3030-004-Q1-B1-C6
aaaagaccaggaatagaagaacccttcatgagctcccagagccgcttaatggatctagtctgaacataactgaagaacgagtaaagaatttgcagaaagaccacctccatggtaataagtcttctatggtagtttcagtccttgttgatcccaaagaggctggcgatggtgatgttgatgttgacggcatgatgagaccaaagtcactctctcggatttttgtggttgtgctaattgatagtgtcaagtatgtcacttactcttgtggtctgcctcgtgcttctccccatttggtgactggttacgtatgacaatccttcggaaaaaagttttgatgcagccgaagcatctaacctgagtt

SEQ ID NO: 6939 - DNA, 380 bp, Glycine max
  Clone ID: LIB3030-004-Q1-B1-C7
cacaggagcaacttcacttgtatcaaacatgggagctcagtacttttctgttggtggcatgttcctgtttgtcttaacatttgctctcggagctggcccagttccaggtctccttctaccagaaatctttcctagtcgaataagagccaaagccatggcagtctgtatgtcagtgcattgggtgataaatttctttgttggactactgttcttgcgtttgctggagaaacttggtccacagctgctttactctatgtttgctaccttttgcatcatggcagtaatttttgtaaaaagaaatgtggtggaaaccaaagggaagtcacttcatgaaatcgagatcgcacttctaccccaagactagagcatcttatgaagct

SEQ ID NO: 6940 - DNA, 403 bp, Glycine max
  Clone ID: LIB3030-004-Q1-B1-C8
gtgctatctgagctcaagttgacagctgataggaatacactgaggggctttgaacatatcatgggggtgagactaaagccgcatgcatttgacatggaaagagatttggcgactgcaacactgaataataccagaaacaaactgctcaagtattatcaggtggaaatagatgaaatcaaccagtgtttgacagggaagaaagcataacgtccgaggttgctaaattctagacacggatatgcctagttagtactacccagtaaccccgttccacaactctcatctatatatataatcctagaagctcaatgctactattttgtgtgacgtaatatgcaccaactagcaactgctgaaccatgatatttaaccaaatgtcaaactctacatatacgagaacaat

SEQ ID NO: 6941 - DNA, 373 bp, Glycine max
  Clone ID: LIB3030-004-Q1-B1-C9
tcacatctaagccttcattactggggtccatatgtcgctgactcgatcgacaaaggcttctgtccagcagttcagtgcgctgtgtctgcagcatttgggtgaccgtgtagctgctggcgaacctgattcaagcgccttcagtggccgccacagctgtgttttcacggaatgttctatacacatatcggaatgtcagaagcttagagttacaagctgtgcgtctatcattgtcatcatttccaactgggtgcatgtgacatattcagcatggacttactagcattgaacaacttccaaagccgattcctagctatgcctacgattgacattcgagtgatttatgtcaggcgctaacctcatcgtagagtctcac

SEQ ID NO: 6942 - DNA, 350 bp, Glycine max
  Clone ID: LIB3030-004-Q1-B1-D1
caaaacactcataacacaaagcacaaagcaaagctcatccttgagttaaaaaatggcagcagcttcttccatggctctctcatccccatccttggctggcaaggccgtgaagctgggcccatcagccccagaagtgggaacggtgagcatgaggaagaccgtcaccaagcatgtctcctcaggaagcccatggtacggcccagaccgagtcaagtacttgggcccattctctggcgagcccccgtcctacctaaccggtgagttcccaagcgactacggctgggacactgctgggctttccgcagacccagaaaccttcgccaagaaccgtgaactcgaagtgatccact

SEQ ID NO: 6943 - DNA, 311 bp, Glycine max
  Clone ID: LIB3030-004-Q1-B1-D10
cttcctacattctcaacacatctactctctctcacgactaatacatgccagtagtgatcacataaatgtgtgggagaagataattagactccttcaggaacccaatttcagaaactgctgatctaaacactcaaatctgcgtccatgttccagtcctctcaaaggatcaccattttcacggctctcttatcttcttgtctctacggcaactgaaagcagtcgacatgcgtcacccaagacgattaccctgaatagtacattcgcagtagcaaccttcagcagcttccggatcactgccggtgcatcacaca

SEQ ID NO: 6944 - DNA, 404 bp, Glycine max
  Clone ID: LIB3030-004-Q1-B1-D11
gaatagccatgtctacttcaaagagcgtcagcagttctagtgaagatgacaatgaacttagaagagggccttggactctggaagaggataacttgctctcccaatatatttttaatcatggggaagggcgatggaatttgctggctaaacgttcaggattaaagagaactgggaaaagttgcagattaaggtggctaaattatctaaagccagatgtaaaacggggaaatttaaccccacaagagcaacttataattcttgaactccactcaaagtggggaaacaggtgcttatcttgtgcatttgattcttgagctccacaggttttatcgtgattcttggtattgtgagaaattgtagacaaatgcggccaatgcagccgcaaaacggtcacaaggactctc

SEQ ID NO: 6945 - DNA, 406 bp, Glycine max
  Clone ID: LIB3030-004-Q1-B1-D12
ctcgtattaatattgttccaaactcccaagtcccaaccttctctccctgtctttgcttctgcaattactcccactctggaaatgggttcgctacccgattttgacactctcccccctctgagctcgaggatttcaacggtggttccagcaacccctcgagaagatgaaaacggtgcgtttcaactcaactacatggacctcctcgtgaagctccattacatacgacccgttttcttcttcacttccgaagccgttcaaggcctctcaatctccgacttgaagaaacctatgttcccgcttctcgacccgtattaccacgtttcgggtcgggtcagaagatccgaatccggacgcccctttgttaagtgcaacgacgccggtgttcgcatcgctgagtcgcactgcg

SEQ ID NO: 6946 - DNA, 324 bp, Glycine max
  Clone ID: LIB3030-004-Q1-B1-D2
cattaaccaataaccattaggtacattaaccaccatggggaagtactttgctgttgttgctctctttgtctcagctttgtgcttctcctctatcttggctcgtaagatacctgcccttgataaattcttcgttgagggcaagatttactgtgacccttgccacttcgcatttgagtccaggctcagtttccccttggaaggtgttaaggtaagcctgcaatgtctgaggagtgagaatgataccgtgacatatgtgaaggagggcattcctgatgccaatgggcaatacagcatccctgtccatggtgatcacgatgaggagat

SEQ ID NO: 6947 - DNA, 326 bp, Glycine max
  unsure (1)..(326): unsure at all n locations
  Clone ID: LIB3030-004-Q1-B1-D3
ggtccaaccggcaaacaaccttaattggggccaaacaacaaaaatggtggtccccccggaatcggtttccaaaaaccaaaaggcttaatgggccccttctccgggttgattccccccttggccaaacctaattgctactccaacaacatttactttctggcccccaaaaaaaccctaaattcaatttaaaattcactccacacaaaaacgccaacaatagtcttcgctctcaagctcgccaatgagaacaaagacaangggatccaatacgacgacgttctcctctccttcagagtcttcgagagcgtgaacaccacgcgccccct

SEQ ID NO: 6948 - DNA, 393 bp, Glycine max
  Clone ID: LIB3030-004-Q1-B1-D4
cgaattccggtccaagaatgattaaaattatgcaacgcgaataaggaataaaaaaatacaaagcttaacgaagccggtttcctccaaaaattagcaataataatgggaacaaataaggttattttggcggtaataaattaaatgctgaatgatgatggacaaatgattgtaagtttcagcatttctcttccgtaagcaaagagcattacctgaaacaaacaaacgaacactgtaagcatgaacaagcgccaagaagatttgcgcaacatagctactaccctcgactccagattcaatcagaccctcagaaatgttcaagggttactcaaaggtcgaagcatacccggtaaaatattattgagccgtaaggtaaaatctcccgataactcaaac

SEQ ID NO: 6949 - DNA, 415 bp, Glycine max
  Clone ID: LIB3030-004-Q1-B1-D5
tctaaattcaattatggcgtttaagaaaacgctagcccagcggcttctcaacatcacaaaaatctccaattaccgcatttcctcctccgtagtccgttccccgaacccgacaaaacctgacattgctccggatcccggagacagccgcaggttcctccacaagagggcctccgtgctcccgccggagctccgcccgccgctgcccgccggcagcctcctccagaggctccgggaaatggacattgcgcggagccggatccggctagacggtctcgctccgccggagactgaacaaacggtggcgccggaacacgtgaggaaggtgctcagagcggtgcaaatcgaaacggtgaaatcgaagctgagaaaaattccgcagagttgcataagctattcagagttcattcgaatgtgc

SEQ ID NO: 6950 - DNA, 393 bp, Glycine max
  Clone ID: LIB3030-004-Q1-B1-D6
ggccttttgtagataacaaaatgaaaaggagtacatggaaaagagaagaggagataattgaaccataccctacccgaggcatgcattgagaaatctgaatttctgatcttgtagcccacgctacaatgcaaaggcatcaattccatacaccaaaggaaattcagcattgtgggtacctcaacattggtctttttataagtgagttaaacataatgccacattgattctcaaccatggaacatggcctccttcagacacacaaccctatttaatataggagttgtcactttttaactaaccaaaatgaaatatgtcaacaataataggcaacttttaattagatttcaacaaattaataccttctttttcatgagatcgattacacaaatattt

SEQ ID NO: 6951 - DNA, 362 bp, Glycine max
  Clone ID: LIB3030-004-Q1-B1-D7
aagagatcacatagcagaatggcttctactcaatgtttcttgcaccaccatgctcttaccacccctgccagatccccatcacaacgcatcatggttagcaccaagcctaaccagcttgtttgcaaggcacagaagcaagaggatattgatgtcagcccaatctctcgccggttagctctaaccgtgctcattggtgctgctgctgttggctccaaagtccaacctgctgatgcagcttatggggaagctgccaatgtgtttggaaagccaaagacagacacagatttcctgccatacaatggagatggattcaaactatcgattccctcaaagtggaaaccaagcaaagaggttgagtacac

SEQ ID NO: 6952 - DNA, 361 bp, Glycine max
  Clone ID: LIB3030-004-Q1-B1-D8
gtgactgacttttcgagaaaggaaaaaaaaagagtttccgggattattccatcatgaacgctcttcccattcttctcttcttcctcttcgtttcggcattagtttatgcgaagaaaactggcgatgtgacggagttgcaaattggcgtgaagcataaaccagcatcatgtgaagttctggcacacaaaggtgacagagtcaaagtacactatcggggaaaactcactgatggaactgttttcgattctagctttgaaagaaataatccaattgaatttgagcttggtactggtcaagtgatcaaaggttgggaccagggattattgggaatgtgtcttggtgagaagcggaagctgaaaat

SEQ ID NO: 6953 - DNA, 391 bp, Glycine max
  Clone ID: LIB3030-004-Q1-B1-D9
gcatatcgaactcttcgtgacaggggtccataccccgctgatcaagtcctcaaagaacttgaaggcagttttggatttgtgatctatgacaacaaggatggaacagtttttgttgcatctggttctaatggccagattgggctctactggggtgttgcagctgatggttccatagttatttctgaaaatctggagcttataaaagcaagctgtgctaaatcatttgcaccatttccgaatgggtgtatgtttcatagtgagcatggtctcatgagcattgaacatccaacaaagaagatgaaagcaatgcctacgattgacagcgagagatttatgtgtggggctaacttcaatgttgactctcagacaaagatccaagtgatgcctcgtg

SEQ ID NO: 6954 - DNA, 360 bp, Glycine max
  Clone ID: LIB3030-004-Q1-B1-E1
tatactcctctcttgtctgtgcatcaaaacacaacattcattcatactgattacttccttgcctattgcacattcttcatcacttcattcaacatttctctctcccttagctagtttttaccaatggctgctgcggttagtgctgcagtctcttttccatccaccaagtctacctctctcccaagcaggacctccatcattaccccagagagagttgtattcaagaaggcttcattgcaatacagagatgtttgtagcagtggaagggtagtttccatcagagctcaagtcaccactgaggctccagccaaggttgaaaaagagtccaagaaacaggatgaaggtgtggttgtgaacaag

SEQ ID NO: 6955 - DNA, 377 bp, Glycine max
  Clone ID: LIB3030-004-Q1-B1-E10
ctctcagcagcttaggctagggttcagaaacgaaaaagggttcggtgttcagttcgcgatgagagccaaggtgagttcaattcgtcactgttgtttcgctaaattccttgattttatcaaacgttgaggtatgattgggacttttttttttttttttttttttttgcattggaaaaaaaaccttctgaggaggttaaaaaggaacccccaaacaattacacagatttcaatgtagtgcttaaacccaattatttaattcccgttgctttaaaaataaggttgtcaaattgggcacccatttgtaaaaggcacgggtttcccctttgtgatgttttgataaattttggttgggttaaattcgtcttaggtaattacct

SEQ ID NO: 6956 - DNA, 404 bp, Glycine max
  Clone ID: LIB3030-004-Q1-B1-E11
gattagtgtggcctagttgttgttttctcgatgagaaaggcttcttccactatgcattgcgcacttctgcgcttttgggttcccttgttgctgcttgctagcttcagctatgctccttctgtttcggccacaactgaaatttcagggaatgaagtgaacacagatgggaaggtgataaatgaagagttagcaaaaccaagtctaaaaggacatgatgaagaagcaaagttcaaaggattttttccaaaaccaattcctatagttaaaccaattccaaagccaattcctattattaaacctattccaattccagtttataagcctattccaaaaccaattcctattgttaagcctattccaaagtcaattccagttgctaagccaattcctaatgaagaagaaaa

SEQ ID NO: 6957 - DNA, 161 bp, Glycine max
  Clone ID: LIB3030-004-Q1-B1-E12
ctgatcttcattttacagagaattctagggttttgtataattggtcaaattgtagtctgaccaattatagatagggaaataattgtccctcaaccatgtatgcacgataaaatatacatgtatttttcaaatatctattcacagttttacagatatattgc

SEQ ID NO: 6958 - DNA, 355 bp, Glycine max
  unsure (1)..(355): unsure at all n locations
  Clone ID: LIB3030-004-Q1-B1-E3
ccaaaaaaaaaaaggttccttaaaatgccaacaaattggaaaagaaaaagattttaggaaaccttttaaaaactgtattctgcccaaattgccaaggtactggtatgatcattgatggaaatggggtggaccagccaaaattttctttgtcgcaaatgttcaaattcaaaataaaggcatgtgatgcacgcagagattggatcaagagtcctgaatttttgcagaattgctcaactgggtttcacttcccttcacaatctgaagagatatttgaggaaaaagtggaacccataaatttactgcatttttatcgtgctgatgatcagagtgnggcataacaaccgggcaaacgttt

SEQ ID NO: 6959 - DNA, 245 bp, Glycine max
  Clone ID: LIB3030-004-Q1-B1-E4
accccctttctcacctaaaggtgtaacttacaggtttcagaacccttcaaccgttgtttgcagatacacctaatgcagttcatgaattaacactagcaagggatatatacaaccatgctgttgtccttagtgtgaaaaatgaggatcaagatgcttttgaaagggatttcttccagttgaagccttattatacagatgcctgcaatcgactttcaccatctcgtcaggagtacccaattctgggt

SEQ ID NO: 6960 - DNA, 408 bp, Glycine max
  Clone ID: LIB3030-004-Q1-B1-E5
aaaaaatcatcatcagcttcaaaaggtgcagcagccaatgatggagttattaagggaggaagcatagattgggagctaagacctggtggcatgcttgttcagaagagacaaccccttgattcctcttctagttccatgatcaaaatcaaggtctctcatggttcttaccaccatgaggtcactgttcctgcacaatccacttttgggcatctaaaaatggtgcttacatccgagactggtcttgagcctaaagagcaaaggttactatttagagggaaagagaaagacgatgacgaatgcttgcatatggtgggagtgaaagacatgtctaaggttatattgctagatgatccagccagcacagagagaaagcttgaggagatgcataagagtgaagatatctcaaag

SEQ ID NO: 6961 - DNA, 396 bp, Glycine max
  Clone ID: LIB3030-004-Q1-B1-E6
gagagtttcatttggaccaagtttatgcttcaaatattctcaacatatggagtggtatcaccaacttcttccctttgattggtgccttcatttctgatgcctatgttggtcgcttctggaccatagcttttgcttccttttcttctctactggggatggtggtggtgactttaacagcatggttaccagagttgcatcctccaccatgcactcctcagcaacaagcattgaaccaatgtgttaaagctagcacacctcacctaggtgctctacttacgggactttgcctattaagcgtaggctctgctggcataaggccatgtagcatcccatttggtgtggaccaatttgacccctccacagatgaagggaaaaaaggtatcaatagcttcttta

SEQ ID NO: 6962 - DNA, 417 bp, Glycine max
  Clone ID: LIB3030-004-Q1-B1-E8
aaccactctctcataaaatcaaagactcatacatacaataaatacacaagtaattaacacagccatgaaatacaatgagatatcccatttcagccacactgaacacaagctgagattcgagtactcagaattccccttcaaatgtgatggctgcaaggaagtaggcatagggtcacgttacaaatgctccatctgtgacttcgaccttcacatgcactgtgccatgataacctccccgaccttgcaccaccctttctacaccaaatgcaacttccagttcatgtcaaagccaccgggagacacgcctcgttactgcaacgcgtgcgagaaggacgtgagtggcttcttgtaccactgcaaagcgtgcggcttcgacctccaaccgtgttgcgccaagctaccgttgctccttgatga

SEQ ID NO: 6963 - DNA, 400 bp, Glycine max
  unsure (1)..(400): unsure at all n locations
  Clone ID: LIB3030-004-Q1-B1-E9
atgatctcctacgccgacatgctcaagggatcacatggatgtcaacaacttcaactatcctccattgtcagagatgtaaactacagctgtggctcgtgtggttatgagctgaacttgaactccagcaaccgcaacacttgttctctcattgactcaaagtccataaagagaggcatcatctccttcttctccgtggatgagagcaggttcactcagatccagcaacttcactggccttcttggatgccctttttcaactccaagcgccaaagaaccaagcttttttgccgcaactgttgggaaccaccttggctatgcttacacttttgccctctcaatctcaatcctgggatggcatctctgatgattccagaatctatgatatcanactaaccgcttt

SEQ ID NO: 6964 - DNA, 386 bp, Glycine max
  unsure (1)..(386): unsure at all n locations
  Clone ID: LIB3030-004-Q1-B1-F1
tgaacctgctctgaatccaattccttccttcttcatgatcctctgtttaaggcaatacaacatttactacgcatactcataattagctttagtgtttatgtttagcatatcatggagaataataatcagtcgttttggcaattcagtgaccagctgaagttacaggcatccaatttggcgaaactttctctaaacgattcgatttggagcaacaattacatctccaataggcgtgatgaaaggattaattttgacatcaaagtgcggggtgagatcaactctttcaagtcaaaggattcaccttgtgattacaacgataacgtgaatggatctcttcntgccataccttacaacaacaacaacaacaacaacattactttgggtgt

SEQ ID NO: 6965 - DNA, 400 bp, Glycine max
  Clone ID: LIB3030-004-Q1-B1-F10
tttgaagcgtggttatgttgcctcaaactcaaaggatgaccctgcaaaggaggctgctaacttcacagcccaagtcatcatcatgaaccaccctggtcagattggaaatggctatgcccctgtcctcgactgccacacttctcacattgctgtcaagtttgctgaactcatgaccaagattgacaggcgatccggcaaagagcttgagaaggagcccaagtttttgaagaacggtgatgctggttttgttaagatgattccaaccaaacccatggttgttgaaactttctccgagtatcctccacttggtaggtttgctgttagggacatgcgtcaaactgttgctgtgggagtcatcaagaacgttgagaagaaggatcctaccggagccaaggtcacc

SEQ ID NO: 6966 - DNA, 405 bp, Glycine max
  Clone ID: LIB3030-004-Q1-B1-F11
aagagacagcagagcagagatctagcgtattctctcgctctttctttcactgtcacagagccacatccatgggcttcccagccaacggcgcctctgcggcccagcccctaaacttcctcatctacggccgcacgggctggattggcggcctcctcggctccctctgccgggcccagggcatctccttccattacggctcgggccgcctcgagaaccgggcctccctcgaaaccgacatagccctcctcaagccctcccacgtcttcaacgccgccggcgtcacgggccgccccaacgtcgactggtgcgagtcccacaaagtcgagaccatccgaaccaacgtcgtcggaaccctcactctcgccgacgtctgccgcgatcacggcctcattctcatcaactacg

SEQ ID NO: 6967 - DNA, 373 bp, Glycine max
  Clone ID: LIB3030-004-Q1-B1-F2
ccaagcacaaaggaaggatgggtggccttggggaattaaaaggaaaagaaaatttttgaggtgaaccttaaggaaatgaattctccttaaaaagcacagataacaaaggaggctgatacatctgaagtcattgaaacggtaaacctgcaatttaaaaatgctaaattgccggaaattgaggtggtgcggatcttgtgggatgttttaatggatgctgttcagtggtctggaaaaaatcagcaacagaatgcagatgcagcccttcgtcaggtaaaaacttgggcagaattgttgaatacattctgcaccagcgggaaacttgagctggagctgatgtacaaagtacagatgcaatgctatgaagatgctaaac

SEQ ID NO: 6968 - DNA, 381 bp, Glycine max
  Clone ID: LIB3030-004-Q1-B1-F4
aattcggtccaaaattggaacaatggcttgcaaatcccaagattcgtaagccaaaacaatttattggaactcataaatctcaggttcattctaaaaaagaggctgatactctttcaaagtacaagcctaccattaattctacatcattgctggctgatttgaaggatatggaaatgagaactgcaaaagcgttggaatacttcaacaccactcggcatatgatcctgtactatgaggatcttatacaaaatcgtactaagctaaaagatgttcaagagtttttaggattgccacagatggaattaacaagccgtcaggttaagatacacagaggaccattgtcagatcacattaaaaattgggatgatgtgaacaagacac

SEQ ID NO: 6969 - DNA, 220 bp, Glycine max
  Clone ID: LIB3030-004-Q1-B1-F5
caactccgaaatatatcatggtcgtaacgtaaaatcctcggtttcaacgttcattcgctatgtcaaggtacagaactatggcatcactctcaggaatttgctcctcatcaccgattcgcataatcttcgcaaaccaagccccatcggtgacagatgctctccgcaaagattacatgtccttcaccgcacgcctcgccgatcgtgtccctcagtgtcgtgc

SEQ ID NO: 6970 - DNA, 417 bp, Glycine max
  unsure (1)..(417): unsure at all n locations
  Clone ID: LIB3030-004-Q1-B1-F6
gaataatagagatgagattccggatactatatcagtttctggtcaaataaattgtcgagctgacttggaagggttgccagatgtgtcatttcacttggctggattgaacacagcaaaccttgaagttttatcgtatcatccttgtgctcaagtttcagatcaaggtttggataagcaaggagtgatgttttctccgccattaggtaattttgtgttgatgcgttatcaggcagcttatgcccttggaccccccataaagggattctatcagttgtcaatggtttctgaggataaaggtgcatttctattcaagttgcatttaatggaaggatataaggctcctttgacaatggaattctgtactgtgactatgcnctttcctaagangangattgtatctttggatgggactccttc

SEQ ID NO: 6971 - DNA, 407 bp, Glycine max
  Clone ID: LIB3030-004-Q1-B1-F7
aggaaatcggtggccacgacggtgccgagaagttcgctgactcctctatcttccaaagtatgaacgttggcgttgttcttgacgaaggtctggcttctcccgacccccattaccggtctttctatgccgaaaggagtccctggtggttggtcatcaaggcctttggtgttcccggccatggcgccaagctttatgataactctgccatggagaatctctttaagagcattgaaagtatccgaaggttccgctcctcgcagttcgacttgatcaaggccggcttcaaggccgaaggcgatgttgtttctgttaatatggtctttctcaaggctggaactccatctccaactggttttgtcatgaatttgcagccttctgaagcagaagctggatttgatattcgggtg

SEQ ID NO: 6972 - DNA, 413 bp, Glycine max
  unsure (1)..(413): unsure at all n locations
  Clone ID: LIB3030-004-Q1-B1-F8
gggagcttgatagggaagggaaagttgacaagtgggggattaaactccatcccatatggcccaatcatgtaaccaaggccttcttctctggaatgagagcaggcttcagtgggttggaagtggcaaatctaggaagcatggccaacaaaaaagagaacccagactaaattggaatgcaacttatgaaagtttgcttggaactagacaacctttccccaagcccatacctttatctgaaatggttgaattcctggtggatgtttgggagcgtgaagggatgtatggttgaaacttgataggttaaaatgctgagtgccttcaagtttgtttatactttcaatgatgtatttgactcctganaggttttcatgtatagttgtgcagagaagattaanagatcaaacacaagtttg

SEQ ID NO: 6973 - DNA, 406 bp, Glycine max
  Clone ID: LIB3030-004-Q1-B1-F9
agttcattctctttgcgcagttccctacctctcctttcaagatgcagatcttcgtcaagaccctcaccggaaagaccatcacccttgaggtggaaagctctgacaccatcgacaacgtcaaggccaagatccaggacaaggaaggaattcccccggatcagcaacgtctcatcttcgccggaaagcagctcgaggacggccgtaccctcgccgactacaacatccagaaggagtcaacccttcaccttgtccttcgtctccgtggtggcatgcagatcttcgtcaagactctcactggcaaaaccataaccctagaggtcgaaagctctgacaccattgacaacgtcaaggccaagatccaggacaaggagggaatcccccagaccagcaacgtctcatcttcgcc

SEQ ID NO: 6974 - DNA, 368 bp, Glycine max
  Clone ID: LIB3030-004-Q1-B1-G1
atctcttccaattagaaagctttccacaattcaccaaaatttctccaaggctgattcaattccaaaggcagaagagtactgtagttttccacagagccagaacaaactgcagagtttagttgatttaatcatgtggagagatatctctagatcagcatttatcttcgggattggaacattcgccatagttttatcttcttatgcaaaagatatcaatctgagtcttatttctgtaatgtcctatattggccttgtctatctagctgttatcttcctctatagatcactaatatgcaggggggtcatagatgtagaggacacaaactatgtactacgagaagaagaagcaatttgggtgctaaaattga

SEQ ID NO: 6975 - DNA, 403 bp, Glycine max
  Clone ID: LIB3030-004-Q1-B1-G10
gagagtttcatttggaccaagtttatgcttcaaatattctcaacatatggagtggtatcaccaacttcttccctttgattggtgccttcatttctgatgcctatgttggtcgcttctggaccatagcttttgcttccttttcttctctactggggatggtggtggtgactttaacagcatggttaccagagttgcatcctccaccatgcactcctcagcaacaagcattgaaccaatgtgttaaagctagcacacctcacctaggtgctctacttacgggactttgcctattaagcgtaggctctgctggcataaggccatgtagcatcccatttggtgtggaccaatttgacccctccacagatgaagggaaaaaaggtatcaatagcttctttaattggta

SEQ ID NO: 6976 - DNA, 155 bp, Glycine max
  Clone ID: LIB3030-004-Q1-B1-G12
cgaaaataagtccggttttccagacagtgattgtttttctttggtgttttttcccttttatgttagaccattgttagggcgtttggaccttttattgttctactattaccatttgaacatcgaatggattttaataaatcactttgtatgcgtgc

SEQ ID NO: 6977 - DNA, 357 bp, Glycine max
  unsure (1)..(357): unsure at all n locations
  Clone ID: LIB3030-004-Q1-B1-G3
ccaacctcaataaaagaatttgggaatttttcccccttccttggtaaccgaaccttggaacccaaaggcccaaacctcaaacaaggacaaaatgccttccccctcggttttccaatcactcccatcgcttcaaaaccctaacttgagccaacccaatttcttcaatttccgcttaccgtcgctctgtcaccgtcccctcgtcaaaagcactgcaacttttcaccgtagaatcctctgcaaagccttcagagattctggcgaggacatcaaggcggtgctcaagtccgacgacggtggtggcagcggcgacggcggcggcgacggtgggggtggnggtgaccgggatgcggagaagaa

SEQ ID NO: 6978 - DNA, 401 bp, Glycine max
  unsure (1)..(401): unsure at all n locations
  Clone ID: LIB3030-004-Q1-B1-G4
tcggtccaaggaagaaattgtataaccggaataaccttacaatttgaggaataccaaggttccggaataccgaaatggaaagctagttatatcagccaatagtttgtcccatggattgagtctgttcaaggaaggcaagagtattgggaatctgaagactaatgaatctaacaaggaaaatgctggaaaagatattactggtgcaaagaatgaattgaattgtgacaaccaagcacctgaaaacaagagtgagacagagaaatccataccagtaacgaagaaagatggcgaaaatcctacacctgcaaaagctgaagttcctgacaacgagtttgagaagcgcataagacaagaggttatccctgcaaatgagatangggttacatttgcagatattggtg

SEQ ID NO: 6979 - DNA, 390 bp, Glycine max
  Clone ID: LIB3030-004-Q1-B1-G5
gtcgtctcaagggccaactcatgatgagattgattttgaattcttgggaaacgtgagcggtgacccttacattctccacacaaacgtgtttaccaaaggccaagggaacagagagcaacagttctatctctggttcgaccccaccagaaacttccacacttactccatcatctggaagcctcaacacatcatattcttggtcgataacattcccataagggtgttcaagaatgctgagactattggcgttcctttcccgaagaaccaacccatgagaatctattctagcttgtggaacgctgatgactggccaccagaggtggtttggtgaaaactgattggtcaaaagcaccctttacagcatactaccgcaatttcaaagccacagag

SEQ ID NO: 6980 - DNA, 422 bp, Glycine max
  Clone ID: LIB3030-004-Q1-B1-G6
gctagattcacttgtgtttatttttttcttcctttttctctttttataatatcagcccccaaactcccttgtgtacagtgatcgatctcaagaagaaagactcaaaaaatggaggggaatctagagaagaagttgctgagcaaagaggaagtgtcagaagaagataatttatcattggtgaagagggtgtgggaagagagcaaagagatgtggatagtggcagcaccagccatattcacaaggtttacgacctttggcatcaatgttataagccaagcttttattggtcatattggttcaagagaactcgctgcctatgctcttgtattcactgtcatcatacgtttcgccaatggtattctgttaggaatgtcaagtgcgttatcaacactttgtggacaagcatacggtgcaaaagaata

SEQ ID NO: 6981 - DNA, 416 bp, Glycine max
  Clone ID: LIB3030-004-Q1-B1-G7
tactcactcacctgtttttagtagtttcttccctattttctgttcataactcagtttgtaactatgactgctgaggttatggctcaagaggagacacaagcagctgaggttgttgttgctgttgagcccctgaaagaggagaaggttgctgaagaaaatgtgaaaccaagagagtcatcagtggaagcatccaaacccaaaatggtggagaaaagctcttcttacaaggaagaaagcaactacctttctgatctcaaggagtttgaaagaaaggctttgagtgaactcaagtcaaagcttgaggaagctatcttggggaacaccctttttgagccaaagaaggaggctttgctagagaatgaagagaagaaaaatgaaggtgaagagaaggaagaagaggaggagaaaaaggttga

SEQ ID NO: 6982 - DNA, 413 bp, Glycine max
  Clone ID: LIB3030-004-Q1-B1-G8
caaatagccctcttggccttcaatttcgtccaattccaaatcatggctagctcttcagttttcacgtcttacattgttttgagtctagtgatggcactagcaattagcggtttcaatttcaaaggggcagaggcagcacgtgccttctttgtgtttggtgattctctcgttgacaatggcaacaacaactacttagccaccacagctagagcagacgctccaccttatggcattgattatccaactcgcagacccactggccgtttctctaatggcctcaatattcctgattttatcagtcaagaacttgggtcagagtccacgttgccatatttaagtcctgagctcaacggggaaagattgctcgtgggtgccaactttgcttctgctggcattggaatcctcaatgacac

SEQ ID NO: 6983 - DNA, 372 bp, Glycine max
  Clone ID: LIB3030-004-Q1-B1-H1
aaacgacaacgcttcttctttttctcttctctcatttttcagtttctccgtttcttattcgttagatctcatcttacactcgccatcaagttcgtctcgcgccaccgtcgacgcagctccgaccacctcctttggttccctcactttctcgctcttcttcttctcagaaatatgccttctcagaaggttgaaacgggtcatcaagacacggtccatgatgttgcgatggattactatggtaagaggctggccacggcttcatcagatcacacaattaagataattggggtcagcaacacggcctcccagcatctagcaactttgactggttcacaaggacctgtatggcaagtggtgtgggctcaccctaag

SEQ ID NO: 6984 - DNA, 407 bp, Glycine max
  unsure (1)..(407): unsure at all n locations
  Clone ID: LIB3030-004-Q1-B1-H10
gatctattctattcttcaatatcttagggttccgacagattccccatcaattcaaccacttgccgtgttagttgatccattcttataaaaagatcaaagactcattatttatagccaaaggccttctgggtcgtcgtgaatctatcttgtgtttgagagattaagacaaaactttttgctttgcaaatggctgctgcaactgctgcaactgcttcttggatgcgattcaaaggcggcaaggaaaggaagctaaccaagatgaataaatccaggattaattgctcttattcttcttcttcttctgtgatagatccttacaagaccttaagaataaaacgaggtgcctctgaatctgaggttangaaggctttcagacagctcgctctgcagtaccatccagatgtgtg

SEQ ID NO: 6985 - DNA, 401 bp, Glycine max
  Clone ID: LIB3030-004-Q1-B1-H11
attcaacgtcatagttcaaagaaacgacaagccatgatggattcctctggtgccaccaacgagaagctcttagaaaatggcactccatcttcttctcaaatgagaaaaggtggcttacgaaccatgcccttcatcatagtgaacgagtctctggagaaagtggcgagctacggaatcatgcccaacatgatactgtatctgagggacgaataccgcatgtctattgcgaagggcacaagcgtaatttacacttggactgccgcgtccgacatcttgtccatcttcggggcattcctctcagattcttacttgggtcgattcctcgtcattgctatcggttccttctccagccttcttggtttaaccatgttgtggttaactgccatgatacctgacctaaa

SEQ ID NO: 6986 - DNA, 190 bp, Glycine max
  Clone ID: LIB3030-004-Q1-B1-H2
ctcgttcggacaatctggcacagtgtatctgttcacacatgaagcatcactaacggataatgaggatgatacccgcgtcagtacatgtagagcttagtgaatatttggtccagaagctagtgcacctttccgaaaattatgtagccacatcttcagcggttgtttgggagtggttgtaggaaaatcagct

SEQ ID NO: 6987 - DNA, 256 bp, Glycine max
  Clone ID: LIB3030-004-Q1-B1-H3
atccggtccaagctcaaaaataattgggaaaataaggacttggccagaccaacaaccccaaaggggaaacctttgaaccacaaacctttaaagggaaaaatttgggatccaaacaaccttaaaaatcctccaactccaacggttgaggttgcccgtttgggggcgggaaacatggcaacgggccaactttacagccaccaaaaaccccccaaacaacttctctggtgatggaacaatcccaattgaggtaaccgat

SEQ ID NO: 6988 - DNA, 347 bp, Glycine max
  Clone ID: LIB3030-004-Q1-B1-H4
caagaatactgggcagaagtgagcaacaagttcaaagaccattgtcaaaaggggggcagatgtctttgtcttggctttttctttagttagtcgcgcaagctatgagaatgtgctgaagaagtggatccctgaactccagcattttgcccctggcatcccaatggtattacttggcacaaaattggatctgcgcgataacaggcacgatttggctgatgagcctgtcgtggtgcccgtgactactgagcagggtgaggaactctgtcaaaatattggagctacctacgataatgagtgcagctcagagactcaacagaatgtggaggcagtttttgatgctgcgatta

SEQ ID NO: 6989 - DNA, 345 bp, Glycine max
  Clone ID: LIB3030-004-Q1-B1-H5
aaggaggatccctgtgctagctcgatcaaagatcaaagatggaggagcggactcgcagcattctgattttgatgaccttgctttccatctccattgctggcggcaatgcaggtggcttgcagcatcataagggtaggcatggtaagcatggtcgtcatatgtctgctcgtaatgtgacttacgacggtaagtcactgttcattaacggaaggcgcgagatcctttttttccggctccgtccattacacacgaagcaccccagatatgtggcctgacattcttgacaaagcaaggcgcggaggcttgaacgtcattcaaactttacgttttctggaacgctcacga

SEQ ID NO: 6990 - DNA, 147 bp, Glycine max
  Clone ID: LIB3030-004-Q1-B1-H6
cttgaaacaaagtatattttgtctcatgtagttttaagacaacttgattaggctgagtctgttgcgaaaattttccttgtatgatgacgatgatgtttaccatctcttccgcgtggtcaattttctaaatatattcctttcctgaat

SEQ ID NO: 6991 - DNA, 386 bp, Glycine max
  unsure (1)..(386): unsure at all n locations
  Clone ID: LIB3030-004-Q1-B1-H7
cttttgagtcccgaccaaaaccctaatcgagttcgattgcaaaacatctcagtttttgaattccaccttctccgaccaatggctgccaaacctcttactaccgaggcgattgcgcttacggaaaagaagatggacatgacactagatgacataatcaaaatgtctaaaaacccgaagaataagaagcaaagaagggttccgaacaaaagtcaaaaattttcaaacaattttactcaggataagtctgcaaaggtccagcgttatatggaatcgagatcttctcttagacagggggctcttgcaaaaagaaggtctaatttccanggaaaacaatttcctgctgcagttgaagttgcgcgaaaagctgttactgctcctctgcacaa

SEQ ID NO: 6992 - DNA, 425 bp, Glycine max
  Clone ID: LIB3030-004-Q1-B1-H8
caagaatagtgttctaagagtgagcaacaacttcaaacaccattgtgagaaatggcttccaagggtgcacttctcttgtgtctcaacattctcttcttcactgtggtaagctccacatatgtcccatgcaacccaccccctaaaactcctaaacacacacctgtcccaaagccaccttccccaaagcaaccaagttgccccaaagacaccattaagtttggtgtgtgtgctgatgtgttaggtttgattaacgtgcaacttgggaagccaccaaagaccccatgctgcaacctcattcagggtcttgctgatcttgaagctgcggtgtgcctttgcaccgctctcaaagctaatgtgttgggcatcaaccttaatgtcccagtcaagttgagcttgcttctcaactactgtggaaagggtgttcc

SEQ ID NO: 6993 - DNA, 386 bp, Glycine max
  unsure (1)..(386): unsure at all n locations
  Clone ID: LIB3030-004-Q1-B1-H9
caaaggcaagttcaaccaattttttgggactgggagacgcttagatggaaactcaattcctcctgtttatccttcacggccttctgatgttccaaatgtcaattcattgtcttttacaaattctagttcaccaaatttcgctcgtccatctcagggaaagctagagtttgcatcgagagtttttaccgcacaaaaataataggaaagataattctggtgttctaacccaatgtcttctgcagtttggcccttcttatatagtaataattagctgactgcaaactaatatcattttcctatttactgtangaaaagaccgagtcaaaacaagaggcaccccaaatttcagcctttcactgggaaagaagtattcccctaagatataa

SEQ ID NO: 6994 - DNA, 364 bp, Glycine max
  Clone ID: LIB3030-005-Q1-B1-A1
gaggatgcaatggaggttttcttctcccaatgtgtgccactttacaagcatgcattagatggcaattggcaagcagcaaagcacatcttagatgcaaaccctgcactgaagactgctgccatagcacctgggtggcccacagtgctgcatgttgctgcaggcacaaaccattatcactttgtggaggagttgctcaacatattagacaatgatgcaattcaattgcaggataaaaagggcaacactgccttttgctttgttgctgcggctggcaattggcgcattgctgagttaatgctgaaaagaaatatacttctgccaacagtcaagggtggagatggaatgacccctcttcactttgctg

SEQ ID NO: 6995 - DNA, 370 bp, Glycine max
  Clone ID: LIB3030-005-Q1-B1-A10
gagagagagaacttcaactgagggtgagagtgacacaaatctagggagcactactctaaaagttctattagattcttcaaaacatgaccatgcatcgcgagtcttgggcttttgtcttcggcgttatgggcaacatcatctcctttggagtgttccttgctccattgccaaccttttaccaaatctacaagaagaaatccactgaagggttccagtcacttccttatgttgttgcactgttcagtgcaatgctttggatttactatgctttcgtcaaaagggaagctgccctccttctcattaccattaacacatttggaattgttgtggagtcaatttaccttgcaatcttcctactttatgccccaag

SEQ ID NO: 6996 - DNA, 386 bp, Glycine max
  Clone ID: LIB3030-005-Q1-B1-A11
aatggaatttcgatgctcagtcatctcttttaccattctcttctctcttgctcttgcaggagagagccatgtccatgcatcgctacctgaggaagattattgggaagctgtttggccaaacactcccattcccactgcactgcgagagcttctaaagcctctccctgcaggtgttgaaatcgatgaactccctaagcaaattgatgatacacagtacccaaaaacattcttctataaagaagaccttcatccaggcaaaacaatgaaagtacaattcaccaagcgtccctatgcacaaccttatggtgtatatacatggttaacggatattaaagacacctctaaagaaagatatagttttgaagagatatgcatcaagaaagaaa

SEQ ID NO: 6997 - DNA, 378 bp, Glycine max
  Clone ID: LIB3030-005-Q1-B1-A12
acaaattcgtgatttaccatttaccacaccaaaaccaatcggatcgtttcctctgcggagtcagaaatccatggatccctacaagaatcggccatcaagcgccttcaattctcccttctggactactaattccggtgctcccatctggaacaacaactcatcgctgactgttggatctagaggtccaattctgctggaagattaccatctggtggagaagcttgcaaactttgacagggaacggatccccgaacgtgttgtccatgctcgtggagctagcgcaaagggtttctttgaagtcacgcatgacatttctcacctcacatgtgccgatttcctccgagcccctggagttcagacccctctcatcgtccgttt

SEQ ID NO: 6998 - DNA, 336 bp, Glycine max
  Clone ID: LIB3030-005-Q1-B1-A2
gagaaagaataatcaagcaagctctcgtcctttccgttccatcaaaacttgccactttcttctctccctccctctacaacagggagggagtgtgtacggtcaactcttccataccaacaccctctccttcgttcccatgtcgtagtcgcggtgcaactcttgaatggataaagacaaactcctcgttgagtgcttatggaggaagagaataagaagcagaagtgaattacacttttcccatacactcaaactagcttatgcgtgaaaatgttgcatcgcgtctgggtggtggatttgtgaataggcacgagttgtttccctgtctacgtagtgtca

SEQ ID NO: 6999 - DNA, 399 bp, Glycine max
  Clone ID: LIB3030-005-Q1-B1-A3
aggactagattgtattgcagactgatcaaatatccccaagtattgttattatcatcatcattgcatctatctatctatctatcttctattcattttctctcattgtatctgatttgtgttgttttttgctaacacaagcaatggcggttgtagagaaggggaaaaagaagtacatcacctcagaggagctgaagggtcacaacaaggagggagatttatggatctcaattcaaggtaaggtgtacaatgtctcagattgggtgaaggagcaccctggtggtgatgttcctatctcaaaccttgctggccaggatgtcactgatgcattcataggcatacatcctggcacagcatggtcacaccttgacaaattcttcactggctaccacctcagtgact

SEQ ID NO: 7000 - DNA, 410 bp, Glycine max
  Clone ID: LIB3030-005-Q1-B1-A4
gatacaatagagatggcaaagctatttttgaaacaggcaaagcaatacgcagatgcaagaccaagctatcctccacaactcttccaattcattgcttccaagactccctctcactacctcgcttgggacgtcggcactgggagcggccaagctgccaaatctttagctgcaatatacaagaatgtgatagccacagatgctagtgacaaacaacttgaatttgcagccaagctcccaaatgtgagataccaacacaccccttcaaccatgtcgacggccgagcttgaacaaatggtggcatctgaaggaaccatagaacttgtgaccatagcacaagccctgcattggtttggacgcccaaccctctacgaacaagttgaattgggttctcaggaaacctcatggaatca

SEQ ID NO: 7001 - DNA, 322 bp, Glycine max
  unsure (1)..(322): unsure at all n locations
  Clone ID: LIB3030-005-Q1-B1-A6
taaaaacaaccgtgcacgggttccaagaagaaaaaaatcccgacagagtagtgtttgtgggagagagagactctgttctgtcgtccattatctaatccaaaatgacaacaacggtggtgccggtggcagcagctgcaacttggttgaaccatcctccaaaccaagcattaacatggcgtctctctgtattgccccgaaacgctgcgtttttggtccaccaccatctcatgaaggagaagaaganaaagctaatgtcttggtcaattggtgcccagccctcacctttcgacctctctcctcctcccatcgaccatgacttcct

SEQ ID NO: 7002 - DNA, 396 bp, Glycine max
  Clone ID: LIB3030-005-Q1-B1-A7
gtcttccttcacccatgcttggagtactctgcgccactcgccccaaaccttggcttctctccctcgtccacgtccacgcttccctgcctcgcctacctcattcccctctatcaccttcagcctcgccgccgccccgtcgccgccattccaccgcctgcaaactttttctctccggcggcgctgccgcctccatatggcacgctatcatgccccgaggtgatgacggattacggcgcggcgttgttgccgtccatgacttgaagggagagggatcgtggaatgtcgcttgggacgcgcggccggcacggtggctccaccgccccgactccgcgtggctcctctttggtgtctgtgcttgtctggcgccgccgccgggttgcctggatgctgacacta

SEQ ID NO: 7003 - DNA, 402 bp, Glycine max
  Clone ID: LIB3030-005-Q1-B1-A8
gtcaagaacatgatcaccggcgctgcccagatggacggcgccatcctcgtcgtctccggcgccgacggcccaatgccccaaaccaaagaacacattcttttggccaaacaagtcggcgttcccaacattgtcgtcttcctcaacaaacaggaccaggttgatgacgaggagcttcttcagttagtagaattggaggtccgggagcttctttccaagtacgagttccccggagacgatgttccgattatctccggttccgctttgctgtctttggaagctttgatggccaaccctgccatcaagcgcggcgaaaaccaatgggttgataaaatttacgagctcatggaagctgtggatgactacattcccatccctcagcgccaaactgaaactccctttttg

SEQ ID NO: 7004 - DNA, 390 bp, Glycine max
  Clone ID: LIB3030-005-Q1-B1-A9
gaagaaagagaatggtgacggaccaggatatagcgaaaggggtggagtctctactgcgtcactctgacccaaactccataactacggttaacggtgtcgttcagcagctggaggccaaactagggttagacctctctcacaaggccagtttcatcagagaccagatcgaccatcttctccggtcacagccacaggcatttgttcctcaccctcctccacttcacaaagactattttgcccctcacccccaaccgcactttccgaccacccactttccttcccattttgccctccatgacgagatcaacttccagcagcacccccgcgctcctccaccgtgcaaagttgagacctttcctcctcaaaatgctcacactgttgcccctcctc

SEQ ID NO: 7005 - DNA, 182 bp, Glycine max
  Clone ID: LIB3030-005-Q1-B1-B1
tccaaccttcaactacttgagcttcggttttctcactgccctcaacaacctatggacctggctcgctctcttaaccgccgccctcaacttctggaagattcgctccgcgggctgccccaagcccaagcccaagaccgaaggccaagcccaaccttttttcaaggctgaagctgtccccgatt

SEQ ID NO: 7006 - DNA, 370 bp, Glycine max
  Clone ID: LIB3030-005-Q1-B1-B10
cttaactctcttcttcttcttcttcttcgcagttctctttcaatattggcatcctctctgtctttggtcacttggaagacaattatagagaccagcttaaggaaaactactgcatagtggagaaagggtacaattctttccctaacaggattcccggaactgtatactccaaagcactcttggcaaggaggagaatcagggagattataagtgagatcatttgtaaaagaaaggagcagagattgatggagatggatctattaggccacttgctgaactacaaggatgaaaaagaacaaacgctaagtgatgaccaaattgctgataatgtaattggggtactatttgcagctcaagatactacagcaag

SEQ ID NO: 7007 - DNA, 372 bp, Glycine max
  unsure (1)..(372): unsure at all n locations
  Clone ID: LIB3030-005-Q1-B1-B11
gcaaacttcaacttgttatcaaaggagagaaanaattcaagcacaaaaaatggcggagaagaaatggtgatcctaagaggtggtgttgccggtgccaaccttgcaaaaactatacaacgtcaagccaacgtcacccttattgattcgaaaggaatattttgagattccatgggcaagtttgaggggattggttgagccaacttttgctgaaaggatagtgatcaaccatagagagtacttcaaaaagggtaaccttgttgtatccagtgctgtcaacataactgaaactgcagtggtgactgaagatggccagcagattgcctatgactatcttgttattgccactggacacacaggaccaatccccaaaac

SEQ ID NO: 7008 - DNA, 354 bp, Glycine max
  unsure (1)..(354): unsure at all n locations
  Clone ID: LIB3030-005-Q1-B1-B12
atctcaatgggttcttcttctattacaacatcgcccgcaaccatgaccatggctgcgatcgtgctcctgttcacggtctttgccgtttcctccgccctagacatgtcgataatctcgtacgacagcgcccacgcggacaaggccgccacgttgcgcaccgaggaggagctgatgtccatgtacgagcagtggctcgtgaagcacgggaaggtgtacaacgcgctcggcgagaaggagaagcgcttccagatcttcaaggacaacctgcgattcatcgacgaccacaactccgcggaggaccgaacctacaagctcggactgaaccggttcgctgatctcnacaacgaggaatac

SEQ ID NO: 7009 - DNA, 387 bp, Glycine max
  Clone ID: LIB3030-005-Q1-B1-B2
caacttacggctaaattctcaaagatttaaactttgtctcagagtttccaaattcacccaaccccagagagaaaatgtctctaatcccaaatttcttcggtggcagaaggagcaacgttttcgatcctttttccctcgacgtctgggaccccttcaaggattttcctttcccaaacactctttcttcagcttcctttcctgaattttctcgggaaaattctgcattcgtgagcactcgtgtggattggaaggagaccccagaagcacacgtattcaaggctgatattccagggctgaagaaggaggaagtgaaggttcagattgaagatgataaggttcttcagataagcggagagaggaacgttgagaaggaagataggaataaca

SEQ ID NO: 7010 - DNA, 179 bp, Glycine max
  Clone ID: LIB3030-005-Q1-B1-B3
ctcactcttctccctcaccgagcttcacggtgctgcctttcagaactgggaggcccttggcttcttcatcggccggttccggcgactcgccgccgaattgggatcagggttggctcagcttggaccatctcacgggtgttttcgacaattcatgtgccgagttgagcgtggacttgttg

SEQ ID NO: 7011 - DNA, 384 bp, Glycine max
  Clone ID: LIB3030-005-Q1-B1-B4
atcgccaaagagaaaaagaaccctcaaccaaacaacaacaacaacaaaaaaaaagccctagaaaagattttggagaagcaatttctcactcctgaaaatctcatcctcttcttctttacatttgttttggataaaacattttgctgatactgaattttattttctcttgttttcgtttcttttcgaccttttttttttttctgcttcgttgttttcagggagaaagggataggagtaataaaagagagtgcattcggtttggttcttcgcctcgggactcgaatcttcgatgcctctctgttttttcttctctggcgcctctttttctattctcaaattaaggtttccgtgagcgttcctttttctcgattctccgcaaactat

SEQ ID NO: 7012 - DNA, 344 bp, Glycine max
  Clone ID: LIB3030-005-Q1-B1-B5
gtcgctaatcctagttccttcaactcctcgctggcaacaacagcagtactaccattagccgcgtttttcaaaagtgattttcgagaattagcgatgggaattgaaagaggaggcttcaagggattcaggagcgcctggagcgtgccgcccaagccgtgcgattcctgcaagctggcctcggcggcgcttttctgccgccccgattccgcgtttctctgcatcgcctgcgattccaacattcactgctcgaacaaactcgcgtcgcgccacgagcgcgtgtggatgtgtgaggtgtgcgagcaggcacccgctgctgtcacgtgcaaagccgacgccggcgccct

SEQ ID NO: 7013 - DNA, 411 bp, Glycine max
  Clone ID: LIB3030-005-Q1-B1-B8
ccttgttcttctttctctattgtctatagtcatctccattgttctcttcattacccacacacacaaaagaaacaacactccaagaggaccaccaggtcctccacctcttcctctcatcggcaaccttcaccaactccacaactcatccccacatctctgcctatggcaactcgccaaactccacggtcctctcatgtcgtttcgcctcggcgccgtgcaaaccgtcgtggtttcatcggccagaatcgccgaacaaatcttgaaaacccacgacctcaacttcgcttccaggcctctcttcgtgggcccgagaaagctctcttacgacgggttggacatgggcttcgcaccgtacggcccgtactggagagaaatgaagaaactctgcatcgttcacctcttcagcgcgca

SEQ ID NO: 7014 - DNA, 352 bp, Glycine max
  Clone ID: LIB3030-005-Q1-B1-B9
aaatcgctgaactcgaggggattagggttcgcgcgttcttcaagtggtggtccatcaccggaatccgctcctccggcgatgatatcgtcttcgaggtcggtatggtcacggcgaagtatccatcgaagaatttcgacgatagccccgcgtgcgagggccagcactcttcttcgtgaaaagggtattagctacttattcgcagccttcgtgtgttatgtaatgatatagcatccatccagtgtccactaagtgcagattgtgtgtaatgtaatattacaaggatagtattacttttacatcatcgtatttatgccacgacgaatccactttaatgttcatattacccctgaat

SEQ ID NO: 7015 - DNA, 231 bp, Glycine max
  Clone ID: LIB3030-005-Q1-B1-C1
atcaatcctaagctcagactttcaaagtttcttcgatcgtcactgtgccatggatcgctccaaaactgcctcagaatccgacgtctctgtccacgcaatattcggttctcgctatgtcagaacttcgctgcccaagttcaagatggcggaggaatcgattgcgaccgaggcagcataccagatcataaatcacgagttgatgttgggttggaactcaaagttgagtttggt

SEQ ID NO: 7016 - DNA, 369 bp, Glycine max
  Clone ID: LIB3030-005-Q1-B1-C10
gtttctttttcttctatagagacacacggaaagagtctcagagcaataaacacccttcaatggctaccactaaagtttacattgtttactattctacgtacggacatgttgagaagttagctgaagagattaaaaagggagctggttccgttgaaggtgtggaagcaaagctatggcaggtacctgaaacactttctgaagaggtccttgggaagatgggtgcacctccaaagagtgatgtaccgattattacacccaacgagctacctgaggctgatggcttattgcttggtttccccacaagatttggactgatggctgctcaattcaaagctttcatggatgcaactggaggcctgtggcgcacac

SEQ ID NO: 7017 - DNA, 374 bp, Glycine max
  Clone ID: LIB3030-005-Q1-B1-C11
tccaaggatggatttgtatgcaacctacaaaaggcttttggtttccctattattgcatttcccttgtgtgctactttaaagggtgagaataccccgtcaaaggttgggttcgagtagaaataggtgctttgggttacatcttgggttgacatttgttcgtcgtgggtttttgaacttaaatcacaggtggtccaaaaatgccaaaaaaaagttattcggaagaggttcaaagatggagtgcttaattggaattcaaatcttatagcgagacatgctcaattgcattttagctttagggaaattgctctattgtcgtattgttttgatgatgattataatcacatagttgacgtgcttgctggagagcattcaaa

SEQ ID NO: 7018 - DNA, 372 bp, Glycine max
  unsure (1)..(372): unsure at all n locations
  Clone ID: LIB3030-005-Q1-B1-C12
cattcgttcactgtcacttttaccaatcctaacactttcttctctctgttttccttcttcctcgcatcaatggagttggacggcgttctcctcggcatgtgcaaccctctcctcgacatctctgccgtcgtcgacgacgctttcttgcaaaaatacggtatcaagttgaacgatgcgattctcgccgaggataaacacaaacctatgtatgaagaattggctaacaatcctaatgtggagtacattgctggaggtgctactcagaattcaatcagggttgctcagtggatgcttcaagcaccaggtgccacaagttatataggttgcatangaaaggacaaatttggagaagagatgaagaagaaatgttca

SEQ ID NO: 7019 - DNA, 363 bp, Glycine max
  unsure (1)..(363): unsure at all n locations
  Clone ID: LIB3030-005-Q1-B1-C2
gaaccaggtcagactcaacgaggcgcttcgcacgccggacgatttgcagcggctttactcagaggttcatctcctcagtaccctcaagcatcagtccatcataagattctacacttcttggattgatattgataacagggccttcaactttatcacagaattgttcacatctgggtcactgagagaatacaggaagaattataaacgtgtcaacatacaagctataaagaattgggcttgccaaatcttgcaaggtcttgtttatctacattgccatgatccaccagtgatccatanggacctcaaatgtgataacatatttgtcaatggtcatcttggacaagtaaaaattggtgatctggg

SEQ ID NO: 7020 - DNA, 368 bp, Glycine max
  Clone ID: LIB3030-005-Q1-B1-C4
aggtggtagacattgttttagaattattgaaagtttatcaaatagagtttgtttcatcttcagatattggtttcttgaagagtatcaatgggaaatcaaacaaggcaactaaaggcctccttaaacttcctaacaataataaggttgaaccctcaaccaagaagccatatggaagtattgtgaaggatcttgtcacaatcaagtcgtttgcatcaagaataatggtcccaaaagaatacatatggccagttaaaccagacaaatatctaggacttcccacaacacttgtggctgatgcccataaatcaggactagaagtttatgcctctggttttgctaatgacttctttacaagttatagttatgac

SEQ ID NO: 7021 - DNA, 375 bp, Glycine max
  unsure (1)..(375): unsure at all n locations
  Clone ID: LIB3030-005-Q1-B1-C5
ctcactcccaatttgaagcttaaaaagcagtcagtaccaaccttcctttctgttacactgcagattctctaaaccactaactcttctcatccatcaacaagagatgaaaggcatagacatcttctgtgcatcacaggcctcaacagctatatgtcttagcatggatcaaccctcttcctcctattcctcttcttcatcttccatttccaacactgctcaatttggtggcagagccattgaccgccacnaacccatcatcacagatcctaaaagaccccctcaagagaacttcatttccccaactccttcttctcagtccccaaattgagccaaacctttgcaagattatctcaaaaggacaaagaaaaactccac

SEQ ID NO: 7022 - DNA, 395 bp, Glycine max
  Clone ID: LIB3030-005-Q1-B1-C6
caaagtttctgtcttcacactccaaatgagaagcatatctcatcaccaatcaccaccgctaccagtgtcttcacttgcactcttttatttaatttagtgaatgatgaacaagctggtggtagaagttgtggaggcgagcgacctcatgcccaaagatggggaagggtcagctagcccctttgtagaggtcaagttcgatgagcagcagcacagcactgaaacgaggcacaaagacctgaatccttgttggaatgaaaagcttgtgttcaacatcaataaccccagagatcttgcccacaagacaattgaggtggttgtatacaataacaatcacaatgatcggaaccacaataacttccttggaagggtgagactttcaggctcctcaatccctc

SEQ ID NO: 7023 - DNA, 360 bp, Glycine max
  Clone ID: LIB3030-005-Q1-B1-C7
acgggcctgattggggaagaagcgttctcttctctatcattcagaaaagacgagcgagatcttcatttattttatttctatttcaaataaaatcgtgtcttctcctctgtactgagacatggccgaagaagaagaagaagaagaatcagagctcagcgataagcagaaagtggaaatcgcgaaatggttcctcctcaattctcctcccggagaaatccaatacgttgccaaagatgtgaaatccattctcaacaacgacgatttgtacaaggaagccgcttccgaggcttttctcttttacaacaaatcgcacttgatttcccttccaatgttcaaccgaagcggagacgtactggttac

SEQ ID NO: 7024 - DNA, 336 bp, Glycine max
  Clone ID: LIB3030-005-Q1-B1-C8
gtatccgatcctctgtcctctcgaagctttcatcgttcaacatattctcaccatctcagtcatgggcctgctatcttgttttaggtctaccgtcctgagaaaatgttccaaaggaagctctggcatgtcaagattcctgtatacgaacaattttcaacgaaacttgatttcgtctggtggcaatgaatcgtattatgggtattttaacaggagatcatacacttcactttatatgggaactggaactgtgggtgggattacaagtgctagaatcagggtgccaaatgtatgatgtgaaggattcatgtgctcaagtcatctgtcaatcactcaaag

SEQ ID NO: 7025 - DNA, 393 bp, Glycine max
  Clone ID: LIB3030-005-Q1-B1-C9
tgggaattcactttactccaatccttatgcttggaacaacttggcaaatatactcttccttgattctcctgctggtgttggcttttcatattctaacacaacatctgatctgtatacagcaggtgaccaaaggacagctgaagatgcatatacattccttgttaattggtttgaaagatttcctcagtataagcatagagatttctacattgctggagaaagttatgcaggtcactatgttcctcagttgtctcaacttgtttaccggagaaataaaggaatcgagaatccagttataaatttcaagggttttatggttggaaatgcagtcattgatgatttccatgattatattggaacatttgagtactggtgggtcaatggtttgatttc

SEQ ID NO: 7026 - DNA, 334 bp, Glycine max
  Clone ID: LIB3030-005-Q1-B1-D1
caaaaccttccccttcatctgatttgcagagactaacccaagaaaggaccaaccaaaaccaagtgctttcttggagcttggtagagagagaaagtcccactttctctctcttctcttttttctttctgtgtgtgttgtgtgcgtgcgtgcgtctgagggtacatgcaaaacagtgagtttgagatagagaaagaaggagttcaagattgttgttcaattttgcaaaaactgcccatcaagtacttttgttgttttttttttcgattttgcttcttatccaacccgttcttgatttggaaggtgattcccggaaggaattgttaaggtgctgctg

SEQ ID NO: 7027 - DNA, 387 bp, Glycine max
  Clone ID: LIB3030-005-Q1-B1-D10
gcgaacgaacgaactaatcaatacaacgccatatctctgtgcatcgcttccttccctcgtcctcaattcgaatcaatttcctcaaagttgctcccacttttcttcgcatcataattcggaagaaactggtttcgatggtgcgagctccgaatccagagcatcgggaatcgaccacgccctttgtcgtacagggagagggtttgacaaatgatgggtttattcctcagatattttcatctatgccagctctcaatgatgcagcttcttatcttgcacaaacaacatcatacataactggatgtttctctgattattcagtggaacattcccccagactttttggtgcttctgacactcgtgcaccagagcttgtggattttccttcct

SEQ ID NO: 7028 - DNA, 380 bp, Glycine max
  Clone ID: LIB3030-005-Q1-B1-D11
agtgaaacgaagaagccctaactacgcacgcactcattcttgagaaagctcaatattcattcgtccatggcactctcttctcgtctcttttccaaatccaaattgatctatggctgtcaaatacttctgcaaaaggagcatgctattccagttcgtcactttgctaaagagtctgcccctcctgcccttaagggagatcagatgctgaagaacatttttgtggaggtgaagaacaaatttgagactgccataggaatattaaagaaggagaagataccattgacccagaagatccagctgctgtttctcattatgcaaaggtcatgaaaacagttagagagaaggcaagcttgttgtcggagtctcaagacatactatcc

SEQ ID NO: 7029 - DNA, 350 bp, Glycine max
  Clone ID: LIB3030-005-Q1-B1-D12
gactttgtctgaaactcagtgttcacctaagcacatggataaaaagtcaattgaccaaggtcacaatatggttagtaggaattttgatggcaaagaaactatttttgaccagacacatttgggtttacaagtaaacttagagagacaagacactagaatcaacaccaaatctacattagggattccgaccatcagtacacaaatttgtcaagaagtgaattccactggttcgtccctgagagacagtgtaccaaagcatcgacaatacataaagtctaaacctcctgaagcaatgggaactagtgtaagtagtaagattgtggaaacaaaaactaatcatgatatttctg

SEQ ID NO: 7030 - DNA, 377 bp, Glycine max
  Clone ID: LIB3030-005-Q1-B1-D2
caacttacggctaaattctcaaagatttaaactttgtctcagagtttccaaattcacccaaccccagagagaaaatgtctctaatcccaaatttcttcggtggcagaaggagcaacgttttcgatcctttttccctcgacgtctgggaccccttcaaggattttcctttcccaaacactctttcttcagcttcctttcctgaattttctcgggaaaattctgcattcgtgagcactcgtgtggattggaaggagaccccagaagcacacgtattcaaggctgatattccagggctgaagaaggaggaagtgaaggttcagattgaagatgataaggttcttcagataagcggagagaggaacgttgagaaggaagat

SEQ ID NO: 7031 - DNA, 330 bp, Glycine max
  Clone ID: LIB3030-005-Q1-B1-D3
caagtcagcatccaatcagaggttccatttctcttgattccctctcacccaagttccaatcgctcactactgcactatatgcttccaactaagagaccttgcgaaggactggttgcagaagaagagactcacattaccaacgacatcagcaacaccagcaacgacatcaacatcaacaacaacaacaccaacaacaataacaacagcaacatcagcagcagcatcagcagttctctcaagaagaatcggatcgccgctgccagaaacgccgattccacggtgaagaactacgacagcaccgaccagagcttcaacaacaacaacagcaac

SEQ ID NO: 7032 - DNA, 393 bp, Glycine max
  Clone ID: LIB3030-005-Q1-B1-D4
agaatgcagtgaaagaagaattcttcttctacacaacaaaagaacacactccatgtcaaacaaaccatatcaaagagaaagtgcttgggtgacttacactttctgaaaattgtgggctgggaattcctgctgccaaggatctaaacagaggggttacttgaagaggggagctgaactccaatcttgatgaggcagaaacaatcccatcattgtttatctgttcctcaaaacacggtttataatttgtgaatcaagttccaaaactaaagttcaattcaaagacaactacccaaactgctaaacttgggattgcaaacatgatgctggtctggcaagttgtttgagttatgagagttttgagccaagactgcaagtggtgctcttggttgctga

SEQ ID NO: 7033 - DNA, 374 bp, Glycine max
  Clone ID: LIB3030-005-Q1-B1-D5
ctcacataaagcatcttcctatggatccccctttaaatgatggtcgtccaaaagggatcatacatggatgtccaaactgcagtaattgtgtgaaggtatgtacctttcactttacctttccacattggaacagtcatgactatgtctcctttttgtttgtttgtttacccaaaaagactataagagaggttataaaaaaggatctcgaaattaatggtttgaatagaagtatggtacttgatagaacattatggcggaagttgatccatgtagccgaccccacctagtgggataaggcgttgttgttgttgttgttgttgttgtttgtttatcaaagtcttgaaccaggtaacagcaaggtggcatcctgaaga

SEQ ID NO: 7034 - DNA, 392 bp, Glycine max
  Clone ID: LIB3030-005-Q1-B1-D6
ctctgtagtatcaaacatacatacagcaaagtggagagtctttacagataaagcgagagaattttttctacagggaaaactagatgaagctgaaagactcttcctttctgctatagaagaagctaaagaaggtttcggcgagaaagatccgcatgttgcttctgcatgcaacaatctggcagaattgtagagggtcaaaaaggcatttgacaaagcagaaccattgtatttggaagctatcaacatattagaggaatcttttggtcctgatgatgtacgggttggggtcgctgttcagaaccttgggcagttttaccttggacagcggaagttggaagaagctcgtgttagctatgagcgtgctttgaagatagaaaggcgtgttctggggt

SEQ ID NO: 7035 - DNA, 390 bp, Glycine max
  unsure (1)..(390): unsure at all n locations
  Clone ID: LIB3030-005-Q1-B1-D7
caaaacaaaaaagagcagagagagagaggaaccatcaccaaccctaatttcttagctaaaccctattcgtttagcatttcctctcttttctcccacgcgtaaatcctctcccaaacttttcagatccaaatgaatcatggttttctgggtttttggctacggttcactggtgtggaaccctggattcgattacaatgagaagattataggtttcattaaggactacagacgcgtgtttgatttagcgtgcattgatcaccggggaacacctgaaaacccagcaggaacttgcacgttggacgagaacgaaggtgctatttgctgcggagctgcttattgtgttcgaggaggccctgaaaagganaaactggctatgcagtatttggagcg

SEQ ID NO: 7036 - DNA, 376 bp, Glycine max
  Clone ID: LIB3030-005-Q1-B1-D8
tcatttttctcactcttgttagttattcctggtacccattttgaacagtgatgaagcgtcatcataggtcaccacaccaccaacagagaagttgggctgaaatatgttgtttcggttggtcctgcttacagctcttctgggcaagggtggtcatgcgcaagtggtttaacatggggagctatgagtctgattacagtgctgaccctgttgatgatgattctgaaagtggttcagacaatgaagagcggggaagacagtcgcagtttgcggacaacagatgtaatgaagatgaagcttcatctgaatcaacagaatttcttccaaagttaaggaagcaaaagtcatcaacttatagatttcaattaattaaccaaaa

SEQ ID NO: 7037 - DNA, 423 bp, Glycine max
  Clone ID: LIB3030-005-Q1-B1-D9
gccttagttaaacccgaaattcggtccaaaattgcaattctcaattcaaaaccaaaaattaaaattgacaccttccccaatggcccggtcttccccggtttaatcctttaaactttgcatgcttcccttttcattcttcttctccacttccttctccgccaaacttaaccctaccatcgattcactctcactctctttcacactcacctcactccctctctccacagcaaaacctctaaacagaaacccaaatctcagaaccctttcttcttcttcttcctacaacataaaatcttcgttcaaatactccatggccctggtggttactctaccaataggaacccctccacagcatcaacaaatggtgttggacacaggaagccaactctcatggattcagtgccacaacaaaacccctccaac

SEQ ID NO: 7038 - DNA, 347 bp, Glycine max
  Clone ID: LIB3030-005-Q1-B1-E1
aaagaaagaagttctaaggaagagggaatatgcagaatacaaggtgctagttgtctatttgcaataacaacatcagcgatccaaccttagtattcttcaacccagagagatttgtaataataaattacaacaacttaaacgatggcaggaggagcttatgtagattcgggaaatgcaaagcaatttgatgggaaggtcacggcattcgtattggttacatgctttgtggcagccatgggaggcttactcttcggttatgatcttggaataaccggaggagtgacttctatggaaccatttctcatcaaattctttcccggtgtttataaacaaatgcaagatgatgt

SEQ ID NO: 7039 - DNA, 333 bp, Glycine max
  unsure (1)..(333): unsure at all n locations
  Clone ID: LIB3030-005-Q1-B1-E10
aaaagtttatttcctctgatcgtgtggtttctgagttctaagcactcacctctttcatacacgtttgttcgcttgttgagaagccatgggcgaggatttcgagttcccaagtgctggcaacatggaaatgcctgaggaggaagagtttgagagtccgatcctgaaggttggggaagagaaggagattgggaaaatggggctgaagaagaaattgctcaaggaaggtgaaggttgggacacccctgacagtggagaccaagttgaagtgcattatactggaaccttgcttgatggaaccaaatttgattctagccgcgatangggcaccccctt

SEQ ID NO: 7040 - DNA, 359 bp, Glycine max
  Clone ID: LIB3030-005-Q1-B1-E11
ctcaattgtgattagaattgcttagcttacattctagaactttaatgtattggaatggtatgtcaatggcactgattggaacctatcttaattgatgtattttgaattcaacagtcgttgtacttgtattgcatgggtgcctggaggtgatggttcttttgttgtttctcacactgatgggaatttgtatgtatacgaaaagaacaaagatggtgctggtgattcttctttcccagttgtaaaggatcaaactcaattttcggttgcgcatgcacgttacagtaagagtaatcctatagccagatggcatatatgccaatgttcaattaatagtatttccttcccaatgggatgggcat

SEQ ID NO: 7041 - DNA, 378 bp, Glycine max
  Clone ID: LIB3030-005-Q1-B1-E12
gtcagcatctatttcaaggtttcgtcttttttgtgccttttttcccccagaaattcataaattcgtggaagttcgaggctcgatttgtccaagcatggattctgcaagggatgcgagtggtgtggcagggaccgtgctaattcccatgcggtttgtgtggccgtacgggggaagaagtgtgtatctaagtggttctttcacgcggtggtctgaacttctacaaatgtcgcctgtggaaggctgcccaactgtgtttcaagttattcatagcttggtacctggtcatcatcagtacaagttttttgttgatggagaatggcggcatgatgaccttcaaccttgtgaatctggagaatatgggattgttaacactgtttc

SEQ ID NO: 7042 - DNA, 379 bp, Glycine max
  Clone ID: LIB3030-005-Q1-B1-E3
aagatggcctgtgaaaatgacaaaaaaggccacctattacttgccctagggctagtgctctgcgtcaccctgaccttcttcccaagggtgaccgaagggagggtgccctttgcatgcgaccctaggaacgggctcacgagggggttcaagttctgcaacacgcacgtgccgatccacgtgagggtgcaggacctcatagcgaggctcacattgccggaaaaaattaggctcgtcgttaacaatgccatcgccgtgcccaggctcggcatccaaggatacgagtggtggtcggaggcgctccacggcgtctccaatgtgggccccggcaccaagttcggtggggccttccctggcgcccacatgttccctcaagtcatct

SEQ ID NO: 7043 - DNA, 371 bp, Glycine max
  Clone ID: LIB3030-005-Q1-B1-E4
atggaatttggcaaaaagtagccatcgccccaacgatcccatttcccttgacttctctacgtgaagatccttgtgtcacatagagctagttaaaatgtccgagggaaatgcagggaaaggaaagagaatcgccatcattggcgtctcaaccttattgttggtggctatggttgtggcggtcacaattggggtcaatctcaatgagaatggttccaacaatgatatagaggacaacaagaaaaatcatgttgcttcttccataaaagccgtccaaaccctttgtcatcccacaaattatgagaaagaatgcgaggaaagccttatagctggggctggaaataccacagatccaaaagaactcatcaaaattt

SEQ ID NO: 7044 - DNA, 377 bp, Glycine max
  Clone ID: LIB3030-005-Q1-B1-E6
tgagaatgctaatgtgatcatggctacatatgaagatccacttctcggtgatgttcaggtctatccagagaaaggaacagttgctttttctgctggtttgcacggctgggcttttaccctgactaactttgccaagatgtatgcatctaagtttggagttgatgaaggaaaaatgatggaaaggctctggggtgaaaacttctttgatccagccacaaagaaatggtccagcaagaatactggttctgctacctgcaagcgtgggtttgttcagttctgttacgagcccatcaagcagattattaacacttgtatgaatgatcagaaggataagctgtggcctatgctgcaaaagcttggggtcaccatgaaatctg

SEQ ID NO: 7045 - DNA, 347 bp, Glycine max
  unsure (1)..(347): unsure at all n locations
  Clone ID: LIB3030-005-Q1-B1-E7
ctcaagaaaatggagcgttacgtgacgttcacggcaacactctaccgcgaaatggaggagctcacggttcttgaaaactccttaagaaaagccctgaatcacgctgacggcaacagcgttgggagcaaagatcagcagaagctctacgagcttcagcagaagatcttttggcagaagcaagaggtgaaggatctaaaagaaagatctttatggagcagaagcttcgacaatgttgttgtactcctcgtaaggttcagcttcaccgttttagcaaggattaaggttgtcttcggaatncggtcacacatgccttgtctgtctcgtactttgtcggctttccgcactgt

SEQ ID NO: 7046 - DNA, 349 bp, Glycine max
  Clone ID: LIB3030-005-Q1-B1-E8
gtttcatgtagtttctttttcatcatccattgaactgaaccttaaattaattatagaaccatgtttgcaactaccaattcctccactttgtcacctttattctctttcagtagaacaacagcaacctctctgccttccaaacccacattctggaatttggttccaatgaaacaatcttcttctccggggcacttggccttagccttagacaatccacgtagaacacttcacgtgtcttgtggctccacatcaccacatgcttcccagagatcatcaattcaggggggtgaagcttttttcaggggtgtgttggaaagtatgcaatctgtttacttgaacagaaatcgta

SEQ ID NO: 7047 - DNA, 377 bp, Glycine max
  Clone ID: LIB3030-005-Q1-B1-E9
gcttttcagaatttttaattttctcgggaaaaatgtggttccacctaagaaaacgacactagcattgcatagcaatagttgatttttctccagaaaattaagaagctcaacttagtagtggtaagaagtaataacgcgcgcacacacacatacacaaagacagtgacagtggtgttgaattttcctcaaagaggatgtggaaactcgtgcgatatgccgccgcctccaacctcgcccgatcgcggcggttctccgccgcgattcctggtccgtgcattgttcacaagcgcggtgccgacatactccatgacccctggttcaacaaggatacagggtttcctttgactgaaagggataggttggggcttcggggcctc

SEQ ID NO: 7048 - DNA, 376 bp, Glycine max
  Clone ID: LIB3030-005-Q1-B1-F10
ggcgggatcagcacaagattgcaaaatgaagttcaacattgcaaatcccaccactgggtgccagaagaagctggaaatcgatgacgacctgaagcttcgagcattttgggacaagaggatctcccaggaggttcttggtgatgctctgggtgaggagtttaaaggatatgttttcaaaatcaccggtgggtgtgacaaacaaggattccctatgaagcagggagtgctgacccctggtcgtgttcgacttttgctccatagaggaactccttgtttccgtggatatggaaggcgcaatggagagcgtagaaggaagtctgttcgtggttgcattgtcagtccagatctctctgttttgaacctggtaattgtgaag

SEQ ID NO: 7049 - DNA, 388 bp, Glycine max
  Clone ID: LIB3030-005-Q1-B1-F11
atccggtccaagccccctaaaaaccaatttccaagggttaaaacaatttccgatggcttctccaaatgttgattaccgttgctttgtcggtgggctcgcttgggccactgacgaccaagctctcgagagagccttctctcagtacggcgaaatcgttgaaacgaagattatcaacgatcgtgagactggaagatccaggggttttggatttgtgaccttcgcctcggagcagtccatgaaagacgccatcgaagggatgaacgggcaaaaccttgacggccgtaacatcactgttaacgaagctcagtcccgtggtggcggtggccgcggaggccgtggaggtggtggatatggttgtggtcgcggtggtggatatggtggtggtggt

SEQ ID NO: 7050 - DNA, 354 bp, Glycine max
  Clone ID: LIB3030-005-Q1-B1-F2
attcaacactcttccttctcctccttcctccaacaaagcaacttttttttttctcttcctttccatttcctaatttccatcatataaaatagtgccacccatcaccacaacaataacaaaatcagcagcatcagcagaagcagaagaagcaggtccaaacttcaattcatggaagtgtgatatcttaggtagttctaatctccacaaaaaacctaaccctaaaaagctaacctttttttttaatattgttgttttttttccttttttacgtaccctagatgttagagccatggacataaccccaacagcaacgattatcaacaccagcatcactcccagtgcagcaaaatcccc

SEQ ID NO: 7051 - DNA, 304 bp, Glycine max
  Clone ID: LIB3030-005-Q1-B1-F3
tcaagggagctttatggcggaatccccgttttctgctgctgttagtgtcccagctgctgctgctgatgggttaactgccagttccggtggcagttgtggggtgctctcaaccagaactgatccttgcatggctcgctccgttagtgtccatggctgctcccaaattcatagtcagtcatcactgcctgcccaatgggagaagtttgatggtttcaaagatgcgggcaccaatgtatctcctgctctttcaaggagggatatgcgcacccaaatgagccccagaggtagctcatggtcctctccc

SEQ ID NO: 7052 - DNA, 367 bp, Glycine max
  Clone ID: LIB3030-005-Q1-B1-F4
aagtggcatcttgtgttgtgtccctcttttaagctatttccttctcttaacacaattggttgtgccaattgccatagtcaccaaccaattaacaaaggtatatatatcatcatatcatcaccaaatgaaaaatattgggttgttttttcctgtggtggtggctacttttgtggtggcagccacagctggtagcttttaccaagactttgaaataacgtggggtggtgagcgtgccaaaatctatgagaatggaaaccttctcacactctcccttgacagagcctctggctctggctttcgttccaaaaaagagtacttgttcggaaaaattgacatgcagctcaagcttgtgcctggtaactctgct

SEQ ID NO: 7053 - DNA, 408 bp, Glycine max
  Clone ID: LIB3030-005-Q1-B1-F5
gtttctccctttctctctgtctctctctcgctcttcttctcatccagcaccgagtcacagactcaccgatcttccgattccctttcgtcttggtttatgagctcgaaggagagacccactcttggtggcacgcggattaagacccgcaaacggaatattgctgcgccgctggaccctgcagcattctcggatgcagtggtccagatttatttggataatgctggtgatctggaacttattgctaagagcattgaatcttcagaccttaacttttcaagatacggcgataccttttttgaggttgttttcactgggggtcgtacacaacctggaactaccaagcctgatgagggggaccgccatccatactctataatagagtgtgagcctaagcgggaagttatttta

SEQ ID NO: 7054 - DNA, 350 bp, Glycine max
  Clone ID: LIB3030-005-Q1-B1-F6
acaaaagtggcagtattaggtggcatcaccgaagtgcagggagctgccaacagcgtcgagatcaacaatctcgctcgctttgctgtagaggaacaaaacaaaagagagaattcagttctggagtttgtgagggtgattagtgcaaagcagcaagtggttgctggagtgaattactacataacattggaagcaaaagatggtgagattaaaaatgagtataaagcgaaggtttgggagagggaatcccaagagttgctagaattcaagccaacattaggtgcaggaggcatcatcgatgtgcctggagctgccaacagcatcgagatcgaccatctcgctcgctttgctgt

SEQ ID NO: 7055 - DNA, 152 bp, Glycine max
  Clone ID: LIB3030-005-Q1-B1-F7
ggcaatcccattctcagcgtccatttccaccatcactactattttcgtgtggttgagaagcttcgcgaacgagaacatggaaccctaaaacgtcaaataacgattccatgaccatgtctggtgattgccctctttctcaggattgggaacct

SEQ ID NO: 7056 - DNA, 393 bp, Glycine max
  Clone ID: LIB3030-005-Q1-B1-F8
aattattataatatgcatatggtgctgcagctgtgctgatttggcattttctggtcttgttgcttgcttccatttgatgtttacatagaggagcaagcttagctactttcggcaaatgaactcagagacccaaagaaagcgagtgttgtatgttttagaactgagacaaatagtatatatttgtgtttgggatttgtcatcttggttggttgagcattcttgtcaaatgaggtaggtgatttattttgacacgcagattcaaactgcatgcaatacacgcgcaagatgttttaaagaccacgccagaaagagaacaaaagaaaaagaaaaagccttgtttcaaaaaaaattcccaattttcaaggaaaagagaaagagagaaaaaatggattg

SEQ ID NO: 7057 - DNA, 388 bp, Glycine max
  unsure (1)..(388): unsure at all n locations
  Clone ID: LIB3030-005-Q1-B1-F9
tccctctcttctcttctcttctcttctctcttatcattctctctctctctctcctgcaacaacaacaaccatttaagggatttcgggatgtgtatcgtccagtgaattgaggagaatgacatttttgggttctgttgattgtgttgtagatggggggtttggctgttagattgttgtttgttgagtacaatcttatgttcagtgaagatgatttcgtgatgtggttgagagagtggtttttgtagaggaaggcttgttatttttgttgttgttgtggtagtttattttgtttaagagtangaacatagtcggcagacgagaagaattaagttttgttggatgggtaataaacttgggaagaggagacaagtggtagatgagaaatata

SEQ ID NO: 7058 - DNA, 386 bp, Glycine max
  Clone ID: LIB3030-005-Q1-B1-G1
agctttcctccatacgaatccaaggaggagagaggagacacagacacaaaggaaacggaaaaagcaacacacacaaaaaaggtctgtgcctcctcttatatgtaatagatagtttctgaaacaaaagaaaaaaataaaataaaaataaaaggaccacatggattatgaaaacaacagttggatttgggagggggtaaactactacccgcgtgtgtttggtggtctaatggttacagcagccttgctgggcttgtcaaccagctactttggtgggattggggttccatatttgtcactgccatgttcctggtctaatttggggatttttctcacaagaagaaatcggggaagaggcgcattcgggtgtacatggatggctgttttga

SEQ ID NO: 7059 - DNA, 363 bp, Glycine max
  Clone ID: LIB3030-005-Q1-B1-G10
gctagagcttcatagtttcttcttcttttctcaccttccttctctcccttcagacaaagggacaaaaaatcagtgtgtgagagagagagagagaaattccaaaaccatgtcccacagtcatctaagtttcgcctttgggattctaggtaacattgcctccttcgtgtgctttctggcaccactaccaacattttatagagtttgtaagaagaaatcaaccgaagggttccaatcaattccatatgtggctgcactcttcagtgcaatgctttggatcttttatgcctatgtgaagaccggagaaacgcttcttatcaccatcaatgcattcggttgcgtgattgagacaatttaccttgccgt

SEQ ID NO: 7060 - DNA, 390 bp, Glycine max
  Clone ID: LIB3030-005-Q1-B1-G11
gcacagcactcggaaatttctggcgatctctgcgttttcccctattttttctgaatctaacaacaaacattcctctggcaacaatcatcactattaataagagttccttccttcactctcacccaagccaaagaaaggaacaagaacaagaacaacaaagtaacgtgaaagagagagagatggaggcgattgttccagtggtggatttccagaggctttcagaggaagaggagcgcaagaagctgagaaaaacatgtgagaaaccagggtgtttcagaatcatcaaccactcaattccactaacactcatggctgacatgaagtcagtggttaaatacttgcatgaccttcccacggaaatcaaaatgcgcaacaaaccctccgtccctg

SEQ ID NO: 7061 - DNA, 380 bp, Glycine max
  unsure (1)..(380): unsure at all n locations
  Clone ID: LIB3030-005-Q1-B1-G12
ggagagtggaacattgtcagcttcataataaagatgacaatgaagctggttttggtagttgttgttgaagttgcatgcttagtttctgggatcttgtcctttggatctgagacactctctgagctttctttcttagaaaatgatgtcgtctcaacaacaagaccttcctcttcatctcaacttcaacctcaacctcaacctcaacctcttatggtggacctcactctcattcatgaagctgattctaaaggagctgtctgtttggatggaacggtgcctggataccatttggatcgtggatttggatctggtgcagatagttggcttattcatttggagggaggangatggtgtaataccatcagaaactgtgtctatag

SEQ ID NO: 7062 - DNA, 357 bp, Glycine max
  Clone ID: LIB3030-005-Q1-B1-G2
taacaacagcacaaagcgggttactgtctgttcaagctaccatctctctctctctttcttagtgcctccttgccagaagttaaaatggcccaagaaactttcctattcacatctgaatcagtgaacgaggggcaccctgacaagctctgtgaccagatctccgatgctgtgctcgatgcatgcttggagcaggaccctgacagcaaggttgcctgtgaaacctgcaccaagaccaacatggtgatggttttcggagagatcacaaccaaggccaacgtggactatgagaagattgtgcgtgacacatgcaggaacattggttttgtctctgatgatgttggtcttgatgctgacaac

SEQ ID NO: 7063 - DNA, 403 bp, Glycine max
  Clone ID: LIB3030-005-Q1-B1-G3
gagagaaagaaaatgccaaagtctcaatttcgaaccccatttcttgtttctttttctcttttgttattcatcttcaacctcaccccttcatacgcactctatggagcatccacacccgtgcttcaactcactccctctaacttcaagtccaaggttctgaattcaaatggagttgttcttgttgaattctttgctccatggtgtggacactgtcaggctctgactcctatatgggagaaggcagctactgtgttgaagggtgttgttactgtggcagcaattgatgctgatgctcacccgtctttggctcaggaatatggaattagaggatttccaactataaaagtgtttgcacctggaaagccgcctgttgattacaaaggagcaagagatgtcaaaccaa

SEQ ID NO: 7064 - DNA, 406 bp, Glycine max
  Clone ID: LIB3030-005-Q1-B1-G5
aggagccagagtgagtgatacagagaaagaagaaagatttaaaattggaagaggaacaattggaaggagaaaaccctaattggaggatgtgatttattgcataatcgatggaaaaaccctagattcggagcagggggcgcaatcgacgacgccgtagatgcttgttgcggttggagcgtcgtgggatctgaattggttcctgcaattgttgctctccgtcatcgtcgtggccattggggttcactacttcgtcaaggtcaccgcttccaaatacttcttggtcgacgccaatttcgaaggggaccaccaccacgccctcgccaccgacgccatgcccggtgccctcgctgccgccgatcctctctgtgccgtctgcgccacgccagcccctaagaagtgctcgcgc

SEQ ID NO: 7065 - DNA, 342 bp, Glycine max
  Clone ID: LIB3030-005-Q1-B1-G6
actgaagatgggagaaactacagaaaggtgtagcacattggcattctagcttcttcttttatcttttttgtgtttggttttaaacacccaaattccaattctactgctgaacttaaattttacatttgttgaaccctttcacctttgtggggtgggggttgagtttgtcaggtatgcagttgtgacaggtgcaaataaaggaattggattagagatagttagacaattagcttcagctggaatcaaggtggtgctcactgcaagaaatgaagagaggggtatccaagcactgcaaacactcaaggactcgggtctatctcaccttgtactgtttcatcaagt

SEQ ID NO: 7066 - DNA, 406 bp, Glycine max
  Clone ID: LIB3030-005-Q1-B1-G7
cactaccactggccacctgatctacaagcttggaggcattgacaagcgtgttattgagagatttgagaaggaagctgctgagatgaacaagaggtctttcaagtatgcctgggtgcttgataagcttaaggctgagcgtgaaagaggaatcacaattgatattgccttgtggaagtttgaaaccaccaagtactattgcacagtcattgatgcccctggacacagggatttcatcaagaacatgatcactgggacatcccaagctgactgtgctgttcttatcattgattccactactggtggttttgaagctggaatttcaaaggatggacagactcgtgaacatgctctgctttcattcacccttggtgtgaaacagatgatttgttgctgtaacaagatggat

SEQ ID NO: 7067 - DNA, 379 bp, Glycine max
  unsure (1)..(379): unsure at all n locations
  Clone ID: LIB3030-005-Q1-B1-G8
cattctcaacctcttaccagaacctgatgtcttcattcacacttcccatggaacacgcattccagcccacgcacccattctggcttctatgtccccggttctggagaacttgatagatcgcccacgtaagcatcggagctccgagagaataatccaaatccacggcgtcccctgcgacgctgtcaccgccttcgtccgattcctctactcctccaggtgtacggaggaagagattgaccagtacgggatgcacctccttgcattgtcncacgtgtacatggtgcagcaactgaaacagaggtgcatcaagggtttgacccaccgtttgacgacggagagcgtcgtcgacgtgctgcaactcgcgcgtctctgcgacgcg

SEQ ID NO: 7068 - DNA, 370 bp, Glycine max
  Clone ID: LIB3030-005-Q1-B1-G9
tctactctctgcagcctttaaatttgttgcaggcacacaaccatggctgctctctccaacggccacgacgcttccttcttcaagatgccctccatcaagttcaccaagctcttcatcaatggagaatttgttgattccctttcagggaaggagtttgaaacaatagatcccaggacaggagaagtgattacaagaatcgcagaaggagcaaaagaagacattgatgttgctgtcaaagcggcacgtgacgctttcgactatggtccatggccccgtatgcccggtgctgaaagagcaaaaatcatgatgaaatgggcagacttaattgatcagaacatcgaggaaatagcagcattggatgccattgatg

SEQ ID NO: 7069 - DNA, 404 bp, Glycine max
  Clone ID: LIB3030-005-Q1-B1-H1
tggtgagtaacgctaacactggcaaaggcaagatgattcagacgtatggattggtgtatgcttcaggaaggagttaaaccgttcattatggtcttgtcttcccccaacaaccgtttccttctcttttattcatgacacaccacactctctctcacatcttccatctcctccatctttctcacacttttctcccacatcacaatcacatcattacgttgcattaatacaatggaccaaacaaccgccgctgccaacgaggttgtccgcgagttccccggcctcctccgcgtctacaaagacggccgcgtcgagcgcctcctcggcaccgaaaccacccctcccggcaccgaccccggcaccgccgtccaatcaaaagacgttaccatcaacgccgaaaccggtgc

SEQ ID NO: 7070 - DNA, 330 bp, Glycine max
  Clone ID: LIB3030-005-Q1-B1-H10
atcaggttgaagactacgaagactaccagcggtgcatcttcggaaatgctgggcatggcgaacaccctgagctcgacgtccaccattttgttcatcctcgtcactttcatgcttttttgcgcctttcttcctgttttcactcctcttccgtctttctcctcgcaccaatcccgtcccaatacagttaacagtaagttcgagattgccgacgataggttctggaaagatggtgaaccatttcacatcatcggtggtgacatgcattaattccaagtgcatccacaatactgggaatatagactgctattagccatagcattgagcttgaac

SEQ ID NO: 7071 - DNA, 385 bp, Glycine max
  Clone ID: LIB3030-005-Q1-B1-H11
cgattgggttacaacagtttgggtgcttttgcaaccattaaccatcttcacttccaggcttattatttggctctgcccttcccaattgagaaggcccccactaagaaaattgcaagtttaaatggtggggtgaagatatctgaactgttgaagtatccagttagaggtctcgtctttgagggtggcgatacgctggaagatttatcaaatgttgtttcagatgcctgtatatgtcttcagaacaacaacatacctttcaatgttcttatctctgactgtggaaagcaagtctatctgttaccacagtgttatgcagagaaacaagctcttggagaagtggatgctgagcttcttgacacccaagtgaatcctgctgtgtgggaaa

SEQ ID NO: 7072 - DNA, 338 bp, Glycine max
  Clone ID: LIB3030-005-Q1-B1-H12
tatcgattcaattctatcagcttcaaatggaaggaatggtggattgtcggaaaaccttcgattctgttgtacacttccgatgccggagacagttgggagaggatacctctcagtgctgaacttccaggggatatggtgtacataaaggcgaccggtgagaagagtgcggagatggtgaccgacgaaggtgcaatatatgttactgcaaacagaggttacaactggagggctgctgtccaggaaactgtgtcagctactcttaacagaacagtttctagtggtattagtggtgcaagctactacactggaactttcaatactgtcaatcgctctccaaa

SEQ ID NO: 7073 - DNA, 341 bp, Glycine max
  unsure (1)..(341): unsure at all n locations
  Clone ID: LIB3030-005-Q1-B1-H2
gctcctcacacaccctatcatatcatatgaatgaatctgcactctctttgaaaactgtcacgctttcaccggcgtcggaaacatcgtccggttagggttccggctatcgctaagggcacggatcataaaatcttccagaagcttctatgccattactcagtattattaccatttgccaaggtgttgttaggcaccatttttatcacttgaagtcagtcaacaacaacttttctgcgaatttttcaggaatattttcccctgaaaaagttggaacaanatgtcttttgcaaacaagggattttgggatggtaanaggttctggacacattaatgacagagat

SEQ ID NO: 7074 - DNA, 385 bp, Glycine max
  unsure (1)..(385): unsure at all n locations
  Clone ID: LIB3030-003-Q1-B1-H5
ccgtgctctattgagaaggcatctgatttataaagctaggtagatatattcagcgtcaagtgtcaactatattatggcaagccttctcatgattccttgccagcatctattgctaaagaagttgcaaaggcattgtcatagaaaggcagcatcaaactccattaggagtgagaaaacttcctcattcagtttcagaagcaatgccaatgttccttttcatgaattgcctggggcttcctttgatcaatacatggatgacaagcacagagtgctaagagctgtgttttctgatgacaaaggaacaactaaacagctcaatgaggaagagtggaggatcaaaatgcctcccatacaatgcttaattttgagtgtcantccaacagca

SEQ ID NO: 7075 - DNA, 430 bp, Glycine max
  Clone ID: LIB3030-001-Q1-B1-G12
gacgtcggacgcattaaaaccggaattcggtccaagaaaaatcaattcaccaattaaaaaaatcaactgtatttccaaaataaccaaaattggtttccttcctttaaaataaaatccctggaaaggggaataattcaacaactggttaattggcctcaaataaatcattttttctgcaactattgctggtggtgatgcatctctcgatgggagctttgtgatttaaaggttcgattagttgctgacaaagatacaaataagcccaggggttatgctttcattgagtatctgcatacaagagacatgaaagctgcttataaacaagctgatggtacgaaaattgatggtacaatggtgcttgtggatgttgagcgtgggaggactgttccaaattggagaactcgccgcctaagtggtgggcttggtacta

SEQ ID NO: 7076 - DNA, 396 bp, Glycine max
  Clone ID: LIB3030-001-Q1-B1-G2
cacacacggaaggaaaaattcttgacaaaagcaatggtgatgttgcagttaatcattatcatcggtacatggaagatattgatcttatagccaagttgggatttgatgcttatagattttcaatttcttggtctcggattttccccgatggcttaggaacgaaaatcaatgacgaagggataactttttataacaacattattaatggtcttcttgaaagaggtatacaaccttatgtaactttgtaccattgggatcttccgctgcatcttcacgagtcgatgggaggatggttaaataaacaaatcatagagtactttgctgtttatgcagatacttgctttgcaagttttggggatagagtgaagaactggattactattaatgagccccttc

SEQ ID NO: 7077 - DNA, 375 bp, Glycine max
  Clone ID: LIB3030-001-Q1-B1-G3
ctttcagaaaaaaataaaaacagtacaaactacaaaacaacgttagttaagctcgatattcaccccgaaaataaaactttcaggaagaatcttcctttatgggataaaccgaattaaaaaagaaaaggagcatggattggtttattaatgaataatgaattaattaagcagatgaagaggaagatgattctgcgtaatccaaaaagtgatatatattatgagccgtagttccaaagaaagcctttgaagtccgacaaacagagtcggtgaacgacgcgcacagctaaaccacaacacaccacacacaccaacaacatttctctctctctctctttctctcgctgtcgcttccgccaacgtctccgccgcgaatgc

SEQ ID NO: 7078 - DNA, 359 bp, Glycine max
  Clone ID: LIB3030-001-Q1-B1-G4
ctctgttccaaaaccctaatccttcgtcttccagaaaatggctgattctccccttgcaaggaattcaaggtccccttccccgtggaaagctcagtcgagatctaggtctaggtcaagatctaggtcgaggtctaggcctagacaaaggccaagatcccgttctagaagtcatggcaggtcaagatcaccaattcatggaaggtcaaggtcacccattcatggaaggtccgagccttcaaatcctggtgacacactttatgtaaccggtctatcttcaagggtcactgaaagagacctagaggagcatttctccaaggaaggaaaggtttcttcatgttttcttgtggtggagccccgta

SEQ ID NO: 7079 - DNA, 354 bp, Glycine max
  Clone ID: LIB3030-001-Q1-B1-G5
tgaattttctctacccttccatattaaatatatagaaatattgcatattgattgctagtgtgtccaagaataaacatgtcggccaagttcctgaccgtgccgccatttgagtgcgcctggagagaggatttgaaattccgggaggcaggccggggttgcgtcgcctttgaagcattcgcctgcaacgatgtcacactggttttccgggagaatgtgggaagccagggctaccattataaaagagatagcagtcctcactacacaatcatattggggagtcacaggaatcggcgactcagaattgaggtcaatggaaaagctgttgtcgatgtggcaggggttggcctctgctgc

SEQ ID NO: 7080 - DNA, 394 bp, Glycine max
  Clone ID: LIB3030-001-Q1-B1-G6
gaagcttacaacggaagcctctcgggaaaccctggtttatgcagcgtcgacgcgattaactcgttcccgcgttgccctgcttcctctggcatgtcgaaggagatgcgcgcgctcataatatgcttcgcggtggcttcgattttgttgctctcgtgtttgggcgtttacttgcaactcaagaggaggaatgaagatgcggagaaatacggagagcgttcgctgaaggaagaaacgtgggacgtgaaatcgttccacgtgttgagtttctcggagggagagattctatattccatcaagcaggataatctcataggaaaaggatgctcggggaacgtgtacagggtcactctttccaatgggaaagaactcgccgtgaagcatatttggaacaacg

SEQ ID NO: 7081 - DNA, 396 bp, Glycine max
  Clone ID: LIB3030-001-Q1-B1-G7
attcgttccgttccttctttctccgctcctcacttcgctctctcattctccattctcacttctcaaattgaatcgaacgaattcacaaaccctagttttcgaggatgggtcagatccagtactccgagaagtacttcgatgacacttacgaatatagacatgtggttcttcctcctgaagtcgcaaaactgcttcccaagaatcgtcttctctccgaaaatgagtggcgggcaattggggttcagcagagccgtggctgggttcattatgcaattcatcgccctgagccacacataatgctcttcaggaggcctttgaattatcagcagcagcaggaaaaccaggcccagcaaagcatgcttgtcaaatgaacactatctatgcaaatctgaaagt

SEQ ID NO: 7082 - DNA, 378 bp, Glycine max
  Clone ID: LIB3030-001-Q1-B1-G8
aatccacactcataacgaaaccctcccaaaaatcaaaattgaaattactaacttttttttctgttactctttctctccaccaccatggctactagtataacagagcaagacacctcatcacgtgccccacacgtgctcgattacgccaccactacatctgacgaggagacggcacatgacgaggaggaggagctggtgccggaggaaaacggcttcgggaacggcgtacggtggtttccggcggcgagcggttgccgacggcgacggcgcgggggacgtgcgttgggtatggttcttgacccgatggcgaagtgtgtccaggaatgggacaaggttttcccgctagtgtgagccgcggcgctgttcgtggactcgctc

SEQ ID NO: 7083 - DNA, 405 bp, Glycine max
  Clone ID: LIB3030-001-Q1-B1-G9
cggaaatgaaagtatgaaatagcataacaacaggtcagggagcgggttttcttcttccaccccttctaatttctctcttctctgaagctatcaggttttctatctatccatctcttgcctgccgctatttatttacgcctctttaattgtccgttctacaaacagatgctaattaattccctgtcacagctattgttgttttttgaaattgttgtttgcaattctgattaatatggtattggtatctctagagattggttattgctctcatcatatagctttactccatttggattctgtttaaggtttatttgttcgacaaccgtgggtttgacgctaatgtttgcactcatttgtcgatgcctatgatcggaagatttggattcctctaatctaatctaatct

SEQ ID NO: 7084 - DNA, 376 bp, Glycine max
  Clone ID: LIB3030-001-Q1-B1-H1
gtgagtcttgggtgtgaaaatgtcgcacagcgataccataccccttcacccatcttcccaatccgacatcgacgagatcgagaacctcatcaatgccagcgttcaccaatcagtcccttcggcgagaccccccagtcccccacgcgcctccatccccgtctccgtctccgtctccactgccccttcccccttcatctcttccaacctccctccgccccctcccctccccaaatcctccgtctccgccgtcactccgtccccacctccgcctcgccccggcatcgccacctccgggttcggtcccgcccccaacacgctcaccgagcccgtctgggacaccgtgaagcgcgatctctcgagaatcgtgagcaatctg

SEQ ID NO: 7085 - DNA, 78 bp, Glycine max
  Clone ID: LIB3030-001-Q1-B1-H11
caaaaagggagtcttgacttctgatcacgtgcttttcaacggcggctccactgattcactgggaagaacttacagcca

SEQ ID NO: 7086 - DNA, 387 bp, Glycine max
  unsure (1)..(387): unsure at all n locations
  Clone ID: LIB3030-001-Q1-B1-H12
ccgggactttgatgggggcaaggacttttaaaattcagccaagaatgggttcggccctaaaaaacctttttgatggatgtgtggtaaagcgtgacgacttatggatcacttccaaactcaggtttgttgtcctttantaattgtgatatcgttttgaacattgagaaagaatggatgtgtttggaccagtttgggtgctgaaggaaggatcctttgatttgttcgggaaacttttaagtgttcagatcatgcaccacaagatgtgccaaaagcaatggctagaacattacaggaagtgcaacttgactatcttgacctctatctgatccacaggacagtccgcatgaaaagtgggacatttgggcacaataaggaacatcttgagca

SEQ ID NO: 7087 - DNA, 317 bp, Glycine max
  Clone ID: LIB3030-001-Q1-B1-H2
gcagaacacgaatttcacgtgtgttctgcgtgatgagataccccttcagccatcttcccaatccgacagcgaggagatcgagaacctcatcaatgccagggttcaccaatcagtcccgtcggcgagacgcgtcagaccttcacgcacctcgatccccgtcaccgtctgcgtcaccaatggcccttcccgcttcatcgcttccaattgcactccgctcactcttctacacaaaacctcagtcgccgccgtcactcggtcaccatggggggctcaccccgggatctccatcacagggtttggtctcgccccaaagacgc

SEQ ID NO: 7088 - DNA, 378 bp, Glycine max
  Clone ID: LIB3030-001-Q1-B1-H3
cgcggccactcagtgggtgaacgcgaacgtcttgccctactacccggcgagcaacatcactctcatcaccgtcggaaacgagattttgaccttagccgaccagggtctactgtctcagctcgtcccggcgatgcgaaatgtccaaaatgccctcggcgcggcctcgctcggtggcaagatcagggtctcgacggtgcactcgatggccgtgttgactcagtcggacccgccgtcgtccgggttgttcaacccggcgctgcaagacacgctgaaacagctgctggcgcttctgaaggacaacaaatcgccgttcacgattcaaccgttaccgttcttcgcttaccagagcgaaccaagattcgagacgctggcgttttg

SEQ ID NO: 7089 - DNA, 409 bp, Glycine max
  unsure (1)..(409): unsure at all n locations
  Clone ID: LIB3030-001-Q1-B1-H4
gataattgctttgatgcagacgtcatctatgcttttctggatgcaaatggaattggcaaaactcattccattttctacatttcatatgctttgcatttggaatctaagaacaagtttaaagctgccaatcagatgatggagcttggcatatctaggaatgctcaaccggttgataaattgaaggctgcttatagacaattttttgcacgctcaatggcaaggcctatagctatagatgatgcagtagaaaaactggcacccacgcgtagctttggaactgttcttgccaagggagaaaatcgtgcaccgctgtccattttgaactcgaaccgtgattcttgtgctaagaatgataggtaccgancagctccactttcccatttataagattcagctgacactggtgata

SEQ ID NO: 7090 - DNA, 361 bp, Glycine max
  Clone ID: LIB3030-001-Q1-B1-H5
caacaaacaactaacacgaagaagaagaaatttctctgcgcttggattcattcatttattctctgaagaaaaccctctcctttctcccaaggatggctaaagacttttacccctcctattgcttggtagcttataatctgggtgttttgttcaaaatctgtgcaatctgactggaggaacttgatttcagtttctggtgttcaaagcctttcttccagtgtgcaaagtactcctgaaaaaatggccattcagatgatgcttcaaaaagttcagaacttcttcagcagttcctaaaatgtggtccaaagaaggaacttcttcaaatgtgttttgacaagacaataaaacatttctttaaaaa

SEQ ID NO: 7091 - DNA, 415 bp, Glycine max
  unsure (1)..(415): unsure at all n locations
  Clone ID: LIB3030-001-Q1-B1-H6
cgtatctttctctgttctattcctacgatggagttttggggtgccgaggttaaggttggtgagtctgttaaggtagatccagccgaattcgaggcatgcatacacctttctcaggctgctcttggtgaggcaaagaaagacaaatcaaatgaaccagttgttctctacttgaaagttggtcaacagaaatttgtcttgggaaccctttccagggagaaaattcctcaaatacctctggaattggttttggaaaaggagtttgagctttcncacaactcaaagaatgccagtgttcatttctgtggatacaaggcattttatgatgctggcgatgatagcgaagaagatgaatttactgatagcgaagaggatgttccattgcttanagcagagaatggaaaacctgaaacaaaag

SEQ ID NO: 7092 - DNA, 416 bp, Glycine max
  unsure (1)..(416): unsure at all n locations
  Clone ID: LIB3030-001-Q1-B1-H7
ctttcgtgtttcatacaacttttgtttaatgccaaaagtctttggtgtttaatgagcaccatgaaattaagattgttttggaagaagaaaaaacaattggtattttgcagacactaaaacgagggacagagatgttaaacttgaaatcctcttcatcccacttgctactcctctttctcttcaccttggtgaccattgcaagtgaagcagcagctcctatatacagcgcacatgcctgcacagatgatggaccattttaccaacccaacacaacataccaaaccaacttgaagctcctcctctcttccctcgtctccaacgccaacctccaacaaggcttcntcctcaccaacatctccctcggaaaccccgatgaggtcaagggactcntcctctgccgcggtgacgtcaccccc

SEQ ID NO: 7093 - DNA, 216 bp, Glycine max
  Clone ID: LIB3030-001-Q1-B1-H8
gaaaaaacctgaagtatactactagggaagcatcagattttcatgctcctcctttcattaaattaaagtgcagaacagtttctaggtatggaaactctttcatatgggtcagcaccatgctgccaagttgtgaactcaaagtggaaattagttgaaaagagtttgagttcacgtcaatcaagagtttcgtctataggaaaacttggagtttaatac

SEQ ID NO: 7094 - DNA, 316 bp, Glycine max
  Clone ID: LIB3030-001-Q1-B1-H9
gatccgtttgggctagggaagcccgcggagtacctgcagttcgagctggactcgctggaccagaaccttgcgaagaacgtggctggggacatcattggaaccaggaccgagctcgcggacgtgaagtccaccccgtttcagccctacagcgaggtgtttgggctccaaaggttccgtgagtgcgaactcatccatggaaggtgggccatgctcgccactctcggagctctcactgttgagtggctcactggtgttacatggcaagacgccggaaaggtggagctagtaaaagggtcatcataccttgggcaaccac

SEQ ID NO: 7095 - DNA, 318 bp, Glycine max
  Clone ID: LIB3030-002-Q1-B1-A1
cactcggttgcagaacagaacaaacttctttcactctttcgcttctgaatcttcaacaatggtgctcgaggcgacgatgatctgtatcgacaattctgaatggatgcgtaacggagattactctccttctcgatttcaagctcaagcagacgctgtcaatctcatatgcggtgctaaaacgcagtctaatccggaaaatacagtgggagtttccacaatggctgggaaaggcgttcgtgttttgggtacccctagcaatggtctgggcaagatcttagcctgcatgcatggactagatataggtggtgagatgaacct

SEQ ID NO: 7096 - DNA, 399 bp, Glycine max
  Clone ID: LIB3030-002-Q1-B1-A11
cggcgcacgcccagaaggcgcccatcctccccaccaaggatctccccaaggatttcgattggcgagacaaaggagccgtcactaacgtcaaggaccaaggggcgtgtggttcgtgttggtctttcagtacgacgggagcgttggaaggagctcattatctggccactggtgagctcgtgagccttagcgagcaacagcttgtggattgcgatcacgtgtgtgatccagaagaatatggagcgtgtgactcaggctgtaatggtgggttgatgaacaacgcatttgagtacatacttcagtctgggggagtacagaaagaaaaggactatccatacaccgggagagatggcacctgcaaatttgacaaaaccaaagttgcggctactgtatctaattaca

SEQ ID NO: 7097 - DNA, 376 bp, Glycine max
  Clone ID: LIB3030-002-Q1-B1-A12
ctttctcgcagaaacgtattgtttttctctctttccgcggcctagatctgagcagtttggaaaccctaactgctctcaccaacgacatcaccactctctccgatcaactacctctttcgtcgccctaagtcatggaaggaattgcacccgagggatcacagttggaggcccgccattatgatccaagaatgaatgagctgcttacgtccgatggtcaggatttcttcacatcctacgatgaggtttatgacagttttgatgctatgggcttgcaagagaatctcctgagaggcatttatgcatatggttttgagaagccatcagctattcagcaaaggggaatagttccattctgcaagggacttgacgttataca

SEQ ID NO: 7098 - DNA, 383 bp, Glycine max
  Clone ID: LIB3030-002-Q1-B1-A2
gttgatttgccagatcatcatgacagttgctattgcagttacatttggtaccaatggaaacccaggtacactgcctaagtggtatgcaattgttgttgtgggggtcatctgtgtatatgtttcaggttttgcttggtcttggggtcctttagcctggttggtacctagtgaaatctttccccttgagattagacctgctgctcagagcatcacagttggtgtcaacatgatcagcactttcttcatagctcaattcttcacatcaatgctctgtcacatgaagtttggtttgttcatcttctttgggtgctttgtggtgatcatgaccacattcatctacaagttattgcctgagacaaagggtatcccacttgaggaaatga

SEQ ID NO: 7099 - DNA, 319 bp, Glycine max
  Clone ID: LIB3030-002-Q1-B1-A3
tcttcgtctccctccaaaaaccctaaaacctcaaaccccaattttcgcgccacccactaatcccaaacccgacaacctcggaccgtggcctcttattccacaaaaaattgctctaccttgaagccctcaaagtgaaccctgacaaggccttccgcgtaaacaccaccctccgttcctctcatctctcaacccttaaatcggtgacgcgctccctttcttcattgggtattcaactcgcttccatgggtcgaatcctcgacatgctccccgtgctccacatgtgcgacgcctatttccaattcgagcccctcctcgaatt

SEQ ID NO: 7100 - DNA, 234 bp, Glycine max
  Clone ID: LIB3030-002-Q1-B1-A5
gccaaatcttatcttatcgaccccatcataacagccacgacactaattctcatactctattaagcaactgtaccaccactctcggacaggatccggatcaccctatgaatgacaccgattctgaagcgcgttgaggtagctcccataaaggatgatggatccatccctgtcgtttacgaacgcgacttgcattgcgacggatacgtcatgacgatcatacgcacctgtcgccac

SEQ ID NO: 7101 - DNA, 323 bp, Glycine max
  Clone ID: LIB3030-002-Q1-B1-A6
tggactagctgagttagggtgagttgcaggcagtgtcatctctcctttgacgacaagatgagcatcccaattccccatcggcagttattcatagacggagactggaaagtccccgtcctcaagaatcggattcccatcatcaacccttccacccaacacatcatcggggatatcccagcagctactaaggaagacgttgatctcgctgtcgctgccgccaaagctgccctctcccgcaacaagggcgccgattgggcctccgcttccggctccgttcgggctcgctacctccgcgccatcgctgccaagatcaccgagaaaaa

SEQ ID NO: 7102 - DNA, 369 bp, Glycine max
  Clone ID: LIB3030-002-Q1-B1-A7
atttcctagcctcccaacaaggatgccccctatgctcaacagcagataataaataaagggcattggggtgcaatggccattgcaaagagtgcttccattcttatgtattttgtgctttgcattggcctgcaatgcggataatgctggaaaaccagacccagttgctggtcatgacatgttcagcaataaagatgtggctaatgatgtgctccttcccggggagcatatacttaacgtccaggattttggagccaaaggtgatggcaagttcgactgcaccgagtctttcatgcaagcatgggcaaagaccttccatcaatcctctgggccagtcaggctttacgtacctgctggcagattcgtggtttc

SEQ ID NO: 7103 - DNA, 393 bp, Glycine max
  unsure (1)..(393): unsure at all n locations
  Clone ID: LIB3030-002-Q1-B1-A8
ctgacatatgtggctcttatttagctatgtctgttccttgttttctttctgtagtgtagcccttattttaaaatttcagaggttttggttttgtatatttgaagagcggggattgtgtgtatcggtgttgtgctacaatcaatgcactcttccgaaagagttccctgcaatattgtcttgagaaagtgggcagttgtgttttcatcttttgttgaaatcacaacaatcattttccctacatctctatcttctcaatcccttcncctccctctgattttacctttttttttatgaaaaaaaaatcgtattgattaagttaacttagaatatagtcctataccgtttacattttgtgggtgtttaattttaaaaatgaaactgccaatgtcagcg

SEQ ID NO: 7104 - DNA, 377 bp, Glycine max
  unsure (1)..(377): unsure at all n locations
  Clone ID: LIB3030-002-Q1-B1-A9
gtctttccaacagcatttgcaacattcagacataacataactttcctgcgaaggaagtgttatgccattacatcatcagaactcttttgtctctctggcttgcaactcaactctgctgctgtagcaaagcctcggttctatggcttcctagttgcccatttgagaaaaaacccacaaagatcttgaatttggctgattctggaaatgggttctcagataaggcttctgggtctgtgtctatggatgtacttgtcaagcttaagcttcattggagccggtgctgtgtatggaagagaaggtgaagttgtgaaagggattgttttagttcatgggaaaactgcaattggaaggattgatgatgattctgtntgtgcaac

SEQ ID NO: 7105 - DNA, 381 bp, Glycine max
  Clone ID: LIB3030-002-Q1-B1-B1
ttttacttcccctatggctcgtcactccttgctcttagccctcctcctcttcgccgccgtggccaccgccgcgatggcggtggccgcgtccgacgccgacgacatcctgatccgtcaggtggtgccagatgttggcgaagccgaagaggaggacaacctgctgaacgccgagcaccacttcgcgagcttcaaggccaagttcgccaagacctacgccaccaaggaggagcacgatcatcgcttcggcgtcttcaagtccaacctccgcagagccaggctgcacgccaagctcgacccctccgccgtccacggcgtcaccaaattctccgatctaactccggccgagttccgccgccagttcctcggcctcaagccgctccg

SEQ ID NO: 7106 - DNA, 394 bp, Glycine max
  Clone ID: LIB3030-002-Q1-B1-B10
actatgtggggtctgaaaggctgaagttcaaatttgatggtagtttcaagcggactttcccttcagaagacaattcctccagcagtccagattcatcaaaaagttttggtgagacacaattagatttatttcaccatcgccatggcttgttgatattgcatcttgttgcaacgatgatgtttgccccatccgttgtagcttggatccagaggttggcgttgggtgagagcctcccgtggctcctggattcagtgctttgcatcggcgtcattcttcatggcatctgcaactcgaagcccgaattcaattccttcttcttgtcctatactgggatccccatccgcaatgttaggctatattttatctatctcatagctggatactggtcctaatt

SEQ ID NO: 7107 - DNA, 384 bp, Glycine max
  Clone ID: LIB3030-002-Q1-B1-B11
aaccgccaagaggaggcggaaaaatctgaagcctgatgttagtcagtgagagtattcggcattcgcaagacttttggtaaacttcacctacaactctattatacttcaatgaatagagagaaacggaggtgcatgccattttgcaagaactctctaagcacttgttattctcggcggatgtcggcataaactggaatttggtggtttatttatttattttctttaatatgtggagaggacatcatcttcaatgaattgaagggctttcaggattgtatataaaaatcaatgaggttggaagtggcagaactttggcaaaatttattagaacttgaggttaagtaaaggtttttttcttgacgatttggtattcataacaacaaa

SEQ ID NO: 7108 - DNA, 282 bp, Glycine max
  Clone ID: LIB3030-002-Q1-B1-B12
gttcattttgtaatatagaagcaagaaagatagagagactgacaacacctctctctctctcccctcgttgatcccaaatctattaggggtttttattcgatgctattcggcctgaagctttcgtttcgcggatttttttaattattttttttcctgcctatcaggaaagttgaaaaaaagatggaccatgacaagactggatgcgaagctcccccagaaggtcctatattgtgcatcaccaactgtagattttttggaagtgcaactaccatgaacatgtgt

SEQ ID NO: 7109 - DNA, 226 bp, Glycine max
  unsure (1)..(226): unsure at all n locations
  Clone ID: LIB3030-002-Q1-B1-B2
gcgaataaagcgaagatagaaaaagtgcggcaaacgatgtgtgtgcttgcttcattgtttgcgttgtgaagtaggtgatcgaagtcgttgaatgctatattcgtttacgaaatgaaggatgacgcggagaaagataaaggcaaagacaacaatatgatttggggagctattctcttcggcttaattggcgccaccgtcactacctttgcngtcggtcagctgcgga

SEQ ID NO: 7110 - DNA, 345 bp, Glycine max
  unsure (1)..(345): unsure at all n locations
  Clone ID: LIB3030-002-Q1-B1-B3
cgagtggatttggagtgtcctagattcgtgtcctggtttggtttggtttggttcgtactgttgtacgagttttgactttttctggatttggagttttcaatcagataatgttcaacggagccgcttggtgggttcagattcagaagcagagggagagggtgtttgtgattgcaagtgttggtgaattcanaagagagagtaagaagagtgtgcatgaacatcatgagtagtagtagaagcagaggcagctggtgcggtttgtggcctggttccttcaatatggaaactgagttgactattagaggaaagagttttggtggcatttttggctcctctgctaagcct

SEQ ID NO: 7111 - DNA, 326 bp, Glycine max
  Clone ID: LIB3030-002-Q1-B1-B4
cctctttctcctcctcctccttcttcttcttctccttctttctctttttcattctttctttcaacatgggtggcatcagcctcgaagaaataaaaaacgagaacgtcgatctggaacggattccaatagaggaagtgtttgagcagctgaaatgttcaagagcaggtctaacatcagaggaaggggccaatcggctccaagtctttggaccaaacaaattggaagagaaaaaagagagcaagtttttgaagttcttgggctttatgtggaaccccttgtcctgggtcatggaagctgctgccataatggccattgctttggcaaac

SEQ ID NO: 7112 - DNA, 360 bp, Glycine max
  Clone ID: LIB3030-002-Q1-B1-B5
tccacttttgccattgcaatggcttcctcggccttgacccaaagcagctccttttcgtatgacgtgtttctcagcttccacgctacagacacacgcagcaacttcacagactttctttttcaagctctcataagaaaaggcatcgttgccttcaaagacgaatccagagcacccgaccaagcgattgaggattctcgccttttcattgtggtcctttccaagaactatgctttctccactcagtgtttgcatgaactatcacagatcttccattgcgttgaattttcgccaagacgtgttctgcctattttttatgatgttgatccatcagatgtgcgaaaacagactggatggtacgag

SEQ ID NO: 7113 - DNA, 268 bp, Glycine max
  Clone ID: LIB3030-002-Q1-B1-B6
gtcgttgaagaagatgggacgagccaggcttctggtttcagacttcgttctgtctttcatgtgggtatggtccggtgttcttcttcggatcctcgtcttcaaacacctcggcttcgctcatggatccctcggtgaggttatcaaaaccaccttctccgtcgccaacatgttcttcttcgccttcctcgtcaacgttacacgtggcgccgcctacaaccccctcatcgtactggccgatgctatcaccggggatttaaacaccttcctc

SEQ ID NO: 7114 - DNA, 379 bp, Glycine max
  Clone ID: LIB3030-002-Q1-B1-B7
aggtcaactctaaaggatcccctcggggaattccaattccacattttcaagaaataaggaggcaaaaatgttcatatatgaattggaattatttgttttcttactaggcctatcctgaaaccaaagggaaatgagattcggaattcctccggggaattccaattcacatttttcaagaaataaggaggcaaaaatgttcatatatgaattggaattatttgttttcttattaggcctatcctgaatccaaaggaaatgagatcggaattcctcggggaattccaattccacattttcaagaaataaggaggcaaaaatgttcatatatgaattggaattatttgttttcttattaggcctatcctgaagccaaaggaaa

SEQ ID NO: 7115 - DNA, 278 bp, Glycine max
  Clone ID: LIB3030-002-Q1-B1-B8
accttaagctcagcaaaagcctctgggtcatcagcaaggcccaatgggtcaaagctgccaccagggtacattgggtcagtgacctcaccgaggggcccaccagcaatacgataatcctcaacagcacccattacgataacttgggtggcccagatggcgaggatgctctgggcgtggacaatgcttgggttgcccatgtagtccagcccatcctcgctgaacatctgggacccggccttgatccacacagcttctccatacttgacccctttgcggcg

SEQ ID NO: 7116 - DNA, 383 bp, Glycine max
  Clone ID: LIB3030-002-Q1-B1-B9
agctcggctgtttctattcagactggtatgcgagggatggctgctcgtactgagctacgcttcaggaagcaaactcgtgctgctattgtcattcagagccactgccggaaatacctggctcaacatcattttacaaacttaaagaaggcagcaattgcaacacaatgtgcatggagaggaaaagttgctcggcgagaattacgacagctcaagatggctgcaagagaaactggagctctccaagctgccaaaaataagcttgaaaaacaagttgaagaccttacattgaggttgcagctggaaaaacgcctgaggattgacattgaagaatcaaaaacacaagaaaatgaataactacaatctgctttgcaagcgatgcaact

SEQ ID NO: 7117 - DNA, 285 bp, Glycine max
  Clone ID: LIB3030-002-Q1-B1-C1
ggggatgcaaaagggatgataaagggctgtgaagagcgatcgacagggattcgatagaagggactcgcattgagacaatggctgcacctgtactgcagacgtgacacagaagtattacatcactggagtcacgccatcataacgatgactggactccccacgcatgtcctacgtatattggaccttcgcttgtcatgtccttcgatccgtctgcgtcgtgagatggccaacgtcatcagcttggcgcacaccaaggtcatcatgacctcccattaggtcctcctc

SEQ ID NO: 7118 - DNA, 368 bp, Glycine max
  Clone ID: LIB3030-002-Q1-B1-C10
acacaacacaacacagcataccgtgtttcattttctctcacacacaaacctccttcgttttcatttacttctcaggaggtataactactatttttcgctttttttttaaaaaaaaaattgattaaatcttttgccatgggaacccagattttgcgacctcaggactgcttggtagaacgaatcagggctcctccggctgacttttcccggcggaggagttccggtaattactgtaattattattactacaacaacaacaacaaccatgtcgccacttccaggtcgtgccggaagcctgttagccgacccgaccaaaggaaacgggctgctcccggttctgcccagccggtggtggcggatgccgcggc

SEQ ID NO: 7119 - DNA, 340 bp, Glycine max
  unsure (1)..(340): unsure at all n locations
  Clone ID: LIB3030-002-Q1-B1-C12
gggaggttcacattcacattacaagcaacaacttaacgcttaacaacagcactctccctaatccttctgtgtatgcaaaatgagaccatgcaaatgcaaatgcaatgttctctctgctctcattcttcttgtcacattcctttttattgcttcttccgtccactgtgaagacccatatcggtacctcacttggaaggtcacctatggtgacatctatcctcttggtgtcaagcaacaagggatcttaattaatgggcagtttccagggcctcaaatanatgctgttacaaatgacaacttgattatcaatgtctataactacctcagagaaccgttcctc

SEQ ID NO: 7120 - DNA, 187 bp, Glycine max
  Clone ID: LIB3030-002-Q1-B1-C2
cctcgattggcacatggggatggtcccattgtcttagttttagcaccaacaagagagttggctgttcaaattcaagaagaggctctgaaatttgggtcccgggcaaataaaagaagtacgtgcatctatggcggcgcaccaaagggcccccaaattcgggagcttaaaagaggcgttgaaatagtta

SEQ ID NO: 7121 - DNA, 378 bp, Glycine max
  Clone ID: LIB3030-002-Q1-B1-C3
gtgatttcagtgagtgatcggtgttcacttgatctcatcataatcgtcagcgtcaattgaagaagatgccgatcagaaacatcgccgtcggaaggcctgaagaggcgactcaccccgacacgttgaaggcggctttggctgagttcatctcaaccttcatcttcgtgttcgccggctcaggctccggcatcgcctacaacaagctcaccgacaacggcgctgccacccctgccggcctcatctccgcctccatcgcccatgcattcgccctcttcgtcgccgtctccgtcggcgccaacatctccggcggccacgtcaaccccgccgtcaccttcggcgccttcgtcggccgcaacatcaacttcctccgcggcatcg

SEQ ID NO: 7122 - DNA, 278 bp, Glycine max
  Clone ID: LIB3030-002-Q1-B1-C4
ctcaaatctgaactcggctctaggatcgacggacagaacgcatgagatatgtggcacaagctccaagctgtgaagcacaacagtgtgcaagtcctacaatcagttagcggaggagactggactgaccaacgtctatgttgctcagcttctcacgagacaggctcagctcaatccccacactgcccctctacttcgggcagcgctgcccgacttgccccaagaccttgtttctgagatgatgataccccctttgacgtcttatgaccctaatctcatcc

SEQ ID NO: 7123 - DNA, 369 bp, Glycine max
  Clone ID: LIB3030-002-Q1-B1-C5
caaagatacaaaggaaaacacttactccaagatggcacgaggaatttagagttcccagcagaacatgggagtctgataacgtgctggttattgcagttcgtgacaaggacgatttctatgatgatatccttggggactgtaccgtgaacatcaatgaatttagggatcggcaaagacgtgatatgtggctgtcagttaagaacatgaatatggggacgttgcgtttggcaatagctattcttgaagataatggaaagggagttgatactagtacacgtgatcaggaaacagtggactttgaagaacgaaaaatctcctttgatacagatgagactactgataatagttccttctcaactgttccacctg

SEQ ID NO: 7124 - DNA, 361 bp, Glycine max
  Clone ID: LIB3030-002-Q1-B1-C6
ccaagccccactcaaccaccacaccactctctctgctcttcttctacctttcaagtttttacagtattaagatggcagagacattcctatttacctaagagtcattgaacgagggacaccctgacaagctctgcgaccaaatctccgatgctgtcctcgacgcttgccttgaacaggacccagacagcaaggttgcctgcgaaacatgcaccaagaccaacttggtcatggtcttcggagagatcaccaccaaggccaacgttgactacgagaagatcgtgcgtgacacctgcaggaacatcggcttcgtctcaaacgatgtgggacttgatgctgacaactgcaaggtccttgttaacat

SEQ ID NO: 7125 - DNA, 382 bp, Glycine max
  Clone ID: LIB3030-002-Q1-B1-C7
gaatcttcaagatgattttgaaatttaaaggagtagaggtgtatgggtggttgatcagcattgagtagcacttaactgctctgaaaacagtagaggttggttgagaagccatcgcattctgtgaagacactaagaggttgtattttcagatggtggcttaagtggaaatggcacaatctgaatacgacatggtggacctttgtgaaggttgtgatcaaacatttccaaccagagtactgcctagatcaagtggtctgggcattggaaagaaacaagaatggttgctgccacaagtcttggaaccagagacaaccaagaatggggaaacctagagggagtatccagtctcctatttagataagtaactagacctgaactaatc

SEQ ID NO: 7126 - DNA, 251 bp, Glycine max
  Clone ID: LIB3030-002-Q1-B1-C8
ggacagacccgtgagcatgcttagaaataccagcttcagaaccaccattggtggagtcaattagatggacagcacagtctgcctgggaagtaccagtactcatgttcttgaccccaccactggtggttatgaagctggtatttctacagatggacagatccgtgagcatgcgcattctcgctttcaccacaggtgtcaaccatatcatgtgttgctgtaacattatcgacgccactactcccaagtatcac

SEQ ID NO: 7127 - DNA, 398 bp, Glycine max
  Clone ID: LIB3030-002-Q1-B1-C9
tgcgcatgtttgttggtcttatctgcttcagatcctaacggtccattgttttacatggggtggtaccatgtattttaccaatacaatccggattcagccgtgtggggcaacataacatggggccacgctgtatccagagacttgattcactggctctaccttcccattgccttgtttccagataagtggtttgacgtcaacggtgtatggtcaggttcagcaacccttttgccagatggcaaaatcctaatgctctacacgggtagcaccgatcaaaacgtgcaagtccaaaatcttgcctaccccgccaacctatctgatcccctcctccttgattgggtcaaatatgctgataaccctgtcttggcccctccaccaagcattgggccaaaggattt

SEQ ID NO: 7128 - DNA, 117 bp, Glycine max
  Clone ID: LIB3030-002-Q1-B1-D1
ggttcactgattctgcaacgaagttagcccaaacaatactggatttcaacagagaagagctcccgcatttcattcttgcaaactggacaggcttttcacgagggcaaatggaccttt

SEQ ID NO: 7129 - DNA, 403 bp, Glycine max
  Clone ID: LIB3030-002-Q1-B1-D10
aatctctaacaccacatttcaaaatgaagcattgcatctcaaaacattttctaagttgtttcgctttgtttctgttgctagtcgcaacaacctatgccactgttgtccctaccaccacccaaaagccaccaagaagctttgcaaaccaattcctcatcccccagaacgcggcacgtgcggtgctgaggctgcggccattggtgtgggactccaaattagcacactacgcgcaatggtatgccaaccagaggcgcaacgattgtgccctagagcactccaacggaccttacggtgagaacattttctggggcagtggcacggggtggaagccagcacaagctgttagtgcatgggttgaagagcgccaatggtacaattattggcacaattcctgtgcaaatgg

SEQ ID NO: 7130 - DNA, 402 bp, Glycine max
  Clone ID: LIB3030-002-Q1-B1-D11
tcgattcaggcagttgggttatgcctgtatcaggtttggtcaatttgatagtgcaaaggaaacatttgaagttatagcagattatgaaagtatgcttgatctgtttatatgccaccttaatcccagtgccatgcggcgtcttgctcaaaaattggaagaagaaggtcttgactcggaattgaggagatattgtgataggatattacgtgctcgatctacaggatggacacaaggtatatttgccaacttttctgctgagagtatggttccaaaaggacctgaatggggtggtggaaactgggaaattaaaacacctactgctgtgaaggatatacctcagtgggagcttgctgcagaggtgacaccatacatgaaaactgatgatggtacaattccatccat

SEQ ID NO: 7131 - DNA, 366 bp, Glycine max
  Clone ID: LIB3030-002-Q1-B1-D12
aaagtttttgaaatgttgtcaccccttcttctatttctatgcctaactcttcctttgtttttgttgtccttcttcaaataccgtaaaaccttcaagaatccaccacttccaccaggtcctagaggccttcccataatagggaatcttcatcaactagatagtccttctcttcatgagcagctatggcatctctcaaagaaatatggtcctttattttcccttcaatttggattaaggccagccatagttgtttcctctccaaaattggccaaagaggtaatgaaagacaatgaccttgagtgctgtggacgacctaaattactaggccaacagaaactaacctataatgggttagacatgggattt

SEQ ID NO: 7132 - DNA, 283 bp, Glycine max
  Clone ID: LIB3030-002-Q1-B1-D2
cttaatagcaattttctagggtttatacaattttcgatggcttcttcagatgttgagtaccgttgctttgtcggtgggctcgcttgggcgactgacgaccaagctctcgagagagccttctctcagtacggcgaaatcgttgaaacgaatattatcagcgatcgtgagactggaacatccaggggttttggatttgtgaccttcgcctcagagcagtcgatgaaagacgccatcgaagggatgaacggccaaaaccttgaccgccgtaacatcactgttaacg

SEQ ID NO: 7133 - DNA, 308 bp, Glycine max
  Clone ID: LIB3030-002-Q1-B1-D3
tatttttcagagttcagattattcatctcttttgaattttgattttgggggtttaagtttctgagagaaaaaaaaaatatgataaaggtcgttctttttttgttctgctttgcctctgcactgaccctttcagtaacggagtccaaatctgcctctgtgcaacctcatgcagctgaatctttctctgttggatatattcagatgaagactgcagcaaactgttcttacttggtagttagatctacgagttgttcatcgcgtaagttcactatcgataagattggtattacatttggcgatgcctatgg

SEQ ID NO: 7134 - DNA, 216 bp, Glycine max
  Clone ID: LIB3030-002-Q1-B1-D4
ctgcaatagagaaagaggcagatagaacaaaagagcgacttttgagttcagaagatgactaacttcccattgatcaacttggagaagctcagtggtgaggaaagaaacgataccatggacaaaacgggggatgcttggtgacaactggggattctttgagctggtgaatcagggcattccccatgacatactggacactgtggagaggttgaccaa

SEQ ID NO: 7135 - DNA, 349 bp, Glycine max
  Clone ID: LIB3030-002-Q1-B1-D5
tcagattcaaacgctgtgaccggtgattcgtcgcctccggtggcggtggaggctccgccgccacttgtaccgcctgttaggtctcactcaaacagtgttgttgtaccatcatctagcttgcagacactaaaagcatagttgcctgaaaattccccacagatcacagaagaaccaaacgtcaatactgctatgaatgggagctgtagcagtaccagtaccatcactaccagctcaaccagcaacagcaccagtggtgctagcagcagtgtatttgcaagcttgtttgcctcatcatcagcatccgcaactgcaagcctccactctcaaacaccagcattcactgacctaa

SEQ ID NO: 7136 - DNA, 238 bp, Glycine max
  Clone ID: LIB3030-002-Q1-B1-D6
gttgattcaaatgccatacacccagatacttcatatcggtacgtgttaaattcggtgtggattgttggattgccacttgtttcgtaccgttcaagtgattgtttgaatgatccatcatgaaatggaccacagcactgatgcacaacgcacggacatgatgaacataacacggttcgtgctgaacgaccaatccaggcacccctagtcatgcgagtatttccacatcatgctcagtcac

SEQ ID NO: 7137 - DNA, 388 bp, Glycine max
  unsure (1)..(388): unsure at all n locations
  Clone ID: LIB3030-002-Q1-B1-D7
caaacaatgaaagcatactgagttctatgcatgtcttgaaccgtgataagcaagatttccagtcaagttactttttgactactgatgctgtttctttcagtgacggtttctttatgaaagatgatcttttacagggaaatggtctttcatgggtattatctgatatggtcgatgtgggaaatcaaagggaaagtcaaattaatatagagcagagatcagaacctgaggaatcaggtggaggttgtagggtggaggtcnctttgcctaaacttttggcatcaagaatagaggcagaactcttcaaactgtttggaggtgtgaataagaagtacaaagaaaaagggaggtctcttttattcaatttaaaagatcacaataatcctgaact

SEQ ID NO: 7138 - DNA, 351 bp, Glycine max
  Clone ID: LIB3030-002-Q1-B1-D8
gctacaaccgctacctatagaggctcagcgaagtcacagcattcagaatcagtatcggagaattttatatttttctctaaatctctctgttagtttgaataaatagacatgtctgagactgaggtaaatccaactatcagcaagtcaactggattgcctcgaaagcgcttctatcgagcacgagcacacagcaatccactgagtgactctcacttctcagtgccaatttcacccagccatgttgactattctctcgattaccctcagttatttcccttgtctggtcaagctgatagttccaaaaagatccagtttgctgatgttggttgtggttttggaaggctgctcata

SEQ ID NO: 7139 - DNA, 383 bp, Glycine max
  Clone ID: LIB3030-002-Q1-B1-D9
ctaaagccgagcagcgagagagagaaaccctagcaaaaatgccggctggtcacggtttgagatcccgcaccagagattccttctctcgtcccttcaggaataagggtaccatcgccctcaccacatacctcagaacctaccacgtcggcgattatgtcgacgtcaaggttaacggcgccgtccacaagggaatgcctcacaagttctaccatggccgcaacggtcgcgtctggaatgtcaccaaacgtgctgttggggtcgaagtcaacaagcaggtcggcaacagaatcataaggaagacgattcacgtgcgtgtggagcatgttatgccatcaaggtgcactgaggagttccgccttacgaagatcaagaatgatcagctc

SEQ ID NO: 7140 - DNA, 394 bp, Glycine max
  Clone ID: LIB3030-002-Q1-B1-E1
gctttggaaaaaccaaccagccaacgggtttttttcacctcctgaaatttgtgttggtttggtaatataagccttggagtggaaattcaatatttgtatggaagccagagaaggtattagttctggggttacagtgataggtgcagaagctccatcagcttaccatgtggcgccaaagagtgaaactccaaaccaggttcatgtccctgatagtggtggtgctgctgctacagctgcacctgttggtgtctcacctgtgagtgcggtgttggatggaacagcagttaagaagaaactgggtacgccgacgaaatatgggcctgatgggtcagtcactatggcattgtcaccaatgccaatttcgtcgtcggctcgccttctaatgacttttcct

SEQ ID NO: 7141 - DNA, 87 bp, Glycine max
  Clone ID: LIB3030-002-Q1-B1-E10
attttctgcattgtagaaatggtgccctggaagtgccactttgtgttttgtttattgtggtatgtaatatcttagtcttgatatttc

SEQ ID NO: 7142 - DNA, 386 bp, Glycine max
  Clone ID: LIB3030-002-Q1-B1-E11
ggcgcagagtagagcagcacagaagagggaaaacggcaccgccgccgtagaagaaaacaaccatggtgcacgtctccttttacaggaactatgggaagacattcaagaagccgcgtcgtccgtacgagaaggagcgtctcgacgcggagttgaagctggttggtgagtacgggcttcggtgcaagagagagctgtggagggtgcagtacgcgctcagccgcatccgcaacaacgcgcggaacctcctcaccctcgacgagaagaacccgcgccggatcttcgagggagaggcgctgctccgaaggatgttccgttacggtctcctcgatgagacacagaacaagcttgattacgtcctcgccctcaccgtcgagaactttctcgag

SEQ ID NO: 7143 - DNA, 378 bp, Glycine max
  Clone ID: LIB3030-002-Q1-B1-E12
gccataatagcattgggttcttctctagtctctgtcctaccacaaaaatggtcccaaaaccaatcttagtcacaacaccaccgccggcaacttctgcaccctctccactgctcaacgcagtttcacccctcaaaacagaagaaaaaccccaaacacaaaccctaaaaacccccaccaccaccactcaaaaagctataaccaaaccaagcccatcatcatccaccaccaaaacgacgccgcagcagcgcgtggagctaaagagaaaaacaaactcatgggtccccgcactaatgctaaacgcattcgacgacatcatcaacaacttcatagaccctccactcaaaccctccatagaccctcgccacgtgttgtcacaaa

SEQ ID NO: 7144 - DNA, 395 bp, Glycine max
  Clone ID: LIB3030-002-Q1-B1-E2
acaactacaaaggttgctgtacgagataagatattgaagtagtgctaagtgcctaacacctgcagtgaacaatggcctctgcatcagcatctcttctcaagtcttcacttgttcttgacaagtctgagtgggtgaagggacatacacttcgccaaccttctgctgcatcagttgtgagatgcaaccccaccaccccatcaggcctcaccatcagagctggttcctatgctgatgagctcgttaagaccgcgaaaacagtggcttcaccatggatgggtactttggccatggatgagtccaatgctacctgtgggacgcgtctggcttcaattgggctagagaacactgaagctaagcgccaggcataccgtaccctccctgtgaaagttccagga

SEQ ID NO: 7145 - DNA, 182 bp, Glycine max
  Clone ID: LIB3030-002-Q1-B1-E3
gaaatctctgatgatgcaaaccttttggcggattgtggatctaacaatcctgtggtagtaaaaattttacgaacccccatatgctttgcttccgggaatcatctgatgggtccttctgtcatacctctgtgcacaataattctgaatgctttgattggaatggacatcccaatatatgatca

SEQ ID NO: 7146 - DNA, 303 bp, Glycine max
  Clone ID: LIB3030-002-Q1-B1-E4
cagccatcaagttcctagctctaataaatcaatgaatgaaaaatgtgccagagaaatgcatactcaactttgtgatggggctgatcctgaaattgaagatttaagaacaactccagatccaccaactgagcaagatgattcgaatacaatctctctggcaattgatgatcattttgttgaagacaccatactgtacatgcttcaggatgttataacaaagttagatgtcaacataacactctgcattagagatagcttgttccggttggcccacagtgctatgcaaaggaattatgccagtga

SEQ ID NO: 7147 - DNA, 395 bp, Glycine max
  Clone ID: LIB3030-002-Q1-B1-E5
tctcattgtctttctccaagaataacaactctcaattccaacctcttcaacttcgatcttccatcttccatcttccatcttccatcttatgcccactaaattctcttctctttcaccttcacttcaattacttcaattaagttgagacttccatcttcgactactagtttcaaactctctctctcacatacactataccattccttttctcgctccctctttctctttcactacaactttcccgattctgtatcatctctgcttcagttcagcatccttacatcctctctatcttccacctatttgatttgttttcatttcttccattttctttctatcttctcacaccttgttccattccacttcttttctcctcgaatctaatccttttggtc

SEQ ID NO: 7148 - DNA, 360 bp, Glycine max
  Clone ID: LIB3030-002-Q1-B1-E6
aaagactcaccccttgaggtcgttgttgtcaacaacagtggtggtgtcaagaatgcttcgcacctgcctaaatatgattccatgctgggaacttttaaagcacatgtcacattaatggacaatgcaaccatcactgttgatggtaagcccatcaaggttgtttcaagcagggacccacttaagcttccttgggctgaacttggaattgacattgttattgatggaatcggagtgtttgtggatggccctggggctggtaaacacatccagtcatgtgccaagaaagttattaacactgcccctgcataaggtgctgatattccaacttatcttgttggtgtcaataaagggactacactc

SEQ ID NO: 7149 - DNA, 217 bp, Glycine max
  Clone ID: LIB3030-002-Q1-B1-E7
attcgatcctagtgggaagtgactcacgcctttctctccctccctctaaatatagatgtctgacaacccagagtcaagccaagacaagcgactgaactagaaatagagtgattgttggatgatgcaaaggcctcatgccttgtctctcttttgatggagggtgacaaacgtgtgttatttatgagtattgtagatgagcaagttccctttctttttg

SEQ ID NO: 7150 - DNA, 370 bp, Glycine max
  Clone ID: LIB3030-002-Q1-B1-E8
ggcgagaaaattgggtcagaacccacattgccgtatctaagtcgcgagctcgatggagagaggctactcgttggtgccaattttgcttctgcggggataggaattctcaatgacactggaattcagtttataaacataattcgaatcaccagacaattacagtactttgagcagtatcaacaaagggtgagcgcactagttggaccagagcagactcaacgactggtcaaccaagcactagtcctcataaccttaggtggcaatgattttgttaacaactattacctggtgccattctctgcaagatcacgccaatttgcacttccaaactatgttgtataccttatttccgagtatcgcagaattcttg

SEQ ID NO: 7151 - DNA, 371 bp, Glycine max
  Clone ID: LIB3030-002-Q1-B1-E9
gaaccatctgcttgtttaagcatcacctgccaaggacctgggtactggcggaatacagctccactgtaattgacaatataaggtgctattgcaactgtctttgaatactctctgattcggatgtagaacactggagtgaattgagaaagaaagcggtagtgcaaatctttggctgggaagcccgggaggccaaagaggaattgttgagggtcttgggacttcaagaagaagagggaagttccctagaatttcttcgaagaggctacaaggcaagcacgtggtgggaagaagattttgattcagaagtatcttctgcatggcggagttgagtagtacactgttagaagagactgttttattgcatctgcatg

SEQ ID NO: 7152 - DNA, 396 bp, Glycine max
  Clone ID: LIB3030-002-Q1-B1-F1
cacctttgttcactcttcttctcttgcggctagggttttagcgcagcttcttctagatttaaggaagatgggtaaggaaaaggttcacatcagtattgtggtcattggccatgtcgactctgggaaatccactaccactggtcacctgatttacaagcttggaggcattgacaagcgtgttattgagaggtttgagaaggaagctgctgagatgaacaagaggtctttcaagtatgcctgggtgctggacaaacttaaggctgagcgtgaaagaggaatcaccattgatattgctttgtggaagtttgaaacaacaaagtattattgcacagttattgatgcgcctggacatagggatttcattaagaatatgattactgggacatcccaagctga

SEQ ID NO: 7153 - DNA, 364 bp, Glycine max
  Clone ID: LIB3030-002-Q1-B1-F10
cgagaacaaaaaaaaaaaaaaaaaaaaatccgcgattcgctcttctcttggaaaagtgaaaaccagaagtacgaacgaaagagaagagcgatttagaagtgagagaagatggggttgtcgttcacgaagctgttcagcaggttgtttgcgaagaaggaaatgaggattctgatggtaggtctcgatgctgctggtaagacaaccatcttgtacaagctcaagcttggagaaatcgtcaccactatccccaccatcggatttaatgttgagactgtggagtacaagaacatcagcttcactgtgtgggatgttggtggtcaggacaagatccgtccactgtggaggcattatttccagaacactc

SEQ ID NO: 7154 - DNA, 377 bp, Glycine max
  Clone ID: LIB3030-002-Q1-B1-F11
gcttcctcttaattactctattattctttctcctcctcagaacctcaaacaccgaaaccaagcattacaattcccaatttcatagaaacaccagaatcaataaaaacacatagcagcaaaggcagtgaaaattggcaagctcggtggagaaggaaattggcccaagcaaggaaactttcccttgggagctgctggctcaaccaggttggaagaggcagttcatcccaaagaaagcgggtaccccaaagaaaagtgatattgtgtacagtgcaccaacaggagaggatatcaataacgggaaacagctggaaaaatatttgagagcacactctggtggtccagctgtatcagaatttgactggggcactggtgagacc

SEQ ID NO: 7155 - DNA, 378 bp, Glycine max
  Clone ID: LIB3030-002-Q1-B1-F2
gcgtttccctttcactttcactcacgttctcgctcgccaaacgcccctctctctcctccaatggccgaccagctcaccgacgaccagatcgccgagttcaaggaggccttcagcctcttcgacaaggatcgcgatggttgtactactactaaggaactctgggactgtgatgcggtcactatggcaaaaccgatctgaggcagaactgcaggatatgattaatgaggttgatgctgatggcaatggaaccatcgacttcccagagttcctcaacctgatggctcgcatgatgaaagacaccgactccgaggaggagcttaatgaggctttccgtgtgttcgacaacgatcacaatgggatcatctctgcaactgaact

SEQ ID NO: 7156 - DNA, 407 bp, Glycine max
  Clone ID: LIB3030-002-Q1-B1-F3
gtttcctttccgcttcaggttcagcttcaacttcaaattctcagtgaaaccaattcagctgagtccaaatcccaaatccgaatcaaaatccgaagtgagatttgcgatggagaggcttcagcgaatgtttgcaggtgcaggtggagcgctagggcaccctcccccagattccccaactctcgattcctccgagcaggtctacatctcctcactcgctctcctcaagatgcttaagcacggaagggctggggttcccatggacgtgatgggtttgatgcttggagaattcgtggacgagtacaccgttcgtgtggttgatgtcatcgcaatgccgcagagtggcactggtgttagtgttgacgctgttgatcacgtttttcagactaatatgcttgacatgctcaaac

SEQ ID NO: 7157 - DNA, 378 bp, Glycine max
  Clone ID: LIB3030-002-Q1-B1-F5
agccactatagtaaacaatcttctctatctaaaatggagtttgttctaaattacctaaatgccactgccattggagttctttctataaccctcttctttttgtttttgtataatcccttcaaatttgcattaggtaaaaaagaggctcccaaagttgcaggtgcatggccaatacttggtcacctaccactattgagtggttcagagacacctgatagggttttgggtgccttggctgataagtatggacccatattcaccatcaactatggtgtcaaaaaggctttggtaatcagcaactgggaaattgctaaggaatgcttcaccaaaaacgacatcgtcgtttcgtctcgccccaagcttcttgccattgaactc

SEQ ID NO: 7158 - DNA, 387 bp, Glycine max
  Clone ID: LIB3030-002-Q1-B1-F6
taaagagcaaccatcctagttaccacgtaaggcttgttaccgggccaaagcttgcagaagcacaacaagaatttgatggtgattgctccgttcagatatatagtgtgcaagctagcattcccaaggatccagctgttctttggaatgctgagttcattcaagcagaggagctcttcaagcaaccttcctcggttgacaattgtttgagggataataggttctgtgggatctctaattcttttgtgcagcggaatgtggatggcccaacagtagtttttgcagctcctcaatcaaaatctgtaggtgagggaccaacaaagagtgacatagttcagcaacctcctaaaaatatatcacgtgattcgattgacaaagtccataccaaac

SEQ ID NO: 7159 - DNA, 389 bp, Glycine max
  Clone ID: LIB3030-002-Q1-B1-F7
ctcaaacactagtaaagggaaggaaccgtaccttcctcaataaaactttctctccgatttggcttctcagtttcggttgtcatcgtcggggagaaacaaaaaaaaaacccacaaaaagattataacccaaaaaaccaaaaataaaataaaatatgaaaggtaaagtactaggatccactgtttctcttatcctagtggtgggtgtcgtaattggcgtggttgctgtagttcaaagtccaaagggcgtcaacaacagcaatggaggagaagtgaaaagcaccaacagggcagtgacagcgttgtgccaaggctcagacgacaagaaactgtgccacgatgttctgtcctcttcaaaaagcacagacccaaaggaatacatcgcaaccgtg

SEQ ID NO: 7160 - DNA, 422 bp, Glycine max
  Clone ID: LIB3030-002-Q1-B1-F8
acgtcggactcactcatatctgagctcggaactcaggactcgagcaatcggcaccctctccagcaacagctacttttcatctcttccctcaaatttcaaaaggcgtgagatccttcacatccagggtggccaatgcggcaaccagatcggcgccaagttctgggaggtggtttgcgcggagcacgggatcgaccctaccggaaggtaccgtggggactcggagttgcagctcgagaggatcactgtctactacaacgaggccagttgcggtcggttcgtgccgcgcgcggttctcatggagctccaaccgggcaccatggacaacgtccggtccgggccgtactggcagatcttcaagctcgacaactttgtgtttgggcagtccggggcagggaacaacggggccaatgggcattaccccg

SEQ ID NO: 7161 - DNA, 373 bp, Glycine max
  Clone ID: LIB3030-002-Q1-B1-F9
gagaaaggaacagagagaagaaaaaggaaaaagatggaaggagagaaagagaatcccgattgtaacgccactttggtgaactccttctgcgaaatcacttcctcttccaaagaagaagcccttttctttttggagagccacaatttcgacctagacgccgccgtttcgactttcctcgacaacgccaacaaccctctcatccctcaaaacgacgacgtcgttgtcgccgcaaacccaaaccccaactccgtttcccctccctccgattctcactccccggacttcaacccttccaggtctccttcgccgtctccgtcgccgactcgcacgccctacgagctccgatcccgcaggtctctcggcaagaaaccct

SEQ ID NO: 7162 - DNA, 411 bp, Glycine max
  Clone ID: LIB3030-002-Q1-B1-G1
cacgaaaccaaattaaaaactgcgccttctctgtctctgtttgttcttctcactttatattctctctctgtgtatatctcttcactcttattattccttctcttctcaacgacgatggaggacccatcagcagcaacaacgttgttgctgaacagcgaatattcgaggctgttcgtcgaggacacggacttgtacaatcgcattgtgttgggaaccctcttgccgcacttcgtgtggggcccactcccgcacttcctccagacgtggcttcgcaattacctcggcggcgtcctcctctacctcctctccggcctcctgtggtgcttctacatttattattggaagcgcaacgtttatgttcccaaagatgctattccctctcgaagagccatgctcttgcaaatatctgtt

SEQ ID NO: 7163 - DNA, 382 bp, Glycine max
  Clone ID: LIB3030-002-Q1-B1-G10
ggagcacgaatgcctgccagttgtacagaacagccggtgggctagccttccgcctgagcttcttcgtgttgttattaaaagattggaagaaagtgagactacatggcctgctcgtaagcacgtggttgcgtgtgctgctgtgtgcaggtcctggagaggaatgtgcaaagaaattgttaccagtcctgagttctgtgggaagattactttccctgtctccctgaagcagcctggttcaagggatggaaccatccagtgtttcatcaagagagacaaatctaatctgacgtaccacctattcctttgtcttagtcctgcattgctagttgaaaatggaaagtttcttctttctgcaaaacggaacaaaagaacaacatgcaca

SEQ ID NO: 7164 - DNA, 401 bp, Glycine max
  Clone ID: LIB3030-002-Q1-B1-G11
gccgttcacagcctagcctctgctctagaagatggctcctcccagaggtggtgggttcaggggtggtaggggtgacagaggtagaggaaggggcggtggtggaggaagaggaggagacaggggcacgccgttcaaagctagaggcggtggccgtggaggaggcagaggcggcggtggccgtggaggaggcaggggcggcggccgaggtggaatgaagggaggtagcaaggttgtggtgcagcctcatagacatgatggtattttcattgccaagggtaaagaagacgctcttgttaccaagaatcttgttcctggtgaagctgtttacaatgagaaaaggattaccgttcagaacgaagacggttccaaagatgagtacagagtttggaatcctttccgct

SEQ ID NO: 7165 - DNA, 342 bp, Glycine max
  Clone ID: LIB3030-002-Q1-B1-G12
ctttcttttccaccttcttgttcttcttcttaactttctctctcttctctgttctccgtgccggtgctgtaactgcacgcgtgttttctgttttcgtttgttgtttttttttgctctcatttgcgaaggtgagaaccctaaatttgagagagagaggtttgatttggccggaggtgattctccggtgagattttgcggcggatcagggtggggccggtcacttttctagagagagaaagaaagtgtggttttgagagttagagagagagacagtgcgagagtggggaaaatgtataagaaccagctgcaggagctggcacagcggagctgcttcaacctgcc

SEQ ID NO: 7166 - DNA, 335 bp, Glycine max
  Clone ID: LIB3030-002-Q1-B1-G2
aagagttaaccctcaaatggcattggaaaatatcaaattcaacgaagattcaaacttgcccctcaacaacagcaaaacatcaaaatccctcccttcactttgtatgacactttgttccccaaggtcccctccaatgaatggattctcctccaatccctcaatggccaacaatcaaaaacttccttcctccaagccaatgtcaatccaaagcccaaagcctctccctctcaaaacctccaacaataacctcctctcgctggcaacaatccttggccttccgaatccaaaattccaatcatcagttaacaccctggtgatgccgtttccgtcgttgt

SEQ ID NO: 7167 - DNA, 406 bp, Glycine max
  unsure (1)..(406): unsure at all n locations
  Clone ID: LIB3030-002-Q1-B1-G3
attaaaagatctgtgtggaaatcatgaatggtttggtcaaggaagtgtattaatcattacaactagagatctacacctactggacctacttaaagttgattatgtttatgaaattgaggaaatggacgaaaatgagtcccttcagctttttagttggcatgcctttggacaaccaaaaccaagagaagacttcaatgaacttgcaagagatgtagttgcttattgtggaggattaccattagctcttgaagtccttggttctcatttaattagtatgacagagacagagtgggaaagtgcattgtcaaggttaaaaatgactcccaatgatcaaattcagcanaaattaagaataagttttgatgatttatatgatcatatgggaaaacatataattcctgacata

SEQ ID NO: 7168 - DNA, 222 bp, Glycine max
  Clone ID: LIB3030-002-Q1-B1-G4
ctcaaattgacggtgttgattccaataatgcatgcgacataggaatcgctgctcagtttaattgtgtcatgtgggtctccaacgattcatgggagtggatgtgatgaacgcttcgtccgcagatggagtacactgtatccctaagggccagatctacctattggtcgacctgccgcaatcgcaatgcgaattcatcctgatgaccccacttccattgacagc

SEQ ID NO: 7169 - DNA, 188 bp, Glycine max
  Clone ID: LIB3030-002-Q1-B1-G5
gctacatgtcaaaatccatatcggtatgcacacagctctgcatatacctaccaaaccttttgatcaaccttgacaaggtcgatgttttggagaataagttgagtgattcagcgtaagttggcgacgcttagtcacatcaacttttaacgaagaatgcccttggccatccaaaactaccaaagtacttc

SEQ ID NO: 7170 - DNA, 175 bp, Glycine max
  Clone ID: LIB3030-002-Q1-B1-G6
tggaaaaaaggattgttgttcggaataaactacccaggaacaaaggcggagctgaaaggatgcataaacgacttgtggaaaatgcatcgctgcctgatcgagcgatacggtttctccgaagacgacatcaccgttttgatcgacacggacgagtcctacacggagcccaccggga

SEQ ID NO: 7171 - DNA, 346 bp, Glycine max
  unsure (1)..(346): unsure at all n locations
  Clone ID: LIB3030-002-Q1-B1-G7
cagaaattaagctagagcttcatagtttcttcttcttttctcaccttccttctctcccttcagacaaagggacaaaaaatcagtgtgtgagagagagagagagaaattccaaaaccatgtcgcacagtcatctaagtttcgcctttgggattctaggtaacattgcctccttcgtgtgctttctggcaccactaccaacattttatagagtttgtaagaagacatcaaccgaacggttccaatcaattccatatgtggctgcactcttcagtgcaatgctttggatcntttatgcctatgtgaagaccggagaaacgcttcttatcaccatcaatgcattcggttg

SEQ ID NO: 7172 - DNA, 322 bp, Glycine max
  Clone ID: LIB3030-002-Q1-B1-G8
catgatccgtacgatcacatataaagtccttgatatctacatagatccccaataggtggtttcacagatgagtgggttcggcatgtctcctatccttagtgaatatcttcggtgcgggtctatgagtgattcatcgcttaccctcaggacccacagagctcaagccttcgctgtaggcctccccaaatggctcgaagttggctcacaattaagtctgatcatatgaatgctcaggtgtacaatctagttctaaagcattcaaacgctatcagcctgattagttatcatcaatatgagggttgttctactcagatcgcttcac

SEQ ID NO: 7173 - DNA, 401 bp, Glycine max
  unsure (1)..(401): unsure at all n locations
  Clone ID: LIB3030-002-Q1-B1-G9
tattttctgaagctcgcactccaggaatctacaaacctgattacattgatgcattgtacacattttatcatgagaaaaaacctgaaatggtagtttgtcctcctactccggagtggaagagatcttctgaatttgatctcaatggtgaagcagttccagatgatgatgatgatggagtaccagaccctgatttgcaggagaaccatgagacagacacacgaatgacaaatgatgatgttttaggagatgagatacctactgatcagcaagatgcattgcgtcagttctgttatcaaacgcttaaattgggtgttggggccaggggacacacacaatttccaggttcacacccagtttctctcancagggataatttgcaattgttacgacaacgctattat

SEQ ID NO: 7174 - DNA, 204 bp, Glycine max
  Clone ID: LIB3030-002-Q1-B1-H1
cgcagatgcgacggtagatccagccgattccgcttgctcgatcgctacagacccctgtatcggctcattaagcagcgtgtctcacgcgttctacacgtgttgccgatctcggatgttggaacagtagtttatgatgtgaagctatggagtgcgaagtatgtggatgtaggagatttcgggatggatgcgcacaaaacgctttgt

SEQ ID NO: 7175 - DNA, 367 bp, Glycine max
  Clone ID: LIB3030-002-Q1-B1-H10
catttttcttttcactcaaatcatggatttcttgcaagcacaagaaaatcagatacttgtgggtgtggccgtggccgttgtagccattgggcttggtgcagtatatctctattcatccaagaagaccaaaggttgcttggacccagagaactttaaggcattcaaacttgttaagcgtgcacagctgagccataatgttgcaaagttcacatttgcactcccaacacctacatctgttttgggtcttccaattgggcaacacataagttgcaggggtaaagatgctcaaggtgaagaggttatcaaaccatatactcctactactttggattccgatgttggacattttgaactagttattaagatg

SEQ ID NO: 7176 - DNA, 365 bp, Glycine max
  Clone ID: LIB3030-002-Q1-B1-H11
gttcccttctccaaagagaaagaacagcaagcaatcgttacccattacctatttcactttccacaccactctcatcctatatctctttcttccttattcctctgtcaagccactcgataatatgcagagtctttcaccacctacttccaacgcgctcaatttgaagcatgtttttcgcccgcgacttggcgcgtcaagccgaatctctgtcaaatgcgcttttgggtttgagccggtgagctacggagtcggctccagccgagccgattggcagagctcctgcgccatcttagccagcaaggtcgtttctcaggaacaaccctccgctgaccagaacagcggcaccaccgaccacatcgccggcg

SEQ ID NO: 7177 - DNA, 350 bp, Glycine max
  Clone ID: LIB3030-002-Q1-B1-H12
ccgaagctttgttggcggcaaggcaaatctgcattgcgatggcgcctccgaagctcttcgtctttgcgctttctgtaaccctaattttcgccatcgttggggccgaagccgatatttccatcgaaggaagcactccaaagcctgatacctccgccatcaggatccaattagatcaactcaattccaagatccaaattctcgagtctcaaatcagcgaaaagttggaagaagtgaagaagaaggacgaaattatagcagaaaaagaaaagtccattgaagataaatcaattaccatacaatccttgcagaatgagattgcttctctccagaaaaaagggtcactggatgct

SEQ ID NO: 7178 - DNA, 246 bp, Glycine max
  Clone ID: LIB3030-002-Q1-B1-H2
ccctaataagaagaagaaagagcgatgatgcgttggtagatcgtgatctggtgcgggcgcgatcattgtaggatcggtgcgttcgaatttcgcaatgacgtttgggagttgagtgaaggaatcgcgattatgtctgaattggtggcccctacgggccggcatcaacagcggtacgagaacggttaccgtcctgtttccgggtgtgttccatttaaatataaaagttccaatgattgtggagaccct

SEQ ID NO: 7179 - DNA, 382 bp, Glycine max
  Clone ID: LIB3030-002-Q1-B1-H3
cttcacttatcaaaaaattcccctctctttttctctctcttcctctcagccatggtcgaccttcaaaccgtttgctgcatgtgcggtgacgttggtttccccgacaagcttttccgctgcaacaaatgccgccaccgtttccaagactcgtattgtagtaactactacggggaattagcagagatagagctatgcgattggtgccaaagcgaggggagaaattactcgaggcatagctccaattcgaagaaattaccagtggccggaaatgacgccggaacgaccacccgttctgagtattccggcgagacaatcaggcagcatgatcgtcatgaagacattagtggatcttccgagaaaggaaacagccctgtgcctttcg

SEQ ID NO: 7180 - DNA, 236 bp, Glycine max
  Clone ID: LIB3030-002-Q1-B1-H4
ttcttgtttctctgatgaagggtgttccttctctctctcatcttcacaaggatggtgcgacatcagagcgtgtgcgggatgttcggcgacgtcggcgactctcacaaactttaccgcagcatcacaggtcggtaacgtttcctacactcttattgaagtcactattactgagaagttacagagatcaatcttagcgattggtgctaaagctaggggagaaattactcgaggcatat

SEQ ID NO: 7181 - DNA, 385 bp, Glycine max
  Clone ID: LIB3030-002-Q1-B1-H5
atcaaactcatcaaaatgaatctgtaccactcctctaccaccaccaccatcactaccatcttcaccgtcatattcctcctccttgcaatattattcactctcacaccccacaaggccaacggtgccacgtgtcaccctgaggaagaagcgggcctgttgggcttcaaatccggtatccgatccgactcgtccggcctgctcagtaactggatatcaggtacggactgctgcacatggaccggatgtagaatgccactatgacagcacccgggtcgaaagattattcttaacgggtcatcaactcgaaagcatcttatcgggtaccatctcatccatcctctcaaaactcacactcatcgatggactctacctcataaacctcatc

SEQ ID NO: 7182 - DNA, 354 bp, Glycine max
  Clone ID: LIB3030-002-Q1-B1-H6
cgacgttttcctcgacgcgcttcctcactgccccttccaccattgctccggcgccgccgataaatcgccggaatcttcctcctcttcttcaattctctccgaccccaacccaccgctccccacctccggtaaccacaatccgccgccgttcaacccgccgtaactcaccggttagggagaccacgaataccggttccagccacaattcgaccaccggaaacgtcacgaaccttcggagcgatcgatatctcggaacttcaaacggaaatgagaatttccccgagaaatgcgattcaaatcgagagaaagttcgtccctttcaatctccaagcgttggcatcgaagaggggaacg

SEQ ID NO: 7183 - DNA, 221 bp, Glycine max
  Clone ID: LIB3030-002-Q1-B1-H7
agtagtttgaggaaattcacgtagtaaatgaacaatacaagtttgcaccagtgcagcattctttacgcggtgcatcagtggagccttagagatgacacgactgcggaagaagcattggctgaacagcagaggatatttgcagaggcacttgaaagaatgattggacgagcgattcggacaacagaactagaggttgaagccagtttatcagagataagttt

SEQ ID NO: 7184 - DNA, 417 bp, Glycine max
  Clone ID: LIB3030-002-Q1-B1-H8
aacagtgactacgtttcgttcctctccttcgtttcgtcttcgatcttcggtttcattctgcgtttgttcacatcatggccaccgcttcagtggcatttaagtccagggaggaccaccgcaagcagattgagttggaggaggcgcgtaaagcagggcttgcgccggctgaactcgatgaagatggaaaggaaatcaatcctcacattccccagtatatgtcttctgcaccttggtatcttaatgctgagagacctagtttgaaacatcaaaggaaatggaaatccgaccccaattacaccaaatcatggtatgatagaggtgctaaaatctttcaggcagacaagtatcggaaaggtgcatgtgagaattgtggagctatgacacatgattccaagtcatgcatggaaagactccggg

SEQ ID NO: 7185 - DNA, 382 bp, Glycine max
  Clone ID: LIB3030-002-Q1-B1-H9
gtaaacggtgatgcccccaagaagtgtgatgactcagccaaccatagactgtgtacctcttctgcagaagttggtagcagaggtggtggggacgtacttcttgatatttgcagggtgtgcttcggtggtggtgaaccttgacaaggacaaagtggtaacacaacctgggatttcaattgtttggggtctcactgttatggttttggtttactcagttggtcacatctctggtgctcatttcaaccctgctgtcaccattgctcatgctaccaccaaaaggtttccactgaagcatgtaccagcttatgtgatagctcaggtcgttggagccacacgtgctagtggaactcttagacttatattcaatggcaagaatgaccat

SEQ ID NO: 7186 - DNA, 295 bp, Glycine max
  Clone ID: LIB3030-003-Q1-B1-A1
tgatgatacacctaaataatacattgttccaccatcagaacagtcgccaactaattccctcagaattgaccgtttccaccgtccaattaccctaaaagcagtgcaagaacttcttgggaagactgggaatgtcaacagcttctggatggaccaaattgagacccattgcgatgttacttactcatctgtggatgaacctattgagacacggcatgctgtaaataatttgcagtggacaccaagtggagggcgtctcttaattgcagagtatgttgatcctgaagaagttaaaatg

SEQ ID NO: 7187 - DNA, 398 bp, Glycine max
  unsure (1)..(398): unsure at all n locations
  Clone ID: LIB3030-003-Q1-B1-A10
cctgagagtaataacggaagcaacccacaaaagcagcacaagaacactcatcagatcccagtgatcaattcaatttgcgttcatcactggtaaggcaaacatgaggggcattctttccgtaaggacagccttggttcaacatcatagtgagaaattgggccttggtttcagagtatttagcactcagggtgcttccactgctagtaccccacagccgccaccaccacctcctccgccggagaaaacccattttggcggccttaaggatgangacaggatatttactaacttatatgggctgcatgatccttttctcaaaggtgccatgaaacgtggggattggcatcgaacgaaagatttggtagttaacggtactgattggattgtgaatgaaatga

SEQ ID NO: 7188 - DNA, 387 bp, Glycine max
  unsure (1)..(387): unsure at all n locations
  Clone ID: LIB3030-003-Q1-B1-A11
gtctttctttcttgtaacttcaacaaacggcagcttcttcaattcaaaacagaactctcttgggtgttggtgttggtgagggatctgaggcaaaggtgttgatgatatgggagcgtgtgtttcaactccacaagggtgcgtgggagggaggttgagctcttccaagaagaaaaccagaaagagaaggagagagggactcagaagaagagttacttctcggttgtgtaaggaatcatcggagaaagttgatgtggcagggttgcctgattgttcctttgctaaccccactttccaagcangaagtattgaagacgcatggtttgattccattgcagtatttgactctgactgtgacgatgattatcagagtgttcctgatgatgttgt

SEQ ID NO: 7189 - DNA, 357 bp, Glycine max
  Clone ID: LIB3030-003-Q1-B1-A12
gtttatagagaccctaacacacttagcgtgatcaagatcaacaatggcggaaaacccttccgaaacggtgtcgtccagttcccaacctcctcctcctcctcctccttcttcttcttcttcttctcagaaatcgccccaagattcgccgcaggtccctgcattgtcgaattttatgccctttccgagtggatattattatcaaatgattcctggtatgtaccctgcgctagttccagggttgactttgccgcaacatgaggagcatgggaaccgcggagctggcatatatgctgttcccgttaacccgtatgacagacaagttactggacttccatacaacacactgattccgctgac

SEQ ID NO: 7190 - DNA, 387 bp, Glycine max
  unsure (1)..(387): unsure at all n locations
  Clone ID: LIB3030-003-Q1-B1-A3
gcgcgaatttacaaaactagccaggaacaggccctgtctttccgatattcaccatctctttctctctaatccaaaaaaaaatctgttgtgaacaaacacacattattgtttgttttcatcccacggaaaaatcgatcaggcaaaacaaacaaaggtgaaactgaataagtgcgtgtttgtgttgatgggctaagaggacagagaaaaagaaagaaagagtataaaatcaaatctggcaaatctcgtggggttgaaggctcggtcttcgtcgaagcaagcttcccctgatttgcaggacgacgaggaggagtgcaagccttggcgtcgaaggttaataatgtcnttctcctggtcctcaaccttaagatcacatcctcctcctcctcc

SEQ ID NO: 7191 - DNA, 332 bp, Glycine max
  Clone ID: LIB3030-003-Q1-B1-A5
tgtacccaaagttagtaagtctgggtggatgactgatgaggaatttgctagagaggtgattgccggtgtaaacccaaatgtgatccgtcctcttcaagaattcccaccacagagcatacttgatcccacactctatggagatcaaaccagtaccatgccagaagaacacttggagattaacatgggaggggtcacagtacaagatgcacttagcacacagagattattcatattatattaccaagatgcattcatcccatatgtgacgaggataaacagcctacctactgcaaaagcttatgccacaaggacaatcctgttcttgaaagatg

SEQ ID NO: 7192 - DNA, 372 bp, Glycine max
  unsure (1)..(372): unsure at all n locations
  Clone ID: LIB3030-003-Q1-B1-A7
ccttcacttcactatctcctcttctcctttccttggtttcatccttttattactgtcgtagtggaaatctatcaccctgtggatcaattaattgacgcgagtttatgaaatccaattaaatgttctgagaacaaacgaagaacataagataacagacagaaagcgcttataaatggctttccacgagcatctaccgcacgaaatcacgttccagccgttcgcggaggagcagcagcagcagcagttaggtcagagccgggacatgcagcggctcctgccactctcgggcggngcgccgacgtggttgaacaacagcaacgccgccacgctccgccagcagaatttcctccacctgcagccggaatccgccgc

SEQ ID NO: 7193 - DNA, 395 bp, Glycine max
  Clone ID: LIB3030-003-Q1-B1-A9
gttcttcagacatatctataacgctgtttctgtgagagcatcaatggcgacaaaagctttgtccttcgctctgtctctcaatgacctcaccaataaccacttctcttccaatacgccacacaccgccgccaaagtttccgtctttaccgtcaaatgctcttcttcgggtggtggagagaggccttggaagaattcagatgctagacttgtgcttgaagatggttcaatttggaaagcaaaatcgtttggtgcttcggggactcaagttggcgaagttgttttcaatacatcattgacagggtatcaagaaattttgacagatcctagttatgctggccagtttgtgctcatgacaaatccacatattgggaacactggcataaattttgatgatg

SEQ ID NO: 7194 - DNA, 352 bp, Glycine max
  Clone ID: LIB3030-003-Q1-B1-B1
gccgatcggtcccggcgtggctgcggcgtcgctgaaaatcgtttgcctgaaggagctctacaacggacagtgtttcggaacgctgattctcggggctaagaatctgaaaaccttgaagcttttccggtgctccggggattgggaccggctctttcagttaatggcagatcgagtcacgaacatggtcgaagttcacctcgagaggcttcagattagcgacgttggattgcaagcgatcgcgaatttttcgagtttggagattttgcatctcgttaagactcctgaatgttctgatattggacttgttgctattgcagacaggtgcaagcttttgcggaagcttcacattgat

SEQ ID NO: 7195 - DNA, 406 bp, Glycine max
  Clone ID: LIB3030-003-Q1-B1-B10
atcagccgccgcagaaaaatcaattttttttctctttaactcttcctgcctcgtcacggaagaaatcctaatttctttctctttaactcagtctgcctcgccggaagttgtataacgcctctgtcaccggaaaacttaaaattcgacgcctcgtcggaaaaccggctgctatagcgcgcgaccaccgaattttcttcgcaagtcagatccagaaacagctatgtctggcaattcgaattgcagtgtttacataggcaatctggatgagagggtgacagacagggtcttgtatgatatattaattcaagcaggacgagtggtagacttgcacattcctaaagataaggaatcagagaaaccaaaaggttttgcctttgcagaatatgaaactgaagagattgcagac

SEQ ID NO: 7196 - DNA, 402 bp, Glycine max
  Clone ID: LIB3030-003-Q1-B1-B11
caatgactctgtcaccaagagcaagtttgacaacttgtatgggtgccgtcactctctccctgatggtctcatgagggctaccgatgttatgattgctggaaaggtggctgttgtggctggatatggtgatgttggcaagggttgtgctgctgcaatgaagcaggctggtgctcgtgtcatcgtgaccgatattgatcccatctgtgcccttcaggctctcatggaaggccttcaggttctgaccttggaggatgttgtttctgaggctgatatctttgtcaccaccaccggtaacaaggacatcatcatggttgaccacatgaggaaaatgaagaacaatgccattgtttgcaacattggtcactttgacaatgagatcgacatgcttgggctggagaacta

SEQ ID NO: 7197 - DNA, 407 bp, Glycine max
  Clone ID: LIB3030-003-Q1-B1-B12
gcaatcaggcgaacagtcagaaaaggaatgcacaccaacacatagaggaggaaagtattatgatttctggcaaaacactcgatctgtgaaatcaacaatacttcatttccaattgaggaacttggtttgggcaacatcaaagcatgatgcatatcttgtttcgagttactcaattatacactggtcgtctttaaattccaagagatcagaaatcctgaatgtatcagggcatgtagctccatgtgagaaacatcctggaagccttttggaaggatttactcagacacagattagtacactggctgtgcgggataagttgttgattgctggggggtttcaaggagaacttatttgcaagtacgtagatcgacctggtgttagcttttgttctagaactacttatgatg

SEQ ID NO: 7198 - DNA, 338 bp, Glycine max
  Clone ID: LIB3030-003-Q1-B1-B3
gaagaaagacacagccattgtttgtttactttccattgattgagcgaaagctttgttttttctgcgatcattttccattgggtggaagaaagtctcaacctttagtcgaaagagcaaggatctgagtgagtgagcgatcatgtgtggtggtgcgattatctccgacttcattccagcgggtcccgccggcggggcgcagcgcgtgaccgccgacatcctgtggccgaatttgaggaagcggttctcgaagtcgctgctggacgatgatttcgaggcaaggttcagagaattcgaggatgactcggaaatcgaagatgtcgatgatgaggacgatgaag

SEQ ID NO: 7199 - DNA, 330 bp, Glycine max
  Clone ID: LIB3030-003-Q1-B1-B5
cctttttcccactctcactctaacaaatcttcttctcacttcggtccgtcccaccccaaaaaagggtaaggtaccatgaagctgagtaatgtaagtttggctaggcagggaacagataggatggtcatgcaaaaggaaatttgtgtgccaattgaaacgatttggataaatacagatcaagtaatcacaatgtccttcagaggtacgccaacgaagatgtgtcactaggatcgtggattatgggacttgatgtggatcatataaatgatataagactttgttgtagcagtccgcctgattgtcattggaaggctcaagcatggaacattt

SEQ ID NO: 7200 - DNA, 383 bp, Glycine max
  Clone ID: LIB3030-003-Q1-B1-B7
gccggccacccaaacccaattcacatcattatcttttttctttctttcttgtgtttgtgtgtttcctcaaaattcacaattacaatcctcacaatcctcctcccttcatttctcaaattcccaatatttcaccaattcaaaacccttcatcattgatcttttcactcttttcttctttgctcgcaacattcattcacaatttgggtgctccttctgtttcttctcctcaccattggattggataatctgcaatttcttcaattgacaaaagcaacgggagttgggttccaacggaattatggttttcctcattgcgatgtttagggaagccagctatgtcatttgtcctttgctttgagaaacctaatttgtgatttttaaat

SEQ ID NO: 7201 - DNA, 384 bp, Glycine max
  Clone ID: LIB3030-003-Q1-B1-B9
aagcccgcgaaggagaagaaacctaaggctccgaaggaaaagaagccaaaacaggccaaaacagcttcacatcctccatattttcagatgattaaggaggctttgatcgctttgaacgagaaaggaggatcgagtccttatgcgatagcgaagtacatggaggagaagcacaaggcggtgctccctgcgaatttcaagaagattctaggtctgcaactaaagaaccaagctgcgagagggaaactcgtgaagatcaaggcttcgtacaagttaaccgaagccgcgaagaatgagaacaccgccaaagtgacgaaggccaacgctgagaaaaaggaatcgcgtccaaaacgaagcaaaaccgcaaccgccgctgctccgaagaaa

SEQ ID NO: 7202 - DNA, 262 bp, Glycine max
  Clone ID: LIB3030-003-Q1-B1-C1
gtacaagttgctcaccatcatatttaaatatgcgtattacactttttgttttcatgacgactatatcgatggagaatcactcttatctcaagcacgtcatgcataccttgacgtgctgggactcttcgcagcaaccatccattgatcgattgacatggtctacccgccctgacaacgctcgtcacttcggcttcaatgctaaacatggcaacctaatcaacgtcctcgtgttatgaggggtggccgcaagacatgatttccc

SEQ ID NO: 7203 - DNA, 394 bp, Glycine max
  Clone ID: LIB3030-003-Q1-B1-C10
acactctctctctctctctcttactttcgctctctaaaaaaaaaactcaaaaacaaaacgaagctctcgaccactcgtcgcgacgttgcctttttgaatcgtctcgaatttcactttttcgtgtcccttcgttgtttgtatatatatctatcaccgatcaccgatcaccgatcatcgattattaattgctgttgtttttaaaattactgttattattttggtggttgcgattctattttgtgctgtactgtacgacgtcgttggagcgatttcatcgccgtcgcggctggtacggagagattgtttgctgcgtcgtggtgtcgttgaaggatggcggctggagtggagttgccggaggggagacaccgcggtggcggcggaattgtgatggaat

SEQ ID NO: 7204 - DNA, 393 bp, Glycine max
  Clone ID: LIB3030-003-Q1-B1-C11
aatttccatcttcaacttcaacacttaaactccttttagtttcaataatccacaccccaaaccccaaatctttccctatttattttcatcttagttttccctaggaccatatattataccatatttatatatcttcacatacttaataatatataataatgggtgttgtacggacgtgggagagcaggagggcggagctggaggcctttcgccggagcctggtggcagccgccggcatccagcggcggaaagacgatgagggggggagaacccacaagtttgtttcctcctatgaacatgatgatggaaagggtaccttaatctgtgtcacttgtggagtttcctactttggtcttgccttggtcaaccatctcttgctcttaggttactctc

SEQ ID NO: 7205 - DNA, 403 bp, Glycine max
  Clone ID: LIB3030-003-Q1-B1-C12
ctgttcttcaagatgagaattgattttactgggaaagctgtatatactgcaatatgggttgctgctgtgtcattgttcatggagttgctgggtttctctacacagaagtggttgactgctggtggtttgggcacagtattgatttcccttgcaggtcgcgagatatttacaaacttcctttcgagtataatgattcatgcaactcggccatttgttgtgaatgagcggattcaaacaaagattaaaggatatgaggttactggtaaagttgagcatgtaggctggtggtcaccaacaatagttagaggttctgattgtgaagcagttcatattcctaatcacaatttgagtgtaaatgttgtgaggaatcttagtaagaaatctcattggcgcatcaagactc

SEQ ID NO: 7206 - DNA, 318 bp, Glycine max
  Clone ID: LIB3030-003-Q1-B1-C3
gcagactcttatacccattctcacaagaatcgtcgtcctcttcaaaatgctcaaggtttcaacagcatcatcattttataatcaacatgcagtgccctcatccagtgttgcccgggatcaaggctatctcaggaaagccagttctggcccactcaggcttcatgctctccccagaagaaggcctactccctccatctacgcaccctcaagtccgggtgcttctggggccaccattgctacgcctcctacttctacgtacgccaacgctgcgccaacagtgactgcgacgaatctctcttctgcaactgtatccaggga

SEQ ID NO: 7207 - DNA, 379 bp, Glycine max
  Clone ID: LIB3030-003-Q1-B1-C5
tgatgaaatgtgcgaaacggtgatcgtgtacaccgcgaagcactcgatctgcgggccgtgtcccctctctctgtctctgaactcaacactctcactcacccactgcaccaccgcactttcttctctctacgatttcatttccatggatctttgttgattcttcagatccagcatggccaacttcctcgctcagttccagactattaagaacacctccgatcgccttgtcatttcagtggaggatgtgagtgacttgtggccaactgtcaagcctgcttttgaggcgcgtttgccgttcaaaagggcgactttgaataacaagacgcggaaccctgtctttgttgacacattgccggcagagttcatattaactaccgat

SEQ ID NO: 7208 - DNA, 368 bp, Glycine max
  Clone ID: LIB3030-003-Q1-B1-C7
caacttacggctaaattctcaaagatttaaactttgtctcagagtttccaaattcacccaaccccagagagaaaatgtctctaatcccaaatttcttcggtggcagaaggagcaacgttttcgatcctttttccctcgacgtctgggaccccttcaaggattttcctttcccaaacactctttcttcagcttcctttcctgaattttctcgggaaaattctgcattcgtgagcactcgtgtggattggaaggagaccccagaagcacacgtattcaaggctgatattccagggctgaagaaggaggaagtgaaggttcagattgaagatgataaggttcttcagataagcggagagaggaacgttgag

SEQ ID NO: 7209 - DNA, 393 bp, Glycine max
  Clone ID: LIB3030-003-Q1-B1-D1
cccatccaatcctcacatgcatgctgtctctgccaaagtgccaagtcacataacatttccattgttaccattctttctttccatcacaaccacttattaagcctctgatcctcactttctctcacacaaaaacacactcaccatggatcatcgcaaaccattgctacccacttcctctgatgctgctccaaatccacacactcgcaaggaccttcttctagttatttgcggcttgctattactctcttcccttgttgcctttggagggtacagggcctccaacgcgccgcatgccgacgtggcatcggcaacatcgaacgatgagcaacgtagtccgacatcggtgccttctccgaaatggtacccggtttcgcgaggtgtttcttccggggg

SEQ ID NO: 7210 - DNA, 405 bp, Glycine max
  unsure (1)..(405): unsure at all n locations
  Clone ID: LIB3030-003-Q1-B1-D10
cgtagagcattgcatcgcatanggtaaggtttgggttggtgtcgttcctttccgatgggttgtatggatttgtgattggtggagatttgacggcacacgcattatcaaaatccttactgtgtttctttcgcggtcattgcctcttttctgttcgtggcttcaggatttttttaattctgcagctccgaaatatagataaaccaatcatcaggctgtagaggagaatggcagaatctatatctagcttctggggtccagtcacgtccaccaaagagtgttgtgaaataaattatgcttattcgtcttacattgctgaattttttaatacaatatccaacattccaacaatacttttggctctgattggtcttataaatgcattaagacaacggtttgagaaaagat

SEQ ID NO: 7211 - DNA, 406 bp, Glycine max
  Clone ID: LIB3030-003-Q1-B1-D11
cttcttcttctgtttgtgttctctatccacagtagttatctagtgagtgtggtggcacttctcgtgttgctcaacacagacaacaatggcgtcggtttcagtaatggctacgaccagcaacaacaggtggtccatggcttccttgcgctctgctttgccctctcattctccttctgtttcctcttcattgcgcttccctgtattgccatcttcctcttcatccaagctccgaatttctcgaaccaaacccaaatcccttctcacccctttcaccggtctggttcctcttaaccccctcttcctctcctctccttcttcagaatatgccggctctgatcactcttttaccattattgacaatggtggtcgagtctctgccatgagacatgggaagaaagtgcccaaa

SEQ ID NO: 7212 - DNA, 397 bp, Glycine max
  Clone ID: LIB3030-003-Q1-B1-D12
attgaatactacaagtacttttttaaattgctggcatgcttctgttatcaatccataacaagattcaaactcactcttgaacctaaaaatcatagagaggttgcaactgtgtgctgcactgtggctagaactacatgttctgtggttcccttcatgctttgcactgtggctggctcctgttctgtcaattttcactctctgggggttcagtttgagttagctcaagataaagacatggattctcagaggtttctcatttgacaaaaattgtcttgtatttctttgagggaagaagaagtagatcaagttaaaagattgcagatatgcttatgtggcttgttttgatgtttacttagttatgagggaaaaacactattttcaagggaagagctgaact

SEQ ID NO: 7213 - DNA, 383 bp, Glycine max
  Clone ID: LIB3030-003-Q1-B1-D3
agagacgttgtttcctggacctccatgattggcggccttgttaatcatgacttacccgttgaggccatcaatttgtttgagagaatgctgcaatgtggtgtagaggtgaatgaggccacggttatttctgttttgagagcctgtgctgattctggagccttgagtatggggaggaaggtccatgctaatttagaggaatggggaattgaaattcactctaagtccaacgtttccactgctcttgttgatatgtatgccaagggtgggtgcatagcgagtgcgaggaaggtgtttgatgatgttgtccacagagatgttttcgtttggactgcaatgatttctggcctcgccagccacgggctttgcaaagatgccattgacat

SEQ ID NO: 7214 - DNA, 354 bp, Glycine max
  Clone ID: LIB3030-003-Q1-B1-D5
ggtggttcaggccaacgaggtcatcgaggatcacagccaggtcgagaccggctccgatgccgtcttcgtcggcgtctacgacggacacggcggcgccgaagcctcgcgcttcatcaacgatcatctcttccttaatctcatcagggttgctcaagaaaatggttctatgtctgaagatattatcagaagtgctgtttctgctactgaggacgggtttctgactcttgttcgaaggagttatggaataaagccattgatagcagcaatgggttcctgttgtctggttggtgttgtctggaaagggacgctatatattgcgaatcttggagactctcgcgctgtaattggttctgt

SEQ ID NO: 7215 - DNA, 386 bp, Glycine max
  Clone ID: LIB3030-003-Q1-B1-D7
ctggcgacgtctaaggttttctcttaatccgtagaaacgcgtgatggctcttggatcttagcgaaaaaacaccaccatcttaatattatcatcatattcttaataaaataaaataaattgtttgactatagttacgcaattctatgaatttcggtccacaattggttgactgacttcgttctttttgtgagtctaaaacagtgaaacatctttgttttccacgttttatcttcctatcattgaagacataatagtaagatgttcttgaccagatagcatggaggagcctcaatgtgcaatcaagaaggatgccactgaattggtagggaataccccaatggtatttctaaacaacattgttgtcgggtgtgtagcccgtattgctg

SEQ ID NO: 7216 - DNA, 383 bp, Glycine max
  Clone ID: LIB3030-003-Q1-B1-D9
cacagactctctaccattaggaatgcagatatgattgctgttgtgcagggagggaagattgtggaaactggtaaccatgaagagctcatggccaacccaactagtgtttatgcatctcttgttcaactccaggaggctgcttctctgcatcgcctcccatcaattggtcctagcatgggatgccaaccaagcataacctactccagagaattatcccgtacaacaacaagccttggtggaagttttcgatcagataaagaatctattggccgggtttgtgctgaagaaacagaaaatgcaggcaagaaaaggcatgtttcagcagcaaggctgtactctatggttggtcctgactggttttatggagttgctgggaccttatg

SEQ ID NO: 7217 - DNA, 387 bp, Glycine max
  Clone ID: LIB3030-003-Q1-B1-E1
tcccaccttcctctccttcttttctcttctttcttcttcttccatctctttttttctgcttaaggtctacaaaagttctcttcttcttctcctcctattgaactttggtcatcacacgagaaaacccacgtctggatcttctggtgtaaaggccattataagccttttagaaattttcaaattgagttggtgtatagtgttgaagggggtgaaatttggagcccagtttgttacttcatttgaaaggtcatagtttgaaccctctttttctggagatttacctgggaaaagatgatgatgtttgaagatatgggattctgtggcgatttggatatgttatgtggttctcttggggatggggatattgctgtgagacaaactgaaccg

SEQ ID NO: 7218 - DNA, 401 bp, Glycine max
  unsure (1)..(401): unsure at all n locations
  Clone ID: LIB3030-003-Q1-B1-E10
aacctcttcatctcccacgcttcactttctccctccccctccctctccctctcgctctcgccagcccgagacgtcaccctcccctccttcgccctttcgccaccacaacgcccaacgtccacataaggaacaaccagctatcattttacattgaactagaaattcatttagaagatcaaagacaaaattttccgattaaaacgtacttaaattgaagaggggttgttgggattgggcaccanaaagggaaaaaaatgtggaggttaaagatagcacatggagggaatgatccctatatatttagcacaaataattttgtggggagggaaacatgggagtttgattctgaggcanggtacgctgaggaacgagctcaaattgaagcagctcgtcaaaacttt

SEQ ID NO: 7219 - DNA, 361 bp, Glycine max
  Clone ID: LIB3030-003-Q1-B1-E11
cggctcgagatttgaacataattctcaaatggcattagaaccctccacgaaacagtgtttagaatctgcttctgaaatgaaagttcctgtgagtcctaaagctgttgaagttcagaagcatccagatgcactagaacctgctgatttgcatggtactccattgattgagagttgcccaaaatctctctgtgaagaaaaaagggatgatagggtttccaaatgtgaacagcttcagtcttgtgttgttgaacctataaatattgaccctgtttcccaagaaaatatagtattatccaatcctattaacaatccaaagactgattcttccgaggcttgccatatggaaatggacacatcagac

SEQ ID NO: 7220 - DNA, 409 bp, Glycine max
  Clone ID: LIB3030-003-Q1-B1-E12
atggatggatgtgacattgtggcaaatgcagataaaagattgcctgcaacctccaaagttgcgaaatccaaacccaggttgaagaagtctgaaaagggaaccaagataaagtatattccaaaacagaagacaaatacctagtgtgaaagaataaattggagttgttagttatacagatatacagagtttgactttgttgccaatttatgttagcagaggtccaagttttaccggatggtcttctgtcagaatgttgaaagtaggtttttgccggaaaatctttacattccgcccctgttgtccgaaagatttcatatgggattttggctagttagattctttttacttgttgaattattaccttttttttttgtaataaacttgtttgatttccgtacaagttgacttt

SEQ ID NO: 7221 - DNA, 385 bp, Glycine max
  Clone ID: LIB3030-003-Q1-B1-E3
tccctttgtcctgagggagttaaataaaccagttaatacactcaagcatgtaggaattactggtcctgtggtggaacacatggaagcacggctaaaagaagatactagctgagattaggcagtctggtgggcgaatgctattacaccgtgaagaatataacccctcaacaaatgagtcaggtgtggttggatactgggaaaatattcgagcagatgacgtgaagacacctgcagaagtttattctgctcttaaagatgatggatatgatattgtctaccagaggatacctttaacaagagagagacatgctttggcctctgacattgatgcaatacagtattgtcaagatgactctgcaggtagttacctttttgtatcacacac

SEQ ID NO: 7222 - DNA, 381 bp, Glycine max
  unsure (1)..(381): unsure at all n locations
  Clone ID: LIB3030-003-Q1-B1-E5
tctaattacatcatatgcacaaatctttggtgctccttcggtctcttatcctaattaagttagtgcaaagattatggcttccaaacctggcatactaaccaattggccctggaagcctctcgggagtttcaagtgggtgattttgacaccatggattgcacacagcacttactctttcctagtgagtgagccaaaggagagggaccttacttatttcctcatctttcctcttatgatggtgaggatgctgcatgaccaagtttggatcacactttctcgccatcgaactgccaaaggcaaaaacagaattgttgacaagggcattgagtttgaacaagttgatcgagaaagcaattgggatgnacagattctgttcaatgg

SEQ ID NO: 7223 - DNA, 392 bp, Glycine max
  Clone ID: LIB3030-003-Q1-B1-E7
ctccctctctctcttctgcaccggagcccttctcgccggcggcctctactggttcgtctgtgttctgggccccgccgagcagaagggcaaacgcgccaccgatctatccggcggctccatctccgccgagaaagtccaagacaactacaagcagtactggtccttcttccgccgccccaaggagatcgagaccgccgacaaagttcccgacttcgtcgacaccttctacaatctattcaccgacatctacgagtggggctggggccagtccttccacttctccccctccatccccggtaagtcgcaccgcgaggccacgcgcctccacgatgagatggccgtcgatctcatcgaggccaagcccggcaacaaaatcctggacgtgggctgcg

SEQ ID NO: 7224 - DNA, 409 bp, Glycine max
  Clone ID: LIB3030-003-Q1-B1-E9
caaagccagtgtacaagcctattccgaagccagtgtataagcctattccaaagccagttccagtgtacaagcctataccaaagccagttccagttccagtgtataagcctattccaaagccagtgtacaagcctattccgaagccagtgtataagcctattccaaagccagttccagtgtataagcctattccaaagccagttccagtgtataagcctattccaaaaccagtgtacaagcctattccaaagccagttcccgtgtataagcctataccaaagccagtttcccatttataagccaattcccatttttaagccaataccgaaaccagttcccatttataagccaattcccatttttaagccagtaccgaaaccagttcccatttataagccaattccaattt

SEQ ID NO: 7225 - DNA, 395 bp, Glycine max
  Clone ID: LIB3030-003-Q1-B1-F1
gtttatttgaaattaacaagtagcaaagatgtttggaatcatcggaggaaacaagggtcacaagataaaggggaacttggtgattatgcgaaagaatgtgttggatatcaacagcattaccagtgttaagggtgtcatcggaaccggcattaacatcattggaggagtcgtcgacaccgttactgctttggcgtcccacatctccatccagctcattagtgccaccaaggctgatggacatgggaaaggaaaagttggaaaggctacaaatttaagaggacaagtgtcgttaccaaccttgggagctggcgaagatgcatacgatgttcattttgaatgggacagtgacttcggaattcccggtgcattttacattaagaacttcatgcaagttg

SEQ ID NO: 7226 - DNA, 336 bp, Glycine max
  Clone ID: LIB3030-003-Q1-B1-F10
cgtttatgtagcacgtatttaatcgcgtttatgtagcgtttatccacatggctccaccttgtcttgctgttggtgtaaagcttcagttgtctattcttcatctcaatggccttggtcttccaacacatgtttgaggtaagactcggttatgaggcttctatagcgcttttgaaaggtaagtttgtagtaccttttttcatccgaagaagagttccaaggaaaggactgtgttttaagggtggttttgtatgaacccaccacaccttcactccttggaactcttctatgatttttttgttatcgttcatgctaagcatcaacggggtgcctgtgttt

SEQ ID NO: 7227 - DNA, 407 bp, Glycine max
  Clone ID: LIB3030-003-Q1-B1-F11
gcatccgaaattctgatctgtgagaatgggaaaaggtggatctctgagcgacggcgtggtgaagaagatcgttctctcctacagctacgtggcaatatggatcttcctgagcttcaccgtcatcgtctacaacaagtacatcctggacaagaagatgtacaactggcccttccccatctccctcaccatgatccacatgtccttctgcgccaccctggccctcctcctcgtccgcgtcttccgcctcgtcgagcccgtctccatgtcccgcgacgtctacctctcctccgtcgtccccatcggcgccctctactccctctccctctggctctccaactccgcctacatccacctctccgttctcttcatccagatgctcaaggccctcatgcctgtcgctgtttact

SEQ ID NO: 7228 - DNA, 371 bp, Glycine max
  unsure (1)..(371): unsure at all n locations
  Clone ID: LIB3030-003-Q1-B1-F12
gatcattttggtctggagcagcttcaaatgctgtggtggttgagccggatgcttttaaggaaaatgacgtcatatatagagcccttagctccaaaggtcaccatgatgacatgctccaaactgctgaattggtgcatcaatcttccactgatgctgcatcatctctgctagtgacagctttaaatgagggtcgagatgtgatcatggatggtaccttatcatgggaaccatttgtggagcagactattactatggcaagaaatgttcacaaacacaggtaccgaatgggggtaagatataaagtatctgaagatggtacaataattacagaagattactgngagcaagtagatgacgcagaagaacatctt

SEQ ID NO: 7229 - DNA, 391 bp, Glycine max
  Clone ID: LIB3030-003-Q1-B1-F3
gttttgcagacagagagagagagagagagtgtgtttcagaatttagagagagaattttattttgtttttttggttatcttttttggtttctcttacagcgtttttgtaggtactgaggaagaaagttttggcagaataactttgttggagagaataaaattcaggcaaggcgttgaagttggagagtattagattggaagcttagaagtttctctttggaccaaagaaatggaggtatatggcaattctatggttgcagctccttcaaatgttatttatctgtcaagtattttgggccaagacagcccaattactggtcacagatgcaactggaaatgtgaaaatgaacatgtttgtggaaacatgtatcgctgcaagataacagggctga

SEQ ID NO: 7230 - DNA, 391 bp, Glycine max
  unsure (1)..(391): unsure at all n locations
  Clone ID: LIB3030-003-Q1-B1-F5
attctctcttccttccttctccacatcatttcaaaaacacaaaaaaccctaacccccaattcatctctcttgaatcgaatcgatggcacgcatgggtccagggttccgattccaccccaccgacgaagagctggtggtgttctacctcaagcgcaagatgactggaaacctctcccgctacgaccacatcgccgtcgttgacgtctacaagctcgagccctgggaccttccctctctgtcgaagctgaagacgaaggacttggagtggtacttcttcagcgcgctggatcgcaagtacggaaacggctccaggaccaaccgcgccaccgagaggggctactggaagaccaccggaaaagaccgtcncgtcacccacggcgaacgcaccgtc

SEQ ID NO: 7231 - DNA, 391 bp, Glycine max
  unsure (1)..(391): unsure at all n locations
  Clone ID: LIB3030-003-Q1-B1-F7
gaacaatgccattgtttgcaacattggtcactttgacaatgagatcgacatgcttgggctggagaactaccccggcgtgaagcgcatcaccatcaagccccaaactgacagatgggtcttccctgagaccaacaccggtatcattgtcttggctgagggtcgattgatgaacttgggatgcgccactggacaccccagttttgtgatgtcctgctccttcaccaaccaggtcattgctcagcttgagttgtggaaggagaagagtaccggcaagtacgagaagaaggtttacgttttgcccaagcaccttgatgagaaggtggctgcacttcacctgngcaaacttggagctaagctgacccagcttagcaagtcccaggctgattacatc

SEQ ID NO: 7232 - DNA, 409 bp, Glycine max
  unsure (1)..(409): unsure at all n locations
  Clone ID: LIB3030-003-Q1-B1-F9
cttagagatattccgaaaccatggctcacgccaatccctatgatttttgttgttggaattctaggtaaccttgtctccttctgttgctttctagcaccagtaccaacattctatcgagtttgtaagaagaaaaccacggaaggtttccaatcacttccttacgtggctgcactcttcacttcaatgctttggatattttatgcttacataaagacgggcgaaatacttctcatcaccattaacgcattcggttgtttcatagagacagtttaccttgtcatctatatcacttattgccccaagaaagctaggttctttaccttcaagatgattttcttggtcaacgttggagtgattttcttggtagttcttcttaaccacgttctagcanaagaacgaacagcccgta

SEQ ID NO: 7233 - DNA, 381 bp, Glycine max
  Clone ID: LIB3030-003-Q1-B1-G1
gccctcactactccatgttaacgcgatgattcatttccgggattcaaggattcccttgcctcgcttcaatctctctcccaaatcatagaaaagccttcaattagaatgaacaatttcccttttgggtttcaagcccccaagtccttccccgcttacccaagaaccgagttcgacttataatcacgaaccgccataaaacgaacccgaaagccgaaaaattcgccctttcacattctcagaatgatcaaatcatttgggaaccgtttccatcacttcttcaagcttcaccctctaatgggtctcttcctagccttgtcctttttgctcacacctgtcatgattctctccttgtatggaacccaatatggggtgcaaagtggt

SEQ ID NO: 7234 - DNA, 408 bp, Glycine max
  Clone ID: LIB3030-003-Q1-B1-G10
gctctgtgtgctgcaatttccttttgagcttgtgtttgattcatcaaatcatcaaagatgactgtaggggcaggaatatctgttgcagatgggaacttgatggtgttggggaacaaagtgctgagccatgtccatgacaaggttcttgttacccctgcatgtggtggtgctttgctcaatggggcattcattggggttcaatcccatcacaagggtagccgcacagtcttcccaattggcaagcttcaagggttgcgatttatgtgtgttttccggttcaagatgtggtggatgacgcagagaatgggcacttgtggacaagatatccccattgagacgcagttcttgctcgttgaagcacacaatggctctgatattgaaggaggatgagaccaaggtgctgctacc

SEQ ID NO: 7235 - DNA, 406 bp, Glycine max
  Clone ID: LIB3030-003-Q1-B1-G11
atggcttcctcgtgtgcttcctctgccattgcagctgttgccatctccacaccaagttcccagaagaatggatcactcttgggaagcacaaaagcttcttttcttagtgggaggaaactgaaggtgaacaactttacagcaccagttggagcacgatccagcactacagtttgcgcagttgctgagcctgataggcctctgtggttcccaggcagcacccctcctccatggctagatggcagtttgccaggagattttggctttgatcctctaggtcttgcatctgatcctgagagcctgagatggaatgtccaagcagagcttgtgcactgcagatgggccatgttgggagctgctggcattttcatcccagaattcctcacaaagattggtatcctgaacaccc

SEQ ID NO: 7236 - DNA, 246 bp, Glycine max
  Clone ID: LIB3030-003-Q1-B1-G12
aagcacacataagcactagattattttctttggtctctcattttcaccatagctcaatgggttctggtgctttatagcttcttcgtgatcttgggtcatccggctagttcaggctaaacacaggccgcacgtggtgcatcaacacgatcatgtacaacatgcatatcatcattattagcacaatcagaaactgactagcgtccattccgaccacacagctaccatcatcaacatcacaattaggca

SEQ ID NO: 7237 - DNA, 152 bp, Glycine max
  Clone ID: LIB3030-003-Q1-B1-G5
ggtgggcaaaaatgatccatagccacctatcagcgctctcctgtttggtctcacccaatgactccatcagacattcatttcatcttattgggaaatcagcatgtaaggttcatttcgttgggcaatgagagtacgcgttgtgttggtgatcc

SEQ ID NO: 7238 - DNA, 375 bp, Glycine max
  unsure (1)..(375): unsure at all n locations
  Clone ID: LIB3030-003-Q1-B1-G7
cacaccaaccccacatccaaagcttcagttcaatatggcaaccttgtcaagttttgctcctttggccattctaagtttagttctagtaattagtgccattgtctttgaggctgaagctaggccaaggacattctttgtatttggagattcacttgttgataatggaaacaacaattacttggctaccacggcacgtgccgatgctcccccttatgggattgattaccctccaagtcatagaccaactggtcgtttctccaatggctacaacattcctgatcttatcagtcaacgacttggtgctgacgctacattgccatacttgagtccagaattaagaggaaataagctccttgttggtgcanattttgcttc

SEQ ID NO: 7239 - DNA, 409 bp, Glycine max
  Clone ID: LIB3030-003-Q1-B1-G9
cggatctgaccttacgcgaaagaagaaccctggaagagagcgatccataatccattgttaacaacaaacaaggacacgcaagacaaaagcacgaaactcataggtatacacagctatctcttgagcttcttagcaaagagaattttgagcagaaacttggtggtggtgttggaagaggaacaatacatcgtccctttggtattccggcaaacccagaatccactgttggcttggatacaccgttgtgtaagctgtgttgggatgaacaagtcaagggtaaattcagggaaaatattttatttgtcaccttctcaaaaacgcccaacttgaagattattgtagagatattatttgaacactatggatatcaagtgcccgattttcaaagtgatgaagaagcagttaagcg

SEQ ID NO: 7240 - DNA, 395 bp, Glycine max
  Clone ID: LIB3030-003-Q1-B1-H1
ttcttaataaatacagaaagaaacaaaaaagaaaaaagtttataggtgcctagaagaaaagacaatatagtgtggagcaattacgtttgatcacaagggaaattaaaggtgcaacggttttgcaagatagcatagaagattttgaagaatcttagttgcaatatagttgtgcagttgttgaaatgggggctcctttatcagcatggcctttggagaactttggaacatacaagtatctattgtatgggccgtttgtgggaaaagtcctgtatgaatggttctatggtgaagaacactcctactacaacctcagctggtgccttcatttgttcatacttagtggtctcagaggcctaattcatgtgctttggggttcctacagccacatgtttttt

SEQ ID NO: 7241 - DNA, 398 bp, Glycine max
  unsure (1)..(398): unsure at all n locations
  Clone ID: LIB3030-003-Q1-B1-H10
ggaagagtgaaacataggtgtagtagaggtttgttgtgtttggtggagaagaataagcacataagtgctttagggaagagttctgggacaagtgaggataaggatgattcagatgaagtgcttcaagccacaattgagaagagtaagaaggttcttgctttgcaaagggaattgcttcaacagatttctgaaagaaagaaactggtttcttcaataaatagtgaaaccacccctgaaataagagacagtatttcttatgagcacagtgacaaatccctgtcaagtgactcaaatccacagaaaggttctgccagaagangcagtgcttttgagaacgaaaatggtggtgttgtttcaagcaattatgtcgaatctattgagaaaggaaatacagatgt

SEQ ID NO: 7242 - DNA, 391 bp, Glycine max
  Clone ID: LIB3030-003-Q1-B1-H11
caaccactcttaatttctctctgccttgctcatttacacacctctccaacctttcactttcagctttatttgaatccctctctctcctttccaaatggccagcgttgaggttgcacatcaaacaccaacaacagttccagaaaatgaaacaaccgaggtaatcaagacccaggaaacaaccccggaaccagtaccagccactgaggctcctgcaacagaacaagcagcagctgaggttcctgctcaagaagaacaacaagcaactgaggttcctgccccagaatcaaccaccgaagcaccaaaggaagaaaccaccgaagcaccaacaacagaaacagtagaaacaacaactacagaagaagccaagccagaggagcctaaagaagttgca

SEQ ID NO: 7243 - DNA, 331 bp, Glycine max
  unsure (1)..(331): unsure at all n locations
  Clone ID: LIB3030-003-Q1-B1-H12
cggatccaggaagactcccgcgccccgggcccgtgcgccgcggcgctgtcggactcctgctcactccccaacaacaaaatccaagaccaattccctctgccacccagggctgtccacagtttggcgaaggaaaaacaacatattccttcgccaccacaagtggacagtcctgtctctgtctcagtctcggtctcttcctcctcggacgacgaggacgaggagatcgtgcaagccgtantgtcgggctccatcccgtcctactcactcgagtcgcggctcggtgacacccgtcggcccgcaacatcccgcacgaagtggtgcaaagactgac

SEQ ID NO: 7244 - DNA, 402 bp, Glycine max
  unsure (1)..(402): unsure at all n locations
  Clone ID: LIB3030-001-Q1-B1-G11
ggcacatcatgtctttcctttcggatggtgattcttccaaattacccatgacaacaaacttttctgggaaggaacaaattaaagaaaacaatggagtagctgggcccagccaggaagcaacttggatgaaatctatttattcagaaaagccacctctgttagaaaggcctgcaaatatccttcctacctttgaccagaatgataaaagaactcttgtgcaagaattgcagatgagtagtatccagaaggacttctgttttgatgaattggagagtatagtanaaattaaacaggcagaggctaaaatgtttcaatcacgtgctgatgatgctaaaagagaagctgaagggttgaagcgcantgcccttgcanagaatgagaaaattgaggaagaatatacca

SEQ ID NO: 7245 - DNA, 236 bp, Glycine max
  Clone ID: LIB3030-001-Q1-B1-A1
ggaaatctttatattttgtaaatactacaaaacacaaggtactacgttcggtgttatgttggggaataaaagaaagaagtaaagattttcacaatgaaggacacctccaccagcgttgaccgcgacaaggaacggagttccagtggctccggtagccacatttgggtgatgagaagggtcatgcaagtcaacatgttccttgctgggcctgccgtgttgtggaggttccccaaaac

SEQ ID NO: 7246 - DNA, 395 bp, Glycine max
  unsure (1)..(395): unsure at all n locations
  Clone ID: LIB3030-001-Q1-B1-A10
gtcccaacagacccagagttcatggaaatgggttggtttacaatcccttcgctatctgagattgtggagaatctcgcaatttctagttaccagattttccaaatttgagatttttacgcacttagagtaaatgcaagaactttaagaaagattgggtattgggtatcttgttttccaactcaataagatagtggggaggaaagagatatggctgtaggtagcaaaaccagaaatatgcttgaaggtctggttaaagaaggatcatttaaatggttgcttggcaagaagagttacttttatgaagaatttgaagagatggaaaattctccttctgctgggaagaattttatacgagagctctctcctgttgcaaacctagttgttcgtanatgctc

SEQ ID NO: 7247 - DNA, 426 bp, Glycine max
  Clone ID: LIB3030-001-Q1-B1-A11
acgtaagcccggactaccgcactgcgacaccaagaaaaatacaaaacttgatcgcaccacgaagcctcaaaactctctccccatcccacatctccatgcatattagatcgatgaaggtgaagtacctaacataaaagagccttggtaacagaaaaaacacatcatgagctcctgaaccaccttcatcgaccaggatcataagtttaaaacatggagatgcagcggatgagggaattgctgttactgtggtcatcatttgaaagccagggaatgtcacttgtgggtggaaatcacactgccgccaggttttgcactcgctaaaacaatattccacaacccccttttctctctcttttctctctaattatctcatcatttgtattcctctctctttcttcctctacatatatataacaactctcttta

SEQ ID NO: 7248 - DNA, 359 bp, Glycine max
  Clone ID: LIB3030-001-Q1-B1-A2
cttttgttaacaaagggggtcaaattggtgaactggattttcgcttcccaattggggcaccaatacacgggataagggcgtttttgaccacaaatcagcgtaatacttatgataaggctagaaatgctgtgggtcttgcactcagtccagttgtcaaaactcttgttgatccagatggtgcactgatggacatattgaatttggatagtactatcttttcagattggctcttatccaaaggtggcacacgcatgagtattacagccatgtgggatccaattgcctatgaccctgggtttatcgactgtgataaaatcagtgctcgctgcatgctcaacatatttgcattggtttgcaca

SEQ ID NO: 7249 - DNA, 393 bp, Glycine max
  unsure (1)..(393): unsure at all n locations
  Clone ID: LIB3030-001-Q1-B1-A3
ggcctctatccgccccgacatcgtcaatttcgtacactcgaacatctccaagaacagccgccagccatacgccgtcagtcgtcgcgctggtcaccagacctccgccgaatcctggggtaccggccgagccgtctcccgtatcccccgtgttcccggcggcggaacccaccgcgccggccaaggagcctttggaaacatgtgccgcggcggacgcatgttcgccccgaccaagatctggcgccgctggcataggaagatcaacgtgaaccagaagcgctacgccgtcgtctccgccattgctgcctccgccattccttcnctcgtcctcgcccgcggccaacgcatcgagtctgtcccggagctcccccttgtcgtcagcgactccgccgaagg

SEQ ID NO: 7250 - DNA, 397 bp, Glycine max
  Clone ID: LIB3030-001-Q1-B1-A4
tacgaaaacaagagatatcgaagatggctctgcccaaagctaaggagatcgtgtcgtccaattccgtcgtcgttttcagcaaaacctattgccctttctgcgtcgatgtgaagaagctcttcggtgacctcggtgccaattacaaggccatcgaactcgacactgaatccgatggaaaagagctccaagcagcattagttgagtggacggaccagcgaaccgtgcctaatgtgtttattggtggaaaccacattggtggctgtgactcaacaactgccctgcacactcaggggaagctggttcctctgctgatatctgctggagctgttgccaaatcaactgcttaaaggatctcccatttctaggttatgcagttaaataaaaataaaaacccaag

SEQ ID NO: 7251 - DNA, 234 bp, Glycine max
  unsure (1)..(234): unsure at all n locations
  Clone ID: LIB3030-001-Q1-B1-A5
gagagatttgatagcctcaactcaagtaagggttttctctttgagaaaatcgtatcttacaccttttggtgaccactttgagtgagagaagagaaattaagagagatactcaaattagattcaagagagatggccatcaaccatgaaacttgggctttcattttcggtcttctaggcaacgtgatctcctttatggtggtcctcgctccattaccaactttttaccanatctac

SEQ ID NO: 7252 - DNA, 342 bp, Glycine max
  Clone ID: LIB3030-001-Q1-B1-A6
agcaataagatgaaaatgaaagtgcttgttttgtttgttgctacagttttggtagcatatgaatgccatggctcagactaccagaagttccctctccagatgaaaactgggtttggtgggcaatacagcaatgaggtggcatgtgccagttggaggcttggcgtggaagcaaacaacgtagtcaagtggcaaactgttcctgcagcttgcggagagtacatagctgactacgttctaggagaccaatatagatcagattccaaaacagttaaccaacaagcttatttctatgctaaatccctcaaactcaccaacatagatgtctttgtcttggacgttgac

SEQ ID NO: 7253 - DNA, 401 bp, Glycine max
  Clone ID: LIB3030-001-Q1-B1-A7
aaggaattgaacataagtcttaccaagtatcaaaaactccttgaaaaattgttaaaccctgatatatcaaaggcatacagaaatgtggactttgatactcatattgtcgatcagataattgcaaaccacttttaccgtcaaggtttgtttgatcttggagatagcatcataaatgaggctggagagcctgatgcagctgcacttagatctcaatttttggaaatgcatcagattattggagctatgagagatagaaaccttcagcctgctctcacatgggtgtctgctaatcgagagaaacttgtccagattggttccaatcttgagcttaagattcacacgctgcagtttgtacaggtcctgcaaaatggaacccgagctgatgccttaaaatatgcccg

SEQ ID NO: 7254 - DNA, 340 bp, Glycine max
  unsure (1)..(340): unsure at all n locations
  Clone ID: LIB3030-001-Q1-B1-A8
ctcacacgtaaacgggagactagaggactctttcattcatcactaatatccttccatacctattcatttttcgttacttttcaagtttagttccaccaaatctattgcagatgatgggttatgagtatattttgggaggcagtatagcttctagcttggtgcttgtgtttgttatagatggttctgtatcaaagacgaagggcanatgttcagtacatgcagaaagtaatggtggtagtactataacgacatcaccagaacatggaaaccaccatcaagagatctcagatactacagacgtcatcattgtcggtgctggggttgctggcgcaacccttgc

SEQ ID NO: 7255 - DNA, 238 bp, Glycine max
  Clone ID: LIB3030-001-Q1-B1-A9
gggtttatcgaggctttcgattcgttccttcctcgctgttacaacaatggcgaaacctgggcgaggtcgtcgctctccctccggttccgtttccggctcctcttccccctccgactccggttcctcctctcgctcgcgctccctttctcggtcccgttctccctcgcgctccatatcgtcttccccctcctcctcctcttcctcccgaagctcccgcagccgcagccctcccccgcaa

SEQ ID NO: 7256 - DNA, 367 bp, Glycine max
  Clone ID: LIB3030-001-Q1-B1-B1
aaaaccctaggtagagagctcttcctccctttctcacagcaatggccgccgcagcacgccctctcgtcaccgtgcaggccctcgacggtgacatggcaaccgatgcctccgccaccgttcccatccctgacgtcatgaaggcctctatccgccccgacatcgtcaatttcgtacactcgaacatctccaagaacagccgccagccatacgccgtcagtcgtcgcgctggtcaccagacctccgccgaatcctggggtaccggccgagccgtctcccgtatcccccgtgttcccggcggcggaacccaccgcgccggccaaggagcctttggaaacatgtgccgcggcggacgcatgttcgcccccga

SEQ ID NO: 7257 - DNA, 408 bp, Glycine max
  Clone ID: LIB3030-001-Q1-B1-B10
cggctcgagaagaaatttaagtgaggagctagagaatgatgatgaagtctgctatgtgtgcagtggtggttgtagcacttcttcttctggcggaggtggggcccatggctgaggctgtgacatgcaccccaacagagttgagtccgtgtcttccagcaatcacttccggtgctaaaccttccaatgcttgttgcacgaagctgaagcagcaaaaaccatgcttatgtggctacctcaaaaacgctagcttgaagcagtatgttaactctcctaatgcccgaaaaaccgttgcttcttgtgggattccctttccaacttgttaattaattaagccttcttataattaaagtgtgggatatatatatatatatagataaacagtttaatttatacacactttgatcctac

SEQ ID NO: 7258 - DNA, 327 bp, Glycine max
  Clone ID: LIB3030-001-Q1-B1-B11
atgtgatagaaataaaagcagatgccgtttccaaaaataaagaagaagtagtttcccaaacaaattcaagcaccaatacaaaggaaacaagggatccaaccaaataagggggcttaaaaaattgtaatggcggagaaaaattaacagtaaaatcaaccaaacaggacggttgatgcaaccccaaaggaaaaaggatccaaaatccaattttggaaactaaattttgataagtacctcaaggcaatgcaattagttcaaaggttcaacaagcgttttgggcgcaaaggtatatgccaaagccagaggcattttcaaagtcccttgcac

SEQ ID NO: 7259 - DNA, 380 bp, Glycine max
  Clone ID: LIB3030-001-Q1-B1-B12
atcaaaacaaccttctttctttcaggttcttgatcagtgtcaaaaccaaaagggtggttgcaaattgcaatggctaagcatgatgttgagggtggttccttcgctgcaaaggactaccatgatcctcctccagcaccattgattgatgctgaggaactcacacagtggtccttctacagggctttgattgctgagttcattgccacaatgctcttcctttacatcacagtgctcactgtgattggttacaagagccagagtgatgtaaaggctgggggtgatgtgtgtggtggagttggcattcttggcattgcttgggcctttggtggcatgatcttcattctggtgtactgcactgctggaatctcaaggggtcacat

SEQ ID NO: 7260 - DNA, 395 bp, Glycine max
  Clone ID: LIB3030-001-Q1-B1-B2
cagagagaagcgtcttaataaacgctcttctctgaaaaacctgatttcttctcttcttctcttctctttcgtttcgatcttcgatctctgaaaatgagagagtgcatttcaatccacatcggtcaggccggtattcaggtcggaaacgcctgctgggagctctactgcctcgaacacggcattcagcctgatgggcagatgccaagtgataagactgttggtggaggtgatgatgctttcaacaccttcttcagtgaaactggggctggaaagcacgtgcctcgtgggaattttgtagatctcgagcctactgtgattgatgaagttaggactgggacataccgccaactattttcaacctgagcagctcattaccggaaaagaggatgctgcaa

SEQ ID NO: 7261 - DNA, 354 bp, Glycine max
  Clone ID: LIB3030-001-Q1-B1-B4
cctgtaacaccttcacctccttccccttcaacaccttcaccgtttccttcacctacgacacctgtaacgccttcacctccttcgccatttccttcacctacgccacctgtaacaccttcacctccttccccttcaacaccttcaccgtttccttcacctacgacacctgtaacgccttcacctccttcacctacaacaccttcaccatttccttcacctacgacacctgtaacaccttcacctccttcgccatttccttcacctacgccagctgtaactccttcaccagtaccttcacctccatcacctacaacagtaccacctgttcatagtccttctccagggtatttgcca

SEQ ID NO: 7262 - DNA, 406 bp, Glycine max
  unsure (1)..(406): unsure at all n locations
  Clone ID: LIB3030-001-Q1-B1-B5
tgtgacacaagaagatggccctgaagttgacggggagctcacacagcttactcgtggtgttgatgggtcttcaacaaaggctctacctacaatctggttagaagtgatgcgtttcttcacaaatcctcataaacctatgatcttagccttgtcaaggccagatccgaaaaagaacataaccactttgttaaaagcctttggagaatgccgccccttaagagaattagctaatcttacgcttataatgggaaacagggatgacatagatgaaatgtcctctggcaatgctagtgtgctcacaacagtgttganattgattgataagtatgacctgtacgggcaagtggcatacccaaaacatcacaatcaatctgatgttccagagatatacagatttgctgcaaaa

SEQ ID NO: 7263 - DNA, 410 bp, Glycine max
  Clone ID: LIB3030-001-Q1-B1-B6
ttgtcctctcctccaccattccccatccccaattttctcgatctcatctcccaccaccatcaaaaataataatctgaaaatgaaaagaaactaaaaatccaaaccaaaccaaaccaaattcaaagacacgatgaaattgaactatcaattttgataccaattgaaggactaaagaagtttcatcaaaatgagaagaaactaaaaaccgaaccgaactccacgaacacccatttctccccactaatggtgtcatctccattgttagtgtccctcactttttttctttctctccctctcttgttgtttctatctcctcatattttgtcgcctcccgacgcggacgacctcgccctcttccgccgcgcagccgccccccatacaacctcccacctctccgccaccccgaaaat

SEQ ID NO: 7264 - DNA, 386 bp, Glycine max
  Clone ID: LIB3030-001-Q1-B1-B8
cttcagttggaaaaccccgtgttaacttcagagaaactgttactcaacgtgctgattttgactatttgcataagaagcaaagtggaggacaaggtcaatatggacgggtaattgggtatattgaaccacttcctgcagggtcatcaactaagtttgcatttgaaaacttgcttgtgggtcaagctattccatcaaattttatccctgcaattgagaaaggtttcaaagaagctgccaactctggtgccttaattggacatccagttgaaaatcttcgagttgtcttgacagatggtgctgcgcatgctgttgattccagtgaacttgcgtttaagttggcttctatctatgcttttagacagtggtatgcagctttcagaccggtt

SEQ ID NO: 7265 - DNA, 381 bp, Glycine max
  Clone ID: LIB3030-001-Q1-B1-B9
aattgcggaatcagctagaattttctaataatggccaaagacgttgagcaagttacagagcaaggtgaatactccgcgaaggattaccatgacccacctccggcgccgttgatcgacccagatgagctcactaagtggtccttgtacagagccgccatagctgagttcatagcaacactccttttcctttacatcaccgtgttgaccattattggctacaagagacagagtgacaccaaaatccccggtaacaccgagtgcgacggcgttggcattttgggcatcgcttgggccttcggtggcatgatcttcatccttgtttactgcaccgccggcatctctgggggacacatcaaccctgcggtgacattcgggttgttc

SEQ ID NO: 7266 - DNA, 319 bp, Glycine max
  Clone ID: LIB3030-001-Q1-B1-C1
ctcagtttctttcttcaacgtttccatcatacacagatcccaatcctctctcaagccctaatttcccctcatttccatggccacagaagagcccactgtcgcggtggaacccgctcccgaacctgcctccgccgatcctcccccggaggagaaggaggagaccaaacctgaagccaaggctaagaaaaccaaggagcccaaacctaaaaaggtttccagacctcgcaaccctcccactcatccttcctacgaagagatggttaaagatgcaattacctcgctgaaggagaaaaccggttcgagccaatacgcgattgcg

SEQ ID NO: 7267 - DNA, 386 bp, Glycine max
  Clone ID: LIB3030-001-Q1-B1-C10
acacaacacaacacagcataccgtgtttcattttctctcacacacaaacctccttcgttttcatttacttctcaggaggtataactactagttttcgctttttttttaaaaaataaattgaggagatcttttgccatgggaacccatactttgcgacctcaggactgcttggtagaatgaatcatggcaccacgggctgaattttccccgaggaggacctacagtgattactatcatcagcagattttttggaagtgcagctaccatgaacatgtgttccaattgtcacaaagacatgtatctgaaacaggagcaggcacggcttgtagcatcatccattgggaatattatgaatgggtcatcaagcagcagtggaaatgaacctg

SEQ ID NO: 7268 - DNA, 367 bp, Glycine max
  Clone ID: LIB3030-001-Q1-B1-C12
gtgccctccctctttctagctatttccatctcttaaaacaatttacaaagatatatcatatcatatcaactcgaaatgatgaaaaatattgggttgtttcttcttgtggtggtggttacttttgtggtggtacacacagctggtatcttttaccatcactttgaaatatcatggggtggtgagcgtgccaaaatctatgagaatggaaatcttctcatcctctccctagacacagcctctggctctggctttcgttccaaacaacagtacttgttcggaaaaattgacatgtatctcaagctcgtgcctggtaactctgctggaacagtcattgcatattatttaccttccctggggcctactcatg

SEQ ID NO: 7269 - DNA, 421 bp, Glycine max
  Clone ID: LIB3030-001-Q1-B1-C2
ctcgacccggcttttccctcgttgaaatgaaaatgggttcttctttgtggactttgtgtctaattttggcttcactagcctcttctgcattctgtgcctttccacggaggccagtggatgttccattcggcagaaactacgttcccacttgggcttttgatcacatcaaatacttcaatggaggttctgagattcaacttcatcttgacaagtacactggtactggcttccagtccaaagggtcatacttgtttggtcacttcagcatgaacataaagatggttcctggcgattcagctggcacagtcactgctttttatttatcttctcaaaatgcggagcacgatgagatagattttgagttcttggggaacagaacaggacaaccttacattttgcaaacaaatgtgttcaccggagg

SEQ ID NO: 7270 - DNA, 401 bp, Glycine max
  Clone ID: LIB3030-001-Q1-B1-C3
tcccattattttctgcgtcaattttgctgaaaaccttaagtgggtatcctgaaaacactagattttcgattcgtttggtaagcggatttttaggtttgattattacgtttttctgttcttgttggatatggaggtttcggtgattggaagctctcaagcgaatctgggagcgtcggaattggcatctagggaagttggattttgcaatcttaagaacaatttaagggctttgaatgatagagttagttttggtaggaataatatacggtgggagaaggctgggattagcttcactttgagggctcttcagactgaacccgttagagaggagaagaagccttctgggattggaacaagattcaaaatggcaaatggtttaagattaattgtggggcttcccc

SEQ ID NO: 7271 - DNA, 412 bp, Glycine max
  Clone ID: LIB3030-001-Q1-B1-C4
aattaaactacagatttgggatactgctggacaagaacgattatgacaataactagtagctactatcgtggagcacatggaatcattattgtttatgacgtgacagatgaagatagcttcaataatgtgaagcaatggctcagtgaaattgaccgctatgccagtgataatgttaacaaacttttggttggaaacaagagtgatctgacagcaaatagagttgtctcatatgacacagctaaggaattcgcagatcaaattggcatacctttcatggaaacaagtgcaaaagatgctacaaatgtggaagatgctttcatggccatgtctgctgccatcaagaatagaatggctagtcagccttcagcaaacaatgcaaggcctccaacagtgcagatcagagggcaacctg

SEQ ID NO: 7272 - DNA, 349 bp, Glycine max
  Clone ID: LIB3030-001-Q1-B1-C5
gaccgtcgcgagtctccatcttcttcatgggcctgcgccacccttacgatgcctgagttgcgttccgggccagacatattgcgccctgtctagagggtaaacggcagtccgacaagtcagccaggctcggcgtcggtcgcctgaacctgtcaaaggaggctagccgtcgtcgccgtcacgaccgggatgaatcatacgctgaagtacgcgattgccgtcacgatcgatcagatcctgaacgctgtagagtaaagtcgtaccgttcgtggaagcacttcgatgaaactgaatcaggatcacggattgatggagaatcttgggaatcagagggtttcagttagggttttgg

SEQ ID NO: 7273 - DNA, 401 bp, Glycine max
  unsure (1)..(401): unsure at all n locations
  Clone ID: LIB3030-001-Q1-B1-C6
gttttctcttcttcgttcgtttcgttgaaaagcgactttttctctctgcaactctcccttttcttccttcgtagatcgaaagggaatcttcttccatggcctccaagcggattctgaaggagcttaaggacctccagaaagaccctccaacctcttgcagcgccggtcctgtagcggaagatatgtttcattggcaagcgactataatgggtccccctgatagcccttatgctgggggtgtttttctagttactattcattttcctccggattatccattcaagccacccaaggttgcatttangactaaagttttccacccaaatatcaacagcactggtagtatttgtcttgatatcttaaaggagcagtggagccccgccttgacaatatctaaggtt

SEQ ID NO: 7274 - DNA, 359 bp, Glycine max
  Clone ID: LIB3030-001-Q1-B1-C7
gagagagaacaatggaagacataacagagggagtgaacaacatcaacatctctgattcgtataagaaaaatcgcattcaggtctctaacaccaagaagcccctcttcttctacgttaatctggccaagagatatatgcaacagcatgatgaggtcgagctctcagctctaggaatgggtattgaaatccctctcgccttttttcctcttttattccttgaatttcgcttgttggttctattggttgcttattgattagtaacgtggactcgttcttttcgtcattcaggtattattctagttatagccttataggcttgctacatataactttatgtgaaaaactcacagaatgataac

SEQ ID NO: 7275 - DNA, 354 bp, Glycine max
  Clone ID: LIB3030-001-Q1-B1-C8
aaggaaagcaaccaacaaccttctcctttagagattgaaagtctcaaggctgaacttgctgctttggccaggcaggtgaatgtgtcagacttggaattacagaccctcacgaagcaaattgtgaaggaatgcaaaagagggcaggatcttgcgacagaagtcatcgtcttgaaagaggaaaaggaagcactcacgacagaatgtgacaatctcacgtcttttcagaaacgcatggatgaggccaaagtgaagaacagatcacaattggcacgtgcagatcttcaagctcttgttgaagaaatatgacaccaattggatcatgagaaggacctatacgcatatctccgattacag

SEQ ID NO: 7276 - DNA, 402 bp, Glycine max
  Clone ID: LIB3030-001-Q1-B1-C9
cacgcatgtgcaaccattagccaataaccaaaccccccaacacacatatcagaacacacagcacaacacagttcaagtttctcgtttccctaaacagatcctaacaacacaacacaaacacggagaaacaaaaatgcacgcaaagacagactcagaggtaacaagcctcgccgcgtcttcccccacgcgctcccctccacgccgtcctctttactacgttcagtctccctcgcgagattctcacgacggcgagaaaaccgcaacgacgtcgtttcactccacgcccgttctcagcccctctgcttcccctcctcactcgcgccactcctcttccacgcgcttctcgaagaaggaccatagccatagtcttaagccgtggaagcaaatcgatgttattgaaga

SEQ ID NO: 7277 - DNA, 289 bp, Glycine max
  Clone ID: LIB3030-001-Q1-B1-D1
cagaaattatgtcgttgtagcataatgacgcttgcttaatttgacaaattaaccccacggcaattgggtagagattagagaagcaaaaacacagttttcttacgcacgatctgatttagacaccgccacttgatcattttttttatatactttttttaagaaaaaatactataacatatgctcatcataagttggtgatagagatagttttgttcccttctaaggtgttaattggatgaagtttaggatgtggtagctattcaatagaccttactcttgatatgaaggg

SEQ ID NO: 7278 - DNA, 407 bp, Glycine max
  Clone ID: LIB3030-001-Q1-B1-D10
caatgggcattgatagtgaatacgtgatatctcacaaggcctatgcgagggtgggattgcttgggaacccgagcgatgtctactacggcaaaacgatagcgttaagcgtcgccaacttcttcgccaccgtcacgctgcgtccctccgaccagttaatcctccaaccccaccccctccacgatctccttcatttctcatcgctccctcaattggtcaacaggttgagctcccaaggttactatggaggcgtgcgattgcttatggctatttgcaatgtcttctacgcgtattgcagagagaacgccatcgatcttggcgacgacaatttcactctctcctacgacaccaatatccctcgccaagctggtctttcgggttctagcgggatcgtgtgtgctgcgttgaac

SEQ ID NO: 7279 - DNA, 251 bp, Glycine max
  unsure (1)..(251): unsure at all n locations
  Clone ID: LIB3030-001-Q1-B1-D11
atgggttgtgtaattgcgcctctcaaattctggatgtgttggactgcccttgatattggctcacctgatggcccttancaagcaccacacgctgttaaattcatggaaattgtcatacatggcgtacagggattctcagagcttccgaagtactgcctgcaaaggtgtggtggtttcgttttggcacccatagttatcagccttctaacggatgtcactcctaagaaattctcacagtatatagctaaccc

SEQ ID NO: 7280 - DNA, 264 bp, Glycine max
  unsure (1)..(264): unsure at all n locations
  Clone ID: LIB3030-001-Q1-B1-D12
tcatgccctgaaaaaagggtctgctgagtatgcacctttggctaagaaccctgagaaagagtttttgaagactattactggcaagaaggagaccctcattgaccttacaattatagaaatcttgtcaaggcacacatctgatgagttctaccttggggagagagatggtggtgactattggacttctgatgctggtccactagangccttcaagangtttggaaagaagcttcaagagattgaacaaaagcttatacagaagaa

SEQ ID NO: 7281 - DNA, 276 bp, Glycine max
  Clone ID: LIB3030-001-Q1-B1-D2
ctcttacacaccgaagcactgctactactactactttctctctagatatgggttctggtgctgtgcaactgtttctgatcttggggctcttggctagctcatgcttaacccaagcatcatgtgctgcaccgtcataatcacccactacaaccccatcaccaccaacacccagaatcaacacctgcaccaacatccatcacatcagcaaccccagcatcagcaaccccaacatcagcagcagctccaacatcagcagcaactccaccaccagcaagc

SEQ ID NO: 7282 - DNA, 409 bp, Glycine max
  Clone ID: LIB3030-001-Q1-B1-D3
ggtcatagaccttaagaaaagcctattaagtctgataggctggcttatttagcacaaatatttttttaaaaaaaattattattattatgatatataatattatagttatttcaatgaaattgcgaaattattttaatgatttgacgatttgaatcattttaatgtttggaatatgttgattcctataagtgtaaatgagtaccaggaataaaggctcttttcttttggtggaactcaaaagactttggtagcctatcacgtgtaatatcaataggcaagttttggccacatcttgtggtgtaaaattgtcgttttgtttttaatgaaaatctttggctttgttaaaggaaaaaaaaagtaaataggaatgcaatgcaaccaattttgggtaacttacgaataacatata

SEQ ID NO: 7283 - DNA, 420 bp, Glycine max
  unsure (1)..(420): unsure at all n locations
  Clone ID: LIB3030-001-Q1-B1-D4
agtttttgaaatgttgtcaccccttcttctatttctnggcctaatccttcctttgtttttgttgtccttcttcaaataccgtataaccttcaagaatccaccacttccaccaggtcctagaggccttcccataatagggaatcttcatcaactagatagtccttctcttcatgagcagctatggcatctctcaaagaaatatggtcctttattgtcccttcaatttggattaaggccagccatagttgtttcctctccaaaattggccaaagaggtaatgaaagacaatgaccttgagtgctgtggacaacctacattactaggccaacacatactaacctataatgggttagacatgggattttcctcatacgatagttattggagagatatccgaaaaatttgtgttgtccacgtcct

SEQ ID NO: 7284 - DNA, 362 bp, Glycine max
  Clone ID: LIB3030-001-Q1-B1-D5
gcctcactaccgtgacacaatgaatatcaatgcacttgcacgacaatcgctcatcatcgcagatggcgttatcgagcgatcatttttgcccggcaaatactctctggagatgtcttcggcagtttacaagagttgggttttcactgatcaagcccttcctgcagatcttatcaagagaggaatggcaattgaggattcctgtgccccccacggccttcgccttgtgatagaggactacccttaagctgttgatggactagaaatatgggatgctattcagacatgggttaagaactatgttcccttgtattacccaacagatgatgcaattaacaaagactctgaagctcaagcttggtgga

SEQ ID NO: 7285 - DNA, 381 bp, Glycine max
  Clone ID: LIB3030-001-Q1-B1-D6
atgaaccctaactctaaaccaccaaactgcagccatggatatgtcgcaatcattgtgggctctgttctcggcttggcgttgctgctgttgcgtgtctgaggcggcggcggagacagtcagcaaagccgcgaagccagtggtggctgcgctggcggaggcggggacgtcatcgtcaaaggagggacgggaatctagttcgtcgttgtcggtgtcaccgattctggcatcgttgctggggctgaacaagatcaagacgagatcggggccgctgccgcaggagagcttcttcggattcaggggcgagaaagggacggcggtgctcggcggcaacaacctctcccggccgggtgtcggtgcccgcgctggcggtgggaagaagaa

SEQ ID NO: 7286 - DNA, 407 bp, Glycine max
  Clone ID: LIB3030-001-Q1-B1-D7
ccggagggaggaagagatgttggggagcagcgagagctcaccctactcccccaaatccatcaagcacaccagatctctccccagatcgatcaactacctcctccgcgagcagcgcctcttgttcatcctcgtcggcatcctcatcggctccaccttcttcatcatccagcccactctctcacgcatgggcccacccgagccggcccacacattcctccctcgaaccgggcttgcccgcttcagcggcacaaggcctcgcacgggccgcgttccggtcgggatcggcggcaggaggcagcgaatcgtcgtcaccggcggcgcgggcttcgtctggagccacctcgtcgacaaactcatcgctcgcggtgacgacgtcatcgtgattgagaatttctcacgggaagaaa

SEQ ID NO: 7287 - DNA, 421 bp, Glycine max
  unsure (1)..(421): unsure at all n locations
  Clone ID: LIB3030-001-Q1-B1-D8
agcctcgcgagcacaaagcaaagagaacagtactgtggattcccttctcaaactactgaagaaacattcagttgagcaagtgaagagaagtagtggaggcagaggaaaagattttagttcagaccagttgcaagaaagtaaccaatacaatggaggacggaactctaaaatttctgatttagatagttctccaaaggatgagccccaagaggacattgtcttctcttcctcggtagccaggcctcggtcaaatttccaaagaaggtctcccgttcctcgtttaagatagcagcatgtctctaacgatgagaatgaaatgactgtagtgccagtaggtagtgacgatacagagaacaatcaggatcagatagatttgaaagctgatgacgangctgaatctgactttgaatcggatgttgat

SEQ ID NO: 7288 - DNA, 369 bp, Glycine max
  Clone ID: LIB3030-001-Q1-B1-D9
gtactcaggcgtggtccttttatgacttcagatggtatctttgtgatacattcctagttcctgataataaggataactgcaggcattaaaataagtaggatcaacagagtaagaacatgcatatacgaagcatatatttatgatctgtagtagaaagaaacagagtttaagatgaaggcataaatggtactaaaaaataggcatttatttcctgattattttggcattttgtatcggtgattcaaaataaaaacaaaaatgacattggatttggaggtgcatctctttgtcgtaaagctggttggacaaaaatgagcttcgttgtggggtatcctaattcctaaaggctaaagcaatgtgtaattttgt

SEQ ID NO: 7289 - DNA, 380 bp, Glycine max
  unsure (1)..(380): unsure at all n locations
  Clone ID: LIB3030-001-Q1-B1-E1
gctacctttggagaactgttccaaggaaaatgcttgaaagccctctggattggtgcaggattggtcttgtttcagcagatcacagggcaacctagtgtgctctactatgctggatcaatctttcagagtgcaggattctctggagcatctgatgcaacccgagtctctattctccttggggtttttaagttgattatgactggagttgctgttgtcgttgttgataaacttggaagaaggcctttactacttgggggagtttcagggatagtaagttccttcttgtttctttgattgtgtagtaatatcctgagaagagaaaacttcctcagttcctcatntctacctcaaattgagagggttatgccaatctgctaatc

SEQ ID NO: 7290 - DNA, 233 bp, Glycine max
  Clone ID: LIB3030-001-Q1-B1-E10
ggaagatctagtccatatgcgatagcgaagtacatggacgagaagcacaaggcggtgcttcctgcgaatttcaagaagatactaagtctgcaactgaagaaccaagctgcgacagggaaactcgtcaggatcaaggcttcgtacaagttatccgaagccgccaagaacgtgaaggagagcaccgccaaagcgacgaacgaatcgcctccgaaacgaaacacaatcgcaaccgc

SEQ ID NO: 7291 - DNA, 399 bp, Glycine max
  Clone ID: LIB3030-001-Q1-B1-E11
aaaagaagaaaaaaaaaagcaaagaaaatcctgtttcccgataaaaaccccgtccgtacatggtctggtcacgcggatcgggttgattgagatgcacaccgcgagcaggagcaacggcggcggcggcggcgtgctggcgtcgcggacgagttcgcggtcggtgacggagacggtgaacgggtcgcacaagttcgtgataaagggatactcgctggcgaaggggatcggagtcggaaaacacatcgcgagcgagacgttcacggtaggagggtaccagtgggcgatatacttctaccctgacggcaagaacccagaggacaactccgcctacgtctccgtcttcatcgcgctcgcctccgagggcaccgacgtccgcgccctgtttgagctcacgctgct

SEQ ID NO: 7292 - DNA, 344 bp, Glycine max
  Clone ID: LIB3030-001-Q1-B1-E12
aacttggggaaaaaataaagaaggggttgttttgtacttggtgtgtgaaatgagaaaaacattgagaatagtttatgaagtcgagcactagagtcttgtactgctagactgaaagagcttccttgttcaatggctccatttggctccttggtcattctcccctttttgttgatagcaacagtgacttgttctacttcagagaaggaaaatagtaaaactttcatagtccaagtccaccaccaaaccaagccttccatattccctacccacaaacactggtacgactcctccctctcttccatttccaccaccgcttctgttatacacacctacgacaccgtttt

SEQ ID NO: 7293 - DNA, 336 bp, Glycine max
  Clone ID: LIB3030-001-Q1-B1-E2
ctctgttttcaccgacccttgttttctatctgggtcggcaaatggttttcaattagtgtttctgtgttgtttcttcattgttgctttctctcgaagctagctcaacccgagatggatctgagagaaagtttggtacctcttcttgtggggtcgttcgtcgtgcaattttgttgcaatgccaatgcgaatttggtgttccccgttgtgcgcaaattcaaaggtcccgttgaaaacctcgctgctatcaaagctcatgatgctggtcgccgaggtagatttctctctgtccttgatgtcgctcttggtggcaatggccgtcctacttcaaatgggctg

SEQ ID NO: 7294 - DNA, 362 bp, Glycine max
  unsure (1)..(362): unsure at all n locations
  Clone ID: LIB3030-001-Q1-B1-E3
attcatccgttgtgttctaagattaaggccattatatataatattttgtttacaacttcctgactcagtgacaggcatgctagttccctttatgctgttcaaaaacatgtcttttttctcccccttggtctgacacaagatttttcggtgaatgagactctagcatggaaagaacgaagtgagtttcttttcttattttgaacaccacagtgatgaacgaacacctatttgaggactgttaacgttccatattaacatctttgttggttacacttgaagttagaagcctcaagtgaagtgtacttgcatcttgttcttggaaaagttcagttgaatggggactcanagagggatagctcttc

SEQ ID NO: 7295 - DNA, 398 bp, Glycine max
  Clone ID: LIB3030-001-Q1-B1-E4
gcgaggttgttgcaaacccagacccaagctctcttgcgaaggaagacgatgggtccgatgctacacaccattctcactgtgcttcttctccatatgcttcatctcaacgtcatcttcctcttccttctcttcaaaccatggcgcttcgttttctctccgcgtttcctctcctccatcaatggcgagctatagcggcccctttttgtgggggacgaaagtgatgcgtcgtcgttgaatcagtgcaatgaattgccctcgagattatgatctcgacggtgcgtgttatcccagtgaagttcagtttcgctctcctcgaacccatggccaaggccttgttcataagcaaaagttcaaaaccttaacatgccacagccacatgctggtgatactttggttgt

SEQ ID NO: 7296 - DNA, 310 bp, Glycine max
  Clone ID: LIB3030-001-Q1-B1-E5
cgatgatgatcagagaggaaaagggtgtgaagcctgttctactaaaatttggtttggctttggctctttcatttgctggatttatctactcacgcctcagaaccagaagaatcaagccctccaagtcacgcaaggggtgttctttcagtcatgacaatgaagataatttaggaggacgtataggggcagcattaagtacctgcaatgccatttcagagggaaattttcgatgtacttcatttgtggcacaagaagaagcatgcatcaacatggtgataaatgatcaatctcgtattgctctctcttctga

SEQ ID NO: 7297 - DNA, 339 bp, Glycine max
  Clone ID: LIB3030-001-Q1-B1-E7
atatattccctccaatctgcacccagccccacttagctaccttatctctctctctctctctctctcaatcgttcttcacgagagagagagacatggacgccgtcgttcaaaccagaggccttctctctctccccaccaatcccaaaaccagggtttcgcatcatctgcatccatctcacggtctcaaacaccgttttctctctctaaaacccaaacccctctccgccccttctctctccgccgccgccgccaaatttcacccctttggcccaaagccccaaaatttattcatctgccgggccgacgccgctgctgccgcagatgggccttgccagcccg

SEQ ID NO: 7298 - DNA, 422 bp, Glycine max
  Clone ID: LIB3030-001-Q1-B1-E8
cagtgaaagagaatccgaggcgaagagaagagaaaaattaagatggaggggaaggagcaggatgtgtcgctgggagcgaacaagttcccggagagacagccgattgggacggcggcgcagagccaagacgacggcaaggactaccaggagccggcgccggcgccactggttgacccgacggagtttacgtcatggtccttttacagagcagggatagcagagtttgtggccacttttctgtttctatacatcactgtcttaaccgtcatgggagtcgccggggctaagtctaagtgcagtaccgttgggattcaaggaatcgcttgggccttcggtggcatgatcttcgccctcgtttactgcaccgctggcatctcagggggacacataaacccggcggtgacatttgggctgtttttggc

SEQ ID NO: 7299 - DNA, 380 bp, Glycine max
  Clone ID: LIB3030-001-Q1-B1-E9
cgtgcgtgtcttttatcttgaacaaaaaaatcacctttcccttattagggttttgaaatgtggagggagaatggaaggctctgaatccgattctgtgtcactttccatttccaatggcgaagagccccaattggggcgaccttcttcccccgccgctcctcctgagccgtcagatctcaatcatgcggcggatgaagagacactctccggggagcttcagagcaagttggatttgaaggatgtggatgaaagtgaggagaaagtttcggactttaacgatggtggaggagtttgtgatgaagaaactggtaagggtgatggagatagtaagggttgggagaccaatagttggaatgaggaagtgggtgttgatgttgatg

SEQ ID NO: 7300 - DNA, 352 bp, Glycine max
  Clone ID: LIB3030-001-Q1-B1-F1
ggttgattaggaaatggatgacgaggatgtgaatgaaagtttgcgcgagacgaaccagtttgatgaagagttcctaagagatattctgcagcagccagaagagggcggtgaagatctgaaaaactcatcgatcatgtcgtctctatttccaacaacttatatactgtccttcgacaaatccgctgctgaattgttaccaactgaaactgatcatcgtgattattcttcttcccaattgccctcatcatcaaattcaagggccaaccatggaaccaacaagaagcctcgaagcgcttcggagtcactggatcacatcatgtcagagagaaataggagacaggagctcaacagc

SEQ ID NO: 7301 - DNA, 348 bp, Glycine max
  unsure (1)..(348): unsure at all n locations
  Clone ID: LIB3030-001-Q1-B1-F11
caagtctgagaacaagactgagaacactcccagccaggtcaaggctctttccagtgttaaaattgttcaagcggctattggggggtggcactgtttggccgttgatgatcaaggcagagcttatgcttggggtggaaatgaatacgggcagtgtggcgaagaacccgagcgcaaggatggcactggtagacctttaaggagagatatagagatccctcagcgctgtgctcctaagcttgttgttcggcaggttgctgcangaggaactcactcagtggtacttacacgagaatggcatgtttggacatggggtcagccatggccgcctggtgacataaaacagatttc

SEQ ID NO: 7302 - DNA, 314 bp, Glycine max
  Clone ID: LIB3030-001-Q1-B1-F2
gattgatgcagagacggctaccgacgatgtagtagatggggcggtcgatacatacgactttgctgaactattcctaagagatactctgcagcagccagaagagggcagtggccatcggtaggctcaccgatcaggtcgtcgcaatttccaacaacatatagcctgtccttcaacaaatccgctgctgaattgctaccacctgatactgatcatcgtgattattcttcctcccaattgcactcatcatcaaattcacaggccaaccatggtaccaacatgaagcctccaagcgcttccgagtcactggatcacat

SEQ ID NO: 7303 - DNA, 407 bp, Glycine max
  Clone ID: LIB3030-001-Q1-B1-F3
ctggaactgtctccacagcaccttaatggcaatacttttgctgataaattaaggttttccaattcaacctacagggaggagccatcttcaggaagcattttgaactcatcagcatagccttgggataggcaaattgggaataccgatttgcacgttaccagtggtcaagaggaacttgtttatgatgaaaactctggacatggattcttaaatgatgtttttgcagggaattctcttgtgaatgatacagatttgaaccctttggagtttttagcttctctattccctggttttgcttcagaaagccttgctgaagttttcttcgccaatgcatgcgatttacatctgaccattgagatgctcactcagttagagattcaagttgatggtggcttcaatcagaatcc

SEQ ID NO: 7304 - DNA, 397 bp, Glycine max
  Clone ID: LIB3030-001-Q1-B1-F4
cttgcccgcagaccaaggtgctgaaagtacaatttggctaattgccaaggcatatgttgttgtcaatgactcctgctatcatcaactcatgagccactggttaaatactcatgctgtgattgaaccatttgtcatagcaacaaacaggcatcttagtgtgctccaccctatttataaacttttgttgcctcactatcgtgacaccatgaacatcaatggactcgcaagacaatcactcatcaatgcaggtggcattattgagcaatcatttctgcctgggccatttgctgtggagatgtcttcggcagtttacaaggggtgggttttcactgatcaagcccttcctgcggatcttatcaagagaggaatggcagtggaggattcatcctctccctat

SEQ ID NO: 7305 - DNA, 348 bp, Glycine max
  unsure (1)..(348): unsure at all n locations
  Clone ID: LIB3030-001-Q1-B1-F5
gcagttttaagcgcttaattagtaggctttggcctatttcttgtcctttcctgagatgaagaatggtggtatcgatccaaacccaaaatcagattcaaattcaatggattggttattgtttcattctgatcacattgtcatatccataaagaagggggggaaaaaaagttagcactttgcagaagcattgcaattattttaagttgcaatagctagctgttagaaatgaaccactactgtgaaagatgttgaatcatacgtacgtgtgttctatcagagaagctgcttttgatcntgtgttactacggtagatgccaaatgagtggaaattgttcctgtttgagtttg

SEQ ID NO: 7306 - DNA, 406 bp, Glycine max
  Clone ID: LIB3030-001-Q1-B1-F6
ctgagaatgtctccttgagtattgaggaggggaaagccagccccaccaatagaagaatctaccttagtaaagcacaagatgcagttacaagtatgctggcaaaaggttcagcaataagacaagatgcagtgaacaaagctaaagcatttgatgaaaagcatcagttgactgccaatgcatctgcaaaggtcatttctttggacaagagagttggactcacagagaaattgacagtaggcattgctgcagtgaaccagaaagtcaagtctgtggatcagaggcttcaaggtttcggataagacaatggcagcaataattgcagctgagaggaagataaataacactggatcagctgtcaaaacaagcagatatgtgactgctggaacagcatggtttaacggtgctt

SEQ ID NO: 7307 - DNA, 412 bp, Glycine max
  unsure (1)..(412): unsure at all n locations
  Clone ID: LIB3030-001-Q1-B1-F7
agcgaagagaaggccacgaaaaaaagaaaacccagaaaaactctgaagaagagttcgttgctttctgcttcactgcgaagatgaacggaggcccatctggtttcacaaatgctcccgtcacaagggctttcatcatcacttcggcgcttttcacaatcttctttgggatccaaggccgtttcagcactctggggttgtcgtatcaggatatttttggaaagcttcgcctttggaagttgatcatttccatattttccttctcgtcaacaccagagttgatgtttggattgtatcttctatattacttcagggtctttgagagacagataggttccaatanatactcagtctttattgtgttctccatattaanctcactactgcttgaggtccttgctgtancacttttaaa

SEQ ID NO: 7308 - DNA, 230 bp, Glycine max
  Clone ID: LIB3030-001-Q1-B1-F8
tgcatttgtacttcacttttcattaggacaatcttcatttggggtcattagtttttgttggtcggatttgtgtttgcttttatttattggtattgctcattagtattttctacttgtttgctctgtcccttgttttagtagcttggattaactgtgtctcaccatgcatttgtacttcacctttcatgttttttggggtaccactatgaaacttggaaaattgggtgcaa

SEQ ID NO: 7309 - DNA, 214 bp, Glycine max
  unsure (1)..(214): unsure at all n locations
  Clone ID: LIB3030-001-Q1-B1-F9
atgccccgaagtccatgaatgagaacaaatcgagagctacttcggtcgcaagatcgccattgacgctagcatgagcatttaccagttccttattgttgtgggaagaagcggaactganatgctcactaatgaggctggtgaagttacagtcatttgcaagggatgttttcgcggacaatcagacttctataagctgggataaaaccagtatatg

SEQ ID NO: 7310 - DNA, 256 bp, Glycine max
  Clone ID: LIB3030-001-Q1-B1-G1
agaagaaggcaaagatagtggcagagctccaagctgtgaagcacaacagtggcaagtcctacaatcagttagcggaggagactggactcaccaacgtctatgttgctcagcttctcaggagacaggctcagctcaatccccaaactgcccctctacttcgggcagcgctgcccgacctgccccaagaccttgtttctgagatgatgagaccccctttgaagtcttatgaccctaatctcatcccaagacccactgt

SEQ ID NO: 7311 - DNA, 369 bp, Glycine max
  Clone ID: LIB3030-001-Q1-B1-G10
gacggcagaaccctcgccgactacaacatccaagaggagtccacgctccacctcgtcctccgcctccgcggtggcatgcaaatcttcgtcaaaagccttactggcaaaacaatcacgctagaggtggagttctccgacacaatcgataacgtgaaagccaagattcaagataaggaagggattcctccggatcaacaacgtttgatcttcgccggaaaacaactccaagacggcagaaccctcgccgattacaatatccagaaagaatccactctgcatttggtgcttcgtctccgcggagggatgcagatcttcgtgaaaaccctaaccggcaaaacgattacgctagaggtaaagtcctctgacaca

SEQ ID NO: 7312 - DNA, 372 bp, Glycine max
  unsure (1)..(372): unsure at all n locations
  Clone ID: LIB3030-001-Q1-B1-B3
cttgcctctcttcttctgctactgctgctcaacccacacaccaccctgggagcgcagaacctcatgctaccctaccataacggcgccctcctcaaaggaaccattaccgttaacctcttatggtacggcagcttcaccccaatccaacgctccataatcctcgacttcattaactcgttaagttccaccgcgggggccccacttccctccgtagcatcgtggtggaagacacggacaagtacagggggggatccactacaatcgtcctaaggaaacaaatcctagaacaaacttattccctcggaaactacctcaacggaacacaactagtctctctctcctcacgcttcgnacaactcaacgccatcaacg

SEQ ID NO: 7313 - DNA, 117 bp, Glycine max
  Clone ID: LIB3030-001-Q1-B1-F12
gttctccaaaaccggcggccaataattaactcctccaacccggaaataaattccggaccgttactggaagggttacaaccttccccaaaatggatccgaataaaaccttggcgtatc

SEQ ID NO: 7314 - DNA, 353 bp, Glycine max
  Clone ID: LIB3030-003-Q1-B1-G3
cagagttcttctcccgatggaactttcctcaaagaaagagttactatctcgaatagtatcaacactaacgcccaacatcacactcatcttcttcatccttgtgctttctccgagcctgtgcacatcactcggaatcaccaacacagttggatcggagttgctgaaggttgctccttctgaatttgaggggacagtgagaatcgtcgttgatgtgttgcaagaagtcacctctattctctccgagttcagttctggcttcggtgattcacgtctttctaacgccgtttctgactgtcgtgatttgcttgacatgtccgctgatgaactcgattggtctgtcaccgacacacaga

SEQ ID NO: 7315 - DNA, 222 bp, Glycine max
  Clone ID: LIB3030-004-Q1-B1-B12
gtgactggatgctccaccaggtgattcactaacataagttgtgttgtaactgtaactattttctatttttttccgtttgtaaccattttcggttagatagatagtagttgtctcctttacaaggagctctgtattttgggtttagagagtttgagagtattttgaaccccttcattgtaaattttgttattcgtaataaacttaacaattttgcacaataag

SEQ ID NO: 7316 - DNA, 359 bp, Glycine max
  Clone ID: LIB3030-005-Q1-B1-E2
cctttctcctaaaacatcgcaatgggttcttcttctattacaacatcgcccgcaaccatgaccatggctgcgatcgtgctcctgttcacggtccttgccgtttcctccgccctagacatgtcgataatctcgtacgacagcgcccacgcggacaatgccgccacgttgcgcaccgaggaggagctgatgtccatgtacgagcagtggctcgtgaagcacgggaaggtgtacaacgcgctcggcgagaaggagaatcgcttccagatcttcaaggacagcctgcgattcatcgacgaccataactccgcggaggatcgaacctacaagctcggactgaaccggttcgctgatcccaccaa

SEQ ID NO: 7317 - DNA, 299 bp, Glycine max
  Clone ID: LIB3030-005-Q1-B1-G4
ttaaaaaaatcacttattatactaacacccttactgaaaatgctccttattaaggagggtctgagagagcaagcaatagccttagaggaggctagagatcgttgggagaggcatggaatcaaagtggtagttgatgatgacctccgcaaggaggcctcggctggagtgacatggcttaatgcctcagagcaggtctcggttcaaggaacagttgacagggccgagagcttattggacaagctcaaacaaatggctgcagatatcagaggaaagtctagagatacccttgataaaatcat

SEQ ID NO: 7318 - DNA, 272 bp, Glycine max
  Clone ID: LIB3030-005-Q1-B1-H3
cgcttgcgttgtacaacaacagcggaaactgtttctcaaacagttacagtaagtgagagtcccagagttcatagcaagaataccacccccagagcagcgaaatcaccaaaaacgctatcggtctcaaatccaacttctcctcgctcccctctcaagctctccctcttcaggaacagcttcaaattcaggagtagctgcggaatttgcttgaacagcgtgaagacgggacagggtacggcgatttacacagcggaatgttgtcacccgtttca

SEQ ID NO: 7319 - DNA, 75 bp, Glycine max
  Clone ID: LIB3030-006-Q1-B1-F3
tgacatcgcactgcacgcgtacgtaacctccggaattcggtccaagcttaaaccccattcagaacttcgaccttt

SEQ ID NO: 7320 - DNA, 324 bp, Glycine max
  Clone ID: LIB3030-007-Q1-B1-F2
ctcaaatctctcatacttcttacgccacatacacccttctcttcatttctcactctccggaacatttttttttttaaaaaagaaaaggggaaaatagaaagaaaagaaaaagggagaatgagtgagaataacatgaacaaacaactcacgctgctctgtctctttatcctcttctcatttctcagtgtgggtttcgccggcgccggagacgcggcggagaaaaaccctttcaccccaaaagccttcgccattcgttattgggacaaagagatccgcagcgggttggcgaagccacagtttcttctgtctaaggcgtcgccgcta

SEQ ID NO: 7321 - DNA, 372 bp, Glycine max
  Clone ID: LIB3030-008-Q1-B1-D2
cactaatagtcggtgtgactgggttgactgggctgagcctagccgaaacattgaagaaacccaattgtctcggaggcccatggaaagtttacggcgcagcccgcaggcccccgcctagttggttctctccttccatggtcgaccacttcatcacctttgacgctgaggactcttccgacacacgcgccaagctttcccccatcgcccacgaggtcacgcacctcttctgggtcacctttcagattcacgcagacgaagaatacaatgcaactgtcaacaaaaccatgctactcaaccttctaactgccctgaaatcttccacgacatcccggttggcccatgtaacggtccaaaccgggaacaaacactaca

SEQ ID NO: 7322 - DNA, 120 bp, Glycine max
  Clone ID: LIB3030-008-Q1-B1-D7
tttattttttttttttattttttttttttgtgttttatatgttagtattatatatatatatattaagaaaaacaagagagggcagacaaaaaaagaaacaaaaaaaaggggggagagaag

SEQ ID NO: 7323 - DNA, 205 bp, Glycine max
  Clone ID: LIB3030-008-Q1-B1-E3
ctttgattttgatggcaaaggtatctttactccctgaaccagtggagcagagctgttaacctctgagatcccaatatttttgcatcattttttgcatgattgcttctcaaacggtgaatagtctccatatttttatagttgattgttgacgcagacagggaaagattgtttgtatgacttaaaatatttgattagagattactct

SEQ ID NO: 7324 - DNA, 406 bp, Glycine max
  Clone ID: LIB3030-009-Q1-B1-B9
ctccaatcaatacaagttataacactttaattaataaaagctaacaaaaccttttttttttcttgtttttttttttccattcctctattgctttcttgtactcgagcaaacaaaaaaggtcgacccgagtcaatacccgaaccacgacccttgccttgtgttaaggaacataacccatgcaaggagttttctctttttttccccacgcgcggttcgttcttgactcaaccaacccacgcgtctttcacacgcgccacccatccatccatcgtcaacaacgttaaaattttcaacaagaacctcaataaatacaaaataacaaaaaaaaaaccagactcacgtgaccgatcacgtgacgtttaactttcgcagtggagcgcggctttgatcttctgaaccgtgcacg

SEQ ID NO: 7325 - DNA, 418 bp, Glycine max
  Clone ID: LIB3030-009-Q1-B1-C2
cccttatctctctctctctctatctctcccgaattattgttcgttcgacccttttacttagtattccctgtttccggtattcgctcccttttttctgcattctggttttacttagatctctgtcccgcaccagatctggtgcatggtgagagggttgggttcattaattttgtatcaatcttccttctgagcggtatgcgtggggataccagagtcttttcgggaagcaagagagggttctctccgttttcaatagatctctcactgtcttcttttgagggggaagccggggcctcggcctcagcggctttcaaagcccccaccttcacagccctatcaacaaaaagacctaaccctatttttttcttcattttctaattcttttttgatcgtcgccgccgccactagagatgcctgc

SEQ ID NO: 7326 - DNA, 279 bp, Glycine max
  Clone ID: LIB3030-010-Q1-B1-D4
cgggaaaagaggttccattccactgtgagagcatgtcacaagcctcaatgagggttcacagtgttcctaataaatgacctaccaatgaacgataacctgtagggattaaaaatacctttttgctgacgctagtacattttactagttgagccaaccatcgttgacaatgatgttatccctttgattgttatgtcttgactgcattatcccttttgttgaagaaatataatcagaattgtctttttcataactgacgtactgattgcccctcttctccat

SEQ ID NO: 7327 - DNA, 387 bp, Glycine max
  Clone ID: LIB3030-010-Q1-B1-E4
catgtggcctaactcaaaacgttctgtttcgctttctgttgcaatggagatatcaaaagttgcaagagattatggagcatagcctgtgggtgtatttgtggatgatgattctgaaacaattctaagagcttctgatgcagcaaaccttgaatttgttcagcttcatggacatggttctcggttagcttttccgtccttaattcaggaaaatcgtgtaatatatgttctccatgtaaatgaggatggaagccttttaaacacaatttctgatgaagagtgctctctagttgattgggttcctgtagataatgcaaagggtggagttgtaatgcattcagttgggaccagttgaaactgccaaacattaacagcaagtatggttggctc

SEQ ID NO: 7328 - DNA, 307 bp, Glycine max
  Clone ID: LIB3030-010-Q1-B1-F4
ctctcttttcccataattcactctctaaacatcacgatggagtatggaacgttgggaccctctgatcctggtggctcctcgcgcgtcaacaacgttcgtccgacatcttccgggaggaagaagattgtcttgctttcacactttagcatcttgttaatagccgcgtctgctgtaactgcaattgtcgtccgctctcgtattcaacaaaatacgagagcccatgaaactacgctccggaagcccaatcaatccatttcacgcacgttcaacaatataagctttaagaccttgtgtgtcaaatcccttt

SEQ ID NO: 7329 - DNA, 401 bp, Glycine max
  Clone ID: LIB3030-010-Q1-B1-G2
ctgaaggctatggcttgtcctggagtaagttcaagcagggccacttgcttagcggttctgatgatgctcagatttgcttgtgggatattaatggcactcccaagaataagagcctagaggcaatgcagatttttaaggttcatgaaggtgtcgtggaagatgtggcttggcatttgaggcatgagtacttgtttggttctgttggtgatgatcaatacttacttatatgggaccttcgaacgccggctgccagcaagcctgtccaatctgttgttgctcatcaaagtgaggttaactgcttggctttaaattcctttaatgaatgggttgttgctactggttctacggataaaactgtgaaattgtttgatctgcggaagatcaatactccgctgcacatc

SEQ ID NO: 7330 - DNA, 51 bp, Glycine max
  Clone ID: LIB3030-011-Q1-B1-D4
ttcggctcgagtgggataagtctgaatgtgacgctgatattctctcttgca

SEQ ID NO: 7331 - DNA, 112 bp, Glycine max
  Clone ID: LIB3030-011-Q1-B1-G12
ctcctttgaaaaaacaaattacaatactgtgttgtgttgtgttgaagtatcaatctaacaaagatctctggtatcttacgacgcaataacgggcacaagatcatcggtactg

SEQ ID NO: 7332 - DNA, 613 bp, Glycine max
  unsure (1)..(613): unsure at all n locations
  Clone ID: LIB3030-006-Q1-B1-D8.F1
cttccgttggctttgtcacagtccactggcccccaagaaagttccttaacctcaaaccccttatggcaagttgctaacttctcttacttttatctttgaagccaccctcttctaacttctccatttcacaaggaagaagatcagagaacatttagaacaaaaaagagagtttgagaaatggggaggggtaagattgagatcaagaggatagagaactcaagcaacaggcaagttacatactcaaagagaaagaatgggatcctaaagaaggccaaggaaatcactgttctatgtgatgctcaagtttcgcttatcatctttgctgcatctggaaagatcgatgactacatcagcccttctaccacgttgattgacatattggagaggtccacaagacctcagggaagaggctttgggacgccaagcatgagaacctaaacggcgaaattgagagactcaagaaagagaatgacagcatgcaaattgagctcaggcacttgaagggtgatgatatcaactctcttaactacaaggagctgatggccttagaggatgccttagaaactggtctagtcagtgtccgcgangaacagatggatgtatacaggatgct

SEQ ID NO: 7333 - DNA, 560 bp, Glycine max
  unsure (1)..(560): unsure at all n locations
  Clone ID: LIB3030-006-Q1-B1-D8.F2
cttccgttggctttgtcacagtccactgtgcccccaagaaagttccttaacctcaaaccccttatggcaagttgctaacttctcttacttttatctttgaagccaccctcttctaacttctccatttcacaaggaagaagatcagagaacatttagaacaaaaaagagagtttgagaaatggggaggggtaagattgagatcaagaggatagagaactcaagcaacaggcaagttacatactcaaagagaaagaatgggatcctaaagaaggccaaggaaatcactgttctatgtgatgctcaagtttcgcttatcatctttgctgcatctggaaagatgcatgactacatcagcccttctaccacgttgattgacatattggagaggtaccacaagacctcagggaagaggctttgggacgccaagcatgagaacctaaacggcgaaattgagagactcaagaaagagaatgacagcatgcaaattgagctcaggcacttgaagggtgatgatatcaactctcttaactacaagnagctgatggccttagaggatgcct

SEQ ID NO: 7334 - DNA, 643 bp, Glycine max
  unsure (1)..(643): unsure at all n locations
  Clone ID: LIB3030-008-Q1-B1-E2.F1
cttagccaaacctcacctcaataatctttcgtgctagctagcttaatcatattccaattccaacagaaccaaattctgctagctagctagtacgtcaaaggaaataaaataatatggcattcagcgggacccaacagaaatgcaaggcttgcgacaaaactgttcacttggtcgaaggtttatctgtcgatggggctgcttatcacaagaattgcttcagatgcagccattgcaatggccttcttgcgataacaactactcatccaccgaagcnttttgtactgcaagtgcactttgagcagcttttcaaggaaactggcgcctaccccaagaaatcccagtcgtctggaaagcctccactcgagctgaatagagcaccaagcaaactttctgccttcttctctgggactcaagagaaatgttcaaaatgcaagaaaaccgtatatccattggaaaagttgaccgtggaaggcgagttttaccataaatcatgttttaggtgtgcacatggaggatgtttcctgacccttcgaactatgctgctcttgatggatatctttactgcagcctcacttctctcaattgttcaaggagaagggtagctacagttatctgtccaagcaaacttcanntgagaaaagtg

SEQ ID NO: 7335 - DNA, 546 bp, Glycine max
  Clone ID: LIB3030-008-Q1-B1-E2.F2
cttagctcaaacctcacctcaataatctttcgtgctagctagcttaatcatattccaattccaacagaaccaaattctgctagctagctagtacgtcaaaggaaataaaataatatggcattcagcgggacccaacagaaatgcaaggcttgcgacaaaactgttcacttggtcgaaggtttatctgtcgatggggctgcttatcacaagaattgcttcagatgcagccattgcaatggccttcttgcgataagcaactactcatccaccgaaggggttttgtactgcaaggtgcactttgagcagcttttcaaggaaactggcgcctaccccaagaaatcccagtcgtctggaaagcctccactcgagctgaatagagcaccaagcaaactttctgccttcttctctgggactcaagagatatgttcaaaatgcaagaaaaccgtatatccattggaaaagttgaccgtggaaggcgagttttaccataaatcatgttttaggtgtgcacatggaggatgtttcctgacccctacaacctatgct

SEQ ID NO: 7336 - DNA, 398 bp, Glycine max
  Clone ID: LIB3030-001-Q1-B1-H10
tcgagtggctaccttgtttagactagtaagttttcatcaacagcagcaaccataacaacaacctgatccatccctcaactccaccaccagcagaacctccagcagctccagatcctccagacaaaactactagccttattcccatcaagaagaagaagaatgcttcaacttttacatggatgaagaagacttatcctcgtcttcttccaaacactactaccacccttatcaaccccatcatcatcaacaacacaacgtatccaacatttctacaaacaccttcagcaccacccctaacactgattactcctactcctactccttctctcgcacgcaacctgttcaagacttcaacttcgaattctcctcccccaactggtcccacaacctcctcctcg

SEQ ID NO: 7337 - DNA, 314 bp, Glycine max
  Clone ID: LIB3030-004-Q1-B1-A8
ggagcttcaagaggctaagactgcataccccaacgggttcatccgtatcatcggattcgacaacgttcgccaagtgcagtgcatcagcttcatcgcctacaagcccccaggcttctaagtgtgaaaaatttgcaaagcatttgtagccgccaccccactttgtttgtttgtacgtaaactacattcccatttgtttttgctttttgagatttcatcatcctgtatttttggtttctgttttcggacttcactggaaattaatggatgagaactaatgaataagctactgtgttgtgttaaaaaagtgtaggaac

SEQ ID NO: 7338 - DNA, 349 bp, Glycine max
  Clone ID: LIB3030-004-Q1-B1-G11
tatccataaagaagggggggaaaaaaagttagcactttgcaaaagcattgcaattattttaagttgcaatagctagctgttagaaatgaaccactactgtgaaagatgttgaatcataggtacgtgtgttctatcacagaagctgcttttgatcttgtgttactacggtagatgccaaatgagtggaagttgttcttgtttgagtttgctttactacgaatccctttttcagtttgcagaatctcttgtatttattgtgttactatatattgtactaggtctcgtgggaaataaaatttttataaattttaattttagcaaagtacaacccaaattggtgtggaacaat

SEQ ID NO: 7339 - DNA, 119 bp, Glycine max
  Clone ID: LIB3030-004-Q1-B1-H12
tgttatgttataagataagaatattgttctgttccctccccttccaataataaaagccttaagggaacgggggaaagttacaaaataaaggaagggggttaacctttaaggtccaaaaa

SEQ ID NO: 7340 - DNA, 344 bp, Glycine max
  Clone ID: LIB3030-005-Q1-B1-A5
acttaagcttcggattcgggtcgaggttgtttgtcactctgtagaacactactacatccagacctggtgctaaacgtaagttctcacaccatatcggttctccaggttcagcaatacccacattttgatggttgattttctagctgataggccatggctattcgaagattgcttgatgttgatgttgatcccaagtcgaacgcagagacgtaggggtacgacgatgtgaactccatggacaaactcaccgcagccttctccaatgattagaagatgattgacgttcttgagggtgatggcaaatcagttgtgtctgaccacgacatgcgttatggtaaatgttc

SEQ ID NO: 7341 - DNA, 559 bp, Glycine max
  unsure (1)..(559): unsure at all n locations
  Clone ID: LIB3030-007-Q1-B1-A1.F2
ggtggnanatggnaaaatcctgaggataaaaaggaaacttagnaaagnagagtacatatacaatacaagacaacttcacacacacaacactttcctctctctctctctctctctctagggttccgagtttgaagttgaaagtgttgaactatctctagctagcttttcacaaatttggttgcacttgcaactgaggcaggaaagaggggcacgagaggaggaagaggaaagagaagaaaaaccaagaaaagtggagaaagggataggtgttgtacagaaatagaaattaaaattgagtgaaaattaaagagaagaaggagtgatagggagatatgggtaggggaagagtggagttgaagaggatagagaacaagataaacaggcaagttacgtttgcaaagaggagaaatgggcttctcaagaaagcctatgagctatctgttctctgtgatgctgaggttgccctcatcatcttctccaaccgtggcaagctttatgagttctgtagcagctctaggtatgcagtgtgtgttgatccttttttttctgtttcttctct

SEQ ID NO: 7342 - DNA, 244 bp, Glycine max
  Clone ID: LIB3030-009-Q1-B1-A10
tcctgctgctggcagtggaagcggtgctggacccaaaattgaggaagtcgattaagcagaccaattgtcatgggttgttcttgattttgcgaagacccttttgaagtttagataataacctgtcttgtcattatgttttggatttggattttacttttctcgtttttttaatgtacttttccccgtttcaacttaacaatgatataagttgcatatggtctaaaaaaaaaaaaacaaacaaaaa

SEQ ID NO: 7343 - DNA, 302 bp, Glycine max
  unsure (1)..(302): unsure at all n locations
  Clone ID: LIB3030-009-Q1-B1-A4
aggctgacaagtacttgaacgaggctgcacttggaaatgctaacaaggatgctattaaaaggggaactttcttcaaaccttaaattggaggcaaagcaaacttggcaagtaaatatttctgtccctgaaagttgtgctgatccaagtgctaaaagttgtgatgggacttgcgtgtaacattcctagaattctcaatgtcntaagtgcaaagagaagatgccaagtttgagatgatttactatatttttcatattggactgtcttcctctataattttgagtttaaagtgtccacttaaattg

SEQ ID NO: 7344 - DNA, 204 bp, Glycine max
  Clone ID: LIB3030-009-Q1-B1-E12
atggatttaaacatacgtgtcattatttccctttaataaacggatctgtcatatggttgtaatgagctactatgctataaataatgctcttgtgaatcttcaactttttgaagacagtttgcaattgcataaatatattaagctcatcttagaaaaaaaaaaaagaaaaaaaaaaaagaaaaacaaaaaaaaggaataaaaatg

SEQ ID NO: 7345 - DNA, 420 bp, Glycine max
  Clone ID: LIB3030-010-Q1-B1-A3
tcaaactctcggtcaagtggatgggtttcgttagcctgtgtcttctgtctgtatcagtatcaggtctgctccaacgcctagagcaccctgtcaaagctgatggctcacttagccttatggtaattggagactggggaaggaaaggaacatacaaccaatctcaagttgccactcagatgggaagggttgctgcaaagttaaatatcgactttgtgatatccactggagacaatttctacgatgatggattgactggtatagatgaccctgcatttgaaatttccttctcaaaaatctacactgccaagagcctccaaaagcaatggtataatgtgttgggcaaccatgactacaggggtgatgttgaagctcaattgaatccaatccttcagaaaattgatcctagatggatctgccaaa

SEQ ID NO: 7346 - DNA, 389 bp, Glycine max
  unsure (1)..(389): unsure at all n locations
  Clone ID: LIB3030-010-Q1-B1-D10
tgatcggatcaccgcagtgccccactctccaccaccgcgccatcgcaaaccctagatggacctactgaagcaagagcttctcaagaagcgccaatccctggcgcaagacaccggcggcaagaaattcttcaagcgctccgagatccagcagaaggaaatccagaaactccgggagcaagagaagcgcgaattggaagccaagtcacagaagcgcctcgcaacgtcctccgacaacgctgccaccgctccgtcctcctcatccaccgcctccgcctcggcctcttccacaatcgcatcctcctccgccgcctcnctcaccaacgagcanaacatcgacaacctcgtcctcccaaagcccgaagtcatccgccggcctcgcttcctcaagc

SEQ ID NO: 7347 - DNA, 565 bp, Glycine max
  Clone ID: LIB3030-012-Q1-B1-A8.F2
gggattaatagattctgatcgtaacggtggtgatactagtgatttacttgaaggtcagcggcaatacaattctgccatacattcaattcaagaaaggtaagcgagcaaccatctattcttcaggtggagaattaagaccataccaactagaaggcctccagtggatgctttctttgtttaataacaatttaaatggaatattggctgatgaaatggggcttgggaagacaatacaaaccatctcattgatagcatatcttatggaacacaagggtgtgactggtcctcacttgattgtggctccaaaggctgttctgccaaattggatcaatgaattctcaacatgggctcctagcatcacaaccattctttatgatggacggctggatgagagaaaagcaatgaaggaagagttgtcaggggaggggaaatttaatgttctgataacacactatgatcttataatgagagataaagcatttctcaagaaaatccattggctctacttgattgtggatgaagggcatcgattgaagaatcatgagtgtgctctagcaagaaccct

SEQ ID NO: 7348 - DNA, 349 bp, Glycine max
  Clone ID: LIB3030-012-Q1-B1-A8.R1
aggaaacagaccttaaaaaaataattttcatcaattagattttacattcacactagataaacttcacaactgccagaaggaatttgaaggaatctacatttgctgatcgagtagaatctaccatttaccttgacaaacacaatgaagaagaatcccaatacaaaagtaaggaaaatttctggcatccatgactaaattagaactctcagatccaagattgctcttccatttgaaatctgacctctactatcagagaaatgaaacctggcaaaggaagactgatctcttctttctaagagaaatccaggaaaataaaagatcgatcaaacaaccaaaactgaaatcttcg

SEQ ID NO: 7349 - DNA, 334 bp, Glycine max
  Clone ID: LIB3030-012-Q1-B1-G3
cggctcgagcggctcgagaaagggttggcattgacccctttgcacaaaggaaaagacggtggtgctgtgttaaaaaaatattgaacttggttggttcaaagttgaaacaagattttcattttcccatttccacattttttgggtttgggagggaagcagaatcctagaattaagaaatgggttgctccataagagagtgttgtgtcttaattttggttttgttcgtgtcatgtgccagaggggaagacccttatatattctacacttggaatgttacatatggagacatttatccacttggtgttaaacaacaggggattttgataaactggca

SEQ ID NO: 7350 - DNA, 501 bp, Glycine max
  Clone ID: LIB3030-007-Q1-B1-A1.R2
agatatccaccagatcatgtgccatattactagatctgataaatctaccatcccttacaaaaaagatcaaattagaaatgaacttttactattctaatggagcaatgaagcacatatagggcttcttacaaaaagccacaagttcacataataataaatataaaaaatgaggagtcactaaataattttgtccttaattgttgaagctaacaaattaaacaaatccaaagaaaggcaccaaaaaaataaaatataaaataatggagcaagtagatctcataggtcaacaaagaaaaagtgattttcagtatctcacaaagagaagaaacagaaaaaaaaggatcaacacacactgcatacctagagctgctacagaactcataaagcttgccacggttggagaagatgatgagggcaacctcagcatcacagagaacagatagctcataggctttcttgagaagcccatttctcctctttgcaaacgtaacttgcctgttt

SEQ ID NO: 7351 - DNA, 511 bp, Glycine max
  Clone ID: LIB3030-012-Q1-B1-A8.R2
tcatcaattagattttacattcacactgataaacttcacaactgccagaaggaatttgctggtatctacatttgctgatcgagtgtaatctaccatttaccttgacaaacacaatgaagcagaatcacaatacaaatgtagggaaaatttctggcatccatgactaaattagaactatcagttccagtttgctcttccatttgaattctgccctctactatcagagaatgaaccctggccaaggtagcctgatctcttctttctacgagtattccaggaaaatatatgctcgttcaaaccaccaacactgacatcttcgttttcatgtttctgggaatttatttcttcgggcttgagtctcttagaggcaggtgtcacgtcgaaagtgtcttcacttctaaataaccgttcttctgtccccatgtcatcactagcttgtgcatggttgtcaacaggaggtggtctcttcttttccctttgactgaaagcttagatatgtcctgtccgttct

SEQ ID NO: 7352 - DNA, 571 bp, Glycine max
  Clone ID: LIB3030-006-Q1-B1-D8.R1
atactcagacaaacacactaagatgtcatatgattacccaataaggttggagacacaagatgttgtaacttcacaattaaagccaaaggtcagttgcttagtttattacttacaaccagataccaacatatacttaaaagagttgtgacacatacgattttgacagcaccaagatgaagtttttgaattcaagagttatatattagatcctttcttgaagatttggctgcataggctgcacacgaaaggcaaatggcatatgggaattgtaatctcttacgctttgatcaaacccattgtccacttctctcgcaccttcctctgccaaacgttgttgccagagaaaattaagttccctgttctcctcctccaagatcttgtcgtttctcctgagcatcctgtatacatccatctgtttctcgcggacactgactagaccagtttctaaggcatcctctaaggccatcagctccttgtagttatgagagttgatatcatcaccctttcaagtgcctgagctcattttgcatgctgtcattctctttcttgagtctctcatattcgccgttta

SEQ ID NO: 7353 - DNA, 362 bp, Glycine max
  Clone ID: LIB3030-006-Q1-B1-D8.R2
atactcagacaaacacactaagatgtcatatgattacccaataaggttggagacacaagatgttgtaacttcacaattaaagccaaaggtcagttgcttagtttattacttacaaccagataccaacatatacttaaaagagttgtgacacatacgattttgacagcaccaagatgaagtttttgaattcaagagttatatattagatcctttcttgaagatttggctgcataggctgcacacgaaaggcaaatggcatatgggaattgtaatctcttacgctttgatcaaacccattgtccacttctctcgcaccttcctctgccaaacgttgttgccagagaaaattaagttccctgttc

SEQ ID NO: 7354 - DNA, 460 bp, Glycine max
  Clone ID: LIB3030-008-Q1-B1-E2.R1
cagacaataaaatcttctttttctactctgatatctgtttctgaatacaaagaatgaaatacatctgaaatgattgtagcatgcatgcacgccctttgggcttgagaaagtcatgtacatgccccaaagaacagaaaggcttaacggttaactgtctacactgactgtttgcaaattatggaacacataatactgtaatagcccttttgcgggaatcttcccaaatgacacaaagccacacaacccaatgaatcaggaactttcaaaatgtcccaaatggggttgttctatttgtagcagaaagatcaattttactcaaagacacaagtgaagcctccccttgcaaaattaatgttccatcaatcaatctagtgttcttgctcagagtgatcatcatcagcttgttcagcttccattgttgttgttgttgtcgtcgtctctggctctggctctgagcgat

SEQ ID NO: 7355 - DNA, 407 bp, Glycine max
  Clone ID: LIB3030-008-Q1-B1-E2.R2
cagcacaataaaatcttctttttctactctgatatctgtttctgaatccaaagaatgaaatacatctgaaatgattgtagcatgcatgcttgcactttggcttgagaaagtcatgtccatgccccaaagaacagaagggcttaacggttaactgtctacactgactgtttgcaaattatggaacacataatactgtaataccccttttgcgggaatcttcccaaatgacacaaagccacacaacccaatgaatcaggaactttaaaatgtcccaaatggggttgttctatttgtagccagaaagatcaattttactcaaagacacaagtgaagcctccccttgcaaaattaatgttccatcaatcaatctagtgtttttgctcagagtgatcatcatcagcttgttc

SEQ ID NO: 7356 - DNA, 282 bp, Glycine max
  Clone ID: LIB3030-007-Q1-B1-A1.F3
tgttgaactatctctagctagcttttccaaatttggttgcacttgcaactgaggcaggaaagaggggcacgagaggaggaagaggaaagagaagaaaaccaagaaagtggagaaagggataggtgttgtacagaaatagaaattaaaattgagtgaaaattaaagagaagaaggagtgatagggagatatgggtaggggaagagtggagttcaagaggttgagtacacgtaaacaggcacgctacgtttgcacagaggtgaatcgggcttctgaggaaagcc

SEQ ID NO: 7357 - DNA, 357 bp, Glycine max
  Clone ID: LIB3030-006-Q1-B1-D8.F3
ggaaacttaattttctctggcaacaacgtttggcagaggaggtgcgagtagagtggacaatgggtttgatcaaagcgtaagagattacaattcccatatgccatttgcctttcgtgtgcagcctatgcagccaaatcttcaagcaaaggatctaatatataactcttgaattcaaaaacttcatcttggtgctgtcaaaatcgtatgtgtcacaactcttttaagtatatgttggtatctggttgtaagtaataaactaagcaactgacctttggctttaattgtgaagttacaacatcttgtgtctccaaccttattgggtaatcatatgacatcttagtgtgtttgtctgagtct

SEQ ID NO: 7358 - DNA, 431 bp, Glycine max
  Clone ID: LIB3030-006-Q1-B1-D8.R3
ttttctacagcttggcgtgccaagacccttacctgaagtcttgtggtacctctccatatgtcaatcaagtggtagagggctcgagtagtcatgcatctttccagagcagcagaaagataagcgaaacttgagcatcacatagaacagtgatttccttggccttctttaggatcccattctttctctttgagtatgtaacttgcctgttgcttgagttctctatcctcttgatctcaatcttacccctccccatttctcaaactctcttttttgttctaaatgttctctgatcttcttccttgtgaaatggagaagttagaagagggtggcttcaaagataaaagtaagagaagttagcaacttgccataaggggtttgaggttaaggaactttcttgggggcacagtggactgtgacaaagccaacggaag

SEQ ID NO: 7359 - DNA, 581 bp, Glycine max
  unsure (1)..(581): unsure at all n locations
  Clone ID: LIB3030-008-Q1-B1-E2.F3
caatgttcagggggaaggtagctacagttatctgtccaagcaaacttcattgaagaaagtgaaatgcaacaanaacaagaggctgtgngagaaaacaacaacaacaacaacaaccgatgatgatcgctcagagccagagccagagacgacgacaacaacaacaacaatggaagctgaacaagctgatgatgatcactctgagcaagaacactagattgattgatggaacattaattttgcaaggggaggcttcacttgtgtctttgagtaaaattgatctttctggctacaaatagaacaaccccatttgggacattttgaagttcctgattcattgggttgtgtggctttgtgtcatttgggaagattcccgcaaaagggctattacagtattatgtgttccataatttgcaaacagtcagtgtagacagttaaccgttaagcctttctgttctttggggcatgtacatgactttctcaagccaaagtgcatgcatgcatgctacaatcatttcagatgtatttcattctttgtattcagaaacagatatcagagtagaaaaagaagattttattgtctg

SEQ ID NO: 7360 - DNA, 393 bp, Glycine max
  Clone ID: LIB3030-008-Q1-B1-E2.F4
attaattttgcagggggggcttcacttgtgtctttgagtaaaattgatctttctggctacaaatagaacaaccccatttgggacattttgaagttcctgattcattgggttgtgtggctttgtgtcatttgggaagattcccgcaaagggctattacagtattatgtgttccataatttgcaaacagtcagtgtagacagttaaccgttaagcctttctgttctttggggcatgtacatgactttctcaagccaaagtgcatgcatgcatgctacaatcatttcagatgtatttcattctttgtattcagaaacagatatcagagtagaaaaagaagattttattgtctgaaaaaaaaaaaaaaaaaaaaaaaaaaaaaaaaaaaaaaacaag

SEQ ID NO: 7361 - DNA, 482 bp, Glycine max
  Clone ID: LIB3030-008-Q1-B1-E2.R3
gtaaactcgccttccacggtcaacttttccaatggctatacggttttcttgcttttgaacatttctcttgagtcccagagaagaggcagaagtttgcttggtgctctattcagctcgagtggaggctttccagacgactggagtttcttggggtaggcgccagtttccttgaaaagctgctcaaagtgcaccttgcagtacaaaaccccttcggtggatgagtagttgcttatcgcaagaaggccattgcaatggctgcatctgaagcaattcttgtgataagcagccccatcgacagataaaccttcgaccaagtgaacagttttgtcgcaagccttgcatttctgttgggtcccgctgaatgccatattattttatttcctttgacgtactagctagctagcagaatttggttctgttggaattggaatatgattaagctagctagcacgaaagattattgaggtgaggtttgagctaag

SEQ ID NO: 7362 - DNA, 634 bp, Glycine max
  Clone ID: LIB3030-008-Q1-B1-E2.R4
gttgttgttgttgtcgtcgtctctggcttctggctctgacgatcatcatcggttgttgttgttgttgttgttttctccacagcctcttgttcttgttgcatttcacttttcttcaatgaagtttgcttggacagataactgtagctacccttctccttgaacaattgagagaagtgaggcttgcagtaaagatatccatcaagagcagcataggttgaaggggtcaggaaacatcctccatgtgcacacctaaaacatgatttatggtaaaactcgccttccacggtcaactttgccaatggatatacggttttcttgcattttgaacatttctcttgagtcccagagaagaaggcagaaagtttgcttggtgctctattcagctcgagtggaggctttccagacgactgggatttcttggggtaggcgccagtttccttgaaaagctgctcaaagtgcaccttgcagtacaaaaccccttcggtggatgagtagttgcttatcgcaagaaggccattgcaatggctgcatctgaagcaattcttgtgataagcagccccatcgacagataaaccttcgaccaagtgaacagttttgtcgcaagccttgcatttctgttgggtcccgctgaatg

SEQ ID NO: 7363 - DNA, 273 bp, Glycine max
  Clone ID: LIB3030-001-Q1-B1-E6
gaatttccttggggacaaatgaaagggagaatcttgtttattatttaatttcttttaaggatttgatcttcgtcactcagttgaaaagagagccttagtttcttgtgtatgtgtgcttggagtaggattttagccccttcatgaagggaaaattgcacgaacagtctgcaatgtttaacttttctccggatatggatggtacttgtcaaatgacttggctgaattttaatacatggacgattgtgtcaaaaataaaactttcatcaaggaaat

SEQ ID NO: 7364 - DNA, 459 bp, Glycine max
  Clone ID: LIB3039-044-Q1-E1-D1
aattatcgggctcgagcacgcgtcaggcggaagacgacagaagggggcctttgaggaaaagaaaggaagagatgcaagaagcaggcttgggaatgatgggtgaggtctccggcgatcagcaccgtcagctgaaggcggagatagcgactcatccgctgtacgagcagcttctggcagcacacgtggcatgcctccgtgtggcgactcccatcgatcagcttccactcattgatgctcaattatctcagtctcaccatcttctacgctcttatgtctcacacaacactctttctctctccctcatcaccgccaagaacttgacaacttcctggcacaatatttgatagttttgtgtacatttaaagaacagcttcagcaacacgtcagagtccacgccgttcaggctgtcactggctgccgtgatatccaaaataccttacaagctctcactggagtgag

SEQ ID NO: 7365 - DNA, 151 bp, Glycine max
  Clone ID: LIB3039-043-Q1-E1-F3
gcatctttctcggttcttaaagagggaaagactggtgtgtcactcacggattccaccttgtacggtctttcattttcagaacctatcaaagctaacttcagctcttctgcattgaggtgcaagagggaattcgaacaaaaactctgtgctg

SEQ ID NO: 7366 - DNA, 444 bp, Glycine max
  Clone ID: LIB3039-003-Q1-E1-A2
ggaatcataaggcaagttgaagggaattcatggctacactgaagatgatgtggtctccactgactttatcggcgatagcagatcaagtatttcttgatgcacaagctggaattgcattgaataagaactttgtgaagcttgtttcttggtacgacaacgaatggggatacagctcacgtgtcattgatcttcatgtactcgttgccaacaagtcgctttaacgtgttacatcaaagtagcttgtcttcacattattaccgtatgtttatgtttagctgcgatttagtgtcttgctcgagcaaatcatgagaggtctgaataaatcggtttctgaaaccagtggtgttacatgttggaggagcattagctctttattggacttttgatgtattctcatgtggatggggatcgagttattggatttttatatactcgctgatgtac

SEQ ID NO: 7367 - DNA, 404 bp, Glycine max
  Clone ID: LIB3039-003-Q1-E1-C4
acaccgtctggtctattcttaactcaacttctgctacccagtctcttcttccaagtccaaccacgcttttctctacagtcatgggcaaggtcaagatcggaatcaacggatttggaagaattggccgtttggttgccagagtcgctctgcaaagagacgatgtggagctcgttgccgttaacgaccctttcattaccaccgattacatgacatatatgtttaaatacgacagtgttcacggacactggaagcatcacgatgtcaccgttaaggacgagaagacccttctcttcagtgacaagccagtcactgtttttggacacaggaaccctgaagagatcccatgggggtcaactggagctgatatcattgttgagtccaccggagttttcaccgataaagac

SEQ ID NO: 7368 - DNA, 397 bp, Glycine max
  Clone ID: LIB3039-053-Q1-E1-E4
gatgcttataacttcatcattcaattgactcagctctcctttctcaagtagaattgttgattcgtagatcttctctcgcagtcccatccgaagcaagcaatacaccaaaacccaaataaaacagaaaatttatttatttattcgtttttagaacaaaagaaaaaaaagtggtgagcgatatggaatttgacgagcacgaggaccaagaggaagaggaggaagaggaaatgggattctcagtggcggctgcgagttacgactcgctgggaaacgcggcggtgaggtctaaaatgagcggcggcgacggagttgcggtcaccgggaattctggttcggaaaggaaccctaagatacagagaatgtcagaagaaccacgccgtcagcattggaggccaag

SEQ ID NO: 7369 - DNA, 398 bp, Glycine max
  Clone ID: LIB3039-053-Q1-E1-E5
gacactcactctttcactcttcttcgtctcaaacctcttcgttccttcgattcattccatttcttccaaaatggccaaagacccagttcgcgttctcgtcactggagccgcagggcaaattggatatgctcttgtccctatgattgctaggggagtgatgctgggtcctgaccagcccgtgatcctccacatgcttgacattcctccagcagcagagtcgttgaatggggttaaaatggaattggtggatgctgcattccctcttcttaaaggtgttgttgctacaaccgatgtggttgaggcatgcactggggtcaatattgcaatgatgggtggtggggtctccataaaaaaaagggtatggaaaggaaggatgtgatgactaagaacgtctccat

SEQ ID NO: 7370 - DNA, 395 bp, Glycine max
  Clone ID: LIB3039-053-Q1-E1-E6
gacagcatatcaataatctattttatactatacccacattttgataattatttttctagttgataagccatggctactcgaggaaagcttgaggttgacgttgatctcaagtctaacgcagacaagtactggcaaacccttaggaactccactgaaatattccccaaggccttccccaatgattacaaaagcattgaggttcttgagggtgatggcaaatcacctggttctatccgccacataagttatggtgaaggttcaccacttgtgaagtcatcctttgagaagattgaggctgttgatgaagaaaagaaggtagtgtcgtacactatcaatgatggagaactccttcaagcactacaaaccattcaagggagacatttctgtgactccag

SEQ ID NO: 7371 - DNA, 383 bp, Glycine max
  Clone ID: LIB3039-053-Q1-E1-E7
gagtgcacaagtgagtttgttgatcgagataactagaaacagtgtgatgaaaatgaaggtccttgttttcttcgttgctacaattttggtagcatggcaatgccatgcgtacgatatgttccctctccgaatgaacactggctatggtgcccgtactccggaggtgaaatgcgcaagttggaggcttgctgtggaagcacacaacatctttggctttgagaccattcctgaagagtgcattgaagcaacaaaggaatacatccatggcgaacaatatagatcagactccaaaacagttaaccaacaagcttacttttaagccagagacctccaaatttcaatcccagggacacatttgggttcagtatatatggcaccgtact

SEQ ID NO: 7372 - DNA, 394 bp, Glycine max
  Clone ID: LIB3039-053-Q1-E1-E8
ccctaatagggtatgcttacacccttggtggctgcttggtgagttggaaggcaacacttcaaccttctgttgctctctcaactattgaggctaaatatatggctcttattgaagctgcaaaggaaggaatttggctgagaggtctgataaatgatctcgaaattaatcaagaatatgctaacatctactgtgacagccttagtgctatatgcttggccaaggattaggttcatcatgatagaaccaagcatatagatgttagatatcacttcattcggtcagaaagaagaatcaaagttcataagattatcactctgcacaatcctgccaatatgtttaaaagccagtttccaaagagcaagtttgatcactgcttaagcttgctcaatgtaca

SEQ ID NO: 7373 - DNA, 378 bp, Glycine max
  Clone ID: LIB3039-053-Q1-E1-E9
ggcgtgaggagtgaggtgctccgggtgagtttatcatatgccgttgataagaggagagagagagattgaccgtttgttaatcttatcttttcttatcccaaacaaactgaaactcaactcctgaaaggcaagagtgagagagaaatggagaatgcggaggagatgatgcagcaaaacgacgaggttttgtcggttgaacttccagctccttccggttggaataaactgtttttccctaagaaactgggaacaccaagaaaaagtgagattgtattcattgctccaactggagaggagatcagtaccaaaaaacaattggagcagtacctaaaagcaaatcctggcaatcctgtaatttcagagtttgactggggaact

SEQ ID NO: 7374 - DNA, 402 bp, Glycine max
  Clone ID: LIB3039-053-Q1-E1-F1
ggaagtaagggatcgagcctcggaggagggaatcgcagcgaagtccactatgccgaagcaaattcacgagattaaggacttcctcctcactgctaggaggaaggatgcacgctctgtgaaaatcaagcggagcaaggatgtggtgaagttcaaggtccgttgctccaagtacctttacaccctctgtgtgtttgattctgagaaggctgataagttgaagcaatcacttcctccaggtttaagcgtgcaggatgtgtgattcttactgctgtatgaagatcaggtttttctctggattttggggattcatagttagtaaaatgggtcacagaaattttccatattggttgtcacattcgggatcatgttagtattttgtttaagacggatccaacttgcttg

SEQ ID NO: 7375 - DNA, 375 bp, Glycine max
  Clone ID: LIB3039-053-Q1-E1-F11
ggcacaagtgagtttgttgatcgagataactagaaacagtgtgatgaaaatgaaggtccttgttttcttcgttgctacaattttggtagcatggcaatgccatgcgtacgatatgttccctctccgaatgaacactggctatggtgcccgtactccggaggtgaaatgcgcaagttggaggcttgctgtggaagcacacaacatctttggctttgagaccattcctgaagagtgcgttgaagcaacaaaggaatacatccatggcgaacaatatagatcagactccaaaacagttaaccaacaagcttacttttatgccagagacctcgaagtcaattccaagacacatttgtgttcagtatagatggcaccgta

SEQ ID NO: 7376 - DNA, 384 bp, Glycine max
  Clone ID: LIB3039-053-Q1-E1-F12
ggtgtggagttaggggtttacagtgtttctcttccttcttcttcttcttcttcttcttcttcgttgaatcgcgattgttctgtgcgagagaaagaagagagagatcgaaaatggcgttggctttcgacgagttcggaaggccgttcataatcctgaaggagcaggagcagaagagcagactccgaggattggacgctcagaaagccaacatctccgccggcaaagccgtggctcgcatcctccgaacctccctcggccccaaaggcatggacaagatgctccagcgccccgacggcgacgtcaccatcacgaacgatggagccacgatccttgaccagatggacgtggacaaccaaatcgcgaagctgatggtggagctctcgc

SEQ ID NO: 7377 - DNA, 401 bp, Glycine max
  unsure (1)..(401): unsure at all n locations
  Clone ID: LIB3039-053-Q1-E1-F2
ggcacaagtgagtttgttgatcgagataactagaaacagtgtgatgaaaatgaaggtccttgttttcttcgttgctacaattttggtagcatggcaatgccatgcgtacgatatgttccctctccgaatgaacactggctatggtgcccgtactccggaggtgaaatgcgcaagttggaggcttgctgtggaagcacacaacatctttggctttgagaccattcctgaagagtgcgttgaagcaacaaaggaatacatccatggcgaacaatatagatcagactccaaaacagttaaccaacaagcttacttttatgccagagaccttcaagtccaatcccagggacaaatttgtgttcagtatanatggcaccgtactctctaatattccatactacaaa

SEQ ID NO: 7378 - DNA, 321 bp, Glycine max
  Clone ID: LIB3039-053-Q1-E1-F3
ggattcatatttttgtgatcgagcctactcttgcacgctaactaacgccatattttcttcttttcttcttatcttattgttgcagactttcgggtcatcattgagcttgctgtagtgaggtgttcaatctgaaatttccttaaccaaattcatggcggaactgatagggcctcgcttgtacagctgctctaattgtaggaaccatgtctcactccatgatgatatcatttccaaggcttttcataaacggccgagcctttctgttttcccatgcaatgaatattgtcacagggccaaaagaagacagacatctcttgactg

SEQ ID NO: 7379 - DNA, 326 bp, Glycine max
  unsure (1)..(326): unsure at all n locations
  Clone ID: LIB3039-053-Q1-E1-F4
aagggttaccccttctccccggtttgtttttgtaccaggtgcacctacaaacaatggtaaagggtcttcaaggaaaccccttcaaactcaacttaaggggtaaaatccttggatacanaaggtccaagtccaaccagtaacccaaacacatccctgatccanatttganggagtgaacaccannaaaagaagtangatggtatgcctggcaaaaaatggcctatatctacaaggctaanngtgaaaaagatggaagccatttacgctgcatatggggcaaggttacgaagcctcacngcaacagtggtgttgtccgtgcaaaattc

SEQ ID NO: 7380 - DNA, 403 bp, Glycine max
  Clone ID: LIB3039-053-Q1-E1-F5
gacacacagagcggttctcatattttggagaatccgaaaaacacgttaaagaaagtcccattcccactaccgaagcaaattaagaagatgaagcagcagagagtggagtttatgggcatgggcatgggcatgggcatgggcctgggccttttggtggtgatgatggcatgtgggtcggcgagtggtgcggatgatttggcaaccaagtgttcagcggtgattcagaaggtaataccgtgtttggatttcgcgaaggggaaggaagaaacgccgaaaaagcaatgttgcgacgcagcaacgtccataaaggagagcaacccagagtgcctctgcgacatccattgatgacacccacaaggggtacccacaggttaaaagcttgggcattcaagaggccaagctg

SEQ ID NO: 7381 - DNA, 316 bp, Glycine max
  Clone ID: LIB3039-053-Q1-E1-F6
ggaaacaaaggcagagcagagttgttgcgattaagaagatgaagagagtggagtttatggggctggggctgttagtggtggtgatgatgggatgttgtgggtctgcgactgctgcggatgacttggcaaccaagtgttcggcggtgattcagaaggtaataccgtgtctgaacttcgcgacggggaatgaagaaatgcccaaaaaggaatgttgcgacgccgccacggccataaaggagagcaacccacagtgcttgtgctacatcattcaggagacccacaacggtagcccacaggtcaaaagcttgggcattca

SEQ ID NO: 7382 - DNA, 271 bp, Glycine max
  Clone ID: LIB3039-053-Q1-E1-F7
gaatgacgaagtcttgattgctggatttggacgaaaaggtcatgctgtgggagatattcctggtgtcaggtttaaggtcgtgaaggtctctggtgtctctcttttggctctcttcaaggagaagaaggagaagccaaggtcttaaatttgtggagtacttgtgtttgttttcaatagtttctctcaagtattatgaattttgtttttaggtgaacgggttttatgaacaattttctatcttttctagttattttactgaacttcatttaac

SEQ ID NO: 7383 - DNA, 303 bp, Glycine max
  Clone ID: LIB3039-053-Q1-E1-F8
gaagccttgcatcgtaagttcatttgacactcataaaccttgcatcaatccacacatggctggcatgaactctagcgtattggcctgtacctatgccatatctggtgcagcatgcgcagagctcaatgggaaggtcacttccatggcctctgtagcatcctctggctacatgttgccattgatcaaatgttaggccagagttccgacagccaaagaatctgaacgaacgagatgtggccttggtctcatggcagctaatcttttcatcgctgcaacctccaattcttctgccagtgatgggat

SEQ ID NO: 7384 - DNA, 283 bp, Glycine max
  Clone ID: LIB3039-053-Q1-E1-F9
gaaggtgcaagagtttgttgtgagctataagctagtttatcgtgaggagaatatgaagttgtttgttttctttgttgctgcagtagttttggtagcatggccatgccatggcgcaggctaccaaaagtttcctccccgaattgaaactggctaaggttaaccttcctccgaaggtaaattccccagttttaaggcttgcgttggaaccaaacacaatccgaccctttaaaaccattcctgaaaattgcgttgaaccaacaaaggactacattaatgcgaacaa

SEQ ID NO: 7385 - DNA, 402 bp, Glycine max
  Clone ID: LIB3039-053-Q1-E1-G1
ggcacaagtgagtttgttgatcgagataactagaaacagtgtgatgaaaatgaaggtccttgttttcttcgttgctacaattttggtagcatggcaatgccatgcgtacgatatgttccctctccgaatgaacactggctatggtgcccgtactccggaggtgaaatgcgcaagttggaggcttgctgtggaagcacacaacatctttggctttgagaccattcctgaagagtgcgttgaagcaacaaaggaatacatccatggcgaacaatatagatcagactccaaaacagttaaccaacaagcttacttttatgccaaaaacctccaaattcaatcccagggacacatttgtgttcagtatagatggcaccgtactctctaatattccatactacaaaa

SEQ ID NO: 7386 - DNA, 387 bp, Glycine max
  Clone ID: LIB3039-053-Q1-E1-G10
gatagtattatcattcattctcatctttctctcttctctctccacccaaaccctaactcccgaccctgttcccctctcgtatccgtcatgaaaggaggaaagtccaagaccgaatctaagagagccgatcccaaacttgctgtgaataagaagggagccgccaccaaggctaggaaacccgccggcaaggggaaggcagcgaaagaccctaacaagccaaagaggcctccaagtgctttcttcgttttcatggaggagttcaggaaggtattcaacaaagaacatcctgaaaacaaagcagtgtctgctgtgggcaaagctgctggagcaaaaatgggagaccatgtctgatgctgaaaaagcaccttatgtggcaaagtctgagaa

SEQ ID NO: 7387 - DNA, 386 bp, Glycine max
  Clone ID: LIB3039-053-Q1-E1-G12
ggagcgaagaagatattagggtttttgagtgcggtgcggcgatcctagcactctcttctgcagctttcgccgacagcttcattcaccatggctgagcaaaccgagaaggcttttttgaaacaaccaaaagtgtttctcagctcgaagaaaactgggaagggaaagagacccggaaagggtgggaaccgcttttggaaatccattgggcttggatttaagactcccagggaagccatcgaaggaacctacattgacaagaagtgccccttcactggcaatgtttccatccgtggccgtatcttggctggaacatgtcacagtgctaagatgaacaggactattattgttaggaggaattatctccattttatcaagaagtaccagag

SEQ ID NO: 7388 - DNA, 402 bp, Glycine max
  Clone ID: LIB3039-053-Q1-E1-G2
gacacacactctgtcacgcacccaccattctactacactcctctctctcactctcactctctgctccgtgatagctgtaccacgtttttctctccatctcgaaacaccatctctgcctcagtcccaacccatcaccattctcatggctgctctagctctagcacttcttcttctggctttcaccggcacttcaagtgctacatggtgcgtttgcaaggatggaagcgacgcgatcctgcagaagacgttagactatgcttgtggagctggtgctgactgtaaccctcttcacctaaacgggccttgttttcagcccaacaccgttaagggccactgttacctacgccgtgaacagctacttctaaaagaagggtcaagctcaagggtcatgcgagtttgcgg

SEQ ID NO: 7389 - DNA, 401 bp, Glycine max
  Clone ID: LIB3039-053-Q1-E1-G4
ggcgcttccggcacttccacttccacttcttcatcaccatgagcaagtcaggccaaccaccggatttgaagaagtacatggacaagaagcttcagattaaactgaatggaaatcgcatgattgttggcactctccgtggctttgaccagtttatgaatttagttgttgacaacactgtggaagtgaatggcaatgagaaaaatgacatagggatggtggtaatcagaggaaatagtgtggtcactgttgaggcgcttgaacccgtgaacagggcctggttactatttcttgtaaacatttataagtagattttctggtttctgtgtttgaacaacgttaccaattgagagtaacatgtaattgtgaatcttaagagtgtcatgttggctgctaatttgggg

SEQ ID NO: 7390 - DNA, 222 bp, Glycine max
  Clone ID: LIB3039-053-Q1-E1-G5
ggaactagtgagatttcagctcattcttccttgtaacagtgtacttaatatgatcgtccttgatttcttcgatgctattcttcaggtagcatagcatttaccatgcgtagtatatgtgctcccaccaaatgtggagtggttatggtacccgaccgccgaccgcgatacacgcaaataggtcgcctgctgtctttaccaacatcatcttttgcaatgccacca

SEQ ID NO: 7391 - DNA, 423 bp, Glycine max
  Clone ID: LIB3039-053-Q1-E1-G6
acgacgacagaaggggggcattcgccgtaaacagaagagagagagagagagagagagagtcctgaaacttgggtgcgattccttcactcacaacaacaacacatcactatggctcttctgagtcgagcctcttcacgcttccctcagctggtttcccctcaaagggtagtttcactccacacaacgctcccatctctgaacgcatccccatccacagccacgcctacaccatatgccccgccaccgcctccgtccgcttcctctcccgccggcgtttcgaaggcggcggagttcgtgatctcgaaggtggacgatctgatgaactgggcccgccgcggctccatctggcccatgaccttcgggctcccctgctgcgccgtcgaattgatgcacaccggcgccgcccgctacgatctcgaccgc

SEQ ID NO: 7392 - DNA, 396 bp, Glycine max
  Clone ID: LIB3039-053-Q1-E1-G7
ggttctttgcgagatagaagagaaagccgtcgctatcctagtctcttcttcccctctacccatttcagtttcaggatggaatctcaggtgaagcacgcccttgttgtcaaagttatgggtcgtactgggtctagggggcaggtgactcaggttagagtgaagtttttggatgatcaaaaccgacacatcatgaggaacgtgaagggacccgtgagagaaggagacattctcaccctacttgagtctgaaagagaagcaagaaggttgcgctagaggatctcttcatggtttggctcaggacttaaacaaaacatcgttggttttggtggaatttaaaggatgtcaaatgttaattgtcatggacctgaattatgcacctactatgtttggcattat

SEQ ID NO: 7393 - DNA, 396 bp, Glycine max
  Clone ID: LIB3039-053-Q1-E1-G8
ggcacaagtgactttgttgatcgagataactacaaacagtgtgatgaaaatgaaggtccttgttttcttcgctgcaacaagtttggtagcatggcaatgccatgcgtacgatatgttccctctccgaatgaacactggctatggtgcccgtactccggaggtgaaatgcgcaagttggaggcttgctgtggaagcacacaacatctttggctttgagaccattcctgaagagtgcgttgaagcaacaaaggaatacatccatggcgaacaatatagatcagactccaaaacagttaaccaacaagcttacttttatgccaaagacctcgaagtccaacccaatggaccaatttgtgtccagtatacatggcaccgtactctctaatattccatact

SEQ ID NO: 7394 - DNA, 353 bp, Glycine max
  Clone ID: LIB3039-053-Q1-E1-G9
gaaggtgcaagagtttgttgtgagctataagctagtttatcgtgaggagaatatgaagttgtttgttttctttgttgctgcagtagttttggtagcatggccatgccatggcgcaggctaccaaaggttccctctccgaatgaaaactggctatggtgagcgttcttcggaggtaaaatgcgcaagttttaggcttgctgtggaagcacacaacatccgagcctttaaaaccattcctgaagagtgcgttgaaccaacaaaggactacattaatggcgaacaatttagatcagactctaaaaaagttaaacaacaagctttcttttatgctactgaacgcgaagtccatcaca

SEQ ID NO: 7395 - DNA, 401 bp, Glycine max
  Clone ID: LIB3039-053-Q1-E1-H1
ggcacaagtgagtttgttgatcgagataactagaaacagtgtgatgaaaatgaaggtccttgttttcttcgttgctacaattttggtagcatggcaatgccatgcgtacgatatgttccctctccgaatgaacactggctatggtgcccgtactccggaggtgaaatgcgcaagttggaggcttgctgtggaagcacacaacatctttggctttgagaccattcctgaagagtgcgttgaagcaacaaaggaatacatccatggcgaacaatatagatcagactccaaaacagttaaccaacaagcttacttttatgccagagaactccaaattccatcccagggacacatttgtgttcagtatagatggcaccgtactctctaatattccatactacaaa

SEQ ID NO: 7396 - DNA, 336 bp, Glycine max
  Clone ID: LIB3039-053-Q1-E1-H11
ggcacacgtttgttgagatagctagaagcaataagatgaaaatgaaagtgcttgttttgcctggtgctacacttttggtagcatatgaatgccatggctcagactaccataagttcgctctctaaatgaaaactgagtttggtgggcaatacagcactgaagtggcatgtgccagttggaggcttggcgtggaagcaaacaacgtactcaagtggcaaactgttcctgcagcttgcggagagtacatagctgactacgttctatgagaccaatatagattagattccaaaacagttaaccaacaagcttatttctatgctaaatccctcaaactca

SEQ ID NO: 7397 - DNA, 432 bp, Glycine max
  Clone ID: LIB3039-053-Q1-E1-H12
tcacggactcgatccatgcctgagggagaacggcaatagggggcgaacgttaatagcacgagaatggggtgggtttggaaggatgacaacagcgacgatgttcgacgcgataactcttcggaacgatgcgccaccaccaaggtcgtcaaatctcagtgcagaacagaggaggtcaaaactggaaagttcgtcagaaagtgcgagaaaaccgaagagattctcaggaattgcatcggaaagcccgccgaagtgttgcaatcaaacaaagagtatactgaagaggatatcacagatgaagtacttaaaggaaggtctgttccatttagctcatctgacggtgccagtggtgtggttgactttcctgggctacaaaatgatattgaagtcatggaacgtaacctgttaagtggtctcagtcatttcttcgacgca

SEQ ID NO: 7398 - DNA, 398 bp, Glycine max
  Clone ID: LIB3039-053-Q1-E1-H2
aaagagacccggaaagggtgggaaccgcttttggaaatccattgggcttggatttaagactcccagggaagccatcgaaggaacctacattgacaagaagtgccccttcactggcaatgtttccatccgtggccgtatcttggctggaacatgtcacagtgctaagatgaacaggactattattgttaggaggaattatctccattttatcaagaagtaccagaggtacgagaaaaggcactccaacattcctgctcatatatcacctgctttccgtgtgaaggaaggagatcacgttattattggtcaatgcaggccactttctaagactgtgaggttcattgtgttgaaagtgatcccagctggatcttctagcggtgcaaagaaggcttttactg

SEQ ID NO: 7399 - DNA, 330 bp, Glycine max
  Clone ID: LIB3039-053-Q1-E1-H3
aggggcctccgtcacttttctcagctgctgttcctgcgcgtgaacaaacctcacgtaagccaaagccatggataggcataacaatgtgatccccaacggacacttcctcaagcactggtagaactatgtcaagacctggttcaatcatccatcacggaagacacgatgacggttggctcatcagaagaaagctgtgaagattttccccagacctatagctggacctcttagacgcattgtacatggtcacactttgtcatacaacatgaaaatgagagctgcaatgtgattttcccttgtagaactcatagcagcaaggattcccaaaat

SEQ ID NO: 7400 - DNA, 402 bp, Glycine max
  Clone ID: LIB3039-053-Q1-E1-H4
ggcacaagtgagtttgttgatcgagataactagaaacagtgtgatgaaaatgaaggtccttgttttcttcgttgctacaattttggtagcatggcaatgccatgcgtacgatatgttccctctccgaatgaacactggctatggtgcccgtactccggaggtgaaatgcgcaagttggaggcttgctgtggaagcacacaacatctttggctttgagaccattcctgaagagtgcgttgaagcaacaaaggaatacatccatggcgaacaatatagatcagactccaaaacagttaaccaacaagcttacttttatgccagagacctcgaaatccatcccaaagacacatttgtgttcagtatagatggcaccgtactctctaatattccatactacaaaaa

SEQ ID NO: 7401 - DNA, 422 bp, Glycine max
  Clone ID: LIB3039-053-Q1-E1-H5
agggttctagtgtgtgattgtttgttgttgtaactcgttcttcttcttttgttgttctgtgtttgtgtttgttttttctctcacctgaaaatgtcttgctgcggtggtaactgtggttgcggaagctcctgcaagtgcggcaacggctgcggaggctgcaagatgtacccagacttgagctacactgagtcaaccaccaccgagaccttggtcatgggagtggcacctgttaaggctcaatttgagggtgctgaaatgggtgtgcccgctgagaacgatggctgcaaatgtggaccaaactgctcctgcaacccctgcacttgcaagtgaggtgttgggagagcaagcttttagcacagatatagcccttaattaggaataatgataaactattaatgtgtagctaaaaacttatgtattat

SEQ ID NO: 7402 - DNA, 299 bp, Glycine max
  Clone ID: LIB3039-053-Q1-E1-H6
ggtcgtcaaatgcgcagtgatgcacacttaaaattttccttggcaacttcaaagtacatcaacattgtctcctacgcctactgttctcttctctgtcacatcaggtatatattatccagtcgtcacatggataccaggtacatgcgactcttttctcatcgaaagcactaacacgattcctttctgatcactggacgagatcacagctctcaacagctttcacgcaatcatcaatgacatccatgcatacttatccagcaaattcatagcatgacagctgataactgccccaacggcat

SEQ ID NO: 7403 - DNA, 371 bp, Glycine max
  Clone ID: LIB3039-053-Q1-E1-H7
gacaacactcatagtagagtaaccaaaaggagagtgcaataactcgttgtacattcctagtgtgtgggagagacatggctaagatgtgtgttttggtgttggttcttgctctggctgtggccacaagtgccagaaacgttcccaaccccaaggatgctggtcttaaggaccagaagaacttcatcagctatggtggagttggtggttattccgggattgggaacaatggactgccttttggaggagctggtgccggaataggtggtggttttggcggaggtggtggacttggtggtggcctccggggtgtcaacggttgggatcggagggtttggcggtaccggtagcggtgtcggtggcggtattggtgg

SEQ ID NO: 7404 - DNA, 390 bp, Glycine max
  unsure (1)..(390): unsure at all n locations
  Clone ID: LIB3039-053-Q1-E1-H8
gaccacattccaaaacacaaacacatacattgtagtatcacttttgtctcggaatttgttcttttgagttatggcaagcttaaaggttgcatgtgtggttttgatgtgcatggctgtgatgagtgcaccaatgatggtgcaagccgtgtcatgcaatgatgtttctgtgaacctagcaccgtgcctatcttacctgatgcagggtggagatgttccagaatcgtgctgtagcggagtgaggaacattctgggttctgccagcaccacctttgacaaacaaaccgtgtgcaaatgtcttcagcaagctgctaataactatggcatcaacgacgaatacgctcaagcactcnccgcccgctgcaatgtcagcgtcccttacaagatcagccg

SEQ ID NO: 7405 - DNA, 373 bp, Glycine max
  Clone ID: LIB3039-053-Q1-E1-H9
gacaacacaacacaacgcgcactctctctttttctctctgttttttgttctcccttcgcttaaaccctatcgttcttctcgttttcgccgattctcgccatgccgaaagctaaatccgacgccaaagccgccgatagcaggttgaagcggaagggcgctggtgctgggaggaagcaatcgaggaaagctgctaaggaccctaacaagccgaagagacctccaagcgctttcttcgttttcatgtccgagttcagagagcagttcaagaaggagcatcctaacaacaaatccgtcgctgttgtcggcaaagctggtggtgaaaaatggaaatcgctatctgatgctgaaaaagcccctttcgttgctactgctg

SEQ ID NO: 7406 - DNA, 388 bp, Glycine max
  Clone ID: LIB3039-054-Q1-E1-A1
ggcacaagtttgttgagatagctacaagcaatacgatgaaaatgaaagtgcctgttttgtttgctgctacagttttggtagcatatgaatgccatggctcagactaccagaagttccctctccaaatgaaaactgggtttggtgggcaatacagcaatgaagtggcatgtgccagttggacgcatggcgtggaagcaaacaacgtaatcaagtggcaaactgttcctgcagcttgcggagagtacatagctgactacgttctaggagaccaatatagatcagattccataacagttaaccaacaagcttatttctatgctaaatccctcaaactcaccaacaaagatgtccttgactttggctttgacgacactactctctctaatct

SEQ ID NO: 7407 - DNA, 364 bp, Glycine max
  unsure (1)..(364): unsure at all n locations
  Clone ID: LIB3039-054-Q1-E1-A10
aaacgcggcggtgaggtctaaaatgagcggcggcgaaggagttgcggtcaccgggaattctggtcggaaagggacgctgagatacagagaatgtcagaagaaccacgccgtcagcattggaggccaagccgtcgacggctgctgcgagtttttggccgccggggaggaaggtacgctggaggccgtaatttgcgccgcctgcaactgccaccgtaatttccaccgcaaggagatcgacngcgaaaccagcccttaccggcagcgttcgcagccgcagcctcagcctctgcaccctcagttacanncacaattctccccttaactacaacggggcccaacaaccttcggctgccgggtacctcca

SEQ ID NO: 7408 - DNA, 397 bp, Glycine max
  Clone ID: LIB3039-054-Q1-E1-A11
ggcacaagtgagtttgttgatcgagataactagaaacagtgtgatgaaaatgaaggtccttgttttcttcgttgctacaattttggtagcatggcaatgccatgcgtacgatatgttccctctccgaatgaacactggctatggtgcccgtactccggaggtgaaatgcgcaagttggaggcttgctgtggaagcacacaacatctttggctttgagaccattcctgaagagtgcgttgaagcaacaaaggaatacatccatggcgaacaatatagatcagactccaaaacagttaaccaacaagcttacttttatgccagagacctcgaagtccatcccaaggacacatttgtgttcagtatagatggcaccgtactctctaatattccatactac

SEQ ID NO: 7409 - DNA, 406 bp, Glycine max
  unsure (1)..(406): unsure at all n locations
  Clone ID: LIB3039-054-Q1-E1-A12
ggcacaagtgagtttgttgatcgagataactagaaacagtgtgatgaaaatgaaggtccttgttttcttcgttgctacaattttggtagcatggcaatgccatgcgtacgatatgttccctctccgaatgaacactggctatggtgcccgtactccggaggtgaaatgcgcaagttggaggcttgctgtggaagcacacaacatctttggctttgagaccattcctgaagagtgcgttgaagcaacaaaggaatacatccatggcgaacaatatagatcagactccaaaacagttaaccaacaagcttacttttatgccagagacctcgaagtccatcccaaggacacatttgtgttcagtatagatggcaccgtactctctaatattccatactacanaaaacat

SEQ ID NO: 7410 - DNA, 325 bp, Glycine max
  Clone ID: LIB3039-054-Q1-E1-A2
ggcacaagtgagtttgttgatcgagataactagaaacagtgtgatgaaaatgaaggtccttgttttcttcgttgctacaattttggtagcatggcaatgccatgcgtacgatatgttccctctccgaatgaacactggctatggtgcccgtactccggaagtgaaatgcgcaagttggaggcttgctgtggaagcacacaacatctttggctttgaaaacattcctgaagagtgcgttgaagcaacaaaggaatacatccatggcgaacaatatagatcagactccaaaacatttaaacaacaagcttacttttatgccagagac

SEQ ID NO: 7411 - DNA, 329 bp, Glycine max
  unsure (1)..(329): unsure at all n locations
  Clone ID: LIB3039-054-Q1-E1-A3
ggcacaagtttgttgagatagctagaagcaataagatgaaaatgaaagtgcttgttttgtttgttgctacagttttggtagcatatgaatgccatggctcagactaccagaagttccctctccaaatgaaaactgggtttggtgggcaatacagcaatgaagtggcatgtgccagttggaggcttggcgtggaagcaaacaacgtagtcaagtggcaaactgttcctgcagcttgcggagagtacatagctgactacgttctangagaccantatagatcagatttcanaacagttaaacaacaagcttatttctatgctaaatccctc

SEQ ID NO: 7412 - DNA, 359 bp, Glycine max
  Clone ID: LIB3039-054-Q1-E1-A4
gagtgcacaagtgagtttgttgatcgagataactagaaacagtgtgatgaaaatgaaggtccttgttttcttcgttgctacaattttggtagcatggcaatgccatgcgtacgatatgttccctctccgaatgaacactggctatggtgcccgtactccggaggtgaaatgcgcaagttggacgcttgctgtggaagcacacaacatcttttggctttgagaccattcctgaagagtgcgtttaaacaacaaaggaatacatccatggcgaacaatatagatcagactcgaaaacagttaaccaacaagcttacttttatgccagagacctcgaagtccatcccaaggacacatttgtg

SEQ ID NO: 7413 - DNA, 367 bp, Glycine max
  Clone ID: LIB3039-054-Q1-E1-A5
gaaggtgcaagagtctgatgtgagctataagctaatttatcgtgaggagaatatgaacttgtttgttttctttgttgctgcaatagttttggtaccatggacatgccatggcgcaggctacgaaaggttccctctccgaatgaaaactggctatggtgagcgttcttcggaagtaaaatgcgcaagttttaggcttgctgtgtaagcacacagcatccgagcctttaaaaccattcctgaagagtgcgtatgaaccatcacaggactacattaatggcgaacaatttagatcagactctaaaacagttcaacaacgaactttcttttatgctaatgaacgccaattccatcacaacgacatatttat

SEQ ID NO: 7414 - DNA, 296 bp, Glycine max
  Clone ID: LIB3039-054-Q1-E1-A6
gattatatttgagttcaaacaaatcaaagccatggccacctccaacttctctattgttctctccgtctccctagccttctttttggtgctacttaccaaggcacactcgaccgataccgtttctttcaccttcaacaagttcaacccagtccaaccaaacattatgctccaaaaagatgctagtatttcatcctctggggtgttacaactcaccaaagttggcagcaacggcgtgcccacctcgggatctctcggtcgtgccctttacgctgccccaatccagatttgggacagcg

SEQ ID NO: 7415 - DNA, 380 bp, Glycine max
  Clone ID: LIB3039-054-Q1-E1-A7
cgaatgaacactggctatggtgcccgtactccggaggtgaaatgcgcaagttggaggcttgctgtggaagcacacaacatctttggctttgagaccattcctgaagagtgcgttgaagcaacaaaggaatacatccatggcgaacaatatagatcagactccaaaacagttaaccaacaagcttacttttatgccagagacctcgaagtccatcccaaggacacatttgtgttcagtatagatggcaccgtactctctaatattccatactacaaaaaacatggatatggggtggagaaatttaactcgaccttgtatgatgaatgggttaacaagggcaatgcaccggcactgcccgagactcttaagaattacaacaa

SEQ ID NO: 7416 - DNA, 349 bp, Glycine max
  Clone ID: LIB3039-054-Q1-E1-A8
agacgacagaaggggagagtggtggagtgtgcaaaagagcgtcgtagtcgcaaccctaatcagaagaagcgcagcttcaagcgagtgacagccaccagccatgggtcgtatgcacagccgcggtaagggtatatcctcttctgctttgccctacaaaaggacacctcctagctggctcaagatctcttcgcaagatgtcgaagaaaatatctgcaagtttgcgaagaaaggtttgaccccgtctcagattggtgtcattctcagagattctcacggtattgctcaggtcaatagcgtcactggcagcaaaatccttcgcatcctcaaagctcacggacttgcgcctgaa

SEQ ID NO: 7417 - DNA, 389 bp, Glycine max
  Clone ID: LIB3039-054-Q1-E1-A9
gggcacaagtttgttgagatagctagaagcaataagatgaaaatgaaagtgcttgttttgtttgtcgctacagttttggtagcatatgaatgccatggctcagactaccagaagttccctctccaaatgaaaactgggtttggtgggcaatacagcaatgaggtggcatgtgccagttggaggcttggcgtggaagcaaacaacgtagtcaagtggcaaactgttcctgcagcttgcggagagtacatagctgactacgttctaggagaccaatatagatcagattccaaaacagttaaccaacaagcttatttctatgctaaatccctcaaactcaccaacaaagatgtctttgtcttggacgttgacgacactactctctctaatct

SEQ ID NO: 7418 - DNA, 283 bp, Glycine max
  Clone ID: LIB3039-054-Q1-E1-B1
ggagcgaagaagatattagggtttttgagtgcggtgcggcgatcctagcactctcttctgcagctttcgccgacagcttcattcaccatggctgagcaaaccgagaaggcttttttgaaacaaccaaaagtgtttctcagctcgaagaaaactgggaagggaaagagacccggaaagggtgggaaccgcttttggaaatccattgggcttggatttaagactcccaaggaagccatcgaaggaacctacattgacaagaagtgccccttcactggcaatgttt

SEQ ID NO: 7419 - DNA, 378 bp, Glycine max
  unsure (1)..(378): unsure at all n locations
  Clone ID: LIB3039-054-Q1-E1-B10
ggcacaagtgagtttgttgatcgagataactagaaacagtgtgatgaaaatgaaggtccttgttttcttcgttgctacaattttggtagcatggcaatgccatgcgtacgatatgttccctctccgaatgaacactggctatggtgcccgtactccggaggtgaaatgcgcaagttggaggcttgctgtggaagcacacaacatctttggctttgagaccattcctgaagagtgcgttgaagcaacaaaggaatacatccatggcgaacaatatagatcagactccanaacagttaaacaacaagctttactttatgccagagacctcgaagtccaatcccaagacacatttgtgttcagtatagatggcaccgtact

SEQ ID NO: 7420 - DNA, 383 bp, Glycine max
  Clone ID: LIB3039-054-Q1-E1-B11
gacctcacccagttgcagaaagaaaagaccatcaaagtttcacttcagccttatccggtttagggtttcggtttttgacccaacctttgacgtatcgaaaccttaagtttcggatcaggtctgagcaatctggttggtagaacctttggtcttagagagtcaagttttatgtctgaattagacgatcaaattcctactgccttcgatccttttgctgatgcaaatgctgatgactcgggtgctgggtcaaaggagtatgtgcatattcgcgtacagcagcgaaatggaaggaaaagcctgacaaccgttcagggattgaaaaaagaattcagctataacaagatacttaaagatgttaagaaagagttctgttgcaatggaac

SEQ ID NO: 7421 - DNA, 395 bp, Glycine max
  Clone ID: LIB3039-054-Q1-E1-B12
tgaaactactcaactaattgaaatgttttgccaccaaactgaccgagagtatcgcataatgatggggactgatgttcgaatccaaagggatcctttagcaatgcgaatgagggaggatcagataaagcaaatatggggtggagatccagtttacccaactgtgaactatattcaagatccaaatgaagtgattgactacagggggccagattttcatgaaccaacaccaaatatggtgtcttatctgaaggagaaaggaaaacttatttcaagggaggaatttgacaagattatggccaaggaaaagactgaacaaattgagtcgacggagatggatgaagctatggccaaagctgttgacattggagaaaatgatgatgaagaggatagtgatg

SEQ ID NO: 7422 - DNA, 375 bp, Glycine max
  unsure (1)..(375): unsure at all n locations
  Clone ID: LIB3039-054-Q1-E1-B2
ggcacaagtttgttgagatagctagaagcaataagatgaaaatgaaagtgcttgttttgtttgttgctacagttttggtagcatatgaatgccatggctcagactaccagaagttccctctccaaatgaaaactgggtttggtgggcaatacagcaatgaggtggcatgtgccagttggaggcttggcgtggaagcaaacaacgtagtcaagtggcaaactgttcctgcagcttgcggagagtacatagctgactacgttctangagaccaatatagatcagattccaaaacagtttaacaacaagcttatttctatgctaaatccctcaaactcaccaacanagatgtctttgtcttggacgttgacgacacta

SEQ ID NO: 7423 - DNA, 329 bp, Glycine max
  Clone ID: LIB3039-054-Q1-E1-B3
agagaaagagagagaaagatgtcgaagcgtggtcgtggtggttcggcggggaacaagttccgcatgtcgctgggtcttccagtggcggcgacggtgaactgcgccgacaacacgggggcgaagaacctctacatcatttcggtgaaagggatcaaaggccgtttgaaccgtcttccctcggcctgcgttggcgacatggtgatggccaccgtgaagaagggaaaacccgatctgaggaagaaggtcttgccagctgtcatcgttcgccagcgcaagccatggcgccgaaaggacggcgtctacatgtacttcgaagataatgctggtgt

SEQ ID NO: 7424 - DNA, 341 bp, Glycine max
  Clone ID: LIB3039-054-Q1-E1-B4
gaaggtgcaagagtggtggagtgtgcagaagagcgtcgcagtcgcaaccctaatcagaagaagcgcagcttcaagcgagtgacagccaccagccatgggtcgtatgcacagccgcggtaagggtatatcctcttctgctttgccctacaaaaggacacctcctagctggctcaagatctcttcgcaagatgtcgaagaaaatatctgcaagtttgcgaagaaaggtttgaccccgtctcagattggtgtcattctcagagattctcacggtattgctcaggtcaatagcgtcactggcagcaaaatccttcgcatcctcaaagctcacggacttgcgcctg

SEQ ID NO: 7425 - DNA, 360 bp, Glycine max
  Clone ID: LIB3039-054-Q1-E1-B5
ggtgcacaagtgagtttgttgatcgagataactagaaacagtgtgatgaaaatgaaggtccttgttttcttcgttgctacaattttggtagcatggcaatgccatgcgtacgatatgttccctctccgaatgaacactggctatggtgcccgtactccggaggtgaaatgcgcaagttggaggcttgctgtggaagcacacaacatctttggctttgagaccattcctgaagagtgcgttgaagcaacaaaggaatacatccatggcgaacaatatagatcagactccaaaacagttaaccaacaagcttacttttatgccagagacctcgaagttcatcccaaagacacaattgtgttc

SEQ ID NO: 7426 - DNA, 305 bp, Glycine max
  Clone ID: LIB3039-054-Q1-E1-B6
ggttccgatttcccaaccaaaagaccactctcgacgagcttcccaaaacaagaagcaccaatggcagtcgcgaatctgcagagactgtcctcgcaagcgcaccgcctcccctccctctcgttcttctccaaatccctgatctaccgccgcacctcctcttccacgaagaaggtcgccgaccgcatcgtacggctctcggcgatcgacttcgtgggaaagaagcacgaggtggtgggcctggccggccagaccttgctgaaggccctgatcaacacgggcctggtcgacccggagtcccaccgcct

SEQ ID NO: 7427 - DNA, 363 bp, Glycine max
  Clone ID: LIB3039-054-Q1-E1-B7
ggcacaagtgagtttgttgatcgagataactagaaacagtgtgatgaaaatgaaggtccttgttttcttcgttgctacaattttggtagcatggcaatgccatgcgtacgatatgttccctctccgaatgaacactggctatggtgcccgtactccggaggtgaaatgcgcaagttggaggcttgctgtggaagcacacaacatctttggctttgagaccattcctgaagagtgcgttgaagcaacaaaggaatacatccatggcgaacaatatagatcagactccaaaacagttaaccaacaagcttacttttatgccagagacctcgaagtccatcccaaggacacatttgtgttcagtat

SEQ ID NO: 7428 - DNA, 367 bp, Glycine max
  unsure (1)..(367): unsure at all n locations
  Clone ID: LIB3039-054-Q1-E1-B8
gaaggtgcaagagtttgttgtgagctataagctagtttatcgtgaggagaatatgaagttgtttgttttctttgttgctgcagtagttttggtagcatggccatgccatggcgcaggctaccaaaggttccctctccgaatgaaaactggctatggtgagcgttcttcggaggtaaaatgcgcaagttttaggcttgctgtggaagcacacaacatccgagcctttaaaaccattcctgaagagtgcgttgaaccaacaaaggactacattaatggcgaacaatttagatcagactctaaaacagttaaccaacaagctttcttttatgctagtgaacgcgaagtccatcacancgacatatttata

SEQ ID NO: 7429 - DNA, 399 bp, Glycine max
  Clone ID: LIB3039-054-Q1-E1-B9
ggtgcacaagtgagtttgttgatcgagataactagaaacagtgtgatgaaaatgaaggtccttgttttcttcgttgctacaattttggtagcatggcaatgccatgcgtacgatatgttccctctccgaatgaacactggctatggtgcccgtactccggaggtgaaatgcgcaagttggaggcttgctgtggaagcacacaacatctttggctttgagaccattcctgaagagtgcgttgaagcaacaaaggagtacatccatggcgaacaatatagatcagactccaaaacagttaaccaacaagcttacttttatgccagagacctcgaagtccatcccaaggacacatttgtgttcagtatagatggcaccgtactctctaatattccatactac

SEQ ID NO: 7430 - DNA, 359 bp, Glycine max
  Clone ID: LIB3039-054-Q1-E1-C1
ggtgtttcaaaaatggaacctaatgacaaccaactcacctctttcttccaccaccaccaccaacagcaccaacaccaccagccgccgccaccaccgcagaccacggcgtctccgaccaacgggctcttgccgaacgcggatgggtcccacatactttacccccactctgtggcgtccgctgtttcgtcgcagcttgaaccggcgaagcggaagcgcgggcggccgaggaagtacggaacgccggagcaagctctggccgcgaagaaagccgctacgacgttgtctcattcgttccctgtggacaagaagccccactccccgacgttcccttcctccaagaaatcccattccttcgctct

SEQ ID NO: 7431 - DNA, 407 bp, Glycine max
  unsure (1)..(407): unsure at all n locations
  Clone ID: LIB3039-054-Q1-E1-C10
gactgaaaaaagagaaagtgagaaaagggtcgaacaactggtgaagtcattgatggctacagaggaagagagtgcggtgaaggagcctttggatctcattaggctcagcctcgacgagcgtatctatgtcaaactccgttccgacagagagcttcgtggcaaacttcacgcttatgatcagcatcttaatatgattcttggtgatgttgaagaaattgttactacagtggaaatcgatgatgagacatacgaagaaattgtgaggactacaaagcggacagttcctttcctgtttgtcangggagatggggtgatattggtttcccgccattgaggactgcatgactggactgatgaactatgtgatcattttaataacaagtgtcactgttatgaaattgtataac

SEQ ID NO: 7432 - DNA, 381 bp, Glycine max
  Clone ID: LIB3039-054-Q1-E1-C11
gcactgtctactcaacacaatctctgagcacaaattgctccatctcaaccccatcaaagacgcaactcagttttttccaccaaaagcaggtagttttctggaggaacagcaagaagggcagctgcagcagcagaagaagctatgtgataacatgtgcagcaggtgactcacagacagtggtgattggcctggctgcagactcagggtgtgggaagagcaccttcatgaggaggctgaccagtgtgtttggaggagcagcagagccaccaaagggtggcaaccctgactccaacactctcatcagtgacaccaccactgtcatatgcttggatgattaccactctttggacagaactggaagaaaggagaaaggtgtcactg

SEQ ID NO: 7433 - DNA, 394 bp, Glycine max
  unsure (1)..(394): unsure at all n locations
  Clone ID: LIB3039-054-Q1-E1-C12
gagcgaaacagagagtggtttcagtgagtgatcggtgttcacttgatccttcataagtcgtcatcatcatcatcatcatcaccgttgattgaagaagatgccgatcagaaacatcgccatcggaaggcctgaagaggctactcaccccgacacgttgaaggcggggttggctgagttcatctccaccttgatcttcgtgttcgccggttcaggttccggcatcgcctacaacaagctcaccgacaacggcgccgccactcccgccggcctcatctccgcttccatcgcccatgctttcgccctcttcgtcgccgtctccgtcggcgccaacatctccggcggccacgtcaaccccgccgtcancttcggcgccttcgtgggcggcaacatcacc

SEQ ID NO: 7434 - DNA, 325 bp, Glycine max
  Clone ID: LIB3039-054-Q1-E1-C2
gaccaccactactaccaagtgaaaaagcaactaagcatagtgtgtaagaaagggagaaaaacaagtgctgtgtagagagaaaaatggctaggcggtgcatgatcttggtggttcttgctcttgccgtggttgcaagtgccagaaacatgcccaatgacgctggtttggaggaccagaagaacttccttgggtatgggttttcgggagttggcaacaatggccttccctttggtggagtgggttctgggtttgatggtaatatgggtgggccttctgggctcggaggacttggaggattcggtgggcctggtgggcttggcggact

SEQ ID NO: 7435 - DNA, 373 bp, Glycine max
  Clone ID: LIB3039-054-Q1-E1-C3
gggtgcaagagtttgttgtgagctataagctagtttatcgtgaggagaatatgaagttgtttgttttctttgttgctgcagtagttttggtagcatggccatgccatggcgcaggctaccaaaggttccctctccgaatgaaaactggctatggtgagcgttcttcggaggtaaaatgcgcaagttttaggcttgctgtggaagcacacaacatccgagcctttaaaaccattcctgaagagtgcgttgaaccaacaaaggactacattaatggcgaacaatttagatcagactctaaaacagttaaccaacaagctttcttttatgctagtgaacgcgaagtccatcacaacgacatatttatattcggcat

SEQ ID NO: 7436 - DNA, 347 bp, Glycine max
  Clone ID: LIB3039-054-Q1-E1-C4
ggaagaacaagtcttgcattgggtggagcatacttagaaacagcaactatgtctctcatgcagcttactagctcccctgttggctcactggtccgtttcattgtaatatttgctttatggtacagaaccatggctttggccaagttgccaccaaacgcttcatcagttccagcagttttagcgtttggagattccatcgtggacccatgcaacaacaacaacataaaaacattgatcaagtgcaacttcccaccttatggaaaggattttcagggaggaaacccaacgggtcgattttgcaatggaaaaattccttctgacttaatacttgaacaattgggtattaa

SEQ ID NO: 7437 - DNA, 345 bp, Glycine max
  Clone ID: LIB3039-054-Q1-E1-C5
gaccttttaggggtgcagagaagagaatcaatctcaaggaattactcaacttaatttttctctcacaaataccgatttctattatttccaactcaaaatttctccattctttttgtttcggtagctcgcgacatcagatcaacatcgacagcctctcgcgattggttcgatattccattccctctttctattatctacgcaaaggtaattttattagtctattcacgatttgcggcatctgattttgtaattttcacaacaatcgtgtgcacgactgattaattgattttgccagtagtaactagcaattcatcttaaccatattttctcggttcccaatttttc

SEQ ID NO: 7438 - DNA, 345 bp, Glycine max
  Clone ID: LIB3039-054-Q1-E1-C6
gattgttggcttgtgctctgctcgtgcctctagggttatcatatctccatttccatttcctctctctcagtttccaagaatcttaagctatgggaaagtcttacccaaccgtgagcgctgattaccagaaggccgttgagaaggcgaagaagaagctcagaggcttcatcgctgagaagagatgcgctcctctaatgctccgtttggcatggcactctgctggaacttacgacgtgagctcgaagaccggtggtcccttcggaaccataaagcacccctccgaactcgctcacggcgctaacaacggtcttgacatcgctgttaggcttttggagccactcaaag

SEQ ID NO: 7439 - DNA, 276 bp, Glycine max
  Clone ID: LIB3039-054-Q1-E1-C7
gaagtttcagaagacacgtgggtggatagcaacttagaacacaagtgaactcaaagtggaacaacccaagcttgtttcacagctcaacaacaatggcttctatctcatgcatcacccaccaccccatcacttccaagctcaataatgccttctcttcaccccacgtctctgcctcaaacttggcctcacggtttctgggcaccagaaaaagagttgggttgcatagcctcacctctagaataattggaccctctaatggctccaaagccacatgct

SEQ ID NO: 7440 - DNA, 341 bp, Glycine max
  Clone ID: LIB3039-054-Q1-E1-C8
ggttctagtgtgtgattgtttgttgttgtaactcgttcttcttcttttgttgttctgtgtttgtgtttgttttttctctcacctgaaaatgtcttgctgcggtggtaactgtggttgcggaagctcctgcaagtgcggcaacggctgcggaggctgcaagatgtacccagacttgagctacactgagtcaaccaccaccgagaccttggtcatgggagtggcacctgttaaggctcaatttgagggtgctgaaatgggtgtgcccgctgagaacgatggctgcaaatgtggaccaaactgctcctgcaacccctgcacttgcaagtgaagtgttgggagag

SEQ ID NO: 7441 - DNA, 397 bp, Glycine max; identical to SEQ ID NO: 7408
  Clone ID: LIB3039-054-Q1-E1-C9

SEQ ID NO: 7442 - DNA, 406 bp, Glycine max
  unsure (1)..(406): unsure at all n locations
  Clone ID: LIB3039-054-Q1-E1-D10
ggcacaagtgagtttgttgatcgagataactagaaacagtgtgatgaaaatgaaggtccttgttttcttcgttgctacaattttggtagcatggcaatgccatgcgtacgatatgttccctctccgaatgaacactggctatggtgcccgtactccggaggtgaaatgcgcaagttggaggcttgctgtggaagcacacaacatctttggctttgagaccattcctgaagagtgcgttgaagcaacaaaggaatacatccatggcgaacaatatagatcagactccaaaacagttaaccaacaagcttacttttatgccagagacctcgaagtccatcccaaggacacnattgtgttcagtatagatggcaccgtactctctaatattccatactacaaaaaacat

SEQ ID NO: 7443 - DNA, 403 bp, Glycine max
  Clone ID: LIB3039-054-Q1-E1-D12
ggtgcaagagtttgttgtgagctataagctagtttatcgtgaggagaatatgaagttgtttgttttctttgttgctgcagtagttttggtagcatggccatgccatggcgcaggctaccaaaggttccctctccgaatgaaaactggctatggtgagcgttcttcggaggtaaaatgcgcaagttttaggcttgctgtggaagcacacaacatccgagcctttaaaaccattcctgaagagtgcgttgaaccaacaaaggactacattaatggcgaacaatttaaatcagactctaaaacagttaaccaacaagctttcttttatgctagtgaacgcgaagtccatcacaacgacatatttatattcggcatagataacaccgtactctctaatatccatact

SEQ ID NO: 7444 - DNA, 318 bp, Glycine max
  Clone ID: LIB3039-054-Q1-E1-D2
gatgccacaatggttgtccctcttaggcactttcttgttttctctctcaccctcatatccatcatcttccacacccatggagcgttctctgagcaatcaataatcaagttacccacagaccaaccaagggtagaaaaactgacccacttgcattttttctaccacgacatcttacagggcaagaacatcacggtggtgaaaatcatccagccatcagcgagcgacgttcgtgaagcaactgggtttggaaccactttcatgatggacaatgttttgaccgagggttcagagctgagctcgaagcacgtttgggaaggc

SEQ ID NO: 7445 - DNA, 276 bp, Glycine max
  Clone ID: LIB3039-054-Q1-E1-D3
ggtgcacaagtgagtttgttgatcgagataactagaaacagtgtgatgaaaatgaaggtccttgttttcttcgttgctacaattttggtagcatggcaatgccatgcgtacgatatgttccctctccgaatgaacactggctatggtgcccgtactccggaggtgaaatgcgcaaattggaggcttgctgtggaagcacacaacatctttggctttgagaccaatcctgaaaagtgcgttgaaacaacaaaggaatacatccatggcgaacaatat

SEQ ID NO: 7446 - DNA, 358 bp, Glycine max
  Clone ID: LIB3039-054-Q1-E1-D4
gagatcagcctctttctttctttctctctctctctctctctctgcacctttctttcacaactcaatcaaaaaaagcatatccaaggtgtggtggttaagctgtccatctatcaatcaatccaatcaatcaagagaccaatcatcaaccgaatataagagaacgaaaaaagggggctacccacaacgtcatcctctttcaccacattatcactggaccacctccctccttccgaacagctatgttatgttcactgcaacatttgtgacaccgtcctcgctgtaagtgttccttgcacaagcttgttcaagaccgtcacagtccgattccgccattgcaataacctccttccagtgaaca

SEQ ID NO: 7447 - DNA, 372 bp, Glycine max
  unsure (1)..(372): unsure at all n locations
  Clone ID: LIB3039-054-Q1-E1-D5
gatccataaccatggcgtctaactctgcttccgctctttacttccttttatgcctatcgcccatcactttgcttctttctgcgtttcgtgctcaagctcaatctcatgctccagctcccactttcaagtactgtgaaaagaatgcagactatgctgtgaaggtgagtggagtggaaatattgcctgaccccgtggagagaggagtgccattcacctttaagatcccagcttatactcctgaaccaattcaaagcggggacttgttatatgaaatttcttatgctggaatagaagcacaacctgctacatttctccatgatctctgtgaggaagcnnacatgccagtacctgcaggcaactttgtgctcgttc

SEQ ID NO: 7448 - DNA, 404 bp, Glycine max
  Clone ID: LIB3039-054-Q1-E1-D6
agacgacagaagggggagaaacacagaatccttctgaactcttagaagagcacacttttcgctaccagttacttccctctttcatttcttatatctgctaagtaaaatcaaaagggtgaatctgaatggtttttgctgttagtttctctcaaagcctccttctgtgcaagccatcatcatcatcatcatatcaggtcaagtgttgctcacggtcacagaacaaagaagccacgtcacatattcaaacaaagaaacggtgcttgaggtgcaacaccctttactcagatgaagataattccccacttgcttgctccttccatggccacaccaatggagataagggtctattttcatttgctccagcacaccgaggaattgatggggattggagtgataaatctgga

SEQ ID NO: 7449 - DNA, 351 bp, Glycine max
  unsure (1)..(351): unsure at all n locations
  Clone ID: LIB3039-054-Q1-E1-D7
gaccaatcaatcattcattcactccaaggagggatctctctctctcactccttcttctctctcctctggcacccctaaagcttcttctgttctgtgcaggcagtttttctttggtttggttgcatcctttgatctgatcagcaaatttgagaattcagtttgggaagggccattcctctttagtgcaaaacagatcgcaggtgcctttgtgctgatggccactaatgaaaatcttccaccaaatgtaattaagcaacttgccaaggagttgaaaaatcttgacgaatctcctcncgagggcattaaagttgtggtaaatgatgatgatttttcgacaatatttgctgacat

SEQ ID NO: 7450 - DNA, 352 bp, Glycine max
  Clone ID: LIB3039-054-Q1-E1-D8
gtgagctcgaagaccggtggtcccttcggaaccataaagcacccctccgaactcgctcacggcgctaacaacggtcttgacatcgctgttaggcttttggagccactcaaagcggagtttcctattttgagctacgccgatttctaccagttggctggcgttgttgccgttgaggtcaccggtggacctgaagttcccttccatcctggaagagaggacaaacctgagccaccaccagagggtcgcttgcccgatgccactaagggttctgaccatttgagagatgtgtttggcaaagctatggggcttagtgaccgagatatcgttgctctgtctgggggtcacactattg

SEQ ID NO: 7451 - DNA, 277 bp, Glycine max
  Clone ID: LIB3039-054-Q1-E1-D9
gtccaaacggcgacaaaacgacaacggaaggggaatactgcacgatagattttttctaactagtccagtcaccctaccaacctacgatcgacaatttcaggagtcacaatttcctcaaatgctcaccccatcgctgtaacccacatccgccatagccctcccacaacttgttcaacaggcagtcaacctacaagcaactcagaaggagtgccaattcccgacactcacaccatgaacaagggtatctccgaacttgttgtctgggccggcgataaag

SEQ ID NO: 7452 - DNA, 375 bp, Glycine max
  unsure (1)..(375): unsure at all n locations
  Clone ID: LIB3039-054-Q1-E1-E1
ggcattatatttgagttcaaacaaatcaaagccatggccacctccaacttctctattgttctctccgtctccctagccttctttttggtgctacttaccaaggcacactcgaccgataccgtttctttcaccttcaacaagttcaacccagtccaaccaaacattatgctccaaaaagatgctagtatttcatcctctggggtgttacaactcaccaaagttggcagcaacggcgtgcccacctcgggatctctcggtcgtgccctttacgctgccccaatccagatttgggacagcganaccggcaaggtagccagctgggctacatcctttaaattcaacattttcgcnaccaacaaatcaaactcagctgac

SEQ ID NO: 7453 - DNA, 391 bp, Glycine max
  Clone ID: LIB3039-054-Q1-E1-E11
gcttccatcggcgcggcacacacagacacacacatttcgtcggaatgggaagggtgattcgcgcacagcgtaagggtgcggggtcggtgttcaagtcccacacccaccaccgcaagggtccggcgaggttccgcagcctcgacttcggcgagcgcaacggctacctcaaaggggtcgtcaccgatatcatccacgaccctggtcgcggtgctcctctagccaaggtggcgttccgccaccccttccgctacaagaagcagatggagctcttcgtcgccgccgaaggcctctacaccggccagttcatctactgcggcaagaacgccaccctcgtcgtcggcaacgtcttgcccctccgatccatccccgaaggtgccgttatctgcaacgt

SEQ ID NO: 7454 - DNA, 382 bp, Glycine max
  Clone ID: LIB3039-054-Q1-E1-E12
gacaacaatctaagagtgagttttgtttatttgaaattaacaagtagcaaagatgtttggaatcatcggaggaaacaagggtcacaagataaaggggaacttggtgattatgcgaaagaatgtgttggatatcaacagcattaccagtgttaagggtgtcatcggaaccggcattaacatcattggaggagtcgtcgacaccgttactgctttggcgtcccacatctccatccagctcattagtgccaccaaggctgatggacatgggaaaggaaaagttggaaaggctacaaatttaagaagacaagtgtcgtttacaaacttgggagctggcgaagatgcatacgatgttcattttgaatgggacagtgacttcggaatt

SEQ ID NO: 7455 - DNA, 371 bp, Glycine max
  Clone ID: LIB3039-054-Q1-E1-E2
gacttgtaataattcttataacacaacacaacccatggccaccacctccgcattcctcctccttcccctcctcctgctgctccacctcgccatcgccgctcacggcatcggcatcaactacggcacgctcggcgacaaccttccaccgcccgcggcggtggcgaacttcctgaagacgaagacgaccatcgaccgcgtgaagatctacgacgtgaaacccggacatcctgcgggccttcgccggcagcggcatctccgtgacggtgaccgcccccaacggcgacatcgccgccttaaccaaaatcgactcggcgaggcattgggtggcgacgcacatcaaaccctttcaccctcagaccaaaattaattac

SEQ ID NO: 7456 - DNA, 357 bp, Glycine max
  unsure (1)..(357): unsure at all n locations
  Clone ID: LIB3039-054-Q1-E1-E3
gggagtgagatcatagaacaacacaaccaactccaagttataaagagaactatagctggcacatattgatgcatacatagctaaaaggatcaaaaggcacatctatgtttcagtcctttgccagcaagtaagtagtaactcatccaaatatagcaaatggatccacaaagcatgcattttgtgctgtccactgattccaaaccaaggctgaaatggactcctgagcttcaccgacggttcattgaggctaccaatcagcttggaggtgcagataaagcaactccaaagagtcttatganggtgatgggaattccgggacttactttgtaccacctgaagagccatttacagaaatat

SEQ ID NO: 7457 - DNA, 172 bp, Glycine max
  Clone ID: LIB3039-054-Q1-E1-E4
ggcacaagtgagtttgttgatcgagataactagaaacagtgtgatgaaaatgaacgtccttgttttcttcgctgctacaattttggtagcatggcaatgccatgcgtacgatatgttccctctccgaatgaacactggctatggtgcccgtactccggaagtgaaatgcgca

SEQ ID NO: 7458 - DNA, 367 bp, Glycine max
  Clone ID: LIB3039-054-Q1-E1-E5
gattcccaaaatttctcattctccctttcctctccgaaccctcgatcactctcacgcgctcctatattcgctcctccaccgtcgctctctcgaacaaccacaacaccatcttcatcacatggcaaacgcagcatctggtatggcagtccatgatgactgcaagttgaggtttttggagctgaaggcaaaaaggacacaccgtttcatagtttttaagattgaggagcagcagaagcaggtcattgtggagaagcttggtgagcctgcccagggctatgaagatttcactgccagccttcctgctgacgagtgccgttatgctgtttatgattttgagtatctgactgaagggaatgtccctaaaagc

SEQ ID NO: 7459 - DNA, 356 bp, Glycine max
  Clone ID: LIB3039-054-Q1-E1-E6
gaagtgagtttgttgatcgagataactagaaacagtgtgatgaaaatgaaggtccttgttttcttcgttgctacaattttggtagcatggcaatgccatgcgtacgatatgttccctctccgaatgaacactggctatggtgcccgtactccggaggtgaaatgcgcaagttggaggcttgctgtggaagcacacaacatctttggctttgagaccattcctgaagagtgcgttgaagcaacaaaggaatacatccatggcgaacaatatagatcagactccaaaacagttaaccaacaagcttacttttatgccagagacctcgaagtccatcccaaggacacatttgtgttcag

SEQ ID NO: 7460 - DNA, 380 bp, Glycine max
  Clone ID: LIB3039-054-Q1-E1-E7
ggcacaagtgagtttgttgatcgagataactagaaacagtgtgatgaaaatgaaggtccttgttttcttcgttgctacaattttggtagcatggcagtgccatgcgtacgatatgttccctctccgaatgaacactggctatggtgcccgtactccggaggtgaaatgcgcaagttggaggcttgctgtggaagcacacaacatctttggctttgagaccattcctgaagagtgcgttgaagcaacaaaggaatacatccatggcgaacaatatagatcagactccagaacagttaaccaacaagcttacttttatgccagagacctcgaagtccatcccaaggacacatttgtgttcagtatagatggcaccgtactct

SEQ ID NO: 7461 - DNA, 329 bp, Glycine max
  Clone ID: LIB3039-054-Q1-E1-E8
gacagcaaaacaattttcaaactcaattaccattccataacctaaatctcctctttgtttccgagtcagagagcaatggcacgtaccaagcaaaccgctcgcaagtccaccggcggaaaggcgccgaggaagcaattggcgactaaagccgctcgcaagtcagctccggccaccggcggagtgaagaagccccaccgcttcaggcccggaacggtggctctgagggagatcagaaagtaccagaagagcactgaacttctgatccgaaaactcccattccagaggctcgtcagagaaatcgctcaggatttcaaaacagatcttcgttt

SEQ ID NO: 7462 - DNA, 405 bp, Glycine max
  Clone ID: LIB3039-054-Q1-E1-E9
gaaggtgcaagagtttgttgtgagctataagctagtttatcgtgaggagaatatgaagttgtttgttttctttgttgctgcagtagttttggtagcatggccatgccatggcgcaggctaccaaaggttccctctccgaatgaaaactggctatggtgagcgttcttcggaggtaaaatgcgcaagttttaggcttgctgtggaagcacacaacatccgagcctttaaaaccattcctgaagagtgcgttgaaccaacacaggactacattaatggcgaacaatttagatcagactctaaaacagttaaccaacaagctttcttttatgctagtgaacgcgaagtccatcacaacgacatatttatattcggcatagataacaccgtactctctaatatcccata

SEQ ID NO: 7463 - DNA, 383 bp, Glycine max
  Clone ID: LIB3039-054-Q1-E1-F1
ggcacaagtgagtttgttgatcgagataactagaaacagtgtgatgaaaatgaaggtccttgttttcttcgctgctacaattttggtagcatggcaatgccatgcgtacgatatgttccctctccgaatgaacactggctatggtgcccgtactccggaggtgaaatgcgcaagttggaggcttgctgtggaagcacacaacatctttggctttgagaccattcctgaagagtgcgttgaagcaacaaaaggatacatccatggcgaacactatagatcagactccaaaacaatttaacaacaaaccttactttttaggccagagacctcgaaagtccaattcgaagggacacatttgtgttcagtataaatggcaccgtact

SEQ ID NO: 7464 - DNA, 374 bp, Glycine max
  Clone ID: LIB3039-054-Q1-E1-F10
gacgcgaatggctgctactgctccttggttttttagttgttgtgttgttgtcttcaactccacacagttccctcacttctcttccctttgaccattcaaccttcctcgcctttgcctccgtttccgtgactgagatggctggaggtgttattcagcagatattgaggaggaaactccaccctcggtttactaactctcccttgttgtcacccatcgtagcaaaaaaagatgatgctggctctactggcagtcagtccttaagagcacttgcattaattggagctggtttgtcaggtcttttcagtttttcaacaatggcagcagctgatgaagctgaacatggcctggcatgtccaagctatccatggcctcac

SEQ ID NO: 7465 - DNA, 405 bp, Glycine max
  Clone ID: LIB3039-054-Q1-E1-F11
ggcacaagtgagtttgttgatcgggataactagaaacagtgtgatgaaaatgaaggtccttgttttcttcgttgctacaattttggtagcatggcaatgccatgcgtacgatatgttccctctccgaatgaacactggctatggtgcccgtactccggaggtgaaatgcgcaagttggaggcttgctgtggaagcacacaacatctttggctttgagaccattcctgaagagtgcgttgaagcaacaaaggaatacatccatggcgaacaatatagatcagactccaaaacagttaaccaacaagcttacttttatgccagagacctcgaagtccatcccaaagacacatttgtgttcagtatagattggaccgtactctctaatattccatactagcaaaaaca

SEQ ID NO: 7466 - DNA, 379 bp, Glycine max
  Clone ID: LIB3039-054-Q1-E1-F12
ggaagagagaaagagagtgaagagagaagaagatggcgtcgagcggagcggtgccgttttggagggcagcggggatgacatacatcacatactcaaacatatgcgcgaatctggtcaggaattgcctcaaggaaccctacaaggctgaagccatctctcgtgagaaggtccattttgctctctccaaatgggtcgacgccaagcctgaaaaacctactattcgttcagacaccccagagcagtgatccggaatagttggaagctataaatgcataaatctttgagatctggaagttcattgtcattttgaacctttctgtgatgtttaattcctttgcttctttttttcattccatgaaatggaacatacactggattt

SEQ ID NO: 7467 - DNA, 379 bp, Glycine max
  Clone ID: LIB3039-054-Q1-E1-F2
gactcaccacttcaaaacactcataacacaaagcacaaagcaaagctcatccttgagttaaaaaatggcagcagcttcttccatggctctctcatccccatccttggctggcaaggccgtgaagctgggcccatcagccccagaagtgggaagggtgagcatgaggaagaccgtcaccaagcaggtctcctcaggaagcccatggtacggcccagaccgagtcaagtacttgggcccattctctggcgagcccccgtcctacctaaccggtgagttcccaggcgactacggctgggacactgctgggctttccgcagacccagaaaccttcgccaagaaccgtgaactcgaagtgatccactccaggtgggccatgctc

SEQ ID NO: 7468 - DNA, 188 bp, Glycine max
  Clone ID: LIB3039-054-Q1-E1-F3
gagggcgatgaagctacatatagacacaatacagagtgagttgttgctccttcgcgacaactctctgccaacatgggtatctccagagactccatccacaatatgcctgccactggtggcaataataatgcctggtggaaaaagataaagtatcaccttggtcgccatgctgctaacaccaagctgtc

SEQ ID NO: 7469 - DNA, 316 bp, Glycine max
  Clone ID: LIB3039-054-Q1-E1-F4
agtcacatgggcatcatcaacatttcgtcgtttcgctgctcattgccttcgctgacacagatggtgcgttgtgaaacgtgttttgggatgaaagtggtatgacgaacggcgtatacgtcgccgaccgtggcaccgtctctgggactgacgtccagtatgctccaacaggagcactcattgacacttatcaccgcaaaaactggtccttttacacggctcacattgcagaattaactgccacattcatcatcgtaaatattaatgtgctcacaatcctatggtacatgcaccacagtgtgctcatagaaaacttcaa

SEQ ID NO: 7470 - DNA, 374 bp, Glycine max
  unsure (1)..(374): unsure at all n locations
  Clone ID: LIB3039-054-Q1-E1-F5
gagccacgtacgcaactgaaaaggaaaaccctaagagatgaagagaactcctatcttgttccctctcttctttcttctttgtgccttcacctcatatctaccttcagccaccgctgatgatgatcatgtgtacgacactgacggcgataagcttcaatacggtgtcaattatttcgtgttgccagtgataagaggaaatggcggtggaatacaagtagcaaaagcaggaaacgaaacttgccctctgactgtggtgcaatctggcaacgagctctctgaggggttaccgataaagattgcatctcgatcagcangagtcgctttcatcacccaaggccagcttttcaagagcattcagttccgtgtgtttccat

SEQ ID NO: 7471 - DNA, 374 bp, Glycine max
  Clone ID: LIB3039-054-Q1-E1-F6
ggcacaagtgagtttgttgatcgagataactagaaacagtgtgatgaaaatgaaggtccttgttttcttcgttgctacaattttggtagcatggcaatgccatgcgtacgatatgttccctctccgaatgaacactggctatggtgcccgtactccggaggtgaaatgcgcaagttggaggcttgctgtggaagcacacaacatctttggctttgagaccattcctgaagagtgcgttgaagcaacaaaggaatacatccatggcgaacaatatagatcagactccagaacagttaaccaacaagcttacttttatgccagagacctcgaagttgatcccaaggacacatttgtgttcagtatagatggcaccg

SEQ ID NO: 7472 - DNA, 378 bp, Glycine max
  Clone ID: LIB3039-054-Q1-E1-F7
ggcacaagtgagtttgttgatcgagataactagaaacagtgtgatgaaaatgaaggtccttgttttcttcgttgctacaattttggtagcatggcaatgccatgcgtacgatatgttccctctccgaatgaacactggctatggtgcccgtactccggaggtgaaatgcgcaagttggaggcttgctgtggaagcacacaacatctttggctttgagaccattcctgaagagtgcgttgaagcaacaaaggaatacatccatggcgaacaatatagatcagactccaaaacagttaaccaacaagcttacttttatgccagagacctcgaagtccatcgcaaggacacatttgtgttcagtatagatgggaccgtact

SEQ ID NO: 7473 - DNA, 372 bp, Glycine max
  Clone ID: LIB3039-054-Q1-E1-F8
ggttgtgcgtcggagctgtctgtgcaaatttgcgttgttcttcgcggcacacctcactcactgaacggtaagtatggcggacaaggctgttacaatccgaacccgaaagttcatgaccaacaggcttctttccaggaagcagtttgtcgttgatgtccttcatccagggagggcaaatgtttccaaggctgaacttaaggagaagctggctaggatgtatgaagtgaaagaccctaatactgtatttgtcttcaaattccgaacacattttggaggtggcaaatccactggatttggtttgatttatgatacagtggagaatgccaagaagtatgagcccaaatacaggcttatcaggaacgggcctgacac

SEQ ID NO: 7474 - DNA, 397 bp, Glycine max
  Clone ID: LIB3039-054-Q1-E1-F9
ggcacaagtgagtttgttgatcgagataactagaaacagtgtgatgagaatgaaggtccttgttttcttcgttgctacaattttggtagcatggcaatgccatgcgtacgatatgttccctctccgaatgaacactggctatggtgcccgtactccggaggtgaaatgcgcaagttggaggcttgctgcggaagcacacaacatctttggctttgagaccattcctgaagagtgcgttgaagcaacaaaggaatacatccatggcgaacaatatagatcagactccaaaacagttaaccaacaagcttacttttatgccagagacctcgaagtccatcccaaggacacatttgtgttcagtatagatggcaccgtactctctaatattccatactac

SEQ ID NO: 7475 - DNA, 370 bp, Glycine max
  unsure (1)..(370): unsure at all n locations
  Clone ID: LIB3039-054-Q1-E1-G1
gactctcacaatgcgaatcctcgtcctgctctctctcgccacccttctcctcttctcctccttctctcccaccttctgcgaccacctcgccgacgacgaggacctcagcttcctcgacgagccctccgccgcgccggagcacgaccaccactacggcgccgatgactccaatttcggcgactttgaggacttcgaggaggacgacgcggaggcgtacaagcagcccgaggtggacgagaaggacgtcgtcgttttgaaggagaagaacttcaccgacgccgtcaagaacaaccgcttcgtcatggtcgagttctacgcgccctggtgcggccactgccangccctcgcgccggagtacgccgccggcgcg

SEQ ID NO: 7476 - DNA, 405 bp, Glycine max
  unsure (1)..(405): unsure at all n locations
  Clone ID: LIB3039-054-Q1-E1-G10
ggttttaggttttcttagtcagacttaccccttgctaccaacactgagcttaaccgagcttcgcaaagatgaatcgggaaaagttaatgaagatggccggttcggttagaactggaggaaagggtactgtgagaagaaagaagaatgctgtccacaagacaacaaccacagatgacaaaaggcttcagagcaccctgaagagaataagggtgaatgccatccctgctattgaagaggtcaatatctttaaggatgacgtanttatccagtttctaaatcccaaagttcaagcaatcaattgctgctaatactttgggtgtcagtggttcaccgcaaacaanagaagttgcaggatatactccctagcattattcaccaattatgaccagataacttggaaaaacc

SEQ ID NO: 7477 - DNA, 405 bp, Glycine max
  Clone ID: LIB3039-054-Q1-E1-G11
ggacacaccgtttgttctattcttaactcaacttctgctacccactctcttcttccaagtccaaccacgcttttctctacagtcatgggcaaggtcaagatcggaatcaacggatttggaagaattggccgtttggttgccagagtcgctctgcaaagagacgatgtggagctcgttgccgttaacgaccctttcattaccaccgattacatgacatacatgtttaaatacgacagtgttcacggacactggaagcatcacgatgtcaccgttaaggacgagaagacccttcccttcggtgacaagcaattcacggtttttggacacaggaaccctgaagaaattccatgggggtcaactggagctgatatcattgttgagtccaccggagtttccaccgataag

SEQ ID NO: 7478 - DNA, 389 bp, Glycine max
  unsure (1)..(389): unsure at all n locations
  Clone ID: LIB3039-054-Q1-E1-G12
gataaccatggcgtctaactctgcttccgctctttacttccttttatgcctatcgcccatcactttgcttctttctgcgtttcgtgctcaagctcaatctcatgctccagctcccactttcaagtactgtgaaaagaatgcagactatgctgtgaaggcgagtggagtggaaatattgcctgaccccgtggagagaggagtgccattcacctttaagatcccagcttatactcctgaaccaattcaaagcggggacttgttatatgaaatttcttatgctggaatagaagcacaacctgctacatttctccatgatctctgtgangaagcaccatgcccagttacctgcaggcaactttgtgctcgttcacaccgaattattgcctccg

SEQ ID NO: 7479 - DNA, 366 bp, Glycine max
  unsure (1)..(366): unsure at all n locations
  Clone ID: LIB3039-054-Q1-E1-G3
gacttttctcagctgctgttcctgcgcgtgaacaagcctcaggtaagccaaagccatggttaagcataacaatgttatccccaacggacacttccgtaagcactggcagaactatgtgaagacctggttcaatcagccagcacggaagacaagaagacggttggctcgtcagaagaaagctgtgaagattttccccagacctacagctggacctcttagacccattgtacatggtcaaactttgaaatacaacatgaaagtgagagctggaaggggattttcncttgaagaactcaaggcagcagggattcccanaaagcttgcaccaacaattggtattgctgttgatcatcgccgcaagaaccg

SEQ ID NO: 7480 - DNA, 366 bp, Glycine max
  Clone ID: LIB3039-054-Q1-E1-G4
ggcacaagtgagtttgttgatcgagataactagaaacagtgtgatgaaaatgaaggtccttgttttcttcgttgctacaattttggtagcatggcaatgccatgcgtacgatatgttccctctccgaatgaacactggctatggtgcccgtactccggaggtgaaatgcgcaagttggaggcttgctgtggaagcacacaacatctttggctttgagaccattcctgaagagtgcgttgaagcaacaaaggaatacatccatggcgaacaatatagatcagactccataacagttaaacaccaagcatacttttaagccatataacgcgaatttacgcgaagtccatcacatcgacatatttatat

SEQ ID NO: 7481 - DNA, 367 bp, Glycine max
  Clone ID: LIB3039-054-Q1-E1-G5
ggagcaaaaccctaatccctatttttcttcctcagtagtgtcatttacgcttctcttctctgcagcaactatgcctaaccctaaggtcttcttcgacatgaccatcggcggtcaatctgctggccgcatcgtgatggagctctacgccgacgtcactccccgcaccgccgagaacttccgcgcgctttgcaccggcgagaagggcgtagggcggagcggcaagcccctccaccacaagggctcgtccttccaccgcgtgatcccgagtttcatgtgtcagggtggcgacttcaccgccggaaacggaaccggcggcgagtcgatttatggcgccaagttcgccgacgagaacttcgtgaagaagcac

SEQ ID NO: 7482 - DNA, 380 bp, Glycine max
  Clone ID: LIB3039-054-Q1-E1-G6
ggcaagagtttgttgtgagctataagctagtttatcgtgaggagaatatgaagttgtttgttttctttgttgctgcagtagttttggtagcatggccatgccatggcgcaggctaccaaaggttccctctccgaatgaaaactggctatggtgagcgttcttcggaggtaaaatgcgcaagttttaggcttgctgtggaagcacacaacatccgagcctttaaaaccattcctgaagagtgcgttgaaccaacaaaggactacattaatggcgaacaatttagatcagactctaaaacagttaaccaacaagctttcttttatgctagtgaacgcgaagtccatcacaacgacatatttatattcggcatagataacacc

SEQ ID NO: 7483 - DNA, 361 bp, Glycine max
  Clone ID: LIB3039-054-Q1-E1-G7
ggacctgaaagtgttggaaacaacaaaaccaccgcacagggatcgtgttgagtttgagaatggagaagacagcagttaaagttcgatgccagaggattgggtgcgacgccatgttctccgaggacgacaaccccgacggttgctgtcgataccatgattcgggacctatatttcatgacgggacaaaagaatggagttgttgcaagaaaagaagtcatgattttagcttgtttttggaaattccaggatgcaagacaggaaaacatacaacagttaagcaagtaattacaccagtgaagaagaacaccatgccttctccaaccgctgtttgttcaaccaatgcatcatcaaaggactcctg

SEQ ID NO: 7484 - DNA, 379 bp, Glycine max
  Clone ID: LIB3039-054-Q1-E1-G8
ggcacaagtttgttgagatagctagaagcaataagatgaaaatgaaagtgcttgttttgtttgttgctacagttttggtagcatatgaatgccatggctcagactaccagaagttccctctccaaatgaaaactgggtttggtgggcaatacagcaatgaggtggcatgtgccagttggaggcttggcgtggaagcaaacaacgtagtcaagtggcaaactgttcctgcagcttgcggagagtacatagctgactacgttctaggagaccaatatagatcagattccaaaacagttaaccaacaagcttatttctatgctaaatccctcaaactcaccaacaaagatgtctttgtcttggacgttgacgacactactct

SEQ ID NO: 7485 - DNA, 397 bp, Glycine max
  Clone ID: LIB3039-054-Q1-E1-G9
gaagtttgttgagatagctagaagcaataagatgaaaatgaaagtgcttgttttgtttgttgctacagttttggtagcatatgaatgccatggctcagactaccagaagttccctctccaaatgaaaactgggtttggtgggcaatacagcaatgaggtggcatgtgccagttggaggcttggcgtggaagcaaacaacgtagtcaagtggcaaactgttcctgcagcttgcggagagtacatagctgactacgttctaggagaccaatatagatcagattccaaaacagttaaccaacaagcttatttctatgctaaatccctcaaactcaccaacaaagatgtctttgtcttggacgttgacgacactactctctctaatctccagtattttgct

SEQ ID NO: 7486 - DNA, 368 bp, Glycine max
  unsure (1)..(368): unsure at all n locations
  Clone ID: LIB3039-054-Q1-E1-H1
ggtctaaggggtgccctgagatcacattgaacaatggtgaaggctgtggccgttcttggcagcagtgagggtgtcactggaactattcacttcgttcaagagggaagtggtccaaccaccgtaactggatctcttgctggtcttaagcctggtctccatggtttccatgtccatgccttgggggacactaccaatggttgcctctcaactggatcacatttcaatcctaataacaaggagcatggtgcccctgaagatgagaatcgtcatgctggtgatcttgggaatgttaatgtcggtgatgatggtactgtcagcttcactattactgacagccagattcctctcactgggacanacaacatcat

SEQ ID NO: 7487 - DNA, 320 bp, Glycine max
  unsure (1)..(320): unsure at all n locations
  Clone ID: LIB3039-054-Q1-E1-H10
gcacaagtgagtttgttgatcgagataactagaaacagtgtgatgaaaatgaaggtccttgttttcttcgttgctacaattttggtagcatggcaatgccatgcgtacgatatgttccctctccgaatgaacactggctatggtgcccgtactccggaagtgaaatgctcaaattggcagcttgctgtggcagcacacaacatctttggctttgagaccattcctgaagagtgcgttgaagcatcaaaggaatacatccatggcgaacaatatagatcagactccanaacagtttaacaacaagcttacttttatgccag

SEQ ID NO: 7488 - DNA, 389 bp, Glycine max
  Clone ID: LIB3039-054-Q1-E1-H11
ggtgctctgctcgtgcctctagggttatcatttctccatttccattttctctctcacttttcaagaatcgtaagctatgggaaagtcttacccaactgtgagtgctgattaccagaaggccgttgagaaggcgaagaagaagctcagaggcttcatcgctgagaagagatgcgctcctctaatgctccgtttggcatggcactctgctggaacctttgacaagggcacgaagaccggtggacccttcggaaccatcaagcacccctgccgaactggctcccaacgctaacaacggtcctgaaaacgctgttaaggtttttggagcactcaaagcggagttccctattttgagctacgccgatttctaccagttggctggcgttgttgcc

SEQ ID NO: 7489 - DNA, 346 bp, Glycine max
  unsure (1)..(346): unsure at all n locations
  Clone ID: LIB3039-054-Q1-E1-H12
aagacctcaacttcaacaactgatcaagataagggtggtgacaacaagagtaagaagaagtggaagctatggagggcttcttcagaagggtccatgaagaaagttggtggtggtggtggtggtgctgctgctgcatctgattcttcccttacttatgcggtggccgtgatggttcccaaagatttcaagctcatcaagcaggaatgggctgccattcgcattcaggctgtgtttcgagccttcttggctagacgagctttgagggctttgagggcagtggtaaggctacaagctatttttagaggccggctagtcangaagcaagcagctgttactctaagatgca

SEQ ID NO: 7490 - DNA, 363 bp, Glycine max
  Clone ID: LIB3039-054-Q1-E1-H2
ggaagaaggcaaatcgcgaagactagatctgatctgagagaatggctcctcggtctagcagcaaggacgcccaagaccttttccgcgctctttggtctgcttatgctgcaacccccactaatctcaagatcattgatctctatgtcatctatgccgtattcaccgctttcatccaggttgtttacatggctttggttggatcatttccatttaactccttcctatcaggagtactttcttgtgtaggaactgctgttcttgctgtttgtctcaggattcaagtgaataaagagaataaggaattcaaggatcttgcacctgagcgcgcttttgcggattttgttccctgtaatttggtgcttc

SEQ ID NO: 7491 - DNA, 358 bp, Glycine max
  Clone ID: LIB3039-054-Q1-E1-H3
ggcacaagtgagtttgttgatcgagataactagaaacagtgtgatgaaaatgaaggtccttgttttcttcgttgctacaattttggtagcatggcaatgccatgcgtacgatatgttccctctccgaatgaacactggctatggtgcccgtactccggaggtgaaatgcgcaagttggaggcttgctgtggaagcacacaacatctttggctttgagaccattcctgaagagtgcgttgaagcaacaaaggaatacatccatggcgaacaatatagatcagactccaaaacagttaaccaacaagcttacttttatgccagagacctcgaggtccatccaaagacacatttgtgttca

SEQ ID NO: 7492 - DNA, 353 bp, Glycine max
  Clone ID: LIB3039-054-Q1-E1-H4
gaccacgagaaagtatctttctctaatttgattgattttttgtgttttattccatcgagatttgtgttggtgaaattttgctgctatctcttcaatcggctttattgtccactatacgttcaaatccatgattgttaggatggatccctctcatcatattgaacaacaagaagacgacgagtgggacactgaaggatttgtgattccaagtttgggaattgaagactcagatcaagataaacctcatgttcttgatatagaatcttctgattctgcatcaaatgctaagaaggatgaaaacatctatttgggtccgcatggagcgcatccttcactagcaaagcagcaagagc

SEQ ID NO: 7493 - DNA, 348 bp, Glycine max
  Clone ID: LIB3039-054-Q1-E1-H5
ggcacaagtttgttgagatagctagaagcaataagatgaaaatgaaagtgcttgttgtgtttgttgctacagttttggtagcatatgaatgccatggctcagactaccagaagttccctctccaaatgaaaactgggtttggtgggcaatacagcaatgaggtggcatgtgccagttggaggcttggcgtggaagcaaacaacgtagtcaagtggcaaactgttcctgcagcttgcggagagtacatagctgactacgttctaggagaccaatatagatcagattccaaaacagttaaccaacaagcttatttctatgctaaatccctcaaacttcacaacaaagatg

SEQ ID NO: 7494 - DNA, 381 bp, Glycine max
  unsure (1)..(381): unsure at all n locations
  Clone ID: LIB3039-054-Q1-E1-H6
ggagaacacaaacagcagcgtcttggtttgtgagagagacagaggcacagagagaaaatggtttcggggtcaggaatctgcgcgaagagggtagttgtggacgcgcggcaccacatgctggggaggctggcatcgatcgtggcgaaggaacttctgaatgggcagaaggtggtggtggtgcgctgcgaggagatttgcatctccggtgggctcgtcaggcagaagatgaagtacttgcgtttcctccgcaagcgcatgaacaccaagccctctcacggccccatccatttccgtgcacccggcaagatcttctggcgcaccgttcgtgggatgatnacacacaagacaaagcgcggggaagctgctcttgcacgactgaag

SEQ ID NO: 7495 - DNA, 337 bp, Glycine max
  Clone ID: LIB3039-054-Q1-E1-H7
gagtttggtataactttagccgaggtcaggaggagcactagctaagttcacaatttcaaaatggctacgggactaaagaagcatttgaaaaggctcaatgctcctaagcattggatgcttgacaaactgggtggtgcatttgcgcctaaaccctcatctggaccacacaaatcgagggagtgcctccccctcattcttattctgcgaaaccggctgaagtatgctctgacataccgtgaagtcattgctattctgatgcagcgccatgttcttgttgatggcaaagtcaggactgacaagactttacctgctggtttcatggatgttgtttcaatcc

SEQ ID NO: 7496 - DNA, 371 bp, Glycine max
  Clone ID: LIB3039-054-Q1-E1-H8
gatccaatcgaaaaaaattgataacatcacacagcattagtatgtatcagcaacaagggtcagatccaacaaagcaatcaccggcaaccggttttccggtgagctatagcaattcaacaacgtattcgaccaacgaggcttcctacgctccagtcccacctccccagcccaaacctcttgtcgattggtccaccggcctctgtgactgcttctccgaatgtggaaactgttgcatgacgtgttggtgtccatgtgttacctttggccgagttgcagaaattgttgacaagggatccacatcatgtggtgctagtggggctctgtatacgctgatttgctgtgtcattggctgtggctgcctatactcttgc

SEQ ID NO: 7497 - DNA, 403 bp, Glycine max
  Clone ID: LIB3039-054-Q1-E1-H9
ggcaagagtttgttgtgagctataagctagtttatcgtgaggagaatatgaagttgtttgttttctttgttgctgcagtagttttggtagcatggccatgccatggcgcaggctaccaaaggttccctctccgaatgaaaactggctatggtgagcgttcttcggaggtaaaatgcgcaagttttaggcttgctgtggaagcacacaacatccgagcctttaaaaccattcctgaagagtgcgttgaaccaacaaaggactacattaatggcgaacaatttagatcagactctaaaacagttaaccaacaagcttttcttttatgctagtgaacgcgaagtccatcacaacgacatatttatattcggcatagataacaccgtactccctaatatcccatact

SEQ ID NO: 7498 - DNA, 401 bp, Glycine max
  Clone ID: LIB3039-053-Q1-E1-E3
ggaaaccgagaagaagaagatggagatgtatcagatctggagcaggagaatagcgttgggagcgttcgcgtttgttctgcttttccgatcggcctcagcagacgacgtcgttgtgctctctgaagataacttcgagaaggaagttggtcaggacagaggagctctcgttgagttctatgctccttggtgtggacactgcaaaaagcttgctccagaatatgaaaagcttggtagcagcttcaagaaagccaaatctgttttaatcggcaaggttgactgtgatgagcacaagagtttgtgcagcaaatatggagtctctggggatccacaaaattacattgggttcccaaagggatctcttgaacccaaaaagtatgaacggccacgcactgctgattcac

SEQ ID NO: 7499 - DNA, 248 bp, Glycine max
  Clone ID: LIB3039-051-Q1-E1-F6
gatcacactcaacatcgacacttttcacataaaggaaaaaagaaaaagaaataaagaattcgttccattattatggcctcccttgttccttatcatttccaatttccacccttctttctttctctctccgtttcccctttagacctctctctcacttgaaactccacaaccccattttcctttcctatgaccctattccaaatcaccaattctaattccattcttcaagtgttcaattgaattcgtga

SEQ ID NO: 7500 - DNA, 314 bp, Glycine max
  Clone ID: LIB3039-051-Q1-E1-F7
ggcacaagtgagtttgttgatcgagataactagagacagtgtgatgaaaatgaaggtccttgttttcttcgttgctacaattttggtagcatggcaatgccatgcgtacgatatgttccctctccgaatgaacactggctatggtgcccgtaatccggaggtgaaatgcgcaagttggaggcctgctgtggaagcacacaacatctttggctttgagaccactcctgaagagtgcgttgaagcaacaaaggaatacatccatggcgaacaatatagatgagactccagaacagttaaccaagaagcttactttt

SEQ ID NO: 7501 - DNA, 158 bp, Glycine max
  Clone ID: LIB3039-051-Q1-E1-F8
gacagcgaaacagagagtgatttcagtgagtgatcggtgttcacttgatctcatcataatcgtcagcgtcaattgaagaagatgccgatcagaaacatcgccgtcggaaggcctgaagaggcgactcaccccgacacgttgaaggcggctttggctga

SEQ ID NO: 7502 - DNA, 225 bp, Glycine max
  Clone ID: LIB3039-051-Q1-E1-F9
gaggtgcaagagtttgttgtgagctataagctagtttatcgtgaggagaatatgaagttgtttgttttctttgttgctgcagtagttttggtagcatggccatgccatggcgcaggctaccaaaggttccctctccgaatgaaaactggctatggtgagcgttcttcggaggtaaaatgcgcaagttttaggcttgctgtggaagcacacaacatccgagccttt

SEQ ID NO: 7503 - DNA, 216 bp, Glycine max
  Clone ID: LIB3039-051-Q1-E1-G1
agccacctgcagcctctcctcctccggcgactcctccaccggcaactcctcctccggcgccggttcccgtgagctctccccccgctcccgtgccggtgagttctccacccgctcctgttccggtggcggcgccaaccacccctgtggctccctctccggctccgaagcataagaagaagggcaagaagcacggtgctccggctccttcaacgttgt

SEQ ID NO: 7504 - DNA, 319 bp, Glycine max
  Clone ID: LIB3039-051-Q1-E1-G10
ccacgcgtcagcacacgcgtccgacagaaggggaaggtgcacgagtttgttgtgagctataagctattttatcgtgaagagaatatgaagttgtttgttttctttgtgtgctgcagtacttctggtagcatggccatgccatggcgcaggctaccaaatgttccctctccgaatgaaaactggctatggtgaacgttcttcggaagtaaaatgcgcaagttttaagcttgctgtggtaccatacaacatccgagcctttaaaaccattccatgatactgcgttaatgcatacaaggactacattaatggcgaacaattt

SEQ ID NO: 7505 - DNA, 302 bp, Glycine max
  Clone ID: LIB3039-051-Q1-E1-G11
ggcacaagtgagtttgttgatcgagataactagaaacagtgtgatgaaaatgaatgtccttgttttcttcgttgctacaattttggtagcatggcaatgccatgcgtacgagatgttccctctccgaatgaacactggctatggtgcccgtactccggacgtgaaatgcgcaagttggaggcttgctgtggaagcacacaacatctttggctttgagaccattcctgaagagtgcgttgaagcaacaaaggaatacatccatggcgaacaatataaatcagactccaaaacagttaaccaac

SEQ ID NO: 7506 - DNA, 293 bp, Glycine max
  Clone ID: LIB3039-051-Q1-E1-G12
ggaaatcgagaagaagaagaagaagaagatggagaagtatcagatctggagcaggagaatagcgttggcagcgtttgcgtttgctctgctgttccaatcggcctcagcagacgacgtcgttgtgctctctgaagataacttcgagaaggaagttggtcaggacagaggagctctcgttgagttctatgctccttggtgtggacactgcaaaaagcttgctccagaatatgaaaagcttggtagcagcttcaagaaagccaaatctgttttaattggcaaggttgactgtgatg

SEQ ID NO: 7507 - DNA, 343 bp, Glycine max
  Clone ID: LIB3039-051-Q1-E1-G2
cggggcacaagtttgttgagatagctagaagcaataggatgacaatgaaatgcttgttttgtttgttgctacagttttggtagcatatgaatgccatggctcagactaccagaagttccctctccaaatgaaaactgggtttggtgggcaatacagcaatgacgtggcatgtgccacttggaggcttggcgtggaagcaaacaacgtactcaagtggcaaactgttcctgcagcttgcggagagtacatagctgactacgttctacgagaccaatatagattagattccaaaacagttaaccaacaagcttatttctatgctaaatccctcaaactcaacaac

SEQ ID NO: 7508 - DNA, 325 bp, Glycine max
  Clone ID: LIB3039-051-Q1-E1-G3
gaaggtgcaagagtttgttgtgagctataagctagtttatcgtgaggagaatatgaagttgtttgttttctttgttgctgcagtagttttggtagcatggccatgccatggcgcatgctaccaaaggttccctctccgaatgaaaactggctatggtgagcgttcttcggaggtaaaatgcgcaagttttatgcttgctgtggaagcacacaacatccgagcctttaaaaccattcctgaagagtgcgttgaaccaacatacgactacattaatggcgatcaatttagatcagactctaaaacagttatacaacaagctttcttt

SEQ ID NO: 7509 - DNA, 356 bp, Glycine max
  unsure (1)..(356): unsure at all n locations
  Clone ID: LIB3039-051-Q1-E1-G5
ggcacaagtgagtttgttgatcgagataactagaaacagtgtgatgaaaatgaaggtccttgttttcttcgttgctacaattttggtagcatggcaatgccatgcgtacgatatgttccctctccgaatgaacactggctatggtgcccgtactccggaggtgaaatgcgcaagttggaggcttgctgtggaagcacacaacatctttggctttgagaccattcctgaagagtgcgttgaagcaacaaaggaatacatccatggcgaacaatatagatcagactccanaacagttaaccaacaagcttacttttatgccagagacctcgaagtcaatccaaggacacatttgtgtt

SEQ ID NO: 7510 - DNA, 288 bp, Glycine max
  Clone ID: LIB3039-051-Q1-E1-G6
gacaccttcgaattttcttttccttcactttcccgagaaaaaaaagacactctttcactttcttgactacggtctcacttcgacatggctcgtactaagcaaactgctcgcaagtccaccggcggcaaggcgccacgtaagcagttggcgaccaaggccgcccggaagtccgctcccgcgaccggaggagtgaagaagccccaccgcttcaggccgggaaccgtggcgctgagggaaatcagaaagtatcagaagagcaccgagcttctcatcaggaagcttccgttt

SEQ ID NO: 7511 - DNA, 265 bp, Glycine max
  Clone ID: LIB3039-051-Q1-E1-G8
ggagctgacaccgagaagaagaagatggagatgtatcagatctggaacaggagaatagcgttgggagcgttcgcgtttgttctgcttttcctatcggcctcagcagacgacgtcgttgtgctctctgaagataacttcgagaaggaagttggtcaggacagaggagctctcgttgagttctatgctccttggtgtggacactgcaaaaagcttgctccagaatatgaaaagcttggtagcagcttcaagaaagccaaatctgttt

SEQ ID NO: 7512 - DNA, 293 bp, Glycine max
  Clone ID: LIB3039-051-Q1-E1-G9
gagtgcacaagtgagtttgttgatcgagataactagaaacagtgtgatgaaaatgaaggtccttgttttcttcgttgctacaattttggtagcatggcaatgccatgcgtacgatatgttccctctccgaatgaacactggctatggtgcccgtactccggaggtgaaatgcgcaagttggaggcttgctgtggaagcacacaacatctttggctttgagaccattcctgaagagtgcgttgaagcaacaaaagaatacatccatggcgaacaatatagattagactccaaaa

SEQ ID NO: 7513 - DNA, 381 bp, Glycine max
  unsure (1)..(381): unsure at all n locations
  Clone ID: LIB3039-051-Q1-E1-H1
gacacttcanaatcctctggtaacccttattttatctattctctctctttcttttgtgttctaagcagctagaagcaatggagaggaaaagaagccatgcctctttcaccatgtttgcaatgcttgttggagtgatctctcagagccttgtcattcctgtagtatccaccactgttgaagatcagaagaactactacaccccagatccacatgctggaagtcncccctcaggtttctccgattctctgtgctcacacagtagtactcctccatctcatggccatggaagctctccaccctcacatcatcacagtagtccaagtactccatcaacaccctcaagtggaaactgtggattcatcactcnacaacatcatgatc

SEQ ID NO: 7514 - DNA, 307 bp, Glycine max
  Clone ID: LIB3039-051-Q1-E1-H10
ggcacaagtgagtttgttgatcgagataactagaaacagtgtgatgaaaatgaaggtccttgttttcttcgttgctacaattttggtagcatggcaatgccatgcgtacgatatgttccctctccgaatgaacactggctatggtgcccgtactccggaggtgaaatgcgcaagttggaagcttgctgtggaagcacacaacatctttggctttgagaccattcctgaagagtgcgttgaagcaacaaaggaatacatccatggcgaacaatatagattaaactccaaaacagtttatcaacaagct

SEQ ID NO: 7515 - DNA, 277 bp, Glycine max
  Clone ID: LIB3039-051-Q1-E1-H11
gacagaagacagagtgagacgcttctcacgatggagggaggagtatcctacgcgcgcatgcctcgggtcaaaatccgcgagctgaaggacgactacgccaagttcgagctccgcgacaccgacgcgagcatcgccaacgcgctgcggcgcgtgatgatcgcggaggtgccgacggtcgccatcgacctcgtggagatcgaggtcaactcctcggtgctcaatgacgagtttatcgctcaaaggctgggcctcatccccctcactagcgagcgcgcca

SEQ ID NO: 7516 - DNA, 281 bp, Glycine max
  Clone ID: LIB3039-051-Q1-E1-H12
gagtgctttctatttgttcattttgttgttcgaagccaaaaccctagcagccggcgagaatggcagacgttgaggttgatgcggcggcagcggcaggggcagcgcagccgaagaagagaacgttcaagaaattcagcttcaggggcgtggatctggacgcgcttctggacatgtccaccgacgaactggtgaagatgttcagtgcgcgtgcacgtagaaggttccagagaggtctgacgaggaagcccatggccttgattaagaagctccgcaaagctaaa

SEQ ID NO: 7517 - DNA, 267 bp, Glycine max
  unsure (1)..(267): unsure at all n locations
  Clone ID: LIB3039-051-Q1-E1-H2
ggcaaacctgagttgcgtcccaagttgctcctcctccttttttcctttccttcaacctcaaaatttctcactctctttatcttcaccttttcagtttaaagcttcagatcacaacagattcaccattcacctcaacactttctcttcacaaggcaaatctaacaagaaaaagtagtctctgaagccgattcagtgtcntgtgaatttggaattgggagtgaatttagatctaaaaagccatagcaatgtcttttatcggtacccagc

SEQ ID NO: 7518 - DNA, 330 bp, Glycine max
  Clone ID: LIB3039-051-Q1-E1-H5
ggaacctttgcattctattcattcaagattcagcaagtgcgttttggaagcagagaccgaaatacttcgagttttctgaagttgttgttggttgttgattaagatggcccgtacaaagcaaactgctcgtaagtcaactggaggaaaagctcccaggaagcagcttgcaaccaaggctgcacgtaagtctgcaccaacaactggtggtgtgaagaagcctcatcgttatcgccctggaactgttgctcttcgtgagattaggaaataccagaagagcactgagctcctaatcaggaagcttcctttccagaggttggttcgtgaaattgc

SEQ ID NO: 7519 - DNA, 198 bp, Glycine max
  Clone ID: LIB3039-051-Q1-E1-H6
gacgattactagcaagtgaaaaagcaattaactaagcatatatagcgtgtaagacagtgagaaaaaaagtgttgtgtagagagaaatggctaagtggtgcatcttggtggttcttgcccttgtcgtggttgcaagtgccagaaacatgcccaatgacgcacgtttggacgaccagaagaacttcctcgggtatgggtt

SEQ ID NO: 7520 - DNA, 343 bp, Glycine max
  unsure (1)..(343): unsure at all n locations
  Clone ID: LIB3039-051-Q1-E1-H7
agaaggggagagtggtggggtgtgcagaagagcgtcgcagttgtaaccctaatcagaagaagcgcagcttcaagcgagtgacagccaccagccatgggtcgtatgcacagccgcggtaagggtatatcctcttctgctttgccctacaaaaggacacctcctagctggctcaagatctcttcgcaagatgtcgaagaaaatatctgcaagtttgcgaagaaaggtttgaccccgtctcagattggtgtcattctcagagattctcacggtattgctcaggtcaatagcgtcactggcagcanaatccttcgcatcctcaaagctcacggacttgcgcctgaaa

SEQ ID NO: 7521 - DNA, 288 bp, Glycine max
  Clone ID: LIB3039-051-Q1-E1-H8
atactttccactttcactttcaaacatcacaaacactttttaacgttgtttgattttggtgcaatctttacttcacaacttcctcgtacttctgagaatcatcatcaaaaaccccaaactcatgatcatgatgatgatgaataggttccttccactctttgtgttcgcattgttattcatgtggtcggttcacgcagacaatgctcctgccccttcacccaagtcatcaccctcgtcgccgacggccaaaccaccctctccggcgacccatccggcgcctcctgcaaa

SEQ ID NO: 7522 - DNA, 254 bp, Glycine max
  Clone ID: LIB3039-051-Q1-E1-H9
cagaaacatcgccgtcggaaggcctgaagaggcgactcaccccgacacgttgaaggcggctttggctgagttcatctcaaccttcatcttcgtgttcgccggctcaggctccggcatcgcctacaacaagctcaccgacaacggcgctgccacccctgccggcctcatctccgcctccatcgcccatgcattcgccctcttcgtcgccgtctccgtcggcgccaacatctccggcggccacgtcaaccccgccg

SEQ ID NO: 7523 - DNA, 338 bp, Glycine max
  Clone ID: LIB3039-052-Q1-E1-A1
ggagagagagagaaggcaagatgtcgaagagaggacgccgtggctcggccgggaacaagttccggatgtcgctgggtctgccggtggcggcgacggtgaactgcgccgacaatacgggggcgaagaacctctacatcatatcggtgaaagggatcaaagggcgtttgaaccgtctcccctcggcttgcgttggcgacatggtgatggccaccgtgaagaaagggaaacccgatctgaggaagaacgttttgccagctgtcattgttcgccagcgcaagccatggcgccgaaaggacggcgtctacatgtatttcgaagataatgccggtgttattgtc

SEQ ID NO: 7524 - DNA, 325 bp, Glycine max
  Clone ID: LIB3039-052-Q1-E1-A10
gaaggtgcaagagtttgttgtgagctataagctagtttatcgtgaggagaatatgaagttgtttgttttctttgttgctgcagtagttttggtagcatggccatgccatggcgcaggctaccaaaggttccctctccgaatgaaaactggctatggtgagcgttcttcggaggtaaaatgcgcaagttttaggcttgctgtggaagcacacaacatccgagcctttaaaaccattcctgaagagtgcgttgaaccaacaaaggactacatttatggggaacaatttaaattagactctaaaacagtttaacaacaagctttcctt

SEQ ID NO: 7525 - DNA, 204 bp, Glycine max
  Clone ID: LIB3039-052-Q1-E1-A11
gactcaagcacaacatctctatcgagtaacttaactatgaagcctaccctactattatccctttccttcctgcctctctttgctttcctggctctttcagaagatgttgaacaagttgtggacataagtggcaaccccattttcccaggtggcacatattacattatgccatcaacttggggcgctgccagtggtggattgaaa

SEQ ID NO: 7526 - DNA, 330 bp, Glycine max
  Clone ID: LIB3039-052-Q1-E1-A12
ggaacctttgcattctattcattcaagattcagcaagtgcgttttggaagcagagaccgaaatacttcgagatggcccgtacaaagcaaactgctcgtaagtcaactggaggaaaagctcccaggaagcagcttgcaaccaaggctgcacgtaagtctgcaccaacaactggtggtgtgaagaagcctcatcgttatcgccctggaactgttgctcttcgtgagattaggaaataccagaagagcactgagctcctaatcaggaaacttcctttccaaaaggtggttcgtgaaattggccaagaattcaagaatgattcgcggttccaaa

SEQ ID NO: 7527 - DNA, 389 bp, Glycine max
  Clone ID: LIB3039-052-Q1-E1-A2
gattatatttgagttcaaacatatcaaagccatggccacctcgaacttctctaatgatctctccgtctccctagccttctttttggtgctacataccaaagcacactcgaccgataccgtttctttcaccttcaacaagttcaacccagtcgatccaaacattatgctccaaaaagatgctagtatttcatcctctggggtgttacaactcaccaaagttggcagcaaccgcttgcccacctcgggatctctcggtcgtaccctttacgctgccccaatccagatttgggacagcgaaaccggcaatgtatccagctgggctacatcctttaaattcaacattttcccaaccaaacaaatcattctcacctgacgggcttgccttcttc

SEQ ID NO: 7528 - DNA, 294 bp, Glycine max
  Clone ID: LIB3039-052-Q1-E1-A3
gattatatttgcgttgaaacatgtcaaagccatggccacctccaacttctctaatgatctctccgtctccctagccttcgttttggtgctacatagcaaagcacactcgaccgataccgtttctttcaccttcaacaagttcaatccagtcgatccaaacattatgctccaatatgatgctagtatttcatcctctgaggtgttacaactcactaaagttggcaccaacggcttgcccacctcgggatctctcggtcgtgccctttacgctgccccaatccagatttgggacag

SEQ ID NO: 7529 - DNA, 302 bp, Glycine max
  Clone ID: LIB3039-052-Q1-E1-A4
ggcacaagtgagtttgttgatcgagataactagaaacagtgtgatgaaaatgaaagtccttgttttcttcgttgctacaattttggtagcatggcaatgccatgcgtacgatatgttccctctccgaatgaacactggctatggtgcccgtactccggaggtgaaatgcgcaagttggaagcttgctgtggaagcacacaacatctttggctttgagaccattcctgaagagtgcgttgaagcaacataggaatacatccatggcgaacaatatacatcagactccaaaacagttaaccaac

SEQ ID NO: 7530 - DNA, 359 bp, Glycine max
  Clone ID: LIB3039-052-Q1-E1-A5
gaaggtgcaagagtttgttgtgagctataagctagtttatcgtgaggagaatatgaagttgtttgttttctttgttgctgcagtagttttggtagcatggccatgccatggcgcaggctaccaaaggttccctctccgaatgaaaactggctatggtgagcgttcttcggaggtaaaatgcgcaagttttaggcttgctgtggaagcacacaacatccgagcctttaaaaccattcctgaagagtgcgttgaaccaacaaaggactacattaatggcgaacaatttagatcagactctaaaacagttaaccaacaagctttcttttatgctagtgaacgccaagttcatcaaaacgaca

SEQ ID NO: 7531 - DNA, 269 bp, Glycine max
  Clone ID: LIB3039-052-Q1-E1-A6
ggacacatcactctccttacactcacaacagagttcacacagcgcagctcatcctgtcgtcagaattcggcatcagcttcctccatggctctcgcaaccgcacccatggctggtatggtcgttaatctggtcccatcagccgcagaagtgagaatggtgaacatgatgaagactgtcatcaagcaggtctcctcagggaacccatggtacggcccagaccgattcgcctacgtgggcacattctctggttagctcccgtcctacctaac

SEQ ID NO: 7532 - DNA, 258 bp, Glycine max
  Clone ID: LIB3039-052-Q1-E1-A7
ggcacaagtgagtttgttgatcgagataactagaaacagtgtgatgaaaatgaaggtccttgttttcttcgttgctacaattttggtagcatggcaatgccatgcgtacgatatgttccctctccgaatgaacactggctatggtgcccgtactccggaggtgaaatgcgcaagttggaggcttgctgtggaagcacacaacatctttggctttgagaccattcctgaagagtgcgttgaagcaacaaaggaatacat

SEQ ID NO: 7533 - DNA, 335 bp, Glycine max
  Clone ID: LIB3039-052-Q1-E1-A8
gaccaatgtcgtatcttgactaccgaggatttgctagttgctaccttgagacgcaagcctctctatggttctctctataaatagtggatctctcttcatccccacattcacttttgatttgattcttttccccactttcagaacagcagcaacaaggtatagagagagagagagagagagagccaaaataaaaacaaactagtactcaacaaaaagagaaagagaaacctcttaaacacgcacccttaattcctacctcaaagaaagtactactcttcaaaaattttctattcactgaagaaggatctttgcacttgcacttgcagccatctatc

SEQ ID NO: 7534 - DNA, 178 bp, Glycine max
  Clone ID: LIB3039-052-Q1-E1-A9
ggaaacagatagtgatttcagtgagtgatcggtgttcacttgatctcatcataatcgtcagcgtcaactgaagaagatgccgatcagaaacatcgccgtcggaaggcctgaagaggcgactcaccccgacacgttgaaggcggctttggctgagttcatctcaaccttcatcttcgtg

SEQ ID NO: 7535 - DNA, 394 bp, Glycine max
  Clone ID: LIB3039-052-Q1-E1-B1
ggctcacgcgtcaggcaagaagacgacagaaggggaccgcaactgaaattagggttttttgcttccaaccctctgagtctgaactgaaattttttattttttccataatgtttgttctgaattaaaattatagcagaaacgccatagtgcgtgtttgcccatccttttttctcccgaaaaccctttttctctgttgatttggggggacacagtagcgactaaatctcttctgaaaatttgatcttgatttctgggtttgcgttgttatgctgattgatgaaatgggtgtgtgttatgtttaaccgtgatgagccctacagacctgtaatgattttgcggctatgatcgcaatcattaatgaacatctaagggactgagttatgtttgtatttgt

SEQ ID NO: 7536 - DNA, 269 bp, Glycine max
  Clone ID: LIB3039-052-Q1-E1-B11
gactgcgaaccagtagggactcccattccgactcttagccgccgatctctcagggcttgcatcttctcaggtaagctgtgaagatgtacacatcaaggaagaaaatccacaaggataaggatgctgaaccaactgaatttgaagagtcagttggacaggcattgtttgatctggaaaataccaatcaggagcttaaaagtgatctgaaggatttatacataaactcagccgtgcaagttgatgtttctggaaaccgcaaggctgttgtt

SEQ ID NO: 7537 - DNA, 305 bp, Glycine max
  Clone ID: LIB3039-052-Q1-E1-B12
ggcagttcaattccaatatattccattctctctgtgtatttccctacctctcccttcaagatgcagatcttcgtcaagaccctcaccggcaagaccatcacccttgaggtggaaagctctgacaccatcgacaacgtcaaggccaagatccaggacaaggaaggaatccccccggaccagcaacgtctcattttcgccggaaagcaacttgaggacggccgtacccttgctgactacaacattcagaaggagagtactcttcacctcgtccttcgtctccgttgtggcatgcaaattttcgtcaa

SEQ ID NO: 7538 - DNA, 336 bp, Glycine max
  Clone ID: LIB3039-052-Q1-E1-B2
acgcatcagtcagctggcagaaaacaaaagacagggggagggctttctaatcactcttactaattcacaactcaactctgtatgctcatcttctctctttcaaggtattatgattctaagatgtgaaacaccttccaatgtaactcagaatggttctacattggaattgatagtgcactctgagtccaaatcacgatcatggtcattgattctcgcgttaaatttcttcaagacaggatcgatgtttgtgacacatctgctactcttagcgtgtctgttatcgtcacacatatgactactaaggttattctcaactctgactgtatcttttctaaa

SEQ ID NO: 7539 - DNA, 324 bp, Glycine max
  Clone ID: LIB3039-052-Q1-E1-B3
ggggggagaagactagatgttaagaagttgatagtttgaagtgtcatgacggcttgtggcacaatttcgtcgctgctagttggaagagatcttcatgcacagattattagtagtaacatccataccatcatagttgtaagaagcacgttggtatggtactactgcagttgtgaagaatactccgatgccttcgtggtgctccaatagatgcctatcaaggatgttgtatcaaggactgccattaccgctggttgtaccatcctccggcatgatcatgatgctcaggagttgctgcaagaaatgatggaagaaggcgtgttgcct

SEQ ID NO: 7540 - DNA, 314 bp, Glycine max
  Clone ID: LIB3039-052-Q1-E1-B4
gacacttcagaatcctctagtaacccttcttttctctctctctctctcgtgttctgagctgctacatgcaatggagaggatcagaagccatgcttctttcaccatgtgtgcaatgcttgttggattgctctctcataaccttgtcattcctgtaatatccaccattgttgcatatcagaagaactacaacatcctacatccacatgctggaagtactcccacaggtttctccaattctctgtgctcacacattactactcatccatctcatggccgtgggagctctacactctcatatccctaatagtccaagt

SEQ ID NO: 7541 - DNA, 352 bp, Glycine max
  Clone ID: LIB3039-052-Q1-E1-B5
ggcacaagtgagtttgttgatcgagataactagaaacagtgtgatgaaaatgaaggtccttgttttcttcgttgctacaattttggtagcatggcaatgccatgcgtacgatatgttccctctccgaatgaacactggctatggtgcccgtactccggaggtgaaatgcgcaagttggaggcttgctgtggaagcacacaacatctttggctttgagaccattcctgaagagtgcgttgaagcaacaaaggaatacatccatggcgaacaatatagatcagactccaaaacagttaaccaacaagcttacttttatgccagagacctcgaagtccatcccaaaggacaacat

SEQ ID NO: 7542 - DNA, 391 bp, Glycine max
  Clone ID: LIB3039-052-Q1-E1-B6
ggccgttctcatctctcttcccagttctcacctcaccgctgcatcttcacgtcgtctctaacgagggaaaatgagtcgaggaggtgcagcagcagcgaagggaaagaagaagggtgctacattcaccattgactgtgcaaagccagtagaagacaagatcatggacattgcttctctcgagaagtttcttcaagagaggatcaaggttggtggcaaagctggtgctcttggtgactctgttaccgttacacgtgagaagactaagattattctcacctctgactgtaacttttccaaacggtatttgaagtacttgacgaagaagttcttggagaaaccacaagttgcgagaacgggctcagagtgattgcttcaaacaaggatagaagtg

SEQ ID NO: 7543 - DNA, 382 bp, Glycine max
  Clone ID: LIB3039-052-Q1-E1-B7
ggtgcaagagtttgttgtgagctataagctagtttatcgtgaggagaatatgaagttgtttgttttctttgttgctgcagtagttttggtagcatggccatgccatggcgcaggctaccaaaggttccctctccgaatgaaaactggctatggtgagcgttcttcggaggtaaaatgcgcaagttttaggcttgctgtggaagcacacaacatccgagcctttaaaaccattcctgaagagtgcgttgaaccaacaaaggactacattaatggcgaacaatttagatcagactctaaaacagttaaccaacaagctttcttttatgctagtggaacccaaagtcaatcacaacgacgtatttaaattcggcatagataacac

SEQ ID NO: 7544 - DNA, 333 bp, Glycine max
  Clone ID: LIB3039-052-Q1-E1-B8
gaaacaaaaaccatcaccaaaaaagaaaatgatgctcggagagcaccatcgcgcgaatccaacggttcacgtgccaccgtggccaacccacgacgatccaacggccgagatgtactccgcgtttttaacaaacgacgtcaatgctggtgagtactctccgtactatcttcaagaagcactaacggctctgcagcgttttctgccgtctaacgaaacggacgctgactcggacacggaggctcaacccgacgcggcggtggacgcgtactcgtgcgaccatttccgcatgtacgagttcaaggtccgtcgatgcgcacgtggcaggtcacacga

SEQ ID NO: 7545 - DNA, 263 bp, Glycine max
  Clone ID: LIB3039-052-Q1-E1-B9
gacagccgcagcttgaaacagagcagagcgaccttgaagagctatggctgtcggaaagaataagaggatttccaagggaaagaagggtggcaagaagaaagccgctgatccctttgccaagaaagactggtacgatatcaaggccccttccctcttccaggtcaagaatattggcaaaaccctcgtctctcgtacccagggaaccaagattgcatccgaaggactcaaacatcgggtttttgaggtctcattggctgatctcc

SEQ ID NO: 7546 - DNA, 387 bp, Glycine max
  Clone ID: LIB3039-052-Q1-E1-C1
gactgcacgtttttcgtcactcgttctctctcatacatgccggaatttcctctctcgttctctctccggagaatagaataaataccctaaaccttcgctttgctgccacacacatcagatctacactacaacttccaagttcaggaattatgtgtcactagcgatgtccgattccgttcccaaaacgcgaaaccgtccggggccgtggacgccagcgccggacgccaaggcaatgccgcctgcttcctgggctaagaaaacaggcttcaagcccaagttctccggcgaggccaatgccagcgactctggccagataagcctgcagcccaagcctaaggagcacgacgctaacgtggattccgaaccgggccggcctggggccccgga

SEQ ID NO: 7547 - DNA, 278 bp, Glycine max
  Clone ID: LIB3039-052-Q1-E1-C10
gaccacattccaaaacacaaacacatacattgtagtatcacttttgtctcggaatttgttcttttgagttatggcaagcttaaaggttgcatgtgtggttttgatgtgcatggctgtgatgagtgcaccaatgatggtgcaagccgtgtcatgcaatgatgtttctgtgaacctagcaccgtgcctatcttacctgatgcagggtggagatgttccagaatcgtgctgtagcggagtgaggaacattctgggttctgccagcaccacctttgacaaac

SEQ ID NO: 7548 - DNA, 285 bp, Glycine max
  Clone ID: LIB3039-052-Q1-E1-C11
ggcgcgcacccagagaggaagcttagagagagagagagagatagagagagagaggagagagtattggcgcttcatcaagatgggtatttctagggattccatgcacaagatgcgtgccactggtggcaagaaaaaggcttggagaatgacgagaaagtatgagcttgggcgtcaggcaacaatgaccaagttatcaggcaacaggacaatcaggaggattcgtgttatatgtggcaatgttaaatggacggcattgaagctggatactggcaattactcaagggg

SEQ ID NO: 7549 - DNA, 321 bp, Glycine max
  Clone ID: LIB3039-052-Q1-E1-C12
gacaacacaacgcaacacaacgcgcactctctcttttctctcttaacacaaaagccctatcgttcttcgcggtttcgccgattctcgccatgccgaaagccaaatccgacgccaaagccgccgatagccggttgaagcgcaagggcgctggtgctggaaggaagcaatcgaagaaagctgctaaggatcctaacaagccaaagagacctccaagcgctttcttcgttttcatgtccgagttcagagagcagtttaagaatgagcatcctaacaacaaatccgtcgctgttgtccgtaaagctggtggtgacaaatggaaat

SEQ ID NO: 7550 - DNA, 233 bp, Glycine max
  Clone ID: LIB3039-052-Q1-E1-C2
agggacacaacttaatttgttgatccagattactaaaaacaatgtgatgaaaattaaaggccttgttttcctccatgccaaaaatttgggaacaatggaatgccaatcgtaacaaaagttcactcaccgaatgaacactggcttatgggcccgtattccggaagtgatatgcgcatctttgacgcttgctgtagaagcacacaagatctttggctttgagaccattcctgaag

SEQ ID NO: 7551 - DNA, 331 bp, Glycine max
  Clone ID: LIB3039-052-Q1-E1-C3
gaaagtgcaagagtttgttgtgagctataagcaagtttatcgtgaggataataggaagttgtttgcttttctttgatgctgcagtaattatggtaacatggacatgccatggcgcacgctaccaaaagttccctctccgaatgaaaactggctatggtgagcgttcttcgcaggtaaaatgcgcacgttttacgcttgctgtggtatcacacatcatccgagcctttaaaactactcctgaacagtgcgttgatacatcaatggactacattaatggtgaacaatttagatcatactctaaaacacttaaccaacaagctttcatttatgc

SEQ ID NO: 7552 - DNA, 391 bp, Glycine max
  unsure (1)..(391): unsure at all n locations
  Clone ID: LIB3039-052-Q1-E1-C4
ggcacaaattaatttggtgattgaaaaaactaaaaacaattttattaaaattaaaggccttggtttccttcgtggcaaaaattttggaagcaaggcaattgcaatgcgtaacatatgttccccctccaattgaacactggctatggtgccgtactcgggagtgaaatggcaagttggaggcttgctgtggaagcacacaacatctttggctttgagaccattcctgaagagtgcgttgaggcaacanatgaatacatccatggcgaacaatatagatcagactccaaaatagttaaccaacaagcttacttttatgccagagacctcgaagtccatcccaaggacacattttggttaagtatagatggcaccgtactctctaatattccat

SEQ ID NO: 7553 - DNA, 338 bp, Glycine max
  Clone ID: LIB3039-052-Q1-E1-C5
ggcacaagtttgttgagatagctagaagcaataagatgaaaatgaaagtgcttgttttgtttgttgctacagttttggtagcatatgaatgccatggctcagactaccagaagttccctctccaaatgaaaactgggtttggtgggcaatacagcaatgaggtggcatgtgccagttggaggcttggcgtggaagcaaacaacgtactcaagtggcaaactgttcctgcagcttgcggagagtacataactgactacgttctaagagaccaatatagatcagattccaaaacagttaaccaacaagcttatttctatgctaaatccctcaaactcaac

SEQ ID NO: 7554 - DNA, 332 bp, Glycine max
  Clone ID: LIB3039-052-Q1-E1-C6
ggcacaagtgagtttgttgatcgagataactagaaacagtgtgatgaaaatgaaggtccttgttttcttcgttgctacaattttggtagcatggcaatgccatgcgtacgatatgttccctctccgaatgaacactggctatggtgcccgtactccggaggtgaaatgcgcaagttggaggcttgctgtggaagcacacaacatctttggctttgagaccattcctgaagagtgcgttgaagcaacaaaggaatacatccatggcgaacaatatagatcagactccaaaacagttaaccaacaagcttacttttatgccagagacctcgaag

SEQ ID NO: 7555 - DNA, 331 bp, Glycine max
  Clone ID: LIB3039-052-Q1-E1-C7
gacacttcaaaatcctctagtaacccttcttttctctctctctctctcgtgttctgagctgctagaaccaatggagaggaaaagaagccatgcttctttcaccatgtttgcaatgcttgttggagtgatctctcagagccttgtcattcctgtagtatccagcactgttgacgatcagaagaactactacaccccagatccacatgctgaaagtcgcccctcaggtttctccgattctctgtgctcacacagtagtactcctccatctcatggccatggaagctctccaccctcacatcatcacagtagtccaagtactccatcaacaccc

SEQ ID NO: 7556 - DNA, 388 bp, Glycine max
  unsure (1)..(388): unsure at all n locations
  Clone ID: LIB3039-052-Q1-E1-C8
ggccgaaagaaagaaacctaacaacgccatagcgtttcctaacccatcgtgcgaggtccctcgacctccgcacaaccccaactccaaggggctgtgcctgtcgccgtcgtcttccacgctcatgtcggaacccgacatccacgcgccgccgttcctgctccagcgcccgccgctcctgcagtcggcctcgccactcttcaagcagcgatcgtggtcgccggacgccttccgcgatgaggcgtggctccggcgcaaggggaactgcaagaaccgccgcagcaagagcgtcaccgatgaggacgtggacgagctcaaagcctgcatcgagttgggcttcggattcgattcctcccccgagaacgagctccatcaacgcntctccgatact

SEQ ID NO: 7557 - DNA, 274 bp, Glycine max
  Clone ID: LIB3039-052-Q1-E1-C9
ggtattcattcccctcaacgctgttttcttttctattcaaactcccgccgcttccctcagttcctcattctctttctttcgttcttcatcgtcttcttcttcctgagctgtcgattgcatcttcctctctcgcgttcgctctgagctaacagtctaagagattcaggtcagtatggaagatgggcataagttccaggaagttccagggccagaatatgattgtcttttatttgatcttgatgacaccctttaaccttatagttctggagtctca

SEQ ID NO: 7558 - DNA, 332 bp, Glycine max
  Clone ID: LIB3039-052-Q1-E1-D1
ggcacaagtgactttgttgatcgagatacctagaaacagtgtgatgaacattaacgtccttgatttcctcgttgctacaattttggtagcatggcaatgccatgcgtacgatatgttcgctctccgaatgaacactggctatggtgcccgtactccggatgtgaaatgcgcaagttggaagcttgctgtggaagcacacaacatctttggctttgagaccattcctgaagagtgcgttgaagcaacaaaggaatacatccatggcgaacaatatagatcagactccaaaacagttaaccaacaagcttacttttatgccagagacctcgaag

SEQ ID NO: 7559 - DNA, 325 bp, Glycine max
  Clone ID: LIB3039-052-Q1-E1-D10
gactcaagcacaacatctctatcgagtaaattaactatgatgcctaccctactattatccctttccttcctgcctctctttgctttcctggctctttcagaagatgttgaacaagttgtggacataagtggcaaccccattttcccaggtggcacatattagattatgccatcaacttggggcgctgccggtggtggattgacactatgccggacaggaaactcaaactgcccagttactgttttgcaagattactcataaatcttccgtggtacaccagtcaaattcagcatacctgggataagccctggaatcaaccttaaaa

SEQ ID NO: 7560 - DNA, 285 bp, Glycine max
  Clone ID: LIB3039-052-Q1-E1-D11
gaggtgcaagagtttgttgtgagctataagctagtttatcgtgaggagaatatgaagttgtttgttttctttgttgctgcagtagttttggtagcatggccatgccatggcgcaggctaccaaaggttccctctccgaatgaaaactggctatggtgagcgttcttcggaggtaaaatgcgcaagttttaggcttgctgtggaagcacacaacatccgagcctttaaaaccattcctgaagagtgcgttgaaccaacaaaggactacattaatggcgaacaattt

SEQ ID NO: 7561 - DNA, 312 bp, Glycine max
  Clone ID: LIB3039-052-Q1-E1-D12
ggcacaagtttgttgagatagctagaagcaataagatgaaaatgaaagtgcttgttttgtttgttgctacagttttggtagcatatgaatgccatggctcagactaccagaagttccctctccagatgaaaactgggtttggtgggcaatacagcaatgaggtggcatgtgccagttggaggcttggcgtggaagcaaacaacgtagtcaagtggcaaactgttcctgcagcttgcggagaatacatagctgactacgttctacgagaccaatatagattaaattccaaaacagtttaacaaaaagcctaat

SEQ ID NO: 7562 - DNA, 326 bp, Glycine max
  Clone ID: LIB3039-052-Q1-E1-D2
aggggcaaaagttaatttgttgattgaaataactaaaaacaatgttatgaaaattaaaggccttggtttcctccgtgccaaaattttggtagcatggcaatgccatgcgtacgatatgttccctctccgaatgaacactggctatggtgcccgtactccggaggtgaaatgcgcaagttggaggcttgctgtggaagcacacaacatctttggctttgagaccattcctgaagagtgcgttgaagcaacaaaggaatacatccatggcgaacaatatagatcagactccaaaacagttaaccaacaagcttacttttatgccagag

SEQ ID NO: 7563 - DNA, 385 bp, Glycine max
  Clone ID: LIB3039-052-Q1-E1-D3
ggagtttacgctaaaccctaaacctcacagcacacagagtttcgctttcggttagttgctccgccgtcgcactatcactcacagcttcgctaggttaaatggcaatgcctgttaatgatgatacactggttgaggctgaaactgaagatcagagagaagaaatgtcatcatctgaatcagagcacgatgaagatgtgaaattaactgaaccatctaaaaatgcagtgtataacagagatgctctactagataaacttggagacatcagttggccagagaatgtggaatggatacacatactctctgttgatgttgatcaagagcaagaactagatgtcaatgatgaattggcacgaagaacttccgtttacacacaggcattgga

SEQ ID NO: 7564 - DNA, 392 bp, Glycine max
  Clone ID: LIB3039-052-Q1-E1-D4
ggcacaagtgagtttgttgatcgagataactagaaacagtgtgatgaaaatgaacgtccttgttttcttcgttgctacaattttggtagcatggcaatgccatgcgtacgatatgttccctctccgaatgaacactggctatggtgcccgtactccggaggtgaaatgcgcaagttggaggcttgctgtggaagcacacatcatctttggctttgagaccattcctgaagagtgcgttgaagcaccacaggaatatatccatggcgaataatatagatcagactccaaaacagttaaccaccaagcttacttttatgccagagaactcgaagttcatcgcaaagacacatttgtgttcactatagatggcaccgtactctctaatattccat

SEQ ID NO: 7565 - DNA, 347 bp, Glycine max
  Clone ID: LIB3039-052-Q1-E1-D5
ggcatcaattcaaaatatatcatcaattataagcatgggtttgtggaacacaacgaatgcagtgtcttgccgctttcacaagtttggtgatgaccaaaagaatctggtcttccaaggtgatgccacgtcttcttccaggggcatagaactcacaaagttagacggtggaggaaaaccagtgggtggcagtgtggggagagcgttatactcttctccagtgcacctttgggaaagctctacagtggtcgcaagctttgaaaccgacttcaccttttccatctcatcagactctactactccaggtgatggccttgccttcttcattgcaccatttgacactaaaatcc

SEQ ID NO: 7566 - DNA, 308 bp, Glycine max
  Clone ID: LIB3039-052-Q1-E1-D6
gattgtagaactgaacaagggtttctctttctctttctctgtctgcttcttcactttctctcgtttcaatcgaaaaaaatcatgggcagaaaattcttcgtcggtggcaactggaaatgcaatgggaccactgaggaggtgaagaagattgttactactttaaatgaagctaaagtccctggagaagatgttgtagaagttgttgtgagccctccttttgtgttccttccttttgtaaaaagtttgctgcgccctgatttccatgtctcggcccaaaattgttgggttcgcaaaggtggtgcttatac

SEQ ID NO: 7567 - DNA, 383 bp, Glycine max
  Clone ID: LIB3039-052-Q1-E1-D7
ggcacaagtgagtttgttgatcgagataactagaaacagtgtgatgaaaatgaaggtccttgttttcttcgttgctacaattttggtagcatggcaatgccatgcgtacgatatgttccctctccgaatgaacactggctatggtgcccgtactccggaggtgaaatgcgcaagttggaggcttgctgtggaagcacacaacatctttggctttgagaccattcctgaagagtgcgttgaagcaacaaaggaatacatccatggcgaacaatatagatcagactccaaaacagttaaccaacaagcttacttttatgccagagaactcgaggttcatcccaaggacacatttgtgttcagtatagatggcaccgtactctcta

SEQ ID NO: 7568 - DNA, 315 bp, Glycine max
  Clone ID: LIB3039-052-Q1-E1-D8
agaacatatgagtttgatgatcagaatcattagcacaagtatgatgaactatgtctagaccataatggcctcttcagtgctggtatctgtggatctcaatcctgtccctttcactgttgcgaactcctcatttacaggccttaccgcgctcgtaaggaactcgtcttcagtcagagttgtgggcattggttgcaagaagatcacaactgataattcttaaggaattaatggtggtatggctttgcaggaaggagttgctgcaactggcaagaatagaaatgaaactggcgtttactagtttgtcaaccttaactg

SEQ ID NO: 7569 - DNA, 307 bp, Glycine max
  Clone ID: LIB3039-052-Q1-E1-D9
ggcacaagtgagtttgttgatcgagataactagaaacagtgcgatgaaaatgaaggtccttgttttcttcgatgctacaattttggtagcatggcaatgccatgcgtacgatatgttccctctccgaatgaacactggctatggtgcccgtactccggaggtgaaatgcgcaagttggaggcttgctgtggaagcacacaacatctttggctttgagaccattcctgaagagtgcgttgaagcaacaaaggaatacatccatggcgaacaatatagattaaactccaaaacagttaaccaacaagct

SEQ ID NO: 7570 - DNA, 348 bp, Glycine max
  unsure (1)..(348): unsure at all n locations
  Clone ID: LIB3039-052-Q1-E1-E1
gacaacacaacacaacgcgcactctctctttttctctctgtnttttgttctctcttcgcttaaactctatcgttcttctcgttttcgccgattctcgccatgccgaaagctaaatccgacgccaaagccgccgatagcaggttgaagcggaagggcgctggtgctgggaggaagcaatcgaggaaagctgctaaggaccctaacaagccgaagagacctccaagcgctttcttcgttttcatgtccgagttcagagagcagttcaagaaggagcatcctaacaacaaatccgtcgctgttgtcggcaaagctggtggtgaaaaatggaaatcgctatctgatgctgaa

SEQ ID NO: 7571 - DNA, 390 bp, Glycine max
  Clone ID: LIB3039-052-Q1-E1-E10
ttcattcaaacacatactcaaagttacttcaactcaaaattatttttgaatctataatcaattctaaatttttctctaacataaaaccaaacatatattaattgtgaattcagaatcaatttttcaacggaaaaccaaatacgaacttaagatcttcaactctgtactaatttgaggaatcccataacttacccaatttttttatttacaaaaaagatgataaaatatggtccatcacatattgagctcttggaaagtattctcagaagtcttgatgggccatatttgggccaagcccatgcaataatgcccaaagccagaacccagaatcatacgtccaaacatgtctggacaactttaaagagattaatggtcctccctttccttttt

SEQ ID NO: 7572 - DNA, 266 bp, Glycine max
  Clone ID: LIB3039-052-Q1-E1-E11
ggcaagagtttgttgtgagctataagctagtttatcgtgaggagaatatgaagttgtttgttttctttgctgctgcagtagttttggtagcatggccatgccatggcgcaggctaccaaaggttccctctccgaatgaaaactggctatggtgagcgttcttcggaggtaaaatgcgcaagttttaggcttgctgtggaagcacacaacatccgagcctttaaaaccattcctgaagagtgcgttgaaccaacaaaggactacatt

SEQ ID NO: 7573 - DNA, 318 bp, Glycine max
  Clone ID: LIB3039-052-Q1-E1-E2
gactcaacacttcaaaacactcataacacaaagcacaaagcaaagctcatccctgagttaaaaaatggcagcagcttcctcatggctctccacccgatccttgctggcaagccgtgaagctgggcccatcatccccacaagtgggaacggtgagcatgaggaagaccgtcaccaagcacgtctcctcaggaagcccatggtactggccataccgagtcaagtacttgggcccattctctggcgaacccccgtcctacctaaccggtgagttcccaggcgactacggctgggacactgctgggctttccgcagacccag

SEQ ID NO: 7574 - DNA, 325 bp, Glycine max
  Clone ID: LIB3039-052-Q1-E1-E3
gaatggtccggtgaagtgttcggattgcggcgacgtgagcggttcgctgcccgcgacgttgtgagaagtccactgaaccttatcatttacaggaagacgacgatgacgaggaggaagatgaagaagaaatggaggacgaggaacttgaagctggtattcagtctgttgatagtctgtcaagcactctcactggagtggaaacacctgatgttattgacctccggaagcaacagacgaaggagcctgagaggcctctttatcaagtactcgaagagaaggaagaaaaaattgctcctggaactttgcttggaaccactcacactta

SEQ ID NO: 7575 - DNA, 351 bp, Glycine max
  Clone ID: LIB3039-052-Q1-E1-E4
ccacgcgtaaagtaggctgcgagaacgacagaaaggggaatcgatttttttttccgttcagtttcgaagctacatttcggttcaatcacaaaatggctctatcgcgcgtggctcaatcgtcgccatcacagtcgaatcgtttgaaacccctctcgtcgtacttatccctacgacgccgttcggtgtcgacctcgtcagtgcgcctcaccgtggagacctcggtgcacttcacctcccacaactgcgatgcgcctccacgcgccgtggcgacgtcctcagcggaactcgtctcgttcttccgtgacatggcgctgatgcggcggatggagatcgcagaggactcgctctaca

SEQ ID NO: 7576 - DNA, 381 bp, Glycine max
  Clone ID: LIB3039-052-Q1-E1-E5
ggcacaagtttgttgagatagctagaagcaataagatgaaaatgaaagtgcttgttttgtttgttgctacagttttggtagcatatgaatgccatggctcagactaccagaagttccctctccaaatgaaaactgggtttggtgggcaatacagcaatgaggtggcatgtgccagttggaggcttggcgtggaagcaaacaacgtagtcaagtggcaaactgttcctgcagcttgcggagagtacatagctgactacgttctaggagaccaatatacgtcagattccaaaacagttaaccaacaagcttaattctatgctaaatccctcaaactcaccaacaaagatgtctttgtcttggacgttgacgacactactctct

SEQ ID NO: 7577 - DNA, 289 bp, Glycine max
  Clone ID: LIB3039-052-Q1-E1-E6
ggcacaagtgagtttgttgatcgagataactagaaacagtgtgatgaatatgaaggtccttggtttcttcgttgctagaattttggtagcatggcaatgccatgcgtacgatatgttccctctccgaatgaacactggctatggtgcccgtaatccggaggttaaatgctcaagtttgaggcttgctgtggaagcacacaacagctttggctttgagaccagtcctgaagagtgcgttgaagcaacaaacgaatacatttatagcgaacaatatagatcagacttcaaa

SEQ ID NO: 7578 - DNA, 384 bp, Glycine max
  Clone ID: LIB3039-052-Q1-E1-E7
gatgcacaagtttgttgagatagctagaagcaataagatgaaaatgaaagtgcttgttttgtttgttgctacagttttggtagcatatgaatgccatggctcagactaccagaagttccctctccaaatgaaaactgggtttggtgggcaatacagcaatgaggtggcatgtgccagttggaggcttggcgtggaagcaaacaacgtagtcaagtggcaaactgttcctgcagcttgcggagagtacatagctgactacgttctaggagaccaatatagatcagattccaaaacagttaaccaacaagcttaattccatggctaaaatccctcaaactcaccaacaaagatgtctttgtcttggacgttgacgacactactctc

SEQ ID NO: 7579 - DNA, 384 bp, Glycine max
  Clone ID: LIB3039-052-Q1-E1-E8
gacactaaacaagttaaaagaagagcatcactgaactaacaaagcaaccctatgtcgaaggtggtttgtgtcaccggagccagcggcgccatcggatcatgggtggtcctactcctcctccagcgtggttacaccgtccatgccaccgtccaagatatcaaggatgaaaatgagacgaaacatttggaggaaatggaaggagcaaagagtcatctccatttttttgaaatggatcttcttgacatcgactccattgccgctgccataaagggttgttccggcgtaatccaccttgcatgtcctaacatcattggtcaagtcgaagattcccgaaaaacaaatattggaaccggcgataaaaggaacggttaatgtgttgaaggc

SEQ ID NO: 7580 - DNA, 317 bp, Glycine max
  Clone ID: LIB3039-052-Q1-E1-E9
ggcacaagtgagtttgttgatcgagataactagaaacagtgtgatgaaaatgaaggtccttgttttcttcgttgctacaattttggtagcatggcaatgccatgcgtacgatatgttccctctccgaatgaacactggctatggtgcccgtactccggaggtgaaatgcgcaagttggaggcttgctgtggaagcacacaacatctttggctttgagaccattcctgaagagtgcgttgaagcaacaaaggaatacatccatggcgaacaatatagatcagactccaaaacagttaaccaacaagcttacttttatg

SEQ ID NO: 7581 - DNA, 294 bp, Glycine max
  Clone ID: LIB3039-052-Q1-E1-F10
ggaacctttgcattctattcattcaagattcagcaagtgcgttttggaagcagagaccgaaatacttcgagatggcccgtacaaagcaaactgctcgtaagtcaactggaggaaaagctcccaggaagcagcttgcaaccaaggctgcacgtaagtctgcaccaacaactggtggtgtgaagaagcctcatcgttatcgccctggaactgttgctcttcgagagattaagaaataccagaagagcactgagctcctaatcaaggagcttcctttccataagttggctcgtgaaa

SEQ ID NO: 7582 - DNA, 294 bp, Glycine max
  Clone ID: LIB3039-052-Q1-E1-F11
ggcacaagtgagtttgttgatcgagataactagaaacagtgtgatgaaaatgaaggtccttgttttcttcgttgctacaattttggtagcatggcaatgccatgcgtacgatatgttccctctccgaatgaacactggctatggtgcccgtactccggaggtgaaatgcgcaagttggaggcttgctgtggaagcacacaacatctttggctttgagaccattcctgaagagtgcgttgaagcaacaaaggaatacatccatggcgaacaatatagattaaactccaaaacaat

SEQ ID NO: 7583 - DNA, 303 bp, Glycine max
  Clone ID: LIB3039-052-Q1-E1-F12
gattatatttgagttcaaacaaatcaaagccatggccacctccaacttctctattgttctctccgtctccctagccttctttttggtgctacttaccaaggcacactcgaccgataccgtttctttcaccttcaacaagttcaacccagtccaaccaaacattatgctccaaaaagatgctagtatttcatcctctggggtgttacaactcaccaaagttggcagcaacggcgttcccacctcgggatctctcggtcgtgccctttacgctgccccaaatcaaaattgggacagcgaaaccgg

SEQ ID NO: 7584 - DNA, 293 bp, Glycine max
  Clone ID: LIB3039-052-Q1-E1-F2
gattgtttgccttttccccgccccttcctccaagggtaacaaaaccccaatttcaatttctcctcccccaatttccaagaaatctaaaccaatggaaaagtctaaccaaaccgtgacccctgattaccacgaaggcctttgaaaaagcgaagaaaaagctcagatgcttcatcgctgaaaaaagatgcgctcctctaatgctccgtttggcatggcactctgctggaacttacgacgtgagctcgaagatcggtggtcccttcggaaccataaagcacccctccgaactcgct

SEQ ID NO: 7585 - DNA, 349 bp, Glycine max
  Clone ID: LIB3039-052-Q1-E1-F3
ggcacaagtgagtttgttgatcgagataactagaaacagtgtgatgaaaatgaacgtccttgttttcttcgttgctacaattttggtagcatggcaatgccatgcgtacgatatgttccctctccgaatgaacactggctatggtgcccgtactccggaggtgaaatgcgcaagttggaggcttgctgtggaagcacacaacatctttggctttgagaccattcctgaagagtgcgttgaagcaacaaaggaatacatccatggcgaacaatatagatcagactccaaaacagttaaccaacaagcttacttttatgccagagacctcgaagttcatcccaaggacaca

SEQ ID NO: 7586 - DNA, 351 bp, Glycine max
  Clone ID: LIB3039-052-Q1-E1-F4
ggcacaagtgagtttgttgatccaaataactagaaacaatgtgatgaaaatgaagggccttggtttcctcgttgccaaaattttggtagcatggcaatgccatgcgtacgaaatgttccctccccgaatgaacactggctatggtgcccgtactccggaggtgaaatgcccaagttggaggcttgctgtggaagcacacaacatctttggctttgagaccattcctgaagagtgcgttgaagcaacaaaggaatacatccatggcgaacaatatagatcagactccaaaacagttaaccaacaagcttacttttatgccaaagacctccaagttccacccaagggacacat

SEQ ID NO: 7587 - DNA, 386 bp, Glycine max
  Clone ID: LIB3039-052-Q1-E1-F5
ggcgcatctctctctctctcgcgcgcgccgcttttctctcagccagccctgcagggttttgcataatttagctctttttctccgcccacaatgggtaaagctaaaaagggaccaaagtttgctgttatgaagaagattgtcacttccaaagcaatcaaaagctacaaagaagaggttttgaacccagaaaagaagaatcttatgaaggaaaagttacccagaaatgttccaactcattcttcagcgcttttctttcaatacaacactgcactgggacccccttatcgtgttttggtggacaccaacttcatcaaatttccgaatcaaattaaattggatctggagaaagggatgatggactgcttatatgcaaaatgcaccccttg

SEQ ID NO: 7588 - DNA, 296 bp, Glycine max
  Clone ID: LIB3039-052-Q1-E1-F6
gactatctttgagttcacataactcacagccatggctacctcgatcttctctattgttctctccgtctccctagccttctttttggtgctacttaggaaggcacactcgagtgataccgtttcttgcaccttcaacaagttcaacccagtccaaccaaacagtatgctccaaaaagatgctagtacttcatcctctggggtgttacaactcaccaaagttggcagcaaaggcgtgtccacctcgggatctctcggtcgtgccctttacgctgcctcaatcgagatttgggacagcg

SEQ ID NO: 7589 - DNA, 367 bp, Glycine max
  Clone ID: LIB3039-052-Q1-E1-F7
ggctgcaatatgcaaggcaaagaaatggaagggttgtcgtcttcaccggcgatcgcgcagaaaacgtgggaactcgagaacaacatcatcccgatggacactccgggcggcgccgctacctcctccaccgctaccaccacgaccaacgccgacgactcgatcttctactacgacgaggcggggcagaacgagttccagcgcgacaagccctgggccaacgacccccactacttcaagcgcgtgaagatctccgcactcgcgctcctcaagatggtcgtccacgcgcgctccggcggcaccatcgaggtcatgggcctcatgcagggcaagaccgacgccgacgccatcatcgtcatggacgcctttc

SEQ ID NO: 7590 - DNA, 378 bp, Glycine max
  Clone ID: LIB3039-052-Q1-E1-F8
ggtgcaagagtttgttgtgagctataagctagtttatcgtgaggagaatatgaagttgtttgttttctttgttgctgcagtagttttggtagcatggccatgccatggcgcaggctaccaaaggttccctctccgaatgaaaactggctatggtgagcgttcttcggaggtaaaatgcgcaagttttaggcttgctgtggaagcacacaacatccgagcctttaaaaccattcctgaagagtgcgttgaaccaacaaaggactacattaatggcgaacaatttagatcagactctaaaacagttaaccaacaagctttcttttatgctagtgaacgcgaagtccatcacaacgacatatttatattcggcatagataa

SEQ ID NO: 7591 - DNA, 318 bp, Glycine max
  Clone ID: LIB3039-052-Q1-E1-F9
ggcacaagtgagtttgttgatcgagataactagaaacagtgtgatgaaaatgaaggtccttgttttcttcgttgctacaattttggtagcatggcaatgccatgcgtacgatatgttccctctccgaatgaacactggctatggtgcccgtactccggaggtgaaatgcgcaagttggaggcttgctgtggaagcacacaacatctttggctttgagaccattcctgaagagtgcgttgaagcaacaaaggaatacatccatggcgaacaatatagattagactccaaaacagttaaccaacaagcttacttttaagc

SEQ ID NO: 7592 - DNA, 340 bp, Glycine max
  Clone ID: LIB3039-052-Q1-E1-G1
ggttgtgtgagtgaagaatcacagggagtagcggcattaaaaatgcagatcttcgtgaaaactctgacagggaagactataaccctcgaggtcgagagcagcgacaccatcgacaatgtcaaggccaagattcaagacaaggaaggcattcctccggatcagcagcgtttgattttcgccggaaagcagcttgaagatggaaggaccctggccgattacaacatccagaaggaatcaacccttcatctcgtcctcaggcttcgtggtggcatcattgagccttccctcatggctttggctcgcaaatacaaccaggacaagatgatttgccgcaagtgct

SEQ ID NO: 7593 - DNA, 292 bp, Glycine max
  Clone ID: LIB3039-052-Q1-E1-G10
gacatcacacacactctcatagctgtagcggcgacactaagatcggagaaagaatggcgaaaacgacgtcgttgctgctctttacactgctcctcttcggaaccctagctctcatccaggcgaagaaatcgaaggaggatttgaaggaggtgacccacaaggtttactttgatgttgagattaatggaaaagaagcaggtcgtattgtaatgggtctttatgggaaggctgttccaaaaactgcagaaaacttccgagcactttgcacatgggaaaagggaactggtaaaag

SEQ ID NO: 7594 - DNA, 295 bp, Glycine max
  Clone ID: LIB3039-052-Q1-E1-G11
gggagtagcggcattaaaaatgcagatcttcgtgacaactctgacatggaagactataaccctcgaggtcgatagcagcgacaccatcgacaatgtcaaggccaagattcaagacacggaaagcattcctccggatcagcagcgtttgattttcgccggtaagcagcttgaagatggcatgaccctggccgattacaatatccataaggaatcaacccttcatctcgtcctcaggcttcgtggtggcatcattgagccttccctcatggctttgggtcgcaaatacaaccaggac

SEQ ID NO: 7595 - DNA, 330 bp, Glycine max
  Clone ID: LIB3039-052-Q1-E1-G12
gattcttcactgtcctctctcgccgccagatctcagacacacactctcactctctctccctcagcttccataatgcagctcctccggccactgctcgcggcggcgctgctcctcctcgccaccctctccgatgcgcagaacatcaccagcatcctcgcaaagcatcccgagctctcgaccttcaaccactacctcaccctcacccacctcgcccccgatatcaacggcaaaatcaccatcaccgtctgcgccgtcgacaacgccgccatgtcggaacttctctcgaagcatccctccattctaaccgttttagaaattctcttccttcaa

SEQ ID NO: 7596 - DNA, 411 bp, Glycine max
  Clone ID: LIB3039-052-Q1-E1-G2
cgcgtaagccagcgcgtccgacagctgcgaaaggagaaaaaatgggaaaggactggaatcctcggaacacaagtatgatagaaatccaaggaacgggtcttaacaaaagcccattcggaaaccccattctttctcatctccttcctttgcttctccatcttcgattttcgtcgctgaacatgagatagtgcatttcaatccacatcgggcagtccgggattcaggttgcgaacgcctgctgagagctttactgcatcgaatacggcattcagcctgatgggcagatgccaagtgacaagactgttggtggaggtgatgatgctttcaacaccttcttcagtgaaactggggcaagaaaagcacgtgccccgtgcgatttttgtagatcttgagcccactgtgattgatgag

SEQ ID NO: 7597 - DNA, 332 bp, Glycine max
  unsure (1)..(332): unsure at all n locations
  Clone ID: LIB3039-052-Q1-E1-G3
ggaaggtgtgtggagttanggccttacagtggttcccctccctcctcctcctcctcctcctcctcctcggtggatcccgaatggtccgttcgaaaaaaaggagaaagaaattcaaaatggcgtttgctttccacgagttcggaaggccgtttcaaaacctgaaggagcatgagcagaagagcagactccgaggattggacgctcagaaagccaacatctccgccggcaaagccgtggctcgcatcctccgaacctccctcggccccaaaggcatggacaagatgctccagagccccgacggcgacgtcaccatcacgaacgatggagccacg

SEQ ID NO: 7598 - DNA, 335 bp, Glycine max
  Clone ID: LIB3039-052-Q1-E1-G4
gacagcatatatatcaataatctattttaaactacacctacattttggataattttcctctgtagttgatagccatggctacccgtggaaagcttgaagttgacattgatctcaagtccaacgcagacaagtactggcaaacccttaggaattctactgaaatattccctaaggccttcccacatgattacaaaagcattgaggttcttgagggtgatggcaagtctcctggttctatccgccacataagttatggtgaaggttcaccacttgtgaaatcatcctttgagaagattgaggctgttgatgacgaaaagaacgtactgtcgtacact

SEQ ID NO: 7599 - DNA, 382 bp, Glycine max
  unsure (1)..(382): unsure at all n locations
  Clone ID: LIB3039-052-Q1-E1-G6
gaaagcaaatacagaaagaaagagtcaagcggcgagcaatggcgacatcgctggtgcgatcgggttttcttcgaagcgccctaagaggaagcgctcgtggctcccaggttccgaagcgaaactttgcttcctctggtcatcacgatgatgcatatgagacggccaaatgggagaagattacatatctaggcattgttagttgcactggtttagccgtttataatctatcaaagggccacccacacttcaaagaacctcctgcttacccatatttgcatatccgcaataaggaattcccctgnggtcncgatggactatttgaaacgaagcaccatgacgagcattactggtttaatgaaggtatttgtggcactggtgggca

SEQ ID NO: 7600 - DNA, 334 bp, Glycine max
  Clone ID: LIB3039-052-Q1-E1-G7
gaagagtttgttgtgagctataagctagtttatcgtgaggagaatatgaagttgtttgttttctttgttgctgcagtagttttggtagcatggccatgccatggcgcaggctaccaaaggttccctctccgaatgaaaactggctatggtgagcgttcttcggaggtaaaatgcgcaagttttaggcttgctgtggaagcacacaacatccgagcctttaaaaccattcctgaagagtgcgttgaaccaacaaaggactacattaatggcgaacaatttacatcagactctaaaacagttaaccaacaagctttcttttatgctagtgaacgcg

SEQ ID NO: 7601 - DNA, 391 bp, Glycine max
  Clone ID: LIB3039-052-Q1-E1-G8
gggtgcttacgatgctgtgtctgagaacgccgttttgtctgagtttctctgccaccaaacacctccgtcaaatacaggcgcggccgtccagatcttgcatcaagatggcgtcaactaaaacggtggagcacattgtcctgttcaaggtgaaggaggaaacggagccgtcaaaggtgagtgacatggtgaacggactcggctcactggtgtcgctggacccggttctccacctcagcgtgggcccactcctccgcaaccgatcctccgccctaaccttcactcacatgctccacagccgctacaagtccaaggaggatctcgaagcgtactcagcacaccctagccacgtcagcgtcgtcaagggatacgtgctccccatcatcgacgacat

SEQ ID NO: 7602 - DNA, 337 bp, Glycine max
  Clone ID: LIB3039-052-Q1-E1-G9
gacacatccctttctccctctttctctttctctttctctttctctccttccttttcatcactcacttttcactcccaagtcccaaccacaagccctcctctcctctcctcgatcagtgccataaatcaattctttctttctatctatctctgtccacaattctctttatgtcaacaaacctaaaactaaaacctgcttgagagagtagggaattaagtaattaattttctttcagttcatcttttaagttgatctgtgaaaatggcttcatcttcctccaacgggagttccagcgggagcaatagttgggacatccaccgggaactccccgggttcc

SEQ ID NO: 7603 - DNA, 340 bp, Glycine max
  unsure (1)..(340): unsure at all n locations
  Clone ID: LIB3039-052-Q1-E1-H1
gactgccgcganaacagaacaaggactcactctggcaacggcactccccgtgggcaaaatccttctgtggtgaattgtcaagatgttcacatcaaggaagaaaatccacaaggataaggatgctgaaccaactgaatttganggatcagtcggacaggcattgtttgatctgggaaataccncaatgagctganaagtgatctgaaagatttatacataaactcagctgtccaaattgatgtttctgggaaccgcaaggctgtggttatccatgtcncctacagattaaggaaaggattccggaagattcatgtcaggcttgtgagagaacttgagaaaa

SEQ ID NO: 7604 - DNA, 294 bp, Glycine max
  Clone ID: LIB3039-052-Q1-E1-H10
accaacaaaggactacattaatggcgaacaatttagatcagactctaaaacagttaaccaacaagctttcttttatgctagtgaacgcgaagcccatcacaacgacatatttatattcggcatagataacaccgtactctctaatatcccatactatgaaaaacatggatatggggtggaggaatttaatgaaaccttatatgatgaatgggttaacaagggcgacgcaccggcattgccagagactcttaaaaattacaacaagctgttgtctcttggcttcaagattgtaat

SEQ ID NO: 7605 - DNA, 357 bp, Glycine max
  Clone ID: LIB3039-052-Q1-E1-H11
ggcacaagtttgttgagatagctagaagcaataagatgaaaatgaaagtgcttgttttgtttgttgctacagttttggtagcatatgaatgccatggctcagactaccagaagttccctctccaaatgaaaactgggtttggtgggcaatacagcaatgaggtggcatgtgccagttggaggcttggcgtggaagcaaacaacgtagtcaagtggcaaactgttcctgcagcttgcggagagtacatagctgactacgttctaggagaccaatatagatcagattccaaaacagttaaccaacaagcttaattctatgctaaatccctcaaactcaccaacaaagatgtccttggcc

SEQ ID NO: 7606 - DNA, 302 bp, Glycine max
  Clone ID: LIB3039-052-Q1-E1-H12
gaaggtgcaagagtcagtttgttgttcgaagccaaaaccctagcagccggcgagaatggcagacgttgaggttgatgcggcggcagcggcaggggcagcgcagccgaagaagagaacgttcaagaaattcagcttcaggggcgtggatctggacgcgcttctggacatgtccaccaaatgcgcgagttttaggcttgctgtggaagcacacaacatccgagcctttaaaaccattcctgaagagtgcgttgaaccaacaaaggactacattaatggcgaacaatttaaattaaactccaaaa

SEQ ID NO: 7607 - DNA, 395 bp, Glycine max
  Clone ID: LIB3039-052-Q1-E1-H3
gacccccagaccctgctgcatacgaagaaaccctagcctctcaccctccctgcgacacgatgcagatcttcgtgaaaaccctaacgggtaagacgatcacccttgaggtggagtcttctgacaccatcgacaacgtgaaggccaagatccaggacaaggaaggcatccctccggacgagcagcgcctcatcttcgccggaaagcagctggaggacggccgcaccctcgccgactacaacatccagaaggagtccagcctccacctcgtcctccgtctccgcggtggcgccaagaagcgcaagatgaagacctacaccaagcccaagaagattagacacaagcaacagaaaggtcaagctcggcattctcaagttctacaaggtcgacgattctgg

SEQ ID NO: 7608 - DNA, 363 bp, Glycine max
  Clone ID: LIB3039-052-Q1-E1-H4
gaaggtgcaagagtttgttgtgagctataagctagtttatcgtgaggagaatatgaagttgtttgttttctttgttgctgcagtagttttggtagcatggccatgccatggcgcaggctaccaaaggttccctctccgaatgaaaactggctatggtgagcgttcttcggaggtaaaatgcgcaagttttaggcttgctgtggaagcacacaacatccgagcctttaaaaccattcctgaagagtgcgttgaaccaacaaaggactacattaatggcgaacaatttagatcagactctaaaacagttaaccaacaagctttcttttatgctagtgaacgcgaagtccatcacaacgacatatt

SEQ ID NO: 7609 - DNA, 356 bp, Glycine max
  Clone ID: LIB3039-052-Q1-E1-H5
ggcacaagtgagtttgttgatcgagataactagaaacagtgtgatgaaaatgaaggtccttgttttcttcgttgctacaattttggtagcatggcaatgccatgcgtacgatatgttccctctccgaatgaacactggctatggtgcccgtactccggaggtgaaatgcgcaagttggaggcttgctgtggaagcacacaacatctttggctttgagaccattcctgaagagtgcgttgaagcaacaaaggaatacatccatggcgaacaatatagatcagactccaaaacagttaaccaacaagcttacttttatgccagagacctcgaagtccatcccaaggacacatttgtgt

SEQ ID NO: 7610 - DNA, 389 bp, Glycine max
  Clone ID: LIB3039-052-Q1-E1-H6
ggcacaagtgagtttgttgatcgagataactagaaacagtgtgatgaaaatgaaggtccttgttttcttcgttgctacaattttggtagcatggcaatgccatgcgtacgatatgttccctctccgaatgaacactggctatggtgcccgtactccggaggtgaaatgcgcaagttggaggcttgctgtggaagcacacaacatctttggctttgagaccattcctgaagagtgcgttgaagcaacaaaggaatacatccatggcgaacaatatagatcagactccaaaacagttaaccaacaagcttacttttatgccagaaacctcaaagtccaccccaaggacacatttgtgttcagtatagatggcaccgtactctctaatattc

SEQ ID NO: 7611 - DNA, 358 bp, Glycine max
  Clone ID: LIB3039-052-Q1-E1-H7
ggcacaagtgagtttgttgatcgagataactagaaacagtgtgatgaaaatgaaggtccttgttttcttcgttgctacaattttggtagcatggcaatgccatgcgtacgatatgttccctctccgaatgaacactggctatggtgcccgtactccggaggtgaaatgcgcaagttggaggcttgctgtggaagcacacaacatctttggctttgagaccattcctgaagagtgcgttgaagcaacaaaggaatacatccatggcgaacaatatagatcagactccaaaacagttaaccaacaagcttacttttatgccagagacctcgaagtccatcccaaggacacatttgtgttc

SEQ ID NO: 7612 - DNA, 395 bp, Glycine max
  unsure (1)..(395): unsure at all n locations
  Clone ID: LIB3039-052-Q1-E1-H8
cactttgataaatgtgtatcgagcatctaatgatttcttggagaagagatcaatggaaatgaatacggcaaagactgaaaaggtttatagaaaatggtgcaaagaaaattttattaatagccggtctcttagacatgctcgtgacattcacaggcagattcagggacatgttgaacaaatgggtctgaatctttcttcttgtggagatgatatgcttcaattccggagatgccttgcagcttctttcttcctcaatgcagctgtaaagcagccagatgggacatacaggactttggcaagcggtctggtggtgcagattcaccttcntctgtattattccggcaaaaaccagagtgtgtgatatttaacgaattggtccaaactaataacaagta

SEQ ID NO: 7613 - DNA, 406 bp, Glycine max
  Clone ID: LIB3039-053-Q1-E1-A1
ggttaccaaaactttaattaactggttgtgagtcttgtcttgtgactgactgctatatcttggcccaactcaattccaccaaatctccagctctcaacttcattttcatataatatttattagaatgaaatcatctaacaaatttttatctttgttatgcttaggtccacccttatgttgcaacagggaataagaactccaaaatttggcataagaaatgagaagctgcaatggtttctagatgctgtgaaggagcatcctaatgagttaaagcttgtaggggcccactgccatcttgggtcaacaattaccaaggttgacatttttaagggaatccgccaattattatggtcaactacatcgaccaaatccaagctcagggttttcaagttgattgcttaaatat

SEQ ID NO: 7614 - DNA, 383 bp, Glycine max
  Clone ID: LIB3039-053-Q1-E1-A10
gatcgcatttcatagcactcaccctcattaccaacacgaaagcatagccaaaaccttttttcgaagtctctgattttcctaatggctccggcaaaggcagagaagaagccggcggagaagaagccagcggcggagaaggcaccggcggagaagaagccgaaggcggagaagaagatctcgaaggaaggagggagcgagaagaagaagaagcgcacgaagaagagcgtggagacctacaagatctacatcttcaaggtcctcaagcaggttcaccccgacattggtatttccggcaaggccatgggcatcatgaacagcttcatcaacgacatcttcgagaagctcgcccaggaagcgtcgcgtttggctcgctacaacaagaa

SEQ ID NO: 7615 - DNA, 415 bp, Glycine max
  Clone ID: LIB3039-053-Q1-E1-A11
cgacacatgcgtcagcggacgcgtgggttcagtgattctgatggttgcatgcagttgatcagagaggtcactgctgagttgcctatttagttggctaactctctcaacagtttgatgttggaagggcagaatgactactgctattgagattctgcagcagtttgattggcaggttcctgattgggtcattgtgcctggaggcaaccttggcaacatttatgccttttacaaagggtttaagatgtgtcaagaacttgggcttgtggataagattccaaggcttgtttgtactcaggctgggatagcagatattttgtacttgtacattaaatccgggtggaaggattttaagcctgtgaactcaagcactacatttgcctctgccattcacattggtgatcctgtttcaattgac

SEQ ID NO: 7616 - DNA, 306 bp, Glycine max
  Clone ID: LIB3039-053-Q1-E1-A12
ggcacaagtgagtttggtgatcgagataactagaaacagtgtgatgaaaatgaaggtccttggtttcctcgttgctacaattttggtagcatggcaatgccatgcgtacgatatgttccctctccgaatgaacactggctatggtgcccgtactccggaggtgaaatgcgcaagttggaagcttgctgtggaagcacacaacatccttggctttgagaccaatcctgaagaatgcgttgaagcaacaaagggatacatccatggcgaacaatatagattagactccaaaacagttaaccaacaagc

SEQ ID NO: 7617 - DNA, 402 bp, Glycine max
  Clone ID: LIB3039-053-Q1-E1-A2
gagacacaatcacaaaccacatcattttcgccactctctctctctctctctgatatccaaataatggtatcaaatgtgaagagaagcccagtgaagtccatcaaggacctccgcaacaacaacaaccgtcgctggcgacggaaaacccccataaaaaatgtggtggcggcttcctccgccgcgctggccaccatccgccgccgtatcacgaaactcttctcgaagatcgcgcgcctcagcaccagcgcccacaagaaaaaagcaacctcctacaaaatcctcaagaagactacaacaatcgactgagaactccaaaagattctcccaaacctctcgtgttccacgacaccaccgccaccaccaccaccccgctcctccctcagttgttctccgtccgaaaaa

SEQ ID NO: 7618 - DNA, 238 bp, Glycine max
  Clone ID: LIB3039-053-Q1-E1-A3
attcaaccgcacgaatggatgtcgcaacaaacaccgccgcagccatgtcaaattcatccgatgctccaactgcagaaaatgctgccccaaggacaacgccatcaagatgtttttggttaggaacattgttgaacaagctgtagtcaaagatgtgcacgaaacttgtgtctatgaacaatatacacttccaaaactctatgtgaagatgcagtactgtgtttcctgtgctaaccactct

SEQ ID NO: 7619 - DNA, 401 bp, Glycine max
  Clone ID: LIB3039-053-Q1-E1-A4
gagggtttggctattagggttttcgctcaccggtgtgcagtcgagcccccgaagaaaaagcgaaaatgccgtcgcacaagacattcagaatcaagaagaagttggcgaagaagatgaggcagaacaggcctatcccctactggatccgcatgaggaccgacaacacgatcaggtacaacgcgaagcgccgtcactggcgtcgcaccaagcttggattctgaggtgcttgctttgcctcggttctgtttatccaattaattagtgttttattttcttgagccaaaaacaatgctttggagattttaataatttgcattttgttccaagactatattgggtgaagggaacttatggtatttcggactaatggtggtgttggtcaccttttttaaaagtatttg

SEQ ID NO: 7620 - DNA, 396 bp, Glycine max
  Clone ID: LIB3039-053-Q1-E1-A5
ggaggacaccatggccaacaacaacgaagaggaagaggaagcagtggcgccaatggtgaagttgggttcttacggtggtgaggttcggttggtggttggtggggaggaatccgctgcggaggagaccatgctgctttggggtattcagcagcccacactttccaaacccaatgccttcgtctctcaagcttccttgcaactctccctcgactcttgtggccactctctctccattcttcaatccccttcctcattgggaacgcctggagtaactggagcagtgatgtgggacagtggagttgtactgggaaagtttctagaacaatccgtttagccacagaatgcttgcccttcagggaaagaagattgttgaattgggttctggttgtggattgg

SEQ ID NO: 7621 - DNA, 316 bp, Glycine max
  Clone ID: LIB3039-053-Q1-E1-A6
gaaggtgcaagagtttgttgtgagctataagctagtttatcgtgaggagaatatgaagttgtttgttttctttgttgctgcagtagttttggtagcatggccatgccatggcgcaggctaccaaaggttccctctccgaatgaaaactggctatggtgagcgttcttcggaggtaaaatgcgcaagttttaggcttgctgtggaagcacacaacatccgagcctttaaaaccattcctgaagagtgcgttgaaccaacaaaggactacattaatggcgaacaatttagatcagactctaaaacagttaaccaacaa

SEQ ID NO: 7622 - DNA, 298 bp, Glycine max
  Clone ID: LIB3039-053-Q1-E1-A7
taatttgggaattattgctcccatcgccattggtttcattgtcggcgctaacattttgttgggtggggccttctctggagcggccatgaaccccgctgtgacatttgggcctgctgtcgtgagctggacctggaccaaccactggatctactgggccgggcctctcatcggtggtggaatcgctggccttgtttacgaggttgtctttatcagccacacccacgagcagcttcccaccactgactactagagggggggaaatgaaaataaaaaaaaaaaaaattgtgtattattgaat

SEQ ID NO: 7623 - DNA, 398 bp, Glycine max
  unsure (1)..(398): unsure at all n locations
  Clone ID: LIB3039-053-Q1-E1-A8
ggcacaagtgagtttgttgatcgagataactagaaacagcgtgatgaaaatgaaggtccttgttttcttcgttgctacaattttggtagcatggcaatgccatgcgtacgatatgttccctctccgaatgaacactggctatggtgcccgtactccggaggtgaaatgcgcaagttggaggcttgctgtggaagcacacaacatctttggctttgagaccattcctgaagagtgcgttgaagcaacaaaggaatacatccatggcgaacaatatagatcagactccaaaacagttaaccaacaagcttacctttaatccaangaaacttcgaattcaatcccaaggacacatttgtgctcagtatagatggcaccgtactctctaatattccatacta

SEQ ID NO: 7624 - DNA, 405 bp, Glycine max
  Clone ID: LIB3039-053-Q1-E1-B1
gaaggtgcaagagtttgttgtgagctataagctagtttatcgtgaggagaatatgaagttgtttgttttctttgttgctgcagtagttttggtagcatggccatgccatggcgcaggctaccaaaggttccctctccgaatgaaaactggctatggtgagcgttcttcggaggtaaaatgcgcaagttttaggcttgctgtggaagcacacaacatccgagcctttaaaaccattcctgaagagtgcgttgaaccaacaaaggactacattaatggcgaacaatttagatcagactctaaaacagttaaccaacaagctttcctttaagccaattgaacgcaaattccatcacaacgacatatttatattcggcatagataacaccgtactctctaatatcccaa

SEQ ID NO: 7625 - DNA, 379 bp, Glycine max
  Clone ID: LIB3039-053-Q1-E1-B10
ggcacaagtgagtttgttgatcgagataactagaaacagtgtgatgaaaatgaaggtccttgttttcttcgttgctacaattttggtagcatggcaatgccatgcgtacgacatgttccctctccgaatgaacactggctatggtgcccgtactccggaggtgaaatgcgcaagttggaggcttgctgtggaagcacacaacatctttggctttgagaccattcctgaagagtgcgttgaagcaacaaaggaatacatccatggcgaacaatatagatcagactccaaaacagttaaccaacaagcttacttttatgccagagacctcgaagtctatcccaaggacacatttgtgttcagtatagatggcaccgtactc

SEQ ID NO: 7626 - DNA, 385 bp, Glycine max
  Clone ID: LIB3039-053-Q1-E1-B11
ggtacaatcacaaaaaaaaatcgtctccttttctctctgcatttgagcaaagccaaaccacgtctgagtgagtgagttccgttggatggcgacgagcaccaccagcagcggtggcggcggcaccggcacccaaacattcaagccgtaccgtcacctgaaaaccctaaaagaccacgagaacgcggtatcgtgcgtgaagttctcgaacgacggaaccctcctagcctcggcctccctggacaaaaccctaatcatatggtcctccgccaccctcaccctctgccaccgcctcgtgggccactccgagggcatctccgacctggcctgggccctccgactcccactacatctgctccgcctccgacgaccacaccctccgcatctg

SEQ ID NO: 7627 - DNA, 402 bp, Glycine max
  unsure (1)..(402): unsure at all n locations
  Clone ID: LIB3039-053-Q1-E1-B2
ggcgtacgcagcttcatcnctaacgcgtgcatagcagagtcagagacagagacgcagccatggggcggagacctgcgacgtgttatangcaaattaagaacaagccataccccaagtcacgtttctgccgtggtgttcctgatcccaagatcaggatttatgatgttggtatgaagaagaacggtgttgatgagtttcctttctgtgtccatctggttagttgggagaaggaaaatgtttcaagtgaggccctggaagctgctcgcattgcttgcaacaagtacatggccaaatttgctggaaaggatgctttccacttgagnaatcacggggtacacccattcaatgttcttaggatcaacaagatgctttcgtgtgctggtgctgataggctccaaactg

SEQ ID NO: 7628 - DNA, 394 bp, Glycine max
  Clone ID: LIB3039-053-Q1-E1-B3
gaatgtaatacatagaatgggataaagcatagttattagaggtcggttctcagttgaagcgttaccctcgctggcgccgcatctctccgcagcaaagcgccgcacctcaccgcagcaacgcgccgcacctcactgcagcagctccgtcgccggcaacgccagtgggcctccagaaactgcagcgtttgggacgacggaaacaggctcgagctttgaaactttctgtgctttgctctgtttgaaagttctcgaacccctctgttgaacccttatcgaaactccgaatcctaattagttatgaatatttttaagcaaattatcagcaatgggtaatcccaaaaatccctggcagatagtgcaccctactaggttactttgctacagcgcaagctcc

SEQ ID NO: 7629 - DNA, 402 bp, Glycine max
  Clone ID: LIB3039-053-Q1-E1-B4
gaaagaaagaagattaagatagtgcatctcccgaaacagttgaccttgtgagatacagacacagcaccttcaattcttcatttctcaaatcgcaattcgtaaaaccataacaacacaaagtgtctcaaattcacattaaattctccctccccgaaaaggatgtcgttcgaggtggaggaggaggaggaggcgttcgagcacacgctcttggtggtgcgcgaggtgtcggtgtacaagatcccgccgcgcagcacctccggcggctacaagtgcggcgagtggctccagtccgacaagatctggtcgggccggatccgcgtcctgtctcggccgcaacggctgcaagatccgcctcgaggatccgagctccggcgagctcttcaccgcgtgcttcgtctaccc

SEQ ID NO: 7630 - DNA, 190 bp, Glycine max
  Clone ID: LIB3039-053-Q1-E1-B5
ggcatcaattcaaaatatatcatcaattataagcatgggtttgtggaacacgatgaatgcagtgtcctgccgctttcacaagcttggtgattaacagaagtatctggccttccagtgtgattgcacgtcatcgtccatgggcactgagctcacaaagttagacggtggtggaaaaccagtgggtggcact

SEQ ID NO: 7631 - DNA, 293 bp, Glycine max
  Clone ID: LIB3039-053-Q1-E1-B6
gacctcacccagttgcagaaagaaaagaccatcaaagtttcacttcagccttatccggtttagggtttcggtttttgacccaacctttgacgtatcgaaaccttaagtttcggatcaggtctgagcaatctggttggtagaacctttggtcttagagagtcaagttttatgtctgaattagacgatcaaattcctactgccttcgatccttttgctgatgcaaatgctgatgactcgggtgctgggtcaaaggagtatgtgcatattcgcgtacagcagcgaaatggttggaa

SEQ ID NO: 7632 - DNA, 395 bp, Glycine max
  Clone ID: LIB3039-053-Q1-E1-B8
gagaagagagagagagagagagagagagagtcctgaaacttgggtgcgattccttcactcgcaacaacaacacatcactatggctcttctgagtcgagcctcttcacgcttccctcagctggtttcccctcaaagggtagtttcactccacacaacgctcccatctctgaacgcatccccatccacagccacgcctacaccatatgccccgccaccgcctccgtccgcttcctctcccgccggcgtttcgaaggcggcggagttcgtgatctcgaaggtggacgatctgatgaactgggcccgccgcggctccaaactggccaagaaccttcggcctcgcctgctgcgccgtcgaaatgatgcacaccggcgccgcccgctacgatctcgaccgc

SEQ ID NO: 7633 - DNA, 384 bp, Glycine max
  Clone ID: LIB3039-053-Q1-E1-B9
ggcacaagtgagtttgttgatcgagataactagaaacagtgtgatgaaaatgaaggtccttgttttcttcgttgctacaattttggtagcatggcaatgccatgcgtacgatatgttccctctccgaatgaacactggctatggtgcccgtactccggaggtgaaatgcgcaagttggaggcttgctgtggaagcacacaacatctttggctttgagaccattcctgaagagtgcgttgaagcaacaaaggaatacatccatggcgaacaatatagatcagactccaaaacagttaaccaacaagcttacttttatgccagagacctcgaaatccatcccaaggacacatttgtgttcagtatagatggcaccgtactctctaa

SEQ ID NO: 7634 - DNA, 401 bp, Glycine max
  Clone ID: LIB3039-053-Q1-E1-C1
gattttcaggcagtcttttggggtttaaccgtgtacctctcacttcttctacgaccatcatcttccttccttccttcaatcgttctaactcttagcagccatggcgagcaccaaagttcagagggttatgactcagcccattaacttgattttcaggtttcttcagagcaaagcacgcattcagatttggctatttgagcaaaaggatttgaggattgaaggccgaatcattggttttgatgaatacatgaatttggttcttgatgatgctgaagaagtgaacatcaagaagaagagcagaaaaacattaaggaagatttcttcctaaggggagataacataactttaaggatgaacacggggaaatgatgaacactccttgacagttgtaaactatgttc

SEQ ID NO: 7635 - DNA, 381 bp, Glycine max
  Clone ID: LIB3039-053-Q1-E1-C10
ggaacctttgcattctattcattcaagattcagcaagtgcgttttggaagcagagaccgaaatacttcgagatggcccgtacaaagcaaactgctcgtaagtcaactggaggaaaagctcccaggaagcagcttgcaaccaaggctgcacgtaagtctgcaccaacaactggtggtgtgaagaagcctcatcgttatcgccctggaactgttgctcttcgtgagattaggaaataccagaagagcactgagctcctaatcaggaagcttcctttccagaggttggttcgtgaaattgcccaggatttcaagactgatctgcgtttccagagccatgctgtgcttgcattgcaagaggctgctgaggcataccttgttgggc

SEQ ID NO: 7636 - DNA, 330 bp, Glycine max
  Clone ID: LIB3039-053-Q1-E1-C11
caaaaagacaacagaaggggacaattgattttgttgttcaaaataactagaaccattgtgatgaaaatgaaggtccttgttttcttcgttgctacaattttggtaccatggaaatgcaatgcttacaatatgttccctctccgaatgaaaactggctatggtgcccgtactccggaggtgaaatgcgcaagttggaggcttgctgtggaagcacacaacatctttggctttgagaccattcctgaagagtgcgttgaagcaacaaaggaatacatccatggcgaacaatatagatcagactccaaaacagtttaacaacaggcttacttt

SEQ ID NO: 7637 - DNA, 382 bp, Glycine max
  Clone ID: LIB3039-053-Q1-E1-C12
gcaagttaagtgtaagggttcttcaacccccgtaccgtctcggcctctctgcaatcaacagccgaaaatgcctttcaagaggtacgttgaaatcgggagggttgctcaaatcaactacggcaaggaatatggcaagctcgtcgtcatcgtcgacgtcattgaccagaacagagcacttgtcgatgcccctgatatggtgaggtcccaagtcaatttcaaaaggctttcccttaccgacatcaagattgacatcaagagggtccctaagaagaaagatcttgtcaaagccatggaggatgctgatgttaagaacaagtgggagaagagttcatggggtagaaaactcattgttagaaagagaagggcatccctcaatgatttt

SEQ ID NO: 7638 - DNA, 401 bp, Glycine max
  Clone ID: LIB3039-053-Q1-E1-C2
gacaacacagaacaaaaacaaagaaaaaaaaaacccttagccaacacaaccatcatggccacctctgctattcagcaatcagcattcactggtcaaactgctctgaagcagctcaatgagttcgtccgcaagaccggtggcgccggcaaaggtcgcactaacatgcgccgcaccgtcaagagtgctcctcagagcatttggtatggccctgaccgtcccaagtacttgggtccattctcggagcagattccatcatacctgaccggagaattccctggtgactacggatgggacactgctggattatcagctgacccggaaaccttccgcaagaaaccggaacctggaggtgattcacagcagatgggcaatgcttggtgcccttggctgcaccttcccag

SEQ ID NO: 7639 - DNA, 394 bp, Glycine max
  Clone ID: LIB3039-053-Q1-E1-C3
gactgagaaacgcaatgagttcgtcgaacctcagagatcttcaacgcgaattggagaacaaagccaatgatctcagcaagcttcaaaaggaaattgcgaagaatcaccaaatgagaaagaaatacacggtccagcttggcgagaacgagctcgtccttaaggaactggatttattgaaagacgacgcaaatgtttataagttgattgggccagtacttgttaagcaagatttggccgaggccaatgcaaatgtccgcaagagaatcgaatacatctcagctgaattgaatcgtctggatgccactgttcaagaatttggaaagagaaccaaattaccaggaaagatacgatactaaaattgcaacaaaggattcaatcatttcaggctgggaaa

SEQ ID NO: 7640 - DNA, 401 bp, Glycine max
  Clone ID: LIB3039-053-Q1-E1-C4
ggcacaagtgagtttgttgatcgagataactagaaacagtgtgatgaaaatgaaggtccttgttttcttcgttgctacaattttggtagcatggcaatgccatgcgtacgatatgttccctctccgaatgaacactggctatggtgcccgtactccggaggtgaaatgcgcaagttggaggcttgctgtggaagcacacaacatctttggctttgagaccattcctgaagagtgcgttgaagcaacaaaggaatacatccatggcgaacaatatagatcagactccaaaacagttaaccaacaagcttacttttaggccaaaggaccccgaattccatcccaaggacacatttgtgttcagtatagatggcaccgtactctctaatattccatactacaaa

SEQ ID NO: 7641 - DNA, 317 bp, Glycine max
  Clone ID: LIB3039-053-Q1-E1-C5
ggcacaagtgagtttgttgatcgagataactagaaacagtgtgatgaaaatgaaggtccttgttttcttcgttgctacaattttggtagcatggcaatgccatgcgtacgatatgttccctctccgaatgaacactggctatggtgcccgtaccccggaggtgaaatgcacaagttggacgcttgctgtggaagcacacaacatctttggctttgagaccattcctgaagagtgcgttgaagcaacaaaggaatacatccatggcgaacaatatagatcagactccaaaacagttaaccaacaagcttacttttatg

SEQ ID NO: 7642 - DNA, 380 bp, Glycine max
  Clone ID: LIB3039-053-Q1-E1-C6
tggggcacaagtgagtttgttgatcgagataactagaaacagtgtgatgaaaatgaaggtccttgttttcttcgttgctacaattttggtagcatggcaatgccatgcgtacgatatgttccctctccgaatgaacactggctatggtgcccgtactccggaggtgaaatgcgcaagttggaggcttgctgtggaagcacacaacatctttggctttgagaccattcctgaagagtgcgttgaagcaacaaaagaatacatccatggcgaacaatatagatcagactccaaaacagttaaccaacaagcttacctttaagccaaaaaacctccaggtccatcccagggacacatttgtgttcagtacagatggcaccgta

SEQ ID NO: 7643 - DNA, 183 bp, Glycine max
  Clone ID: LIB3039-053-Q1-E1-C7
ggcacaagtgtgtctatagatctatagtccctcagattatcttgacattgcctgtttcgtttgttgctacacttctgctatcttgatactgctattgctcaaagtcaccgaacttccctctctcactgagtccagcgtgtcgtgagccatctcgtccttagggcacaggtcttattgggaggc

SEQ ID NO: 7644 - DNA, 320 bp, Glycine max
  Clone ID: LIB3039-053-Q1-E1-C8
gaagcaacaccccttctatcagtgtgttttcttttccctaccaacttcttctactcttccccacacgatactactacacaaatggagaaccaactcgaactgaaccctaactcgctgaccgaactcagtgagtcctcggcgccgtccgacgacgacgaaccggctctgagctcccacaccctcgccgccctcaaagaattcctcgccgagcagcaacgcggctccgacgccggcggagagtccgaggtttctctggtgtctgaggattggacgctgagccagttctggtacagccccgaaaccgccacaaccgtcgccga

SEQ ID NO: 7645 - DNA, 322 bp, Glycine max
  Clone ID: LIB3039-053-Q1-E1-C9
ggcacaagtgagtttgttgatcgagataactagaaacagtgtgatgaaaatgaaggtccttgttttcttcgttgctacaattttggtagcatggcaatgccatgcgtacgatatgttctctctccgaatgaacactggctatggtgcccgtactccggaggtgaaatgcgcaagttggaggcttgctgtggaagcacacaacatctttggctttgagaccattcctgaagagtgcgttgaagcaacaaaggaatacatccatggcgaacaatatagatcagactccaaaacagttaaccaacaagcttacttttatgccaga

SEQ ID NO: 7646 - DNA, 399 bp, Glycine max
  Clone ID: LIB3039-053-Q1-E1-D1
ggcacaagtgagtttgttgatcgagataactagaaacagtgtgatgaaaatgaaggtccttgttttcttcgttgctacaattttggtagcatggcaatgccatgcgtacgatatgttccctctccgaatgaacactggctatggtgcccgtactccggaggtgaaatgcgcaagttggaggcttgctgtggaagcacacaacatctttggctttgagaccattcctgaagagtgcgttgaagcaacaaaggaatacatccatggcgaacaatatagatcagactccaaaacagttaaccaacaagcttacctttaagccaaagaacctccaattccatcccaaggacacatttgtgttcagtatagatggcaccgtactctctaatattccatactaca

SEQ ID NO: 7647 - DNA, 381 bp, Glycine max
  Clone ID: LIB3039-053-Q1-E1-D10
ggcacaagtttgttgagatagctagaagcaataagatgaaaatgaaagtgcttgttttgtttgttgctacagttttggtagcatatgaatgccatggctcagactaccagaagttccctctccaaatgaaaactgggtttggtgggcaatacagcaatgaggtggcatgtgccagttggaggcttggcgtggaagcaaacaacgtagtcaagtggcaaactgttcctgcagcttgcggagagtacatagctgactacgttctaggagaccaatatagatcagattccaaaacagttaaccaacaagcttatttctatgctaaatccctcagactcaccaacaaagatgtctttgtcttggacgttgacgacactactctct

SEQ ID NO: 7648 - DNA, 376 bp, Glycine max
  unsure (1)..(376): unsure at all n locations
  Clone ID: LIB3039-053-Q1-E1-D11
ggaagtcgccgtttgttttcttttcgttcgcatcttctctctctctcagaaagatgaaggtggtcgccgcgtatttgctcgccgtcctcggtggcaacaacagcccctccgccgatgtcatcaaggaaatccttggctccgttggagtagaagcagatgaagataggattgaatcgtttttgtctgaagttaagggtaaggatatagttgagcttattgctgccggtagggaaaagttggccacggttccttctggtggtggtggtgccgttgccgtcgccgcagctcctgngggaggtgctgctgctgctgctcctgctgctgaggcaaaaaaagaagaaaaagtggaggagaaagaggaatctgatgatgatat

SEQ ID NO: 7649 - DNA, 381 bp, Glycine max
  Clone ID: LIB3039-053-Q1-E1-D12
ggaaaccctaaaccccgttttcggtgagatcgagatcgatcgaacatggatgaggagtacgatgtgatcgtgttgggcacgggtctcaaggagtgcattctcagcggtcttctctccgtcgatggcctcaaggttctgcatatggataggaacgactattacggaggagaatccacttcgctcaatcttattcagctttggaagagattcaggggagatgacaagcctcctccacatttgggcgctagcagggactacaacatcgatatgaaccccaagtttattatggctaatggcaatttggtgcgggttctcatacataccgatgttacaaagtatctctatttcaaagctgtggatgggagctatgtgtttaataaa

SEQ ID NO: 7650 - DNA, 397 bp, Glycine max
  Clone ID: LIB3039-053-Q1-E1-D2
gaaaacgattatttcgagtcccaaagagctaacaagagattcaagaccggcatgggtaatgaagaggaacagagaaaccacctcttcggcatcaaagatctcggtcacaagactctccttcagagtgatgcactctagcagtatatacttgaaaccagtgtctatccaagagagcacgagtgcttgaaagagatacgcaagatgactgcagaacacccactgaacatcatggcaacaccagcagacgaaggagaacttctgagcatgcttgttaagctcacgaattcaaagaacgccttggaaattggtgtattcaatgggtaatccccggacctcaatggccctggctcttccccctgatggaaagatcttggctttggatgtgaatcgcgaatac

SEQ ID NO: 7651 - DNA, 353 bp, Glycine max
  Clone ID: LIB3039-053-Q1-E1-D3
gcacgcgtcagtacgatggcaaaaaaacgacaaaagggggcacaattaattttgttgttcaagataactaaaaacattgtgatgaaattgaaggtccttgttttctccgttgctacaattttggtagcatggaaatgcaatgcgtacgatatgttctctctccgaatgaacactggctatggtgcccgtactccggacgtgaaatgcgcaagttggatgcttgctgtggaagcacacaacatctttggctttgagaccattcctgaagagtgcgttgaagcaacaaaggaatacatccatggcgaacaatatagatcagactccaaaacagttaaccaacaagcttactttta

SEQ ID NO: 7652 - DNA, 308 bp, Glycine max
  unsure (1)..(308): unsure at all n locations
  Clone ID: LIB3039-053-Q1-E1-D4
gcaaaattaatttggttgttcaaaattacaaaaaacattttaataaaattaaaggcccttgtttcctccgttcaaaaattttggaacaatggaaatgcaaggccttcgataggttccccccccaaatgaacactggctatggtgcccgtactccggaggtgaaatgcgcaagttggaggcttgctgtggaagcacacaacatctttggctttgagaacattcctgaagagtgcgttgaagcaacaaaggaatacatccatggcgaacaatatagatcagactccanaacagttaaccaacaagcttac

SEQ ID NO: 7653 - DNA, 312 bp, Glycine max
  Clone ID: LIB3039-053-Q1-E1-D5
gagacgttcacattcaggaatcgttttcttcagaaatttgtcatcgttgagagaagcgtgagagccttagtcgttcagcatgagagctaagtggaagaatatgcgcattctgcggttgacgaggaagcgccgagtgatgagacaggtatctaagtaggtgcttgagcaggttttgagattagcgttccatctgacagcatccgcaggacattttaggatgttatggatcttatgatcatgaggtctagtcgcttcgggagcttcactcttgacttagtttgctttaatggtcctgggacgggtccatgacta

SEQ ID NO: 7654 - DNA, 321 bp, Glycine max
  Clone ID: LIB3039-053-Q1-E1-D6
gaaggtgcaagagtttgttgtgagctataagctagtttatcgtgaggagaatatgaagttgtttgttttctttgttgctgcagtacttctggtaccatggccatgccatggcgcacgctaccaaaggttccctctccgaatgaaaactggctatggtgagcgttcttcggaggtaaaatgcgcaagttttaagcttgctgtggaagcacacaacatccgagcctttaaaaccattcctgaagagtgcgttgaaccaacaaaggactacattaatggcgaccaatttagatcagactctgaaacagttaaccaacaagcttt

SEQ ID NO: 7655 - DNA, 397 bp, Glycine max
  Clone ID: LIB3039-053-Q1-E1-D7
gagggttacacgccgtcgtctctgtttttgtgtgtcgcttcttcgtaagtgcagctgcaatggtgaagggacgccaaggagaacgtgtcagactctacgtgaggggtacaatccttggatacaaaaggtccaagtcaaaccagtatccaaatacatccctgatccaaattgagggtgtgaatgccaaagaagaagtagcatggtatgctggcaagaaaatggcctatatctacaaggctaaggtgaagaagaatggaagccattaccgctgcatatggggcaaggttacaaggcctcatggtaacagtggtattgtccgtgtaaaaatccaattccaaccttccacctaaattaatgtgaccccgaataggagtattcatgtatccaagcaacatat

SEQ ID NO: 7656 - DNA, 329 bp, Glycine max
  Clone ID: LIB3039-053-Q1-E1-D8
gagtggtagtgagtgatacattcagctgcacaatgaatcccaatgtagagaaacagcacactctcacctcactcacttgtccttgttatatttgttttatatcttgtcacaatctgtgactgttcgagttatccgaggcccctcttttatatggtcgttgataaaatggcttcggcccttttaacaaagatgcttttgggtcaccgattgatacacccttcttcgttcctcactcaccagccacagattctctcttctctattcagtaaacggctgttttgtatacgagctgtcccggtctcagcctctacatcccaaaacatcaaaac

SEQ ID NO: 7657 - DNA, 378 bp, Glycine max
  Clone ID: LIB3039-053-Q1-E1-D9
gcacaagtgagtttgttgatcgagataactagaaacagtgtgatgaaaatgaaggtccttgttttcttcgttgctacaattttggtagcatggcaatgccatgcgtacgatatgttccctctccgaatgaacactggctatggtgcccgtactccggaggtgaaatgcgcaagttggaggcttgctgtggaagcacacaacatctttggctttgagaccattcctgaagagtgcgttgaagcaacaaaggaatacatccatggcgaacaatatagatcagactccaaaacagttaaccaacaagcttacttttatgccagagacctcgaattccatcccaaggacacatttgtgttcagtatagatggcaccgtactc

SEQ ID NO: 7658 - DNA, 393 bp, Glycine max
  unsure (1)..(393): unsure at all n locations
  Clone ID: LIB3039-053-Q1-E1-E1
ggtaaaggcaaagtacagacaaagttagttagaaattgaaagggaaagggaaacgaaaatgagtagtagggtttggtgtgtggtgatggtatcagcgttggcgttgatgttacaatggcacgaagcattcagctcctacgctggctccgcaagtgcgatcatcgacccttccaaggtcaaacaagtttcgtggaaaccgagagctttcgtttacgagggttttctgacggaattggaatgcgatcacttgatttccatcgccaaatcggagctcaagagatccgcggtggccgataaattgtcccggganaacaaagttttaccaaatctcaaaacaacctccgggcatgttcattcccaagaacaaggatctgattgttgctggtattgaaa

SEQ ID NO: 7659 - DNA, 381 bp, Glycine max
  unsure (1)..(381): unsure at all n locations
  Clone ID: LIB3039-053-Q1-E1-E10
ggactgagggaaggagcaagcctcgtggaagtggtcaagcaagtgaagcctgacgttctcctaggattatcggctgttggaggattattctcaaaagaggtactagaggccctcaagggttcaacatcaaccagaccagccatatttgctatgtcaaatccaacaaagaatgctgaatgcaccgctgaagaagcattctccattttgggtgacaacattatttttgcaagtggaagtccattcagtaatgtggatcttggaaatggtcatattggccattgcaaccagggaaacaacatgtacctctttccaggcattggtctcggaactcttctttcaagcgctangatcgtctctgatggcatgctgcaggctgcagct

SEQ ID NO: 7660 - DNA, 377 bp, Glycine max
  Clone ID: LIB3039-053-Q1-E1-E11
gacaggcaaaaaccctagccttcgaaaaccctaatcctgaggcactgtgatatggcaagagccgtttcctcttcctgcgcgcgcctcacaatgcgcctcttctccaccaccaccaccaccaccaccaccaccgctgcgttcgccgttacattacccaaaccctcgtcactctcagtctcaacgcgtcgattcctcttccctctctcccatgccatcgtccctccctccacccgcgtcgccggaatccggtgccgtgtcaaccgcgccggcgactcagcgtactcgccgctgaactcagcttcgtcatcgtcgtcgtcgttcagcgaccgggctcccacggagatggcgccgccctttcccggctgcgactacaacca

SEQ ID NO: 7661 - DNA, 379 bp, Glycine max
  Clone ID: LIB3039-053-Q1-E1-E12
gaccgtcgcatatttctgtgccaacaaaagaagatggcctcacaggtttgcaaagctgcttccagagccgcgaggtcccttctctccgcttccagagcctcccatggacgtgcggttggggctgctacggctgtttcattgagctgcaaagtgcctcttttctacggaaagaacggttctggaagtggttccgcttcatcatcatcatcatcatggatttcaggagcacttgctcttcctgccgcagcttacatgttccaagatcaggaggtgcgcgcagctgagctggagcgcactttcattgccattaagcctgatggagtgcagagaaggctgatttctgagattatatctcgttttgagcggaaagggtacaagc

SEQ ID NO: 7662 - DNA, 401 bp, Glycine max
  Clone ID: LIB3039-053-Q1-E1-E2
gaccacattccaaaacacaaacacatacattgtagtatcacttttgtctcggaatttgttcttttgagttatggcaagcttaaaggttgcatgtgtggttttgatgtgcatggctgtgatgagtgcaccaatgatggtgcaagccgtgtcatgcaatgatgtttctgtgaacctagcaccgtgcctatcttacctgatgcagggtggagatgttccagaatcgtgctgtagcggagtgaggaacattctgggttctgccagcaccacctttgacaaacaaaccgtgtgcaaatgtcttcagcaagctgctaataactatgggatcaacgaacaataaccctcaggaattccccgcccgctgcaatgtcagcgtcccttacaagatcagccgatccaccaac

SEQ ID NO: 7663 - DNA, 363 bp, Glycine max
  unsure (1)..(363): unsure at all n locations
  Clone ID: LIB3039-051-Q1-E1-F5
gaaggtgcaagagtttgttgtgagctataagctagtttatcgtgaggagaatatgaagttgtttgttttctttgttgctgcagtagttttggtagcatggccatgccatggcgcaggctaccaaaggttccctctccgaatgaaaactggctatggtgagcgttcttcggaggtaaaatgcgcaagttttaggcttgctgtggaagcacacaacatccgagcctttaaaaccattcctgaagagtgcgttgaaccaacaaaggactacattaatggcgaacaatttagatcagactctaaaacagttaaccaacaagctttcttttatgctagtgaacgcgaagtccatcacancgacatatt

SEQ ID NO: 7664 - DNA, 388 bp, Glycine max
  Clone ID: LIB3039-049-Q1-E1-H1
aggggacggcaaacagaaagaataatcgagacacagatcatagtgatcattttttaatttctcagatttatccgacgtcgctgcagatccaccaaccgttatggctgccttcagcggtgatgaaacggcaccgtttttcggcttccttgggggccgcagctgccctcgtcttctcctgtatgggagctgcctatggcacagcgaagagtggcgtgggcgtggcttccatgggtgtaatgagacctgagctggtgatgaagtcgattgttcctgttgtcatggctggagttttgggcatttatggccttattattgctgttattatcagtaccggtattaatccaaaggccaaatcctattacctctttgatggttatgcacatctctc

SEQ ID NO: 7665 - DNA, 387 bp, Glycine max
  unsure (1)..(387): unsure at all n locations
  Clone ID: LIB3039-049-Q1-E1-H10
ggttgtactttttcttgaatttcgttctgagtggagactatttcaagatcaccatcactcctctcattttgcgggaaagttcaagagaagatggtaactagaattgtggatcttcgttcagacacagttacaaagccaactgaagcaatgagagctgctatggcaagtgctgaagttgatgacgatgttctaggctatgatccaactgcttttcgcttagaaacagagatggcaaagacaatgggcaaagaagctgctctttttgttccatctggcactatggggaaccttgtatctgtacttgttcattgcgatgtcangggaagtgaggttattcttggagacaattgccatatcaacatttttgagaatggaggcattgcaacc

SEQ ID NO: 7666 - DNA, 380 bp, Glycine max
  unsure (1)..(380): unsure at all n locations
  Clone ID: LIB3039-049-Q1-E1-H11
gaccacaccaccctactacattcccacctttagtcttgttcttagagatggcttgtgaaaccaagtcatggttggttatgtttcttgttttcttggttgctaattgcatgcaacattgtgtccacggggtgtctcaagtgccttgcctttttatctttggggactctatgtctgatagtggaaacaacaatgaacttccaaccacttcaaaatctaatttcagaccatatgggatcgactttccattacgaccaactgggagatatacaaatggccgaacagaaattgacataatcactcaatttctgggatttgagaaatttatcgcaccctttgcanacactagtggttcagacatacttaaaagtggtaactatgca

SEQ ID NO: 7667 - DNA, 385 bp, Glycine max
  Clone ID: LIB3039-049-Q1-E1-H12
gaagagtttgttgtgagctataagctagtttatcgtgaggagaatatgaagttgtttgttttctttgttgctgcagtagttttggtagcatggccatgccatggcgcaggctaccaaaggttccctctccgaatgaaaactggctatggtgagcgttcttcggaggtaaaatgcgcaagttttaggcttgctgtggaagcacacaacatccgagcctttaaaaccattcctgaagagtgcgttgaaccaacaaaggactacattaatggcgaacaatttagatcagactctaaaacagttaaccaacaagctttcttttatgctagtgaacgcgaagtccatcacaacgacatatttatattcggcatagataacaccgtactct

SEQ ID NO: 7668 - DNA, 374 bp, Glycine max
  Clone ID: LIB3039-049-Q1-E1-H2
ggagaggaatcaggatcgcgtttgggagaagaagagcaaaatcgctgtgaaaatgagcggaacggtgaagaaagttagcgatgtagcattcaaagtgggaaggaacatcgattgggatggaatggcgaagcttctggtctccgatgaagctcgcaaggagttctccaatctccgtcgcgctttcgacgaggttaactcccaactccaaaccaagtttagccaggaacctgagcccattgattgggattactatagaaagggaattggcactcgtttggtggatatgtacaaggagcattatgagagcattgagatccccaagtttgttgatacagtaactcctcaatataagcctaaatttgatgcccttttga

SEQ ID NO: 7669 - DNA, 404 bp, Glycine max
  Clone ID: LIB3039-049-Q1-E1-H3
ggaaaaattaatttggttgttcaaaatactaaaaaaattgtgatgaaaatgaaggtccttgttttcttcgttgctacaattttggtagcatggcaatgccatgcgtacgatatgttccctctccgaatgaacactggctatggtgcccgtactccggaggtgaaatgcgcaagttggaggcttgctgtggaagcacacaacatctttggctttgagaccattcctgaagagtgcgttgaagcaacaaaggaatacatccatggcgaacaatatagatcagactccaaaacagttaaccaacaagcttacttttatgccagagaactcgaagtccatcccaaggacacatttgtgttcagtatagatggcaccgtactctctaatattccatactacaaaaaaca

SEQ ID NO: 7670 - DNA, 368 bp, Glycine max
  Clone ID: LIB3039-049-Q1-E1-H5
gaaggtgcaagagtttgttgtgagctataagctagtttatcgtgaggagaatatgaagttgtttgttttctttgttgctgcagtagttttggtagcatggccatgccatggcgcaggctaccaaaggttccctctccgaatgaaaactggctatggtgagcgttcttcggaggtaaaatgcgcaagttttaggcttgctgtggaagcacacaacatccgagcctttaaaaccattcctgaagagtgcgttgaaccaacaaaggactacattaatggcgaacaatttagattagactctaaaacagttaaccaacaagctttcttttatgctagtgaacgcgaagtccatcacaacgacatatttatat

SEQ ID NO: 7671 - DNA, 402 bp, Glycine max
  unsure (1)..(402): unsure at all n locations
  Clone ID: LIB3039-049-Q1-E1-H6
ggacaagccaatcctttgtgtaggtgctcaaccctagtaagccgcaatggtgaagtactcaagggagcctgacaatccaactaagtcttgcaaggctagaggcgccgaccttagggctcattttaagaacacaagggaaactgcctttgcaatcaggaagttgcccttggtcaaggctaaaaggtacttggaagatgttcttgcccacaagcaggcaattccattcagacgtttttgtcgaggtgttggaaggacagcccaggctaagaatagacactctaatggccaaggacngtggcctgtcaagtcagcaaaattcaatcctgatttgctcaanaatgctgagagcaatgcttaagtgaaacgtttggatgttgatgcactgtacatttcgcatatcca

SEQ ID NO: 7672 - DNA, 402 bp, Glycine max
  unsure (1)..(402): unsure at all n locations
  Clone ID: LIB3039-049-Q1-E1-H7
gggagtgtcattgtgaagttggaaacaatgctagcttcttcgctctccttcctccattcttgcacatccccctcttcctcttccttattgtcaatttcacctccaaaccccaaaccctctcacttcctacctttcgtggtcgaagccaaagacaggacccgcagggaagacaggaccgctcgccacactcgcatcagaaagaaggtcnaagggacgcccgaaaggccgaggctgtccgtgttccggtcgaacaagcatctctctgtgcaggtgattgatgacaccgcaatgcgcacgcttgcttcggtgtcgacaatgcagaagacggttgctgatgatttcaactactccgctggccctacatttgaagtaccanagaggatgggtgagatcattgcaaaa

SEQ ID NO: 7673 - DNA, 372 bp, Glycine max
  Clone ID: LIB3039-049-Q1-E1-H8
gatagccactacttgcttccacttctgattcagaaactcttaggcattccacattctcaaccccgaaccctaagagcagagcgaaaatgacaaccaccttcgcgaccgtcgcaggactcggtggcgcattactgtcatccacctcatctcgtctcaactcagggtttgtgaaatccccagtgattgctaggaatcccttgaggcaagctgtggcaatgggaaatgggaggattacatgctttgagaggaattggctgcgggcagattacagtgtgattgggtttgggttgattggttggctagcaacctcaagcataccggctatcaacggtaaaagtctgactggcctcttctttgagagcattggtgctg

SEQ ID NO: 7674 - DNA, 353 bp, Glycine max
  unsure (1)..(353): unsure at all n locations
  Clone ID: LIB3039-049-Q1-E1-H9
gcttctctttctttgtcacaaacacaacacagcacccttcacacactgcacagtgcctcctttctagtttctactatctgcttcttcttcttcaattagggttttccccttctccgagatcagcgccaacatcatgaacatgaatatcttcaagaagaaaacctcacccaaagaggctctgcggtcaagtaagagggaaatggctgttgcaaccagaggaattgaaagagagatagcatcacttcagatggaggaaaaaaaattggtggcagagattaaaagagaagcaaaaacaggaaatgaggctgccnacagaatcttagctcgtcaacttgttaggttacgtcaacaga

SEQ ID NO: 7675 - DNA, 339 bp, Glycine max
  Clone ID: LIB3039-050-Q1-E1-A1
atggcacttgtattgttgaacaaaggtttctccgtctgcttcgtcactttccctcgtttcaatcgaaaccaaaactaatcacatggacactaaattcctcgtcagtggcaactggaaatgcagtgggaccactgaggatgatttgaagattgttactaatttgactgaggctaaagtccctgtacgaatatgtcgtagcaaattgtgttgatgcccacctttcgtgttccttcctgttgtaaacagtttacagcgccctgatttccatgtttcaggacagcactgttcggttcgaaaaagtcgtgcttacaccggtgatgttattgctgatctgcatgt

SEQ ID NO: 7676 - DNA, 370 bp, Glycine max
  Clone ID: LIB3039-050-Q1-E1-A10
gaccacattccaaaacacaaacacatacattgtagtatcacttttgtctcggaatttgttcttttgagttatggcaagcttaaaggttgcatgtgtggttttgatgtgcatggctgtgatgagtgcaccaatgatggtgcaagccgtgtcatgcaatgatgtttctgtgaacctagcaccgtgcctatcttacctgatgcagggtggagatgttccagaatcgtgctgtagcggagtgaggaacattctgggttctgccagcaccacctttgacaaacaaaccgtgtgcaaatgtcttcagcaagctgctaataactatggcatcaacgacgaatacgctcatgcactccccgcccgctgcaatgtcagc

SEQ ID NO: 7677 - DNA, 177 bp, Glycine max
  Clone ID: LIB3039-050-Q1-E1-A11
gaactacatgagagtgcacttacgtagtgtgtgggagacaaagagagatggctaagtggtgcatgttggtgttggttcgtgctctagctctggctgtggccacgagttccatagatgcacccgatgatgttggtctcaaggactacgatgacattcatcagctatttctggagttgg

SEQ ID NO: 7678 - DNA, 367 bp, Glycine max
  Clone ID: LIB3039-050-Q1-E1-A12
ggagtatcaacaagaatactcataataatatagtggctagcatagagctagtaataatattaatattgttaagctagctctaagccatggctaatgaacgtgatctgttctcggcggagattgtgaaccgtggaattgaatcgtcaggaccaaacgctgggtcgttgacgttttcggtgagggtgagaaggcgcttaccggattttcttcaatcggtgaaccttaagtacgtgaaattgggttaccattatctgataaaccatggcatatacttgttcaccataccggttcttctcgtggtgtttagtgctgaggttggaagcctcagcaaagaggacctatggaagaagctttgggaagacgcgcg

SEQ ID NO: 7679 - DNA, 392 bp, Glycine max
  Clone ID: LIB3039-050-Q1-E1-A2
gagtattcagattacattgcaaaaatggcatcattcaccatgacagcttccatccttggcagcccagccgtcaccaaccggtcggcagtagcaacgcagaggagatcactcgtagtgaatgctgccaaagctgttgaagcagagaaggtcagttatgacaatgacatggatggtagcaatggaaggaggaacttgatgttcgccgcggcggctgctgcagtttgctctgttgctgggatggcagtggcagatgagcctaaaccaggaaccccagaagccaagaagaagtatgctccgatttgtgtcaccatgccaactgctatgatttgtcgcaattgagggactttggtttttattttacttctgatgattggaaatgtacaatggggttg

SEQ ID NO: 7680 - DNA, 413 bp, Glycine max
  Clone ID: LIB3039-050-Q1-E1-A3
agacgacagaaggggaagccttcaaatattttcctttttagctttgattagagtggcctagttgttgtttttctcaatgagaagggtttttactatgcattgcgcactttggcgcttctgtgttcccttgttgctacttgctagcttcagttatgctccttttgttttggccactgaaatttcagggaatgaagtgagcactgatggaaaggttttaaatgaagagttagcagaacctaatctacaaggacatgatgaagaagcaaagtttaaaggatttattccaaagccaattcccatagtgaagcctattccaaaaccatttcccatcattaagcctattccaaagataattcctatcgccaaacctattcctattccgatttataagcctatatcaaaatcaattccca

SEQ ID NO: 7681 - DNA, 386 bp, Glycine max
  Clone ID: LIB3039-050-Q1-E1-A4
ggcacaagtgagtttgttgatcgagataactagaaacagtgtgatgaaaatgaaggtccttgttttcttcgttgctacaattttggtagcatggcaatgccatgcgtacgatatgttccctctccgaatgaacactggctatggtgcccgtactccggaggtgaaatgcgcaagttggaggcttgctgtggaagcacacaacatctttggctttgagaccattcctgaagagtgcgttgaagcaacaaaggaatacatccatggcgaacaatatagatcagactccaaaacagttaaccaacaagcttacttttatgccagagacctcgaagtccatcccaaggacacatttgtgttcagtatacatggcgccgtactctctaata

SEQ ID NO: 7682 - DNA, 351 bp, Glycine max
  Clone ID: LIB3039-050-Q1-E1-A5
ggcaggcgaagagatggccaccgttccagggcagctcgtgtgggagatcgtcaagaaaaacaattccttcttggtcaagcagtttggaaggggcacccagagcgtcgaattcagcagagagagcaacaatctctacaacctcaattcgtgcaagtactctggtttggcaaacaagaaaactgttactgttcagcctgatggcagagatcaggctgtcttgttggctacaatcaatacaaagaagcaaaacatgcccgctgcattgctccacaaatctgtgactaacaaggacttcaggacgatggcaaaagctgttgaaaaccaggtggccaaaaattaccacaggcctga

SEQ ID NO: 7683 - DNA, 162 bp, Glycine max
  Clone ID: LIB3039-050-Q1-E1-A6
gaccgacacagacagtgacttcagtgagtgatcagtgttcacttgatcgcagcataatcgtcagcgtcacttgcgtaagatgcccataagcaacatcgccgtcggaaggcccgaagacgtgactcatgcctacaagttgaaagcggctttggctgaattcat

SEQ ID NO: 7684 - DNA, 378 bp, Glycine max
  unsure (1)..(378): unsure at all n locations
  Clone ID: LIB3039-050-Q1-E1-A7
gaacagccacaacactttccacttgtctccgaattagttatcttgagaaacattattcccattgctatatattatggctagcatgaaggttacatgggtggttgtgatcatgtgcatggccgtggtgggtgcaccgatgatggcgcaagccatgacatgcaatgatgtgacggtgaacatggcacagtgcctatcctacctgatgcagggaggaacaccttcaacactttgctgcagcggagtcaagaacattcttggctctgctgtcaccaccgttgacaaacaaactgtgtgcaactgtctcaaggcggatgctgctaggtacaacatcaatgaccagtatgctcaagcactcnctggtttctgcaaggtcaatgt

SEQ ID NO: 7685 - DNA, 369 bp, Glycine max
  Clone ID: LIB3039-050-Q1-E1-A8
ggaacttctcacgttcatttctacacatccctagctctgtcgttccgtcgtgacgatggcgtttcgggtgcgaagccctgacctccgctctctctttcttctctctctcttgtccatcgcttccgccaatgtcttcttcgaagagcgtttcgatgacgggtgggaaaatcgatgggttaaatcagattggaaaaaagatgagaacgtggctggggagtggaaccacacctctggtcaatggaatggagacgctaatgacaaaggtattcaaaccagtgaggattacagattctatgttatttcagctgagtaccctgaattcagcaacaagggtaagacactagtctttcaattttctgttaagcacga

SEQ ID NO: 7686 - DNA, 366 bp, Glycine max
  Clone ID: LIB3039-050-Q1-E1-A9
ggcacaagtgagtttgttgatcgagataactagaaacagtgtgatgaaaatgaaggtccttgttttcttcgttgctacaattttggtagcatggcaatgccatgcgtacgatatgttccctctccgaatgaacactggctatggtgcccgtactccggaggtgaaatgcgcaagttggaggcttgctgtggaagcacacaacatctttggctttgagaccattcctgaagagtgcgttgaagcaacaaaggaatacatccatggcgaacaatatagatcagactccaaaacagttaaccaacaagcttacttttatgccagagacctcgaagtccatcccaaagacacatttgtgttcagtataga

SEQ ID NO: 7687 - DNA, 347 bp, Glycine max
  Clone ID: LIB3039-050-Q1-E1-B1
aaatgggttaaaaagggcaatgcaccggaactgcccgagactcgtaataattacaacacgctggtgtctcttggattcaagattatagtcttgtcacgaagaacactggacaaacaggccgtaacagaaccaaccttaacaaaggttgctaacaaacattggaaaaattaaatctcaatgatccacacgatccttccactccaaatgcagtttcatacaagacagcatcgagagagacactgataaagcacggatacaacattcatgggatcactgttgaacaatggagcgatatcctcggaggccacagattgaaatgcatgacctttaaacttcataatcccctg

SEQ ID NO: 7688 - DNA, 359 bp, Glycine max
  unsure (1)..(359): unsure at all n locations
  Clone ID: LIB3039-050-Q1-E1-B10
ggattggaggattgtggagattctgcataaaaggtttcttaaatttgaaaagaagaattggaggatctcttacaattccctgatcgtgcttgagcacttgttgactcatggaccagagagtgttgcggaggaatttaagagtgacaaagatgtcattagccaaatgaaaggttttcagtatattgatgacactgggtttaattggggcctaactgtgagaaagaaatctgagaggataatgaaactgctggaaaaagggactcttctcaaggaagagagaaaaaatgctagaaggttatctanagggattgaaggtttcggaagtttctctcatcggtcaactccggcacaaggtgttc

SEQ ID NO: 7689 - DNA, 307 bp, Glycine max
  Clone ID: LIB3039-050-Q1-E1-B11
ggatccacagatttcgcgaatactgcaaaaatagcacgcgctggtatcacctttcgccaaaccagctattccaatcctcccaatttccacaatcttcaatcttcacactctgcttcacctttcttcatttcacttcagagagagagaacaatacacaatgggcgtcgtggtgatcgacggcagcagcgtgcgcgacttcgtgaaggacgaaaccggcttcaacaacagcgtggacgatcagttctcggcgctggatctcaacaactaccgcgtcctctcgcgctcggagctcccgcacggccttcga

SEQ ID NO: 7690 - DNA, 267 bp, Glycine max
  Clone ID: LIB3039-050-Q1-E1-B12
agaagggggcacaagtgagtttgttgatcgagataactagaaacagtgtgatgaaaatgaaggtccttgttttcttcgttgctacaattttggtagcatggcaatgccatgcgtacgatatgttccctctccgaatgaatactggctatggtgcccgtactccggaggtgaaatgcgcaagttggatgcttgctgtggaagcacataacatctttggctttgagaccattcctgaagagtgcgttgatgcaacaaatgaatacatcc

SEQ ID NO: 7691 - DNA, 390 bp, Glycine max
  Clone ID: LIB3039-050-Q1-E1-B2
ggcacaagtgagtttgttgatcgagataactagaaacagtgtgatgaaaatgaaggtccttgttttcttcgttgctacaattttggtagcatggcaatgccatgcgtacgatatgtgccctctccgaatgaacactggctatggtgcccgtactccggaggtgaaatgcacacgttggacgcttgctgtggaagcacacaacatctttggctttgagaccattcctgaagaatgcgttgaatcaacataggaatacatccatggtgaacaatatagatcagactccaatacagttaaccaacaagcttacttttatgccacagacctcgaagtccatcccaaggacacatttgtgttcagtatacatggcaccgtactctctaatattcc

SEQ ID NO: 7692 - DNA, 242 bp, Glycine max
  Clone ID: LIB3039-050-Q1-E1-B3
ggcacacgtgagtttgttgatcgtgataactacagacatcgtgaggagactggaagcagtgtgatgcaactgagcgtcagtgtttgctaggatggcacatgcatgcctatgatatgtgccggctccgatatgaagactggatatggtgcccgtactccagacgtgtcatgcacacgttgtacgcttgctgtgggcacagacagcatctttagctttgacacgcactccagaatagtgcgttg

SEQ ID NO: 7693 - DNA, 169 bp, Glycine max
  Clone ID: LIB3039-050-Q1-E1-B4
ataattataaccattgtgatgaccgtgtaggtccttgttgtctacgttgcacacaagggtggtaccactccactggcatgcctaccatatgttccctctccgaatgaacactgtctagtggtgcccgtactccggaagtgatatgctcaagttggaggcttgctgtgga

SEQ ID NO: 7694 - DNA, 314 bp, Glycine max
  Clone ID: LIB3039-050-Q1-E1-B5
tagaaaaaacatggatatggggtggagaaatttaactcgaccttgtatgatgaatgggttaacaagggcaatgcaccggcactgcccgagactcttaagaattacaacaagctggtgtctcttggcttcaagattatattcatgtcaggaagaacactggacatacaggccgtaacataagcacacttaatgaaagctggctaccacacatgggaaaaaataattctcaaggatccacaagatccttccactccaaatgcagtttcatacaaaacagcagtgagagacaaactgataaggcaaggatacaacat

SEQ ID NO: 7695 - DNA, 381 bp, Glycine max
  Clone ID: LIB3039-050-Q1-E1-B6
ggcacacgtgagtttgttgatcgagataactaaaaccagtgtgatgaaaatgtaggtccttgttttcttcgttgctacaattttggtagcatggcaatgccattcgtacgatatgttccctctcctaatgaacactggctagtggttcccgtactccggaggtgaaatgcgcaagttggaggcttgctgtggaagcatacaacatctttggctttgagaccattcctgaagaatgcgtttaaccaccacacgaatacatccatggcgaacaatatagattagactccaaaccatttaaccagcaggcttacttttatgccatagacctctaagtccagcccatggacacatttgtgttcactatacatggcaacgtactct

SEQ ID NO: 7696 - DNA, 374 bp, Glycine max
  Clone ID: LIB3039-050-Q1-E1-B7
ggcacaagtgagtttgttgatcgagataactagaaacagtgtgatgaaaatgaaggtccttgttttcttcgttgctacaattttggtagcatggcaatgccatgcgtacgatatgttccctctccgaatgaacactggctatggtgcccgtactccggaggtgaaatgcgcaagttggaggcttgctgtggaagcacacaacatctttggctttgagaccattcctgaagagtgcgttgaagcaacaaaggaatacatccatggcgaacaatatagatcagactccaaaacagttaaccaacaagcttacttttatgccagagacctcgaagtccatcccaaggacacatttgtgttcagtatagatggcaccg

SEQ ID NO: 7697 - DNA, 383 bp, Glycine max
  unsure (1)..(383): unsure at all n locations
  Clone ID: LIB3039-050-Q1-E1-B8
ggcacaagtttgttgagatagctagaagcaataagatgaaaatgaaagtgcttgttttgtttgttgctacagttttggtagcatatgaatgccatggctcagactaccagaagttccctctccaaatgaaaactgggtttggtgggcaatacagcaatgaggtggcatgtgccagttggaggcttggcgtggaagcaaacaacgtagtcaagtggcaaactgttcctgcagcttgcggagagtacatagctgactacgttctaagagaccaatatagatcagattccanaacagttaaccaacaagcttatttctatgctaaatccctcaaactcaccaacaaagatgtctttgtcttggacgttgacgacactactctctct

SEQ ID NO: 7698 - DNA, 363 bp, Glycine max; identical to SEQ ID NO: 7427
  Clone ID: LIB3039-050-Q1-E1-B9

SEQ ID NO: 7699 - DNA, 379 bp, Glycine max
  Clone ID: LIB3039-050-Q1-E1-C1
gaaggttttgcactgttgttgctgctcatcctccgtttactccgagctctgcaccgaattacgagtccacggggaagacacatggaatgggatctgctcgcaagctcaagtcccaccgcacgaggcagatgtgcgctgacatgtcatacaggaaatcacatcgtgctactgaatggaagaaaccttttgctgggtcatctcatgccacaggaattgtccttgacatgataagtattgatgctaagcagctcaactctgccattcataagtgtgccagggttcaacttatcatgaatgcgaagacgattgccgcttttgtccccaatgacggttgcttgaactacattgatcagaatgacgaagtcatgattgctggatt

SEQ ID NO: 7700 - DNA, 352 bp, Glycine max
  Clone ID: LIB3039-050-Q1-E1-C10
ggctttcgcagtacttcaaatggccgagaagcaatctcagagacagaatcacagaaccggagagaaagagaaagaaagagagagagaatttcattgaccgccattgaagctttgcttcttctatctctcactcataacaaaattccccacacacattcttcagtttctcattctctccaatttcaacactgttacggttcagaattcgtccaattaagacaaaatttgaggtgtgtacggttcaattggaccttctacgctgcgttttgttcgctcaatggaccaagctccgggatgattgcgcggatccgtgcatgacggcgctacgctcgagtcaattcaattcaacgaa

SEQ ID NO: 7701 - DNA, 361 bp, Glycine max
  Clone ID: LIB3039-050-Q1-E1-C11
gcccgttccatttctcaacaacttctgctacttcctactccaaccgcacttctgctccgcaattatcatgggcaaggtcaagatcggaatcaacggatttggaagaattggccgtttggtagccagagtggctctgcagagagacgatgttgaactcgttgccgttaacgaccctttcatcaccaccgattacatgacatacatgtttaaatacgacagtgttcatggacactggaagcatcacgatgtcaccgttaatgacgagaagacccttcccttcggtgacaagccagtcactatttttggacacagaaaccctgaacagatcccatgggggtcaactggagctgacctcattgtt

SEQ ID NO: 7702 - DNA, 375 bp, Glycine max
  unsure (1)..(375): unsure at all n locations
  Clone ID: LIB3039-050-Q1-E1-C12
gatcgcagaggcagagcataacaacacaagagtcgcatctcaagcttttgtctttctctacttttcttcttctttctgtgtatcgtatcgtattggtaggttgaaaaacaaagagtgtgtgttgttgttgtgtggtttggttttcacttttgttcatcgtttgcgagacacacaggagagaagagatggcgacgagggtggtggcggaacagaagccgaagacgaagattgtgtgcacgctggggcccgcatcgcgctctgtcccaatgatcgagaagcttctgcgggcgggcatgaacgtggctcgcttcaacttctcacatgggtcncacgagtaccaccaggaaaccctcgacaacctccgcgccgccatgg

SEQ ID NO: 7703 - DNA, 348 bp, Glycine max
  unsure (1)..(348): unsure at all n locations
  Clone ID: LIB3039-050-Q1-E1-C2
ggcacaagtttgttgagatagctagaagcaataagatgaaaatgaaagtgcttgttttgtttgttgctacagttttggtagcatatgaatgccatggctcagactaccagaagttccctctccaaatgaaaactgggtttggtgggcaatacagcaatgacgtggcatgtgccagttggaggcttggcgtggaagcaaacaacgtagtcaagtggcaaactgttcctgcagcttgcggagagtacatagctgactacgttctangagaccaatatagatcagattccanaacagttaaccaacaagctttattctatgctaaatccctcaaactcaacaacanagatg

SEQ ID NO: 7704 - DNA, 388 bp, Glycine max
  Clone ID: LIB3039-050-Q1-E1-C3
ggcacaagtgagtttgttgatcgagataactagaaacagtgtgatgaaaatgaaggtccttgttttcttcgttgctacaattttggtagcatggcaatgccatgcgtacgatatgttccctctccgaatgaacactggctatggtgcccgtactccggaggtgaaatgcgcaagttggaggcttgctgtggaagcacacaacatctttggctttgagaccattcctgaagagtgcgttgaagcaacaaaggaatacatccatggcgaacaatatagatcagactccaaaacagttaaccaacaagcttacttttatgccagagacctcgaagtccatcccaaggacacatttgtgttcagtatagatggcaccgtactctctaatatt

SEQ ID NO: 7705 - DNA, 382 bp, Glycine max
  Clone ID: LIB3039-050-Q1-E1-C4
ggcacaagtgagtttgttgatcgagataactagaaacagtgtgatgaaaatgaaggtccttgttttcttcgttgctacaattttggtagcatggcaatgccgtgcgtacgatatgttccctctccgaatgaacactggctatggtgcccgtactccggaggtgaaatgcgcaagttggaggcttgctgtggaagcacacaacatccttggctttgagaacattcctgaagagttcgttgaagcaaccaaatgaatacatccatggcgaaccagtataaattagactccacatcagttacccaaccagcttacctctatgccagagacctcgaaatccatcccaaggacacatttgtgttcagtatagatggcaccgtactct

SEQ ID NO: 7706 - DNA, 386 bp, Glycine max
  Clone ID: LIB3039-050-Q1-E1-C6
ggcacaagtttgttgagatagctagaagcaataagatgaaaatgaaagtgcttgttttgtttgttgctacagttttggtagcatatgaatgccatggctcagactaccagaagttccctctccaaatgaaaactgggtttggtgggcaatacagcaatgaggtggcatgtgccagttggaggcttggcgtggaagcaaacaacgtagtcaagtggcaaactgttcctgcagcttgcggagagtacatagctgactacgttctaggagaccaatatagatcagattccaaaacagttaaccaacaagcttatttctatgctaaatccctcaaactcaccaacaaagatgtctttgtcttggacgttgacgacactactctctctaat

SEQ ID NO: 7707 - DNA, 381 bp, Glycine max
  Clone ID: LIB3039-050-Q1-E1-C7
gacaaacaagttcatgacagatcctgtaaggatccttgtaaaacgtgatgaattgacattggagggcatcaagcaatttttcgttgcggtcgaaagggaggaatggaagtttgataccctgtgtgatctttatgataccctcactatcactcaagctgttatattctgtaatactaagcgaaaggtggactggttaactgaaaaaatgcgtaacaacaatttcactgtctcatcaatgcacggtgacatgcctcagaaagaaagagatgctattatgggagaatttcgtgctggaacaacccgtgtgctaataacaactgacgtttgggcccgtggtcttgatgtacagcaggtttctctagttatcaattatgaccttcc

SEQ ID NO: 7708 - DNA, 384 bp, Glycine max
  Clone ID: LIB3039-050-Q1-E1-C8
ggcacaagtgagtttgttgatcgagataactagaaacagtgtgatgaaaatgaaggtccttgttttcttcgttgctacaattttggtagcatggcaatgccatgcgtacgatatgttccctctccgaatgaacactggctatggtgcccgtactccggaggtgaaatgcgcaagttggaggcttgctgtggaagcacacaacatctttggctttgagaccattcctgaagagtgcgttgaagcaacaaaggaatacatccatggcgaacaatatagatcagactccaaaacagttaaccaacaagcttacttttatgccagagacctcgaagtccatcccaaggacacatttgtgttcagtatagatggcaccgtactctctaa

SEQ ID NO: 7709 - DNA, 377 bp, Glycine max
  Clone ID: LIB3039-050-Q1-E1-C9
gatagcaaaatcgtttctccaatttaatcaccattgtacaacccaattcccttcgtcgttttcgattaagagagcaatggcacgtaccaagcaaaccgctcgcaagtccaccggaggaaaggctccgaggaagcaattggcaaccaaagccgctcgcaagtcagccccggcgaccggcggagtgaagaagccccaccgcttcaggccaggaacggtggctctgagggagattcgaaagtaccagaagagcaccgaacttctgatccgaaaactcccattccagaggctcgtcagagaaatcgctcaggatttcaaaaccgatctccgctttcagagcagcgccgtttcggctcttcaggaagccgcggaggcttatc

SEQ ID NO: 7710 - DNA, 368 bp, Glycine max
  Clone ID: LIB3039-050-Q1-E1-D10
ggcgttttgatattgtaaatcacgtccagcacaacagtccgagaagtgaatggctgacatagtgaagcagctgttggcaaagccgatccagctggcggaccaagtggccaaggcagcggaggaggccagttcctccttcaagcaagagtgcttagagctcaaatccaaggccgacaagctcgcggcgctgctgcggctggcggcgcgtgcgagctccgacctctacgagcgccccacgcgccgcatcatcgccgacaccgagctcgtcctcgacaaggccctctccctaaccctaaaatgccgcgccaacggcctcatgaagcgcgtctttagcatcatccccatcgccgccttccgcaagatgtcct

SEQ ID NO: 7711 - DNA, 309 bp, Glycine max
  Clone ID: LIB3039-050-Q1-E1-D11
gagagtcagaactcatcagagagagagagatcgatgacgagaattctggtgagacatggcagtctctacatgtcgcaaccttcttcatcactccgccctcgcacttgccgcttcatcgagtcgctcaattcatactcttttcctccaatgagatgtccctcaccggttccccatatccaggacgtgaatgacacacatctgaaggcgcagatcgagacctacttcaatggcgactagacggtgctctcgtcgatgatggaggcgattctgaggcggaacctgtcggggaatcactaggataccgactac

SEQ ID NO: 7712 - DNA, 360 bp, Glycine max
  Clone ID: LIB3039-050-Q1-E1-D12
gagtgtacctctttgctttttcccattgcttctaacgtgagatctcagattgcaattgcctcttctcttctcccagaatcggtgtatgttacaggtttaagggttttgttttcatttaggtcactaatccgatatcatgaagctcgatacgactagtctcgaatcgtttcccacactgattgcacctcaaaacgacgtcgccggagaactctccgccgctccgttctttgaccttccgaattccaatgacttcgatgggttcttgaaagacgctattcagatggttaagcccgcgacaggtactacaactcttgcttttacatttaaagacggtgttatggtagccgttgattctccagc

SEQ ID NO: 7713 - DNA, 392 bp, Glycine max
  Clone ID: LIB3039-050-Q1-E1-D2
ggcacaagtttgttgagatagctagaagcaataagatgaaaatgaaagtgcttgttttgtttgttgctacagttttggtagcatatgaatgccatggctcagactaccagaagttccctctccaaatgaaaactgggtttggtgggcaatacagcaatgaggtggcatgtgccagttggaggcttggcgtggaagcaaacaacgtagtcaagtggcaaactgttcctgcagcttgcggagagtacatagctgactacgttctaggagaccaatatagatcagattccaaaacagttaaccaacaagcttatttctatgctaaatccctcaaactcaccaacaaagatgtctttgtcttggacgttgacgacactactctctctaatctccag

SEQ ID NO: 7714 - DNA, 373 bp, Glycine max
  Clone ID: LIB3039-050-Q1-E1-D3
ggcacaagtgagtttgttgatcgagataactagaaacagtgtgatgaatatgaatgtccttgttttcttcgttgctacaattttggtagcatggcaatgccatgcgtacgatatgttccctctccgaatgaacactggctatggtgcccgtactccggaggtgaaatgcgcaagttggacgcttgctgtggaagcacacaatatctttggctttgagaccagtcctgaagagtgcgttgaagcaacaaatgaatacatccatggcgaacaatatatatcagactccaaaacagtttaccaataagcttacttttatgccagagaccccgaagtcatcccaaggacagatttgtgttcagtatatacggcaccg

SEQ ID NO: 7715 - DNA, 383 bp, Glycine max
  Clone ID: LIB3039-050-Q1-E1-D4
ggcacaagtgagtttgttgatcgagataactagaaacagtgtgatgaaaatgaaggtccttgttttcttcgttgctacaattttggtagcatggcaatgccatgcgtacgatatgttccctctccgaatgaacactggctatggtgcccgtactccggaggtgaaatgcgcaagttggaggcttgctgtggaagcacacattatctttggctttgagaccattcctgaagagtgcgttgaagcaacaaaggaaaagatccatggccaacgctacatatgagattccagatgaatggcacctaatgttttaccttttgctgcatacgacgagtctacatacgtgtggagcagttggtgcaaaactatacgaataatagggattt

SEQ ID NO: 7716 - DNA, 374 bp, Glycine max
  Clone ID: LIB3039-050-Q1-E1-D5
gagggttttatctcattaacgtttcttctcttcactctgcccgccgcatcaatggcttcagagaagaaactttcgaacccaatgagggagataaaagtgcagaagctcgtcctcaatatctctgttggcgagagtggagatcgtctcaccagagcctccaaggtgttggaacaacttagtggccaaaccccagtgttttccaaagcaaggtacactgttcgttcctttgggattagaagaaatgagaagattgcatgctatgtcactgtcagaggtgacaaggcaatgcaacttttggagagtggtttgaaggtgaaggaatatgaacttctcagaaggaacttcagtgatactggttgcttcggctttggtat

SEQ ID NO: 7717 - DNA, 370 bp, Glycine max
  Clone ID: LIB3039-050-Q1-E1-D6
gagcgctgagtcgagggcgttcagtgttcaccacagtttacacacgagtacccattttctcttctcaatttctcagagagaaaatcatggtggacgcagcagaacgtaggtacttggaggatgacgattcatcactcatgaaaactattaagggggcaacaactggtttagttgctggcactatctgggggaccgtagttgccacctggtatgatgtccctcgtgtagagagaaatgttgctcttccagggctgattaggactttcaagatgatgggcaactatggtttgacctttgctgccataggaggagtctacataggtgtggagcagttggtgcaaaactataggatgaagagggatttagtcaa

SEQ ID NO: 7718 - DNA, 341 bp, Glycine max
  Clone ID: LIB3039-050-Q1-E1-D7
gacacactaagcgtgaactaatatcgaaattcaattataccctgaccctgtgttagtttcgtgtgttgagaaacacatagaggcagagatgcatggaagcgcagctgacggtgaaaccttggctttcgagcctgaggactatgacttgatggacgaagacagtacccccgacgccgacgcttctccgccacaatctaagctcaaatccgccatcaccgtcgccgccgcccccataaagaccaacggtctcggattctcgtacgacatcgacgccaaccgtgacactctcctctccggctccgacttcggctctctcatcagcgacggcggtcctggtcctc

SEQ ID NO: 7719 - DNA, 381 bp, Glycine max
  unsure (1)..(381): unsure at all n locations
  Clone ID: LIB3039-050-Q1-E1-D8
ggcacaagtgagtttgttgatcgagatacctagacacagtgtggtaaatgtaagtgcctgtgttcttcgctgcgacaattttgggagcatggcaatgccatgcgtactataagttccccctccgcatgaacactggctatggtgcccgtactccggaggtgaaatgcgcaagttggaggcttgctgtggaagcacacaacatctttggctttgagaccattcctgaagagtgcgttgaagcaacaaaggaatacatccatggcgaacaatatagatcagactccaaaacagttaaccaacaagcttacttttatgccagagacctcgaagtccatcncaaggacacatttgtgttcagtatagatggcaccgtactctcta

SEQ ID NO: 7720 - DNA, 378 bp, Glycine max
  Clone ID: LIB3039-050-Q1-E1-D9
ggcgcatcgaaccaaaattagggtttttgtcgtagcaggaagaagcagcaatggcgccgaagataacacgcaaggtcagcagaaaccccgaattgataaggggaatcggaaagtactcgaggtcgcagatgtaccacaagaggggcatttgggctatcaaggccaaaaacggtggcgttttacctcgccacgaccccaaacccaaacctgaaactcccactgaaaaaccacccaaattttaccccgctgatgatgtcaagaaaccccttgtcaacaagcacaaacccaaaccagctaagctcagggctagcattacccccggaacagtgttgattcttcttgctggtagatttaagggaaagaaggtagtgtttttga

SEQ ID NO: 7721 - DNA, 387 bp, Glycine max
  Clone ID: LIB3039-050-Q1-E1-E1
ggcacaagtgagtttgttgatcgagataactagaaacagtgtgatgaaaatgaaggtccttgttttcttcgttgctacaattttggtagcatggcaatgccatgcgtacgatatgttccctctccgaatgaacactggctatggtgcccgtactccggaggtgaaatgcgcaagttggaggcttgctgtggaagcacacaacatctttggctttgagaccattcctgaagagtgcgttgaagcaacaaaggaatacatccatggcgaacaatatagatcagactccaaaacagttaaccaacaagcttacttttatgccagagacctcgaagtccatcccaaggacacatttgtgttcagtatagatggcaccgtactctctaatat

SEQ ID NO: 7722 - DNA, 374 bp, Glycine max; identical to SEQ ID NO: 7696
  Clone ID: LIB3039-050-Q1-E1-E10

SEQ ID NO: 7723 - DNA, 374 bp, Glycine max
  unsure (1)..(374): unsure at all n locations
  Clone ID: LIB3039-050-Q1-E1-E11
gacacacagagcggttctcatattttggagaatccgaaaaacacgttaaagaaagtcccattcccactaccgaagcaaattaagaagatgaagcagcagagagtggagtttatgggcatgggcatgggcatgggcatgggcctgggccttttggtggtgatgatggcatgtgggtcggcgagtggtgcggatgatttggcaaccaagtgttcagcggtgattcagaaggtaataccgtgtttggatttcgcgaaggggaaggaagaaacgccgaaaaagcaatgttgcgacgcagcaacgtccatgaaggagagcaacccagagtgcctctgctacatcattgaagagacncacaagggtagcccacaggttaa

SEQ ID NO: 7724 - DNA, 375 bp, Glycine max
  Clone ID: LIB3039-050-Q1-E1-E12
ggcacaagtgactttgttgatcgagataactataaacagtgtgatgaaaatgaaggtccttgttttcttcgttgctacaattttggtagcatgacaatgccatgcgtacgatatgtaccctcaccgaatgaacactggctatggtgcccgtactccggaggtgaaatgctcaagttggaagcttgctgtggaagcacacaacatctttggctttgagaccattcctgaagagtgcgttgaggcaacacaggaatacatccatggcgaacactatagatcagactccagaacagttaaccaacatgcttacttttatgccagagacctcgaggtccatcacaaggacacatttgtgtgcagtataaatggcaccgt

SEQ ID NO: 7725 - DNA, 390 bp, Glycine max
  unsure (1)..(390): unsure at all n locations
  Clone ID: LIB3039-050-Q1-E1-E2
agattgaggaggccaatgaggagcaagtacttgctgaactagctaggatcgaggcttcgaaagaacttgcagatattgaggcccagagagaaaaggaagcaaatcaattttcattcaatttggaaattgcgaggagaaagttgaaggaggccattgaagagattgatgagtcaaaggagcttgaaatgaaattggctgtgacaatatcagatgttgatttcttgcagaacgagttaaagtcagttaaggatatgaataaaagggttcaaggagatgggagtgtaaagcaattggaaggaattttcaggaaaggggaggaaccagaatactctatagtgttgcaaactataacggaagaattggaggcagctangaaagaattagctttgg

SEQ ID NO: 7726 - DNA, 388 bp, Glycine max
  Clone ID: LIB3039-050-Q1-E1-E3
ggcacaagtgagtttgttgatcgagataactagaaacagtgtgatgaaaatgaaggtccttgttttcttcgttgctacaattttggtagcatggcaatgccatgcgtacgatatgttccctctccgaatgaacactggctatggtgcccgtactccggaggtgaaatgcgcaagttggaggcttgctgtggaagcacacaacatctttggctttgagaccattcctgaagagtgcgttgaagcaacagaggaatacatccatggccaacaatatagattagactccaaaacagttaagcaacaggcttacttttatgccagagacctcgaagtccatcccaaggacacatttgtgttcagtatagatggcaccgtactctctaatatt

SEQ ID NO: 7727 - DNA, 367 bp, Glycine max
  Clone ID: LIB3039-050-Q1-E1-E4
gaggaagcagcagcggcgggaacaaggagagaagatgaagttcaatccacgtgtgtcgagcagccgctgcatgaaccgaaaggctcatttcacggcgccgtcaagcgtgcggcgggtgcatattagcgcccctctgtcggaggagctgccgtccaagtacaacgtgaggtcgatcccactacagaacgatgacgatgtgcaggtagtgcgaggaacatacaatggtcgcgaggggaaggtgactcaagtcgaccgtcaaacatgggtgattcacattgagcgcataacacgcgagaaggtgaatggttccaccgtcaacgttgggattcatccctccaaggttgtgccgatcaagcgcaaattggac

SEQ ID NO: 7728 - DNA, 368 bp, Glycine max
  Clone ID: LIB3039-050-Q1-E1-E5
ggcccagtagcaccttcgtaggacccttatccctctctctctctatctctcccgaattattgttcgttcgacccttttacttagtattccctgtttccggtattcgctcccttttttctgcattctggttttacttagatctctgtcccgcaccagatctggtgcagggtgagagggttgggttcattaattttgtatcaatcttccttctgagcggtaggcgtggggataccagagtcttttcgggaagcaagagagggttctctccgttttcaatagatctctcactgtcttcttttgagggggaagccggggcctcggcctcggcggctttcaaagcccccaccttcacagccctatcaacaaaa

SEQ ID NO: 7729 - DNA, 356 bp, Glycine max
  unsure (1)..(356): unsure at all n locations
  Clone ID: LIB3039-050-Q1-E1-E6
ggccgctctctgagaaaaacagatagtgtgggagagagaagagcggaagagaaaatgacgaccaggttcaagaagaacaggaagaagagaggtcacgtcagcgccggacacggccgtatcggaaagcaccgcaagcatcccggaggtcgcggtaacgccggtggcatgcatcaccaccgtatcctcttcgacaagtaccatcctggtttcttcgggaaggtangcatgcgctacttccacaaacttcgcaacaaattctacaatccgatcatcaacatcgacaagctgtggtccctcctcccccaggaggccaaagacaaggccaccgccgacaaggcacccttgctcgatgtcac

SEQ ID NO: 7730 - DNA, 384 bp, Glycine max
  Clone ID: LIB3039-050-Q1-E1-E7
gatcgcatttcatagcactcaccctcattaccaacacgaaagcatagccaaaaccttttttcgaagtctctgattttcctaatggctccggcaaaggcagagaagaagccggcggagaagaagccagcggcggagaaggcaccggcggagaagaagccgaaggcggagaagaagatctcgaaggaaggagggagcgagaagaagaagaagcgcacgaagaagagcgtggagacctacaagatctacatcttcaaggtcctcaagcaggttcaccccgacattggtatttccagcaaggccatgggcatcatgaacagcttcatcaacgacatcttcgagaagctcgcccaggaagcgtcgcgtttggctcgctacaacaagaag

SEQ ID NO: 7731 - DNA, 382 bp, Glycine max
  Clone ID: LIB3039-050-Q1-E1-E8
ggcacaagtgagtttgttgatcgagataactagaaacagtgtgatgaaaatgaaggtccttgttttcttcgttgctacaattttggtagcatggcaatgccatgcgtacgatatgttccctctccgaatgaacactggctatggtgcccgtactccggaggtgaaatgcgcaagttggaggcttgctgtggaagcacacaacatctttggctttgagaccattcctgaagagtgcgttgaagcaacaaaggaatacatccatggcgaacaatatagatcagactccaaaacagttaaccaacaagcttacttttatgccagagacctcgaagtccatcccaaggacacatttgtgttcagtatagatggcaccgtactctct

SEQ ID NO: 7732 - DNA, 361 bp, Glycine max
  unsure (1)..(361): unsure at all n locations
  Clone ID: LIB3039-050-Q1-E1-E9
ggcacaagtttgttgagatagctagaagcaataagatgaaaatgaaagtgcttgttttgtttgttgctacagttttggtagcatatgaatgccatggctcagactaccagaagttccctctccaaatgaaaactgggtttggtgggcaatacagcaatgaggtggcatgtgccagttggaggcttggcgtggaagcaaacaacgtagtcaagtggcaaactgttcctgcagcttgcggagagtacatagctgactacgttctaagagaccaatatagatcagattccaaaacagttaaccaacaagcttatttctatgctaaatcnctcaaactcaccaacaaagatgtctttgtcttgga

SEQ ID NO: 7733 - DNA, 391 bp, Glycine max
  Clone ID: LIB3039-050-Q1-E1-F1
gacacttcagaatcctctagtaacccttcttttctctctctctctctcgtgttctgagctgctagaagcaatggagaggaaaagaagccatgcttctttcaccatgtttgcaatgcttgttggattgctctctcagagccttgtcattcctgtaatatccatcactgttgcagattagaagaactactacaccccagatccacatgctggaagtctccccacaggctcacacaatagtagtcctccatctcatggccatgggagctctccaccctcacatcacaatagtccaagtactccatcaacaccctcaggtggaaactgtggatcatcacccccacatcatcatgatccaacaccctcaactccatcaacaccatcaaaccctccc

SEQ ID NO: 7734 - DNA, 376 bp, Glycine max
  Clone ID: LIB3039-050-Q1-E1-F10
gattgtgttgtgtgtgctcccttcaactcactcactcactcacaatggagcggaagcaagggttcttctctgcgctcaaagacgaggtggttcgcggcctctcgccggcgcggtcacgcgccaagagccccgccaggagtgcatcgcccatgtcctcgctgctccgccgccgcaggaagcaccacgcgccgccgcctgagctcttcattgcgagatcgggaagcctcaggcccgccgaggccctctcgccgctcaaggaaggtcctgacggaaccgacggcggccaggactcctcgcgcggagaaggaaagtggggccagtggatgaaaggaccactcgctagagcaccctctgtttcctcttcctcgtcctcttg

SEQ ID NO: 7735 - DNA, 368 bp, Glycine max
  Clone ID: LIB3039-050-Q1-E1-F11
ggcagccactctgtgagagaaagagatagtgtggtagagagagaggagcggaggagagaaaatgacgacgaggttcaagaagaacaggaagaagagaggccacgtcagcgccggtcacggtcgtatcgggaagcaccgcaagcatcccggtggtcggggtaacgccggtggcatgcaccaccaccgcatcctcttcgacaagtaccatcccggtttcttcggaaaggtgggtatgcgctacttccacaaactccgcaacaaattctactgccccatcgtcaacattgataagctatggtccctcctaccccatgaggccaatgacaaggccaccgccgacaaggcgccattgctcgatgtcacccagt

SEQ ID NO: 7736 - DNA, 376 bp, Glycine max
  unsure (1)..(376): unsure at all n locations
  Clone ID: LIB3039-050-Q1-E1-F12
ggcgtacgcagcttcatccctaacgcgtgcatagcagagtcagagacagagacgcagccatggggcggagacctgcgaggtgttataggcaaattaagaacaagccataccccaagtcacgtttctgccgtggtgttcctgatcccaagatcaggatttatgatgttggtatgaagaagaagggtgttgatgagtttcctttctgtgtccatctggttagttgggagaaggaaaatgtttcaagtgaggccctggaagctgctcgcattgcttgcaacaagtacatggccaaatttgctggaaaggatgctttccacttgagagtcagggtgcacccattccatgttcntangatcaacaagatgctttcgtgtgc

SEQ ID NO: 7737 - DNA, 392 bp, Glycine max
  unsure (1)..(392): unsure at all n locations
  Clone ID: LIB3039-050-Q1-E1-F2
ggcacaagtgagtttgttgatcgagataactagaaacagtgtgatgaaaatgaaaggccttggtttcctccgtgccacaattttgggagcaaggcaatgccaagcgtacgaaaagttccctccccgaatgaacaacggctaagggggccgtactccggaaggtgaaagcccaaattgggaggcttgctgtggaagcacacaacatctttggctttgagaacattcctgaagagtgcgttgaagcaacanaggaatacatccatggcgaacaatatagatcagactccaaaacagttaaccaacaagcttacttttatgccagagacctcgaagtccatcccaaggacacatttgtgttcagtatagatggcaccgtactctctaatattcca

SEQ ID NO: 7738 - DNA, 387 bp, Glycine max
  Clone ID: LIB3039-050-Q1-E1-F3
gactcaagcacaacatctctatcgagtaaattaactatgaagcctaccctactattatccctttccttcctgcctctctttgctttcccggctctttcagaagatgttgaacaagttgtggacataagtggcaaccccattttcccaggtggcacatattacattatgccatcaacttggggcgctgccggtggtggattgaaactaggccggacaggaaactcaaactgcccagttactgttttgcaagattactcagaaatcttccgtggcacaccagtcaaattcagcatacctgggataagccctggaatcatctttacaggtactccacttgaaatcgagttcgcagagaaaccttattgtgctgaatcctccaaatgggtg

SEQ ID NO: 7739 - DNA, 239 bp, Glycine max
  Clone ID: LIB3039-050-Q1-E1-F4
ttcacggctccatacaggctgtcagaagacgacaaaagaggcacaaggggatttgatgttatcaataatcaaattcagtgtaatgctacagtatgaccatgttctctgcagtgcaacaacattggtacccgtggaatgccagacgttgaaaatgatcccacgtccaatgaacactgtatatggtgacccttatcaagtcgtcagatgcacatcttagaggcttcccagtagagcacaca

SEQ ID NO: 7740 - DNA, 380 bp, Glycine max
  Clone ID: LIB3039-050-Q1-E1-F5
gactcaaacccaaaaaaaaaccctctctttctctctcttccaaaacctaattttcattttttctcttcaaacaaattttcaaaatgcgtgagatccttcacatccagggtggccaatgcggcaaccagatcggcgccaagttctgggaggtggtttgcgcggagcacgggatcgaccccactggaaggtacggtggggactcagagcttcagctcgagaggatcaatgtctactacaacgaagccagctgcggccggttcgtgccgcgcgcggttctcatggacctcgaaccgggcaccatggacagcgtccggtccgggccgtacgggcagatcttcaggcccgacaactttgtgttcgggcagtccggggcaagaaac

SEQ ID NO: 7741 - DNA, 372 bp, Glycine max
  Clone ID: LIB3039-050-Q1-E1-F6
gacagcatatatatcaataatctattttatactatacctacattttgataattttctttgtagttgatagccatggctacccgtggaaagcttgaggttgacattgatctcaagtccaacgcagacaagtactggcagacccttaggaattctactgaaatatttcctaaggccttcccacatgattacaacagcattgaggttcttgagggtgatggcaagtctcctggttctatccgccacataagttatggtgaaggttcaccacttgtgaaatcatcctttgagaagattgaggctgttgatgaggacaagaacgtagtgtcgtacactatcattgatggggaactcctccagcactacaaaacattc

SEQ ID NO: 7742 - DNA, 381 bp, Glycine max
  Clone ID: LIB3039-050-Q1-E1-F7
ggaaacaaacatggaaaggatatagattatagaatacagaggcaccgacgtagcgacggtcaaggtccacaatccacaatccgcaaccgaataacccactacccacagatttctctctctctctctctgttggattggatcctaatatctgtgttccactttcagaggttgctccttcattcacgcccttgctctcttcaaatctattttcttcctctgctctatctatctcttgttatttttccctctcacgccaatcaccatgccttctccttcagatcaccaccgcccccaaccaaaacctaatcccaacctcctttctctgttcctcaaaccaatcatcatgctccttctcacctccctcttcttcctcttcctcgg

SEQ ID NO: 7743 - DNA, 383 bp, Glycine max
  Clone ID: LIB3039-050-Q1-E1-F8
ggcacaagtgagtttgttgatcgagataactagaaacagtgtgatgaaaatgaaggtccttgttttcttcgttgctacaattttggtagcatggcaatgccatgcgtacgatatgttccctctccgaatgaacactggctctggtgcccgtactccggaggtgaaatgcgcaagttggaggcttgctgtggaagcacacaacatctttggctttgagaccattcctgaagagtgcgttgaagcaacaaaggaatacatccatggcgaacaatatagatcagactccaaaacagttaaccaacaagcttacttttatgccagagacctcgaagtccatcccaaggacacatttgtgttcagtatagatggcaccgtactctcta

SEQ ID NO: 7744 - DNA, 360 bp, Glycine max
  Clone ID: LIB3039-050-Q1-E1-F9
gacgtacgcaactgaaaaggaaaaccctaagaaatgaagagaactcctatcttgttccctctcttctttcttctttgtgccttcacctcatatctaccttcagccaccgctgatgatgatcatgtgtacgacactgacggcgataagcttcaatacggtgtcaattatttcgtgttgccagtgataagaggaaatggcggtggaatacaagtagcaaaagcaggaaacgaaacttgccctctgactgtggtgcaatctggcaacgagctctctgaggggttaccgataaagattgcatctcgattagcaggagtcgctttcatcacccaaggccagcttttcaagagcattcagttcggt

SEQ ID NO: 7745 - DNA, 242 bp, Glycine max
  Clone ID: LIB3039-050-Q1-E1-G1
aatacaggtgtgagacagctgcagaaaggggaacaagtgaggatgttgatctatgttgctataaacagtgtcatgaaaatgaaagtcattgtgctcgtcgtgtgctacagctttggtatcatgagcatgccattcgtacgattcattccctcatccgaatgaccaccggccttggtgctcgtattccggaggtgaaatgcactaattggcagcttgcagttgaagcgcatagcatctttgga

SEQ ID NO: 7746 - DNA, 379 bp, Glycine max
  Clone ID: LIB3039-050-Q1-E1-G10
gacaacttcaatccctcttttgctttaccaaattccattttccaattcaaaaccctaactccgttcgaagcaccaaatcgtgatggcaccaaaggcagagaagaagccagcagagaagaagcctgtggaggagaagaaatcgacggtgggagacaaggctccggcggagaagaagccaaagaccggaaagaagcttccgaaggagggaggcgccggcggagaaggtaagaagaagaagagaaacaagaagagcgtggagacatacaagatctacatcttcaaggttctgaagcaggttcaccctgacattggtatctcaagcaaggccatgggaatcatgaacagcttcatcaacgacatcttcgagaagcctgcccag

SEQ ID NO: 7747 - DNA, 372 bp, Glycine max
  Clone ID: LIB3039-050-Q1-E1-G11
ggcacaagtgagtttgttgatcgagataactagaaacagtgtgatgaaaatgaaggtccttgttttcttcgttgctacaattttggtagcatggcaatgccatgcgtacgatatgttccctctccgaatgaacactggctatggtgcccgtactccggaggtgaaatgcgcaagttggaggcttgctgtggaagcacacaacatctttggctttgagaccattcctgaagagtgcgttgaagcaacaaaggaatacatccatggcgaacaatatagatcagactccaaaacagttaaccaacaagcttacttttatgccagagacctcgaagtccatcccaaggacacatttgtgttcagtatagatggcac

SEQ ID NO: 7748 - DNA, 379 bp, Glycine max
  Clone ID: LIB3039-050-Q1-E1-G12
gactcgccactcgtaacaatgaactccatagccttcaaatccttcgtcggcctccgccagtcctcgccggaggccccacatttcgctgcccagtcccgccccgccactccccaccgcaaattccgcgtcgtggccggaaaattcagccccaggctgaacggccggaacctccgcgtggcggtggtgggcggcggtcccgccggaggagccgccgcggagacgctggcgaagggcggcgtggagacgttcctgatcgagcgaaaaatggacaactgcaagccgtgcggcggcgccatcccgctgtgcatggtgggggagttcgaccttccgctggacatcatcgaccggcgcgtgacgaagatgaagatgatatcgccgt

SEQ ID NO: 7749 - DNA, 392 bp, Glycine max
  Clone ID: LIB3039-050-Q1-E1-G2
ggcacaagtgagtttgttgatcgagataactagaaacagtgtgatgaaaatgaaggtccttgttttcttcgttgctacaattttggtagcatggcaatgccatgcgtacgatatgttccctctccgaatgaacactggctatggtgcccgtactccggaggtgaaatgcgcaagttggaggcttgctgtggaagcacacaacatctttggctttgagaacattcctgaagagtgcgttgaagcaacaaaggaatacatccatggcgaacaatatagatcagactccaaaacaattaaccaacaagcttacttttatgccagagacctcgaagtccatcccaaggacacatttgtgttcagtatagatggcaccgtactctctaatattccat

SEQ ID NO: 7750 - DNA, 344 bp, Glycine max
  Clone ID: LIB3039-050-Q1-E1-G3
gatccataaccatggcgtctaactctgcttccgctctttacttccttttatgcctatcgcccatcactttgcttctttctgcgtttcgtgctcaagctcaatctcatgctccagctcccactttcaagtactgtgaaaagaatgcagactatgctgtgaatgtgagtggagtggcaatattgcctgaccccgtggagagaggagtgccattcacctttaagatcacagcttatactcctggaacaattcaaagcggggacttgttatatgaaatttcttatgctggaatacaagcacaacctgctacatttctccatgatctctgttaggaagcaccatgccca

SEQ ID NO: 7751 - DNA, 391 bp, Glycine max
  Clone ID: LIB3039-050-Q1-E1-G4
gacttcaattgcaatcaaattagttcattctctttgcgcagttccctacctctcctttcaagatgcagatcttcgtcaagaccctcaccggaaagaccatcacccttgaggtggaaagctctgacaccatcgacaacgtcaaggccaagatccaggacaaggaaggaattcccccggatcagcaacgtctcatcttcgccggaaagcagctcgaggacggccgtaccctcgccgactacaacatccagaaggagtcaacccttcaccttgtccttcgtctccgtggtggcatgcagatcttcgtcaagactctcactggcaaaaccataaccctagaggtcgaaagctctgacaccattgacaacgtcaaggccaagatccaggacaagga

SEQ ID NO: 7752 - DNA, 380 bp, Glycine max
  unsure (1)..(380): unsure at all n locations
  Clone ID: LIB3039-050-Q1-E1-G5
ggcacaagtgagtttgttgatcgagataactagaaacagtgtgatgaaaatgaaggtccttgttttcttcgttgctacaattttggtagcatggcaatgccatgcgtacgatatgttccctctccgaatgaacactggctatggtgcccgtactccggaggtgaaatgcgcaagttggatgcttgctgtggaagcacacaacatctttggctttgagaccattcctgaagagtgcgttganacaacaaaggaatacatccatggcgaacactatagatcagactccaaaacagttaaccaacaagcttacttttatgccagagacctcgaggtccatcgcaaggacacatttgtgttcagtatagatggcaccgtactct

SEQ ID NO: 7753 - DNA, 363 bp, Glycine max
  Clone ID: LIB3039-050-Q1-E1-G6
ggaacctttgcattctattcattcaagattcagcaagtgcgttttggaagcagagaccgaaatacttcgagatggcccgtacaaagcaaactgctcgtaagtcaactggaggaaaagctcccaggaagcagcttgcaaccaaggctgcacgtaagtctgcaccaacaactggtggtgtgaagaagcctcatcgttatcgccctggaactgttgctcttcgtgagattaggaaataccagaagagcactgagctcctaatcaggaagcttcctttccagaggttggttcgtgaaattgcccaggatttcaagactgatctgcgtttccagagccatgctgtgcttgcattgcaagaggctgctg

SEQ ID NO: 7754 - DNA, 381 bp, Glycine max
  Clone ID: LIB3039-050-Q1-E1-G7
gaaggtgcaagagtttgttgtgagctataagctagtttatcgtgaggagaatatgaagttgtttgttttctttgttgctgcagtagttttggtagcatggccatgccatggcgcaggctaccaaaggttccctctccgaatgaaaactggctatggtgagcgttcttcggaggtaaaatgcgcaagttttaggcttgctgtggaagcacacaacatccgagcctttaaaaccattcctgaagagtgcgttgaaccaacaaaggactacattaatggcgaacaatttagatcagactctaaaacagttaaccaacaagctttcttttatgctagtgaacgcgaagtccatcacaacgacatatttatattcggcatagataa

SEQ ID NO: 7755 - DNA, 376 bp, Glycine max
  Clone ID: LIB3039-050-Q1-E1-G8
gaaggtgcaagagtttgttgtgagctataagctagtttatcgtgaggagaatatgaagttgtttgttttctttgttgctgcagtagttttggtagcatggccatgccatggcgcaggctaccaaaggttccctctccgaatgaaaactggctatggtgagcgttcttcggaggtaaaatgcgcaagttttaggcttgctgtggaagcacacaacatccgagcctttaaaaccattcctgaagagtgcgttgaaccaacaaaggactacattaatggcgaacaatttagatcagactctaaaacagttaaccaacaagctttcgtttatgctaatgaacgcgaagtccatcacaacgacatatttatattcggcata

SEQ ID NO: 7756 - DNA, 371 bp, Glycine max
  Clone ID: LIB3039-050-Q1-E1-G9
ggagatagatctgcttcttgttgttggaaagaaaccctagcaagcggaacaatggcagacgttgaggtcgatgtggcggctgcagcagcagcagggcagccgaagaagagaacgttcaagaagttcagtttcaggggcgtggatctcgatgcgcttctggacatgtccaccgatgaactcgtgaagatgttcagtgctcgcgcacgtagaaggttccagagaggcctcaccagaaagcccatggccttgatcaagaagcttcgcaaagcgaaaagagaagctcaccaggtgagaagccagaacctgtccgcacccacctccgcaacatgattattgtgcctgagatgattggtagcattactggagtgtac

SEQ ID NO: 7757 - DNA, 380 bp, Glycine max
  Clone ID: LIB3039-050-Q1-E1-H1
ggcacaagtttgttgagatagctagaagcaataagatgaaaatgaaagtgcttgttttgtttgttgctacagttttggtagcatatgaatgccatggctcagactaccagaagttccctctccaaatgaaaactgggtttggtgggcaatacagcaatgaggtggcatgtgccagttggaggcttggcgtggaagcaaacaacgtagtcaagtggcaaactgttcctgcagcttgcggagagtacataactgactacgttctaggagaccaatatagattaaattccaaaacagttaaccaacaagcttatttctatgctaaatccctcaaactcaccaacaaagatgtctttgtcttggacgttgacgacactactctc

SEQ ID NO: 7758 - DNA, 375 bp, Glycine max
  unsure (1)..(375): unsure at all n locations
  Clone ID: LIB3039-050-Q1-E1-H10
gatgcacaagtttgttgagatagctagaagcaataagatgaaaatgaaagtgcttgttttgtttgttgctacagttttggtagcatatgaatgccatggctcagactaccagaagttccctctccaaatgaaaactgggtttggtgggcaatacagcaatgaggtggcatgtgccagttggaggcttggcgtggaagcaaacaacgtagtcaagtggcaaactgttcctgcagcttgcggagagtacatagctgactacgttctangagaccaatatagatcagattccaaaacagttaaccaacaagcttatttctatgctaaatccctcaaactcaccaacaaagatgtctttgtcttggacgttgacgacac

SEQ ID NO: 7759 - DNA, 377 bp, Glycine max
  Clone ID: LIB3039-050-Q1-E1-H11
ggtgagagagtgggcacgcacctgcacctgtcttcatcttccactttgtctttctctctctacccgtgaattttccaatctcagtctcacgttttctctttcactttcaataccgtttcgccaatgtcgcttctctgcttcccctcaatactatctattttctgtttcttcagtttcgtaaccgccgccaccgagttcgacttcggaacgttaactttgggaagcctcaagctcctcggcgacgcccacttaaacaacgccaccgtcagcctcacgcgcgacctcgccgttccaacctccagcgccggcagagccctttactcccgtcctgtcagattccgccaacccggaaaccgttttccggcgagcttcaccac

SEQ ID NO: 7760 - DNA, 366 bp, Glycine max
  unsure (1)..(366): unsure at all n locations
  Clone ID: LIB3039-050-Q1-E1-H12
ggatgcacaagtttgttgagatagctagaagcaataagatgaaaatgaaagtgcttgttttgtttgttgctacagttttggtagcatatgaatgccatggctcagactaccagaagttccctctccaaatgaaaactgggtttggtgggcaatacagcaatgaggtggcatgtgccagttggaggcttggcgtggaagcaaacaacgtagtcaagtggcaaactgttcctgcagcttgcggagagtacatagctgactacgttctangagaccaatatagatcagattccaaaacagttaaccaacaagcttatttctatgctaaatccctcaaactcaacaacaaagatgtctttgtcttggacg

SEQ ID NO: 7761 - DNA, 393 bp, Glycine max
  unsure (1)..(393): unsure at all n locations
  Clone ID: LIB3039-050-Q1-E1-H2
ggcacaagtgagtttgttgatcgagataactagaaacagtgtgatgaaaatgaaggtccttgttttcttcgttgctacaattttggtagcatggcaatgccatgcgtacgatatgttccctctccgaatgaacactggctatggtgcccgtactccggaggtgaaatgcgcaagttggaggcttgctgtggaagcacacaacatctttggctttgagaccattcctgaagagtgcgttgaagcaacaaacgaatacatccatggcgaacaatatagatcagactccanaacagttaaccaacaagcttacttttatgccagagaactcgaagtccatcccaaggacacatttgtgttcagtataaatggcaccgtactctctaatattccata

SEQ ID NO: 7762 - DNA, 391 bp, Glycine max
  Clone ID: LIB3039-050-Q1-E1-H3
gaaagaaaaatacttataaaaagaatcaaacagctacaacttgaactgttcataacccacaccaaaagttccaaaccccaacccgaaaaatcacacacaccccctttggaattgggatccatcgccatatctctgattaggttagataagattccctatgggcacttccattctcgacgccctgaacgtccgcgtggaaggttccggcgataagtaccttttcctggcccacggcttcggcacagaccaatccgcgtggcagcgcgtgctcccttacttcacccgcaactacagcgtcattctctacgacctcgtctgcgccggcagcgtcaaccccgaccacttcgactaccgccgctacaccaccctcgacgcctacgtcgacgacctc

SEQ ID NO: 7763 - DNA, 378 bp, Glycine max
  Clone ID: LIB3039-050-Q1-E1-H4
acacacagctattcctcttaagcttgctactgagtttccacactgcataccttaggtcttccgaattcgaagttaatttgcaagatggctaaggaaaaggctcagatcaacattgtggtggttggtcatgtggaccctgaggaggcaaccaccattaacgagctgaagaagcctgttgtggagaaagaagctccagggcatgccatatgagggcatgcacgtacggcctcggaggggaaccagaaaattatgttaacaaaataatctggaaccctaatgtatcagtgtcatcatcagtgtgtagtttaagctagctttgctatggttacgttctttgagatgagagtcttgatgaacagtaccattctgatgtattgc

SEQ ID NO: 7764 - DNA, 410 bp, Glycine max
  Clone ID: LIB3039-050-Q1-E1-H5
ggttgttacttttgctttaacacattacactcacactctttgtgaaaaaggggagtttcttattctttctagacgcttccattgatcggcgatttcttagacatggcggagcatcacgaacacgaggaagtgaagggtgagtccttgttggagaagatttctgggaagatccacgaccacgattcgtcatcttcgtcggattccgacaacgagaaaaccagcgcttctgactccttgaagtcaaaggttttcaggcttttcggcagagaaaagcccattcaccatgttcttggtggcggaaaaccggccgacgtttttctctggagaaacaagaagatatctgcatcgacactcggagttgcgaccgctatatgggttctgtttgaattgcttgagtaccacctcctcac

SEQ ID NO: 7765 - DNA, 382 bp, Glycine max
  Clone ID: LIB3039-050-Q1-E1-H6
gacacttactagtagtaagcatggagtcctcaaagatctatgcttacctcttcctctgcatgatctttctctcttccgccactcccattctcgggtgtgggtacagttgcaaaccccccaggatgcacaagcctggtaatgacagcagcgacacccattacacacgttgttaagccagtagtcaccatccctcctacaaaggatcctcccgttgttcatccaccaatagtgaagcccccaggtattctccctccaattccaattattaacccaccaaccacaccatagattggacggaacactccatgcccaccaccaaagtctcctgcgcaggctacttgccacaatgatcctctcaaacattgtgcctgtgttgatcttc

SEQ ID NO: 7766 - DNA, 377 bp, Glycine max
  Clone ID: LIB3039-050-Q1-E1-H7
gattgttggcttgtgctctgctcgtgcctctagggttatcatatctccatttccatttcctctctctcagtttccaagaatcttaagctatgggaaagtcttacccaaccgtgagcgctgattaccagaaggccgttgagaaggcgaagaagaagctcagaggcttcatcgctgagaagagatgcgctcctctaatgctccgtttggcatggcactctgctggaacttacgacgtgagctcgaagaccggtggtcccttcggaaccataaagcacccctccgaactcgctcacggcgctaacaacggtcttgacatcgctgttaggcttttggagccactcaaagcggagtttcctattttgagctacgccgatttc

SEQ ID NO: 7767 - DNA, 379 bp, Glycine max
  Clone ID: LIB3039-050-Q1-E1-H8
gagggaaaggtccattcaacattattgtcattcagagaagagaagaggttttgcatcgcatcgcacagagatgaattcaattacaagaagcggatcgcttagtatcatcctcgttgttttcttctctttgcacttcattcttggtttttccgacgactcatcacctgcttcaaaagatgctacaaagacagaacctcatgccggaagaagcactagtgctatagttatcattgtattaattgtgcttgtgttcttttctttgttctcctttgtactttttaagctgtggcggaagaagaaaagggaggagcaatatgctcgtcttttgaaattatttgaagaggatgatgagttagagcttgagcttggcctaagggac

SEQ ID NO: 7768 - DNA, 368 bp, Glycine max
  Clone ID: LIB3039-050-Q1-E1-H9
gaacgctctccaatacaaaataaccactcactgaatattcggtcgaagttgtccgccgccgaagaagctaaagttcccgccgtcgaaaagccggtggaggaggtgaaggcgccgaagcttgccaaggagaagaaacctaaggctccgaaggaaaagaagccgaaacaggccaaaactgcttctcatcctccatatctccagatgattaaggacgctttgattgctctgaacgagaaaggaggatcgagtccatatgcgatagcgaagtacatggaggagaagcacaaggcggtgcttcctgcgaatttcaagaagatactaggtctgcaactgaagaaccaagctgccagaaggaaactcgtcaagat

SEQ ID NO: 7769 - DNA, 343 bp, Glycine max
  Clone ID: LIB3039-051-Q1-E1-A1
ggcagttgtattgttgaacaagggtttctctgtctgcttcttcactttctctcgtttcaatcgaaaccaaaacaaaaacatgggcagaaaattcttcgtcggtggcaactggaaatgcaatgggaccactgaggaggtaaagaagattgttactactttgaatgaggctaaagtccctggagaagatgtcgtagaagttgttgtgagccctccttttgtgttccttcctgttgtaaaaagtttgctgcgccctgatttccatgtttcggcacaaaactgttgggttcgcaaaggtggtgcttataccggtgaggttagtgctgaaatgcttgttaatttggga

SEQ ID NO: 7770 - DNA, 280 bp, Glycine max
  Clone ID: LIB3039-051-Q1-E1-A10
gagggttacacgccgtcgtcactgtttttgtgtgtcgcttcttcggatgtgcagctgcaatggtgaatggacgccatagagaacgtgtcagactctacgtgaggggtacaatccttggatacaaaatgtccaagtcaaaccagtatccaaatacatccctgatccaaattgagggtgtgaatgccaaagaataagtatcatggtatgctggcaataaaatggcctatatctacaatgctaaagtgaagaagaatggaagccattaccgctgcatatgggg

SEQ ID NO: 7771 - DNA, 293 bp, Glycine max
  Clone ID: LIB3039-051-Q1-E1-A11
ggcacaagtgagtttgttgatcgagataactagaaacagtgtgatgaaaatgaaggtccttgttttcttcgttgctacaattttggtagcatggcaatgccatgcgtacgatatgttccctctccgagtgaacactggctatggtgcccgtactccggatgtgaaatgcgcaagttggaggcttgctgtggaagcacacaacatctttggctttgagaccattcctgaagagttcgttgaagcaacaaaggaatacatccatggccaacaatatagattaaacgccaaaacag

SEQ ID NO: 7772 - DNA, 298 bp, Glycine max
  Clone ID: LIB3039-051-Q1-E1-A12
ggcgagattgaatcgtaagcagcggctaccctaatcctctcctcttcctctctacgaatttcagctatggccgacgaagctgtgggtgttccagatcccacccagatcgatgtcaagctctttaaccgctggagcttcgacgatattgagattactgacatttctctggctgattatatcggagtggcgacatccaagcacgccacgtatgtgcctcacaacgccggcaggtactcggtgaagcggttcaggaaagcgcaacggcccattgttgaaaagctgacaactctctcaagat

SEQ ID NO: 7773 - DNA, 375 bp, Glycine max
  unsure (1)..(375): unsure at all n locations
  Clone ID: LIB3039-051-Q1-E1-A2
aggggtgttaaaaaagttttttctgaaaacaaaaaataaaaaaaagaggtttgggacaatggaaaaagaaattgattccggcccctccctctgttttaaaatccatcagaagccgcaactctctcaataaaacctgctttctatttntctcaacctaaaatcccatccaccaaccttatgatgatgtcttcactctctgtttcgcgccacaaccacctcttctcgggccctctcncggcccggcccaagcccaagcccagcttttcctcttccaggatccgaatgtccctccaagaaaacggcccctccatcgccgtcgtgggcgtcaccggcgccgtcggccaggagttcctctccgtcctctccgaccgcgac

SEQ ID NO: 7774 - DNA, 322 bp, Glycine max
  Clone ID: LIB3039-051-Q1-E1-A3
caacaaggggtaccttgaaatctctttgtttctatttcagttgcaattaatctctttgctcagccaccacccaccacctaccgtgactcaaagcaccataaggcaacaatgatagatgagcgtcagttcttttcgaatcctgtgacattcaagtagcaataattgtaaggaaacttggagatacttctagtctttagaaggaaacaagcattaatatttattgtataattattgtggggaatggtcatttaatttggatatgatggagttctgtgctgaaagttcccattcaaatcagaaacaaactttgaagcattttaaa

SEQ ID NO: 7775 - DNA, 355 bp, Glycine max
  Clone ID: LIB3039-051-Q1-E1-A4
ggcacaagtgagtttgttgatcgagataactagaaacagtgtgatgaaaatgaaggtccttgttttcttcgttgctacaattttggtagcatggcaatgccatgcgtacgatatgttccctctccgaatgaacactggctatggtgcccgtactccggaggtgaaatgcgcaagttggaggcttgctgtggaagcacacaacatctttggctttgagaccattcctgaagagtgcgttgaagcaacaaaggaatacatccatggcgaacaatatagatcagactccaaaacagttaaccaacaagcttacttttatgccagggacctcgaagtctatcccaaggacacatttgtg

SEQ ID NO: 7776 - DNA, 313 bp, Glycine max
  unsure (1)..(313): unsure at all n locations
  Clone ID: LIB3039-051-Q1-E1-A5
ggcacaagtgagtttgttgatcgagataactagaaacagtgtgatgaaaatgaaggtccttgttttcttcgttgctacaattttggtagcatggcaatgccatgcgtacgatatgttccctctccgaatgaacactggctatggtgcccgtactccggaggtgaaatgcgcaagttggaagcttgctgtggaagcacacaacatctttggctttgagaccattcctgaagagtgcgttgaagcaacanatgaatacatccatggcgaacaatatagatcagactccaaaacagttaaccaagaagcttacttt

SEQ ID NO: 7777 - DNA, 251 bp, Glycine max
  Clone ID: LIB3039-051-Q1-E1-A6
ggttccaaaaccaaatgttgcagagcctgccaagtggggtgtacaagatgagcctcttttggtttctagttttctctgcacatcttgcactagcatcctctcttgttgaatttcaagataatgataatccaaggcaaaagcaagagggcatgcatctaaatttgtaccatgttaaaggtcttgactcctctcaaacttccacatcaccattttcattctctgacatgattacaaaagatgatgaacgtgtc

SEQ ID NO: 7778 - DNA, 287 bp, Glycine max
  Clone ID: LIB3039-051-Q1-E1-A7
ggcacaagtgagtttgttgatcgagataactagaaacagtgtgatgaaaatgaaggtccttgttttcttcgttgctacaattttggtagcatggcaatgccatgcgtacgatatgttccctctccgaatgaacactggctatggtgcccgtactccggaggtgaaatgcgcaagttggaagcttgctgtggaagcacacaacatctttggctttgagaccattcctgaagagtgcgttgaagcaacaaaggaatacatccatggcgaacaatatagatcagactcca

SEQ ID NO: 7779 - DNA, 232 bp, Glycine max
  unsure (1)..(232): unsure at all n locations
  Clone ID: LIB3039-051-Q1-E1-A8
ggtttcatttggttttcttccttctcacacttcccccaattcccaaaccaaactctgtcttttcttctctgtacggcactctctcttccggcgttctgggggtcgcatcgccggcgattccccactctgcttctctcttcacccttcaattcaatcctctcgtcttcgcttcactgagtcnctcttcgaaaatgcttcagatcgcntgctacggttttccttctctcaaatc

SEQ ID NO: 7780 - DNA, 269 bp, Glycine max
  Clone ID: LIB3039-051-Q1-E1-A9
gaatcgttagactaagcaagaggtcgttcagtgtaagtactccttgttcttgtttctgtttcatcatttttgatcttatgctagtcgaatcaattgtgatgcttagaattagtcaatgaagctccctgtgcgttacttgattgttattttgaccttcgtctgcacctcggtttgctacatcgaacgagttgggttttccatcgcgtacacagttgctgctgacggtgccggagtgaatcaatcgagcaaaggtacaatactgtccaact

SEQ ID NO: 7781 - DNA, 370 bp, Glycine max
  Clone ID: LIB3039-051-Q1-E1-B1
ggactaaacccaggctgtaaaccctttttccatctagagttgttgcggctctcttctctgcacactcagaatgcagtccacactcttcaaccccacccattcccttatccccacttcaccacactctatcagatccaattctggtcatgcttctctctccgttcgcgcctccatcgccgtggaaacccccacggagacggtgaagctgaacaagtacagctcccgcatcaccgagcccaaatcgcagggcgcctcccaggccgtgctctacggcgtcggtctctccgaggacgacatggccaagccccaggtcggcgtctcctcggtctggtacgaaggcaacacctgcaacatggcactcctcaacctc

SEQ ID NO: 7782 - DNA, 296 bp, Glycine max
  Clone ID: LIB3039-051-Q1-E1-B10
ggccgaaaaccctaacaacacaggcgcagagcgtgatccattgacgaagatggtgcagcgtctcacctaccgcaagaggcacagctatgccaccaaatccaaccaacacagggtcgtcaaaacccctggtgggaagctcgtttatcagaccaccaagaagagggccagcgggcccaagtgccccgtcactggcaagaggattcaggggattccacacttgaggcctgcagagtacaagagatcaaggttacccagaaaccgtaggactgtcaaccgtgcatatggcggagttttgt

SEQ ID NO: 7783 - DNA, 328 bp, Glycine max
  Clone ID: LIB3039-051-Q1-E1-B11
gaatcagaagaagaagcaggcgagttgagagagaatgggaaggaagaaggggtatgttgagttcgaggagtcgccgccggacgatttcgatccggcgcatccgtacaaggacccggtggcgatgctggagatgagggagcacatcgtgagggagaagtggatccaaatcgagaatgccaagatcattacggagaagctccgatggtgctaccgcatccaaagcgtcaaccacctccagaagtgccgccacctcgtcaaccagtatctcgagtccacccgcggcatcggttggggcaaggacggtcgtcatccttctctccaagctccc

SEQ ID NO: 7784 - DNA, 290 bp, Glycine max
  Clone ID: LIB3039-051-Q1-E1-B12
gaatgaaaggagaatacgtagagcaacagcaacaacatcctaagagtgaaacaccacctagtatgttctcaaagcttcagcctcagcaccatcctttcccgcaccaccctttccaactctccgccgaggatgccaccaccatcaccccgagcaccgctcagaaggccaactcctccggcggcgacggcgcgaccatcgaggttgctcggcgtcccaaaggacgtccgcccgggtccaaaaacaagcccaagccaccggttatcataacccgtgacccggaacccgctatg

SEQ ID NO: 7785 - DNA, 360 bp, Glycine max
  Clone ID: LIB3039-051-Q1-E1-B2
gcctcttctctcgcgtcgctccgcaccagtttcaccgcacgaatatcttgttgtttggagcgatccgagaaaaactctgtaaacatgttggtttaccaggacctccttacaggtgatgagcttctctctgactccttccgttacaaggaaattgagaatggaatgctgtgggaagttgaggggaagtgggttgttaaaggagcagttgatgtagacattggtgcaaatccttctgctgagggtggaggagaagatgagggagttgatgatgcagctgttaaggttgttgacattgttgacacattcagacttcaggagcaacccgcattcgataagaagcagtttgttaccttcatgaag

SEQ ID NO: 7786 - DNA, 375 bp, Glycine max
  Clone ID: LIB3039-051-Q1-E1-B3
tccactccacccatttctctctctctcttctcttttcctcttcaacattcttctctctcacaaagcaacaacacaaacaccgagcgaggggaattcaactttcagcaatggcggtttcttcttctgcaacaaaatgggtcctcttcttgcttctggcgctgctcatccgagaagaagccatggccatggctactaccccacagatctctgacctcaggaatgttgaagttgaaagacacaggttgccgagcttgacgaactcgtcaatggtggagaggttagtgtccttttcccaacgttaaaaattcttatcctcttctttctcgaaactcgtgtaaatctggaccgtccgttccgaattctatctttaactct

SEQ ID NO: 7787 - DNA, 224 bp, Glycine max
  Clone ID: LIB3039-051-Q1-E1-B4
gaaggtgcaaaagtttgttgtgagctataagctagtttatcgtgaggagaatatgaagttgtttgttttctttgttgctgcagtagttttggtagcatggccatgccatggcgcaggctaccaaaggttccctctccgaatgaaaactggctaaggtgaacgttcttctgaggtaaaatgcgcaagttttaagcttgctgtggaaccacacaacatctgagcct

SEQ ID NO: 7788 - DNA, 386 bp, Glycine max
  Clone ID: LIB3039-051-Q1-E1-B5
gaagacttgagagtgagagagagagtgagagagtgagtgagatagagagagacgcttcgcaaatctcaatcgaatctcagaaaaatgagagaaatcatcagcattcacataggtcaggccgggatccaggtcggaaactcctgctgggaactctactgcctcgaacatggcatccagcccgacggcatgatgccttctgactccaccttcggtgtagcccacgacgccttcaacaccttcttcagcgaaaccggatctggcaagcacgtcccccgtgctgtcttcgtcgacctcgaacccaccgtcatcgacgaggtccgctgcggtacctaccgtcaactcttcgaccccgaacaactcatctccggcaaggaagacgccgccaa

SEQ ID NO: 7789 - DNA, 272 bp, Glycine max
  Clone ID: LIB3039-051-Q1-E1-B6
ggcaagagtttgttgtgagctataagctagtttatcgtgaggagaatatgaagttgtttgttttctttgttgctgcagtagttttggtagcatggccatgccatggcgcaggctaccaaaggttccctctccgaatgaaaactggctatggtgagcgttcttcggaggtaaaatgcgcaagttttacgcttgctgtggaagcacacaacatccgagccttttaaaccattcctgaagagtgcgttgaaccaacaaaggactacattaatggc

SEQ ID NO: 7790 - DNA, 355 bp, Glycine max
  Clone ID: LIB3039-051-Q1-E1-B7
ggcacaagtgagtttgttgatcgagataactagaaacagtgtgatgaaaatgaaggtccgtgttttcttcgttgctacaattttggtagcatggcaatgccatgcgtacgagatgttccctctccgaatgaacactggctatggtgcccgtactccggaggtgaaatgcgcaagttggaggcttgctgtggaagcacacaacatctttggctttgagaccattcctgaagagtgcgttgaagcaacaaaggaatacatccatggcgaacaatatagatcagactccaaaacagttaaccaacaagcttacttttatgccagagacctcgaagtccatcccaggacacatttgtgt

SEQ ID NO: 7791 - DNA, 319 bp, Glycine max
  unsure (1)..(319): unsure at all n locations
  Clone ID: LIB3039-051-Q1-E1-B9
cgacccacgcatcagggcaggcgtcagaacgacgangggggaagttccaaaattcaacattggtacctcaacctttgtcattgcctgcgagttccaccttggctatcgcttcccgcaccaaaagtccctcccagctcgtattttctcaaagaaacccgtgctcgatagcttcttccttgccagacccatatggccattcatcggaagttgggttatcaagtaaaagccgtggctttcctttaaaacatgatgagaaaaatatccatggtgctagtacaagttatggtgcaattgaagccaacgggaatccgccgataac

SEQ ID NO: 7792 - DNA, 378 bp, Glycine max
  unsure (1)..(378): unsure at all n locations
  Clone ID: LIB3039-051-Q1-E1-C1
ggttctattgtttgattgtttgttgttgtaatccgttcttcttctttggtggttcggtgtttgtgttggttttttctctcacctgaaaaatgtcttgctgcggtggtaactgtggttgcggaagctcctgcaagtgcggcaacggctgcggaggctgcaagatgtacccagacttgagctacactgagtcaaccaccaccgagaccttggtcatgggagtggcacctgttaaggctcaatttgagggtgctgaaatgggtgtgcccgctgagaacgatggctgcaaatgtggaccaaactgctcctgcaacccctgcacttgcaagtgangtgttgggagagcaagcttcaagcagagatagcccttaattangaata

SEQ ID NO: 7793 - DNA, 307 bp, Glycine max
  Clone ID: LIB3039-051-Q1-E1-C10
gattgaaccacacaatacaagttaaagggatgatggagaaaggaagtgtggttgaagctgcagtaactagatctcccatgcagatgaagatgggggatcatgaattagaaggcaacactaccagtgccctacgcactgccgagacgtttctgcgtttgttccctgttggtctatgtgtttcagcacttgttctcatgcttaagagctctcagcagaatgaatatggatctgttgattacagcgatcttggagctttcaagtacttggtgcatgcaaatggcatttgtgccggctactctctattttc

SEQ ID NO: 7794 - DNA, 291 bp, Glycine max
  Clone ID: LIB3039-051-Q1-E1-C11
ggcacaagtgagtttgttgatcgagataactagaaacagtgtgatgaaaatgaaggtccttgttttcttcgttgctacaattttggtagcatggcaatgccatgcgtacgatatgttccctctccgaatgaacactggctatggtgcccgtactccggaggtgaaatgcgcaagttggaggcttgctgtggaagcacacaacatctttggctttgagaccattcctgaagagtgcgttgaagcaacaaaggaatacatccatggcgaacaatatagattagactccaaaac

SEQ ID NO: 7795 - DNA, 327 bp, Glycine max
  Clone ID: LIB3039-051-Q1-E1-C12
gaaggtgcaagagtttgttgtgagctataagctagtttatcgtgaggagaatatgaagttgtttgttttctttgttgctgcagtagttttggtagcatggccatgccatggcgcaggctaccaaaggttccctctccgaatgaaaactggctatggtgagcgttcttcggaggtaaaatgcgcaagttttaggcttgctgtggaagcacacaacatccgagcctttaaaaccattcctgaagagtgcgttgaaccaacaaaggactacattaatggcgaacaatttagatcagactctaaaacagtttaacaacaagctttccttta

SEQ ID NO: 7796 - DNA, 327 bp, Glycine max
  Clone ID: LIB3039-051-Q1-E1-C2
gctccttctccatcctaaatcgaatagatagataggtgaaaatggcgcagtgtgtgaccaacacattcgtgcaaggaaaaaccttttcatccagttgcagcagctcgcactaaaaatgttcggagagcggttcagtgcggtgtgtggtgcaagaagaaggagatacacccgcaattctacgaggaatcgaaggtgtactgcaacggggagctggtgctgacgacaggtgggacccagaaggaatacgtggtggacgtgtggtcggggaaccaccccttctacctcggaagccggtcggcgtctatggtcagcgacgaccaggtcgag

SEQ ID NO: 7797 - DNA, 384 bp, Glycine max
  Clone ID: LIB3039-051-Q1-E1-C3
ggccattgttgctgtcatcatccgcagctgctgttattcgcaccgcaaacatgcattgagccatggccgtcggaaagaacaagcgcatctccaaagggaaaaagggtggcaagaagaatgcagctgatccctttgccaagaatgattggtatgacattaaggccccttctctttttcaagtgaaaaatgttggcaaaaccctcgtctcacgtacgcacggtaccaagattgcttctgaaggacttaaacatagagtgtttgacgtctccttggctgatcttcaacgggatgaggatcatgcattcaagaagattaggttgagagctgaagatgtgcaagggaataatgtcctgacaaatttctggggaatggatttcacaactg

SEQ ID NO: 7798 - DNA, 193 bp, Glycine max
  Clone ID: LIB3039-051-Q1-E1-C4
gacatttcacagtcaccaactaaccctccgtttatcccacccccaccctggttttaaccggcaacatccattggaaaggacacaacgccaggcgtctttcaggaggtttgcaatgcgtgttggattgctctctcagaaccgtgtcatacatgtaattgccacatcgctgcacatcagaagaatattagacccc

SEQ ID NO: 7799 - DNA, 366 bp, Glycine max
  unsure (1)..(366): unsure at all n locations
  Clone ID: LIB3039-051-Q1-E1-C5
ggcacaagtgagtttgttgatcgagataactagaaacagtgtgatgaaaatgaaggtccttgttttcttcgttgctacaattttggtagcatggcaatgccatgcgtacgatatgttccctctccgaatgaacactggctatggtgcccgtactccggaggtgaaatgcgcaagttggaggcttgctgtggaagcacacaacatctttggctttgagaccattcctgaagagtgcgttgaagcaacaaaggaatacatccatggcgaacaatatagatcagactccaaaacagttaaccaacaagcttacttttatgccagagacctcgaagtcaatcncaaggacacatttgtgttcagtataga

SEQ ID NO: 7800 - DNA, 327 bp, Glycine max
  Clone ID: LIB3039-051-Q1-E1-C6
gatccaaagcagaacaaagagccattgaactttgactataatattcagagttcagattactcactctaatcttctaagttttcattttggggtttaagtttctgaaggaaaaaaaaatgataaagtttgttctatttttgttctgctttgcctctgcactgaccctttcagtatcggagtcgaaatcagcttcagtgcaacctcatgctgctgaatctttcactgttggatatattcagatgaagactgcagcgaactgttcttacctggtagttatatctacgagttgttcatcgcctaagttcacaacggataagatcggtatca

SEQ ID NO: 7801 - DNA, 310 bp, Glycine max
  Clone ID: LIB3039-051-Q1-E1-C7
ggaacttctcacgttcatttctacacatccctagctctgtcgttccgtcgttgacgatggcgtttcgggtgcgaagccctgaactccgctctctctttcttctctctctcttgtccatcgcttccgcgaatgtcttcttcgaagagcgtttcgatgacgggtgggaaaatcgatgggttaaatcagattggcaatgagatgagaacgtggctggggagtggaagcatacctctggtcaatggaatggagacgctaatgacacatgtattcaaaccagtgaggattacagattctatgctatttcaactga

SEQ ID NO: 7802 - DNA, 287 bp, Glycine max
  Clone ID: LIB3039-051-Q1-E1-C8
gatggggttttactttccatggcgatggccaatgatggcctatgccttttggtctggaacttagtctgaacaatttcatttggtaactatatacaatgtttttattgctagctgttattggcttgttttcagtttgtggacaagttgcaatagtaatatatattacttgattttaggtttactatttcattgttctttgatcaactttaagttttaaccccttacaggtgtatttattattattattactacttacagtttatgttactgttgatttagtttttgac

SEQ ID NO: 7803 - DNA, 168 bp, Glycine max
  Clone ID: LIB3039-051-Q1-E1-C9
ggcacaagtgagtttgttgatcgagataactagaaacagtgtgatgaaaatgaacgtccttgttttcttcgttgctacaattttggtagcatggcaatgccatgcgtacgatatgttccctctccgaatgaacactggctatggtgccggtactccggaggtgaaatg

SEQ ID NO: 7804 - DNA, 325 bp, Glycine max
  Clone ID: LIB3039-051-Q1-E1-D1
gacaacacaagacataatcaaagaaaaaaaaacccttagccaacacaaccatcatggccacctctgctattcagcaatcagcattcactggtcaaactgctctgaagcagctcaatgagttcgtccgcaagaccggtggcgccggcaaaggtcgcactaacatgcgccgcaccgtcaagagtgctcctcagagcatttggtatggccctgaccgtcccaagtacttgggtccattctcggagcagattccatcataccggaccggagaattccctggtgactacggatgggacactgctggattatcagctgacccggaaacctt

SEQ ID NO: 7805 - DNA, 337 bp, Glycine max
  unsure (1)..(337): unsure at all n locations
  Clone ID: LIB3039-051-Q1-E1-D10
agagttcaagcactcaaatctgatggtggtaaatggaataagagatggcaagaagcatctagtgacactgatgacgacgatgacgatgacgatgcacctcagcggtttaatacaaatgacccttaccttatgagtcctgangatagactggaatggaggatgaacataagacaggtgttggataggaaacctgatgttgaagaggaattagaccctctggaaaagaagaaaaaactggagaagcttttggacgattaccctcttgttgtggacgaagatgatcctgattggccaggagatgctgaatggtggggaatcagctttggccaattttttc

SEQ ID NO: 7806 - DNA, 293 bp, Glycine max
  Clone ID: LIB3039-051-Q1-E1-D11
ggcacaagtttgttgagatagctagaagcaataagatgaaaatgaaagtgcttgttttgtttgttgctacagttttggtagcatatgaatgccatggctcagactaccagaagttccctctccaaatgaaaactgggtttggtgggcaatacagcaatgaggtggcatgtgccagttggaggcttggcgtggaagcaaacaacgtagtcaagtggcaaactgttcctgcagcttgcggagagtacatagctgactacgttctaggagaccaatatagatcagattccaaaaca

SEQ ID NO: 7807 - DNA, 274 bp, Glycine max
  Clone ID: LIB3039-051-Q1-E1-D12
ggtgctctgctcgtgcctctacggttatcatttctccatttccattttctctctcacttttcaagaatcgtaagctatgggaaagtcttacccaactgtgagtgctgattaccataatgccgttgagaaagcgaagaataagctcaaatgcttcatcgctgataagagatgcgctcctctaatgctccgtttgagatggcactctgctggaatctttgacaatggcacgaagatcggtggacccttccgaagcatcaatcaccctgccgaactg

SEQ ID NO: 7808 - DNA, 336 bp, Glycine max
  unsure (1)..(336): unsure at all n locations
  Clone ID: LIB3039-051-Q1-E1-D2
gatcgaagcanaaaatgaaaacccaaagtgcttctctcctctgtctttttctctctcttgctatccttttggctagtggcactgctgcaagtgcaactccaagaagcgcagtgccaagccaccatgtttcaacattcaacagaagcctttttccttccacttttctctttggaattggttcttctgcttaccaggcagaaggagcagcaagtgtagatgggagaggaccaagcatatgggacacctacactagacagcatactgaaaagatttgggattatagcaccggtgacatgggagctgatttttatcatcgatacaagggtgacataaaaa

SEQ ID NO: 7809 - DNA, 385 bp, Glycine max
  Clone ID: LIB3039-051-Q1-E1-D3
agggggcaaaattaattttgttgatcaaaatagcttcaaacatttgaatgaaaatcacggtcgttgttttcttcgttgctaaaattttggtaccatggcaatgccatgcgtacgatatgttcccccacgtaatgaacaatggcaatggtgcccgtactccggatgtgaaatgcgcaagttggacgcctgctgtggaagcacacaagatcattggctttgagaccattcctgaagagtgcgttgaagcatcaaacgaatacatccatggcgaacaatatagatcagactccagtacagttaaccaataagcttacttatatgccagagacctcgatgtccatcccaaggacacatgtgtgttcagtatacatggcatcgtactcac

SEQ ID NO: 7810 - DNA, 304 bp, Glycine max
  Clone ID: LIB3039-051-Q1-E1-D4
aggaaaagagaagagagatctgagagaagcaaagctgaagaagtgaagttaagatgatgtccgggaaatatacctccaatgacccccaacaacctcaaggattcggtcctggcgttccaaaatcaagaaccggcaacggcaaattccgcaaatccaaaccttcaaactttcccccctcctggacctcagggcaagatcaccgctgcttccgggccccctcgtgacgctgatgatccattttcaaaaccggtatctggttctgatgaaccgcagcagggtggttggtttcagacttttacaattg

SEQ ID NO: 7811 - DNA, 379 bp, Glycine max
  Clone ID: LIB3039-051-Q1-E1-D5
gacaagtgagtttgttgatcgagataactagaaacagtgtgatgaaaatgaaggtccttgttttcttcgttgctacaattttggtagcatggcaatgccatgcgtacgatatgttccctctccgaatgaacactggctatggtgcccgtactccggaggtgaaatgcgcaagttggaggcttgctgtggaagcacacaacatctttggctttgagaccattcctgaagagtgcgttgaagcaacaaaggaatacatccatggcgaacaatatagatcagactccaaaacagttaaccaacaagcttacttttatgccagagacctcgaagtccatcccaaggacacattgtgttcagtatagatggcaccgtactctct

SEQ ID NO: 7812 - DNA, 338 bp, Glycine max
  Clone ID: LIB3039-051-Q1-E1-D6
gacaagtgagtttgttgatcgagataactagaaacagtgtgatgaaaatgaaggtccttgttttcttcgttgctacaattttggtagcatggcaatgccatgcgtacgatatgttccctctccgaatgaacactggctatggtgcccgtactccggaggtgaaatgcgcaagttggaggcttgctgtggaagcacacaacatctttggctttgagaccattcctgaagagtgcgttgaagcagcaaaggaatacatccatggcgaacaatatagatcagactccaaaacagttaaccaacaagcttacttttatgccagagacctcgaagtccatccc

SEQ ID NO: 7813 - DNA, 350 bp, Glycine max
  Clone ID: LIB3039-051-Q1-E1-D7
ggcacaagtgagtttgttgatcgagataactagaaacagtgtgatgaaaatgaaggtccttgttttcttcgttgctacaattttggtagcatggcaatgccatgcgtacgatatgttccctctccgaatgaacactggctatggtgcccgtactccggaggtgaaatgcgcaagttggaggcttgctgtggaagcacacaacatctttggctttgagaccattcctgaagagtgcgttgaagcaacaaaggaatacatccatggcgaacaatatagatcagactccaaaacagttaaccaacaagcttacttttatgccagagacctcgaagtcaatcccaaagacacat

SEQ ID NO: 7814 - DNA, 325 bp, Glycine max
  unsure (1)..(325): unsure at all n locations
  Clone ID: LIB3039-051-Q1-E1-D8
ggcagcagcaactttagacgccgaagaaagttcatccaatctccgaagcccttcaccgcattgcaaccatgtcgagaagaaaggttagagagccaaaggaagaaaacgtgactctgggcccaactgttagagatggcgaacatgtctttggcgtcgctcgcatctttgcctccttcaatgataccttcagtcatgtcactgatctgtccgggagggaaacacatgtccgcatcacaggtggaatgaacgttaaggctgacagagatgaatcgtctcnctatgctgctatgcttgctgcacaggacgttgctgccagatgcaagga

SEQ ID NO: 7815 - DNA, 288 bp, Glycine max
  Clone ID: LIB3039-051-Q1-E1-D9
ggcaggcgaagagatggccaccgttccagggcagctcgtgtgggagatcgtcaagaaaaacaattccttcttggtcaagcagtttggaaggggcacccagagcgtcgaattcagcagagagagcaacaatctctacaacctcaattcgttcaagtactctggtttggcaaacaagaaaactgttactgttcagcctgagggcaaagatcaggctgtgttgttggctacaaccaagacaaagaagcaaaacaagcccgctgcattgctccacaaatctgtgatgaagaa

SEQ ID NO: 7816 - DNA, 355 bp, Glycine max
  unsure (1)..(355): unsure at all n locations
  Clone ID: LIB3039-051-Q1-E1-E1
ggcacaagtgagtttgttgatcgagataactagaaacagtgtgatgaaaatgaaggtccttgttttcttcgttgctacaattttggtagcatggcaatgccatgcgtacgatatgttccctctccgaatgaacactggctatggtgcccgtactccggaggtgaaatgcgcaagttggaggcttgctgtggaagcacacaacatctttggctttgagaccattcctgaagagtgcgttgaagcaacaaaggaatacatccatggcgaacaatatagatcagactccaaaacagttaaccaacaagcttacttttatgccagagaactcgaagttcatcncaaggacacatttgtg

SEQ ID NO: 7817 - DNA, 313 bp, Glycine max
  Clone ID: LIB3039-051-Q1-E1-E10
gcacaagtgagtttgttgatcgagataactagaaacagtgtgatgaaaatgaaggtccttgttttcttcgttgctacaattttggtagcatggcaatgccatgcgtacgatatgttccctctccgaatgaacactggctatggtgcccgtactccggaggtgaaatgcgcaagttggaggcttgctgtggaagcacacaacatctttggctttgagaccattcctgaagagtgcgttgaagcaacaaaggaatacatccatggcgaacaatatagatcagactccaaaacagttaaccaacaagcttactttt

SEQ ID NO: 7818 - DNA, 301 bp, Glycine max
  Clone ID: LIB3039-051-Q1-E1-E11
gaggtgcaagagtttgttgtgagctataagctagtttatcgtgaggagaatatgaagttgtttgttttctttgttgctgcagtagttttggtagcatggccatgccatggcgcaggctaccaaaggttccctctccgaatgaaaactggctatggtgagcgttcttcggaagtaaaatgcgcaagttttaggcttgctgtggaagcacacaacatccgagcctttaaaaccattcctgaatagtgcgttgaaccaacaaaggactacattaatggcgaacaatttagatcagactctaaaa

SEQ ID NO: 7819 - DNA, 282 bp, Glycine max
  Clone ID: LIB3039-051-Q1-E1-E12
gacaacacagaacatgaacagagaaaaaaaaacccttagccaacacaaccatcatggccacctctgctactcagcaatcagcattcactggtcaaactgctctgaagcagctcaatgagttcgtccgcaagaccggtggcgccggcaaaggtcgcactaacatgcgccgcaccgtcaagagtgctcctcagagcatttggtatggccctgaccgtcccaagtacttgggtccattctcggagcagattccatcataccggaccggagaattccctggtgact

SEQ ID NO: 7820 - DNA, 292 bp, Glycine max
  Clone ID: LIB3039-051-Q1-E1-E2
gaacaacaatacgaacaagtgaaaaagcaattaactaagcatatatagcgtgttagacaatgaaaagaacagtgttgtgtcgagagaaatggctaagtggtgcatcatgggggttcttgcccttgtcgtggttgcaagtgccagaaacatgcccaatgacgcaggtttggaggaccagaagaacttcctcgggtatgggttctctggagttggaaacaatgggcttcccattggacgagtgggttctgggtttgatggtaatatgggtgggccttctgggctcagtggattt

SEQ ID NO: 7821 - DNA, 381 bp, Glycine max
  unsure (1)..(381): unsure at all n locations
  Clone ID: LIB3039-051-Q1-E1-E3
ggttcaattgtgtgatggttggttgttgtaactcgttcttcttctttggtggttcggtgttggtgttggttttttctctcacctgaaaatgtcttgctgcggtggtaactgtggttgcggaagctcctgcaagtgcggcaacggctgcggaggctgcaagatgtacccagacttgagctacactgagtcaaccaccaccgagaccttggtcatgggagtggcacctgttaaggctcaatttgagggtgctgaaatgggtgtgcccgctgagaacgatggctgcaaatgtggaccaaactgctcctgcaacccctgcacttgcaagtgaggtgttgggaaggcaagcttcaagcagagatagccctttaatangaataatga

SEQ ID NO: 7822 - DNA, 363 bp, Glycine max
  unsure (1)..(363): unsure at all n locations
  Clone ID: LIB3039-051-Q1-E1-E5
ggcacaagtttgttgagatagctagaagcaataagatgaaaatgaaagtgcttgttttgtttgttgctacagttttggtagcatatgaatgccatggctcagactaccagaagttccctctccaaatgaaaactgggtttggtgggcaatacagcaatgaggtggcatgtgccagttggaggcttggcgtggaagcaaacaacgtagtcaagtggcaaactgttcctgcagcttgcggagagtacatagctgactacgttctangagaccaatatagatcagattccaaaacagttaaccaacaagcttatttctatgctaaatcgctcanactcaacaacaaagatgtctttgtcttggacg

SEQ ID NO: 7823 - DNA, 294 bp, Glycine max
  Clone ID: LIB3039-051-Q1-E1-E6
atccaactcgctagacaacacattaacctttcgcattcaccatctcttcaccttagtcagccactgctaatttctagggttccgaaatggacgctggcggaaagatcaagaagggcgccggaggaagaaagggcggcggccctaataagaatccggtttcaaggtccgtcaaaggtggtctccaattccgcgtcggaagaattggacgttatttgaagaaaggaaagtacgcctaacgtgtctgtagcagtgctcacgtatacttagtcgcagttctcgagtgcctaactgctg

SEQ ID NO: 7824 - DNA, 317 bp, Glycine max
  Clone ID: LIB3039-051-Q1-E1-E7
gagggtttttgtcgtcgctactaagagttgctgcttcttcagccactccgcacctcgcaacctctgtgccctcaacaaggatggctgatatcgacactaccgttccagatcccaggcaactcgacgtcaaacgcttcaatcgctggagcttcgaggatgttgaggttaatgataggtctctggctgattacattggagtgtccccatcaaagcatgctacatatgtgcctcacactgctggtaggtactcagtgcacatgttcatgaaggcgcagtgccccagtgttgatacgctcatcaactcgctgatgatgcac

SEQ ID NO: 7825 - DNA, 238 bp, Glycine max
  Clone ID: LIB3039-051-Q1-E1-E8
gatatcaataatctattttatactatacctacattttgataattttctttgtagttgatagccatggctacccgtggaaagcttgaggttgacattgatctcaagtccaacgcagacaagtactggcaaacccttaagaattctactgacatattccctaaaggccttccacatgattacaaaagcattgaggtccttgagggtgatggcaagtctcctggttctatccgccacataa

SEQ ID NO: 7826 - DNA, 385 bp, Glycine max
  unsure (1)..(385): unsure at all n locations
  Clone ID: LIB3039-051-Q1-E1-F1
atcctgtcatcctgtgccaatttttccggcaaatccgcaagaataaattggaacctaaggtaattataacatgaaattacaaaattattaaataaaaggttatcattattaagtataaactactcagtcatctttaacaatctgtactagtaagaagttaaaacagatgaagcaaatatcncatgggtggtgcatacgtctagccttaccacatttatacatatccttatacttggttcaacaaatcaggggaagaaatgcatagtgatgattggatttccttctaaatactcatttgccggtactatttgttgcacattccttttatgcaaagctcaaggggaaacagcataaacaaccattccaaatgatgaaactcattcca

SEQ ID NO: 7827 - DNA, 302 bp, Glycine max
  Clone ID: LIB3039-051-Q1-E1-F10
gacacatcatccgttctagtctcaagttctgctcttccaactcctagagagcttttctctgcactcatgggcaaggtcaagatcagcatcaacggatttggaagaattgggcgtttggttgccacagtcgctctgcaaagagacgatgttgaactcgttgccggttacgaccctttcattatcaccgattacatgacatacatgtttaaatacgacagtgttcacggacactggtagcatcacgatgtcaccgttaacgaccaaaaaacccttctcctccgtgacaaagcaatcactggttt

SEQ ID NO: 7828 - DNA, 303 bp, Glycine max
  Clone ID: LIB3039-051-Q1-E1-F11
ggcacaagtgagtttgttgatcgagataactagaaacagtgtgatgaaaatgaaggtccttgttttcttcgttgctacaattttggtagcatggcaatgccatgcgtacgatatgttccctctccgaatgaacactggctatggtgcccgtactccggaggtgaaatgcgcaagttggaggcttgctgtggaagcacacaacatctttggctttgagaccattcctgaagagtgcgttgaagcaacaaaggaatacatccatggcgaacaatatagatcagactccaaaacagttaaacaaca

SEQ ID NO: 7829 - DNA, 302 bp, Glycine max
  Clone ID: LIB3039-051-Q1-E1-F12
gacttgtaataattcttataacacaacacaacccatggccaccacctccgcattcctcctccttcccctcctcctgctgctccacctcgccatcgccgctcacggcatcggcatcaactacggcacgctcggcgacaaccttccaccgcccgcggcggtggcgaacttcctgaagacgaagacgaccatcgaccgcgtgaagatctacgacgtgaacccggacatcctgcgggccttcgccggcagcggcatctccgtgacggtgaccgcccccaacggcgacatcgccgccttaaccaaaa

SEQ ID NO: 7830 - DNA, 229 bp, Glycine max
  Clone ID: LIB3039-051-Q1-E1-F3
agggaagtctcactaggacgagagtcatcatcaggggatgagaatgccgtgaacttgaaggtcatactgcagattgcaatcatcgtggacgtcaaatcctgagatctgataggctacagtctccttttgactacatagatgttgctaaggtggtgaaaccagggaattagaaactggttagaccatgtccgaagcgtgcttttaatgctagtgaaagtgcagcgacatt

SEQ ID NO: 7831 - DNA, 55 bp, Glycine max
  Clone ID: LIB3039-051-Q1-E1-F4
ggcacaagtgagtttgttgatcgagataactagaaacagtgtgatgaaaatgaag

SEQ ID NO: 7832 - DNA, 377 bp, Glycine max
  Clone ID: LIB3039-049-Q1-E1-G9
gaacaccccttctatcagtgtgttttcttttccctaccaacttcttctactcttccccacacgatactactacacaaatggagaaccaactcgaactgaaccctaactcgctgaccgaactcagtgagtcctcggcgccgtccgacgacgacgaaccggctctgagctcccacaccctcgccgccctcaaagaattcctcgccgagcagcaacgcggctccgacgccggcggagagtccgaggtttctctggtgtctgaggattggaggctgagccagttctggtacagccccgaaaccgccacaaccgtcgccgaagaagttctcgctctctgcggcggcggcatccgcgctcgcgtcgcctgcatcgcttgccct

SEQ ID NO: 7833 - DNA, 370 bp, Glycine max
  unsure (1)..(370): unsure at all n locations
  Clone ID: LIB3039-048-Q1-E1-A11
gaccgatcctgcgtttcatctcatatactactaacaccctcagaaccgttccccacttgcttttcaattttctttttttgcccttttcgccgccctcaaagagttcaaggatttatacaattaatagttttttaatttggaatggctggaatttgctgtggagttgttggagaatccggagagacttcttcctcttcaatcgaacccacctcgcgcccctccgctcgccggagtttggaccttttgcctttgagatacatagctgctgacgtgtcagtcccggcgccggagaacagccggaagcgccagaagctggatcggtgcgtntcttccgcaagggagtgcgaaaacgcggttcagagttccaaat

SEQ ID NO: 7834 - DNA, 367 bp, Glycine max
  Clone ID: LIB3039-048-Q1-E1-A12
ggagcaaaaccctaatccctatttttcttcctcagtagtgtcatttacgcttctcttctctgcagcaactatgcctaaccctaaggtcttcttcgacatgaccatcggcggtcaatctgctggccgcatcgtgatggagctctacgccgacgtcactccccgcaccgccgagaacttccgcgcgctttgcaccggcgagaagggcgtagggcggagcggcaagcccctccactacaagggctcgtccttccaccgcgtgatcccgagtttcatgtgtcagggtggcgacttcaccgccggaaacggaaccggcggcgagtcgatttatggcgccaagttcgccgacgagaacttcgtgaagaagcac

SEQ ID NO: 7835 - DNA, 290 bp, Glycine max
  Clone ID: LIB3039-048-Q1-E1-A2
ggcacaagtgagtttgttgatcgagataactagaaacagtgtgatgaaaatgaaggtccttgttttcttcgttgctacaattttggtagcatggcaatgccatgcgtacgatatgttccctctccgaatgaacactgggtatggtgcccgtactccggaggtgaaatgcgcaagttggaggcttgctgtggaagcacacaacatctttggctttgagaccattcctgaagagtgcgttgaagcaacagaggaatagatccatggcgaacaatatggatcagactccaaaa

SEQ ID NO: 7836 - DNA, 169 bp, Glycine max
  Clone ID: LIB3039-048-Q1-E1-A4
agcgagaagacgagaggagggggcagtttcaaattttcgttgccgtcagtttcgcgagaaaaagagagcacttttcagtttcttcactacgttctcacttcgatatgggtcgtgcgaatgaggacgcgcgcaaggccaccggtggcaaggcgccacgtaagcagctcgc

SEQ ID NO: 7837 - DNA, 288 bp, Glycine max
  Clone ID: LIB3039-048-Q1-E1-A5
ggcacaagtgagtttgttgatcgagataactagaaacagtgtgatgaaaatgaaggtccttgttttcttcgttgctacaattttggtagcatggcaatgccatgcgtacgatatgttccctctccgaatgaacactgagctatggtggcccgctactcggcgaggtgaaatgcggaagttggaggcttgctgtggaagcacacaacatctttgactttgagaccagtcctgaagagtgcgttggagcagcaagcgaatacatccatggcgaacaatggagatcagact

SEQ ID NO: 7838 - DNA, 337 bp, Glycine max
  Clone ID: LIB3039-048-Q1-E1-A6
gatcgaagcaaaaaatgaaaacccaaagtgcttctctcctctgtctttttctctctcttgctatccttttggctagtggcactgctgcaagtgcaactccaagaagcgcagtgccaagccaccatgtttcaacattcaacagaagcctttttccttccacttttctctttggaattggttcttctgcttaccaggcagaaggagcagcaagtgtaggtgggagaggaccaagcatatgggacaccgacactagacagcatactgaaaagatttgggatcatagcaccggtgacatgggaactgatttttatcatcgagacaaaggttacattaaaat

SEQ ID NO: 7839 - DNA, 300 bp, Glycine max
  Clone ID: LIB3039-048-Q1-E1-A7
ggcacaagtttgttgagatagctagaagcaataagatgaaaatgaaagtgcttgttttgtttgttgctacagttttggtagcatatgaatgccatggctcagactaccacaagttccctctccaaatgaaaactgggtttggtgggcaatacagcaatgaggtggcatgtgccagttggaggcttggcgtggaagcaaacaacgtagtcaagtggcaaactgttcctgcagcttgcggagagtacatagctgactacgtgctaggagaccaatatagatcagattccaacgcagttaacc

SEQ ID NO: 7840 - DNA, 291 bp, Glycine max
  Clone ID: LIB3039-048-Q1-E1-A8
gacaacacaacgcaacacaacgcgcactctctctcttctctcgtaacacagaaaccctatcgttcttcgcggtttcgccgattctcgccatgcccaaagccaaatccgacgccaaagccgccgatagccggttgaagcgcaagggcgctggtgctggaaggaagcaatcgaagaaagctgctaaggatcctaacaagccaaagagacctccaagcgctttcttcgttttcatgtcctacttcagagagcagtttaataaggagcatcctaagaacaaatccatcgctgttg

SEQ ID NO: 7841 - DNA, 387 bp, Glycine max; identical to SEQ ID NO: 7721
  Clone ID: LIB3039-048-Q1-E1-A9

SEQ ID NO: 7842 - DNA, 297 bp, Glycine max
  Clone ID: LIB3039-048-Q1-E1-B1
gaaggtgcaagagtttgttgtgagctataagctagtttatcgtgaggagaatatgaagttgtttgttttctttgttgctgcagtagttttggtagcatgggcatgccatggcgcaggctaccaaaggttccctctccgaatgaaaactggctatggtgagcgttcttccgaggtaaaatgcgcaagttttaggcttgctgtggaagcacacaacatccgagcctttaaaaccatttcctaaaaatccgttgaaccaacaaaggactacattagatggggaacaatttagatcagact

SEQ ID NO: 7843 - DNA, 371 bp, Glycine max
  Clone ID: LIB3039-048-Q1-E1-B11
ggtcgttacaaattactacacactgttccaatgggtgaagaccgatccgaaatagtgttcttcgatgtggagaccagcgttcccacccgaacggggcagggttttgcgcttctggaattcggcgccattttggtttgccccaaaacgctcacggagcttcggaattactctactctcgttcgtcccgccaacctctccgtcatctcccccttgtcggagcgctgcaatggcatcaccgccgccgccgtctccgccgccccttccttcgccgacattgctcacctcgtttacgacctccttcacgggaggatttgggcggggcataatatcatacgattcgactgtgttcggattagagatgcctttgctga

SEQ ID NO: 7844 - DNA, 373 bp, Glycine max
  unsure (1)..(373): unsure at all n locations
  Clone ID: LIB3039-048-Q1-E1-B12
ggtacacagcctcaacaaccctaacgcgtgcagagcagagagagacgcagccatggggcgaagacccgcgaggtgttataggcaaattaagaacaaaccataccccaagtcacggttttgccgtggtgttcctgatcccaagatcaggatttacgatgttggtatgaagaagaagggtgttgatgagtttcctttctgtgtccatctggttagttgggagaaggaaaacgtttctagtgaggccctggaagctgctcgtattgcttgcaacaagtacatggccaaatttgctggaaaggatgctttccacttgagagtcanggtgcacccattccatgttcttaagatcaacaagatgctttcgtgtgctgga

SEQ ID NO: 7845 - DNA, 267 bp, Glycine max
  Clone ID: LIB3039-048-Q1-E1-B2
gacacttcaaaatcctctggtaacccttattttatctattctctctcgttcttttgtgttctaagcagctagaatcaatggagaggaaaagaagccatgcctctttcaccatgtttgcaatgcttgttggagtgatctctcagagccttgtcattcctgtagtatccagcactgttgaagatcagaagaactactagaccccagattcacatgctggaagtcccccctcaagctcacacagtagtactcctccatgctcatggccat

SEQ ID NO: 7846 - DNA, 315 bp, Glycine max
  Clone ID: LIB3039-048-Q1-E1-B3
gactcaccacttcaaaacactcataacacaaagcacaaagcagagctcatccttgagttgaaaaatggcagcagcttcttcgatggctctctcatcgccatccttggctggcaaggccgtgaagctgggcccatcagccccagaagtgggaagggtgagcatgaggaagaccgtcaccaagcaggtctcctcaggaagcccatggtactgcccagaccgagtcaagtacttgggcccattctctggcgagcccccgtcctacctaaccggtgagttcccaggcgactaccgctgggacactgctgggctttccgc

SEQ ID NO: 7847 - DNA, 297 bp, Glycine max
  Clone ID: LIB3039-048-Q1-E1-B4
ggcacaagtttgttgagatagctagaagcaataagatgaaaatgaaagtgcttgttttgtttgttgctacagttttggtagcatatgaatgccatggctcagactaccagaagttccctctccaaatgaaaactgggtttggtgggcaatacagcaatgaggtggcatgtgccagttggaggcttggcgtggaagcaaacaacgtaatcaagtggcaaactgttcctgcagcttgcggagagtacatagctgactacgttctaggagaccaatagagatcagattccaaaacagtta

SEQ ID NO: 7848 - DNA, 305 bp, Glycine max
  Clone ID: LIB3039-048-Q1-E1-B5
gaaggtgcaagagtttgttgtgagctataagctagtttatcgtgaggagaatatgaagttgtttgttttctttgttgctgcagtagttttggtagcatggccatgccatggcgcaggctaccaaaggttccctctccgaatgaaaactggctatggtgagcgttcttcggaggtaaaatgcgcaagttttaggcttgctgtggaagcacacaacatccgagcctttaaaaccattcctgaagagtgcgttgaaccaacaaaggactacattaatggcgaacaatttagattagactctagaacag

SEQ ID NO: 7849 - DNA, 322 bp, Glycine max
  Clone ID: LIB3039-048-Q1-E1-B6
gattgctgaatatggtgaaggagtggttaagctaggaggaaggatgctcaagatgatgtcaataaaccttggtttgaaagaagatttccttctcaatgcatttgggggagagagtgaggttggtgcatgcctaagggtgaatttctatccaaagtgccctcaacctgacctcacttttggactctcccctcactcagatcctggtggcatgaccattcttctccctgatgattttgtgtctggccttcaagtaagaagaggagatgaatggattacagttaagtctgtcccaaatgccttcatcatcaacattggtgaacaa

SEQ ID NO: 7850 - DNA, 270 bp, Glycine max
  Clone ID: LIB3039-048-Q1-E1-B7
aggggcacagttgagtttgttgatgtatacaactagaaagagtatggtgaagatgaaggtccttggtttcttctctgctacaattttggtagcatggcaatgccatgcgtacaatgtgttcggtctccgaatgaacactggctatggtgcccgtactccggaggtgatatgcgcaagttggaggcttgctgtggaagcacactacatctttggcattgaaaccattcctgaagagtgcgttgagacgacatgggattacatccataggga

SEQ ID NO: 7851 - DNA, 298 bp, Glycine max
  Clone ID: LIB3039-048-Q1-E1-B8
gagcaagggaagaaagaaactacagaaaagaaatggcttccacttctgcagtttcaatggctatgccagtaacttatgctagccagaagagggtggtgcctagctcggatgcattcttcaagccactgcctctacggtcttccaaggcagtgacagcatcaaaactcaatggaaggtttcaagtgagggcctccatgaaggagaaagttgtgacggggctcaccgcagctgcattgacagcttcaatgatggttcctgatgtggctgaagctgccgttacaccttctctcaagaactt

SEQ ID NO: 7852 - DNA, 381 bp, Glycine max
  Clone ID: LIB3039-048-Q1-E1-B9
ggcacaagtgagtttgttgatcgagataactagaaacagtgtgatgaaaatgaaggtccttgttttcttcgttgctacaattttggtagcatggcaatgccatgcgtacgatatgttccctctccgaatgaacactggctatggtgcccgtactccggaggtgaaatgcgcaagttggaggcttgctgtggaagcacacaacatctttggctttgagaccattcctgaagagtgcgttgaagcaacaaaggaatacatccatggcgaacaatatagatcagactccaaaacagttaaccaacaagcttacttttatgccagagacctcgaagtccatcccaaggacacatttgtgttcagtatagatggcaccgtactctc

SEQ ID NO: 7853 - DNA, 214 bp, Glycine max
  unsure (1)..(214): unsure at all n locations
  Clone ID: LIB3039-048-Q1-E1-C1
ggcacaagtgagtttggtgatgnagagagctagaaacagtgtgctgaaaatgaaggtccgtgttttcttcgttgctacaattttggtagcaggggaaggccatgcgtacgatgtgtgccctctccgaatgagcactgggtatggtgcccgtactccgggtgtgaaatgcgcaagttgggggcttgctgtggaagcacacaacatctttggcttt

SEQ ID NO: 7854 - DNA, 368 bp, Glycine max
  Clone ID: LIB3039-048-Q1-E1-C10
ggcattatatttgagttcaaacaaatcaaagccatggccacctccaacttctctattgttctctccgtctccctagccttctttttggtgctacttaccaaggcacactcgaccgataccgtttctttcaccttcaacaagttcaacccagtccaaccaaacattatgctccaaaaagatgctagtatttcatcctctggggtgttacaactcaccaaagttggcagcaacggcgtgcccacctcgggatctctcggtcgtgccctttacgctgccccaatccagatttgggacagcgaaaccggcaaggtagccagctgggctacatcctttaaattcaacattttcgcacccaacaaatcaaactc

SEQ ID NO: 7855 - DNA, 371 bp, Glycine max
  Clone ID: LIB3039-048-Q1-E1-C11
gatcgcatttcatagcactcaccctcattaccaacacgaaagcatagccaaaaccttttttcgaagtctctgattttcctaatggctccggcaaaggcagagaagaagccggcggagaagaagccagcggcggagaaggcaccggcggagaagaagccgaaggcggagaagaagatctcgaaggaaggagggagcgagaagaagaagaagcgcacgaagaagagcgtggagacctacaagatctacatcttcaaggtcctcaagcaggttcaccccgacattggtatttccagcaaggccatgggcatcatgaacagcttcatcaacgacatcttcgagaagctcgcccaggaagcgtcgcgtttggctcg

SEQ ID NO: 7856 - DNA, 226 bp, Glycine max
  Clone ID: LIB3039-048-Q1-E1-C12
gactttactgatatcctgagcttccattgtgctcactcaacccgtaaaaagaaaccctcttcatcttgttctatcagtgacgagcatcattgtctcaacagcaatgttactgttggctatgtgtgtgcttccggcgatggttgtggccagtcgtctagcatagaaccctttctgcgtgaatggtcatgtctaatgtgacccttgccgtgctggttctgagacctca

SEQ ID NO: 7857 - DNA, 189 bp, Glycine max
  Clone ID: LIB3039-048-Q1-E1-C2
cggggagttgaattgaaacttttggagagagaaaagaagagcaaaaacaacacatcaatctgcattttggcattgggctcttcgtgttgagtttgtttggtccaatccaacgcttggtttggctgtgtgtgtgtgtttgtgttgggaacaataagaatagcagtgggaatcaatcagcgaccccatgag

SEQ ID NO: 7858 - DNA, 121 bp, Glycine max
  Clone ID: LIB3039-048-Q1-E1-C3
aacataaaaaattccgtggccgttttggttaagaaggaagacggaaaaaaaaaattagaagggaaccaaaataaaaatcaaccccgttttttgataattttaagggccaagaattgaacat

SEQ ID NO: 7859 - DNA, 289 bp, Glycine max
  unsure (1)..(289): unsure at all n locations
  Clone ID: LIB3039-048-Q1-E1-C4
ggttgtcaacattgaccaagtaagcaggtgaggtcaggtgangcgagggaaccattcaactggcaactgctcccggtcccttcaacctcaagccaccacagcaaaaaggttccctaaatcaaatcataacaactttgtgtgctttctttccgcactgaacagtgaaaatcacgcaaacaacattaaaccctctttcatgctggcctcagactccggctctgtgctccgacccaaaccccccgtacccactcttgacccgacccgttcactgctccgccctttctgcttc

SEQ ID NO: 7860 - DNA, 286 bp, Glycine max
  Clone ID: LIB3039-048-Q1-E1-C5
ggcacaagtgagtttgttgatcgagataactagaaacagtgtgatgaaaatgaaggtccttgttttcttcgttgctgcaattttggtagcatggcaatgccatgcgtacgatatgttccctctccgaatgaacactggctatggtgcccgtactccggaggtgaaatgcgcaagttggaggcttgctgtgggagcacacaacatctttggctttgagaccattcctgaagagtgcgtgtaagcaacaaaggaatacatccatggcgaacaggatagatcagactcc

SEQ ID NO: 7861 - DNA, 310 bp, Glycine max
  Clone ID: LIB3039-048-Q1-E1-C6
ggccatgatttgattcctcaacaccccacacacacgtagttaaaatgggttttactaggaaacccatgtttcctgtgttgctggttttgttcatcagaagtcttcttgagccgccccatgttgcagaatctacttcttctgattactccactttggtctacaacggctgctcaaaggagcctttcacagatcccaatggggtgtactctcaggcactttcagcactctttggctcattggtttgacaatccaccaaagccaagttccacagagccacttctggctctggccaggacaccatgactggcct

SEQ ID NO: 7862 - DNA, 333 bp, Glycine max
  Clone ID: LIB3039-048-Q1-E1-C7
ggcgtacacagcctcaacaaccctaacgcgtgcagagcagagagagacgcagccatggggcgaagacccgcgaggtgttataggcaaattaagaacaaaccataccccaagtcacggttttgccgtggtgttcctgatcccaagatcaggatttacgatgttggtatgaagaagaagggtgttgatgagtttcctttctgtgtccatctggttagttgggagaaggaaaacgtttcgagtgaggccctggaagctgctcgtattgcgtgcaacaagtacatggccaaatttgcctggaaggatgctttccactttagagtcaagggtgcaccc

SEQ ID NO: 7863 - DNA, 373 bp, Glycine max
  Clone ID: LIB3039-048-Q1-E1-C9
gattgtagaactgaacaagggtttctctttctctttctctgtctgcttcttcactttctctcgtttcaatcgaaaaaaatcatgggcagaaaattcttcgtcggtggcaactggaaatgcaatgggaccactgaggaggtgaagaagattgttactactttaaatgaagctaaagtccctggagaagatgttgtagaagttgttgtgagccctccttttgtgttccttccttttgtaaaaagtttgccgcgccctgatttccatgtctcggcccaaaattgttgggttcgcaaaggtggtgcttatactggagaggttagtgctgaaatgcttgttaatttgggaattccttgggttattattggtcactctg

SEQ ID NO: 7864 - DNA, 135 bp, Glycine max
  Clone ID: LIB3039-048-Q1-E1-D1
gactcagggacaatatctcgaacgagttaattaactaggaagcctaagctactagtagcgctttccttcctgcctctctttgctttcctgggtcattcagaatatgttgaacaagttgtggacataagtgggaaa

SEQ ID NO: 7865 - DNA, 123 bp, Glycine max
  unsure (1)..(123): unsure at all n locations
  Clone ID: LIB3039-048-Q1-E1-D10
gaagggaagcaaggacgatgagtatagtatgagtaatcagattcagagtgtatagtgattctgattctttcattttccatagattagcaggcaatcgagcaagggagggaganagaganagag

SEQ ID NO: 7866 - DNA, 374 bp, Glycine max
  Clone ID: LIB3039-048-Q1-E1-D11
ggcacaagtgagtttgttgatcgagataactagaaacagtgtgatgaaaatgaaggtccttgttttcttcgttgctacaattttggtagcatggcaatgccatgcgtacgatatgttccctctccgaatgaacactggctatggtgcccgtactccggaggtgaaatgcgcaagttggaggcttgctgtggaagcacacaacatctttggctttgagaccattcctgaagagtgcgttgaagcaacacaggaatacatccatggcgaacaatatagatcagactccaaaacagttaaccaacaagcttacttttatggcagagacctcgaagtccatcccaaggacacatttgtgttcagtatagatggcaccg

SEQ ID NO: 7867 - DNA, 374 bp, Glycine max
  Clone ID: LIB3039-048-Q1-E1-D12
gatgagtttatagggaagaaagctgcctatgctttgagccaaggtcttggggtgattgcatgcattggagaattgttagaagaaagggaggctggaaaaacttttgatgtttgttttcagcaattgaaggcttatgcagacgcagttgctagttgggacaacattgttattgcatatgaacctgtatgggccattggaacgggcaaagtggccactccccaacaagctcaggaagtacatgtagctgttcgggattggctaaaaaagaatgtctcagatgaagttgcgtctaaaacacgaattatttatggagggtctgtaaatggaagcaacagtgctgaactggcaaagcaagaagatattgatggatttct

SEQ ID NO: 7868 - DNA, 297 bp, Glycine max
  Clone ID: LIB3039-048-Q1-E1-D2
gacccacactcactctttgactcttcttcgtctcaaatctcttcgttccttcgattcgttccatttcttccaaaatggccaaagacccagttcgcgttctcgtcactggagctgcagggcaaattgggtatgctcttgtccctatgattgctaggggagtgatgttgggtcctgaccagcccgtgatcctccacatgcttgacattcctccggcagcagagtcattgaatggggttaaaatggaattggtggatgctgcattccctcttcttaagggtgttgttgccacaactgatg

SEQ ID NO: 7869 - DNA, 240 bp, Glycine max
  Clone ID: LIB3039-048-Q1-E1-D3
ggtaaagggtaaaaagagtacgacctaataatgggacatacaatgcattacaaacgtatgattattacgcttcaaccgggttattctattccacctcttaaaaagaaaaaaacttaaatcagaatacttaatagcatggcgatacatttatacaaaacttctaccccaagcagacgcaatgggaccgtagacagtcaagtaaaatccaatccacgaaatcatttgatctatggacagcat

SEQ ID NO: 7870 - DNA, 315 bp, Glycine max
  Clone ID: LIB3039-048-Q1-E1-D4
ggcacaagtgagtttgttgatcgacataactagaaacagtgtgatgaaaatgaaggtccttgttttcttcgttgctacaattttggtagcatggcaatgccatgcgtacgatatgttccctctccgaatgaacactggctatggtgcccgtactccggaggtgaaatgcgcaagttcgaggcttgctgtggaagcacacaacatctttggctttgagaccattccttaagagtgcgttgaagcaacaaaggaatacatccatggcgaacaatatagatcagactccaaaacagttaaccaacaagcgtactttta

SEQ ID NO: 7871 - DNA, 298 bp, Glycine max
  Clone ID: LIB3039-048-Q1-E1-D5
ggtccgaagcgatcggcaggcagtgatagcaaagagaagatcatttcataatcagactcacctaactccgccatggctgctgttccctcgactttcgctcgaaccaaatctgcattgtccataaacaagctggaccactctctggtcaagatgaggccatacagcttctctctgaatctaaaccgtctagggaggatggaaacatcttgaaccagaaggcctcgaagaattcaagccacatatagtgatggtggaaggcgcagcagtgctagtgtagttgttggtgggtgtctcttgg

SEQ ID NO: 7872 - DNA, 293 bp, Glycine max
  Clone ID: LIB3039-048-Q1-E1-D6
gacacaccgtttgttctattcttaactcaacttctgctacccactctcttcttccaagtccaaccacgcttttctctacagtcatgggcaatgtcaagatcggaatcaacggatttggaagaattggccgtttggttgccagagtcgctctgcagagagacgatgtggagctcgttgccgttaacgaccctttcattaccaccgattacatgacatacatgtttaaatacgacactgttcacggacactgcgagcatcacgatgtcaccgttaaggactagaagacccttctc

SEQ ID NO: 7873 - DNA, 212 bp, Glycine max
  Clone ID: LIB3039-048-Q1-E1-D7
gacaagtgagtttgctgatcgatataactagaaacagtgtgatgaagatgaaagtccttgttttcttcgttgctacaattttggtaacatggcaatgccatgcgtaggatatgttccctctccgagtgaacactggctatggtgcccgtactgcggaagttaaatgcgcaagttggacgcttgctgtggaagcacacaatatctttggcttt

SEQ ID NO: 7874 - DNA, 395 bp, Glycine max
  Clone ID: LIB3039-048-Q1-E1-D9
agaaaggggcacaagtttgttgagatagctagaagcaataagatgaaaatgaaagtgcttgttttgtttgttgctacagttttggtagcatatgaatgccatggctcagactaccagaagttccctctccaaatgaaaactgggtttggtgggcaatacagcaatgaggtggcatgtgccagttggaggcttggcgtggaagcaaacaacgtagtcaagtggcaaactgttcctgcagcttgcggagagtacatagctgactacgttctaggagaccaatatagatcagattccaaaacagttaaccaacaagcttatttctatgctaaatccctcaaactcaccaacaaagatgtctttgtcttggacgttgacgacactactctctctaatct

SEQ ID NO: 7875 - DNA, 117 bp, Glycine max
  Clone ID: LIB3039-048-Q1-E1-E1
caatggggaattggcacaccacacacacagtgctgtcctgtaattcccaaaataaataacgaacaagaacccgaatttccaatgcaaatgtgttagtaaggactgtacggcagattg

SEQ ID NO: 7876 - DNA, 342 bp, Glycine max
  Clone ID: LIB3039-048-Q1-E1-E10
ggcacaagtgagtttgttggttcaaattactagaaacaatgttatgaaaatgaagggccttggtttcctcgttgctacaattttggtagcatggcaatgccatgcgtacgatatgtttcctctccgaatgaacactggctatggtgcccgtactccggaggtgaaatgcgcaaattggaggcttgctgtggaagcacacaacatctttggctttgagaccattcctgaaaaatgcgttgaagcaacaaaggaatacatccatggcgaacaatatagattagactccaaaaacagttaaccaacaagcttacttttatgccagagacctcgaagtccatccca

SEQ ID NO: 7877 - DNA, 378 bp, Glycine max
  Clone ID: LIB3039-048-Q1-E1-E11
ggcacaagtgagtttgttgatcgagataactagaaacagtgtgatgaaaatgaaggtccttgttttcttcgttgctacaattttggtagcatggcaatgccatgcgtacgatatgttccctctccgaatgaacactggctatggtgcccatactccggaggtgaaatgcgcaagttggaggcttgctgtggaagcacacaacatctttggctttgagaacattcctgaagagtgcgttgaagcaacaaaggaatacatccatggcgaacaatatagatcagactccaaaacagttaaccaacaagcttacttttatgccagagacctcgaagtccatcccaaggacacatttgtgttcagtatagatggcaccgtact

SEQ ID NO: 7878 - DNA, 364 bp, Glycine max
  Clone ID: LIB3039-048-Q1-E1-E12
ggcacaagtgagtttgttgatcgagataactagaaacagtgtgatgaaaacgaaggtccttgttttcttcgttgctacaattttggtagcatggcaatgccatgcgtacgatatgttccctctccgaatgaacactggctatggtgcccgtactccggaggtgaaatgcgcaagttggaggcttgctgtggaagcacacaacatctttggctttgagaccattcctgaagagtgcgttgaagcaacaaaggaatacatccatggcgaacaatatatattagactccaaaacagttaaccaacaagcttacttttatgccagagacctcgaagtccatcccaaggacacatttgtgttcagtata

SEQ ID NO: 7879 - DNA, 217 bp, Glycine max
  Clone ID: LIB3039-048-Q1-E1-E2
gacacttcagaatcctcgagtagacccttcgtttctctctctctctctcgtgttctgagctgctacaagcaatggagaggaaaagaagccatgcttctttcaccatgtttgcaatgcttgttggattgctctctcagaggcttgtcattcctgtgatatcgagcactgttgcagatcagaagaactactacaccccagattcacatgctggaagtcc

SEQ ID NO: 7880 - DNA, 304 bp, Glycine max
  Clone ID: LIB3039-048-Q1-E1-E3
ggccattgttgttgctattatcatccgcagctgcttttattcgcaccgcaaacagtgagccatggccgtcggaaagaacaagcgcatctccaaggggaagaagggtggcaagaagaaggcagctgatccctttgccaagaaggattggtatgacattaacgctccttctgtttttcaagtgaaaaatgttggcaaaaccctcgtctctcgtactcagggtaccaagattgcttctgaaggactcaagcatagagtgtttgaggtctccttggctgatcttcaacgggatgaggatcatgcattc

SEQ ID NO: 7881 - DNA, 315 bp, Glycine max
  Clone ID: LIB3039-048-Q1-E1-E4
gacacttcagaatcctctagtaacccttcgtttctctctctctctctcgtgttctgagctgctagaagcaatggagaggaaaagaagccatgcttctttcaccatgtttgcaatgcttgttggattgctctctcagagccttgtcattcctgtaatatccagcactgttgcagatcagaagaactactacaccccagatccacatgctggaagtccccccacaggtttctccgattctctgtgctcagacaatagtagtcctccatctcatggcaatgggagctctccaccctcacatcacaatagtccaagtac

SEQ ID NO: 7882 - DNA, 334 bp, Glycine max
  Clone ID: LIB3039-048-Q1-E1-E5
ggacggcagtttatattccccaaccggaccaaacacacagtccaaatcctttgtgccctaatttctcaaatcggaatctttcactccaccgctctaacccttaattccgatcaacgcttttgccttcgtcgctcgccagtttgttagcgggagctcagttattctgttttattgacgaagtgataacaaatggatgattgggaggatgagcatattgcccctattgatcttacattgaaagatccagttaaaagtaattgggatgatgaagatgtggatgaaaatgatgtgaaggaatcatgggaggatgaagacgagcctgctccgggacctg

SEQ ID NO: 7883 - DNA, 226 bp, Glycine max
  Clone ID: LIB3039-048-Q1-E1-E6
gactcaagcactagatctctatcgagtaaattaactaggaggcctaacctatgagtatccctttccttcctgcctctctttgctttcctggctcattcagaatatgttgagcaggttgtagacataactggcagacccattttcccaggtggcacagtgtacagtatgcgagcaacttcgggcgctgccggtggtggattgaaactaggccggtgaggagactcag

SEQ ID NO: 7884 - DNA, 310 bp, Glycine max
  Clone ID: LIB3039-048-Q1-E1-E7
ggcacaagtgagtttgttgatcgagataactagaaacagtgtgatgaaaatgaaggtccttgttttcttcgttgctacaattttggtagcatggcaatgccatgcgtacgatatgttccctctccgaatgaacactggctatggtgcccgtactccggaggtgaaatgcgcaagttggaggcttgctgtggaagcacacaacatctttggctttgagaccattcctgaagagtgcgttgaagcaacaaaggaatacatccatggcgaacaatatagatcagactccaaaacagttaaccaacaagcttac

SEQ ID NO: 7885 - DNA, 352 bp, Glycine max
  Clone ID: LIB3039-048-Q1-E1-E8
ggcacaagtgagtttgttgatcgagataactagaaacagtgtgatgaaaatgaaggtccttgttttcttcgttgctacaattttggtagcatggcaatgccatgcgtacgatatgttccctctccgaatgaacactggctatggtgcccgtactccggaggtgaaatgcgcaagttggaggcttgctgtggaagcacacaacatctttggctttgagaccattcctgaagagtgcgttgaagcaacaaaggaatacatccatggcgaacaatatagatcagactccaaaacagttaaccaacaagcttacttttatgccagacacctcgaagtccatcccaaggacacattt

SEQ ID NO: 7886 - DNA, 360 bp, Glycine max
  Clone ID: LIB3039-048-Q1-E1-E9
ggcacaagtgagtttgttgatcgagataactagaaacagtgtgatgaaaatgaaggtccttgttttcttcgttgctacaattttggtagcatggcaatgccatgcgtacgatatgttccctctccgaatgaacactggctatggtgcccgtactccggaggtgaaatgcgcaagttggaggcttgctgtggaagcacacaacatctttggctttgagtccattcctgaagagtgcgttgaagcaacaaaggaatacatccatggcgaacaatatagatcagactccaaaacagttaaccaacaagcttacttttatgccagagacctcgaagtccatcccaaggacacatttgtgttcag

SEQ ID NO: 7887 - DNA, 272 bp, Glycine max
  unsure (1)..(272): unsure at all n locations
  Clone ID: LIB3039-048-Q1-E1-F1
ggatgcatttatacttacaccgaatcacgaggcgacaacatcgacatggagggtctcatcaacggcttcatcaacgttgctctcgganctgatcgtggcgatcgggaagaacaacaacacgggagagacgaccgtagtagaagctcctgcgctgaagtcgtctcgcaggattaacaagatcaccctcttcctcatcaccaacacaaggaacaatatcgtcctcagtaccagggacccgaatctcaaagttcctacaaaccccagaaggtgga

SEQ ID NO: 7888 - DNA, 363 bp, Glycine max
  Clone ID: LIB3039-048-Q1-E1-F10
gggagaacaaaaaaaaaacaactttgcggctgcgctgctgctaatagcgcgttgcatctgctctatcatacatattttcgccaaaccgccgattccgttgagcgtttctaccgtagcgctcaggaaggaggcagtggctggtggtgttggttgtggtggaggtggttttgctgatcatttgtggtagagggtaggaaagaaaaaaaagttgaaaatgagttcagacagccgcagcaggagcagaagcaggagcccaatggaccgtaagatccgctctgatcgattttcctatcgtgatgcaccttacaggagagattcacgtcggggtttcagccgtgacaatctgtgcaagaactgcaagag

SEQ ID NO: 7889 - DNA, 309 bp, Glycine max
  Clone ID: LIB3039-048-Q1-E1-F11
ggttcactttcttccaacctctaacctacctctttttcttctctctcaacaacttcaacttcttcctcctcgattaagttccaatttaaaggcaaattacaagattaacctaaccgcaaaaccgccttcaattggaatccctgaaaagggtattcttcctgccgataattcaacagggacaattggcaaccttttggccagcatcattgtaaaaacaattgaatccaacaggcaagctcttagggagctgcttttcattgctcctgatgttcttcaatatctcattggtgtcatcctctttaaggaaac

SEQ ID NO: 7890 - DNA, 269 bp, Glycine max
  Clone ID: LIB3039-048-Q1-E1-F2
gatatattccactttcgctagtttagctacctagccatgggaaagattgccctagccaatgtcctcttggtccttctcttgaacttgagcactttgctcaatgttcttgcttgtccctattgcccttacccatctcccaaccctcctccagaaaagcctcccattgtgaaaccaccagttcacaaacaaccaaaaccatgtccaccagccaagtcatctccaaaaccaccccatgtagacccaccctatgtcccaaaagctcctcacta

SEQ ID NO: 7891 - DNA, 202 bp, Glycine max
  Clone ID: LIB3039-048-Q1-E1-F3
ggaacttcgcacgttcagtgtcagacatgcctagctctgtcgtgccgtcgttgacgagggcgtttcgggtgcgaagccctgacctccgctcgctctttcggtctcgcgctcttgtccatcgcttccgccaatgtcttcgtcgaggagcgtttcgatgacgggtgggaagatcgaggggttaagtcagattgggaaagggatg

SEQ ID NO: 7892 - DNA, 339 bp, Glycine max
  Clone ID: LIB3039-048-Q1-E1-F4
gaaggtgcaagagtttgttgtgagctataagctagtttatcgtgaggagaatatgaagttgtttgttttctttgttgctgcagtagttttggtagcatggccatgccatggcgcaggctaccaaaggttccctctccgaatgaaaactggctatggtgagcgttcttcggaggtaaaatgcgcaagttttaggcttgctgtggaagcacacaacatccgagcctttaaaaccattcctgaagagtgcgttgaaccaacaaaggactacattaatggcgaacaatttagatcagactctaaaacagttaaccaacaagctttcttttatgctagtgaacg

SEQ ID NO: 7893 - DNA, 297 bp, Glycine max
  Clone ID: LIB3039-048-Q1-E1-F5
ggaacaaggcaaatcgcgaagactacatctgatctgagataatggctcctcggtctagcagcaaggacgcccaagaccttttccgcgctctttggtctgcttatgctgcaacccccactaatctcaagatcattgatctctatgtcatctatgccgtagtcaccgctttcatccaggttgtttacattgctttggttggatcatttccatttaactccttcctatcaggagtactttcctgtgtaagaactgctgttcatgctgtttgtctcaggatccaagtcaataaggagaata

SEQ ID NO: 7894 - DNA, 336 bp, Glycine max
  Clone ID: LIB3039-048-Q1-E1-F6
ggacgcacattcaacaaaacagaatttgtctgattcaagggcccaaaagagagagagaaaatggaaacaagtttggcttggctggttggtaccttcttcgctcattcagctgctacattacactacacttaacacttcctttatcaacggtcattctatagggacgtttcggtaaattccactccctccttcgttccaccgtcgctatcaactgtttcacactgaactcccttcttcgttttcacaccatttgacttctactgtgcctccagaaatctcatctttcttctttataccgaattgggtagagttcatcagtgacaatggaaactgggt

SEQ ID NO: 7895 - DNA, 310 bp, Glycine max
  Clone ID: LIB3039-048-Q1-E1-F7
ggagagaagttattagggtttttgagtgcggcggtccaaacactcttctctgcagcttttgcctacaactcccttcaccatggctgaacaaatcgagaaagcttttctgaagcaaccaaaagtgtttctcagcacaaagaagactgggaagggaaagagacctggaaaaggtgggaaccgcttttggaagtccattgggcttggatttaagactcccagggaagccatcgaaggaacctatattgacaagaagtgccccttcactggcaatgtttccatccgtggccgtatcttggctggaacatgtcac

SEQ ID NO: 7896 - DNA, 330 bp, Glycine max
  Clone ID: LIB3039-048-Q1-E1-F8
gacaaaacaagtgtttcgaatagattatcctaagtctttgggaatagtgctgcaatggcttcaggtcaggaggaggtgaaccttttgggagctactggaagcccatttgtgtgcagggttcatattgccctcaagttgaagggagttcaatacaaatatgtcgaagaaaatttgaggaacaagagtgaactgcttctcaaatccaacccagttcacaagaaggttccagtgtttattcacaatgagaagcccatagcagagtctcttgtgattgttgaatacattgatgagacatggaagaacaaccccatcttgccttctgatccttac

SEQ ID NO: 7897 - DNA, 123 bp, Glycine max
  Clone ID: LIB3039-048-Q1-E1-F9
gaacatttgtctcccaaccttcaatttcaatcaacgggtaaacccttttccatttgagcatcatcatgtccaccgcagcgcaacccaaggccaagaaaacggggtcttccaaaaaaaccctct

SEQ ID NO: 7898 - DNA, 331 bp, Glycine max
  Clone ID: LIB3039-048-Q1-E1-G1
agacgacagaagggggccattgttgttgctattatcatccgcagctgcttttattcgcaccgcaaacagtgagccatggccgtcggaaagaacaagcgcatctccaaggggaagaagggtgggaagaagaaggcagctgatccctttgccaagaaggattggtatgacattaaggctccttctgtttttcaagtgagaaatgttggcaaaaccctcgtctctcgtactcagggtaccaagattgcttctgaaggactcaagcatagagtgtttgaggtctccttggctgatcttcaaggggatgaggatcatgcattcaagaagattaggt

SEQ ID NO: 7899 - DNA, 378 bp, Glycine max
  Clone ID: LIB3039-048-Q1-E1-G10
ggcacaagtgagtttgttgatcgagataactagaaacagtgtgatgaaaatgaaggtccttgttttcttcgttgctacaattttggtagcatggcaatgccatgcgtacgatatgttccctctccgaatgaacactggctatggtgcccgtactccggaggtgaaatgcgcaagttggaggcttgctgtggaagcacacaacatctttggctttgagaccattcctgaagagtgcgttgaagcaacaaaggaatacatccatggcgaacaatatagatcagactccaaaacagttaaccaacaagcttacttttatgccagagacctcgaagtccatcccaaggacacatttgtgttcagtatagatggcaccgtact

SEQ ID NO: 7900 - DNA, 375 bp, Glycine max
  Clone ID: LIB3039-048-Q1-E1-G11
gaaggtgcaagagtttgttgtgagctataagctagtttatcgtgaggagaatatgaagttgtttgttttctttgttgctgcagtagttttggtagcatggccatgccatggcgcaggctaccaaaggttccctctccgaatgaaaactggctatggtgagcgttcttcggaggtaaaatgcgcaagttttaggcttgctgtggaagcacacaacatccgagcctttaaaaccattcctgaagagtgcgttgaaccaacaaaggactacatttatggcgaacaatttagatcagactctaaaacagttaaccaacaagctttcttttatgctagtgaacgcgaagtccatcacaacgacatatttatattcggcat

SEQ ID NO: 7901 - DNA, 368 bp, Glycine max
  Clone ID: LIB3039-048-Q1-E1-G12
ggtggaggataattataactcttcagcgacggcgcatggttccagttcctcctcttctcaccgcccaccgccgtcactttgagttattcttctcttctcttctcactcaccctttgcaatttctctctttccttcctgtatttgttgcaaccctcttcaaggtggatgtgaatccacaccactcatggattttagaggaaatcttaattgcaagagaagggctctcactgtggaaccggtgagtagtgatagtgataggaagtttctcattgacttcatcgtcactacttatttgggacctgatgtcaagtctcataatccaagatgttctgttattcaaagactaattgccggattcccactctata

SEQ ID NO: 7902 - DNA, 279 bp, Glycine max
  Clone ID: LIB3039-048-Q1-E1-G3
ggaacagcatatgatatcaaatagtctattttatactatacctacattttgggaattttctttgtagttgatagccatggctacccgtggaaagcttgaggttgacattgatctcaagtccaacgcagacaagtactgggaaacccttaggaattctactgaaatattccctaagggcgtcccacatgattacaaaaacattgaggttcttgaaggtgatggcaagtctcctggttctatccgccaaataaattatggtgaacgttcaccacttgtgaa

SEQ ID NO: 7903 - DNA, 307 bp, Glycine max
  unsure (1)..(307): unsure at all n locations
  Clone ID: LIB3039-048-Q1-E1-G4
gaccacattccacagcacanacacatacattgtggtagcacttttgtctcggaatttgttcttttgagttatggcaagcttaaaggttgcatgtgtggttttgatgtgcatggctgtgatgagtgcaccaatgatggtacaagccgtgtcatgcaatgatgtgtctgtgaacctagcaccgtgccgatcttacctgatgcagggtggagatgtgccagaatcgtgctgtagcagagtgaggaacattctgggttctgccagcaacacctttgacaaacaaaccgtgtgcaaatgtcttcagcaagct

SEQ ID NO: 7904 - DNA, 312 bp, Glycine max
  Clone ID: LIB3039-048-Q1-E1-G5
ggaggagagaggagaagagaagctaaagaaagaaaggagatgggagtggagaagcagttgttgaggtctggcaccggtccgaagccaattcccggtcagaacgtaaccgttcactgcactggtttcgggaagaacggtgacctttctcagaaattctggagcacaaaggatcctggccagaacccattcactttcaaaatcggccaaggttctgttatcaaaggatgggatgaaggtgtgcttggcatgcaaattggtgaagttgctcgtctccggtgctctccggattatgcttatggtgctggtggcttt

SEQ ID NO: 7905 - DNA, 333 bp, Glycine max
  Clone ID: LIB3039-048-Q1-E1-G6
gattctcatttcaatttgcatttgcatttcatttggcgttttgtttctttctggaagcttcacttcggcatccatggcgtcgttcgaagaagctcctcccggaaactccaagaacggcgagaagatcttcaagaccaagtgcgctcagtgccacaccgtggacaaaggtgccggtcacaaacaaggacccaatctgaatggtttgtttggaaggcaatctggcacaactcctggatattcctattctactgctaacaaaaacatggctgtgatttggggggaaaagaccttgtatgattacttgctcaaccccaaaaagtttagtccagggac

SEQ ID NO: 7906 - DNA, 306 bp, Glycine max
  Clone ID: LIB3039-048-Q1-E1-G7
ggcacaagtgagtttgttgatcgagataactagaaacagtgtgatgaaaatgaaggtccttgttttcttcgttgctacaattttggtagcatggcaatgccatgcgtacgatatgttccctctccgaatgaacactggctatggtgcccgtactccggaggtgaaatgcgcaagttggacgcttgctgtggaagcacacaacatctttggctttgagaccattcctgaagagtgcgttgaagcaacaaaggaatacatccatggcgaacaatatagattagactccaaaacagtttaccaacaagc

SEQ ID NO: 7907 - DNA, 284 bp, Glycine max
  Clone ID: LIB3039-048-Q1-E1-G8
gaccgtgcgctagttctgagtattctgatcgctccctgagagagctcgtcgcggcggttgcagaagaagattgcaagatgaagttcaacatcgcgaatcccaccactggatgccagaagaagctcgagatcgacgacgatctgaaactgcgagcattttgggacaagaggatctcacaggaggtcatcggagatgcactcggtgaggaatttaagggctatgtcttcaaaattaccggaggttgtgacaaacagggatttccaatgaagcacggagtgctgact

SEQ ID NO: 7908 - DNA, 258 bp, Glycine max
  Clone ID: LIB3039-048-Q1-E1-G9
gagggagcaagggtttcaaactcgaggcagtggctgcgtgggtgcgtgcgtctgagtgggatagaaaagaaaagaatggcggaaagggcgaaaccgatcgacttcgaactcaccttaaagcctttctatcagagagcctcagaagcagaggagcgcttatcaagactagaagcagcctttgaatagtaaaaaaggtactggaaacgaggaaaacttgaaagtgattaatgatcttcagtcaaagttagaagttgcaaa

SEQ ID NO: 7909 - DNA, 299 bp, Glycine max
  Clone ID: LIB3039-048-Q1-E1-H1
gaaggtgcaagagtttgttgtgagctataagctagtttatcgtgaggagaatatgaagttgtttgttttctttgttgctgcaatagttttggtagcatggccatgccatggcgcaggctaccaaaagttccctctccgaatgaaaactgggtatggtgagcgttcttcggaggtaaaatgcccaagttttaagcttgctgtggaagcacacaacatccgagcctttaaaaccattcctgaagaatgcgttgaaccaagaaaggactacattaatggggaacaatttagattagactcta

SEQ ID NO: 7910 - DNA, 378 bp, Glycine max
  Clone ID: LIB3039-048-Q1-E1-H10
ggcacaagtttgttgagatagctagaagcaataagatgaaaatgaaagtgcttgttttgtttgttgctacagttttggtagcatatgaatgccatggctcagactaccagaagttccctctccaaatgaaaactgggtttggtgggcaatacagcaatgaggtggcatgtgccagttggaggcttggcgtggaagcaaacaacgtagtcaagtggcaaactgttcctgcagcttgcggagagtacatagctgactacgttctaggagaccaatatagatcagattccaaaacagttaaccaacaagcttatttctatgctaaatccctcaaactcaccaacaaagatgtctttgtcttggacgttgacgacactactc

SEQ ID NO: 7911 - DNA, 358 bp, Glycine max; identical to SEQ ID NO: 7611
  Clone ID: LIB3039-048-Q1-E1-H11

SEQ ID NO: 7912 - DNA, 366 bp, Glycine max
  Clone ID: LIB3039-048-Q1-E1-H12
gatagcaaaatcgtttctccaatttaatcaccattgtacaacccaattcccttcgtcgttttcgattaagagagcaatggcacgtaccaagcaaaccgctcgcaagtccaccggaggaaaggctccgaggaagcaattggcaaccaaagccgctcgcaagtcagccccggcgaccggcggagtgaagaagccccaccgcttcaggccaggaacggtggctctgagggagattcgaaagtaccagaagagcaccgaacttctgatccgaaaactcccattccagaggctcgtcagagaaatcgctcaagatttcaaaaccgatctccgctttcagagcagcgccgtttcggctcttcaggaagccgc

SEQ ID NO: 7913 - DNA, 291 bp, Glycine max
  Clone ID: LIB3039-048-Q1-E1-H2
cggctctgcagctgctcataacagtggggatggtgaagaggcaaagtgacatttttttatgtgcttttcatgagatacatatgactgttgatagtaagtttttctttaaaggtaggacgagtgtgatctgatgacctttaataggtccaccaaaggacaaaagggcttctcttgtttgagagattacgtagtttgtgttgttagaattttggcacaaagcaagtttgcatgaactgaaactgctggtgcctcaacatactgtactcgtcactggaaggtccaagcatgtgt

SEQ ID NO: 7914 - DNA, 211 bp, Glycine max
  unsure (1)..(211): unsure at all n locations
  Clone ID: LIB3039-048-Q1-E1-H4
tattgtaggaagaataaaaagagatacatggatttaaagaccctataaacaactatttatggttatataatccgaataacagaaaaatggataattgccaaaatacctgagngaacttgcaaatttcacggatgaggatgatgaggaagcctttttatcacgccttttttgaagagcaaagattcagggtttggaggtaccattttaatgg

SEQ ID NO: 7915 - DNA, 275 bp, Glycine max
  Clone ID: LIB3039-048-Q1-E1-H5
gaaggtgcaagagtttgttgtgagctataagctagtttatcgtgaggagaatatgaagttgtttgttttctttgttgctgcagtagttttggtagcatggccatgccatggcgcaggctaccaaaggttccctctccgaatgaaaactggctatggtgagcgttcttcggaggtaaaatgtgcaagttttaggcttgctgtggaagcagacaacatccgagcctttaaaaccattcctgaagagtgcgttgaaccaacaggggactacattaatg

SEQ ID NO: 7916 - DNA, 237 bp, Glycine max
  Clone ID: LIB3039-048-Q1-E1-H6
gtcttccccgaactgttgtcccgcaacggggtcaagtttggacaagctgtgtggttcaaggccgggtcccacatcttcagcgacggtgagctggaccacatgggcaacgcaagccttgtccatgcccagagcatcctcgccatctgggccacccaggttatcctaatgagtcctgttgagggttatcgtatggctgggtgggcccctcggtgaggtcactgggccattctaccctgg

SEQ ID NO: 7917 - DNA, 314 bp, Glycine max
  Clone ID: LIB3039-048-Q1-E1-H7
ggcacaagtgagtttgttgatcgagataactagaaacagtgtgatgaaaatgaaggtccttgttttcttcgttgctacaattttggtagcatggcaatgccatgcgtacgatatgttccctctccgaatgaacactggctatggtgcccgtactccggaggtgaaatgcgcaagttggaggcttgctgtggaagcacacaacatctttggctttgagaccattcctgaagagtgcgttgaagcaacaaaggaatacatccatggcgaacaatagagatcagactccaaaacagttaagcaacaagcttactttt

SEQ ID NO: 7918 - DNA, 333 bp, Glycine max
  Clone ID: LIB3039-048-Q1-E1-H8
gagtgcacaagtgcagtttgttgatcgagataactagaaacagtgtgatgaaaatgaaggtccttgttttcttcgttgctacaattttggtagcatggcaatgccatgcgtacgatatgttccctctccgaatgaacactggctatggtgcccgtactccggacgtgaaatgcgcaagttggaggcttgctgtggaagcacacaacatctttggctttgagagcattcctgaagagtgcgttgaagcaacaaaggaatacatccatggcgaacaatatagatcagactccaaaacagttaaccagcaagcttacctttatgccagagacctcg

SEQ ID NO: 7919 - DNA, 359 bp, Glycine max
  unsure (1)..(359): unsure at all n locations
  Clone ID: LIB3039-048-Q1-E1-H9
ggcacaagtgagtttgttgatcgagataactagaaacagtgtgatgaaaatgaaggtccttgttttcttcgttgctacaattttggtagcatggcaatgccatgcgtacgatatgttccctctccgaatgaacactggctatggtgcccgtactccggaggtgaaatgcgcaagttggaggcttgctgtggaagcacacaacatctttggctttgagaccattcctgaagagtgcgttgaagcaacaaaggaatacatccatggcgaacaatatagatcagactccaaaacagttaaccaacaagcttacttttatgccagagacctcgaagtccatcncaaggacacatttgtgttca

SEQ ID NO: 7920 - DNA, 341 bp, Glycine max
  Clone ID: LIB3039-049-Q1-E1-A1
gacattgggggctatggtggttggttttggttagagttggaacctccgtcttctttcgatgaattcgaggacttaattaacacttcataaacacacatatcatttcgtttcttctcttcattccattctcattcaatccaatgatggctcaccttctccacactccctttatcccttcctcctccgcgctccgccgcgccgcccccattccccaccgcaaaacgaccactccactcgtcgttcgggccaagatccgggagattttcatgccggcactgagctccaccatgacggagggcaaaatcgtcccgtggaccaaatccgaaggcgaaaagctctcc

SEQ ID NO: 7921 - DNA, 380 bp, Glycine max
  Clone ID: LIB3039-049-Q1-E1-A10
ggcacaagtgagtttgttgatcgagataactagaaacagtgtgatgaaaatgaaggtccttgttttcttcgttgctacaattttggtagcatggcaatgccatgcgtacgatatgttccctctccgaatgaacactggctatggtgcccgtactccggaggtgaaatgcgcaagttggaggcttgctgtggaagcacacaacatctttggctttgagaccattcctgaagagtgcgttgaagcaacaaaggaatacatccatggcgaacaatatagatcagactccaaaacagttaaccaacaagcttacttttatgccagagacctcgaagtccatcccaaggacacatttgtgttcagtatagatggcaccgtactct

SEQ ID NO: 7922 - DNA, 383 bp, Glycine max
  Clone ID: LIB3039-049-Q1-E1-A11
gaagcgcagttcgttccacgttgttgttcgctctgtgtctctcactctctctatatttgcatcattcatcggaaatggctctcgaggttgctgttaaggctgctgttggggctccaaatgttctcggagattgtccattttcccaaagggtcctcttaactttggaggagaagaaaatcccttacaaactccacctcatcgatctcagtaacaaacccgaatggtttttgggtgtgaatcctgaagggaaggtgccagtggttctttttgatggcatatgggtggctgattctgatgtaattgtggggatactagaggaaaagtacccagaaccctctctaatcactcctcctgaatttgcctccgtgggattaaagatattt

SEQ ID NO: 7923 - DNA, 350 bp, Glycine max
  Clone ID: LIB3039-049-Q1-E1-A12
gaattctttgtgtaggtgctaaatccctagtaagccgccatggtgaagtactcaagggagcctgacaatccaaccaagtcttgcaaggctagaggcgccgaccttagggttcattttaagaacactagggaaactgcctttgcaatcaggaagttgcccttggttaaagctaaaaggtacttggaagatgttcttgcgcacaagcaggccattccgttcagacgtttctgtcgtggtgttgggaggacagctcaagcaaagaatagacactctaatggccaaggaaggtggcctgtcaagtcagcaaaattcatccttgatttgctcaaaaatgctgagagcaatgctga

SEQ ID NO: 7924 - DNA, 374 bp, Glycine max
  Clone ID: LIB3039-049-Q1-E1-A2
ggaaacagagagtgatttcagtgagtgatcggtgttcacttgatctcatcataatcgtcagcgtcaattgaagaagatgccgatcagaaacatcgccgtcggaaggcctgaagaggcgactcaccccgacacgttgaaggcggctttggctgagttcatctcaaccttcatcttcgtgttcgccggctcaggctccggcatcgcctacaacaagctcaccgacaacggcgctgccacccctgccggcctcatctccgcctccatcgcccatgcattcgccctcttcgtcgccgtctccgtcggcgccaacatctccggcggccacgtcaaccccgccgtcaacctcggcgccttcgtcggcggcaacatcacct

SEQ ID NO: 7925 - DNA, 353 bp, Glycine max
  Clone ID: LIB3039-049-Q1-E1-A3
gacaagtgagtttgttgatcgagataactagaaacagtgtgatgaaaatgaaggtccttgttttcttcgttgctacaattttggtagcatggcaatgcaatgcgtacgaaatgttccctctccgaatgaacactggctatggtgcccgtactccggaggtgaaatgcgcaagttggaggcttgctgtggaagcacacaacatctttggctttgagaccattcctgaaaattgcgttgaagcaccaaaggattacatccatggcgaccaatatagtatagactccaaaaaagttaaccaacaagcttacttttatgccagagacctcgaattccatcacagggacacatttgtg

SEQ ID NO: 7926 - DNA, 371 bp, Glycine max
  Clone ID: LIB3039-049-Q1-E1-A5
ggctccccaaaaaggaaagaagcagattctgtcctttgaaatcaacaagaaaagatgtcaggtgaagaggtagctgttgcagttgaggtacctgctacttcaattccaggtgagccaatggacatcatgactgctctacagcttgtgctgagaaaatctctggcctatggtggtcttgcacgaggtcttcatgaaggtgccaaggtgatcgagaagcatgctgcacagctctgtgttctagcagaagattgtgaccaacctgattatgtgaaactggtgaaggctctttgtgcagagcacaatgttagtcttttgacagttccaagtgcaaagacccttggagaatgggctggtttgtgtaagattgattc

SEQ ID NO: 7927 - DNA, 262 bp, Glycine max
  Clone ID: LIB3039-049-Q1-E1-A6
ggcacaattgattttgttgatcaaaatacctagaaccattgtgatgaaaatgaaggcccttgtttccttcgttgcaacaattttggtagcatggaaatgccatgcgtacaaaaggttccctctccgaatgaacactggcaatggtgcccgtaccccggaggtgaaatgcccaatttggaggcttgctgtggaagcaaacaaaatctttggctttgaaaccattcctgaaaattgctttgaaccaacaaaggaatacatccat

SEQ ID NO: 7928 - DNA, 405 bp, Glycine max
  Clone ID: LIB3039-049-Q1-E1-A7
ggcacaagtgagtttgttgatcgagataactagaaacagtgtgatgaaaatgaaggtccttgttttcttcgttgctacaattttggtagcatggcaatgccatgcgtacgatatgttccctctccgaatgaacactggctatggtgcccgtactccggaggtgaaatgcgcaagttggaggcttgctgtggaagcacacaacatctttggctttgagaccattcctgaagagtgcgttggagcaacaaaggaatacatccatggcgaacaatatagatcagactccaaaacagttaaccaacaagcttacttttatgccagagacctcgaagtccatcccaaggacacatttgtgttcagtatagatggcaccgtactctctaatattccatactacaaaaaaca

SEQ ID NO: 7929 - DNA, 395 bp, Glycine max
  Clone ID: LIB3039-049-Q1-E1-A8
ggcacaagtgagtttgttgatcgagataactagaaacagtgtgatgaaaatgaaggtccttgttttcttcgttgctacaattttggtagcatggcaatgccatgcgtacgatatgttccctctccgaatgaacactggctatggtgcccgtactccggaggtgaaatgcgcaagttggaggcttgctgtggaagcacacaacatctttggctttgagaccattcctgaagagtgcgttgaagcaacaaaggaatacatccatggcgaacaatatagatcagactccaaaacagttaaccaacaagcttacttttatgccagagacctcgaagtccatcccaaggacacatttgtgttcagtatagatggcaccgtactctctaatattccatact

SEQ ID NO: 7930 - DNA, 355 bp, Glycine max
  Clone ID: LIB3039-049-Q1-E1-A9
ggcgaaacagagagtgatttcagtgagtgatcggtgttcacttgatctcatcataatcgtcagcgtcaattgaagaagatgccgatcagaaacatcgccgtcggaaggcctgaagaggcgactcaccccgacacgttgaaggcggctttggctgagttcatctcaaccttcatcttcgtgttcgccggctcaggctccggcatcgcctacaacaagctcaccgacaacggcgctgccacccctgccggcctcatctccgcctccatcgcccatgcattcgccctcttcgtcgccgtctccgtcggcgccaacatctccggcggccacgtcaaccccgccgtcaccttcggcgcct

SEQ ID NO: 7931 - DNA, 394 bp, Glycine max
  Clone ID: LIB3039-049-Q1-E1-B1
gggcgtgtccggaaattttctgaatccctaaattttctcctcctgccagggcgcgtatcgacgacgatgctctcctccaaacccccgcgccggaaagtggttccggcgaacggcgatgactccgccgacaaactcgaccagctccttctctcctccgccatttgcaacaacgaggacctaggtccgttcatccgcaagaccttcgcctccggcaagccggagaccctccaccaccaccttcgccacttcgcgaggtcgaaagagtcggagatcgaagaggtgtgcaaggctcactaccaggacttcatcctcgccgtcgacgacctccgatctctcctctccgacgtcgattcgctcaagtcctccctctccgactccaactcgcgcctccaac

SEQ ID NO: 7932 - DNA, 374 bp, Glycine max
  Clone ID: LIB3039-049-Q1-E1-B10
aggggaaatgggaaaggaagaagcattgaatgtgtttggtggaagatgagtgaattggtgtacatgatcactacggcgaaagagtgggaggagttgcagagcaatggatccagtttcggtggggaccttgacaagtcatctgctttcatccatctcagcaagctcgaccatgttcggtcaacactggagaactttttcctgaacagcaacgaggaactctacctgcttcaaattgatgctaaaaagctacgtgatggtttggtgtatgaaattgtggatggtaaaaatagcttccctcatttctatgggccatctcgaagctttgttcctctcactcttgatgcagtgataaaagcagataaactaacactcac

SEQ ID NO: 7933 - DNA, 369 bp, Glycine max
  Clone ID: LIB3039-049-Q1-E1-B11
gaaagtgcacaagtgagtttgttgatcgagataactagaaacagtgtgatgaaaatgaaggtccttgttttcttcgttgctacaattttggtagcatggcaatgccatgcgtacgatatgttccctctccgaatgaacactggctatggtgcccgtactccggaggtgaaatgcgcaagttggaggcttgctgtggaagcacacaacatctttggctttgagaccattcctgaagagtgcgttgaagcaacaaaggaatacatccatggcgaacaatatagatcagactccaaaacagttaaccaacaagcttacttttatgccagagacctcgaagtccatcccaaggacacatttgtgttcagtata

SEQ ID NO: 7934 - DNA, 381 bp, Glycine max
  Clone ID: LIB3039-049-Q1-E1-B12
gaaggtgcaagagtttgttgtgagctataagctagtttatcgtgaggagaatatgaagttgtttgttttctttgttgctgcagtagttttggtagcatggccatgccatggcgcaggctaccaaaggttccctctccgaatgaaaactggctatggtgagcgttcttcggaggtaaaatgcgcaagttttaggcttgctgtggaagcacacaacatccgagcctttaaaaccattcctgaagagtgcgttgaaccaacaaaggactacattaatggcgaacaatttagatcagactctaaaacagttaaccaacaagctttcttttatgctagtgaacgcgaagtacatcacaacgacatatttatattcggcatagataa

SEQ ID NO: 7935 - DNA, 364 bp, Glycine max
  Clone ID: LIB3039-049-Q1-E1-B2
ggtgcacacgtgagtttgttgatcgagataactagaaatagtgtgatgaaattgaacgtccttgtgttcttcgttgctacaattttggtatcatggcgatgccatgcatacgatatgttccctctccgaatgaagactggctatggtgcccgtactccggaggtgaaatgcgcaagttggaggcttgctgtggaatcagacaacatctttggctttgagaccattcctgaagagtgcgttgaagcagcaaatgaatacatccatggcggaataatatggatcagactcgacaacagttaacctgcatgcttacttttaggccagagacctcgaagtccatcccaacgacacatttgtgttcagt

SEQ ID NO: 7936 - DNA, 383 bp, Glycine max
  Clone ID: LIB3039-049-Q1-E1-B3
ggtagttccaccgagtagcaacaatgtcgaagcgaggtcgcggaggatcggcgggaaacaagttccgcatgtcgctgggtctgccggtggcggcgacggtgaactgcgccgacaacaccggcgcgaagaacctctacatcatatcagtgaaggggatcaagggtaggctgaaccggttgccgtcagcttgcgtcggagacatggttatggccaccgtcaagaagggaaagcccgatctccgtaagaaggtgctgcccgccgtcatcgtccgccagcgcaagccttggcgccgaaaggacggtgtttacatgtacttcgaagataatgctggtgttatcgtgaatcccaagggtgaaatgaaaggttctgctatcactggtcca

SEQ ID NO: 7937 - DNA, 351 bp, Glycine max
  Clone ID: LIB3039-049-Q1-E1-B4
aaaggggggaattggcctagtcaaccggcaccgccagcaagggaacatgggggtctttgagccacgggttgacgcacaagatcgtcctctcctacagctaactgggcatatggattttcttgagcttcaacgtcatcgtctacaaaacgtagatcctgaatcagaagatgtacaactgtgccatccccaaccccctcacaatgatcgacatgttcttctgggccaacctcgccatcctcctcgtctgtatcctccgcaacgtcgagcccgtctccatgtcccgccatgtctacctctcctccgtcgtccccatcggtgctctctaatccctctccgtctggctctccaact

SEQ ID NO: 7938 - DNA, 398 bp, Glycine max
  Clone ID: LIB3039-049-Q1-E1-B5
gaaggtgcaagagtttgttgtgagctataagctagtttatcgtgaggagaatatgaagttgtttgttttctttgttgctgcagtagtcttggtagcatggccatgccatggcgcaggctaccaaaggttccctctccgaatgaaaactggctatggtgagcgttcttcggaggtaaaatgcgcaagttttaggcttgctgtggaagcacacaacatccgagcctttaaaaccattcctgaagagtgcgttgaaccaacaaaggactacattaatggcgaacaatttagattagactctaaaacagttaaccaacaagctttcttttatgctagtgaacgcgaagtccatcacaacgacatatttatattcggcatagataacaccgtactctctaata

SEQ ID NO: 7939 - DNA, 405 bp, Glycine max
  Clone ID: LIB3039-049-Q1-E1-B6
gagcaacatcatcatcgtcatctacaactagtaacaaagatccaacaagcagatcaatctctctctctgtctcccaatcaaaacagacatgggtttgaaggaggattttgagcagtatgctgagaaagcaaagactttgccaccgactcaatcaaacgaagacttgcttatcctttatggattgtacaagcaggccaccgttggacctgtcaacaccagccgtccgggaatgttcaacatgagggacagagctaaatgggatgcatggaaggctgttgaagggaaatccaaggacgaagcaatgagtgattacatcactaaggtgaaacagctgctggaagcagccggcatgcctgcttgataacattgtcatgccttgctttcttattctgtgctagaagttcc

SEQ ID NO: 7940 - DNA, 402 bp, Glycine max
  Clone ID: LIB3039-049-Q1-E1-B7
ggcacaagtgagtttgttgatcgagataactagaaacagtgtgatgaaaatgaaggtccttgttttcttcgttgctacaattttggtagcatggcaatgccatgcgtacgatatgttccctctccgaatgaacactggctatggtgcccgtactccggaggtgaaatgcgcaagttggaggcttgctgtggaagcacacaacatctttggctttgagaccattcctgaagagtgcgttgaagcaacaaaggaatacatccatggcgaacaatatagatcagactccaaaacagttaaccaacaagcttacttttatgccagagacctcgaagtccatcccaaggacacatttgtgttcagtatagatggcaccgtactctctaatattccatactacaaaaa

SEQ ID NO: 7941 - DNA, 404 bp, Glycine max
  Clone ID: LIB3039-049-Q1-E1-B8
ggttcactttcttccaacctctaacctacctctttttcttctctctcaacaacttcaccttcttcctcctcgatcatgtctcacttcaagggcaagtaccatgatgagcttatcgccaatgctgcgtacattggcactcctggaaagggtattcttgctgctgatgagtcaacagggacaattggcaagcgtttggccagcatcagtgtagagaacattgaatccaacaggcgagctcttagggagctgcttttcactgctcctggtgttcttcaatatctcagtggtgtcatcctctttgaggaaaccctctaccagagcacagctgcaggcaagccctttgtgaatgtcttgaacgaagctggtgtgcttcctggcatcaaggttgacaagggcacagtcga

SEQ ID NO: 7942 - DNA, 328 bp, Glycine max
  Clone ID: LIB3039-049-Q1-E1-B9
ggcacaagtgagtttgttgatcgagataactagaaacagtgtgatgaaaatgaaggtccttgttttcttcgttgctacaattttggtagcatggcaatgccatgcgtacgatatgttccctctccgaatgaacactggctatggtgcccgtactccggaggtgaaatgcgcaagttggaagcttgctgtggaagcacacaacatctttggctttgagaccattcctgaagagtgcgttgaagcaacaaaggaatacatccatggcgaacaatatagatcagactccaaaacagttaaccaacaagcttacttttatgccagagacctc

SEQ ID NO: 7943 - DNA, 334 bp, Glycine max
  Clone ID: LIB3039-049-Q1-E1-C1
tgatcttcaacgacacagagggaggaacatttgcatacatctgacttacgattcaggaactgcgtattggtgacatgtagggatggacatcgcaatagaccgtacaaatgattcaggtcgtctatcatgtgggtgaacttgatcgaaccatcaacttttacacaaagtggtaaggaattctgcattatgagcggtgagagttcacaaacgacatatatagcaacgcttaactgtggctctgccctagattaatcccatttagttgtagacttaacatataattatggagctacctctcaagacgttggctattgctattgcccattagctcatg

SEQ ID NO: 7944 - DNA, 382 bp, Glycine max
  unsure (1)..(382): unsure at all n locations
  Clone ID: LIB3039-049-Q1-E1-C10
ggcacaagtttgttgagatagctagaagcaataagatgaaaatgaaagtgcttgttttgtttgttgctacagttttggtagcatatgaatgccatggctcagactaccagaagttccctctccaaatgaaaactgggtttggtgggcaatacagcaatgaggtggcatgtgccagttggaggcttggcgtggaagcaaacaagtagtcaagtggcaaactgttcctgcagcttgcggagagtacatagctgactacgttctangagaccaatatagatcagattccaaaacagttaaccaacaagcttatttctatgctaaatccctcaaactcaccaacaaagatgtctttgtcttggacgttgacgacactactctctct

SEQ ID NO: 7945 - DNA, 298 bp, Glycine max
  Clone ID: LIB3039-049-Q1-E1-C11
gattttactgatatcctgagcttctattgagctcactcaactcgtacaacgaaaccctcttcaacttgtactatcagtgacgagcatcattgtctcaacagcaatgttagtggtggctatgtgtgtgcttccggcgatgggtgtggacagtcgcctagcatggaaccctttttgcgttaatggtcatatctactgtgacacttgccgtgctggttttgagaccacatctaccagctacattgctggtgctgagattattttgcaatgcaagaacagggttagcaactaagttgtgtac

SEQ ID NO: 7946 - DNA, 361 bp, Glycine max
  Clone ID: LIB3039-049-Q1-E1-C12
gaaggtgcaagagtttgttgtgagctataagctagtttatcgtgaggagaatatgaagttgtttgttttctttgttgctgcagtagttttggtagcatggccatgccatggcgcaggctaccaaaggttccctctccgaatgaaagctggctatggtgagcgttcttcggaggtaaaatgcgcaagttttaggcttgctgtggaagcacacaacatccgagcctttaaaaccattcctgaagagtgcgttgaaccaacaaaggactacattaatggcgaacaatttagattagactctaaaacagttaaccaacaagctttcttttatgctagtgaacgcgaagtccatcacaacgacata

SEQ ID NO: 7947 - DNA, 395 bp, Glycine max
  Clone ID: LIB3039-049-Q1-E1-C2
cggcacaagtttgttgagatagctagaagcaataagatgaaaatgaaagtgcttggtttgtttgttgctacagttttggtagcatatgaatgccatggctcagactaccagaagttccctctccaaatgaaaactgggtttggtgggcaatacagcaatgaggtggcatgtgccagttggaggcttggcgtggaagcaaacaacgtagtcaagtggcaaactgttcctgcagcttgcggagagtacatagctgactacgttctaggaaaacaatatagatcagattcgaaaacagttaaccaacaagcctatttctatgccaaatccctcagactcaccaacaaagatgtccttgtcctggacgttgacgacactactctctctaatctccagta

SEQ ID NO: 7948 - DNA, 394 bp, Glycine max
  Clone ID: LIB3039-049-Q1-E1-C3
ggcacaagtgagtttgttgatcgagataactagaaacagtgtgatgaaaatgaaggtccttgttttcttcgttgctacaattttggtagcatggcaatgccatgcgtacgatatgttccctctccgaatgaacactggctatggtgcccgtactccggaggtgaaatgcgcaagttggaggcttgctgtggaagcacacaacatctttggctttgagaccattcctgaagagtgcgttgaagcaacaaaggaatacatccatggcgaacaatatagatcagactccaaaacagttaaccaacaagcttacttttatgccagagacctcgaagtccatcccaaggacacatttgtgttcagtatagatggcaccgtactctctaatattccatac

SEQ ID NO: 7949 - DNA, 409 bp, Glycine max
  Clone ID: LIB3039-049-Q1-E1-C4
gggaaaagtgaatttgttgattgaaataactaaaaacaattttattaaaattaaaggccttggtttcctccgtggcaaaaattttggaccaatgaatgcatgcgtacgatatgttccctctccgaatgaacactggctatggtgcccgtactccggaggtgaaatgcgcaagttggaggcttgctgtggaagcacacaacatctttggctttgagaccattcctgaagagtgcgttgaagcaacaaaggaatacatccatggcgaacaatatagatcagactccaaaacagttaaccaacaagcttacttttatgccagagacctcgaagtcaatcccaaggacacatttgtgttcagtatagatggcaccgtactctctaatattccatactacaaaaaacatggata

SEQ ID NO: 7950 - DNA, 349 bp, Glycine max
  Clone ID: LIB3039-049-Q1-E1-C5
gaggcgtaaacatccatcgaatccaaataataccaaaaaacaccatgatgcttggggagacccaccgcccaaatccaaccgtacacgtgccaccgtgggcgccggagatcttctcaccatacaccggcaatgccgattactctccgtactccatgcaagaagcacttagtgcacttcagcactacgaatccaccgatgctgagtcagactcggaggttccgtctcgggaaccggaagtcccggtggacgcttactcctgcgaccatttccgcatgttcgagttcaaggttcggagatgcgcacgttgcaggtcgcatgactggaccgactgtccgtacgcccaccccgg

SEQ ID NO: 7951 - DNA, 412 bp, Glycine max
  Clone ID: LIB3039-049-Q1-E1-C6
ggcacaagtttgttgagatagctagaagcaataagatgaaaatgaaagtgcttgttttgtttgttgctacagttttggtagcatatgaatgccatggctcagactaccagaagttccctctccaaatgaaaactgggtttggtgggcaatacagcaatgaggtggcatgtgccagttggaggcttggcgtggaagcaaacaacgtagtcaagtggcaaactgttcctgcagcttgcggagagtacatagctgactacgttctaggagaccaatatagatcagattccaaaacagttaaccaacaagcttaattccatgctaaatccctcaaactcaccaacaaagatgtctttgtcttggacgttgacgacactactctctctaatctcaagtattttgctaaccatggatt

SEQ ID NO: 7952 - DNA, 368 bp, Glycine max
  Clone ID: LIB3039-049-Q1-E1-C7
gagagccggcttcttcctctgcgcaggaattaggaatattcgacaggtagagtttcttcaatggctcctaaagttgataagaagaatgatccaaaggcccaggccttgaagactgctaaggcagttaagtcaggtgctacctttaagaagaaggtaaagaagatccgaacttctgtcactttccacaggccgaagaccttgaagaaggacaggaaccccaagtaccctcgcattagcgccccgccgaggaacaagcttgatcattatcagatcctgaaataccccctcaccactgagtctgccatgaagaagattgaggacaacaacactttggttttcattgtcgacctgcgtgccgacaagaagaa

SEQ ID NO: 7953 - DNA, 401 bp, Glycine max
  Clone ID: LIB3039-049-Q1-E1-C8
ggtagttctaacttctaagcccttgcccagtgctcatcgaggcttaaaccctttcggcggcagcgaaaaaagtctccccgcccccaaacccaaacaatgaggaagaaaaaacaagggttcagaagacccgttgtcataaaaaagccgaagcaaccgcaagagcaacccagcgttgatcctattacgggaaagaaaatccccaaaagtttcgtgttttcgcgaggcaagttgccggctcctctcaaacagcttcagatggacctcagaaagttgatgcttccatacactgctctcagccttagggaaaagaaacggaataatctgagggactttctgaatgttgctggacctatgggtgtcacgcatttcttcatattgtcaaaaactgctacttcatctta

SEQ ID NO: 7954 - DNA, 378 bp, Glycine max
  Clone ID: LIB3039-049-Q1-E1-C9
gaagagagagcttctcaaggcggagagagaaaatgccgataagaagaagagagaggacctcaaggtcacggaggagagacaaaaggtggagaagagattgaatgaagagaaggaactcaaagccgaagacaccaacaaaaacgaaagcgcctccagagttccaaacaaaggtaatggcttggatctggagaaatactcttggactcagtcgcttcaagaggttaatgtgaatgttccggtgccaaatggaaccaaatcgagatttgttaccgttgagataaggaagaaccatctaaaagttggactcaaaggccagcctccaattattgagggggagtttcataagtctgtcaagcctgatgattgctattggagtat

SEQ ID NO: 7955 - DNA, 358 bp, Glycine max; identical to SEQ ID NO: 7611
  Clone ID: LIB3039-049-Q1-E1-D1

SEQ ID NO: 7956 - DNA, 379 bp, Glycine max
  Clone ID: LIB3039-049-Q1-E1-D10
gaagccaaatacacatacacattagcttcaatctgagagagaaacacacacaatgaaggtttccattgccaagtttcactcccttcccctatgttttctccttctcttggccatcaacacacagccactgctagcagctgaaccagagccagtggtagataagcaagggaaccctttggtgccaggagtagggtactatgtgtggccactttgggctgataatggaggcctcacactaggccaaacaaggaacaaaacatgccctcttgatgttatccgtgacccttcattcatacggtcaccagtgaggttccatgcatcaagccttaatcacattccaacactcactgatctcaccattgatttccctgtggtgaca

SEQ ID NO: 7957 - DNA, 385 bp, Glycine max
  unsure (1)..(385): unsure at all n locations
  Clone ID: LIB3039-049-Q1-E1-D11
gccttcagaggaggattcatattggaaaaaatcatgggtccaatctcaagcgggcatttggagctccgaacccgcgacccgaacgacaacccatcagtgaccttcaactacttccaggaccctcgagacttgcagcgatgcgtgcagggcctgagcaccgtggagaagataatcgagtccaaagctttctctcccttcagataccccaacatgccagtgcccgttctgctcaacctgaccgcaagtgcccccgttaacttgttgcccaagcacaccagttcttcactttctttggaacagtattgcagagacactgtcatgaccatttggcactaccacggtggctgccaagtagggaacgttcttgatanggactacaagcttc

SEQ ID NO: 7958 - DNA, 367 bp, Glycine max
  Clone ID: LIB3039-049-Q1-E1-D12
gaaggtgcaagagtttgttgtgagctataagctagtttatcgtgaggagaatatgaagttgtttgttttctttgttgctgcagtagttttggtagcatggccatgccatggcgcaggctaccaaaggttccctctccgaatgaaaactggctatggtgagcgttcttcggaggtaaaatgcgcaagttttaggcttgctgtggaagcacacaacatccgagcctttaaaaccattcctgaagagtgcgttgaaccaacaaaggactacattaatggcgaacaatttagatcagactctaaaacagttaaccaacaagctttcttttatgctagtgaacgcgaagtccatcacaacgacatatttata

SEQ ID NO: 7959 - DNA, 399 bp, Glycine max
  unsure (1)..(399): unsure at all n locations
  Clone ID: LIB3039-049-Q1-E1-D2
aaaaaagggtacggtggcaaagacgaaagaaagggaacacatttcagaacaaanacacatacattgtagtatcacttttgtctcggaatttgttcttttgagttatggcaagcttaaaggttgcatgtgtggttttgatgtgcatggctgtgatgagtgcaccaatgatggtgcaagccgtgtcatgcaatgatgtttctgtgaacctagcaccgtgcctatcttacctgatgcaaggtggagatgttccagaatcgtgctgtagcggagtgaggaacattctgggttctgccagcaccacctttgacaaacaaaccgtgtgcaaatgtcntcagcaagctgctaataactatggcatcaacgacgaatacgctcaagcactccccgcccgctgcaatg

SEQ ID NO: 7960 - DNA, 408 bp, Glycine max
  Clone ID: LIB3039-049-Q1-E1-D3
ggggtgcacaagtgagtttgttgatcgagataactagaaacagtgtgatgaaaatgaaggtccttgttttcttcgttgctacaattttggtagcatggcaatgccatgcgtacgatatgttccctctccgaatgaacactggctatggtgcccgtactccggaggtgaaatgcgcaagttggaggcttgctgtggaagcacacaacatctttggctttgagaacattcctgaagagtgcgttgaagcaacaaaggaatacatccatggcgaacaatatagattagactccaaaacagttaaccaacaagcttacttttatgccagagacctcgaagtccatcccaaggacacatttgtgttcagtatagatggcaccgtactctctaatattccatactaccaaaaac

SEQ ID NO: 7961 - DNA, 355 bp, Glycine max
  Clone ID: LIB3039-049-Q1-E1-D4
atttgttttgtttttctttgttgctgcagtagttttggtagcatggccatgccatggcgcatgctaccaaaggttccctctccgaatgaaaactggctatggtgagcgttcttcggaggtaaaatgcgcaagttttaggcttgctgtggaagcacacaacatccgagcctttaaaaccattcctgaagagtgcgttgaaccaacaaaggactacattaatggcgaacatttagattagactctaaaacagtttaacaacaagctttcttttatgctagtgaacgcgaagtcaatcacaacgacatatttatattcggcatagataacaccgtactctctaatattccatactatg

SEQ ID NO: 7962 - DNA, 397 bp, Glycine max
  Clone ID: LIB3039-049-Q1-E1-D5
ggcacaagtgagtttgttgatcgagataactagaaacagtgtgatgaaaatgaaggtccttgttttcttcgttgctacaattttggtagcatggcaatgccatgcgtacgatatgttccctctccgaatgaacactggctatggtgcccgtactccggaggtgaaatgcgcaagttggaggcttgctgtggaagcacacaacatctttggctttgagaccattcctgaagagtgcgttgaagcaacaaaggaatacatccatggcgaacaatatagattagactccaaaacagttaaccaacaagcttacttttatgccagagacctcgaagtccatcccaaggacacatttgtgttcagtatagatggcaccgtactctctaatattccatactac

SEQ ID NO: 7963 - DNA, 408 bp, Glycine max
  unsure (1)..(408): unsure at all n locations
  Clone ID: LIB3039-049-Q1-E1-D6
gacacacagctattcctcttaagcttgctactgagtttccacactgcataccttaggtcttccgaattcgaagttaatttgcaagatggctaaggaaaaggctcagatcaacattgtggtggttggtcatgtggaccctgaggaggcaaccaccattaacgagctgaagaagcctgttgtggagaaagaagctccagggcatgccatatgagggcatgcacgtacggcctcggaggggaaccagaaaattatgttaacaaaataatctggaaccctaatgtatcagtgtcatcatcagtgtgtagtttaagctagctttgctatggttacgttctttgagatgagagtcttgatgaacagtaccattctgatgtattgctttccttganagttaatgcatgctcctta

SEQ ID NO: 7964 - DNA, 402 bp, Glycine max
  Clone ID: LIB3039-049-Q1-E1-D7
gagcgaaatcgatataatgggagaacactctgacataatactcctatctcctccattctatcagatgctcaagacagacacttttgaatgttctctgttctcttacatgtcgacgaatagttaccacacatttcatcacttcagggccgattatctcagtactctactctaaagtcactatcacattgttagtgttgataggatgatgccacagcgtgtactgatcataattactgaggctgtgtttctatcaccagctgtaacgtatattaagccacatcttggaaattctgtggatgtcatcgaacgcacaaaactcatcaattgctagtgaaaatgttagagatataggacatctccactcagagacgtgaactatgatacactaagctctactagctg

SEQ ID NO: 7965 - DNA, 381 bp, Glycine max
  Clone ID: LIB3039-049-Q1-E1-D8
gaacctgatcgatctctttaccagttgccacactacaccgagattccccctaaacccgtttgcgttgttgtttgcgaagaaatggcgactaagaggagcgtgggaacgttgaaggagggtgatttgaaagggaagagggtgttcgtgagggtcgatctgaacgtgcctttggatgacaaccttaacatcaccgatgacactagagtccgtgctgctgttcccaccatcaagtacttaactggtcatggagccaaagtgatcctttctagccacttgggacgtcctaaaggtgtaacacctaaatacagtttgaagcctcttgtgccaaggctgtctcaacttctcggaattgaggttacgatggcaaatgactctattggg

SEQ ID NO: 7966 - DNA, 383 bp, Glycine max
  unsure (1)..(383): unsure at all n locations
  Clone ID: LIB3039-049-Q1-E1-D9
gagggcgaggaagccacatagagacacaatacagagtgagttgttgctccttcgccacaactctctgccaacatgggtatctccagagattctatgcacaagaggcgtgccactggtggcaagaagaaggcctggaggaaaaagagaaagtatgagcttggtcgccagcctgctaacactaagctgtcaagcaacaagacagtcaggaggatccgtgttagaggtggaaatgtgaaatggagggcattgagattggatactggaaattactcctgnggaagtgaagctgtaactcgcaagactcgtgtactagatgtggtttacaatgcctcanacaatgagcttgtgcgtactcagactcttgtcaaaagtgctatcgttca

SEQ ID NO: 7967 - DNA, 358 bp, Glycine max
  Clone ID: LIB3039-049-Q1-E1-E1
ggcacaagtgagtttgttgatcgagataactagaaacagtgtgatgaaaatgaaggtccttgttttcttcgttgctacaattttggtagcatggcaatgccatgcgtacgatatgttccctctccgaatgaacactggctatggtgcccgtactccggaggtgaaatgcgcaagttggaggcttgctgtggaagcacacaacatctttggctttgagaccattcctgaagagtgcgttgaagcaacaaaggaatacatccatggcgaacaatatagattagactccaaaacagttaaccaacaagcttacttttatgccagagacctcgaagtccatcccaaggacacatttgtgttc

SEQ ID NO: 7968 - DNA, 382 bp, Glycine max
  Clone ID: LIB3039-049-Q1-E1-E10
ggtgagacgagggtaaggtcgcgttgtgttgcgtcgtgtcgtgcgctgttcctctgtctgtcgtttttgttttcagaccaaaccctagctccgcatcgcaaccatgtcgaccaagcaaggtggaaaagctaagcctttgaagaaacccaagtctgataagaaggattacgacgaggttgacatggctaacattcagaagaaaaaggaagaggagaaggcgctaaaggagttgaaagccaaggcgcaacagaagggaagctttggaggttctgggctcaagaaaagtggaaagaaataagggctctttatcatgattgtatacatccaatattgagccctgtagtttattaccatgataacttctgtcttattgtggccttct

SEQ ID NO: 7969 - DNA, 161 bp, Glycine max
  Clone ID: LIB3039-049-Q1-E1-E11
aggcgtcaggatgccagaagggggcagaagtgatttcatagtactagcattcaatctcaactgtcactcatctcacggtacttgaattctaactcgcgacactgttggcctcacggaaccgtcatgcatggaagaaagtccatcaccgaatctaaaatagc

SEQ ID NO: 7970 - DNA, 371 bp, Glycine max
  unsure (1)..(371): unsure at all n locations
  Clone ID: LIB3039-049-Q1-E1-E12
ggagcaaaaccctaatccctatttttcttcctcagtagtgtcatttacgcttctcttctctgcagcaactatgcctaaccctaaggtcttcttcgacatgaccatcggcggtcaatctgctggccgcatcgtgatggagctctacgccgacgtcactccccgcaccgccgagaacttccgcgcgctttgcaccggcgagaagggcgtanggcggagcggcaagcccctccactacaagggctcgtccttccaccgcgtgatcccgagtttcatgtgtcagggtggcgacttcaccgccggaaacggaaccggcggcgagtcgatttatggcgccaagttcgccgacgagaacttcgtgaagaagcacaccg

SEQ ID NO: 7971 - DNA, 408 bp, Glycine max
  Clone ID: LIB3039-049-Q1-E1-E2
aggggcaaaagtgagtttgttgatcgagataactagaaacagtgtgatgaaaatgaaggtccttgttttcttcgttgctacaattttggtagcatggcaatgccatgcgtacgatatgttccctctccgaatgaacactggctatggtgcccgtactccggaggtgaaatgcgcaagttggaggcttgctgtggaagcacacaacatctttggctttgagaccattcctgaagagtgcgttgaagcaacaaaggaatacatccatggcgaacaatatagattagactccaaaacagttaaccaacaagcttacttttatgccagagacctcgaagtccatcccaaggacacatttgtgttcagtatagatggcaccgtactctctaatattccatactacaaaaaaca

SEQ ID NO: 7972 - DNA, 370 bp, Glycine max
  Clone ID: LIB3039-049-Q1-E1-E3
ggtggtagtttggcagcgacacgtatcttcatcaataatcgcagaagcagtttccggtgcatctcatcgtcttccaaaatgaacgacgcagatgtctcgaagcaaatccagcagatggtgcgtttcatccgccaggaagctgaggagaaagccaacgagatctctgtatctgccgaagaggaattcaatatcgagaagctgcagttggttgaagccgaaaagaagaagatcaggcaagaatacgaacgcaaagagcgccaagtcgaaattcgcaagaagattgagtactcaatgcagctgaatgcttctcggattaaagttcttcaagctcaagatgacgtgatcagttccatgaaagaagctgcatcca

SEQ ID NO: 7973 - DNA, 277 bp, Glycine max
  unsure (1)..(277): unsure at all n locations
  Clone ID: LIB3039-049-Q1-E1-E4
acataaaattcctctgagaatgcattaccaagcagcggcggcggcgtggtgggggagctacgtggcggcccctcggaacgcggcgggcgcggtagtgggggacccgctggagcgcatagagaggctggcgtcngaaagcgcggtggtgatattcagcgtgagcacgtgctgcatgtgccacgccgtcaagaggctcctctgcggcatgggtgtgaacccaaacgtgcacgagctggacgaggatccaagaggcacaggactcgaacgcgccctcatg

SEQ ID NO: 7974 - DNA, 375 bp, Glycine max
  Clone ID: LIB3039-049-Q1-E1-E5
gcagtgcagcatcgtagagaaataagggaaaaatggtgtcgctgaaactgcagaagcgcctctccgcaagcgtgctcaagtgcggcagaggaaaggtttggcttgaccccaatgaagtcaacgaaatctccatggccaattctcggcaaaacatcaggaagttggttaaggatgggtttatcatcaggaagccaaccaagattcactcccgctcacgtgctcgtaggatgaaggaggcaaagaggaagggccgccactccggttatggtaaacgtaagggtacaagggaggcaaggcttcccaccaagatactctggatgagaaggatgcgtgtgctcagacggttgcttcgtaagtacaaggaatccaagaaaa

SEQ ID NO: 7975 - DNA, 407 bp, Glycine max
  Clone ID: LIB3039-049-Q1-E1-E6
gggggggttgcattgcagtatcatcagaatcagagttgagttgaccccttcattccattaactatcactcttaacaatgcaagcagcaattgcagccatggccgcccacactattctcttttcttccttcccagctcctcaatccattgcccttcccgccactaccaagaaagccgttgcaatcctcaagggcaattcctccgtccatggccttgtcactctaacccaacaacaagacaacggcccaacaactgttactgttcgtgtttctggtcttactcctgggcctcatggttttcatctccatgagtttggtgatataacaaatgggtgcatatcaactgggccacatttcaatcctaataaactcaaacatggtgctccggaggataaaattcgccatgcgg

SEQ ID NO: 7976 - DNA, 399 bp, Glycine max
  Clone ID: LIB3039-049-Q1-E1-E7
ggggcattcgccgtaaacagaagagagagagagagagagagagagtcctgaaacttgggtgcgattccttcactcacaacaacaacacatcactatggctcttctgagtcgagcctcttcacgcttccctcagctggtttcccctcaaagggtagtttcactccacacaacgctcccatctctgaacgcatccccatccacagccacgcctacaccatatgccccgccaccgcctcaagtccgcttcctctcccgccggcgtttcgaaggcggcggagttcgtgatctcgaaggtggacgatctgatgaactgggcccgccgcggctccatctggcccatgaccttcggcctcgcctgctgcgccgtcgaaatgatgcacaccggcgccgcccgctacg

SEQ ID NO: 7977 - DNA, 384 bp, Glycine max
  unsure (1)..(384): unsure at all n locations
  Clone ID: LIB3039-049-Q1-E1-E8
ggatcattcataatccatcaatcaagaaagaaacagaaacttttttctttgataaatttgttctttgttccgacaatgcgtccaccgcggaagagggtggatttctcgcgcggcgacaaggtggagatctgcagcaacgaggagggcttcctcggctcctactacccggccacggtcgtgtcgcgcctcgacaacggcctctacgtcgtacgctacgacacgctcctcgaggacgacgcctcgttccagcccctcagcgaaaccctatttccgaaagagctccgtcgccatccgccacgtgtccccaggacccacttcgcgctccaccagtgcgtcgacgccttcgacaacgacggctggtggctcggccagatcancggcaag

SEQ ID NO: 7978 - DNA, 164 bp, Glycine max
  Clone ID: LIB3039-049-Q1-E1-E9
gagtcaagtacttgggcccattctctggcgagcccccgtcctacctaaccggtgagttcccaggcgactacggctgggacactgctgggctttccgcagacccagaaaccttcgccaagaaccgtgaactcgaagtgattcactccaggtgggccatgctcgga

SEQ ID NO: 7979 - DNA, 320 bp, Glycine max
  Clone ID: LIB3039-049-Q1-E1-F1
gacagttgcagcctgagcttgagcaaaacgaccttgaccatctatagctgtcggtgtcagtaagaagatttcgattgcaaagggaggtggcggtagcaaagcgttagtggccaatcccttcgtcactcattaatgctctcatttcaacgctgattccctccttcatctaccgtgtttcgacagcgccgcttcctttcgtaacaaagactgataatagcatcaggccgattcactcatccagttcatgaagactcattggatgctcgtcactgggatgcagagaactcctactgcatcattcggatgcaaacatcggattt

SEQ ID NO: 7980 - DNA, 381 bp, Glycine max
  unsure (1)..(381): unsure at all n locations
  Clone ID: LIB3039-049-Q1-E1-F10
ggcacaagtttgttgagatagctagaagcaataagatgaaaatgaaagtgcttgttttgtttgttgctacagttttggtagcatatgaatgccatggctcagactaccagaagttccctctccaaatgaaaactgggtttggtgggcaatacagcaatgaggtggcatgtgccagttggaggcttggcgtggaagcaaacaacgtagtcaagtggcaaactgttcctgcagcttgcggagagtacatagctgactacgttctangagaccaatatagatcagattccaaaacagttaaccaacaagcttatttctatgctaaatccctcaaactcaccaacaaagatgtctttgtcttggacgttgacgacactactctct

SEQ ID NO: 7981 - DNA, 373 bp, Glycine max
  Clone ID: LIB3039-049-Q1-E1-F11
ggggttttatctcattaacgtttcttctcttcactctgcccgctgcatcaatggcttcagagaagaaactttcgaacccaatgagggagataaaagtgcagaagctcgtcctcaatatctctgttggcgagagtggagatcgtctcaccagagcctccaaggtgttggaacaacttagtggccaaaccccagtgttttccaaagcaaggtacactgttcgttcctttgggactagaagaaatgagaagattgcatgctatgtcactgtcagaggtgacaaggcaatgcaacttttggagagtggtttgaaggtgaaggaatatgaacttctcagaaggaacttcagtgatactggttgcttcggctttggtat

SEQ ID NO: 7982 - DNA, 351 bp, Glycine max
  Clone ID: LIB3039-049-Q1-E1-F12
ggcattatatttgagttcaaacaactcaaagccatggccacctccaacttctctattgttctctccgtctccctagccttctttttggtgctacttaccaaggcacactcgaccgataccgtttctttcaccttcaacaagttcaacccagtccaaccaaacattatgctccaaaaagatgctagtatttcatcctctggggtgttacaactcaccaaaattggcagcaacggcgtgcccacctcgggatctctcggtcgtgccctttacgctgccccaatccagatttgggacatcgaaaccggcaaggtagccagctgggctacatcctttaaattcaacattttcgca

SEQ ID NO: 7983 - DNA, 401 bp, Glycine max
  Clone ID: LIB3039-049-Q1-E1-F2
gatgcacaagtttgtttagaaaactagaagcaataagattaaaatgaaaatgcttgttttgtttgttgctacagttttggtagcatatgaatgccatggctcagactaccagaagttccctctccaaatgaaaactgggtttggtgggcaatacagcaatgaggtggcatgtgccagttggaggcttggcgtggaagcaaacaacgtagtcaagtggcaaactgttcctgcagctttcggagagtacatagctgactacgttctaggagaccaatatagatcagattccaaaacagttaaccaacaagcttatttctatgctaaatccctcaaactcaccaacaaagatgtctttgtcttggacgttgacgacactactctctctaatctccagtattttg

SEQ ID NO: 7984 - DNA, 397 bp, Glycine max
  Clone ID: LIB3039-049-Q1-E1-F3
ggcacaagtgagtttgttgatcgagataactagaaacagtgtgatgaaaatgaaggtccttgttttcttcgttgctacaattttggtagcatggcaatgccatgcgtacgatatgttccctctccgaatgaacactggctacggtgcccgtactccggaggtgaaatgcgcaagttggaggcttgctgtggaagcacacaacatctttggctttgagaccattcctgaagagtgcgttgaagcaacaaaggaatacatccatggcgaacaatatagattagactccaaaacagttaaccaacaagcttacttttatgccagagacctcgaagtccatcccaaggacacatttgtgttcagtatagatggcaccgtactctctaatattccatactac

SEQ ID NO: 7985 - DNA, 440 bp, Glycine max
  unsure (1)..(440): unsure at all n locations
  Clone ID: LIB3039-049-Q1-E1-F4
aattccgggatcaccagcgtcagaagacacagaagggtcccctttttccggccaaaaaccaaaaagggtcctttaaaactccaaaggattcttcacttcatcctctcttccttcagctacccttgcaacacaaaagtangaagtacatattgactgcttcctgggttcacatacaatgacatcaagtttaaaacatggttggccctctgttgtgcgtcttcgtctccgagacaaatcagtgacacccttttgcatattctctaaagtgaaatcagctggcaacatacctgggaatacacctgtctatctcaatgtctatgacttgacaacagtaaatggctatatgtattgggcaagcattggtatttccactcaagggttgaagtttatggagtagaatatgcatttggagcccatgactatccaacaagtggtgtctt

SEQ ID NO: 7986 - DNA, 396 bp, Glycine max
  Clone ID: LIB3039-049-Q1-E1-F5
ggaaatggaaatggagaggagaaggcgaggttgatgattgtgatggcggaagcagagacaaacaggaatggcagtggcatcctccttcatcatcatcatcgtcgtcatcatcgctctcatcttcttctccctaaaccctcctcctgcaccatcacgtaggtcacttctcctcaccacttcatcgtcttgctccaacgaatccaatggtcttctcaactaccactgcatcttcccccaaacttcctctttctcaatcccctccctctcgctcttcctcctcctcaacttctacatcctcatcaccaccgcgcagcaccacttctccctcgtcaccacaaagctcgcctcgcacctcaacctctcccccagcatggccgccgtcacgctcctctccct

SEQ ID NO: 7987 - DNA, 365 bp, Glycine max
  unsure (1)..(365): unsure at all n locations
  Clone ID: LIB3039-049-Q1-E1-F6
gaccacattccaaaacacaaacacatacattgtagtatcacttttgtctcggaatttgttcttttgagttatggcaagcttaaaggttgcatgtgtggttttgatgtgcatggctgtgatgagtgcaccaatgatggtgcaagccgtgtcatgcaatgatgtttctgtgaacctagcaccgtgcctatcttacctgatgcagggtggagatgttccagaatcgtgctgtagcggagtgaggaacattctgggttctgccagcaccacctttgacaaacaaaccgtgtgcaaatgtcttcagcaagctgctaataactatgggatcaacgacgaatacgctcaagcactcncggcccgctgcaatg

SEQ ID NO: 7988 - DNA, 410 bp, Glycine max
  Clone ID: LIB3039-049-Q1-E1-F7
gggcgcggcacacacagacacacacatttcgtcggaatgggaagggtgattcgcgcacagcgtaagggtgcggggtcggtgttcaagtcccacacccaccaccgcaagggtccggcgaggttccgcagcctcgacttcggcgagcgcaacggctacctcaaaggggtcgtcaccgatatcatccacgaccctggtcgcggtgctcctctagccaaggtggcgttccgccaccccttccgctacaagaagcagatggagctcttcgtcgccgccgagggcctctacaccggccagttcatctactgcggcaagaaggccaccctcgtcgtcggcaacgtcttgcccctccgatccatccccgaaggtgccgttatctgcaacgtcgagcaccacgttggcgaccgccgcgt

SEQ ID NO: 7989 - DNA, 406 bp, Glycine max
  Clone ID: LIB3039-049-Q1-E1-F8
gacctacattttgataattttctttgtagttgatagccatggctacccgtggaaagcttgaggttgacattgatctcaagtccaacgcagacaagtactggcaaacccttaggaattctactgaaatattccctaaggccttcccacatgattacaaaagcattgaggttcttgagggtgatggcaagtctcctggttctaaccggcaaaataagttatggtgaaggttcaccacttgtgaaatcatcctttgagaagattgaggctgttgatgaggaaaagaaggtagtgtcgtacactatcattgatggggaactcctccagcactacaaaacattcaagggagacatttcagtgactccaattggcgatggatgcgaagtgaagtggagtgctgtgtacgaaa

SEQ ID NO: 7990 - DNA, 367 bp, Glycine max
  Clone ID: LIB3039-049-Q1-E1-F9
ggcacaagtgagtttgttgatcgagataactagaaacagtgtgatgaaaatgaaggtccttgttttcttcgttgctacaattttggtagcatggcaatgccatgcgtacgatatgttccctctccgaatgaacactggctatggtgcccgtactccggaggtgaaatgcgcaagttggaggcttgctgtggaagcacacaacatctttggctttgagaccattcctgaagagtgcgttgaagcaacaaaggaatacatccatggcgaacaatatagatcagactccaaaacagttaaccaacaagcttacttttatgccagagacctcgaagtccatcccaaggacacatttgtgttcagtatagat

SEQ ID NO: 7991 - DNA, 392 bp, Glycine max
  Clone ID: LIB3039-049-Q1-E1-G1
ggatggcttgcagacagttgtgggcttcaagagctgcttcctacctcaggatctccgtgtttcacagaagcttctctaacgttttgaatgatctgaagtatgctgattctcatgagtgagtgaaggttgatggaaattctgcaactgttggcataactgatcatgcccaagatcatttgggtgaggttgtgtatgttgaattgcctgaagtgggagccaccgtgacacaagggagaaggttttggtggaagctgaaaattttaaaggcaactagtgatattaactctcctgtttcaggaaaagtggtcgaagttaatgaaaaacttaccagttctcctgctttggtcaacacaagcccttacaaagatggatggataattaaagtggagatg

SEQ ID NO: 7992 - DNA, 380 bp, Glycine max
  Clone ID: LIB3039-049-Q1-E1-G10
ggcacaagtgagtttgttgatcgagataactagaaacagtgtgatgaagatgaaggtccttgttttcttcgttgctacaattttggtagcatggcaatgccatgcgtacgatatgttccctctccgaatgaacactggctatggtgcccgtactccggaggtgaaatgcgcaagttggaggcttgctgtggaagcacacaacatctttggctttgagaccattcctgaagagtgcgttgaagcaacaaaggaatacatccatggcgaacaatatagatcagactccaaaacagttaaccaacaagcttacttttatgccagagacctcgaagtccatcccaaggacacatttgtgttcagtatagatggcaccgtactct

SEQ ID NO: 7993 - DNA, 369 bp, Glycine max
  Clone ID: LIB3039-049-Q1-E1-G11
gaagaaatatacatgttgaggtagcaacagagaaaccctaaattgaagagaagagtgaagattgagagttagggtttaagcgaaatcagatcagagaagaaggcatcatcatgtttccaggaatgttcatgcgcaagccagacaaagctgcagcactgaagcagctgaaatctcacgcggccatgttcggggcatgggttgttgttattcgagtcaccccttacgttcttcactttctcagcaccgagaaagaggaacttaagctcgagctttagcttctcactcttcctcggcagagtggattttgaggagttggatgtgtccatgggttcgggacaataatggagtaatgtatttatgttacccttg

SEQ ID NO: 7994 - DNA, 251 bp, Glycine max
  Clone ID: LIB3039-049-Q1-E1-G2
gggggattttttgggtgccattgttgttgctagtatcatccgcagctgcttttattcgcaccgcaaacagtgagccatggacgtcggaaagaagaagcgcatctccaacgggaagaagggtggcaataacaatgcagctgatgcctttgccaagaatgattggtattacattaatgctccttctgtttttcaagtgaaaaatgttggcaaaaccctcgtctctcgtactcagggtaccaggattgcttctg

SEQ ID NO: 7995 - DNA, 424 bp, Glycine max
  Clone ID: LIB3039-049-Q1-E1-G3
agaagggggcacaagtttgttgagatagctagaagcaataagatgaaaatgaaagtgcttgttttgtttgttgctacagttttggtagcatatgaatgccatggctcagactaccagaagttccctctccaaatgaaaactgggtttggtgggcaatacagcaatgaggtggcatgtgccagttggaggcttggcgtggaagcaaacaacgtagtcaagtggcaaactgttcctgcagcttgcggagagtacatagctgactacgttctaggagaccaatatagatcagattccaaaacagttaaccaacaagcttatttctatgctaaatccctcaaactcaccaacaaagatgtctttgtcttggacgttgacgacactactctctctaatctccagtattttgctaaccatgggatttggt

SEQ ID NO: 7996 - DNA, 258 bp, Glycine max
  Clone ID: LIB3039-049-Q1-E1-G4
gaccacattcggaaatacaaacacattacattgggcgtaccacttttgtctcggaatgtgctcatttgcattaggggaaacttaatgggtacaagtgtgggtttgatgtccctggatggtatgaattgaccaatgaaagggggaaccctttgattggagaatggtttcgttgaacctttaacgggtttaacctaaccggttcaagggtggaaattttccaaaatcttgttgtaacgggtttaggaaaattctgggttc

SEQ ID NO: 7997 - DNA, 319 bp, Glycine max
  Clone ID: LIB3039-049-Q1-E1-G6
gatatcacaaaaaactattttggcttctgcctttccttttccagtgagctcattgacaatggctgaaacatagtgggtcatgaaggacaattgatggtctctccatggaataatagcccaattaaaaggaggaaccgaaggataagggaaggcaatggtgaagcgttaactgagtttagcgcaactgttcatagatgtgcacgttatcaagatgatattgataaatgtttagaagagtggaaaaatcagggacttaatgtgactggttcaatatgtgatttactatgttctgaccaacgtataagattaatggaaattg

SEQ ID NO: 7998 - DNA, 411 bp, Glycine max
  unsure (1)..(411): unsure at all n locations
  Clone ID: LIB3039-049-Q1-E1-G7
gacagaatcatcttctttttttcttcctatcctatctagtgaaaatgaattgaagggctaagggatgaaaggtttgatattgatggtctagctttagtagtgatctcttggaattgaaagtttagaaattagaaattaatagtgactattgatgatgggtaagaagaagccacaaaaaactaaggaactttccgtggcaatagctgaagcatcatcagcaattgatgagaaagagcaacaaattcaagttcaagttcaacctcaacctcaagctcctagaaagagaggtaaaactcgtaagaattgttttaaagagggaagaaaagtgaagaggaaaaaacacaactgatgatagggcaaagaggagcacaaggcacanagagttcaatggaaaaaggtacacacaacgag

SEQ ID NO: 7999 - DNA, 406 bp, Glycine max
  unsure (1)..(406): unsure at all n locations
  Clone ID: LIB3039-049-Q1-E1-G8
ggcacaagtgagtttgttgatcgagataactagaaacagtgtgatgaaaatgaaggtccttgttttcttcgttgctacaattttggtagcatggcaatgccatgcgtacgatatgttccctctccgaatgaacactggctatggtgcccgtactccggaggtgaaatgcgcaagttggaggcttgctgtggaagcacacaacatctttggctttgagaccattcctgaagagtgcgttgaagcaacaaaggaatacatccatggcgaacaatatagatcagactccaaaacagttaaccaacaagcttacttttatgccagagacctcgaagtcaatcncaaggacacatttgtgttcagtatagatggcaccgtactctctaatattccatactacaaaaaacat

SEQ ID NO: 8000 - DNA, 370 bp, Glycine max
  Clone ID: LIB3039-048-Q1-E1-A10
ggcatcaattcaaaatatatcatcaattataagcatgggtttgtggaacacaacgaatgcagtgtcttgccgctttcacaagtttggtgatgaccaaaagaatctggtcttccaaggtgatgccacgtcttcttccaggggcatagaactcacaaagttagacggtggaggaaaaccagtgggtggcagtgtggggagagtgttatactcttctccagtgcacctttgggaaagctctacagtggtcgcaagctttgaaaccgacttcaccttttccatctcatcagactctactactccaagtgatggccttgccttcttcattgcaccatttgacactaaaatccctccaaactctggtgggagcaac

SEQ ID NO: 8001 - DNA, 381 bp, Glycine max
  Clone ID: LIB3039-046-Q1-E1-B2
gaaggtgcaagagtttgttgtgagctataagctagtttatcgtgaggagaatatgaagttgtttgttttctttgttgctgcagtagttttggtagcatggccatgccatggcgcaggctaccaaaggttccctctccgaatgaaaactggctatggtgagcgttcttcggaggtaaaatgcgcaagttttaggcttgctgtggaagcacacaacatccgagcctttaaaaccattcctgaagagtgcgttgaaccaacaaaggactacattaatggcgaacaatttagatcagactctaaaacagttaaccaacaagctttcttttatgctagtgaacgcgaagtccatcacaacgacatatttatatcggcatagataac

SEQ ID NO: 8002 - DNA, 306 bp, Glycine max
  Clone ID: LIB3039-046-Q1-E1-B3
gattctgattctgtccatccaaatcttaaaaatattcagtgaagatcaacctcaatggcatctcttggcgtgcgaccagttcttccccctccattaacttccatctccgacccacctcctcttttcgatggcaccaccaggttgtacatcagttattcttgcccctatgcacaacgtgtgtggatcgctaggaactacaaggggctacaagataagatcaatttggtccctattaaccttcaagacaggccagcttggtataatgagaaagtctatcctgaaaataaggtgccatccttggagcac

SEQ ID NO: 8003 - DNA, 239 bp, Glycine max
  Clone ID: LIB3039-046-Q1-E1-B4
acgcgtcagtacaaagaagacaacaaaaggggacaacccacctattgacaaccccccttaatccaatccatccccccaattcctccaacctaaattcccgaaaaatggcaaaggctccggaaaaaaaccctccggccaaaaaggccccggcggaaaaaaacccaaaggcggaaaaaaaggttccaaaggaaggaaccgccggaaaaaaaaaaaaaaaaaggtcaaaaaaaaccttgaaa

SEQ ID NO: 8004 - DNA, 387 bp, Glycine max
  Clone ID: LIB3039-046-Q1-E1-B6
gaccacattccaaaacacaaacacatacattgtagtatcacttttgtctcggaatttgttcttttgagttatggcaagcttaaaggttgcatgtgtggttttgatgtgcatggctgtgatgagtgcaccaatgatggtgcaagccgtgtcatgcaatgatgtttctgtgaacctatcaccgtgcctatcttacctgatgcagggtggagatgttccagaatcgtgctgtagcggagtgaggaacattctgggttctgccagcaccacctttgacaaagaaaccgtgtgcaaatgtcttcagcaagctgctaataactatggcatcaacgacgaatacgctcaagcactcgcagcccgctgcaatgtcagcgtcccttacaagatcag

SEQ ID NO: 8005 - DNA, 353 bp, Glycine max
  Clone ID: LIB3039-046-Q1-E1-B7
gaccacattccaaaacacaaacacatacattgtagtatcacttttgtctcggaatttgttcttttgagttatggcaagcttaaaggttgcatgtgtggttttgatgtgcatggctgtgatgagtgcaccaatgatggtgcaagccgtgtcatgcaatgatgtttctgtgaacctagcaccgtgcctatcttacctgatgcagggtggagatgttccagaatcgtgctgtagcggagtgaggaacattctgggttctgccagcaccacctttgacaaacaaaccgtgtgcaaatgtcttcagcaagctgctaataactatggcatcaacgacgaatacgctcaggcatcccccg

SEQ ID NO: 8006 - DNA, 392 bp, Glycine max
  unsure (1)..(392): unsure at all n locations
  Clone ID: LIB3039-046-Q1-E1-B8
ggaaacagagagtgatttcagtgagtgatcggtgttcacttgatctcatcataatcgtcagcgtcaattgaagaagatgccgatcagaaacatcgccgtcggaaggcctgaagaggcgactcaccccgacacgttgaaggcggctttggctgagttcatctcaaccttcatcttcgtgttcgccggctcaggctccggcatcgcctacaacaagctcaccgacaacggcgctgccacccctgccggcctcatctccgcctccatcgcccatgcattcgccctcttcgtcgccgtctccgtcggcgccaacatctccggcggccacgtcaaccccggcgtcaccnttcggcgccttcgtcggcggcaacatcaccttcctccgcggcatcgtc

SEQ ID NO: 8007 - DNA, 370 bp, Glycine max
  Clone ID: LIB3039-046-Q1-E1-B9
gaccacattccaaaacacaaacacatacattgtagtatcacttttgtctcggaatttgttcttttgagttatggcaagcttaaaggttgcatgtgtggttttgatgtgcatggctgtgatgagtgcaccaatgatggtgcaagccgtgtcatgcaatgatgtttctgtgaacctagcaccgtgcctatcttacctgatgcagggtggagatgttccagaatcgtgctgtagcggagtgaggaacattctgggttctgccagcaccacctttgacaaacaaaccgtgtgcaaatgtcttcagcaagctgctaataactatggcatcaacgacgaatacgctcaagcactccccgcccgctgcaatgtcagc

SEQ ID NO: 8008 - DNA, 387 bp, Glycine max
  unsure (1)..(387): unsure at all n locations
  Clone ID: LIB3039-046-Q1-E1-C1
ggccattgttgctgtcatcatccgcagctgctgttattcgcaccgcaaacaaacagtgagccatggccgtcggaaagaacaagcgcatctccaaagggaaaaagggtggcaagaagaaggcagctgatccctttgccaagaaggattggtatgacattaaggccccttctctttttcaagtgaaaaatgttggcaaaaccctcgtctctcgtacgcagggtaccaagattgcttctgaaggacttaaacatagagtgtttgaggtctccttggctgatcttcaaggggatgangatcatgcattcaagaagattaggttgagagctgaagatgtgcaaggggaagaatgtcctgacaaatttctggggaatggatttcacaactgac

SEQ ID NO: 8009 - DNA, 278 bp, Glycine max
  Clone ID: LIB3039-046-Q1-E1-C10
agaggttccagttgaggaagaaccatgaagccaccggttacctacggatttagattccgttgcgtttgtttgatcaatcattatggttcaaggtatccttaaaacccttcttgataatctaaggtaatgtgtttctggttattacaaaaattttataaggatccccaaaaatttcaacaattgatatcagagccaccattacagttagataattgatatttaaagttatttgattctaattacaccaaaatgccttgggtaaaataaacctttttttt

SEQ ID NO: 8010 - DNA, 361 bp, Glycine max
  Clone ID: LIB3039-046-Q1-E1-C11
gaaggtgcaagagtttgttgtgagctataagctagtttatcgtgaggagaatatgaagttgtttgttttctttgttgctgcagtagttttggtagcatggccatgccatggcgcaggctaccaaaggttccctctccgaatgaaaactggctatggtgagcgttcttcggaggtaaaatgcgcaagttttaggcttgctgtggaagcacacaacatccgagcctttaaaaccattcctgaagagtgcgttgaaccaacaaaggactacattaatggcgaacaatttagatcagactctaaaacagttaaccaacaagctttcttttatgctagtgaacgcgaagtccatcacaacgacata

SEQ ID NO: 8011 - DNA, 340 bp, Glycine max
  Clone ID: LIB3039-046-Q1-E1-C2
cccacgcgtcaggggaatcgttcccgtgctcgtgcgtctactcgattcctccccatccgaaacgaaagagaaaaccgtcgccgccatctcaaaaatctccaccgtggaaagcgcgaaaagcgttcttctcgctgagggtttactccttctgaaccacttgcttatggttttggattctggaagtggcttcgctattgagaaagcatgcatcgcgcttcgggcgttgagtttgacgaacgagaacgctatggcgattggctcgcgcggcggaatctcgtcgctgctccagatctgccaggctggcacccccggcgcacacgcttcagccgccgctgtgctg

SEQ ID NO: 8012 - DNA, 291 bp, Glycine max
  Clone ID: LIB3039-046-Q1-E1-C3
gaggcgcggcgggatcagcacaagattgcaaaatgaagttcaacattgcaaatcccaccactgggtgccagaagaagctggaaatcgatgacgacctgaagcttcgagcattttgggacaagaggatctcccaggaggttcttggtgatgctctgggtgaggagtttaaaggatatgttttcaaaatcaccggtgggtgtgacaaacaaggattccctatgaagcagggagtgctgacccctggtcgtgttcgacttttgctccatagaggaactccttgtttccgtggat

SEQ ID NO: 8013 - DNA, 321 bp, Glycine max
  unsure (1)..(321): unsure at all n locations
  Clone ID: LIB3039-046-Q1-E1-C4
ggcacaagtgagtttgttgattcgagataactagaaacattgtgatgaaaatgaaggtccttgttttcttcgttgctacaattttggtagcatggcaatgccatgcgtacgatatgttccctctccgaatgaacactggctatggtgcccgtactccggaggtgaaatgcgcaagttggaggcttgctgtggaagcacacaacatctttggctttgagaccattcctgaagagtgcgttgaaacaacanaggaatacatccatggcgaacaatatagatcagactccanaacagttaaccaacaagcttacttttatgcca

SEQ ID NO: 8014 - DNA, 356 bp, Glycine max
  Clone ID: LIB3039-046-Q1-E1-C5
gagctcaaaacccaattttaccctaccaattaaggtctctcatacagtagtattttatttgcactacgtactggctactttatttatttaagcagaagcaggtgagtgagtgagtgagcaagagtgaagagcgaagagaatggctcccaagggtttaatctttttggctgtgttatgcttctcagcactgtcactgagtcgttgtcttgcggaggataatggacttgttatgaacttctacaaggaatcatgccctcaggctgaagacatcatcaaagaacaagtcaagcttctctacaagcgccacaagaacactgcttttctcctgcctcagaaacatcttccatgactgtgct

SEQ ID NO: 8015 - DNA, 328 bp, Glycine max
  Clone ID: LIB3039-046-Q1-E1-C6
ggtgctctgctcgtgcctctagggttatcatttctccatttccattttctctctcacttttcaagaatcgtaagctatgggaaagtcttacccaactgtgagtgctgattaccagaaggccgttgagaaggcgaagaagaagctcagaggcttcatcgctgagaagagatgcgctcctctaatgctccgtttggcatggcactctgctggaacctttgacaagggcacgaagaccggtggacccttcggaaccatcaagcaccctgccgaactggctcacagcgctaacaacggtcttgacatcgctgttaggcttttggagccactc

SEQ ID NO: 8016 - DNA, 371 bp, Glycine max
  Clone ID: LIB3039-046-Q1-E1-C7
ggcgcattgaacgaaaattagggtttgtagtgtaccaggaagaagcagcaatggcgccgaagataacacgtaaggttagcagaaaccctgaattgataaggggaatcggaaagtactcgaggtcgcagatgtaccacaagaggggcatttgggctatcaaggccaaaaacggtggcgttttacctcgccacgaccctaaacccaagcctgaagctcctgctgaaaaaccacccaaattttaccctgctgatgatatcaagaagccccttgtcaacaagcacaaaccgaaaccagctaagctcatggctagcattactcgcgggacagtgttgattcctcttgccggtagatttaagggaaagagggtattc

SEQ ID NO: 8017 - DNA, 375 bp, Glycine max
  Clone ID: LIB3039-046-Q1-E1-C8
gaacgtaaattatacaaatgtcgtccccctgttataatactaacccggcctgggtcacttgactccggcacaaggaaagctgcttcttctttgcaaaggcggcgaggcaccaacgctctctagctccggtctctttgtattttgagataacacaatgtcgctgaggcgtttcttaggctattctgatggtgaggtcatgaggtctgatgcaaaaccttgttccaggctaatgaggcacacagctgcaatctttagtgttggtggagcattaggattttgggtcctttgccgaatgcactatggtcctcgaattacaaatcctaagagtcttcgttgggcatcatgtggagctgtaactgcgagctcaggcacggc

SEQ ID NO: 8018 - DNA, 380 bp, Glycine max
  unsure (1)..(380): unsure at all n locations
  Clone ID: LIB3039-046-Q1-E1-C9
gatcgcatttcatagcactcaccctcattaccaacacgaaagcatagccaaaaccttttttcgaagtctctgattttcctaatggctccggcaaaggcagagaagaagccggcggagaagaagccagcggcggagaaggcaccggcggagaagaagccgaaggcggagaagaagatctcgaaggaagganggagcgagaagaagaagaagcgcacgaagaagagcgtggagacctacaagatctacatcttcaaggtcctcaagcaggttcaccccgacattggtatttccagcaaggccatgggcatcatgaacagcttcatcaacgacatcttcgagaagctcgcccaggaagcgtcgcgtttggctcgctacaacaa

SEQ ID NO: 8019 - DNA, 319 bp, Glycine max
  Clone ID: LIB3039-046-Q1-E1-D1
gaacactgtcactcttacaatctcagctcatagaattcttcttcttccaacgagaatcattctttgggttccaaatggcccgtacgaagcaaacagcaagaaagtccaccggaggaaaagctccaaggaagcagctcgccaccaaggcagcacgtaagtccgctccggcgacgggcggcttgaagaagccccaccgtttcaggccggggacattggctctgagggagattcggaagtaccagaagagcacggagcttctcataaggaagcttcctttccacaggctcgtaagggaaatcgctcaggacttcaagaccga

SEQ ID NO: 8020 - DNA, 343 bp, Glycine max
  Clone ID: LIB3039-046-Q1-E1-D10
ggtagcaccttcgtaggacccttatctctctctctctctatctctcccgaattattgttcgttcgacccttttacttagtattccctgtttccggtattcgctcccttttttctgcattctggttttacgtacatctctgtcccgcaccagatctggtgcagggtgagagggttgggttcattaattttgtatcaatcttccttctgagcggtaggcgtggggataccagagtcttttcgggaagcaagagagggttctctccgttttcaatagatctctcactgtcttcttttgagggggaagccggtgcctcggcctcggcggctttcaaagcccccatct

SEQ ID NO: 8021 - DNA, 359 bp, Glycine max
  Clone ID: LIB3039-046-Q1-E1-D11
ggcacaagtgagtttgttgatcgagataactagaaacagtgtgatgaaaatgaaggtccttgttttcttcgttgctacaattttggtagcatggcaatgccatgcgtacgatatgttccctctccgaatgaacactggctatggtgcccgtactccggaggtgaaatgcgcaagttggaggcttgctgtggaagcacacaacatctttggctttgagaccattcctgaagagtgcgttgaagcaacaaaggaatacatccatggcgaacaatatagatcagactccaaaacagttaaccaacaagcttacttttatgccagagacctcgaagtccatcccaaggacacatttgtgttca

SEQ ID NO: 8022 - DNA, 378 bp, Glycine max
  Clone ID: LIB3039-046-Q1-E1-D12
gggtgggcgaggtagccagagagtgatacaatacagagtgcgttgttgctccttcgccacaactccctgccaacatgggtatctccagagattctatgcacaagaggcgtgccactggtggcaagaagaaggcatggaggaagaagagaaagtatgagcttggtcgccagcctgctaacactaagctgtcaagcaacaagacagtcaggaggatccgggttagaggtggaaatgtgaagtggagggcactgagattggatactggaaattactcctggggaagtgaagctgtaactcgcaagactcgtatactagatgtggtttacaatgcctcaaacaacgagcttgtgcgtactcagactcttgtaaaaagtgcta

SEQ ID NO: 8023 - DNA, 341 bp, Glycine max
  Clone ID: LIB3039-046-Q1-E1-D2
ggcacaagtgagtttgttgatcgagataactagaaacagtgtgatgaaaatgaaggtccttgttttcttcgttgctacaattttggtagcatggcaatgccatgcgtacgatatgttccctctccgaatgaacactggctatggtgcccgtactccggaggtgaaatgcgcaagttggaggcttgctgtggaagcacacaacatctttggctttgagaccattcctgaagagtgcgttgaagcaacaaaggaatacatccatggcgaacaatatagatcagactccaaaacagttaaccaacaagcttacttttatgccagagacctcgaagtccatccca

SEQ ID NO: 8024 - DNA, 310 bp, Glycine max
  unsure (1)..(310): unsure at all n locations
  Clone ID: LIB3039-046-Q1-E1-D4
gacttctcttcacacctttgttcactcttcttctcttgcggctagggttttaccgcagcttcttctaaatttaaggaaaatgggtaaggaaaaggttcacatcagtattgtggtcattggccatgtcgactctgggaaatccactaccactggtcacctgatttacaagcttggaggcattgacaagcgtgttattgagaggtttgagaaggaagctgctgagatgaacaagaggtctttcaagtatgcctgngtgctggacaaacttaaggctgatcgtgaaagaagaatcaccattgatattgctttg

SEQ ID NO: 8025 - DNA, 380 bp, Glycine max
  unsure (1)..(380): unsure at all n locations
  Clone ID: LIB3039-046-Q1-E1-D5
gactgcgaaccagtagggactcccattccgactcttagccgccgatctctcagggcttgcatcttctcaggtaagctgtgaagatgtacacatcaaggaagaaaatccacaaggataaggatgctgaaccaactgaatttgaagagtcagttggacaggcattgtttgatctggaaaataccaatcaggagcttaaaagtgatctgaaggatttatacataaactcagccgtgcaagttgatgtttctggaaaccgcaaggctgttgttattcatgtcccttacagattaaggaaaggtttccgtaagattcatgtnaggcttgtcanggagcttgagaaaaagtttattggcaagatgtaatcttggttgccacccgga

SEQ ID NO: 8026 - DNA, 382 bp, Glycine max
  Clone ID: LIB3039-046-Q1-E1-D6
gaagtcgggttggatttgtaggaggaagtaagaaaacacaacacgaatttcattgcagagtgttactttgagtatcagcatcaatggctccaattgcagtgggaaacgtgattccagacggcattttggcttacttggatgaagaaaacataccccaaactgtctccattcactctctcgccaccggcaagaaagtcatcatctttggggttcccggtgccttcactcctacttgcagcttgaagcacgttcctggcttcattgagagagcagaagagctgaaagggaagggtgtggacgaaataatctgtaacagtgtgaatgatccagttgtgatgaactcaatggcaaaaacattcccagagaacaagcatgttaagtt

SEQ ID NO: 8027 - DNA, 376 bp, Glycine max
  Clone ID: LIB3039-046-Q1-E1-D7
ggcacaagtgagtttgttgatcgagataactagaaacagtgtgatgaaaatgaaggtccttgttttcttcgttgctacaattttggtagcatggcaatgccatgcgtacgatatgttccctctccgaatgaacactggctatggtgcccgtactccggaggtgaaatgcgcaagttggaggcttgctgtggaagcacacaacatctttggctttgagaccattcctgaagagtgcgttgaagcaacaaaggaatacatccatggcgaacaatatagatcagactccaaaacagttaaccaacaagcttacttttatgccagagacctcgaagtccatcccaaagacacatttgtgttcagtatagatggcaccgta

SEQ ID NO: 8028 - DNA, 381 bp, Glycine max
  unsure (1)..(381): unsure at all n locations
  Clone ID: LIB3039-046-Q1-E1-D8
ggcaagagtttgttgtgagctataagctagtttatcgtgaggagaatatgaagttgtttgttttctttgttgctgcagtagttttggtagcatggccatgccatggcgcaggctaccaaaggttccctctccgaatgaaaactggctatggtgagcgttcttcggaggtaaaatgcgcaagttttatgcttgctgtggaagcacacaacatccgagcctttaaaaccattcctgaatagtgcgttgaaccaacaaaggactacattaatggcgaacattttagattagactctaaaacagttaaccaacaagctttcttttatgctagtgaacgcgaagtccatcacancgacatatttatattcggcatagataacaccg

SEQ ID NO: 8029 - DNA, 383 bp, Glycine max
  Clone ID: LIB3039-046-Q1-E1-D9
gctagtttagtgttagtgttcttccacccccgtaccgtctctgcctctctgcaatccacagccgaaaatgcctttcaagaggtacgttgagatcgggagggttgctcaaatcaactacggcaaggaatatggcaggctcgtcgtcatcgtcgacgtcattgaccagaacagagcacttgtcgatgcccctgatatggtgaggtcccaagtcaatttcaaaaggctttcccttaccgacatcaagattgacatcaagagggtccctaagaagaaagatcttgtcaaagccatggaggatgctgatgttaagaacaagtgggagaagagttcatggggtagaaaactcattgttaaaaagagaaaggcatccctcacatgatttg

SEQ ID NO: 8030 - DNA, 370 bp, Glycine max
  Clone ID: LIB3039-046-Q1-E1-E1
aaagagacccggaaagggtgggaaccgcttttggaaatccattgggcttggatttaagactcccagggaagccatcgaaggaacctacattgacaagaagtgccccttcactggcaatgtttccatccgtggccgtatcttggctggaacatgtcacagtgctaagatgaacaggactattattgttaggaggaattatctccattttatcaagaagtaccagaggtacgagaaaaggcactccaacattcctgctcatatatcacctgctttccgtgtgaaggaaggagatcacgttattattggtcaatgcaggccactttctaagactgtgaggttcaatgtgttgaaagtgatcccagctggatct

SEQ ID NO: 8031 - DNA, 376 bp, Glycine max
  unsure (1)..(376): unsure at all n locations
  Clone ID: LIB3039-046-Q1-E1-E11
gattatatttgagttcaaacaaatcaaagccatggccacctccaacttctctattgttctctccgtctccctagccttctttttggtgctacttaccaaggcacactcgaccgataccgtttctttcaccttcaacaagttcaacccagtccaaccaaacattatgctccaaaaagatgctagtatttcatcctctggggtgttacaactcaccaaagttggcagcaacggcgtgcccacctcgggatctctcggtcgtgccctttacgctgccccaatccagatttgggacagcgaaaccggcaatgtagccagctgggctacatcctttaaattcaacatttttcgcaccaacanatcanactcaagctgacgg

SEQ ID NO: 8032 - DNA, 392 bp, Glycine max
  unsure (1)..(392): unsure at all n locations
  Clone ID: LIB3039-046-Q1-E1-E12
gacagcatatatatcaataatctattttatactatacctacattttgataattttctttgtagttgatagccatggctacccgtggaaagcttgaggttgacattgatctcaagtccaacgcagacaagtactggcaaacccttaggaattctactgaaatattccctaaggccttcccacatgattacaaaagcattgaggttcttgagggtgatggcaagtctcctggttctatccgccacataagttatggtgaaggttcaccacttgtgaaatcatcctttgagaagattgaggctgttgatgaggaaaagaaggtagtgtcgtacactatcattgatggggaactcctcnagcactacaanacattcaaaggagacatttcagtgac

SEQ ID NO: 8033 - DNA, 349 bp, Glycine max
  Clone ID: LIB3039-046-Q1-E1-E2
ggcacaagtgagtttgttgatcgagataactagagacagtgtgatgaaaatgaaggtccttgttttcttcgttgctacaattttggtagcatggcaatgccatgcgtacgatatgttccctctccgaatgaacactggctatggtgcccgtactccggaggtgaaatgcgcaagttggaggcttgctgtggaagcacacaacatctttggctttgagaccattcctgaagagtgcctttaagcaacaaaggaatacatccatggcgaacaatatagatcagactccaaaacagttaaccaacaagcttacttttatgccagagacctcgaagtccatcccaaggacaca

SEQ ID NO: 8034 - DNA, 392 bp, Glycine max
  Clone ID: LIB3039-046-Q1-E1-E3
gacacttcaaaatcctctagtaacccttctattctctctctttcttttgtgttctaagcagctagaagcaatggagaggaaaagaagccatgcctcttccaccatgtttgcaatgcttgttggagtgatctctcagagccttgtcattcctgtagtatccaccactgttgaagatcagaagaactactacaccccagatccacatgctggaagtcccccctcaggctcacacagtagtactcctccatctcatggccatggaagctctccaccctcacatcatcacagtagtccaagtactccatcaacaccctcaggtggaaactgtggatcatcacctccacaacatcatgatccaacaacaccctcaactccatctaacacatcaaacc

SEQ ID NO: 8035 - DNA, 390 bp, Glycine max
  Clone ID: LIB3039-046-Q1-E1-E4
ggacatcaacaatttgttcacttgcaatttagaaaaggaacagacaagagcacaagcacaacacaacacaacacaacatcctccaggaacgggaatcccacgccgcttgtaactccatctcggtgtttgattctctgcttcttccttcattccccttcggaatcgatcgatccatcttcctcttccaatggcaacccctaccgacaataataacaaccctgcacaggaaaaccctaacaaaaccctagaccccaccgaaccagatccaatccctgccactgaggacgccaccgccactaagggctccgacgccaaagaccccgccgacgccgacgccgacgccgtaacttctccgccgcccgattccggaaacgacgctccgctctccga

SEQ ID NO: 8036 - DNA, 386 bp, Glycine max
  Clone ID: LIB3039-046-Q1-E1-E5
gggcagcagaagaacaagtagttgagaactaagaaggagaagcaaatggcttcctcaatgatctcttccccagctgttaccactgtcaaccgtgccggtgccggcatggttgctccattcactggcctcaagtccatggctggcttccccaccaggaagaccaacaatgacattacctccattgctagcaacggtggaagagtgcaatgcatgcaggtgtggccaccagttggcaagaagaagtttgagactctttcctacctgccagaccttgatgatgcacaattggcaaaggaagtagaataccttcttaagaagggatggattccttgcttggaattccaagttggagcacggtttcgtgtaccgtgagcacaacaggtcac

SEQ ID NO: 8037 - DNA, 416 bp, Glycine max
  Clone ID: LIB3039-046-Q1-E1-E6
acgggaggttcattgtatctgagtgtcaggtgtgtgagtgagtgaactcaattcaactcaacattcttcaatcaaatcagccatggcagcagaacccacccgccccgtaaaaatcatcgccgccgccgatgacttcggcactcctctcaaagacgccctcgtcgctcacttgcgcactctcaacatccaagtcgaagatctcggaacctcttcctactactccgccggagccgaggtcggtcgccgagtctcccaatcctcctcctccgacatccgtggcctcgtcgcctgcggcaccggcgccggcgtctccatcttcgccaacaaatatcccggcgtctacgccgccacgtgcctctccccctccgacgccgtcaacgcccgctcaatcaacaactcgaacgtcctcgccgtct

SEQ ID NO: 8038 - DNA, 384 bp, Glycine max
  Clone ID: LIB3039-046-Q1-E1-E7
ggcacaagtttgttgagatagctagaagcaataagatgaaaatgaaagtgcttgttttgtttgttgctacagttttggtagcatatgaatgccatggctcagactaccagaagttccctctccaaatgaaaactgggtttggtgggcaatacagcaatgaggtggcatgtgccagttggaggcttggcgtggaagcaaacaacgtagtcaagtggcaaactgttcctgcagcttgcggagagtacatagctgactacgttctaggagaccaatatagatcagattccaaaacagttaaccaacaagcttatttctatgctaaatccctcaaactcagcaacagagatgtctttgtcttggacgttgacgacactactctctcta

SEQ ID NO: 8039 - DNA, 340 bp, Glycine max
  Clone ID: LIB3039-046-Q1-E1-E8
ggagctccgtacgtaaattctccaccaatcaaacctgagcagtgatgattgtcatactcgctcaaatctctatagagacactaccatactcaagaataaatatacaattagttaactcttctcatacttacagagtatgctagacgcaaacatgcttctccgttacctcttccttctggggctcttctcaaccatgacaacatcgtcaacttccgcgatgtacatgttcatcgttgccagttgctcccagaccaagttcaagcagagttccacctatgagaatacagtccactcgctcatcacctctctcgtcaagtccgatgccttcggcacataaaaa

SEQ ID NO: 8040 - DNA, 381 bp, Glycine max
  Clone ID: LIB3039-046-Q1-E1-E9
ataatattattcaaaatttaaagggaaatatttatgtatgtataaataaatatatagttctcattactcttattagcacaacaatacatgttgaagccaaaagtgagaaaaaataatagtaactaataaggagtgcgtggaatgtgtgggagtaaattgttttgttagaggtttaagattttgacaaaagttatataagtaatattttaatatatcatttatctttcatattaattagattttcttttatttgtatttcttttttattttcttaaaacaaattgagatatatataaaatttcaataaacaataaacggaaaaaaatgcaaaaacaattttttgtgtgtctataatgaaaatatcaatgttagaacttaaga

SEQ ID NO: 8041 - DNA, 387 bp, Glycine max
  Clone ID: LIB3039-046-Q1-E1-F1
gctagtggcagtgaccaaactccatttctcactcgccgtcgtctcttccgtctagggtttctcctcttcacaaaaatggttgccgcaaaaaaaactaagaagacccatgagagcatcaacaacaggctcgctctcgtcatgaagagtggcaaattcaccctcggttacaagaccgttctcaaatctcttaggagctccaaagggaaattgattatcattgctaacaactgcccccctttgaggaagtcagagattgaatactatgctatgttggcaaaggttggggttcatcattacaatgggaacaatgtggatttgggcactgcatgtggcacatattacagagtgtgctgccttaacattattgatcctggtgattcggatatc

SEQ ID NO: 8042 - DNA, 396 bp, Glycine max
  Clone ID: LIB3039-046-Q1-E1-F10
ggcacaagtgagtttgttgatcgagataactagaaacagtgtgatgaaaatgaaggtccttgttttcttcgttgctacaattttggtagcatggcaatgccatgcgtacgatatgttccctctccgaatgaacactggctatggtgcccgtactccggaggtgaaatgcgcaagttggaggcttgctgtggaagcacacaacatctttggctttgagaccattcctgaagagtgcgttgaagcaacaaaggaatacatccatggcgaacaatatagatcagactccaaaacagttaaccaacaagcttacttttatgccagagacctcgaagtccatcccaaggacacatttgtgttcagtatagatggcaacgtactctctaatattccatacta

SEQ ID NO: 8043 - DNA, 419 bp, Glycine max
  unsure (1)..(419): unsure at all n locations
  Clone ID: LIB3039-046-Q1-E1-F11
aggtcaaaaaggacaaattgggatcactaatccaacacactactttttgccaaaatctcaaagtgctgcagattacaaggcagcaagtagagctctggacttcttctttggttggtattctgatccggttttctatggtgactatccggagagtatgaaatcttcagtaggttctaggctcccaaaattcacaaaagctgaatctgaaggtctaaaaaattccatagattttcttggtgtgaattactacaccacttattatgcggaacatgctgaacctgtcagtgccaaccgaaccttctacacagacatactagccagtctcagtacggaaaggaatggtctacatgttggaaccccgactgatttgaattggctctttatctttccaaagggaattcatcttcntatggcacaca

SEQ ID NO: 8044 - DNA, 370 bp, Glycine max
  Clone ID: LIB3039-046-Q1-E1-F12
gggttgaaaagcatgatgtaatggaggcatttcggcttttggaagttgcaatgcagcagtctgcaacggatcattctactggaactattgacatggatcttattactactggagtttcggcaagtgaaagaatgaggcgagaaagtctgcaacaagcaactcgtaacataatcatggagaaaatgcagattgggggaccatctatgcgcttattggagttattggaagaattgaagaaacaggatactggtagcgaagttcatcttaatgatctaaggaatgcaattgctactctggctacagaaggatttgttaccatgcacggtgacattgtaaaaagatcttgatggcacgagacagtagtgacatc

SEQ ID NO: 8045 - DNA, 341 bp, Glycine max; identical to SEQ ID NO: 8023
  Clone ID: LIB3039-046-Q1-E1-F2

SEQ ID NO: 8046 - DNA, 359 bp, Glycine max
  unsure (1)..(359): unsure at all n locations
  Clone ID: LIB3039-046-Q1-E1-F3
gggtgcaagagtttgttgtgagctataagctagtttatcgtgaggagaatatgaagttgtttgttttctttgttgctgcagtagttttggtagcatggccatgccatggcgcaggctaccaaaggttccctctccgaatgaaaactggctatggtgagcgttcttcggaggtaaaatgcgcaagttttaggcttgctgtggaagcacacaacatccgagcctttaaaaccattcctgaagagtgcgttgaaccaacanaggactacattaatggcgaacaatttagatcagactctaaaacagttaaccaacaagctttcttttatgctagtgaacgcgaagtccatcacaacgacata

SEQ ID NO: 8047 - DNA, 313 bp, Glycine max
  Clone ID: LIB3039-046-Q1-E1-F4
ggggagcaagagtgaagagcgaagagaatggctcccaagggtttaatctttttggctgtgttatgcttctcagcactgtcactgagtcgttgtcttgcggaggataatggacttgttatgaacttctacaaggaatcatgccctcaggctgaagacatcatcaaagaacaagtcaagcttctctacaagcgccacaagaacactgctttctcctggctcagaaacatcttccatgactgtgctgttcagagttgtgatgcttcactgttgctggactccacaagaaggagcttgtctgagaaggaaacagata

SEQ ID NO: 8048 - DNA, 367 bp, Glycine max
  Clone ID: LIB3039-046-Q1-E1-F5
ggcagttcaattccaatatattccattctctctgtgtatttccctacctctcccttcaagatgcagatcttcgtcaagaccctcaccggcaagaccatcacccttgaggtggaaagctctgacaccatcgacaacgtcaaggccaagatccaggacaaggaaggaatccccccggaccagcaacgtctcattttcgccggaaagcaacttgaggacggccgtacccttgctgactacaacattcagaaggagagtactcttcacctcgtcctccgtctccgtggtggcatgcagatcttcgttaagacactcaccggcaagaccataaccctagaggttgaaagctccgacaacatcgataacgtca

SEQ ID NO: 8049 - DNA, 388 bp, Glycine max
  Clone ID: LIB3039-046-Q1-E1-F6
ggcacaagtgagtttgttgatcgagataactagaaacagtgtgatgaaaatgaaggtccttgttttcttcgttgctacaattttggtagcatggcaatgccatgcgtacgatatgttccctctccgaatgaacactggctatggtgcccgtactccggaggtgaaatgcgcaagttggaggcttgctgtggaagcacacaacatctttggctttgagaccattcctgaagagtgcgttgaagcaacaaaggaatacatccatggcgaacaatatagatcagactccaaaacagttaaccaacaagcttacttttatgccagagacctcgaagtccatcccaagggaaacatttgtgttcagtatagatggcaccgtactctctaatat

SEQ ID NO: 8050 - DNA, 376 bp, Glycine max
  unsure (1)..(376): unsure at all n locations
  Clone ID: LIB3039-046-Q1-E1-F7
gagcccaaaatattttcatagcattttcagaggaaaatggcgggtacggtttcgacttgtttcttcttcgtgtttcttctttctctccttcttccttttcagatctccgctgaggaatcctcggagaaagagttcgttctcacaatggatcaaccctaacttcaacaaaacgtcaacaagcaagaatttcacctcctccaatttcaagccccaaggtgttgtcactgttagaagcttgctccggagtattagaaagctgcttctatcttgagtaatcatgattctcctattgttttggctaaagtagatgccaatgaggagaagaacaaagaccctgcatcacaatatgatgttaagggattcccancaattaata

SEQ ID NO: 8051 - DNA, 383 bp, Glycine max
  Clone ID: LIB3039-046-Q1-E1-F8
gaaggtgcaagagtttgttgtgagctataagctagtttatcgtgaggagaatatgaagttgtttgttttctttgttgctgcagtagttttggtagcatggccatgccatggcgcaggctaccaaaggttccctctccgaatgaaaactggctatggtgagcgtccttcggaggtaaaatgcgcaagttttaggcttgctgtggaagcacacaacatccgagcctttaaaaccattcctgaagagtgcgttgaaccaacaaaggactacattaatggcgaacaatttagattagactctaaaacagttaaccaacaagctttcttttatgctagtgaacgcgaagtccatcacaacgacatatttatattcggcatagataaca

SEQ ID NO: 8052 - DNA, 403 bp, Glycine max
  Clone ID: LIB3039-046-Q1-E1-F9
ggagtttgttgatcgagataactagaaacagtgtgatgaaaatgaaggtccttgttttcttcgttgctacaattttggtagcatggcaatgccatgcgtacgatatgttccctctccgaatgaacactggctatggtgcccgtactccggaggtgaaatgcgcaagttggaggcttgctgtggaagcacacaacatctttggctttgagaccattcctgaagagtgcgttgaagcaacaaaggaatacatccatggcgaacaatatagatcagactccaaaacagttaaccaacaagcttacttttatgccagagacctcgaagtccatcccaaggacacatttgtgttcagtatagatggcaccgtactctctaatatttcatactacaaaaaacatggata

SEQ ID NO: 8053 - DNA, 215 bp, Glycine max
  unsure (1)..(215): unsure at all n locations
  Clone ID: LIB3039-046-Q1-E1-G1
gacagctattcctcttaaccttgctactgattttccacactgcataccttaggtcttccgaattcgaagttaatttgcaagatggctaaggaaaaggctcagatcaacattgtggtggttggtcatgtggaccctgangaggcaaccaccattaacgagctgaagaagcctggtgttgaagaaagaagctccagggcatgccatatgagggcatg

SEQ ID NO: 8054 - DNA, 354 bp, Glycine max
  Clone ID: LIB3039-046-Q1-E1-G10
gactcaagcacaacatctctatcgagtaaattaactatgaagcctaccctactattatccctttccttcctgcctctctttgctttcctggctctttcagaagatgttgaacaagttgtggacataagtggcaaccccattttcccaggtggcacatattacattatgccatcaacttggggcgctgccggtggtggattgaaactaggccggacaggaaactcaaactgcccagttactgttttgcaagattactcagaaatcttccgtggcacaccagtcaaattcagcatacctgggataagccctggaatcatctttacaggtactccacttgaaatcgagttcgcagag

SEQ ID NO: 8055 - DNA, 351 bp, Glycine max
  Clone ID: LIB3039-046-Q1-E1-G11
ggagtgagcgtcaacaatggcttcttcgtcttcagcgtcgggttcgggttcagcttcggcggtgacggagcgaagaggaataccaggggctcagttcgtggaggatgtccaaacttaccttactcaatcgggtctcgatgttggttcagccctcgcttttctccaagaaagacttcagcaatacaaggtagtagaaatgaagcttcttgctcagcaaagagatcttcaggcaaagataccagatattgaaaagtgcctagatgttgttgctacattgaaagctaagaacggtactggtgaggaacttattgctgattttgaagtatcagaaggcatctattcacaagcacg

SEQ ID NO: 8056 - DNA, 362 bp, Glycine max
  Clone ID: LIB3039-046-Q1-E1-G12
ggagtagcgatggagaagaagaagggtgagctaaagtcaattttccttcctttcctttccactagtcacataatcccgctagtggacatggccagactcttcgccttgcacgacgtcgacgtcaccatcatcaccaccgcacataacgccaccgttttccaaaagtccatcgatttagatgcgagtcgcggtcgccccatcagaacgcacgttgtcaacttctccgccgcacaagtgggtctccccgttgggatcgaagccttcaacgtcgatacgcctcgggaaatgacccccagaatctacatgggcctatcccttctccaacaagtcttcgaaaaactcttccatgacttgcaaccgga

SEQ ID NO: 8057 - DNA, 389 bp, Glycine max
  unsure (1)..(389): unsure at all n locations
  Clone ID: LIB3039-046-Q1-E1-G2
ggttcatgttagcataggaggttgagtagttcttcatcatagtcttaaacattaaaccttagcaaaactcaacaatgctagacatcaaaggctacctcgtactcttcttcctatggttcatatcaaccattctgatacgttccatcttcaagaaaccacagcgtctaagactcccaccgggtcctccaatttcaatacccttgctgggacacgcgccatatctccgttcactgctccaccaagcattgtacaagctatcactgcgctatggacccttgatccacgtcatgatcggttcgaagcacgtggtggtggcgtcgtcggcggagacggccangcagattctcaaaaacttnggaggaggcattctgcaaccgtcccttaatgat

SEQ ID NO: 8058 - DNA, 386 bp, Glycine max
  Clone ID: LIB3039-046-Q1-E1-G3
gaaggtgcaaaagtttgttgtgagctataacctactttatcgtgaggagaatatgaagttgtttgttttctttgttgctgcagtagttttggtaccatggccatgccatggcgcatgctaccaaaggttccctctccgaatgaaaactggctatggtgagcgttcttcggacgtaaaatgcgcaagttttatgcttgctgtggaagcacacaacatccgagcctttataaccattcctgaagagtgcgttgaaccaacacaggactacattaatggcgatcaatttagattagactctaaaacagttaaccaacaagctttcttttatgctagtgaacgcgatgtccatcacaacgacatatttatattcagcatatataacaccg

SEQ ID NO: 8059 - DNA, 396 bp, Glycine max
  Clone ID: LIB3039-046-Q1-E1-G4
gactcaccacttcaaaacactcataacacaaagcacaaagcaaagctcatccttgagttaaaaaatggcagcagcttcttccatggctctctcatccccatccttggctggcaaggccgtgaagctgggcccatcagccccagaagtgggaagggtgagcatgatgaagaccgtcaccaagcaggtctcctcaggaagcccatggtacggtccagaccgagtcaagtacttgggcccattctctggcgagcccccgtcctacctaaccggtgagttcccaggcgactacggctgggacactgctgggctttccgcagacccagaaacctttcgcaaagaaccgtgaactcgaagtgatccactccaggtgggccatgctcggagccttgggctgcg

SEQ ID NO: 8060 - DNA, 390 bp, Glycine max
  Clone ID: LIB3039-046-Q1-E1-G5
gagggcgaggaagccacatagagacacaatacagagtgagttgttgctccttcgccacaactctctgccaacatgggtatctccagagattctatgcacaagaggcgtgccactggtggcaagaagaaggcctggaggaaaaagagaaagtatgagcttggtcgccagcctgctaacactaagctgtcaagcaacaagacagtcaggaggatccgtgttagaggtggaaatgtgaaatggagggcattgagattggatactggaaattactcctggggaagtgaagctgtaactcgcaagactcgtgtactagatgtggtttacaatgcctcaaacaatgagcttgtgcgtactcagactcttgtcaaaagtgctatcgttcaggttgat

SEQ ID NO: 8061 - DNA, 388 bp, Glycine max
  unsure (1)..(388): unsure at all n locations
  Clone ID: LIB3039-046-Q1-E1-G6
ggcagttcaattccaatatattccattctctctgtgtatttccctacctctcccttcaagatgcagatcttcgtcaagaccctcaccggcaagaccatcacccttgaggtggaaagctctgacaccatcgacaacgtcaaggccaagatccaggacaaggaaggaatccccccggaccagcaacgtctcattttcgccggaaagcaacttgaggacggccgtacccttgctgactacaacattcagaaggagagtactcttcacctcgtcctccgtctccgtggtggcatgcagatcttcgttaagacactcaccggcaagaccatanacctagaggttgaaagctccgacacaatcgataacgtcaaagccaagatccaggacaagg

SEQ ID NO: 8062 - DNA, 384 bp, Glycine max
  unsure (1)..(384): unsure at all n locations
  Clone ID: LIB3039-046-Q1-E1-G7
agtcattgacttctccaacatgtcaagcgacgccgtttgggtcctcttccacctcgccttcttctcccaatgccttccctccgcctgggcccactcggcgatcctcctcccgggtcaactcgcccgtgactcaccgcagagctgccccgcccctgaccccaacctctactacaagccagtcatcggaatcgtcagccatcccggcgactgcgcctccggccgcctcagcaacgccaccggcgcctcctacatcgccgcctcctatgtcaaattcgttgaggccgccggcgcccgtgtcgttcccctcatctataccgagcctccggagaagcttctcangaagctcgaattggtaaatggggttctcttcactggtggatgggc

SEQ ID NO: 8063 - DNA, 382 bp, Glycine max
  Clone ID: LIB3039-046-Q1-E1-G8
ggcattctttcttcactttcttcccttcttcaaccccaactcatgcatgtccctctctatcttctcccaatgaaatgaaccatcaaaaaacccaccaccccaattgcaccaccatcaaccaccatgtcctcctagccaccaaagtccgcaaacccaaaaaccctcatagagttagctagaaacaccccaaaagattcattttgttttaaagcgcaacttatggcatccattgccaccttcttcaacaagttcctctacttctttatcctcttagtccacctcggctgcttcatcttcaccaccgccgggaaacaatcgccgcccgtcaagaaacgcaaaacctcacctttatcccaaccctcctccccttcccacaccaaat

SEQ ID NO: 8064 - DNA, 372 bp, Glycine max
  unsure (1)..(372): unsure at all n locations
  Clone ID: LIB3039-046-Q1-E1-H1
gatccataaccatggcgtctaactctgcttccgctctttacttccttttatgcctatcgcccatcactttgcttctttctgcgtttcgtgctcaagctcaatctcatgctccagctcccactttcaagtactgtgaaaagaatgcagactatgctgtgaaggtgagtggagtggaaatattgcctgaccccgtggagagaggagtgccattcacctttaagatcccagcttatactcctgaaccaattcaaagcggggacttgttatatgaaatttcttatgctggaatagaagcacaacctgctacatttctccatgatctctgtgaggaangcacatgcccagtacctgcaggcaactttgtgctcgttc

SEQ ID NO: 8065 - DNA, 319 bp, Glycine max
  Clone ID: LIB3039-046-Q1-E1-H10
gactcaccacttcaaaacactcataacacaaagcacagagcatagctcatccttgagttaaaaaaatggtagcagcttcttccatggctctctcatccccatccttggctggcaaggccgtgaagctggggccatcagccccagaagtgggaagggtgagcatgaagaagatcgtcaccaagcaggtctcctcaggaagcccatggtacggcccagaccgagtcaagtacttgggcccattctctggcgagcccacgtcctacctaaccggtgagttcccaggcgactacagctgggacactgctgggctttccgcaga

SEQ ID NO: 8066 - DNA, 396 bp, Glycine max
  unsure (1)..(396): unsure at all n locations
  Clone ID: LIB3039-046-Q1-E1-H11
ggcacaagtgagtttgttgatcgagataactagaaacagtgtgatgaaaatgaaggtccttgttttcttcgttgctacaattttggtagcatggcaatgccatgcgtacgatatgttccctctccgaatgaacactggctatggtgcccgtactccggaggtgaaatgcgcaagttggaggcttgctgtggaagcacacaacatctttggctttgagaccattcctgaagagtgcgttgaagcaacaaaggaatacatccatgacgaacaatatagatcagactccanaacagttaaccaacaagcttacttttatgccagagacctcgaagtcaatcncaaggacacatttgtgttcagtatagatggcaacgtactctctaataatcatactac

SEQ ID NO: 8067 - DNA, 343 bp, Glycine max
  Clone ID: LIB3039-046-Q1-E1-H12
gagggaaggggatcgcatttcatagcactcaccctcattaccaacacgaaagcataggcaaaaccttttttcgaagtctctgattttcctaatggctccggcaaaggcagagaagaagccggcggagaagaagccagcggcggagaaggcaccggcggagaagaagccgaaggcggagaagaagatctcgaaggaaggagggagcgagaagaagaagaagcgcacgaagaagagcgtggagacctacaagatctacatcttcaaggtcctcaagcaggttcatcccgacattggtatttccagcaaggccatgggcatcatgaacagcttcatcaacgacatc

SEQ ID NO: 8068 - DNA, 393 bp, Glycine max
  unsure (1)..(393): unsure at all n locations
  Clone ID: LIB3039-046-Q1-E1-H2
cttctcatacccttttattcattccattcgtttctagggttttcttttctttgccgagaaaatgagagagtgcatttcgatccacattggccaggccggtatccaggttggaaacgcctgctgggaactctattgccttgaacacggcattcagcccgatggacagatgccgagtgacaagaccgttggcggaggagacgacgccttcaacacatttttcagcgagaccggcgccggaaagcacgtgccccgcgccgtcttcgtggatcttgaacccaccgtgatcgacgaagtccgaaccggtgcgtaccggcagctcttccacccggagcagctgatcagccgcaaggaagacgccgccaacaacttcgcgcgttggcactacnacatcgg

SEQ ID NO: 8069 - DNA, 350 bp, Glycine max
  Clone ID: LIB3039-046-Q1-E1-H3
gacacaccgtttgttctattcttaactcaacttctgctacccactctcttcttccaagtccaaccacgcttttctctacagtcatgggcaaggtcaagatcggaatcaacggatttggaagaattggccgtttggttgccagagtcgctctgcaaagagacgatgtggagctcgttgccgttaacgaccctttcattaccaccgattacatgacatacatgtttaaatacgacagtgttcacggacactggaagcatcacgatgtcaccgttaaggacgagaagacccttctcttcggtgacaagccagtcactgtttttggacacaggaaccctgaagagatccatggg

SEQ ID NO: 8070 - DNA, 396 bp, Glycine max
  unsure (1)..(396): unsure at all n locations
  Clone ID: LIB3039-046-Q1-E1-H4
gcacaagtttgttgagatagctagaagcaataagatgaaaatgaaagtgcttgttttgtttgttgctacagttttggtagcatatgaatgccatggctcagactaccagaagttccctctccaaatgaaaactgggtttggtgggcaatacagcaatgaggtggcatgtgccagttggaggcttggcgtggaagcaaacaacgtagtcaagtggcaaactgttcctgcagcttgcggagagtacatagctgactacgttctaggagaccaatatagatcagattccaaaacagttaaccaacaagcttatttctatgctaaatccctcaaactctacaacanagatgtctttgtcctggacgttgacgacactactctctctaatctccagtattt

SEQ ID NO: 8071 - DNA, 387 bp, Glycine max
  Clone ID: LIB3039-046-Q1-E1-H5
gaaggtgcaagagtttgttgtgagctataagctagtttatcgtgaggagaatatgaagttgtttgttttctttgttgctgcagtagttttggtagcatggccatgccatggcgcaggctaccaaaggttccctctccgaatgaaaactggctatggtgagcgttcttcggaggtaaaatgcgcaagttttaggcttgctgtggaagcacacaacatccgagcctttaaaaccattcctgaagagtgcgttgaaccaacaaaggactacattaatggcgaacaatttagatcagactctaaaacagttaaccaacaagctttcttttatgctagtgaacgcgaagtccatcacaccgacatatttatattcggcatagataacaccgt

SEQ ID NO: 8072 - DNA, 385 bp, Glycine max
  unsure (1)..(385): unsure at all n locations
  Clone ID: LIB3039-046-Q1-E1-H6
gggggaggaagaataattgtgaggcgagggtaaggtcgcgttgtgttgcgtcgtgtcgtgcgctgttcctctgtttctcgtttttgtgttcagaccgaaccctagctccgcatcgcaaccatgtcgaccaagcaaggtggaaaagctaagcctttgaagaaacccaagtctgataagaaggattacgacgagattgatgtggctaacattcagaagaaaaaggaagaggagaaggcgctaaaggagttgaaagccaaggcgcaacagaagggaagctttggaggttctgggctcaagaaaagtggaaagaaataagggctctttatcatgattgtatgcattcaatattgacccctgtanatacagttgctaccatgataacttc

SEQ ID NO: 8073 - DNA, 395 bp, Glycine max
  Clone ID: LIB3039-046-Q1-E1-H7
ggcacaagtgagtttgttgatcgagataactagaaacagtgtgatgaaaatgaaggtccttgttttcttcgttgctacaattttggtagcatggcaatgccatgcgtacgatatgttccctctccgaatgaacactggctatggtgcccgtactccggaggtgaaatgcgcaagttggaggcttgctgtggaagcacacaacatctttggctttgagaccattcctgaagagtgcgttgaagcaacaaaggaatacatccatggcgaacaatatagatcagactccaaaacagttaaccaacaagcttacttttatgccagagacctcgaagtccatcccaaagacacatttgggttcagtataaatggcaccgtactctctaatattccatact

SEQ ID NO: 8074 - DNA, 385 bp, Glycine max
  Clone ID: LIB3039-046-Q1-E1-H8
gatccaaattcaagttcgcaccaaattttcctcccaaaatgtcaggccgtggaaaaggtgggaagggtttgggaaagggaggagctaagaggcacagaaaggttcttcgtgacaacattcaaggaatcacgaaacctgcgattcgtaggttagcgagaagaggtggcgtgaagaggatcagtggtttgatttacgaggaaaccagaggagttctgaagatattcttggagaacgtgattcgcgatgctgtaacctacactgagcacgctaggaggaaaactgttactgctatggatgtcgtttatgctctcaagagacagggaaagaccctctatgggctttggaggctaaagaatagaatctttaggtttaatgactgtgttgc

SEQ ID NO: 8075 - DNA, 351 bp, Glycine max
  Clone ID: LIB3039-046-Q1-E1-H9
gatagggtttttgtcgttgcgactaagagttgctgcttcttccgccactcagcacttcgctccctctgtgcttcaccaaccatggccgaaatcgaagctaccgttccagatccctctcaaatcgacgtcaaacttttcaaccgctggagcttcgacgacgttgaggttactgatatgtctctggctgattacattggagtgtccccgtcaaagcatgctacatatgttcctcacactgctggtaggtactcagtgaagaggttcaggaaggcgcagtgccccattgttgagagactcaccaactctctcatgatgcacggaaggaacaatggaaagaagctcatggctgtc

SEQ ID NO: 8076 - DNA, 322 bp, Glycine max
  unsure (1)..(322): unsure at all n locations
  Clone ID: LIB3039-047-Q1-E1-A10
ggcacaagtgagtttgttgatcgagataactagaaacagtgtgatgaaaatgaaggtccttgttttcttcgttgctacaattttggtagcatggcaatgccatgcgtacgatatgttccctctccgaatgaacactggctatggtgcccgtactccggaggtgaaatgcgcaagttggaggcttgctgtggaagcacacaacatctttggctttgagaccattcctgaagagtgcgttgaagcaacaaaggaatacatccatggcgaacaatatagatcagactccaatacagttanacaacaagcttacttttatggcaga

SEQ ID NO: 8077 - DNA, 368 bp, Glycine max
  Clone ID: LIB3039-047-Q1-E1-A12
aaaacgacagaagggaaaaaaacccggaaagggtgggaaccgcttttggaaatcaattgggcttggatttaagactcccagggaagccatcgaaggaacctacattgacaagaagtgcccttcactggcaatgtttccatccgtggccgtatcttggctggaacatgtcacagtgctaagatgaacaagactattattgttaagaggaattatctccattttatcaagaagtaccagaggtacgagaaaaggcactccaacattcctgctcatatatcacctgctttccgtgtgaaggaaggagatcacgttattattggtcaatgcaagccaattttctaagactgtgaaggtcaatgtgttgaaag

SEQ ID NO: 8078 - DNA, 392 bp, Glycine max
  Clone ID: LIB3039-047-Q1-E1-A2
gcacaactgagtttgatgatcgagatatctatgagcagtgtgatgaaaatgaaagtccttggattcttcgtgtgctacaactttggtagcattgcaatgccatgcgtacgatatgttccctctccgaatgaacactggctatggatcccgtactccggacgtgaaatgcgcatgttggacgcatgctgtgggatcacacaacatctttggctttgagatcattcttgaacagttcgttgaagctgcattggaatacatccatggcgaacactatagatcagactccaatacagttcaccaacaggcttacttttatgccacatacctcgaagtcgatcccaaggacacatttgtgttcagtatatatggcaccgtactcgctaatattccat

SEQ ID NO: 8079 - DNA, 402 bp, Glycine max
  unsure (1)..(402): unsure at all n locations
  Clone ID: LIB3039-047-Q1-E1-A3
agggggcaaaaaagaaaaatattaaataaaaacggcacaaatttccccaaaattaagggcaatttcaatccccaagccctgaacgttcgcgtggaagggtccggggaaaagtaacttgtcctggcccacggcttcggcacggaacaatccgcgtgggagcgcgtgctcccttacttcaaccgcaactacagcgtcattctctacgacctcgtctgcgccggcagcgtcaaccccgaccacttcgactaccgccgttataccaccctcgacgcctacgtcgacgacctcctcaacatcctcgacgccctccgcgtcncccgctgcgcctacgtcggccactccatctccgccatgatcggcatgctcgcctccatccgccgcccggacctcttctccaaactc

SEQ ID NO: 8080 - DNA, 401 bp, Glycine max
  Clone ID: LIB3039-047-Q1-E1-A4
ggcgcacccagagaggaagcttagagagagagagagagagagagagagagaggagagagtattggcgcttcatcaagatgggtatttctagggattccatgcacaagaggcgtgccactggtggcaagaaaaaggcttggagaaagaagagaaagtatgagcttgggcgtcaggcagcaaacaccaagttatcaagcaacaagacaatcaggaggattcgtgttagaggtggcaatgttaaatggagggcattgaagctggatactggcaattactcatggggtagtgaagcagttactcgcaagactcgtattctagatgttgtttacaatgcctcaaacaacgagcttgtgcgaactcagaccctggtcaagagtgctattgtccaggttgatgctgct

SEQ ID NO: 8081 - DNA, 394 bp, Glycine max
  Clone ID: LIB3039-047-Q1-E1-A5
ggcacaagtgagtttgttgatcgagataactagaaacagtgtgatgaaaacgaaggtccttgttttcttcgttgctacaattttggtagcatggcaatgccatgcgtacgatatgttccctctccgaatgaacactggctatggtgcccgtactccggaggtgaaatgcgcaagttggaggcttgctgtggaagcacacaacatctttggctttgagaccattcctgaagagtgcgttgaagcaacaaaggaatacatccatggcgaacaatatagatcagactccaaaacagttaaccaacaagcttacttttatgccagagacctcgaagtccatcccaaggacacatttgtgttcagtatagattgcaccgtactctccaatattccatac

SEQ ID NO: 8082 - DNA, 394 bp, Glycine max
  Clone ID: LIB3039-047-Q1-E1-A6
gaaggtgcaagagtttgttgtgagctataagctagtttatcgtgaggagaatatgaagttgtttgttttctttgttgctgcagtagttttggtagcatggccatgccatggcgcaggctaccaaaggttccctctccgaatgaaaactggctatggtgagcgttcttcggaggtaaaatgcgcaagttttaggcttgctgtggaagcacacaacatccgagcctttaaaaccattcctgaagagtgcgttgaaccaacaaaggactacattaatggcgaacaatttagatcagactctaaaacagttaaccaacaagctttcttttatgctagtgaacgcgaagtccatcacaacgacatatttatattcggcatagataacaccgtactctct

SEQ ID NO: 8083 - DNA, 400 bp, Glycine max
  Clone ID: LIB3039-047-Q1-E1-A7
gagtagcagagaaaagaatagggttttgctatggagaagctagaagcagagaacgttctggtccttccctctgagcaacccaacaacaataggccaaagccaaaaccaaagcgtttcgtgaaaaaccaaatcccagactcaatccttaacaaccctcttctgagcgccgcaatctctgtgctcccttccaactacaacttcgaggtccacaagtgcgtctggcgcgtgctctccacgggagcaaaacgcgtggctctccagttcccggagggtctcctcatgtactctctcccactctccgacatcttcaccaccttcgccggcgtcacccactgcttcgtcctcgccgacgtcacctacggcgcttgctgcgtcgacgaccttgctgcctccgccctcg

SEQ ID NO: 8084 - DNA, 376 bp, Glycine max
  unsure (1)..(376): unsure at all n locations
  Clone ID: LIB3039-047-Q1-E1-A8
agcacaagagttacattatctataaatgtgagaagtaatcaaaataatatctttacaaaaaaaaggcaactttccaaggaacaagagaagcatttttgaaggcctccacaacaacagtccagtcactttcaaaccaaaatttactccaatttctatccacaacaaccaaggaagacacccttatggtctctaaagatagcaccactgccggaatgatccggggagccccttgaggatccatccgttttgcattttatggtatggcaagccggatgggaccaaatcacgcanacaaattgcaaagccttcgactattttgtactacttgttgtatgtcaaaaaaaaaatccatcacaacaaaaaaaagcggccgctc

SEQ ID NO: 8085 - DNA, 368 bp, Glycine max
  Clone ID: LIB3039-047-Q1-E1-A9
gaaggtgcaagagtttgttgtgagctataagctagtttatcgtgaggagaatatgaagttgtttgttttctttgttgctgcagtagttttggtagcatggccatgccatggcgcaggctaccaaaggttccctctccgaatgaaaactggctatggtgagcgttcttcggaggtaaaatgcgcaagttttaggcttgctgtggaagcacacaacatccgagcctttaaaaccattcctgaagagtgcgttgaaccaacaaaggactacattaatggcgaacaatttagatcagactctaaaacagttaaccaacaagctttcttttatgctagtgaacgcgaagtccatcacaacgacatatttatat

SEQ ID NO: 8086 - DNA, 396 bp, Glycine max
  unsure (1)..(396): unsure at all n locations
  Clone ID: LIB3039-047-Q1-E1-B1
gaaagggcaagaatttggtgtgagctaaaaaccaatttaacctgaagggaataagaagttggttggtttccttggtgccggaataattttgggaacaagggcaagccaaggggcaaggtaacaaaaggtccctccccgaatgaaaactgggtatggggagccttcttcggaagtaaaatgcccaagtttttaagcttgctgtggaagcacacaacatccgagccctttaaaaccattcctgaagagtgcgttgaaccaacanaggactacattaatggcgaacaatttagatcagactctaaaacagttaaccaacaagctttcttttatgctagtgaacgcgaagtccatcacaacgacatatttatattcggcatagataacaccgtactctct

SEQ ID NO: 8087 - DNA, 367 bp, Glycine max
  unsure (1)..(367): unsure at all n locations
  Clone ID: LIB3039-047-Q1-E1-B10
ggaggaagccacatagagacacaatacagagtgagttgttgctccttcgccacaactctctgccaacatgggtatctccagagattctatgcacaagaggcgtgccactggtggcaagaagaaggcctggtggaaaaagagaaagtatgagcttggtcgccagcctgctaacactaagctgtcaagcaacaagacagtcaggaggatccgtgttagaggtggaaatgtgaaatggagggcattgagattggatactggaaattactcctgnggaagtgaagctgtaactcgcaagactcgtgtactagatgtggtttacaatgcctcaaacaatgagcttgtgcgtactcagactcttgtcaaaagt

SEQ ID NO: 8088 - DNA, 391 bp, Glycine max
  Clone ID: LIB3039-047-Q1-E1-B11
gaaagaagggcacaaccaacataaggcatggccttatcctctccctccctcttttcagctgtaaacgccacatattcagtaccccatttccatgcactgccactttcactttcttcttcttactttccaattaatgttagaccctccacccatcatgtccttgtctctgatcataatcacaaatggagaacaaaagtttcatttttcacttccttcttgaagcagaaaggtaaagatgccaagatcatcaaggaagaactccttgaggccattgcaccacttgatcgaggggctgatgccactccccaagaccagcaaacagttgatcagattgcgcgcgaacttgaagcagttaactccaataaggagcccctcaaatctaacctactcg

SEQ ID NO: 8089 - DNA, 368 bp, Glycine max
  Clone ID: LIB3039-047-Q1-E1-B12
gacacaccgtttgttctattcttaactcaacttctgctacccactctcttcttccaagtccaaccacgcttttctctacagtcatgggcaaggtcaagatcggaatcaacggatttggaagaattggccgtttggttgccagagtcgctctgcaaagagacgatgtggagctcgttgccgttaacgaccctttcattaccaccgattacatgacatacatgtttaaatacgacagtgttcacggacactggaagcatcacgatgtcaccgttaaggacgagaagacccttctcttcggtgacaagccagtcactgtttttggacacaggaaccctgaagagatcccatgggggtcaactggagctgat

SEQ ID NO: 8090 - DNA, 410 bp, Glycine max
  Clone ID: LIB3039-047-Q1-E1-B2
cgatacaaggggacagtgcaagagtttgttgtgagctataatctagtttatcgtgaggagaatatgaagttgtttgttttctttgttgctgcagtagttttggtatcatggtcatgccatggcgcatgctaccaaaggttccctctccgcatgacaactggctatggtgagcgttcttcggatgtaacatgcgcatgttttacgcgtgctgtggaaccacacaacatccgagcctttagaaccattcctgaaaagtgcgttgaaccaccaacggactaaattcatggtgaacaatttagatcagactctacaacagttaagcaacaagctttcttttatgctagtgaacgcgaagtccatcacaacgacatatttatattctgcatagataacaccgtactctctaatat

SEQ ID NO: 8091 - DNA, 398 bp, Glycine max
  unsure (1)..(398): unsure at all n locations
  Clone ID: LIB3039-047-Q1-E1-B3
gaaagtgcaagagtttgttgtgagctataagctagtttatcgtgaggagaatatgaagttgtttggtttctttggtgctgcaataattttggtaacatggccatgccatggcgcaagctaccaaaggttccctctccgaatgaaaactggctatggtgagcgttcttcggagggaaaatgcgcaagttttaagcttgctgtggaagcacacaacatccgagcctttaaaaccattcctgaagagtgcgttgaaccaacanaggactacattaatggcgaacaatttagatcagactctaaaacagttaaccaacaagctttcttttatgctagtgaacgcgaagtccatcacaacgacatatttatattcggcatagataacaccgtactctctaata

SEQ ID NO: 8092 - DNA, 393 bp, Glycine max
  unsure (1)..(393): unsure at all n locations
  Clone ID: LIB3039-047-Q1-E1-B4
gaacgtgcaagagtttgttgtgagctataagctagtttatcgtgaggagaatatgaagttgtttgttttctttgttgctgcagtagttttggtagcatggccatgccatggcgcatgctaccaaaggttccctctccgaatgaaaactggctatggtgagcgttcttcggaggtaaaatgcgcaagttttaggcttgctgtggaagcacacaacatccgagcctttaaaaccattcctgaagagtgcgttgaaccaacanaggactacattaatggcgaacaattagatcagactctaaaacagttaaccaacaagctttcttttatgctagtgaacgcgaagtccatcacaacgacatatttatattcggcatagataacaccgtactctct

SEQ ID NO: 8093 - DNA, 382 bp, Glycine max
  Clone ID: LIB3039-047-Q1-E1-B5
gactttcttaatccttaaaccttaaatgttaaaacccattactagtatactgcagcaccgttcgttcattgaaaccacaaactccaaacagagatggctttgagacatcgccgccttacgaagcaactctccaagtttctaactcccgttctcaacgcaggtaactgctgtcagcaatctagcaaagctttaaacttagtggctttgtctataatgcatatgccttctgctcagagtccaattgctaattggactcaagtgagaggatttcgtgaatacaggatctcaacaaagtctgatgaattatgtgaacctgcaactgaaattgatcttttgtctttcattaaggcttcactggatgagtttgaaggcacccatcatt

SEQ ID NO: 8094 - DNA, 353 bp, Glycine max
  Clone ID: LIB3039-047-Q1-E1-B6
ggtgcacaagtgagtttgttgatcgagataactagaaacagtgtgatgaaaatgaaggtccttgttttcttcgttgctacaattttggtagcatggcaatgccatgcgtacgatatgttccctctccgaatgaacactggctatggtgcccgtactccggaggtgaaatgcgcaagttggaggcttgctgtggaagcacacaacatctttggctttgagaccattcctgaagagtgcgttgaagcaacaaaggaatacatccatggcgaacaatatagattagactccaaaacagttaaccaacaagcttacttttatgccagagacctcgaagtccatcccaaagacacatt

SEQ ID NO: 8095 - DNA, 386 bp, Glycine max
  Clone ID: LIB3039-047-Q1-E1-B7
gcagagattatggggtcttgctatggtgaaagtgcagataacatgcaagtgatagctgctgataaggaccacatatggagcagcaagaaagtggaagcagatgagggtctgaatctgaacactgtggggtgcctcagagggagattactggctgagagacaggcttcaagggtggccaagaaggaagctgaatcaatggggaacaagttggttgagttggaaaaattgcttagagaagagatcagattaagagataaagctgaaagaaggcttaaacttttaaagaagaaggttggatctttcagcatgccctccaagtcatggcaattggagcattctgattcgtcggagaaatgtgaaaattcttgtggatcatcctcaattag

SEQ ID NO: 8096 - DNA, 351 bp, Glycine max
  Clone ID: LIB3039-047-Q1-E1-B8
gatactttccactttcactttcaaacatcacaaacactttttaacgttgtttgattttggtgcaatctttacttcacaacttcctcgtacttctgagaatcatcatcaaaaaccccaaactcatgatcatgatgatgatgaataggttccttccactctttgtgttcgcattgttattcatgtggtcggttcacgcagacaatgctcctgccccttcacccaagtcatcaccctcgtcgccgacggccaaaccaccctctccggcgacccatccggcgcctcctgcaaagtctccgactttatcaccgcctccacaatctccggcagtttctccatctggggtcacccgcc

SEQ ID NO: 8097 - DNA, 372 bp, Glycine max
  Clone ID: LIB3039-047-Q1-E1-C1
aggggcacaagttagtttggtgatccagataacaaaaaaatgtatgaaataaggcctgtttctcctgcaaaatttggacaagaatgcaagctaagaaagttcctccccaatgacacggctaggggccgtacccggaagtaaaatgccaattggaaggctgctgtggaagcacacaacatctttgggctttgaaacattcctgaagagtgcgttgaagcaacaaaggaatacatccatggcgaacaatatagatcagactccaaaacagttaaccaacaagcttacttttatgccagagacctcgaagtccatcccaaggacacattttgtgtcagtatagatggcaccgtactctctaatattccatactac

SEQ ID NO: 8098 - DNA, 367 bp, Glycine max; identical to SEQ ID NO: 7990
  Clone ID: LIB3039-047-Q1-E1-C10

SEQ ID NO: 8099 - DNA, 315 bp, Glycine max
  Clone ID: LIB3039-047-Q1-E1-C11
accactcatacgtgcagatgagaagaggacaccacgtggcacaactttgctcacagagccatcagcatcacgatgtcgatgaaaatgccagcattgattgttgctacagttttggtatcatatgaaggtcaaggctcacactaacagtgattcacacgccatgtgtaaatcggcttcggcggccactacatcagtgatgtggcatgtgccagttgtcggcttcgcgtaggaacaatcagcgtaatctattggaacactgttcctgcagcttgctgatagtacatatctaactacgtccgagtataccaatataga

SEQ ID NO: 8100 - DNA, 358 bp, Glycine max
  Clone ID: LIB3039-047-Q1-E1-C12
ggcacaagtgagtttgttgatcgagataactagaaacagtgtgatgaaaatgaaggtccttgttttcttcgttgctacaattttggtagcatggcaatgccatgcgtacgatatgttccctctccgaatgaacactggatatggtgcccgtactccggaggtgaaatgcgcaagttggaggcttgctgtggaagcacacaacatctttggctttgagaccattcctgaagagtgcgttgaagcaacaaaggaatacatccatggcgaacaatatatatcagactccaaaacagttaaccaacaagcttacttttatgccagagacctcgatgtccatcccaacgacacatttgtgttc

SEQ ID NO: 8101 - DNA, 357 bp, Glycine max
  Clone ID: LIB3039-047-Q1-E1-C2
ggcacaagtgagtttgttgatcgagataactagaaacagtgtgatgaaaatgaacggccctgttttcttcgttgctacaattttggtagcatgggaatgccatgcgtacgatatgttccctctccgaatgaacactggctatggtgcccgtactccggaggtgaaatgcgcatgttggaggcttgctgtggaagcacacaacatctttggctttgagaccattcctgaagagtgcgttgaagcaacaaaggaatacatccatggcgaacaatatagatcagactcaaaacagttaaccaacaagcttacttttatgccagagacctcgaagttcatcccaaggacacatttgtgttc

SEQ ID NO: 8102 - DNA, 352 bp, Glycine max
  Clone ID: LIB3039-047-Q1-E1-C5
ggcacacgtgagtttgttgatcgagataacgagaaacagtgtgatgaaaatgaaggtccttgttttcgtccttgctggaagtttggtagcatggcaatgcgatgcgtacgatgtgttccctctccgaatgaacactggctatggtgcccgtactccggaggtgaaatgcgcaagttggaggcctgctgtggaagcacacaacatcgttgggtttgaaaccattcctgaaaagtttcttgaaacatccgcatgaatacatccatggggaacaatatggatcacactctaggtcagtttaccaacaagcttacctttaagccagagaccgtcgaaatccatcccaagggcccat

SEQ ID NO: 8103 - DNA, 383 bp, Glycine max
  Clone ID: LIB3039-047-Q1-E1-C6
gaataaaacctgctttctatttttctcaacctaaaatcccatccaccaaccttatgatgatgtcttcactctctgtttcgcgccacaaccacctcttctcgggccctctcccggcccggcccaagcccaagcccagcttttcctcttccaggatccgaatgtccctccaagaaaacggcccctccatcgccgtcgtgggcgtcaccggcgccgtcggccaggagttcctctccgtcctctccgaccgcgacttcccctacagctccatcaaaatgctcgcgtccaagcgctccgctgagcgccgcatcacctttgaggacagggactacgtcgtggaggagctgacggcggagagcttcgatggcgtcgacatcgcgctcttc

SEQ ID NO: 8104 - DNA, 382 bp, Glycine max
  Clone ID: LIB3039-047-Q1-E1-C7
aaagagacctggaaaaggtgggaaccgcttttggaagtccattgggcttggatttaagactcccagggaagccatcgaaggaacctatattgacaagaagtgccccttcactggcaatgtttccatccgtggccgtatcttggctggaacatgtcacagtgctaagatgaacaggactattattgttagaaggaattatctccattttatcaagaagtaccagaggtacgagaagaggcactcaaatattcctgctcatatatcacctgccttccgtgtgaatgaacgcgatcacgttattaatggtcaatgcaggcctctctctaagacagtgacgctcaatgtcatgaaagtgatcccagctggatcttctagtggtgca

SEQ ID NO: 8105 - DNA, 187 bp, Glycine max
  Clone ID: LIB3039-047-Q1-E1-C8
accgctcctacaacagcagagaaaggggcacaaatgggattgatacttgaaataagtaggaaccgcgtttggaaatccaatgtccttggattcatcactcccacagattccatcgcatgacactaccatgactacaagtgcctcctcactcggaatgtatccatccgatggcgtatctactccggaa

SEQ ID NO: 8106 - DNA, 386 bp, Glycine max
  Clone ID: LIB3039-047-Q1-E1-C9
gaaggtgcaagagtttgttgtgagctataagctagtttatcgtgaggagaatatgaagttgtttgttttctttgttgctgcagtagttttggtagcatggccatgccatggcgcaggctaccaaaggttccctctccgaatgaaaactggctatggtgagcgttcttcggaggtaaaatgcgcaagttttaggcttgctgtggaagcacacaacatccgagcctttaaaaccattcctgaagagtgcgttgaaccaacaaaggactacattaatggcgaacaatttagatcagactctaaaacagttaaccaacaagctttctttttatgctagtgaacgcgaagtccatcacaacgacatatttatattcggcatagataacacc

SEQ ID NO: 8107 - DNA, 403 bp, Glycine max
  Clone ID: LIB3039-047-Q1-E1-D1
aggggcaaaagtgagtttggtgatcgagataactagaaacagtgtgattaaaatgaaagtccttgttttcttcgttgctacaattttggtagcatggcaatgccatgcgtacgatatgttccctctccgaatgaacactggctatggtgcccgtactccggaggtgaaatgcgcaagttggaggcttgctgtggaagcacacaacatctttggctttgagaacattcctgaagagtgcgttgaagcaacaaaggaatacatccatggcgaacaatatagatcagactccaaaacagttaaccaacaagcttacttttatgccagagacctcgaagtcaatcccaaggacacatttgtgttcagtatagatggcaccgtactctctaatattccatactacaaa

SEQ ID NO: 8108 - DNA, 350 bp, Glycine max
  Clone ID: LIB3039-047-Q1-E1-D10
ggaattcgagttggagcacggtttcgtgtaccgtgagcacaacaggtcacctggatactatgatggacgctactggaccatgtggaagctgcctatgtttggctgcactgatgcttctcaagtgttgaaggagcttcaagaggctaagactgcataccccaatggcttcatccgtatcattggatttgacaacgttcgccaagtgcagtgcattagcttcatcgcctacaagcccccaggcttctaagtcattgaaaaattttgcaagcatctgttgccaacccaacttggttggtggtcttaaactacattcccatttgtttttgctttatgagatttcatcatcctgt

SEQ ID NO: 8109 - DNA, 382 bp, Glycine max
  unsure (1)..(382): unsure at all n locations
  Clone ID: LIB3039-047-Q1-E1-D11
ggttcaaaaggatttgtgtgttctgtggcagcagccctgggaacaagagtagctataaggacgctgctattgagcttgggaaagagttggtgtcaagaaatattgatctggtttatggaggaggaagcattggtttgatggggttggtttcccaggctgtttatgaaggaggtcgccatgtaattggagttattcccaagacactgatgccaagagagattactggagagacagtgggggaagtgatggcagtagcagacatgcatcagagaaaagcagagatggctaagcactctgatgcctttattgccttgcccggtggctatgggactcttgaggagcttctanaggtgataacttgggctcagcttgggatccatga

SEQ ID NO: 8110 - DNA, 358 bp, Glycine max
  Clone ID: LIB3039-047-Q1-E1-D12
tggggcacaagtgagtttgttgatcgagataactagaaacagtgtgatgaaaatgaaggtccttgttttcttcgttgctacaattttggtagcatggcaatgccatgcgtacgatatgttccctctccgaatgaacactggctatggtgcccgtactccggaggtgaaatgcgcaagttggaggcttgctgtggaagcacacaacatctttggctttgagaacattcctgaaaagtgcgttgaaacaacaaaggaatacatccatggcgaacaatatagatcagactcaaaaaaatttaacaaacaggcttacttttatgccagagaactcaaagtcaatcccaaggacacatttgtg

SEQ ID NO: 8111 - DNA, 368 bp, Glycine max
  unsure (1)..(368): unsure at all n locations
  Clone ID: LIB3039-047-Q1-E1-D4
ggattggtaaagtattgaatcctgtgcatacatcctcacttatcctcttcctgcgactctcttctcattggttctccgtattctccctcaatcctattaaccttttcttctttcatttcccaccccattctataatcaatcaatggcaatggcttcttcaatccctaatgcgccttctgcgttcaattctcagagctacgttggtctcagagcgccactgaggaccttcaacttttcttctcctcaagctgccaaaattcctcgctcncaacgccttttcgtcgtcagagcctccgattcggagttcgaagccgccgttgtcgccggtaaggttccgccggcgcctcccgtgccgcccagaccggcgg

SEQ ID NO: 8112 - DNA, 390 bp, Glycine max
  Clone ID: LIB3039-047-Q1-E1-D5
gactcaagcacaacatctctatcgagtaaattaactatgaagcctaccctactagtatccctttccttcctgcctctctttgctttcctggctctttcagaagatgttgaacaagttgtggacataagtggcaaccccattttcccaggtggcacatattacattatgccatcaacttggggcgctgccggtggtggattgaaactaggccggacaggaaactcaaactgcccagttactgttttgcaagattactcacaaatcttccgtggtacaccagtcaaattcagcatacctgggataagccctggaatcatctttacaggtactccacttgaaatcgagttcgcagagaaaccttattgtgctgaatcctccaaatgggtggcg

SEQ ID NO: 8113 - DNA, 388 bp, Glycine max
  Clone ID: LIB3039-047-Q1-E1-D6
ggcacaagtttgttgagatagctagaaacaataagatgaaaatgaaagtgcttgttttgtttgttgctacagttttggtagcatatgaatgccatggctcagactaccagaagttccctctccaaatgaaaactgggtttggtgggcaatacagcaatgaggtggcatgtgccagttggaggcttggcgtggaagcaaacaacgtagtcaagtggcaaactgttcctgcagcttgcggacagtacatagctgactacgttctaggagaccaatatagatcagattccaaaacagtttaacaacaagcttatttctatgctaaatcccttaaactcatcaacagagatgtcgttgccctggacgttgacgacaccagtctctctaatct

SEQ ID NO: 8114 - DNA, 398 bp, Glycine max
  Clone ID: LIB3039-047-Q1-E1-D7
ggcagctgcagagctcaaaaccctagagaggaggaagagagagcgtgcaagttccggccaccaccgaccatgacattcaagcgcaggaatggaggtcgcaacaaacacggccgcggccacgtcaaattcatccggtgctccaactgtggcaaatgctgtcccaaggacaaggccatcaagaggtttctggtgaggaacattgttgaacaggctgcagtcagagatgtgcaggaagcttgtgtctatgaacaatatactcttccgaaactctatgtgaagatgcagtactgtgtttcttgtgctatccactctcatgttgtgagggttcgatcccgcactgacaggaggaaacgtgagcctccacagagattcatcaggcgcaaggatgatgcacctag

SEQ ID NO: 8115 - DNA, 372 bp, Glycine max
  Clone ID: LIB3039-047-Q1-E1-D8
ggcagttgtattgttgaacaagggtttctctgtctgcttcttcactttctctcgtttcaatcgaaaccaaaacaaaaacatgggcagaaaattcttcgtcggtggcaactggaaatgcaatgggaccactgaggaggtaaagaagattgttactactttgaatgaggctaaagtccctggagaagatgtcgtagaagttgttgtgagccctccttttgtgttccttcctgttgtaaaaagtttgctgcgccctgatttccatgtttcggcacaaaactgttgggttcgcaaaggtggtgcttataccggtgaggttagtgctgaaatgcttgttaattttgggattcccttggggtataatggtcactctga

SEQ ID NO: 8116 - DNA, 366 bp, Glycine max
  Clone ID: LIB3039-047-Q1-E1-D9
gatgagtttatagggaagaaagctgcctatgctttgagccaaggtcttggggtgattgcatgcattggagaattgttagaagaaagggaggctggaaaaacttttgatgtttgttttcagcaattgaaggcttatgcagacgcagttgctagttgggacaacattgttattgcatatgaacctgtatgggccattggaacgggcaaagtggccactccccaacaagctcaggaagtacatgtagctgttcgggattggctaaaaaagaatgtctcagatgaagttgcgtctaaaacacgaattatttatggagggtctgtaaatggaggcaacagtgctgaactggcaaagcaagaagatattgat

SEQ ID NO: 8117 - DNA, 398 bp, Glycine max
  Clone ID: LIB3039-047-Q1-E1-E1
gacaagtgagtttgttgatcgagataactagaaacagtgtgatgaaaatgaaggtccttgttttcttcgttgctacaattttggtagcatggcaatgccatgcgtacgatatgttccctctccgaatgaacactggctatggtgcccgtactccggaggtgaaatgcgcaagttggaggcttgctgtggaagcacacaacatctttggctttgagaccattcctgaagagtgcgttgaagcaacaaaggaatacatccatggggaacactatagatcatactccacaacagttaacaacaagcttacttttatgccagagacctcgaagtctatcccaaagacacatttgtgttcagtatatatggcaccgtactctctaacattccatactacaaaa

SEQ ID NO: 8118 - DNA, 380 bp, Glycine max
  Clone ID: LIB3039-047-Q1-E1-E10
gactctgatccacttccacttcaacatcttaagaaagcgaatcgattccgattcctctcaatggctgcggaacccaaggaatcgccttccaacaaccccggtctccatacaactcctgacgaagccaccaagggttacatcatgcaacaaactatgtttagaatcaaagaccccaaagtgagcctcgatttttattctcgagtcttgggcatgtctttgcttaagagattggattttccggagatgaagttcagcctgtacttcatgggctatgagaatacggcagaagctccaagtaatccaattgataaagtggtttggaccttttctcagaaggctacaattgaactgacacataattggggtactgaaagcgattc

SEQ ID NO: 8119 - DNA, 352 bp, Glycine max
  unsure (1)..(352): unsure at all n locations
  Clone ID: LIB3039-047-Q1-E1-E11
gacttgtctctgtctcaacttttcttcattttctctcttcctctcaccgagtcacgcactcgcctcgactcgtacggactccgatcccccccgagtcacactcagccagcaccaccgcccgatccgacgatgtctcgcgcctcttccgccgcctccggcgagatcatgctgttcggggtcagagtcgtcgtcgattcgatgacgaagagcgtcagcatgaacaacctctcacagtacgaacatcctttaaacggcatcaacaacagacagcaacaaagacgccgtcgccgccggctacgcctccgccgacgacgccgctcctcagaactccgggcngcaccgcgagcgcgag

SEQ ID NO: 8120 - DNA, 262 bp, Glycine max
  Clone ID: LIB3039-047-Q1-E1-E12
ggcacaagtttgttgagatagctagaagcaataagatgaaaatgaaagtgcttgttttgtttgttgctacagttttggtagcatatgaatgccatggctcacactaccagaagttccctctccaaatgaaaactgggtttggtgggcaatacagcaatgaggtggcatgtgccagttggaggcttggcgtggaagcaaacaacgtagtcaagtggcaaactgttcctgcaccttgcggagagtacataactgactacgttct

SEQ ID NO: 8121 - DNA, 384 bp, Glycine max
  unsure (1)..(384): unsure at all n locations
  Clone ID: LIB3039-047-Q1-E1-E2
gagggtttacaccgaggagacacaccttcagcagcagcagccatggttctcaaaaccgaactatgccgattcagcggtgccaagatctacccagggaaaggcatcagatttgttcgtggtgattctcaggttttcctgtttgctaactcgaaatgtaagaggtatttccacaacaggttgaagccatcaaagctcacctggactgcaatgtacagaaagcaacacaagaaggacattgctcaagaagctgtgaagaaaagaagacgtgctgccaaaaagccttactccaggtccattgtcggtgccactttggaagttatccagaaaaagagagctgagaagccagaagttcgagatgcanatagggaagctgcccttcgtgaa

SEQ ID NO: 8122 - DNA, 255 bp, Glycine max
  Clone ID: LIB3039-047-Q1-E1-E3
gagggtttctggatgctgctagtttctgtctgaaagctattctccaccgtagccgcaagcttcgccgtttgaaacagtgcctcaaccatggcagaacaaacagagaaggcttttctgaagcaaccaaaagtgtttctatgctctaagaaaggtgggaagggaaagaggcctgggaaaggtgggaatcgcttttggaagtcaattgggcttggattcaagactcccagagatgccattgaagggacatatattgac

SEQ ID NO: 8123 - DNA, 331 bp, Glycine max
  Clone ID: LIB3039-047-Q1-E1-E4
gagatagatctgcttcttgttgttggaaagaaaccctagcaagcggaacaatggcagacgttgaggtcgatgtggcggctgcagcagcagcaaggcagccgaagaagagaacgttcaagaagttcagtttcaggggcgtggatctcgatgcgcttctggacatgtccaccgatgaactcgtgaagatgttcagtgctcgcgcacgtagaaggttccagagaggcctcaacagaaagcccatgggcttgatcaagaaacttcgcacagcgaaaagagaaactcgaccatgtgacgaagcatcacctgtcagcacccaccctccggaacatga

SEQ ID NO: 8124 - DNA, 391 bp, Glycine max
  Clone ID: LIB3039-047-Q1-E1-E5
ggaacctttgcattctattcattcaagattcagcaagtgcgttttggaagcagagaccgaaatacttcgagatggcccgtacaaagcaaactgctcgtaagtcaactggaggaaaagctcccaggaagcagcttgcaaccaaggctgcacgtaagtctgcaccaacaactggtggtgtgaagaagcctcatcgttatcgccctggaactgttgctcttcgtgagattaggaaattacagaagagcactgagctcctaatcaggaagcttccttttcagatgttgggtcctgaaattgcccaggatttcaagactgatctgcgtttccagagccatgctgtgcttgcattgcaagaggctgctgaggcataccttgttgggctctttgaaga

SEQ ID NO: 8125 - DNA, 399 bp, Glycine max
  Clone ID: LIB3039-047-Q1-E1-E6
gctagtctagggttacgccgtcgtcgctgtttgtgtgtgtatcaggtgcagctaccaacgatggtgaagggtcgtcaaggagagcgcgtcagactctacgtgaggggtacaatccttggatacaaaaggtccaagtccaaccagtacccaaacacatccctgatccaaattgagggagtgaacaccaaagaagaagtatgatggtatgctggcaagaaaatggcctatatctacaaggctaaggtgaaaaaggatggaagccattaccgctgcatatggggcaaggttacgaggcctcacggtaacagtggtgttgtccgtgcaaaattcaagtcagaccttccacccagatcgatgggagctcgagtaagagtattcatgtatcgaagtaatatatga

SEQ ID NO: 8126 - DNA, 393 bp, Glycine max
  Clone ID: LIB3039-047-Q1-E1-E7
gatcacaaatctttcgctaacactcattaattgcaagaatggcacttcgttgcttggtgatgtccctttctgttctcttcacccttggtcttgcgagagaaagccatgccagagacgaagatttttggcatgctgtttggccaaacactcccattccaagttcattgcgagatcttctaaagcctggccctgcaagtgttgaaatcgatgatcaccctatgcaaattgaaggaacacagtacccgaaaaccttcttctataaagaagaccttcatccaggcataacaatgaaagtacaattcaacaagcctccctttcaacaccatggggtgttggtacatggttaaaggaaattaaggacactactaaagaaggatatagttttgaagagct

SEQ ID NO: 8127 - DNA, 384 bp, Glycine max
  unsure (1)..(384): unsure at all n locations
  Clone ID: LIB3039-047-Q1-E1-E8
ggcacaagtgagtttgttgatcgagataactagaaacagtgtgatgaaaatgaaggtccttgttttcttcgttgctacaattttggtagcatggcaatgccatgcgtacgatatgttccctctccgaatgaacactggctatggtgcccgtactccggaggtgaaatgcgcaagttggaggcttgctgtggaagcacacaacatctttggctttgagaccattcctgaagagtgcgttgaagcaacanaggaatacatccatggcgaacaatatagatcagactccaaaacagttaaccaacaagcttactttttatgcagagacctcgaagtccatcccaaggacacatttgtgttcagtatagatggcaccgtactctctaa

SEQ ID NO: 8128 - DNA, 400 bp, Glycine max
  Clone ID: LIB3039-047-Q1-E1-E9
gacttgcgagaaattatggcaagagatcttgaaagtggcggtggaggaaccaagaataacagaactgcagaggaaaactactctgcacctgaatcttcccatgtttatgattctgagacccattggacatcatggctcgtgcctatgtttgtggttgctaatattgctgtctttgttattaccatgtacatcaacaattgtcccaggaacaaccttcgtttccaaggtcgctgcgtggccaggttccttggaaggttctcttttcagcctatgcaggagaatcccttgcttggtccttcttcttcaacattgaccaagatgggagcccttcgatgggataatgttgtgaatagacatcaaggatggagactcttcacttgcatttggttacatgctgggg

SEQ ID NO: 8129 - DNA, 454 bp, Glycine max
  unsure (1)..(454): unsure at all n locations
  Clone ID: LIB3039-047-Q1-E1-F1
gtacggtctagnataccgggtccaaccaagcctccattcgggtggcaaaagaccacaaaaagggggaaaagtttggttagaaaaccaaaaacaattagaagaaaattaaagtgcctggtttgtttgttgctacagttttgggagcatatgaatggcatggctcagactaccagaagttccctctccaaatgaaaactgggtttggtgggcaatacagcaatgaagtggcatgtgccagttggaggcttggcgtggaagcaaacaacgtaatcaagtggcaaactgttcctgcagcttgccgagagtacatagctgactacgttctaagagaccaatataaatcaaattcaaacagttaacaacaggcttatttctatgctaaatcgctcaaactcaccaacaaagatgtctttggcctggacgttgacgacactactctctctaatctccagta

SEQ ID NO: 8130 - DNA, 361 bp, Glycine max
  unsure (1)..(361): unsure at all n locations
  Clone ID: LIB3039-047-Q1-E1-F10
ggagcaaaaccctaatccctatttttcttcctcagtagtgtcatttacgcttctcttctctgcagcaactatgcctaaccctaaggtcttcttcgacatgaccatcggcggtcaatctgctggccgcatcgtgatggagctctacgccgacgtcactccccgcaccgccgagaacttccgcgcgctttgcaccggcgagaagggcgtanggcggagcggcaagcccctccactacaagggctcgtccttccaccgcgtgatcccgagtttcatgtgtcagggtggcgacttcaccgccggaaacggaaccggcggcgagtcgatttatggcgccaagttcgccgacgagaacttcgtgaag

SEQ ID NO: 8131 - DNA, 189 bp, Glycine max
  Clone ID: LIB3039-047-Q1-E1-F11
ggcgcacccagagaggaagcttagagagagagagagagagagagagagagaggagagagtattggcgcttcatcaagatgggtatttctagggattccatgcacaagaggcgtgccactggtggcaagaaaaaggcttggagaaagaagagaaagtatgagcttgggcgtcaagcagcaaacaccaagt

SEQ ID NO: 8132 - DNA, 384 bp, Glycine max
  Clone ID: LIB3039-047-Q1-E1-F12
gaagcgcagttcgttccacgttgttgtccgctctgtggctctctacatttcatcattcatcggaaaaatggctctcgaggttgctgttaaggctgctgttggtgctccaaatgttctcggagattgtccattttcccaaagggtcctcttaactttagaggagaagaaaatcccttacaaactccacctcatcgatctcagtagtaaacccgaatggtttttgggtgtgaatcccgaagggaaggtgccagtggttctttttgatggcaaatgggtggctgattctgatgtgattgtggggatactcgaggaaaagtacccagaaccctctctcgtcactcctcctgaatttgcctccgtgggattaaagataattgggtcctt

SEQ ID NO: 8133 - DNA, 349 bp, Glycine max
  Clone ID: LIB3039-047-Q1-E1-F2
ggcacaagtgagtttgttgttcaaaatacctagaaccattttgataaaattaaaggccctggtttcctccgtgccaaaaattttggaacaatggaatgccaatccttagataagttcccctcccgaatgaacactggctaaggtgcccgtactcccgaggtgaaatgcccaaattggaggcgtgctgtggaagcacacaacatctttggctttgagaccattcccgaaaagtgcgttgaagcaacaaaggaatacatccatggggaacaatatagattagactccaaaacaatttaccaacaagcttaattttatgccagagacctcgaagtccatcccaaggacacat

SEQ ID NO: 8134 - DNA, 400 bp, Glycine max
  Clone ID: LIB3039-047-Q1-E1-F3
gagcatagcgaaacagagagtggtttcagtgagtgatcggtgttcacttgatccttcataagtcgtcatcatcatcatcatcatcaccgttgattgaagaagatgccgatcagaaacatcgccatcggaaggcctgaagaggctactcaccccgacacgttgaaggcggggttggctgagttcatctccaccttgatcttcgtgttcgccggttcaggttccggcatcgcctacaacaagctcaccgacaacggcgccgccactcccgccggcctcatctccgcttccatcgcccatgctttcggcctcttcgtcgccgtctccgtcggcgccaacatctccggcgggcacgtcaaccccggcgtcaccttcggcgccttcgtgggcggcaacatcacct

SEQ ID NO: 8135 - DNA, 317 bp, Glycine max
  Clone ID: LIB3039-047-Q1-E1-F4
ggcacaagtgagtttgttgatcgagataactagaaacagtgtgatgaaaatgaaggtccttgttttcttcgttgctacaattttggtagcatggcaatgccatgcgtacgatatgttccctctccgaatgaacactggctatggtgcccgtactccggaggtgaaatgcgcaagttggaggcttgctgtggaagcacacaacatctttggctttgagaccattcctgaagagtgcgttgaagcaacaaaggaatacatccatggggaacaatatagatcagactccaaaacagttaaccaacaagcttacttttatg

SEQ ID NO: 8136 - DNA, 379 bp, Glycine max
  Clone ID: LIB3039-047-Q1-E1-F5
ggcacaagtttgttgagatagctagaagcaataagatgaaaatgaaagtgcttgttttgtttgttgctacagttttggtagcatatgaatgccatggctcagactaccagaagttccctctccaaatgaaaactgggtttggtgggcaatacagcaatgacgtggcatgtgccagttggaggcttggcgtggaaacaaacaacgtactcaagtggcaaactgttcctgcagcctgcggagagtacatagctgactacgttctatgagaccaatatagatcagattccaaaacagttaaccaacaagcttatttctatgctaaatccctcaaactcaccaacatagatgtctttgtcctggacgttgacgacactactct

SEQ ID NO: 8137 - DNA, 358 bp, Glycine max
  Clone ID: LIB3039-047-Q1-E1-F6
ggcacaagtgagtttgttgatcgagataactagaaacagtgtgatgaaaatgaaggtccttgttttcttcgttgctacaattttggtagcatggcaatgccatgcgtacgatatgttccctctccgaatgaacactggctatggtgcccgtactccggaggtgaaatgcgcaagttggaagcttgctgtggaagcacacaacatctttggctttgagaccattcctgaaaagtgcgttgaagcaacaaaggaatacatccatggcgaacaatatagattagactccaaaacagtttaccaacaagcttacttttatgccagagacctcgaaatccatcccaaagacacatttgtgttc

SEQ ID NO: 8138 - DNA, 393 bp, Glycine max
  Clone ID: LIB3039-047-Q1-E1-F7
ggcacaagcgagtttgttgatcgagataactagaaacagtgtgatgaaaatgaaggtccttgttttcttcgttgctacaattttggtagcatggcaatgccatgcgtacgatatgttccctctccgaatgaacactggctatggtgcccgtactccggaggtgaaatgcgcaagttggaggcttgctgtggaagcacacaacatctttggctttgagaccattcctgaagagtgcgttgaagcaacaaaggaatacatccatggcgaacaatatagatcagactccaaaacagttaaccaacaagcttacttttatgccagagacctcgaagtccatcccaaggacacatttgtgttcagtatagatggcaccgtactctctaatattccata

SEQ ID NO: 8139 - DNA, 168 bp, Glycine max
  Clone ID: LIB3039-047-Q1-E1-F8
ggcacaagtgagtttgttgatcgagataactagaaacagtgtgatgaaaatgaaggtccttgttttcttcgttgctacaattttggtagcatggcaatgccatgcgtacgatatgttccctctccgaatgaacactggctatggtgcccgtactccggaggtgaaatg

SEQ ID NO: 8140 - DNA, 368 bp, Glycine max
  unsure (1)..(368): unsure at all n locations
  Clone ID: LIB3039-047-Q1-E1-F9
ggatcatcttcacaatcacatctccagaacacaaagaagagtgacccttcttcttgttattccacttgcgttaggtattggtgtgattgtttgtaccatccggtggtggagcttgttggaaattggagatgagtcagaggggtttaatatatagctttgttgccaaaggaactgttgttttagcagagcacacgcaatataccgggaatttcaattacaattgccgttcagtgcctgcagaagctgccatcaaatagcagcaaatacacgtattcctgtgatggtcacnacttcaatttcctcctagacaatggatttgttttccttgttgttgctgatgaatcgattggcaagagtgttccttttgt

SEQ ID NO: 8141 - DNA, 400 bp, Glycine max
  Clone ID: LIB3039-047-Q1-E1-G1
ggcacaagtgagtttgttgatcgagataactagaaacagtgtgatgaaaatgaaggtccttgttttcttcgttgctacaattttggtagcatggcaatgccatgcgtacgatatgttccctctccgaatgaacactggctatggtgcccgtactccggatgtgaaatgcgcaagttggaggcttgctgtggaagcacacaacatctttggctttgagaccattcctgaagagtgcgttgaagcaacacaggaatacatccatggcgaacaatatagatcagactccaaaatagttaaccaacaagcttacttttatgccagagacctcgaaatccatcccaaggacacatttgtgttcagtatagatggcaccgtactctctaatatttcatactacaaa

SEQ ID NO: 8142 - DNA, 374 bp, Glycine max
  Clone ID: LIB3039-047-Q1-E1-G10
ggaggttttggagttacagccgcagcttgaaacagagcagagcgaccttgaagagctatggctgtcggacagaataacaggatttccaagggaaagaaaggtggcaacaataaagccgctgatccctttgccaagaaagactggtacgatatcaaagccccttccctcttccaggtcaataatagtggcaaaaccctcgtctctcgtacccatggaaccaagattgcatccgaaggactcaaacatccggtttttgaagtctcaatggctgatctccatagggatgaacaccactccttcaacaagattcgtttgagaactgaagacgttcaagggaacaatgttctgacaaacttctggggaatggatttcac

SEQ ID NO: 8143 - DNA, 230 bp, Glycine max
  unsure (1)..(230): unsure at all n locations
  Clone ID: LIB3039-047-Q1-E1-G11
gcctcaacanaaaacagcacaacgaaccactctgaagccgctcacgttatccacaacactctcaaccctccttaaaccctaaccaatccaaccatggcttcttcttccaccttcactgcaatgtccgcctgcaagctctcctcctccgccgccatctcctccttcncctcncgccgccgctccaacgccgtcgttctgtcgaggcgcagccgcgccgccagggtctccgc

SEQ ID NO: 8144 - DNA, 376 bp, Glycine max
  Clone ID: LIB3039-047-Q1-E1-G12
gagtattaagcggtcagcacgaacaaacaatcacattacacacttctctctcttcaatggccggaatccgcttgctgccggaagactccgacgtctcccaacaatcccgcgcggtgcctctctccgccgccgatctggtctccgacgacgaccgctccgtcgccgctgactcctggtccatcaagagcgagtatggcagcactctcgacgacgaccagcgccacgccgacgccgccgaagctctctccaacgcgaacctccgacctccctccgattacagttctgacaaggatgaacctgattctgaagcagtcacgtccatgctgggatttcagagttattgggatgctgcatatgctgacgagctcacaaattt

SEQ ID NO: 8145 - DNA, 240 bp, Glycine max
  Clone ID: LIB3039-047-Q1-E1-G2
ggtatagatctcggtagcaaacgcaacagtgggagatataaaggtagatagattgagagagagagaaagattcggaaccatcgctatcgcacgctttccattgatgcttccgacgcttgctttgtctgcatcgtccttctttccttcatgcgttctctgtgtgtcgtaagggtgctctcaaactcttcatcatgtctgaactcgctgatactctcgatcagtgagtcgtcttcctccaag

SEQ ID NO: 8146 - DNA, 401 bp, Glycine max
  unsure (1)..(401): unsure at all n locations
  Clone ID: LIB3039-047-Q1-E1-G3
ggtaaacaaaaaccatcaccanaaaagaaaatgatgctcggagagcaccatcgcgcgaatccaacggttcacgtgccaccgtggccaacccacgacgatccaacggccgagatgtactccgcgtttttaacaaacgacgtcaatgctggtgagtactctccgtactatcttcaagaagcactaacggctctgcagcgttttctgccgtctaacgaaacggacgctgactcggacacggaggctcaacccgacgcggcggtggacgcgtactcgtgcgaccatttccgcatgtacgagttcaaggtccgtcgatgcgcacgtggcaggtcacacgactggacggagtgtccgtacgcgcatcccggcgagaaggctcgacgccgggacccgagaaagttcac

SEQ ID NO: 8147 - DNA, 399 bp, Glycine max
  unsure (1)..(399): unsure at all n locations
  Clone ID: LIB3039-047-Q1-E1-G4
ggaagaagagtcacagtcacaccactttagttttaggctaatattgtgaaagaaagatgagcaagagggcaaggagtccaaggttggaactgaggctgaacttgtccccaccaagggcagcagcaacctcaattatatcttcttcggagctgtcatcgacggagtcttcgacgttgtcgccggtgtcggtgcaatcgctggagagctcctgcgtgtcttccgaggctgaagagacaagggcaatgcttctcgtggggtgtcctcggtgcctcttgtatgttatgttgtcggaggtttaccctaaatgccccanatgcaagagtgctgtgttgcttgacttcctcaacaacgatgaacacaataccaagaagagtagcagcgagtgagagatatgttgtg

SEQ ID NO: 8148 - DNA, 399 bp, Glycine max
  Clone ID: LIB3039-047-Q1-E1-G5
gagttgtagccgctgcatctgaacgaaacacagagggagagagagtgagagaagcagtaattcatcacaatgggtaaggttcacggatctctcgcacgtgcggggaaagtgagaggacaaactcccaaagtggcgaagcaagacaagaagaagaagccacgcggacgtgctcacaagagaatgcaatacaaccgccgattcgtcaccgccgtggtgggattcggaaagaagcgtggaccaaactcgtcggagaagtgagggaggcgtttggaagatgatggtttttcttagtttgcgaaatgtatcacctcattttatttgattgatgaactcaaactttgatagttctgattaagcttcaatgaaggagttttttgctagttaatatcacaccacatt

SEQ ID NO: 8149 - DNA, 396 bp, Glycine max
  Clone ID: LIB3039-047-Q1-E1-G6
gagcgaaacagagagtgatttcagtgagtgatcggtgttcacttgatctcatcagaatcgtcagcgtcaattgaagaagatgccgatcagaaacatcgccgtcggaaggcctgaagaggcgactcaccccgacacgttgaaggcggctttggctgagttcatctcaaccttcatcttcgtgttcgccggctcaggctccggcatcgcctacaacaagctcaccgacaacggcgctgccacccctgccggcctcatctccgcctccatcgcccatgcattcgccctcttcgtcgccgtctccgtcggcgccaacatctccggcggccacgtcaaccccgccgtcaccttcggcgccttcgtcggcggcaacatcaccttcctccgcggcatcgtcta

SEQ ID NO: 8150 - DNA, 398 bp, Glycine max
  Clone ID: LIB3039-047-Q1-E1-G7
ggcacaagtgagtttgttgatcgagataactagaaacagtgtgatgaaaatgaaggtccttgttttcttcgttgctacaattttggtagcatggcaatgccatgcgtacgatatgttccctctccgaatgaacactggctatggtgcccgtactccggaggtgaaatgcgcaagttggaggcttgctgtggaagcacacaacatctttggctttgagaccattcctgaagagtgcgttgaagcaacaaaggaatacatccatggcgaacaatatagatcagactccaaaacagttaaccaacaagcttacttttatgccagagacctcgaagtccatcccaaagacacatttgtgttcagtatagatggcaccgtactctctaatattccatactaca

SEQ ID NO: 8151 - DNA, 397 bp, Glycine max
  Clone ID: LIB3039-047-Q1-E1-G8
gaaggtgcaagagtttgttgtgagctataagctagtttatcgtgaggagaatatgaagttgtttgttttctttgttgctgcagtaattttggtagcatggccatgccatggcgcaggctaccaaaggttccctctccgaatgaaaactggctatggtgagcgttcttcggaggtaaaatgcgcaagttttaagcttgctgtggaagcacacaacatccgagcctttaaaaccattcctgaagagtgcgttgaaccaacaaaggactacattaatggcgaacaatttagatcagactctaaaacagttaaccaacaagctttcttttatgctagtgaacgcgaagtccatcacaacgacatatttatattcggcatagataacaccgtactctctaat

SEQ ID NO: 8152 - DNA, 297 bp, Glycine max
  unsure (1)..(297): unsure at all n locations
  Clone ID: LIB3039-047-Q1-E1-G9
cagctgagagagagaagctggagaaggagggatacagaatcattggaaacgttggagaccaatggagtgacctcctgggaagcaacaaagggactaggacttttaagctgcctaatcccttgtactatgattaagctctcaaatcaagcctctaagttgctccttaatttctatgaaataagatcctgagtattattacttagtcatgtangggcactgaacaatgttgttttcccctttcgagactttcatgaattatgagctcttgttccattaagaaattgtccgttccaagtt

SEQ ID NO: 8153 - DNA, 387 bp, Glycine max
  unsure (1)..(387): unsure at all n locations
  Clone ID: LIB3039-047-Q1-E1-H1
caaaaagggaatcaaaactttaaccaatcctcaatccaacaattccaattcccaatccaaaacctaatactttaaagaactaatattgatcaattttggaacaagaagaaaagcacgaaaaaaccgttgagaaaaatcacgtggaaaaagtccngcgaaaaagccaggccggaaaaaagcttccaangaggaagacccgccggaaaaagggggaagaggaaaagaggaacaagaagagcgtggagacatacaagatatacatattcaaagttctgaagcaagtcaaccctgacattggtatctcaagcaaaggcatgggaatcatgaacagcttcatcaacgacatcttcgagaagcttgctcaagaatctttcagacttgcccgct

SEQ ID NO: 8154 - DNA, 368 bp, Glycine max; identical to SEQ ID NO: 8085
  Clone ID: LIB3039-047-Q1-E1-H10

SEQ ID NO: 8155 - DNA, 172 bp, Glycine max
  Clone ID: LIB3039-047-Q1-E1-H11
gtgctcactcatctatctattataaccaaacactcttcttcatattcttcttcttcttcttgttcttgttctatctgtgacgagcatcatggcctcgagagcagtgctattgttggctatgtgtgtgcttccggccatggttgtggccattcgcccagcaaagaaccctttt

SEQ ID NO: 8156 - DNA, 358 bp, Glycine max; identical to SEQ ID NO: 7611
  Clone ID: LIB3039-047-Q1-E1-H12

SEQ ID NO: 8157 - DNA, 354 bp, Glycine max
  Clone ID: LIB3039-047-Q1-E1-H2
gacgcaactgaataagaaaagccttccactattccatatatagcagccaaaaaagaatgaagaatactgcgttgttcactatctttctacaccttgctttcacctcatacctaccttcagacaccgctgctaatgtgtacgatacggatggtaatattcttcaaaagggtcgcacatattttgtgttggcagctacaataggaaacggcggtggaatagaatttgccgcaactggaaacgacacttgccctctaactgtcgtgcaatctcccagtggcgactctattgggtttccaataaggttttcagatccatttatagaaacgcctgatgatatccttgaaggctttggtt

SEQ ID NO: 8158 - DNA, 298 bp, Glycine max
  Clone ID: LIB3039-047-Q1-E1-H3
agggggaaaaattgagttttgttgattcgagataactagacacagtgtgatgaaaaatgaaagtccttgttttcttcgttgctacaattttggtagcatggcaatgccatgcgtacgatatgttccctctccgaatgaacactggctatggtgcccgtactccggaagtgaaatgcccaagttggaagcttgctgtgggagcacacaacatccttggctttgagaccattcctgaagagtgcgttgaagcaacaaaggaatacatccatggcgaacaatatagattagactccaaaac

SEQ ID NO: 8159 - DNA, 74 bp, Glycine max
  Clone ID: LIB3039-047-Q1-E1-H4
cggggcacaagaaagtttgtttttggaaatatcgataattagacttattggaatgatggtccttgatctcgtat

SEQ ID NO: 8160 - DNA, 403 bp, Glycine max
  Clone ID: LIB3039-047-Q1-E1-H6
ggatgcaactgtggagaaggaagctgcgaggaatggggggttatagaacttcaaggagtggtggagccacagcctggattccacgattccctccaaaatcttcacatcggcactttgtgtcgtccttcttctcaggcgctgcgtcattatagagtattccacaatcgcaatttaaaacatttctctacttttagggttctgctaactagagtattttacaagaatattattggaagtctacaccttcactgttggataccatgaactgacggggtcaaaggttcccttaaagaagccaatggtggtgctcaagaaagtaaagcatcctgatggagaaagtggttgtaaggtggagctgcaagttgttggagtcattagacataagattctgttcaagaacaga

SEQ ID NO: 8161 - DNA, 384 bp, Glycine max
  Clone ID: LIB3039-047-Q1-E1-H7
ggaagttgaaaaccccaaatctcagtttttcttctgcactcattctttcattctcattgccgtcacagagagagacaagaaacaatgaagtttaaccctagggtttcctcaagccgtcgcaagagccgcaaggctcacttcaccgctccgtcgagcgtgcgccgcgtcctgatgagcgcgcctctctccaccgatctccggtcaaagtacaacgtgcggtccattccggttcgcaaggacgacgaggttcaggtcgtgaggggaacctacaagggccgcgagggcaaagtggtccaggtctatcgccgcaagtgggtcatccacatcgagcgcatcacccgcgagaaggttaacggctccaccgttaacgttggcattcaccct

SEQ ID NO: 8162 - DNA, 400 bp, Glycine max
  unsure (1)..(400): unsure at all n locations
  Clone ID: LIB3039-047-Q1-E1-H8
ggcacaagtgagtttgttgatcgagataactagaaacagtgtgatgaaaatgaaggtccttgttttcttcgttgctacaattttggtagcatggcaatgccatgcgtacgatatgttccctctccgaatgaacactggctatggtgcccgtactccggaggtgaaatgcgcaagttggaggcttgctgtggaagcacacaacatctttggctttgagaccattcctgaagagtgcgttgaagcaacaaaggaatacatccatggcgaacaatatagatcagactccaaaacagttaaccaacaagcttacttttatgccagagacctcgaagtccatcncaaggacacatttgtgttcagtatagatggcaccgtactctctaatattccatactacaaa

SEQ ID NO: 8163 - DNA, 363 bp, Glycine max
  unsure (1)..(363): unsure at all n locations
  Clone ID: LIB3039-047-Q1-E1-H9
gaaggtgcaagagtttgttgtgagctataagctagtttatcgtgaggagaatatgaagttgtttgttttctttgttgctgcagtagttttggtagcatggccatgccatggcgcaggctaccaaaggttccctctccgaatgaaaactggctatggtgagcgttcttcggaggtaaaatgcgcaagttttaagcttgctgtggaagcacacaacatccgagcctttaaaaccattcctgaagagtgcgttgaaccaacanaggactacattaatggcgaacaatttagatcagactctaaaacagttaaccaacaagctttcttttatgctagtgaacgcgaagtccatcacaacgacatatt

SEQ ID NO: 8164 - DNA, 359 bp, Glycine max
  Clone ID: LIB3039-046-Q1-E1-B12
gatcccattcccagttttccttccctccacaatggcagagaaactacagtacccctgtctctcttccttgttaaccctcatcctctgcatctccgccacttccactaacccacacaagtcccaaacccaagcccttcacctccatagcctccctgacccattcacactctcatggcccgaatccgccaccgtagaacgcgacccggaacccaacacatctctctctcttcatcagataaacgcactcaccttcaacaaaaccgcttcccaactcatccacgttagactcgtacgcgatgccagcaaggtcaaaagtctcactcacttatccgcatccaaaatcaaaactcgaaccgcca

SEQ ID NO: 8165 - DNA, 408 bp, Glycine max
  Clone ID: LIB3039-044-Q1-E1-C4
ggcacaagtgagtttgttgatcgagataactagaaacagtgtgatgaaaatgaaggtccttgttttcttcgttgctacaattttggtagcatggcaatgccatgcgtacgatatgttccctctccgaatgaacactggctatggtgcccgtactccggaggtgaaatgcgcaagttggaggcttgctgtggaagcacacaacatctttggctttgagaccattcctgaagagtgcgttgaagcaacaaaggaatacatccatggcgaacaatatagatcagactccaaaacagttaaccaacaagcttacttttatgccagagacctcgaagtcaatcccaaggacacatttggtgtcagtaatagatggcaccgtactctctaatattccatactacaaaaaacatg

SEQ ID NO: 8166 - DNA, 406 bp, Glycine max
  unsure (1)..(406): unsure at all n locations
  Clone ID: LIB3039-044-Q1-E1-C5
ggttgttgttgttgttacccattgattcccaaaaccctaattgaagttctctcctccacactatatattgcttgttttgagtgagtctatcccttaaaggctctctcttgcagtcgcagaggaaaaccctagctagtagtctcagttcgtttgagagagaaaaaatggcagagggtctcgttctccgcggaaccatgcgcgcccacaccgacgtcgtgacggcgattgccactcccatcgacaactccgacatgatcgtgacggcgtcgcgcgacaaatccatcattctctggcacctcaacaaaggaggacaagactacggtgttccccgccgccgcctcaccggacattctcacttcgtccaagacgtcgtcntctcatccgacggtcagttcgccctctccgg

SEQ ID NO: 8167 - DNA, 396 bp, Glycine max
  Clone ID: LIB3039-044-Q1-E1-C6
ggcacaagtgagtttgatgatcgagatatctacagacagtgtgatgaaaatgaaggtcgttgtattcttcgttgctacacttttggtagcatggcaatgccacgcgtacgatatgttacctctccgaacgaacaatgactatggtgcccatactctggaagtgaaatgcacacgttggaggcatgctgtggaagcacacagtatctatggctttgagaccattcatgaatagtgcgttgacgcaccaagggaatacatcgatggcgatcagtatacatcagactctaaatcagtgaaacaacaagcttacttttatgacaaagacctcgacatctatcacaacgacacatttgtgttcagtatataccggaacgtaccctctataatccaatacta

SEQ ID NO: 8168 - DNA, 333 bp, Glycine max
  Clone ID: LIB3039-044-Q1-E1-C7
acaaaggggaaaacaacaacaaaacaaacccaataaaaagggttcctttggaaccttcctaatggtgcctcctggaacccctaacctcaagcctcaaaggcctgccaattaataaaaaccaatttaaaaaccaacaattttcaaacctccaatgttcaagccaacaatgttcaaaccaacggtttaaaaaccaaaaccaacggtttaaaaaccgaaaccaacggtttaaaaaccaacatattagaagccaacattcaagaaaccaacttaaggaaagtatcctccaattgaagacaacaaccaagcctaaagccagccatgaagtccaataac

SEQ ID NO: 8169 - DNA, 358 bp, Glycine max
  Clone ID: LIB3039-044-Q1-E1-C8
gattctcccaaactaacaaacaaatcccagggagccaccaaccatggcttccaagctctgcgactcatgcaaatcagccactgctaccttgtactgccgccccgacgcggccttcctctgcggcgcctgtgactctaaggttcatgccgccaacaagctcgcatcgcgccacccgcgcgtcgtgctctgcgaggtgtgcgagcaggcgcccgcgcatgtgacctgtaaagccgacgccgccgcgctctgccttgcctgcgatcgcgatatccactccgccaaccccctcgccagccgccacgagcgcatccccgtcacgccgttcttcgagtccgtacattcagtcaaggcctcctcg

SEQ ID NO: 8170 - DNA, 363 bp, Glycine max
  Clone ID: LIB3039-044-Q1-E1-C9
ggcacaagtgagtttgttgatcgagataactagaaacagtgtgatgaaaatgaaggtccttgttttcttcgttgctacaattttggtagcatggcaatgccatgcgtacgatatgttccctctccgaatgaacactggctatggtgcccgtactccggaggtgaaatgcgcaagttggaggcttgctgtggaagcacacaacatctttggctttgagaccattcctgaagagtgcgttgaagcaacaaaggaatacatccatggcgaacaatatagatcagactccaaaacagttaaccaacaagcttacttttatgccagagacctcgaagtccatcccaaagacacatttttgttcaattt

SEQ ID NO: 8171 - DNA, 331 bp, Glycine max
  Clone ID: LIB3039-044-Q1-E1-D10
gacagcccaccctctgtcccttttttctctcttggctttctttctttcatactcagtactccccattggggtataatagggacacgaggttgatgcggtggagctaagaaaatgaagcccttttgcacattcttcattcttctttcgctgcttgttattctcgttgaatcttcatgcaaaaacgaagaccaggagatggtgtccaaggccttccaatctgtgtctggattcaactcttcctggttcgatacaggttccaactgttcaaatgctgagattaaagggataaatctttcgtccaagaacctaagtgggaacatctcgtggaggt

SEQ ID NO: 8172 - DNA, 336 bp, Glycine max
  Clone ID: LIB3039-044-Q1-E1-D11
gattccacctcaacaaacacaacgacactctctcttctcgctcttggcttttcgctcttcactcactctcattcattcatttccaccgttcatggatccagtaagcgtgtggggtaacacgcccttggcgacggtggatcccgagatccatgacctcatcgagaaggagaagcgccgtcaatgccgcggaatcgagctcatcgcctccgagaacttcacctccttcgccgtcatcgaggccctcggcagcgctctcacgaacaaatactccgagggcatgccgggcaaccgctactacggcggcaatgaatacatcgaccagatcgaaaacctctg

SEQ ID NO: 8173 - DNA, 332 bp, Glycine max
  Clone ID: LIB3039-044-Q1-E1-D12
caagagtgctcctcagagcatttggtatggccctgaccgtcccaagtacttgggtccattctcggagcagattccatcatacctgaccggagaattccctggtgactacggatgggacactgctggattatcagctgacccggaaaccttcgccaggaaccgggagctggaggtgattcacagcagatgggcaatgcttggtgcccttggctgcaccttcccagagatccttgagaagaatggtgtcaaattcggcgaggccgtgtggttcaaggccggtgcacagatcttctcagagggaggccttgactacttgggcaacccaaacctga

SEQ ID NO: 8174 - DNA, 404 bp, Glycine max
  unsure (1)..(404): unsure at all n locations
  Clone ID: LIB3039-044-Q1-E1-D2
ggcgtctatattcattttggcatcgaggttgaatctcatcggagagagaaaaaccataaccatgtctggaagaggaaagggaggcaagggtctcggaaagggaggagcgaaacgacaccgtaaggttctgagggataacattcagggcataacgaagcccgcaattcgccgtctcgcgagacgtggcggcgtgaagcgtatcagtggtctcatctacgaagaaacccgcggtgttctcaagatcttcctcgagaacgtcattcgcgacgctgtcacctacactgagcacgctcgccgcaagaccgtcactgccatggacgttgtttacgccctcaagaagcanggcangaccctctacggtttcggcggttanagaattaccgatttctgcattgcgtcgtgga

SEQ ID NO: 8175 - DNA, 412 bp, Glycine max
  Clone ID: LIB3039-044-Q1-E1-D3
gcacaagtgagtttgttgatcgagataactagaaacagtgtgatgaaaatgaaggtccttgttttcttcgttgctacaattttggtagcatggcaatgccatgcgtacgatatgttccctctccgaatgaacactggctatggtgcccgtactccggaggtgaaatgcgcaagttggaggcttgctgtggaagcacacaacatctttggctttgagaccattcctgaagagtgcgttgaagcaacaaaggaatacatccatggcgaacaatatagatcagactccaaaacagttaaccaacaagcttacttttatgccagagaactcgaagtccatcccaaggacacatttgtgttcagtatagatggcaccgtactctctaatatttcatactacaaaaaaacatggatat

SEQ ID NO: 8176 - DNA, 385 bp, Glycine max
  Clone ID: LIB3039-044-Q1-E1-D4
gatagcgaaacagagagtggtttcagtgagtgatcggtgttcacttgatccttcataagtcgtcatcatcatcatcatcatcaccgttgattgaagaagatgccgatcagaaacatcgccatcggaaggcctgaagaggctactcaccccgacacgttgaaggcggggttggctgagttcatctccaccttgatcttcgtgttcgccggttcaggttccggcatcgcctacaacaagctcaccgacaacggcgccgccactcccgccggcctcatctccgcttccatcgcccatgctttcgccctcttcgtcgccgtctccgtcggcgccaacatctccgggcggcacgtcaaccccgccgtcaccttcggcgccttcgtgggcg

SEQ ID NO: 8177 - DNA, 406 bp, Glycine max
  Clone ID: LIB3039-044-Q1-E1-D5
ggagagagaggcacttggaatccaaaaatgagagaaatcatcagcattcacataggtcaggccgggatccaggttggcaactcctgctgggaactctactgcctggaacatggcatccagcccgatggcatgatgccaagtgactcctccttcggtgtagcccacgacgccttcaacaccttcttcagcgaaaccggatccggcaagcacgtccctcgcgccgtcttcgtcgatctcgagcccaccgtcatcgacgaagtccgttgtggcacttaccgtcaactcttccaccccgaacaactcatctccggcaaggaagatgccgccaacaaccttgccagaaggcactacaccgttggcacagagatcgtaaatctgtgcttggatcgcgtccgaaagctcgcag

SEQ ID NO: 8178 - DNA, 393 bp, Glycine max
  Clone ID: LIB3039-044-Q1-E1-D6
gggcacaagtttgttgagatagctagaagcaataagatgaaaatgaaagtgcttgttttgtttgttgctacagttttggtagcatatgaatgccatggctcagactaccagaagttccctctccaaatgaaaactgggtttggtgggcaatacagcaatgaggtggcatgtgccagttggaggcttggcgtggaagcaaacaacgtagtcaagtggcaaactgttcctgcagcttgcggagagtacatagctgactacgttctaggagaccaatatagatcagattccaaaacagttaaccaacaagcttatttctatgctaaatccctcaaactcaccaacaaagatgtccttggccttggactttgacgacactactctctctaatctcca

SEQ ID NO: 8179 - DNA, 398 bp, Glycine max
  unsure (1)..(398): unsure at all n locations
  Clone ID: LIB3039-044-Q1-E1-D8
gacaagtgagtttgttgatcgagataactagaaacagtgtgatgaaaatgaaggtccttgttttcttcgttgctacaattttggtagcatggcaatgccatgcgtacgatatgttccctctccgaatgaacactggctatggtgcccgtactccggaggtgaaatgcgcaagttggaggcttgctgtggaagcacacaacatctttggctttgagaccattcctgaagagtgcgttgaagcaacaaaggaatacatccatggcgaacaatatagatcagactccaaaacagttaaccaacaagcttacttttatgccagagacctcgaagtcaatcncaatgacacatttgtgttcagtataaatggcaccgtactctctaatattccatactacaaa

SEQ ID NO: 8180 - DNA, 301 bp, Glycine max
  Clone ID: LIB3039-044-Q1-E1-D9
tggcactcaccacacaatctcaaccggtaccgttaccataaaagcaaaccctttagtgatcttccacatcttcaccataaccaactggcttcacaaacccaaatcttaagcgatccaccaccacgacaataatggctcaaggcttcaaatgttcaatgttttcaccacatgttccccatttaatgactcatcaccaatgtcattgtaacagattttcataaagcgttaagcaattgagcactccaagatgcagtacctttcaaacattgtcggaaagatgtccattgtcgcaattgccatc

SEQ ID NO: 8181 - DNA, 413 bp, Glycine max
  Clone ID: LIB3039-044-Q1-E1-E1
ggcacaagtgagtttgttgatcgagataactagaaacagtgtgatgaaaatgaaggtccttgttttcttcgttgctacaattttggtagcatggcaatgccatgcgtacgatatgttccctctccgaatgaacactggctatggtgcccgtactccggaggtgaaatgcgcaagttggaggcttgctgtggaagcacacaacatctttggctttgagaccattcctgaagagtgcgttgaagcaacaaaggaatacatccatggcgaacaatatagatcagactccaaaacagttaaccaacaagcttacttttatgccagagacctcgaagtccatcccaaggacacatttggtgttcagtatagatggcaccgtactctctaatattccatactacaaaaaacatggatat

SEQ ID NO: 8182 - DNA, 316 bp, Glycine max
  Clone ID: LIB3039-044-Q1-E1-E10
ggcgtacgcagcttcatccctaacgcgtgcatagcagagtcagagacagagacgcagccatggggcggagacctgcgaggtgttataggcaaattaagaacaagccataccccaagtcacgtttctgccgtggtgttcctgatcccaagatcaggatttatgatgttggtatgaagaagaaaggtgttgatgagtttcctttctgtgtccatctggttagttgggagaaggaaaatgtttcaagtgaggccctggaagctgctcgcattgcttgcaacaagtacatggccaaatttgctggaaaggatgctttcca

SEQ ID NO: 8183 - DNA, 317 bp, Glycine max
  Clone ID: LIB3039-044-Q1-E1-E11
ggcacttcaagtgcaatcaaattagttcaatcgctttgcgcagttccgtacctcgcctttcaagatgcaaatcttctggaagaatcgcaccggcaagagtatcacacttgcggtcgcaagctctgacacgagtcgagagtgtcagtgctccgatggagaacagcgcaggttttccgcctgctgaggaacgtcacatcatcgctggaaaccagcacaatgactgacgtatgcgctcagacaacaacagccaacatcgatggcgactacaacttgtcagacgccaccgtagttgcacgcaaatcttagttttaagccac

SEQ ID NO: 8184 - DNA, 409 bp, Glycine max
  Clone ID: LIB3039-044-Q1-E1-E2
ggcacaagtgagtttgttgatcgagataactagaaacagtgtgatgaaaatgaaggtccttgttttcttcgttgctacaattttggtagcatggcaatgccatgcgtacgatatgttccctctccgaatgaacactggctatggtgcccgtactccggaggtgaaatgcgcaagttggaggcttgctgtggaagcacacaacatctttggctttgagaccattcctgaagagtgcgttgaagcaacaaaggaatacatccatggcgaacaatatagatcagactccaaaacagttaaccaacaagcttacttttatgccagagacctcgaagtccatcccaaagacacaattgtggtcagttatagatggcaccgtactctctaatattccatactacaaaaaacatgg

SEQ ID NO: 8185 - DNA, 324 bp, Glycine max
  Clone ID: LIB3039-044-Q1-E1-E3
ggcagtagaatagtaatagtggtaacaaaaggcaacagagaacagaagagaaaggaaaagagagggtttggtgagttacccaagagaaaggatgaagagagagcgccagcagcttggttccaacgcaggaacctcaagctgcggttattcaagcggaaaatcgaatctttgggaggaagaaggaggcatggacgagcttcttgcagtggtgggttacaaggtgaggtcatcggacatggcggaagtggcgcagaagctggagcgtcttgaggaagccatgggaaatgtccacgatgacctcacggacctttcaaacgaggccgt

SEQ ID NO: 8186 - DNA, 341 bp, Glycine max
  Clone ID: LIB3039-044-Q1-E1-E4
aagaggttattctatcatttctatgcaaggatttctgagttctcaatcaaaaaagccaataaactgcgcacaatcctgctaatttttgcaatgtgtgggggcaacagtagtttgtcctccactcctctttctgagtgctgtggtccacttgtctatatattgagacatgcttctctatgctccctacgacttattacagcaataaatttatttgtctggtggaactcgtgttgttcaaaacatgcaaattagatatggatctttctgattagtattcttagtattgattaaaacattaaaaaatgaaaatatttatggagaataacataaaaaaaacatta

SEQ ID NO: 8187 - DNA, 61 bp, Glycine max
  Clone ID: LIB3039-044-Q1-E1-E5
ttccgctcccagaatacgacctaatggggagaccagtcttccgtcccgttgtcttgcctct

SEQ ID NO: 8188 - DNA, 401 bp, Glycine max
  unsure (1)..(401): unsure at all n locations
  Clone ID: LIB3039-044-Q1-E1-E6
ggcacaagtgagtttgttgatcgagataactagaaacagtgtgatgaaaatgaaggtccttgttttcttcgttgctacaattttggtagcatggcaatgccatgcgtacgatatgttccctctccgaatgaacactggctatggtgcccgtactccggaggtgaaatgcgcaagttggaggcttgctgtggaagcacacaacatctttggctttgagaccattcctgaagagtgcgttgaagcaacaaagggatacatccatggcgaacaatatagatcagactccaaaacagttaaccaacaagcttacttttatgccagagacctcgaagtccatcccaaggacacatttgtgttcagtaaaanatgcgaccgtactctctaatattccatactacaaa

SEQ ID NO: 8189 - DNA, 406 bp, Glycine max
  unsure (1)..(406): unsure at all n locations
  Clone ID: LIB3039-044-Q1-E1-E7
ggagcaagagtgaagagcgaagagaatggctcccaagggtttaatctttttggctgtgttatgcttctcagcactgtcactgagtcgttgtcttgcggaggataatggacttgttatgaacttctacaaggaatcatgccctcaggctgaagacatcatcaaagaacaagtcaagcttctctacaagcgccacaagaacactgctttctcctggctcagaaacatcttccatgactgtgctgttcagagttgtgatgcttcactgttgctggactccacaagaaggagcttgtctgagaaggaaacagatagaagctttgggttgagaaatttcaggtacattgagaacatcaaagaagctttgggaangggaatgcccaaggagttgtttcctgtgctgatatcc

SEQ ID NO: 8190 - DNA, 396 bp, Glycine max
  Clone ID: LIB3039-044-Q1-E1-E8
gatccaaattcaagttcgcaccaaattttcctcccaaaatgtcaggccgtggaaaaggtgggaagggtttgggaaagggaggagctaagaggcacagaaaggttcttcgtgacaacattcaaggaatcacgaaacctgcgattcgtaggttagcgagaagaggtggcgtgaagaggatcagtggtttgatttacgaggaaaccagaggagttctgaagatattcttggagaacgtgattcgcgatgctgtaacctacactgagcacgctaggaggaaaactgttactgctatggatgtcgtttatgctctcaagagacagggaaggaccctctatggctttggaggctaaagaattaaatccttaaggtttaatgactgtgttgcaggataaaaca

SEQ ID NO: 8191 - DNA, 374 bp, Glycine max
  Clone ID: LIB3039-044-Q1-E1-E9
gtcaaacgcgagaagacaacagaaggggaacacaaacacaaattacatagcctcagtaatctgagagagaaacaaaaacaatgaaggtttccattgccaagttccactcccttcccctatgttttttccttctcttggccttcaacacaaaacccctcctagcagcagaaccagagccagtggttgataagcaagggaaccctttggagccaggagtatggtactacgtgtggccacattgggctgatgaaggacgcctcacactaggccaaacaaggaacaagacatgccctctttatgttatccgtgacccttcattcattggcaccccagtttcattcttagcaccaggccttgaacatgttccaacactc

SEQ ID NO: 8192 - DNA, 408 bp, Glycine max
  Clone ID: LIB3039-044-Q1-E1-F1
gaccgcgcaccacactgagaggaagagggagtgagagagagtgttcttcgtttgctaccttctcccagaaatggttacgttcaggtttcaccagtaccaggtggtcgggagggctctcccaacggaagcagatcagcatccgaagatctaccgaatgaagctctgggccaccaacgaggttcgcgccaagtctaagttctggtattttttgaggaagctgaagaaggtgaagaagagcaatggtcaagttcttgctatcaacgagatttttgagaagaacccaaccaagattaagaactacgggatatggttgcggtatcagagtaggactggttaccacaacatgtacaaagagtaccgccgatacactctaaacggttcagttgaggcaatgtacaatgagatggc

SEQ ID NO: 8193 - DNA, 334 bp, Glycine max
  Clone ID: LIB3039-044-Q1-E1-F11
ggactgaagccagcgagtgagcgagcgagcgaggtagggttttcgttgttcccccgtctttgaattcagttcgcgacgatggggtccatccccgatccaggcgagttgagcgagttgactcagccgagcttcgacgagttccagcgccaaacttccctcatgaccagctgcaccctcctctggaaggagctctccgaccacttctcctccctcgagcaagacctcaaccacaaatccgaagccctcaaacgcaagattcgcaccctcgacaacactacttccgactccctccgcctcctcgatcgccgcgaaacctccctcgacgccacgctcc

SEQ ID NO: 8194 - DNA, 334 bp, Glycine max
  Clone ID: LIB3039-044-Q1-E1-F12
gactatttttattattattataatattattctctcacgtaacggcgtcttcagctcaagtgcctaacctcttcggcggcgccacctcagctccgccgccaactccggcggcgcaccatgacaacatcatgtcctcatccgacgccgccgatgcgctctcgcgcctcctccagcgcctcccgcccacgctctccctccccacgcgcctcccctcgccttcctccgcagccgccacgtgtcctccctgcctctcccttaacgacgtcctctcctgcgtttccaaactcggttacgcgcaactcaccgatcactcagtcccctccgaactcgccaac

SEQ ID NO: 8195 - DNA, 408 bp, Glycine max
  Clone ID: LIB3039-044-Q1-E1-F2
ggctctgctcgtgcctctagggttatcatttctccatttccattttctctctcacttttcaagaatcgtaagctatgggaaagtcttacccaactgtgagtgctgattaccagaaggccgttgagaaggcgaagaagaagctcagaggcttcatcgctgagaagagatgcgctcctctaatgctccgtttggcatggcactctgctggaacctttgacaagggcacgaagaccggtggacccttcggaaccatcaagcaccctgccgaactggctcacagcgctaacaacggtcttgacatcgctgttaggcttttggagccactcaaggcggagttccctaatttgaaccaacccgatttctaccagttggctggcgttgttgccgttgaggtcacgggtggacctg

SEQ ID NO: 8196 - DNA, 349 bp, Glycine max
  Clone ID: LIB3039-044-Q1-E1-F3
ggaagtttgaaagacacatacaccatggcagatatcctgagtgaagaacagattgttgattttaaagaggcctttggcttgtttgacaaagatggggatggttgcattactgtggaagaacttgccactgttattcggtcgttggatcagaaccccaccgaagaagagctccacgatatgataagcgaagtggatgcagatcgcaacggaaccattgaattcgatgagttcttgagcttgatggccaagacagtgaaagacaccgatgcataggacgagctcaaagacgctttcaaggtttttgacaaagatcataatggccacatatcacctagtgacttgagacccg

SEQ ID NO: 8197 - DNA, 409 bp, Glycine max
  Clone ID: LIB3039-044-Q1-E1-F4
gagacaaaaaattcttcgcattgcaattgtaatcgagtgagtcaagtgcgggaacgattctaactcagtctgcacgcactgatctcacagcatagcgcttgggctgaggaagaaggaagagaagaagaagcatggcggtgcgggccactgtgtcgcgtttcccgatggacacggacgcccgcgagggctcgggcctcctctggggagtaaccgtcacgccgttctccgccgccgacgagaatgcccgcgctccgtcgtacggctccggcggcgacctcttgccccggtgcgagaactgctgggcctacttcaacacctactgcgagctggagcaatggtcctggtcctggtccctccggcgggaaactcaacggcctctcctccgacgccatcgaccgctactctcgcc

SEQ ID NO: 8198 - DNA, 402 bp, Glycine max
  Clone ID: LIB3039-044-Q1-E1-F5
ggcatcaattcaaaatatatcatcaattataagcatgggtttgtggaacacaacgaatgcagtgtcttgccgctttcacaagtttggtgatgaccaaaagaatctggtcttccaaggtgatgccacgtcttcttccaggggcatagaactcacaaagttagacggtggaggaaaaccagtgggtggcagtgtggggagagtgttatactcttctccagtgcacctttgggaaagctctacagtggtcgcaagctttgaaaccgacttcaccttttccatctcatcagactctactactccaggtgatggccttgccttcttcattgcaccatttgacactaaaatccctccacactcgggtgggagcaaccttggactcctcccatcagacaatgttgttgc

SEQ ID NO: 8199 - DNA, 392 bp, Glycine max
  Clone ID: LIB3039-044-Q1-E1-F6
catgtaggattcactcacgttggggaggttatgattttgagaggcaagtgaccagcgtcgcagtcattaggaccaagtcgaacattgtggtattcgtgtggggagtgctcgctagagattcagattctgcctgtttgagaaaattgtctaatttatttagtataaattcaaattgtcttgttcgaaacaacgtatgtctttgaaggtgttcactgctctttcgaatatatccaatatttaatactgagaagcatgttctccatgcatgtttctactttctagtgagccttttagatatcaaatatcgttaattgttgattttattagattactataattagacaaatatcggtgcactcactccaaaaattttttgccctcaatacatattt

SEQ ID NO: 8200 - DNA, 405 bp, Glycine max
  unsure (1)..(405): unsure at all n locations
  Clone ID: LIB3039-044-Q1-E1-F7
gaaggtgcaagagtttgttgtgagctataagctagtttatcgtgaggagaatatgaagttgtttgttttctttgttgctgcagtagttttggtagcatggccatgccatggcgcaggctaccaaaggttccctctccgaatgaaaactggctatggtgagcgttcttcggaggtaaaatgcgcaagttttaggcttgctgtggaagcacacaacatccgagcctttaaaaccattcctgaagagtgcgttgaaccaacaaaggactacattaatggcgaacaatttagatcagactctaaaacagttaaccaacaagctttcctttatgctagtgaacgcgaagtccatcacancgacatatttatattcggcatagataacaccgtactctctaatatcccata

SEQ ID NO: 8201 - DNA, 403 bp, Glycine max
  unsure (1)..(403): unsure at all n locations
  Clone ID: LIB3039-044-Q1-E1-F8
ggcacaagtgagtttgttgatcgagataactagaaacagtgtgatgaaaatgaaggtccttgttttcttcgttgctacaattttggtagcatggcaatgccatgcgtacgatatgttccctctccgaatgaacactggctatggtgcccgtactccggaggtgaaatgcgcaagttggaggcttgctgtggaagcacacaacatctttggctttgagaccattcctgaagagtgcgttgaagcaacaaaggaatacatccatggcgaacaatatagatcagactccanaacagttaaccaacaagcttacttttatgccagagacctcgaagtccatcccaaggacacatttgtgttcagttaaaaatgggaccgtactctctaatattccatactacaaaaa

SEQ ID NO: 8202 - DNA, 340 bp, Glycine max
  Clone ID: LIB3039-044-Q1-E1-F9
ggcacaagtgagtttgttgatcgagataactagaaacagtgtgatgaaaatgaaggtccttgttttcttcgttgctacaattttggtagcatggcaatgccatgcgtacgatatgttccctctccgaatgaacactggctatggtgcccgtactccggaggtgaaatgcgcaagttggaggcttgctgtggaagcacacaacatctttggctttgagaccattcctgaagagtgcgttgaagcaacaaaggaatacatccatggcgaacaatatagatcagactccaaaacagttaaccaacaagcttacttttatgccagagacctcgaagtccatccc

SEQ ID NO: 8203 - DNA, 413 bp, Glycine max
  Clone ID: LIB3039-044-Q1-E1-G1
gagggtttttgtcgtcgctactaagagttgctgcttcttcagccactccgcacctcgcagcctctgtgccctcaacaaccatggctgaaatcgaaactaccgttccagatcccacccaaatcgacgtcaaactcttcaatcgctggagcttcgaggatgttgaggttaatgatatgtctctggctgattacattggagtgtccccatcaaagcatgctacatatgttcctcacactgctggtaggtactcagtgaagaggttcaggaaagcgcagtgccccattgttgagaggctcaccaactctctgatgatgcacgggaggaacaatggaaagaagctcatggctgtcaggatttacagccatgccatggagatcatccacttgctcactgacctgaacccaattcaggtc

SEQ ID NO: 8204 - DNA, 325 bp, Glycine max
  Clone ID: LIB3039-044-Q1-E1-G10
gatagcgaaacagagagtggtttcagtgagtgatcggtgttcacttgatccttcataagtcgtcatcatcatcatcatcatcaccgttgattgaagaagatgccgatcagaaacatcgccatcggaaggcctgaagaggctactcaccccgacacgttgaaggcggggttggctgagttcatctccaccttgatcttcgtgttcgccggttcaggttccggcatcgcctacaacaagctcaccgacaacggcgccgccactcccgccggcctcatctccgcttccatcgcccatgctttcgccctcttcgtcgccgtctccgtcg

SEQ ID NO: 8205 - DNA, 363 bp, Glycine max; identical to SEQ ID NO: 7608
  Clone ID: LIB3039-044-Q1-E1-G11

SEQ ID NO: 8206 - DNA, 323 bp, Glycine max
  Clone ID: LIB3039-044-Q1-E1-G12
gagagaaagagagagaaagatgtcgaagcgtggtcgtggtggttcggcggggaacaagttccgcatgtcgctgggtcttccagtggcggcgacggtgaactgcgccgacaacacgggggcgaagaacctctacatcatttcggtgaaagggatcaaaggccgtttgaaccgtcttccctcggcctgcgttggcgacatggtgatggccaccgtgaagaagggaaaacccgatctgaggaagaaggtcttgccagctgtcatcgttcgccagcgcaagccatggcgccgaaaggacggcgtctacatgtacttcgaagataatg

SEQ ID NO: 8207 - DNA, 410 bp, Glycine max
  Clone ID: LIB3039-044-Q1-E1-G2
ggagttgagaggatcgtgagaggggcagtagccgagattccgtgagttgcaaaaatgaagacgattctttccaccgagaccatgaacatcccggacggcgtgagcatcaaagttcatgccaaggtcatcgaagttgagggcccccgcggaaaattggtgcgagacttcaagcatttgaatctcgattttcagctcattactgacgaaaacggtaaaagaaagctgaaaatcgacgcgtggtttggttctcggaaaacatccgccgccattcgcaccgccttgagccacgtggagaatcttatcaccggcgtcaccaagggctaccgctacaaaatgaaggtcgtttaaggccaatttcccaatcaaggcaagcatcggcaacagcaacaagtctattgagatccgaaatt

SEQ ID NO: 8208 - DNA, 340 bp, Glycine max
  Clone ID: LIB3039-044-Q1-E1-G3
ggagtgagcgtagttgaggttttgccacttcgaaaccaaattttcttccttcgttggcatctgtgatctcttctcctcacaatgagcagatcagggcaaccaccggatttgaagaagtacatggacaagaagcttcagatcaagctgaatgcaaatcgcatggttgttggtactctccgtggcttcgaccagtttatgaatttagttgttgacaacactgtggaagtgaatggcaatgagaaaaatgacataaggatggtggtaatcagaggaaatagtgtggtcactgttgaggcgcttgaacctgtgaacaggacttgatttctgtggcttgtaaaca

SEQ ID NO: 8209 - DNA, 404 bp, Glycine max
  Clone ID: LIB3039-044-Q1-E1-G4
ggagcaaaaccctaatccctatttttcttcctcagtagtgtcatttacgcttctcttctctgcagcaactatgcctaaccctaaggtcttcttcgacatgaccatcggcggtcaatctgctggccgcatcgtgatggagctctacgccgacgtcactccccgcaccgccgagaacttccgcgcgctttgcaccggcgagaagggcgtacggcggagcggcaagcccctccactacaagggctcgtccttccaccgcgtgattccgagtttcatgtgtcacggtggcgacttcaccgccggaaacggaaccggcggcgagtcgatttatggcgcaaagtttgccgaccaaaaacttcgtgaaaaagcacaccggttccggcatcctctccatggcgaacgccggt

SEQ ID NO: 8210 - DNA, 406 bp, Glycine max
  Clone ID: LIB3039-044-Q1-E1-G5
ggcacaagtttgttgagatagctagaagcaataagatgaaaatgaaagtgcttgttttgtttgttgctacagttttggtagcatatgaatgccatggctcagactaccaggagttccctctccaaatgaaaactgggtttggtgggcaatacagcaatgaggtggcatgtgccagttggaggcttggcgtggaagcaaacagcgtagtcaagtggcaaactgttcctgcagcttgcggagagtacatagctgactacgttctaggagaccaatatagatcagattccaaaacagttaaccaacaagcttatttctatgctaaatccctcaaacccaccaacaaagatgtccttgtcctggacgttgacgacactactctctctaatctccagtattttgctaacca

SEQ ID NO: 8211 - DNA, 403 bp, Glycine max
  Clone ID: LIB3039-044-Q1-E1-G6
ggggttttcttttcacattacaaagtacaaacaccctgcagcaggagcgtacgcataactccccgccgtccggacatttcttggttcctgattcaccatggcaactatgagaggctgtaatcgatttgaaggatgaaccactggacttgtctataatttttgaaggaggaaagggttgtaacagcagatttttgttccatcatcatattatctgaacttctggtagaaaatggcagctgaagatgataggaatcttgtcgaaatcatggaaaccctgaatccaatagatgttgctaaatacatgaattttgttggtgccccccaagctggtgctatagctacattttcaaggacaaactcgcgacaacctttgaaggaaaaacagtcgtggagttgagatacg

SEQ ID NO: 8212 - DNA, 407 bp, Glycine max
  unsure (1)..(407): unsure at all n locations
  Clone ID: LIB3039-044-Q1-E1-G7
gacacttcaaaatcctctggtaacccttattttatctattctctctctttcttttgtgttctaagcagctagaagcaatggagaggaaaagaagccatgcctctttcaccatgtttgcaatgcttgttggagtgatctctcagagccttgtcattcctgtagtatccaccactgttgaagatcagaagaactactacaccccagatccacatgctggaagtcccccctcaggtttctccgattctctgtgctcacacagtagtactcctccatctcatggccatggaagctctccaccctcacatcatcacagtagtccaagtactccatcaacaccctcaggtggaaactgtggatcatcacctccacaacatcatgatccancancaccctcaactccatcaaca

SEQ ID NO: 8213 - DNA, 402 bp, Glycine max
  Clone ID: LIB3039-044-Q1-E1-G8
agagtgatccttctacactaactaaagccgagcagcgagagagagaaaccctagcaaaaatgccggctggtcacggtttgagatcccgcaccagagattccttctctcgtcccttcaggaagaagggtaccatcgccctcaccacatacctcagaacctaccacgtcggcgattatgtcgacgtcaaggttaacggcgccgtccacaagggaatgcctcacaagttctaccatggccgcaccggtcgcgtctggaatgtcaccaaacgtgctgttggggtcgaagtcaacaagcaggtcggcaacagaatcataaggaagaggattcacgtgcgtgtggagcatgttatgccaatcaaggtgaactgaggagttccgccttaggaagatcaagaatgatcag

SEQ ID NO: 8214 - DNA, 348 bp, Glycine max
  Clone ID: LIB3039-044-Q1-E1-G9
ggcacaagtgagtttgttgatcgagataactagaaacagtgtgatgaaaatgaaggtccttgttttcttcgttgctacaattttggtagcatggcaatgccatgcgtacgatatgttccctctccgaatgaacactggctatggtgcccgtactccggaggtgaaatgcgcaagttggaggcttgctgtggaagcacacaacatctttggctttgaggccattcctgaagagtgcgttgaagcaacaaaggaatacatccatggcgaacaatatagatcagactccaaaacagttaaccaacaagcttacttttatgccagagacctcgaagtccatcccaaagggac

SEQ ID NO: 8215 - DNA, 346 bp, Glycine max
  Clone ID: LIB3039-044-Q1-E1-H1
gatcatcaaatcaaaaaccctaattcccaaattctctcatttttcaagtttcaaccaagaaaagcagcaacaatgtcgggtcgcggaaagggtgggaagggtttaggaaagggaggagcaaagaggcatcgcaaggtgctccgcgacaatatccagggaatcacgaagcccgcgattcggagactggcgagaagaggtggcgtgaagagaatcagtggtttgatctacgaagagaccaggggcgtgctcaagatctttctcgagaacgtgattcgcgatgccgtgacgtacacggagcacgctaggagaaagacagtgacggccatggatgtcgtttacgctctca

SEQ ID NO: 8216 - DNA, 344 bp, Glycine max
  Clone ID: LIB3039-044-Q1-E1-H10
ggcacaagtttgttgagatagctagaagcaataagatgaaaatgaaagtgcttgttttgtttgttgctacagttttggtagcatatgaatgccatggctcagactaccagaagttccctctccaaatgaaaactgggtttggtgggcaatacagcaatgaggtggcatgtgccagttggaggcttggcgtggaagcaaacaacgtagtcaagtggcaaactgttcctgcagcttgcggagagtacatagctgactacgttctaggagaccaatatagatcagattccaaaacagttaaccaacaagcttatttctatgctaaatccctcaaactcaccaacaaa

SEQ ID NO: 8217 - DNA, 331 bp, Glycine max
  Clone ID: LIB3039-044-Q1-E1-H11
gagagaagttattagggcttttgagtgcggcggtccaaacactcttctctgcagcttttgcctacaactcccttcaccatggctgaacaaaccgagaaagcttttctgaagcaaccaaaagtgtttctcagcacaaagaagactgggaagggaaagagacctggaaaaggtgggaaccgcttttggaagtccattgggcttggatttaagactcccagggaagccatcgaaggaacctatattgacaagaagtgccccttcactggcaatgtttccatccgtggccgtatcttggctggaacatgtcacagtgctaagatgaacaggacta

SEQ ID NO: 8218 - DNA, 337 bp, Glycine max
  Clone ID: LIB3039-044-Q1-E1-H12
gattgactgaagccagcgagtgagcgagcgagcgaggtagggttttcgttgttcccccgtctttgaattcagttcgcgacgatggggtccatccccgatccaggcgagttgagcgagttgactcagccgagcttcgacgagttccagcgccaaacttccctcatgaccagctgcaccctcctctggaaggagctctccgaccacttctcctccctcgagcaagacctcaaccacaaatccgaagccctcaaacgcaagattcgcaccctcgacaacactacttccgactccctccgcctcctcgatcgccgcgaaacctccctcgaggccacgctcc

SEQ ID NO: 8219 - DNA, 407 bp, Glycine max
  Clone ID: LIB3039-044-Q1-E1-H2
gaaggtgcaagagtttgttgtgagctataagctagtttatcgtgaggagaatatgaagttgtttgttttctttgttgctgcagtagttttggtagcatggccatgccatggcgcaggctaccaaaggttccctctccgaatgaaaactggctatggtgagcgttcttcggaggtaaaatgcgcaagttttaggcttgctgtggaagcacacaacatccgagcctttaaaaccattcctgaagagtgcgttgaaccaacaaaggactacattaatggcgaacaatttagatcagactctaaaacagttaaccaacaagctttcttttatgctaatgaacgcgaagttcaatcaaaacgacatatttatattcggcatagataacaccgtactctccaatatcgcatac

SEQ ID NO: 8220 - DNA, 340 bp, Glycine max
  Clone ID: LIB3039-044-Q1-E1-H3
ggaaattaggaattagggttagggttttcattatcttcgcccggaaaagaaaggggggaagaagaaagaaccgttcctttatgatcgaaaaggtgcctttggtcatcatcgcggtgttaatcttggtggtgcaatcctctgcagcgttccacggtataaacagaatcatgaaggtccaccctgttcctcgaaaacgcaacatctcaatccaatttggcggcgacgggggcaacccgatgtcggaggctcaagcgctgttggggatcgccgggaagaagctccggcgactaccgcacgtgttcagctgcgtgctggagctgcccttccgctccgacgccga

SEQ ID NO: 8221 - DNA, 396 bp, Glycine max
  Clone ID: LIB3039-044-Q1-E1-H4
ggcacaagtgagtttgttgatcgagataactagaaacagtgtgatgaaaatgaaggtccttgttttcttcgttgctacaattttggtagcatggcaatgccatgcgtacgatatgttccctctccgaatgaacactggctatggtgcccgtactccggaggtgaaatgcgcaagttggaggcttgctgtggaagcacacaacatctttggctttgagaccattcctgaagagtgcgttgaagcaacaaaggaatacatccatggcgaacaatatagattagactccaaaacagttaaccaacaagcttacttttatgccagaagactcgaagtccatcccaaggacacatttgtgttcaatatagatggaacgtaccctctaatattccatactac

SEQ ID NO: 8222 - DNA, 60 bp, Glycine max
  Clone ID: LIB3039-044-Q1-E1-H5
gacacttcaagatcctctagaaacacttcttttctctctctctctctcggattctgagct

SEQ ID NO: 8223 - DNA, 358 bp, Glycine max; identical to SEQ ID NO: 7611
  Clone ID: LIB3039-044-Q1-E1-H7

SEQ ID NO: 8224 - DNA, 359 bp, Glycine max
  Clone ID: LIB3039-044-Q1-E1-H8
actattatgtgtcccttgcaccatcagcttctctctttggttcccctctcatcgcgtcataagcacctcaattctcactattctttacaaatttgaggttcaaacgctacgactagggtgcatcccgtgggttcctaaatattttttttcgattggggtgcagggagcaaataagggggtgtagtaagtaaaatccattagtgatgatgtatataaaaaccaaaaaaaatattacatgtactaaaagcaaaaaaaaagtttaggtagtaatttgaaatgtttaaaccatttttttatatctctaacacttttactattattttctctatttcctctttatcttaggataaattaccaca

SEQ ID NO: 8225 - DNA, 163 bp, Glycine max
  Clone ID: LIB3039-044-Q1-E1-H9
tggggcgcaccttagtctgtcgatctcgctccttgggtccagtctcatcgctctcctaggcacctcagttctcagtgttccttactgatttgtggttcaaacgctaggactagggtgcatcccgtctgttcctaaatagtttttttcgactggggtgcaccga

SEQ ID NO: 8226 - DNA, 305 bp, Glycine max
  Clone ID: LIB3039-045-Q1-E1-A1
caaagagaatgccactcaaaaaagtcaaaaagtgtttgtgcatgtgccatcagagattgctgctcatgaagttgaggaaataggagtggaacacttgcttagagatgtgaaggatacaaccattagcacccttgcaacagaggtaagtgcaaaactcacagctttgaagggtttggatgcaagacttaaagagatcaggagttaccttgaccttgttattgatggaaagcttccattaaaccatgagatcctgtaccatctgcaggatgtgtttaacctgctaccaaatcttaatgttgctgatc

SEQ ID NO: 8227 - DNA, 374 bp, Glycine max
  Clone ID: LIB3039-045-Q1-E1-A11
ggctcgcactcacgcgtcagacagatgacaacagaaggggagcctcagcagaagcagaacgaggagaagcagaaggagcaaaagcaatggcgccgaagaagccgagaaccacgacaaggaaccctgatttggttagggggattggcaagtattcgaggtcgcagatgtaccacaagaggggcatctgggccatcaaggccaaaaacggtggcgttttgccccgccacgatcccaagcccaagcccgaggccccggcccagaagccgcccaagttctaccccgcggacgatgttaagaagcccctcgtcaacaagcacaagcccaaacccgcgaaactcaaggctagcattactccagggactgtgttgatcctg

SEQ ID NO: 8228 - DNA, 320 bp, Glycine max
  Clone ID: LIB3039-045-Q1-E1-A12
gagaaacatcaagagtctattttatggtacccctacattttggaaacattccatggaaccctgatttggttatggggattggcaactagtcgatgtcacagatgtaccacacgacgggcatctgtgccatcaaagccataaacagtcgagttttgccccgccacgatcccaagcccatgcccaaagccccagtccagatcctgcccatgttctaccctgccgtcgatgttaacaagcccctcgtcaacaagcacgttcccaaactcgcgaaactcacggttagcattactccagggactgtgttgatcctgcttgctggg

SEQ ID NO: 8229 - DNA, 368 bp, Glycine max
  unsure (1)..(368): unsure at all n locations
  Clone ID: LIB3039-045-Q1-E1-A2
gacccacgcgtcagggggatttttgactttcaagtttcaatagtctcccactcttcttcgagcgggaactcaacattttcctttcctctctctgcatgtctctgcaattctagggtttcaatttcgctctccccttcgaaattcgcagttgtgtaaccgacgccatgagtctgcgccacggctccaaggtttggcttgaggaccgcgattcggcttggctcgccgccgaagtgctcgattccgacggtaaccgcctcttgctcgtcaccgattccggcaagaaagtttatgcttcgccggagaagctgcttccganggatgcggatgaagaggagcatggaggattcgaagatatgacgaagctggcg

SEQ ID NO: 8230 - DNA, 348 bp, Glycine max
  Clone ID: LIB3039-045-Q1-E1-A3
gacccacacgtaagacggctgctatgatatgaaaaaaagtacagaaggggacatatcgtttgttctaagcttatcccaatttccgctatgcatgctgttcctcaacttcgagcaacacttttctctaaagtcaggggcacggtcaagtttggaatcagcggatttgtttcaattgggcttttgggtgcaagattcgctctgcaaagtaacgatgtgtaactccttgccgtttagaatcctttcgatactaccgattacacgacacaaatttttaaatacgagattgtgcacggccagtgaaaccatttcaatgtaatcgttaaggacaagattacccttctcttcagt

SEQ ID NO: 8231 - DNA, 296 bp, Glycine max
  Clone ID: LIB3039-045-Q1-E1-A4
agtgaggatacgacagaacggggtgttgagcagggacaaagatgtctggtatgggagatcggtacatgggcatcgcacattacacggtgatgattcgattgttggttaaacatagataatcggaacgtcgcagaatccaagtcctcaggatgaaatcgagctccgtcaacggctaaccaggtctgctccacttcagttcgatcacttcagagattcatgagactgcctttaagaatgaaagtgtgggtttggtcaccagagagcagtatgtagatacgagggttaacattcacatc

SEQ ID NO: 8232 - DNA, 390 bp, Glycine max
  Clone ID: LIB3039-045-Q1-E1-A5
gactcaagcacaacatctctatcgagtaaattaactatgaagcctaccctactattatccctttccttcctgcctctctttgctttcctggctctttcagaagatgttgaacaagttgtggacataagtggcaaccccattttcccaggtggcacatattacattatgccatcaacttggggcgctgccggtggtggattgaaactaggccggacaggaaactcaaactgcccagttactgttttgcaagattactcagaaatcttccgtggcacaccagtcaaattcagcatacctgggataagccctggaatcatctttacaggtactccacttgtaaatcaaatttcgcagagaaaccttattgtgctgaatcctccaaatgggtgg

SEQ ID NO: 8233 - DNA, 336 bp, Glycine max
  Clone ID: LIB3039-045-Q1-E1-A6
gaagaaaataaaatacagagaaagattggaaagagaaatggcaaaaaatattctctcaacctcaaaccccatcctactacctagttcatcaccatcctcatcctcatcatcatttgtaaaaccaatacatgtttgctccaatccgataatcaaaagcactttgaagagggaattaactctttgcaaagcaacaccacactctccaattgttgtgacaaagagaggcttgtccatcagcttcatcaccagctttgtgctttcattggctggtaagaagaatgcaaatgcagcaatactcgaggcagatgatgatgaagaactcttggagaaagttaa

SEQ ID NO: 8234 - DNA, 382 bp, Glycine max
  Clone ID: LIB3039-045-Q1-E1-A7
ggaagagtgaagagaatggctcccaagggtttaacctttctggctgtgttaatatgcgtttcagcactgtcactgagtccttctgttgcgggggaagggcaaaataatggccttgttatgaacttctacaaggaatcatgccctcaggctgaagacatcatcacagaacaagtcaagcttctctacaagcgccacaagaacactgctttctcctggctcaggaacatcttccatgactgtgctgttcagagttgtgatgcttcactgttgctggactccacaagaaggagcttgtctgagaaggaaacagatagaagctttgggttgaaaaatttcaaggtaaattgagaccatcaaagaagctttggaaagagaatgccct

SEQ ID NO: 8235 - DNA, 251 bp, Glycine max
  Clone ID: LIB3039-045-Q1-E1-A8
ggcacaagtgagtttgttgatcgagatgattaaaaacagtgtgatgaatatgaatgtccttgatcacttcgatcgcaatcattctggtaccatggaaatgcaaagcataggacatgttaccactctcaacgaagactcattatcgcacgcgtaatacgtgatgtcaaatgcacatcttcgacgctacatgtgcaagcacaacacagctttcgccttgagcaggatcatcaaccatgagtgtactgttcaga

SEQ ID NO: 8236 - DNA, 317 bp, Glycine max
  unsure (1)..(317): unsure at all n locations
  Clone ID: LIB3039-045-Q1-E1-B1
gatagggtttttgtcgttgcgactaagagttgctgcttcttccgccactcagcacttcgctccctctgtgcttcaccaaccatggccgaaatcgaagctaccgttccagatccctctcaaatcgacgtcaaacttttcaaccgctggagcttcgacgacgttgaggttactgatatgtctctggctgattacattggagtgtcnccgtcaaagcatgctacatatgttcctcacactgctggtaggtactcagtgaagaggttcaagaaggcgcagtgccccattgttgagagactcaccaactctctcatgatgca

SEQ ID NO: 8237 - DNA, 382 bp, Glycine max
  Clone ID: LIB3039-045-Q1-E1-B10
ggcacaagtttgttgagatagctagaagcaataagatgaaaatgaaagtgcttgttttgtttgttgctacagttttggtagcatatgaatgccatggctcagactaccagaagttccctctccaaatgaaaactgggtttggtgggcaatacagcaatgaggtggcatgtgccagttggaggcttggcgtggaagcatacaacgtagtcaagtggcaaactgttcctgcagcttgcggagagtacatagctgactacgttctaagagaccaatatagatcagattccaaaacagttaaccaacaagcttatttctatgctaaatccctcaaactcaccaacaaagatgtccttgtcttggacgttgacgacactactctctc

SEQ ID NO: 8238 - DNA, 384 bp, Glycine max
  Clone ID: LIB3039-045-Q1-E1-B11
gaaagcagtgaccacggagagagagagaggttttgacgcaacacactttcactgagaaaggatctctatctaccaaggagcagaataaaacccttctctctggtaagtgaataagagaatggcttcagatcggaaacttcacactttcgaggaggtggcaaagcacgaccagaccaatgattgctggctcatcatttctggcaaggtgtatgatgtcacccctttcatggaggatcatcccggaagtgatgaggttttgttatctgcaacagggaaagatgcaaccaatgattttgaagatgttggacacagtgattctgctagagatatgatggaaaaatactacattggtgaaattgattcatcaactgtaacaactaaacg

SEQ ID NO: 8239 - DNA, 343 bp, Glycine max; identical to SEQ ID NO: 7769
  Clone ID: LIB3039-045-Q1-E1-B12

SEQ ID NO: 8240 - DNA, 395 bp, Glycine max
  Clone ID: LIB3039-045-Q1-E1-B2
gatcgcatttcatagcactcaccctcattaccaacacgaaagcatagccaaaaccttttttcgaagtctctgattttcctaatggctccggcaaaggcagagaagaagccggcggagaagaagccagcggcggagaaggcaccggcggagaagaagccgaaggcggagaagaagatctcgaaggaaggagggagcgagaagaagaagaagcgcacgaagaagagcgtggagacctacaagatctacatcttcaaggtcctcaagcaggttcaccccgacattggtatttccagcaaggccatgggcatcatgaacagcttcatcaacgaaattcttcaaaaagctcgcccaggaagcgtcgcgtttggctcgctacaacaagaagcccaccatca

SEQ ID NO: 8241 - DNA, 297 bp, Glycine max
  Clone ID: LIB3039-045-Q1-E1-B3
gcacaaatgactttggtggttcaagatatctagaaacattgtgatgaaaatgaaggtccttgttttcttcgttgctacaattttggtaccatggcaatgccgtgcgtacgatatgttccctctccgaatgaacactgggtatggtgcccgtactccggaggtgaaatgcgcaagttggaggcttgctgtggaagcacacaacatctttggctttgagaccattcctgaaaagtgcgttgatgcaacacaggaatacatccatggcgatcaatatagatcagactctataacagttaa

SEQ ID NO: 8242 - DNA, 391 bp, Glycine max
  unsure (1)..(391): unsure at all n locations
  Clone ID: LIB3039-045-Q1-E1-B4
gaaggtgcaagagtttgttgtgagctataagctagtttatcgtgaggagaatatgaagttgtttgttttctttgttgctgcattagttttggtaacatggccatgccatggcgcaggctaccaaaggttccctctccgaatgaaaactggctatggtgagcgttcttcggaggtaaaatgcgcaagttttangcttgctgtggaagcacacaacatccgagcctttaaaaccattcctgaagagtgcgttgaaccaacacatgactacattaatggctaacactttagatcagactctaaaacagttaaccaacaagctttcttttatgccaatgaaccccaaggttcaacacacctacatatttatattcggcatagataacaccgtact

SEQ ID NO: 8243 - DNA, 376 bp, Glycine max
  Clone ID: LIB3039-045-Q1-E1-B5
ggccagagatgcaagagaaggccctagggttcttatgagccttagggtagatttcgggcccatgggctgagtatgagcccacttatctttgtaaatattagattaagattttattatttttgggtcttgtatttagggctccataatgtaggtagggtaccctagaaatataggatttttcagcccttgtattttagggcacctagactagtttttgtattaggggtagttttgtaatttcacatacactaagtggatatttgatgtgtgtggttggaaataaatttaattgaattggtagaagcccaatccaattaaattttataaggggaaaggtaaccatttgcttactacgccccattgccacatcatatat

SEQ ID NO: 8244 - DNA, 387 bp, Glycine max
  Clone ID: LIB3039-045-Q1-E1-B6
ggcacaagtgagtttgttgatcgagataactagaaacagtgtgatgaaaatgaaagtccatgttttcttcgttgctacaattttggtagcatggtaatgccatgcgtacgatatgttccctctccgaatgaacactggctatggtgcccgtactccggatgtgaaatgcgcaagttggaggcttgctgtggaagcacacaacatctttggctttgagaccattcctgaagagtgcgttgaagcaacaaaggaatacatccatggcgaacaatatagatcatactccaaaacagttaaccaacaagcttacttttatgccaaagaactccaatttcaatcccaaggaaacatttgtgttcagtatagatggcaccgtactctctaata

SEQ ID NO: 8245 - DNA, 302 bp, Glycine max
  Clone ID: LIB3039-045-Q1-E1-B7
ggtgctcaatcaactatctattataagcatcttgtcctcctcatagtcttcttcttcatcatgttcgtgttctatctgtagcgagcatcacagattcgagatgcagctgcatggttgggtatgtgtgtgcttccggacatgggtgtggacattcgtgcagcagtgtgccctttgtgcgtgaaaggtcacgtctaatgtgacccttgcagtgcatggttatgatacatcagcaagctcctatattgccggtgctgtgactatgttgcaaggcaagatgagggttagcacagatgttgtgtaca

SEQ ID NO: 8246 - DNA, 388 bp, Glycine max
  Clone ID: LIB3039-045-Q1-E1-B8
gacagcatatatatcaataatctattttatactatacctacattttgataattttctttgtagttgatagccatggctacccgtggaaagcttgaggttgacattgatctcaagtccaacgcagacaagtactggcaaacccttaggaattctactgaaatattccctaaggccttcccacatgattacaaaagcattgaggttcttgagggtgatggcaagtctcctggttctatccgccacataagttatggtgaaggttcaccacttgtgaaatcatcctttgagaagattgaggctgttgatgaggaaaagaaggtagtgtcgtacactaacactggatgggaaactcttcaagcactacaaaacattcaagggagacatttca

SEQ ID NO: 8247 - DNA, 353 bp, Glycine max
  Clone ID: LIB3039-045-Q1-E1-B9
ggtaataattcttataacacaacacaacccatggccaccacctccgcattcctcctccttcccctcctcctgctgctccacctcgccatcgccgctcacggcatcggcatcaactacggcacgctcggcgacaaccttccaccgcccgcggcggtggcgaacttcctgaagacgaagacgaccatcgaccgcgtgaagatctacgacgtgaacccggacatcctgcgggccttcgccggcagcggcatctccgtgacggtgaccgcccccaacggcgacatcgccgccttaaccaaaatcgactcggcgaggcagtgggtggcgacgcacatcaaacccttttcaacctcaga

SEQ ID NO: 8248 - DNA, 391 bp, Glycine max
  unsure (1)..(391): unsure at all n locations
  Clone ID: LIB3039-045-Q1-E1-C1
ggtgatttgagaggatcgtgagagggacggtagcagagattccgtgagttgcaaaaatgaaaacaattctttctgcagagaccatgaacatcccggacggcgtgagcgtcaaggttaatgccaaggtcatcgaagttgagggcccccgcggaaaattggtgcgagacttcaagcacttgaatctcgattttcagctcatcactgacgaaaacggtaaaaggaagctgaaggtggaggcctggttcggttctcggaaaacatccgccgccattcgcaccgccctgagccacgtggagaatctgatcaccggcgtcaccaanggctaacgctacaaaattaaggtccgttaatgcccattttcccatcaacgcaagcatcggcaacgacaaca

SEQ ID NO: 8249 - DNA, 356 bp, Glycine max
  Clone ID: LIB3039-045-Q1-E1-C10
ggggaggaagaataattgtgaggcgagggtaaggtcgcgttgtgttgcgtcgtgtcgtgcgctgttcctctgtttctcgtttttgtgttcagaccgaaccctagctccgcatcgcaaccatgtcgaccaagcaaggtggaaaagctaagcctttgaagaaacccaagtctgataagaaggattacgacgagattgatgtggctaacattcagaagaaaaaggaagaggagaaggcgctaaaggagttgaaagccaaggcgcaacaggagggaagctttggaggttctgggctcaagaaaagtggaaagaaataagggctctttatcatgattgtatgcattcaatattgagccctg

SEQ ID NO: 8250 - DNA, 390 bp, Glycine max
  unsure (1)..(390): unsure at all n locations
  Clone ID: LIB3039-045-Q1-E1-C11
gactgatacaggaacagctagcagagaaacaaagttacaagtaaagtaaattaagaagatcattaatggcttctcttgcaaccttagctgctgttcaaccagctgcgctcaatggccttgctggaagttccctctctggaactaagctctctttcaagccctctcgccacactgtcaaatccaagaacttcaggagtggtgccgtggtagcaaagtatggtgacaagagtgtgtactttgatttggaggatctgggcaacactacggggcagtgggacttgtatggctcagatgcaccttcaacctacaaccctcttcagagcaagttcttcgagacatttgctgctccattcacanagaggggaattgtactcaagtttctgatattgg

SEQ ID NO: 8251 - DNA, 338 bp, Glycine max
  Clone ID: LIB3039-045-Q1-E1-C12
ggcacaagtttgttgagatagctagaagcaataagatgaaaatgaaagtgcttgttttgtttgttgctacagttttggtagcatatgaatgccatggctcagactaccagaagttccctctccaaatgaaaactgggtttggtgggcaatacagcaatgaggtggcatgtgccagttggaggcttggcgtggaagcaaacaacgtagtcaagtggcaaactgttcctgcagcttgcggagagtacatagctgactacgttctaggagaccaatatagatcagattccaaaacagttaaccaacaagcttatttctatgctaaatccctcaaactcacc

SEQ ID NO: 8252 - DNA, 393 bp, Glycine max
  unsure (1)..(393): unsure at all n locations
  Clone ID: LIB3039-045-Q1-E1-C2
ggttgttttcagcttgagaactgatatcatcatcattcattagctgggcggtttgaaaaggctaaattctaataacaccaacgtcttcatcttgtaagctccgtctcttgacaaaatcaacgtcccatttatgcaagctttgattaaccattttcattccctttttccttcgcactactccctcattctgtgccatgtcttcctctctcgttcttccttccactcccttcttcgcccatggaacaagaaccctccctctcactcgatctaagctttccatgaccgtctccgccggatctcagccttctctccgcgacgctctgttcgccgattacaaagggctcaacttaatccntcttccccggccagggtgctcaagctgttggaatgggg

SEQ ID NO: 8253 - DNA, 305 bp, Glycine max
  Clone ID: LIB3039-045-Q1-E1-C3
gcaaagttaattggatattgaaaaaactagaaacaattttatgaaaaattaagtccgtgatttcctcgtgctaaatctttgagcatggaaatgcatgccttcgaaatgtttcctctccgaatgaacactggctatggtgcccgtacactggaggtgaaatgcgcaatttggaagcttgctgtggaagcacacaacatctttggctttgagaccattcctgaatagtgcattgaaccaacaaaggaatacatccatggataacagtatagattagactccaaaacagtttaccaacaagcttactt

SEQ ID NO: 8254 - DNA, 394 bp, Glycine max
  unsure (1)..(394): unsure at all n locations
  Clone ID: LIB3039-045-Q1-E1-C4
ggggaaccctaattctgcgaggtgagtgaaaatggcggtacccttgctctccaagaagatcgtgaagaagcgcgtcaagaagtttatacgcccccagagtgatcgcaagatctccgtcaagccaagctggcgcagacccaagggtattgattctcgtgtcaggagaaagttcaaaggatgcactttgatgcccaacattggttatggctcagacaagaaaacccgccattatctaccaaatggtttcaagaaatttgtcgtgcacaatgtgaaagacctggaacttctcatgatgcataacaggacatattgtgctgagattgctcacaatgtaaccnacagggaaaaggaaggacatagttgagagagctgctcagcttgatgttgtcttgac

SEQ ID NO: 8255 - DNA, 336 bp, Glycine max
  Clone ID: LIB3039-045-Q1-E1-C5
ggatgagacagtaataataataatgagtgactgactagtctgaaagtgaaagttggtagacaaaagggaccccattctccattctccattctcaaactcaccatcaaatccttgccttctttctccctccaaatccctaattcccttccatcccaaaaattcaacaatactaacattattaactcttctcttcgtttttcccaattaggtttccgagtctcaaccaatttcaccatgtccactcaaattccgagttagttagttatctctttccgccatggaaggtaacaaggacgaagcattacgctgcgttcgcatcgccgaagaagcaatccc

SEQ ID NO: 8256 - DNA, 388 bp, Glycine max
  Clone ID: LIB3039-045-Q1-E1-C6
ggcacaagtgagtttgttgatcgagataactagaaacagtgtgatgaaaatgaaggtccttgttttcttcgttgctacaattttggtagcatggcaatgccatgcgtacgatatgttccctctccgaatgaacactggctatggtgcccgtactccggaggtgaaatgcgcaagttggaggcttgctgtggaagcacacaacatctttggctttgagaccattcctgaagagtgcgttgaagcaacaaacgaatacatccatggcgaacaatatagatcagactccaaaacagttaaccaacaagcttacttttatgccagagacctccaagttcatccaaaggacaaatttgggtccagtatagatggcaccgtactctctaatatt

SEQ ID NO: 8257 - DNA, 308 bp, Glycine max
  Clone ID: LIB3039-045-Q1-E1-C7
ggtgcacaagtgagtttgttgatcgagataactagaaacagtgtgatgaaaatgaaggtccttgttttcttcgttgctacaattttggtagcatggcaatgccatgcgtacgatatgttccctctccgaatgaacactggctatggtgcccgtactccggaggtgaaatgcgcaagttggaggcttgctgtggaagcacacaacatctttggctttgagaccattcctgaagagtgcgttgaagcaacataggaatacatccatggcgaacaatatagatcagactccaaaacagttaaccaacaagc

SEQ ID NO: 8258 - DNA, 391 bp, Glycine max
  Clone ID: LIB3039-045-Q1-E1-C8
ggcacaagtgagtttgttgatcgagataactagaaacagtgtgatgaaaatgaaggtccttgttttcttcgttgctacaattttggtagcatggcaatgccatgcgtacgatatgttccctctccgaatgaacactggctatggtgcccgtactccggaggtgaaatgcgcaagttggaggcttgctgtggaagcacacaacatctttggctttgagaccattcctgaagagtgcgttgaagcaacaaaggaatacatccatggcgaacaatatagatcagactccaaaacagttaaccaacaagcttacttttatgccagagacctcgaagtccatcccaagggacacaatttggggtcattataaatggcaccgtactctctaatattc

SEQ ID NO: 8259 - DNA, 383 bp, Glycine max
  Clone ID: LIB3039-045-Q1-E1-C9
gcacgcgtcagtggtggttttggcggaggtggtggacttggtggtggcctcggcggtcctaccggtgggatcggagggtttggcggtaccggtagcggtgtccgtggcggtattggtggtggcgttggaactggcgttggtggtggcagcggtgttcttcctttcccttgaaatgatgaacatgcatgcatgcatgcatatatgctccgtcacgtttctttggattacactagtctttatttttcgttcgggaaataattgtggtttgtgcttgtacgtgtcgttaatcgttcaagctttgttctagtgtttctctcgcctgtggaaagtaaaaaatagttgtaatgtgtcattctgtgtccttcatttgcttaagttttgtg

SEQ ID NO: 8260 - DNA, 316 bp, Glycine max
  Clone ID: LIB3039-045-Q1-E1-D1
ggggttatttatgtcatgacccatgattcaataggacttggagaagatgggccaacccaccaccctattgagcacctagcaagcttccgggcaatgccaaacattttgatgcttcgtcccgccgacggtaacgaaacagccggagcatacaaagtggccgtgctcaacaggaagagaccctccattcttgccctgtccaggcaaaaactgccccagcttcccggaacttccattgaaggagttgaaaagggtggttacaccatttcggacaactccactggcaacaagcctgatgtcattttgatcggaactggtt

SEQ ID NO: 8261 - DNA, 357 bp, Glycine max
  Clone ID: LIB3039-045-Q1-E1-D10
gactcactcatacaataaaaacagcttttgcttctttgtgaatatggaaataaggaaatcaggtggcttcttcttcttgctcctcttccttgtctttgcttcccaggtggtggtgcataccgaaggaagagtgtgtgagtacaaagccacggttcatggcttgtgtaatagagaccacaactgtgctttggtctgcaggaacgaacgtttctccggtggcatgtgcaaaggcttccgccgccgctgcttttgcaccaggatttgttgagatctcatcaaacactactcttgccatgcaaattaataaatcatagctaggccaaataaattgcatctactctttatccatttgggagc

SEQ ID NO: 8262 - DNA, 358 bp, Glycine max
  Clone ID: LIB3039-045-Q1-E1-D11
ggcacaagtgagtttgttgatcgagataactagaaacagtgtgatgaaaatgaaggtccttgttttcttcgttgctacaattttggtagcatggcaatgccatgcgtacgatatgttccctctccgaatgaacactggctatggtgcccgtactccggaggtgaaatgcgcaagttggaagcttgctgtggaagcacacaacatctttggctttgagaccattcctgaagagtgcgttgaagcaacaaaggaatacatccatggcgaacaatatagatcagactccaaaacagttaaccaacaagcttacttttatgccagagacctcgaagtccatcccaacgacacatttgtgttc

SEQ ID NO: 8263 - DNA, 362 bp, Glycine max
  Clone ID: LIB3039-045-Q1-E1-D12
gactgctacaaaaacattgaaagaaatagaaaaagcaaaactggtttctcgcatttcctccgaaacaaaccgtttcgctcgtttctcggatctgcaatggaagccccacccaaaggcgctgttggaagaaaaggtgacaggaagaagtccgtttccaaatccatcaaagctggcctccaattccccgtcagccgcgtcgccaggtacttgaagaaaggccgttactctcgccgccttggcaccggcgctcccatttatctcgccgccgttctcgaatatctcgccgcagaagtgttggagctggccgggaatgctgcacgtgacaacacgaataatacgattaaccctatgcacgtgttgct

SEQ ID NO: 8264 - DNA, 395 bp, Glycine max
  Clone ID: LIB3039-045-Q1-E1-D2
gacaacacaacgcaacacaacgcgcactctctcttttctctcttaacacaaaaaccctatcgttcttcgcggtttcgccgattctcgccatgccgaaagccaaatccgacgccaaagccgccgatagccggttgaagcgcaagggcgctggtgctggaaggaagcaatcgaagaaagctgctaaggatcctaacaagccaaagagacctccaagcgctttcttcgttttcatgtccgagttcagagagcagtttaagaaggagcatcctaacaacaaatccgtcgctgttgtcggtaaagctggtggtgacaaatggaaatcgctgtctgatgctgaaaaaggcccccttcgttgcacggccgaaaagaagaaacaagagtatgagaaaactatt

SEQ ID NO: 8265 - DNA, 323 bp, Glycine max
  Clone ID: LIB3039-045-Q1-E1-D3
gtggagatttaactgtgggctttatcacaatcaagtccaaagttcactcaagtgatgcgaggtgtttatgctgtgaaagctcttcgtttttccactgctttaaatattttgaaagatgaatttctgcgttccagagattatccaaaatgtcctccaacatctcatttatttcatcgattcaggcagttgggttatgcctgtatcaggtttggtcaatttgatagtgcaaaggaaacatttgaagttatagcagattatgaaagtatgcttgatctgtttatatgccaccttaatcccagtgccatgcggcgtcttgctcaaaa

SEQ ID NO: 8266 - DNA, 392 bp, Glycine max
  Clone ID: LIB3039-045-Q1-E1-D4
gggagaagcatgagaatcggagagaggaagaagaagaatagcatccccagcgacgaatgaatgggcaattgcggaagcatagatgaatctgccgtagtttccaaagctcacgttgttcagcagcttcgccatgctacgtcgttgggcgccagtgccaagatcgacaagaaccactctcacaggcacaatctcagcgagtgcgcttcggatctcagcgagtcctgttccacatcgcacggtatcaatagcagcaacacgctgctctacacgcacgtcatcgctttcacgctctacgagttggagaccataaccaagagctttcgcgcccaataaattcctcggccagggaggcttcggcaccgtttacaaaggctacattgatgataacgtca

SEQ ID NO: 8267 - DNA, 324 bp, Glycine max
  Clone ID: LIB3039-045-Q1-E1-D5
gacacaccatccgttctagtctcaacttctgctcttccaactcctacaacgcttttctctgcactcatgggcaaggtcaagatcggaatcaacggatttggaagaattggccgtttggttgccagagtcgctctgcaaagagacgatgttgaactcgttgccgttaacgaccctttcattaccaccgattacatgacatacatgtttaaatacgacagtgttcacggacactggaagcatcacgatgtcaccgttaaggacgagaagacccttctcttcggtgacaaggcagtcactgtttttggacacagaaaccctgaagag

SEQ ID NO: 8268 - DNA, 392 bp, Glycine max
  Clone ID: LIB3039-045-Q1-E1-D6
gcacaagtgagtttgttgatcgagataactagaaacagtgtgatgaaaatgaaggtccttgttttcttcgttgctagaattttggtagcatggcaatgccatgcgtacgatatgttccctctccgaatgaacactggctatggtgcccgtactccggaggtgaaatgcgcaagttggaggcttgctgtggaagcacacaacatctttggctttgagaccattcctgaagagtgcgttgaagcaacaaaggaatacatccatggcgaacaatatagatcagactccaaaacagttaaccaacaagcttacttttatgccagagacctcgaagtccatcccaagggacaacatttgtggtcagtatagatggcaccgtactctctaatattcca

SEQ ID NO: 8269 - DNA, 327 bp, Glycine max
  Clone ID: LIB3039-045-Q1-E1-D7
ggcacaagtgagtttgttgatcgagataactagaaacagtgtgatgaaaatgaaggtccttgttttcttcgttgctacaattttggtagcatggcaatgccatgcgtacgatatgttccctctccgaatgaacactggctatggtgcccgtactccggaggtgaaatgcgcaagttggaggcttgctgtggaagcacacaacatctttggctttgagaccattcctgaagagtgcgttgaagcaacaaaggaatacatccatggcgaacaatatagatcagactccaaaacagttaaccaacaagcttacttttatgccagagacct

SEQ ID NO: 8270 - DNA, 391 bp, Glycine max
  Clone ID: LIB3039-045-Q1-E1-D8
ggtaaacaaaaaccatcaccaaaaaagaaaatgatgctcggagagcaccatcgcgcgaatccaacggttcacgtgccaccgtggccaacccacgacgatccaacggccgagatgtactccgcgtttttaacaaacgacgtcaatgctggtgagtactctccgtactatcttcaagaagcacgaacggctctgcagcgttttctgccgtctaacgaaacggacgctgactcggacacggaggctcaacccgacgcggcggtggacgcgtactcgtgcgaccatttccgcatgtacgagttcaaggtccgtcgatgcgcacgtggcaagtcaaaagaatgggacggagtgtcggtacgcgcatcccggcgagaaggctcgacgccgggacccg

SEQ ID NO: 8271 - DNA, 346 bp, Glycine max
  Clone ID: LIB3039-045-Q1-E1-D9
ggaacgattccgatccagaaaatggcatccgccgccgccagatctagattccgatcatgctccgcccccaggtcagcgtttcgcgtcgcatcgggagccaaaccggttcgttctccgttccgcatcgcgtccaataggcctctctcgcagtcccaatccactctcaggttccctgtggaattgagttcgtgtgtggaatcaaggatgtcgtagcacacggccactgcttctgcgcgcatgaattctatgctttcaatttcgacccgcacgagcgcttggattcccgaaggccaaaagcagactacgtgaagatcagggatgatacatgggattgcatggactttct

SEQ ID NO: 8272 - DNA, 317 bp, Glycine max
  Clone ID: LIB3039-045-Q1-E1-E1
accgtggttcttactcgcgaaaagaatcttaatgttggctgtttcatacgacgtcgtctcctggaacgcgatgttcaccactggggtccacttgctgaaggcccttgcaatcgcgcttttgaaagtgtcatcaagtcttggctccggggagaaagcgtaggtgagttgtgtggttccagcttgccaccgcggcatgtctttgaagaaggtatagtccgagatcatgccaaacgatgtggttttgtttgtgttgattattatgtcggggacgccacaccggggtgtcatgatttgtttaagagtgttgatgtcgaact

SEQ ID NO: 8273 - DNA, 390 bp, Glycine max
  unsure (1)..(390): unsure at all n locations
  Clone ID: LIB3039-045-Q1-E1-E10
ctatccaaattcattggcgtgtggccattttcaaattgaatggagttatggaattggggttgagattcgattagacagacacaccatggacccagagtcaccatatgctaggggtatgtacaaaatcttgtccaaattaaattctctcaaaaagattgaaaaaggtgctaggggtgtcattgactctagacaaagtacatttttggaaggaagatatttattacaagtgcacttgtggctaataagggggtgaaggaggcaaaaaagaaagaagaaaaaatgcctcatttttaaagttataaaaagacatgactcaatgagttggaagtttcttctatatatgctttanagactggaattttaagagaagtgaattgggtgttgtttggt

SEQ ID NO: 8274 - DNA, 397 bp, Glycine max
  Clone ID: LIB3039-045-Q1-E1-E11
ggcacaagtgagtttgttgatcgagataactagaaacagtgtgatgaaaatgaaggtccttgttttcttcgttgctacaattttggtagcatggcaatgccatgcgtacgatatgttccctctccgaatgaacactggctatggtgcccgtactccggaggtgaaatgcgcaagttggaggcttgctgtggaagcacacaacatctttggctttgagaccattcctgaagagtgcgttgaagcaacaaaggaatacatccatggcgaacaatatagatcagactccaaaacagttaaccaacaagcttacttttatgccagagaactcgaagtcaatcccaaggacacatttgtgttcagtatagatgggcacgtactctctaatattccatactac

SEQ ID NO: 8275 - DNA, 343 bp, Glycine max
  Clone ID: LIB3039-045-Q1-E1-E12
catctttacaggtactccacttgaaatcgagttcgtagagaaaccttattgtgctgaatcctccaaatgggtggcgtttgtggacaatgaaatccaaaaggcatgtgtgggtattggtggtcctgaaggtcatcctggtcaacaaacatttagtggcacatttagcattcagaaatataaatttggatacaaacttgtgttctgtatcactggctcaggcacttgtttagatattggaaggtttgatgccaaaaatggtgagggaggaagacgtttgaatctcactgagcatgaggccttcgacattgttttcatagaagcttctaaggttgatggaattatc

SEQ ID NO: 8276 - DNA, 260 bp, Glycine max
  Clone ID: LIB3039-045-Q1-E1-E2
ggcacaagtgagtttgttgatcgagataactagaaacagtgtgatgaaaatgaatgtccttgttgtcatcgttgctataattttggtagcatggcaatgccatgcagtaggatatgtttactctccgaattaacactggcaattgtgcccgtattcctgatgtcaattgcaccttttggaagcattaatgtggaagcacacattatctgctgtctatgaaaacattcctcaacactgcctataaggctcaaccgaataca

SEQ ID NO: 8277 - DNA, 311 bp, Glycine max
  unsure (1)..(311): unsure at all n locations
  Clone ID: LIB3039-045-Q1-E1-E3
gaaacaacaaccgttccaatcccaaattccggccctccaactcccaaaaagcctttccccgcaatcaagggcaaggtcaagatcggaatcaacggatttggaagaattggccgtttggttgccanagtcgctctgcaaagagacgatgttgaactcgttgccgttaacgaccctttcattaccaccgattacatgacatacatgtttaaatacgacagtgttcacggacactggaagcatcacgatgtcaccgttaaggacgagaagacccttctcttcggtgacaaggcagtcactgtttttggacacag

SEQ ID NO: 8278 - DNA, 379 bp, Glycine max
  Clone ID: LIB3039-045-Q1-E1-E4
gacagcacagcactctttgcaacacaacaaaaaaagacaacacagagagaagcgtcttaataaacgctcttctctgaaaaacctgatttcttctcttcttctcttctctttcgtttcgatcttcgatctctgaaaatgagagagtgcatttcaatccacatcggtcaggccggtattcaggtcggaaacgcctgctgggagctctactgcctcgaacacggcattcagcctgatgggcagatgccaagtgataagactgttggtggaggtgatgatgctttcaacaccttcttcagtgaaactggggctggaaagcacgtgcctcgtgggaattttggtaaatctcgagcctactgtgattgatgaagttaggactggg

SEQ ID NO: 8279 - DNA, 329 bp, Glycine max
  Clone ID: LIB3039-045-Q1-E1-E8
agtgcacaagtgagtttgttgatcgagataactagaaacagtgtgatgaaaatgaaggtccttgttttcttcgttgctacaattttggtagcatggcaatgccatgcgtacgatatgttccctctccgaatgaacactggctatggtgcccgtactccggaggtgaaatgcgcaagttggaggcttgctgtggaagcacacaacatctttggctttgagaccattcctgaagagtgcgttgaagcaacaaaggaatacatccatggcgaacaatatagatcagactccaaaacagttaaccaacaagcttacttttatgccagagacct

SEQ ID NO: 8280 - DNA, 367 bp, Glycine max
  unsure (1)..(367): unsure at all n locations
  Clone ID: LIB3039-045-Q1-E1-E9
ggtgagacgagggtaaggtcgcgttgtgttgcgtcgtgtcgtgcgctgttcctctgtctgtcgtttttgttttcagaccaaaccctagctccgcatcgcaaccatgtcgaccaagcaaggtggaaaagctaagcctttgaagaaacccaagtctgataagaaggattacgacgaggttgacatggctaacattcagaagaaaaaggaagaggagaaggcgctaaaggagttgaaagccaaggcgcaacagaagggaagctttggaggttctgggctcaagaaaagtggaaagaaataagggctctttatcatgattgtatacatccaatattgagccctgtagtttattancatgataacttctgtc

SEQ ID NO: 8281 - DNA, 357 bp, Glycine max
  Clone ID: LIB3039-045-Q1-E1-F1
agcaaaagacgacagaagggggagccacaacacaaccaaaagcctattcacttggtcaatcattctctcacttagcaaacaaacactgtgtgtagctgcaatggaagagtattactaccagagacatcacgtgccagcatttgggagctgggattggaatgataatcttccttttacacaatgctttgagtctgcaagacaggctggtttgctaagatatggttactctgagtctgaagatagagatctttatgtcactggagacttgtatgagaatgattttgtcaaacccgctgtgatcgttgttcctcgcagaagggaaaaggtacgttgccacaatgaaaaagacgaataaaa

SEQ ID NO: 8282 - DNA, 337 bp, Glycine max
  Clone ID: LIB3039-045-Q1-E1-F10
ggagagtgagtgagatagagagagacgcttcgcagatctcaatcgaatctcagaaatatgagagaaagcatcagcattcacatatgtcacgccgggatccaggtcggaaactcctgctgggaactctactgcctcgaacatggcatccagcccgacggcatgatgccttctgactccaccttcggtgtagcccacgacgccttcaacaccttcttcagcgaaaccggatctggcaagcacgtcacccgtgctgtcttcgtcgagctcgaatccatcgtcatcgacgatgttcgctgcggcacctaccgtcaactcatccataccgaacaactcatct

SEQ ID NO: 8283 - DNA, 354 bp, Glycine max
  unsure (1)..(354): unsure at all n locations
  Clone ID: LIB3039-045-Q1-E1-F11
gaattacgggaaggggccattgaacagctggaaaaagcccaagcccgcttaaggaaagtcgaaacggaagcagatcgttttcgggtgaatggctattctgagatcgaacgagaaaaattgaatttaattaattcaatttatacgactttggaacaattagaaaattacaaaaacgaagccattcattttgaacaacaaagagtgattaatcaagtccgacaacgggttttacaacaagccttacagggagctccaggaactctaaagagttgcttgaacaacgagttacatttacgtactgtcagtgctaatattggcatgtttgggacgatgaaagaaaanataactgattag

SEQ ID NO: 8284 - DNA, 339 bp, Glycine max
  Clone ID: LIB3039-045-Q1-E1-F12
gggtgcgttgcttctactcaaacttccttcctcttcagcccaccaaggaaactgcttccgaatctgatcaatggaaaactcagacgagcaacttcccttctctccacaaaaccctaacaatgccgaagaagaagacgacgacatcgaagagccagaagacgaagacgaagaagaggaggaggaggacgacgacgacgacgacgtcgtttcgcaggagcaatccccattgtcgcggctgcgcgagcagcgttcgaagctggaaaccctgtcccggcgattggcgtcggagctggtcccaatccgagtccacgacgtgctgattcgcggcaacacgaagac

SEQ ID NO: 8285 - DNA, 380 bp, Glycine max
  Clone ID: LIB3039-045-Q1-E1-F2
ggaacctttgcattctattcattcaagattcagcaagtgcgttttggaagcagagaccgaaatacttcgagatggcccgtacaaagcaaactgctcgtaagtcaactggaggaaaagctcccaggaagcagcttgcaaccaaggctgcacgtaagtctgcaccaacaactggtggtgtgaagaagcctcatcgttatcgccctggaactgttgctcttcgtgagattaggaaataccagaagagcactgagctcctaatcaggaagcttcctttccagaggttggttcgtgaaattgcccaggatttcaagactgatctgcgtttccagagccatgccgtgcctgcattgcaagaggctgctgaggcataccttgttggg

SEQ ID NO: 8286 - DNA, 272 bp, Glycine max
  unsure (1)..(272): unsure at all n locations
  Clone ID: LIB3039-045-Q1-E1-F3
gacccccaaaccctgctgcatangaagaaaccctagcctctcaccctccctgcgacacgatgcagatcttcgtgaaaaccctaacgggtaagacgatcacccttgaggtggagtcttctgacaccatcgacaacgtgaaggccaagatccaggacaaggaaggcatccctccggaccagcagcgcctcatcttcgccggaaagcagctggaggacggccgcaccctcgccgactacaacatccagaaggagtccaccctccacctcgtcctc

SEQ ID NO: 8287 - DNA, 392 bp, Glycine max
  Clone ID: LIB3039-045-Q1-E1-F4
ggtcttccagtgaaagaaaggcagcgatggaagaagacttcgacatccccggcggcaaggaaatggttcccggcaaaaacaaggccggcaaggaaaggaaaatcggcccgggcggcctcaaaaaaaacctccccaaggaaggtcaaggctggggaaacccccaaagccggtgacgaagtccaagttcattacacggggactttgctcgacgggactaagttcgattcgagccgcgacagggattctcccttcagcttcacgctcggacaagggcaagtaattaaaggatgggatgaaggtattaaaaccatgaagaaaaggtaaaatgctaatttcaacatccctcccgagctagcttatggtgaatctggttcccctcctactattcctcc

SEQ ID NO: 8288 - DNA, 334 bp, Glycine max
  Clone ID: LIB3039-045-Q1-E1-F5
ggagcaataccctaaaccctattgttcttcctcagtagtgtcatctacgcatctcttcactgcaccatctatgccgaaccctaaggtcttcttcgagatgatgatcgggggtcaatctgctggccgcatcgtgaaggagctctacggctacgtcactccccgcaccgcagagaacttccgcacgctttgcaccggcaagatcggcgtaaggcggagcagcaatcccctcgactacaatggctcgtgcatcgaccgcgtgatcccgagtttcatgtgtcaggttggcgacttcaacgtcagtaacgggatcggaggcgagtcgaattaaggcgcc

SEQ ID NO: 8289 - DNA, 391 bp, Glycine max
  unsure (1)..(391): unsure at all n locations
  Clone ID: LIB3039-045-Q1-E1-F6
gattcacgcagctgaataaagaaaaaagcctttcatagtgagatagccctagaaatgtttcgtgaatctttgtttgctctctttctactttctgccttctcctcctcactcctacctttaaccactgctcaagattacgttctcgacacggacggtcacgcggttgaaaatcacggtacatactatttgttgccagcgaaatcaggaagcggcggtggtggaatagaggtagccgcaactggcaaagaaagttgcgctctcactgtagtgcaatctctgaacgaggactccatggggctaccattgaagctttcaagcccatccatcactacgtctcacttcancgaatacacttcgttgaacatcgagttcacttcggcgccggcgccgt

SEQ ID NO: 8290 - DNA, 386 bp, Glycine max
  Clone ID: LIB3039-045-Q1-E1-F7
ccggctcgacccacacgtcaggacgacagaagggggcacaagtttgttgagatagctagaagcaataagatgaaaatgaaagtgcttgttttgtttgttgctacagttttggtagcatatgaatgccatggctcagactaccagaagttccctctccaaatgaaaactgggtttggtgggcaatacagcaatgaggtggcatgtgccagttggaggcttggcgtggaagcaaacaacgtagtcaagtggcaaactgttcctgcagcttgcggagagtacatagctgactacgttctaggagaccaatatagatcagattccaaaacagttaaccaacaagcttatttctatgctaaatccctcaaactcaccaacaaagatgtcct

SEQ ID NO: 8291 - DNA, 377 bp, Glycine max
  Clone ID: LIB3039-045-Q1-E1-F8
ggcacaagtgagtttgttgatcgagataactagaaacagtgtgatgaaaatgaaggtccttgttttcttcgttgctacaattttggtagcatggcaatgccatgcgtacgatatgttccctctccgaatgaacactggctatggtgcccgtactccggaggtgaaatgcgcaagttggaggcttgctgtggaagcacacaacatctttggctttgagaccattcctgaagagtgcgttgaagcaacaaaggaatacatccatggcgaacaatatagatcagactccaaaacagttaaccaacaagcttacttttatgccagaaaactcgaaattcaatcccaaggacacatttgtgttcagtatagatggcaccgta

SEQ ID NO: 8292 - DNA, 408 bp, Glycine max
  unsure (1)..(408): unsure at all n locations
  Clone ID: LIB3039-045-Q1-E1-F9
gaacgatcataaggcaaaaatctaaagagctacgatgacgcgagcaagcggcgaagattcctgagaagagtgggatttgcttgagtcattctcttcccttctagctacgtaacgactaacgacgcactctactctttcttagggtttcctctcccgccaattttccctttccccaattcaattccaaccctaacctcactccactctcgccggaaccgcaccttcgattcgacctagggtttcacgaacttcacgatgccgtcgctactctccccgggcaaaatccactgcctcgaggtggagaatttcaagtcctacaagggcttccgagtgatcggtcncttctacgacttcaccgccatcatcggccccaacggcgccggcaagtccaatctcatggacgccatc

SEQ ID NO: 8293 - DNA, 315 bp, Glycine max
  Clone ID: LIB3039-045-Q1-E1-G1
gggtgaggagtcatgggctctagtccgtcaggatttaattagagagcttcaacagtggcaagataattatgcgaaactctttggtagcaatgaccgagtggctgaactgaggaaatctttgtatgttggcaagcaggcatctgtcgctagttggatgaccataccagatatgggctatgtaattgcctcaagatataacgtggtcctagtcactttatccttgcaggagtgcatgacctttttccctcttagaggacgaccaccactatctcagtcaagtcaccgtcttatttccattgggtttgtgcataaatg

SEQ ID NO: 8294 - DNA, 357 bp, Glycine max
  Clone ID: LIB3039-045-Q1-E1-G10
gctctaccgcattagcactcgtctttggttctggtttatagatctctgtgaagtcgctttataacactcaacctaagatgcagaacgaggaacgacagatcaccgagctttacattcctaggaagtgctctgccacaaaccgattgattaccgctaaggaccatgcttcggttcaggttaacattgggcatgtggatgagaatggcgtctacaatggccatttctccacttttgctctctgcggcttcatacgtgctcatggtgatgctgacagtgccctagatcgcttgtggcagaagaagaaagttgaagttaagcaacagtagacacccatgatagtttgttactttgctatgt

SEQ ID NO: 8295 - DNA, 378 bp, Glycine max
  Clone ID: LIB3039-045-Q1-E1-G11
ggctgcagcaagggctcaacgcacgcaggaggaggagattgatcgagagaagagaagatgactacacgcttcaagaagaacaggaagaagagaggccacgtgagtgccggccatggccgcatcgggaagcaccggaagcaccctggaggacgcggtaatgccggaggcatgcaccaccaccggatcctctttgacaagtaccaccctgggttcttcggcaaggtcggaatgcgctattttcacaagctccgcaacaaattccactctccgatcctcaacatcgacaagctctggtccctggttccgcaagaagtgaaggacaaggcctccaaggagaacaaggcgccgctgatcgacgtcacgcagttcggggtactt

SEQ ID NO: 8296 - DNA, 354 bp, Glycine max
  unsure (1)..(354): unsure at all n locations
  Clone ID: LIB3039-045-Q1-E1-G12
ggcacaagtttgttgagatagctagaagcaataagatgaaaatgaaagtgcttgttttgtttgttgctacagttttggtagcatatgaatgccatggctcagactaccagaagttccctctccaaatgaaaactgggtttggtgggcaatacagcaatgaggtggcatgtgccagttggaggcttggcgtggaagcaaacaacgtagtcaagtggcaaactgttcctgcagcttgcggagagtacatagctgactacgttctangagaccaatatagatcagattccaaaacagttaaccaacaagcttatttctatgctaaatccctcaaactcaccaacaaagatgtctttg

SEQ ID NO: 8297 - DNA, 395 bp, Glycine max
  Clone ID: LIB3039-045-Q1-E1-G2
gaagactcaaactctttcccatggatactctatcatcctctgtttcaaccctcaatgttcccccactcccatcatcaaccttcacaaatcgcgatttctatcgattcaaagcatcccccacccgttcccaacaacaacaacaacatcatgttttctccacttccacacccaattttctccccaaaaccaaaactttctcccacaaatcttccccttctcttccattctccccctcacccctcaaacccaaaccgtcttctccaactttccatccaaatcccgctactgggtatgcggcagcgctggtggacgtcgcccacaacagcaattcccttcaacttggtcacagcgatgttcaaaggctcttgaaattgctgcagggtgccaagtttcag

SEQ ID NO: 8298 - DNA, 395 bp, Glycine max
  unsure (1)..(395): unsure at all n locations
  Clone ID: LIB3039-045-Q1-E1-G4
gtcacaccaaaatttgccaattgccatttcaatccccagtttcttcttcaacgtcctcttacgagcaagtccaattccccctcccagtttcaaaaccctaaatccctcattcccatggcctcagaagagcccactgtcgccgtggaacncgctcccgaacctgccaccgccgagcctcncccggaggagaaggaggagcccaaacctgaagccaaggctaagaaaaccaaggaacccaaacctaaaaaggtttccagaccacgcaaccctcccactcatccttcctacgaggagatgattaaagacgcaattacctcgctgaaggagaaaaacggttccaagcaacaagcaattgcgaggttcatcgaggagaagcacangcagcttccaccgaa

SEQ ID NO: 8299 - DNA, 392 bp, Glycine max
  unsure (1)..(392): unsure at all n locations
  Clone ID: LIB3039-045-Q1-E1-G5
ggcgtacacagcctcaacaaccctaacgcgtgcagagcagagagagacgcagccatggggcgaagacccgcgaggtgttataggcaaattaagaacaaaccataccccaagtcacggttttgccgtggtgttcctgatcccaagatcaggatttacgatgttggtatgaagaagaagggtgttgatgagtttcctttctgtgtccatctggttagttgggagaaggaaaacgtttctagtgaggccctggaagctgctcgtattgcttgcaacaagtacatggccaaatttgctggaaaggatgctttccacttgagagtcagggtgcacccattccatgttcctaaggttcaccangatgctttcgtgtgctggagctgataggctccaaa

SEQ ID NO: 8300 - DNA, 392 bp, Glycine max
  unsure (1)..(392): unsure at all n locations
  Clone ID: LIB3039-045-Q1-E1-G6
gtccgccatttttcgtagctgctgttcttgcgcgtgaacaagcctcaggtaagccaaaaccatggttaagcataacaatgttatcccaaacggacacttccgtaagcactggcagaactatgtgaagacttggttcaatcagccagcacggaagacaaggagacgattggctcgtcagaagaaagctgtgaagatattccccagacctacggctggacctctcaggcccattgtacatggtcaaactttgaaatacaacatgaaagtgagaggtggaaggggattttctcctgaagaactcaaggcagcaaggattcccaaaaagcttgcancaaaccataggtattgctgttgatcatcgtcgcaagaaccgttctttggaaagtctgcaa

SEQ ID NO: 8301 - DNA, 391 bp, Glycine max
  unsure (1)..(391): unsure at all n locations
  Clone ID: LIB3039-045-Q1-E1-G7
ggctttaagtcattctttctctactggctacgtaacgactaacgacgcactctactctctcttagggtttcttctcccgccaatttcccctctcccccattcaattccaaaccctaacctcactccacccttgccggaaccgcaccttcgattcgacctagggtttcacagtttcactccgagcacgcacgcacgaacttcacgatgccgtcgctactctccccgggcaaaatccactgcctcgaggtggagaatttcaagtcctacaagggcttccaagtgatcggtcncttctacgacttcaccgccatccttggccccaacggcgccgggaagttcaaccttaatggacgcaatcagcttcgtcatcggcgtccgcaccggccagctc

SEQ ID NO: 8302 - DNA, 369 bp, Glycine max
  unsure (1)..(369): unsure at all n locations
  Clone ID: LIB3039-045-Q1-E1-G8
gagaaagggggtttctttcacttcagatttggttaattagggttccgttggcgcgagctaagagcgaaggaagtagaagcagcaaaacccaatcaaagaccctcactctcaccccacacttcaccagcaaatgtgttggaagccaaagaaaatgctggttccattaaaacaacagcaaccgatactgctctagaaaactttaagcagaagtgggaattgtttagagtagcatgtgatcaagccgaggagtttgtggagtctgtgaagcaaaggataggatccgagtgtctggtggatgaggcaacaaggcctgttacaggaaaacctgaacaagctaccatgactggtcttcctcncatcagtgcagtt

SEQ ID NO: 8303 - DNA, 407 bp, Glycine max
  unsure (1)..(407): unsure at all n locations
  Clone ID: LIB3039-045-Q1-E1-G9
gacacacttcagatcaacgatgatgaggtggaactatgggtggttagaggattaactgctaagttaattgactgtaagatggaccaaatgaatcaagttgtagttgtcagtcatcctactgagcgtgtgtttggtcagcaccaatggcaagcactgagaacaaagctagtgacatggaggggaaatattgtaaatgttatcagtaccattcaggccaacaaaataacggaggatgggtcccaggcagcccaaggtttggttgttcgttgaggacaattgagtgaagcaattatctgagtatctagattttattcaagtggaattttttgatcttaaacagaggataagagtgtaatttgtnttgttacgatttatttttccatttaatttaattggctggtgactcc

SEQ ID NO: 8304 - DNA, 391 bp, Glycine max
  Clone ID: LIB3039-045-Q1-E1-H1
ggtgttgcagaagacacaaaagaagtcacaaaatgtatcgcgttcttcaccgcgctttctgcaccgccaccgagcccgccaccaccgccaccgtcaccgtttccatcaagtccatttcggaggatctgtacaaggaagtgaagctaaagaatgtggtggagaagttcaagaaagcctcggacatcgaccgcttccgcaaaaaaaccggcatctacgaagacaccgtccgccgcctcgccggcgcccgacgcttccggtggatccgcgacatcctcgagcaccagaagcagtactccgacatctccaacgacggcttctccgcgcgcctcaacttcctggtccggaaattccgggatgaccaaccacgctcgcaaggtgttcgacgaaatgc

SEQ ID NO: 8305 - DNA, 376 bp, Glycine max
  Clone ID: LIB3039-045-Q1-E1-H10
agacaggtgacgacagaaggggagggttttgcgctgttgttgctgctcatcctccgtaacctccgagctctgcaccgaagaacgaagccatggggaagacacatggaatgggatctgctcgcaagctcaagtcccaccgcaggaggcaaaggtgggctgacaagtcatacaagaaatcacatcttggaaatgaatggaagaaaccttttgctggttcatcccatgccaagggaattgtccttgaaaagataggtattgaggctaatcagcccaactctgccattcgtaagtgtgccaaggttcaacttatcaagaatgggaagaagattgccgcttttgtccctaatgacggttgcttgaactacattgaagagaa

SEQ ID NO: 8306 - DNA, 330 bp, Glycine max
  Clone ID: LIB3039-045-Q1-E1-H11
ggcacaagtgagtttgttgatcgagataacaagaaacagtgtgatgaaaatgaaggtccttgttttcttcgttgctacaattttggtagcatggcaatgccatgcgtacgatatgttccctctccgaatgaacactggctatggtgcccgtactccggaggtgaaatgcgcaagttggaggcttgctgtggaagcacacaacatctttggctttgagaccattcctgaagagtgcgttgaagcaacaaaggaatacatccatggcgaacaatatagatcagactccaaaacagttaaccaacaagcttacttttatgccagagaactcga

SEQ ID NO: 8307 - DNA, 356 bp, Glycine max; identical to SEQ ID NO: 7609
  Clone ID: LIB3039-045-Q1-E1-H12

SEQ ID NO: 8308 - DNA, 391 bp, Glycine max
  Clone ID: LIB3039-045-Q1-E1-H2
ggagcaaaaccctaatccctatttttcttcctcagtagtgtcatttacgcttctcttctctgcagcaactatgcctaaccctaaggtcttcttcgacatgaccatcggcggtcaatctgctggccgcatcgtgatggagctctacgccgacgtcactccccgcaccgccgagaacttccgcgcgctttgcaccggcgagaagggcgtagggcggagcggcaagcccctccactacaagggctcgtccttccaccgcgtgatcccgagtttcatgtgtcagggtggcgacttcaccgccggaaacggaaccggcggcgagtcgattttatggcgcaagtttcgccgacaagaaactcgtgaagaagcacaccggtcccggcatcctctccat

SEQ ID NO: 8309 - DNA, 400 bp, Glycine max
  Clone ID: LIB3039-045-Q1-E1-H4
gatgtcatagtattatcattcattctcatctttctctcttctctctccacccaaaccctaactcccgaccctgttcccctctcgtatccgtcatgaaaggaggaaagtccaagaccgaatctaagagagccgatcccaaacttgctgtgaataagaagggagccgccaccaaggctaggaaacccgccggcaaggggaaggcagcgaaagaccctaacaagccaaagaggcctccaagtgctttcttcgttttcatggaggagttcaggaaggtattcaacaaagaacatcctgaaaacaaagcagtgtctgctgtgggcaaagctgctggagcaaaaatggaagaccatgtctgatgctgaaaaagcaccttatgtggcaaagtctgagaaaaggaaat

SEQ ID NO: 8310 - DNA, 398 bp, Glycine max
  Clone ID: LIB3039-045-Q1-E1-H5
gatagcgaaacagagagtggtttcagtgagtgatcggtgttcacttgatctttcataagtcggcatcatcatcatcaccatcaccgttgattgaagaagatgccgatcagaaacatcgccatcggaaggcctgaagaggctacgcaccccgacacgttgaaggcggggttggctgagttcatctccaccttgatcttcgtgttcgccggttcaggttccggcatcgcctacaacaagctcaccgacaacggcgccgccactcccgccggcctcatctccgcttccatcgcccatgctttcgccctcttcgtcgccgtctccgtcggcgccaacatctccggccggcaagtttaaccccgcggtcaccttcggcgccttcgtgggcggcaacatcacct

SEQ ID NO: 8311 - DNA, 432 bp, Glycine max
  Clone ID: LIB3039-045-Q1-E1-H6
gacccacacgtacgacggcgacagaaggggagaactgaaaatgttgatgatgaacacaatgcaatagctgtggtggagtctgagcgagggaggaatcattcaaggagacatgatgatccaagaggaagatcaaaatcgcaattgcatccacaacgagatatgagtaacattcaatgttattattgtggtgagaatgatcatgtgcaagtgaggtgtaaacaaatgaaggaggatttgaaaaaattaagagatatgaacaaagatgacgccaactcccaaactaatgtagtaaaaagtgtggaagatgaagatgatgtgtttttggcaacaaatgatggggttgctaaaacaaaatggatgatggattctgctgtctcaaagcacatttgcagagatcgagatatgtttgatactttgaaaatcgatggggaa

SEQ ID NO: 8312 - DNA, 386 bp, Glycine max
  Clone ID: LIB3039-045-Q1-E1-H7
ggcacaagtgagtttgttgatcgagataactagaaacagtgtgatgaaaatgaaggtccttgttttcttcgttgctacaattttggtagcatggcaatgccatgcgtacgatatgttccctctccgaatgaacactggctatggtgcccgtacttcggaggtgaaatgcgcaagttggaggcttgctgtggaagcacacaacatctttggctttgagaccattcctgaagagtgcgttgaagcaacaaagggatacatccatggcgaacaatatagatcagactccaaaacagttaaccaacaagcttacttttatgccagagaactcgaagtccaacccaaggacacatttgtgtccagtatagatggcaccgtactctctaata

SEQ ID NO: 8313 - DNA, 393 bp, Glycine max
  Clone ID: LIB3039-045-Q1-E1-H8
ggcatcacgtatccccccacacatcaccctctacctactttgcacctctcacccttctctctataggaaatagcaagcgtgttttcccagctatagtaatctatcaaacaaaacctctgctacactctagcatcctacacccccactttttctagtaataatagtactacattatctagtgttcgagagagagagagttcatagttcaatgctcagttcttcttcggcttcgtttttgaggcagttaagtgcaaaaaaggagggttggaaagagagatactataatagtggtagtggtggctggggaatgagctttggagggtgtgaagcaagtgtgaaactaatggaagggtttaacatgcaggggaatgtggggaggaagagggtgatggt

SEQ ID NO: 8314 - DNA, 376 bp, Glycine max
  unsure (1)..(376): unsure at all n locations
  Clone ID: LIB3039-045-Q1-E1-H9
ggcgtgcacaggcgaaaaccctaatcctgaggcactgaaagtgtgatatggcaagagtcatttcctcttcctgcgcacgcctcgcaatgcgcctcttctccaccaccaccacagccaccgcgttcgccgtcactttacccaaaccctcatcactctccctctcatcgcgtcgattcctcttccctctctcccatgccatcgtccctccctccacccgcgtcgccggaatccggtgccgcgttaaccgcgccggagactcggcgtactcaccgctgaactcggggtcgtcgtcttcgtcgttcagcgaccgcccccccacggagatggcgccgctcttccccggctgcgactancancactggctcatcgtcatgga

SEQ ID NO: 8315 - DNA, 333 bp, Glycine max
  Clone ID: LIB3039-046-Q1-E1-A1
cccagccttaagacggatgcaagaggacgacgtaagggggtcgaaccgcgatcacgcgccctagaacccgagctcgcgtgcagcttccgtctcctacaccaggatggagtctcaggtgaatcacgcacttcttgtcaaagttatgggtcgtactggatctagaggagaagtacgccaggtgcgagtcaagtctctggatcatcagtaccgtcacatcaccaggactgtgaactgacctgtgcgatgaggagacattctcagccaactcaagtcagtaagggaatcacgaggattgcactcaatcgcatcttttggcttgcctccaagatcgac

SEQ ID NO: 8316 - DNA, 321 bp, Glycine max
  Clone ID: LIB3039-046-Q1-E1-A11
gccataaccatggcgtctaactctgcttccgctctttacttccttttatgcctatcgcccatcactttgcttctttctgcgtttcgtgctcaagctcaatctcatgctccagctcccactttcaagtactgtgaaaagaatgcagactatgctgtgaaggtgagtggagtggaaatattgcctgaccccgtggagagaggagtgccattcacctttaagatcccagcttatactcctgaaccaattcaaagcggggacttgttatatgaaatttcttatgctggaatagaagcacaacctgctacatttctccatgatctc

SEQ ID NO: 8317 - DNA, 361 bp, Glycine max
  unsure (1)..(361): unsure at all n locations
  Clone ID: LIB3039-046-Q1-E1-A12
gacagcatatatatcaataatctattttatactatacctacattttgataattttctttgtagttgatagccatggctacccgtggaaagcttgaggttgacattgatctcaagcccaacgcagacaagtactggcaaacccttaggaattctactgaaatattccctaaggccttcccacatgattacaaaagcattgaggttcttgagggtgatggcaagtctcctggttctatccgccacataagttatggtgaaggttcaccacttgtgaaatcatcctttgagaagattgacgctgttgatgaggaaaagaaggtantgtcgtacactatcattgatggggaactcctccagcact

SEQ ID NO: 8318 - DNA, 356 bp, Glycine max
  Clone ID: LIB3039-046-Q1-E1-A2
gataatcattgagagcgatggtgaaaatctcacttggtggatacgatgatggggaaggacccagcaaccgaacccataagcgacgcagggaagatgatgatgacgacgacgaagaagagcaacaacaacaacgaagctttgagatggtggacccttcaataggaactcaagagaacgaagatcatgctgctccatccaatgatggatcgaattctaacggaaatggggctggaaccagtacccgggataggtccgttcctatcttcgtttccgaccctgatgtccttgattgctgcatttgctatgaacccttgacttcccctgtgttccagtgtgagaatggacatattgcttgc

SEQ ID NO: 8319 - DNA, 301 bp, Glycine max
  Clone ID: LIB3039-046-Q1-E1-A3
ggtacgcaactgaaaaggaaaaccctaagagatgatgagaactcctatcttgttccctctcttctttcttctttgtgccttcacctcatatctaccttcagccaccgctgatgatgatcatgtgtacgacactgaccgcgataagcttcaatacggtgtcaattatttcgtgttgccagtgttaagatgaaatggcggtggaatactagtagcataagcaggatacgaaacttgccctctgactgtggtggaatctggcaacgagctctctgaggggttaccgacttagattgcatctcga

SEQ ID NO: 8320 - DNA, 315 bp, Glycine max
  Clone ID: LIB3039-046-Q1-E1-A4
aacattgtggtggttggtcatgtggaccctgaggaggcaaccaccattaacgagctgaagaagcctgttgtggagaaagaagctccagggcatgccatatgagggcatgcacgtacggcctcggaggggaaccagagaattatgttaacaaaataatctggaaccctaatgtatcagtgtcatcatcagtgtgtagtttaagctatctttgctatggttacgttctttgagatgagagtcttgatgaacagtaccattctgatgtattgctttccctgaaagttaatgcatgcgtcttaacttctgtccataaaa

SEQ ID NO: 8321 - DNA, 297 bp, Glycine max
  Clone ID: LIB3039-046-Q1-E1-A5
cattcaagaagattaggttgagagctgaagatgtgcaagggaagaatgttctgacaaatttctggggaatggatttcacaacagacaagctgaggtcattggtacgaaaatggcaaactcttattgaagcccatgtggatgtgaagacaactgataattacacattgaggatgttttgcattggatttaccaagagaagagctaaccaggtgaagagaacctgttatgcacaatcaagccagattagacagattcgtaggaagatgagggagatcatgaccaaccaagcaacagcat

SEQ ID NO: 8322 - DNA, 326 bp, Glycine max
  Clone ID: LIB3039-046-Q1-E1-A6
gaaagtgcacaagtgagtttgttgatcgagataactagaaacagtgtgatgaaaatgaaggtccttgttttcttcgttgctacaattttggtagcatggcaatgccatgcgtacgatatgttccctctccgaatgaacactggctatggtgcccgtactccggaggtgaaatgcgcaagttggaggcttgctgtggaagcacacaacatctttggctttgagaccattcctgaagagtgcgttgaagcaacaaaggaatacatccatggcgaacaatatagatcagactccaaaacagttaaccaacaagcttacttttatgccag

SEQ ID NO: 8323 - DNA, 305 bp, Glycine max
  Clone ID: LIB3039-046-Q1-E1-A7
gaaggtgcaagagtttgttgtgagctataagctagtttatcgtgaggagaatatgaagttgtttgttttctttgttgctgcagtagttttggtagcatggccatgccatggcgcaggctaccaaaggttccctctccgaatgaaaactggctatggtgagcgttcttcggaggtaaaatgcgcaagttttaggcttgctgtggaagcacacaacatccgagcctttaaaaccattcctgaagagtgcgttgaaccaacaaaggactacattaatggcgaacaatttagatcagactctaaaacag

SEQ ID NO: 8324 - DNA, 346 bp, Glycine max
  Clone ID: LIB3039-046-Q1-E1-A8
agaggctgcgacgatcgagatacggggaaatatcacattgacaaagaaccccattcttgtgggagatagatggcacgcttgtcactgctcattttcgcgttctgcgccgtcgccgtcgccgtcgccgtctcgggctcatcgttctaccatgccgcacgcaaccgtttgtcctctgacctggagtcacatgtgcaggatgtgctttgatcgagcgtccacgctccctctttcacgcgcgccgtgcgccgacacggcatccgctcctgtaccgtcaatcatgtccgctgcctcgtcccgatcatcgccgacattcatggccaccacttttgctccaactcgaggtcac

SEQ ID NO: 8325 - DNA, 345 bp, Glycine max
  Clone ID: LIB3039-046-Q1-E1-A9
gatagcaaaatcgtttctccaatttaatcaccattgtacaacccaattcccttcgtcgttttcgattaagagagcaatggcacgtaccaagcaaaccgctcgcaagtccaccggaggaaaggctccgaggaagcaattggcaaccaaagccgctcgcaagtcagccccggcgaccggcggagtgaagaagccccaccgcttcaggccaggaacggtggctctgagggagattcgaaagtaccagaagagcaccgaacttctgatccgaaaactcccattccagaggctcgtcagagaaatcgctcaggatttcaaaaccgatctccgctttcagagcagcgccgt

SEQ ID NO: 8326 - DNA, 368 bp, Glycine max
  Clone ID: LIB3039-046-Q1-E1-B1
acgcgtcagatagggtgggtttctccaattttgcaaacatgtatcatattgtctgtggaacttgtggcaaaagacacattgttgcgccaatcaacatcaagtgttggacctgaatgaaattcaaattgttgtttccattcttctgccttcacatcccacacaattgcagtttgatcacaacttccagtcagaagataatctcctttcttattccacttcagagagaatattggtcccttgtgtttgcttaatgtactcttcagttcaccattggtggtccaaattcttgcttgcccatcatatgaaccagttgcgagaagtgtcccttccccattccagtcaagtgtagtaacatctttactcctttc

SEQ ID NO: 8327 - DNA, 384 bp, Glycine max
  Clone ID: LIB3039-046-Q1-E1-B10
gaaggtgcaagagtttgttgtgagctataagctagtttatcgtgaggagaatatgaagttgtttgttttctttgttgctgcagtagttttggtagcatggccatgccatggcgcatgctaccaaaggttccctctccgaatgaaaactggctatggtgagcgttcttcggaggtaaaatgcgcaagttttaggcttgctgtggaagcacacaacatccgagcctttaagaccattcctgaagagtgcgttgaaccaacaaaggactacattaatggcgaacaatttagatcagactctaacacagttaaccaacaagctttcctttatgctagtgaacgcgaagtcgatcacaacgacatatttatattcggcatacgatacac

SEQ ID NO: 8328 - DNA, 350 bp, Glycine max
  Clone ID: LIB3039-046-Q1-E1-B11
gacaacataaaagggttctctctcacgttctctttcacacactaagcgtgaactaatatcgaaattcaattataccctgaccctgtgttagtttcgtgtgttgagaagcagagagaggcagagatgcaaggaagcgcagctgacggtgaagccttggatttcgagcctgaggacgatgacttgatggacgaggacggcgcccccgacgccgacgcttctccgcctcaacctaagctcaaatccgccatcaccgccgccgccgcccccaaaaagaccaagggtcgcggattccggcaggacaccgacgccaaccgtgacactcgcctctccggctccgactttgactctct

SEQ ID NO: 8329 - DNA, 406 bp, Glycine max
  Clone ID: LIB3039-044-Q1-E1-C3
ggcacaagtgagtttgttgatcgagataactagaaacagtgtgatgaaaatgaaggtccttgttttcttcgttgctacaattttggtagcatggcaatgccatgcgtacgatatgttccctctccaaatgaacactggctatggtgcccgtactccggaggtgaaatgcgcaagttggaggcttgctgtggaagcacacaacatctttggctttgagaccattcctgaagagtgcgttgaagcaacaaaggaatacatccatggcgaacaatatagatcagactccaaaacagttaaccaacaagcttacttttatgccagagacctcgaagtccatcccaaggacacatttgtgttcagtatagatggcaccgtactctctaatattccatactacaaaaaacat

SEQ ID NO: 8330 - DNA, 205 bp, Glycine max
  unsure (1)..(205): unsure at all n locations
  Clone ID: LIB3039-042-Q1-E1-D11
gatagcgaaacagagagtggtttcagtgagtgatcggtgttcacttgatccttcataagtcgtcatcatcatcatcatcatcaccgttgattgaagaagatgccgatcagaaacatcgccatcggaaggcctgaagaggctactcaccccgacacgttgaaggcggggttggctgagttcatctccaccttgatcntcgtgttcg

SEQ ID NO: 8331 - DNA, 158 bp, Glycine max
  Clone ID: LIB3039-042-Q1-E1-D12
gacgataaagggtttttgttttgtttccttgggtgctgcatgcactttcactcgaagaaccttgaagcgagtctgggccacagcaaccagcgacaacaactcaatcagctagggttgctttgcctgctaacctgttggaggaatttctgttcaagaga

SEQ ID NO: 8332 - DNA, 378 bp, Glycine max
  Clone ID: LIB3039-042-Q1-E1-D2
gagcgatctccgtgaatacatagtaacacaataaaccacctccgcgcgagccaccttacccagtgaaccctaccgcaccgaaacaaaaccctcgcaaaccctaaccctaatctcataggaacatggacggcgacgacgagacctcgggtccgatgatcgacgaaatctacgccaacggcggtggcgtcggcgacgacggagacaagcggagccgccgcgcaatcatgagcggcgaccagctcgacatcgaggcgtacgcggcgctatactcggggcgcacgaagatcatgaggctcctcttcttcgccgacaagatgaacaacgcggcgacgcagctcgaggcgctgcgcatggcctacgacgagattaagaagggag

SEQ ID NO: 8333 - DNA, 288 bp, Glycine max
  Clone ID: LIB3039-042-Q1-E1-D3
ggttctagtgtgtgattgtttgttgttgtaactcgttcttcttcttttgttgttctgtgtttgtgtttgttttttctctcacctgaaaatgtcttgctgcggtggtaactgtggttgcggaagctcctgcaagtgcggcaacggctgcggaggctgcaagatgtacccagacttgagctacactgagtcaaccaccaccgagaccttggtcatgggagtggcacctgttaaggctcaatttgagggtgctgaaatgggtgtgcccgctgagaacgatggctgcaaatg

SEQ ID NO: 8334 - DNA, 381 bp, Glycine max
  Clone ID: LIB3039-042-Q1-E1-D4
gacacatgcccatcatcaaagtttcttcctttctctgctctttgtcttctctgacacatttggggccttgttgagtgtgtttttgcaagagggtatggcgaaggacgttgaggttgctgagcgtggctccttctctgggaaggactaccaggaccctccaccagcaccactcattgatgctgaggagctcacaaagtggtccttttacagggctcttattgctgagttcattgccactttgctcttcctctacattactgtgctcacagttatagggtacaagcaccagacggatcatgctgatgcgtgtggtggggttggcattcttggcattgcatgggccttttggtggcatgatcttcatccttgtctactgcactg

SEQ ID NO: 8335 - DNA, 377 bp, Glycine max
  Clone ID: LIB3039-042-Q1-E1-D5
gaaggtgcaagagtttgttgtgagctataagctagtttatcgtgaggagaatatgaagttgtttgttttctttgttgctgcagtagttttggtagcatggccatgccatggcgcaggctaccaaaggttccctctccgaatgaaaactggctatggtgagcgttcttcggaggtaaaatgcgcaagttttaggcttgctgtggaagcacacaacatccgagcctttaaaaccattcctgaagagtgcgttgaaccaacaaaggactacattaatggcgaacaatttagatcagactctaaaacagttaaccaacaagctttcttttatgctagtgaacgcgaagtccatcacaacgacatatttatattcggcatag

SEQ ID NO: 8336 - DNA, 383 bp, Glycine max
  unsure (1)..(383): unsure at all n locations
  Clone ID: LIB3039-042-Q1-E1-D6
gaattcaaaccaaaatcccaaatcctcaaattcgatttgtaccaaattttcttcacaaaatgtctggtcgtgggaaaggtggcaagggtttgggaaagggaggtgccaagaggcacagaaaagttcttcgtgataacattcaaggtatcacgaaacctgcgattcgtaggttagcgagaagaggtggcgttaagaggatcagtggtttaatctatgaggaaaccagaggagttctgaagattttcttggagaacgtgattcgagatgctgtgacctacaccgagcacgctaggaggaagacggtgactgccatggatgtggtttatgcgctcaagaagcanggaaaggacctctatggtttcggaggctgaatgattgattct

SEQ ID NO: 8337 - DNA, 367 bp, Glycine max
  Clone ID: LIB3039-042-Q1-E1-D7
gaccacattccaaaacacaaacacatacattgtagtatcacttttgtctcggaatttgttcttttgagttatggcaagcttaaaggttgcatgtgtggttttgatgtgcatggctgtgatgagtgcaccaatgatggtgcaagccgtgtcatgcaatgatgtttctgtgaacctagcaccgtgcctatcttacctgatgcagggtggagatgttccagaatcgtgctgtaccggagtgaggaacattctgggttctgccagcaccacctttgacaaacaaaccgtgtgcaaatgtcttcagcaagctgctaataactatggcatcaacgacgaatacgctcaggcactccccgcccgctgcaatgtc

SEQ ID NO: 8338 - DNA, 382 bp, Glycine max
  Clone ID: LIB3039-042-Q1-E1-D8
gaaggtgcaagagtttgttgtgagctataagctagtttatcgtgaggagaatatgaagttgtttgttttctttgttgctgcagtagttttggtagcatggccatgccatggcgcaggctaccaaaggttccctctccgaatgaaaactggctatggtgagcgttcttcggaggtaaaatgcgcaagttttaggcttgctgtggaagcacacaacatccgagcctttaaaaccattcctgaagagtgcgttgaaccaacaaaggactacattaatggcgaacaatttagatcagactctaaaacagttaaccaacaagctttcttttatgctagtgaacgccaagtccatcacaacgacatatttatattcggcatagataac

SEQ ID NO: 8339 - DNA, 190 bp, Glycine max
  Clone ID: LIB3039-042-Q1-E1-D9
gggtgtcgcgtccgctatatattctacccgaatttctgcattttccttcttccatcggcgcggcacacagagacacacacatttcgtcggaatgggaagggtgattcgcgcacagcgtaagggtgcggggtctgtgttcaagtcccacacccatcaccgcaagggtccggctaggttccccagcctcgac

SEQ ID NO: 8340 - DNA, 374 bp, Glycine max
  Clone ID: LIB3039-042-Q1-E1-E1
gaccacattccaaaacacaaacacatacattgtagtatcacttttgtctcggaatttgttcttttgagttatggcaagcttaaaggttgcatgtgtggttttgatgtgcatggctgtgatgagtgcaccaatgatggtgcaagccgtgtcatgcaatgatgtttctgtgaacctagcaccgtgcctatcttacctgatgcagggtggagatgttccagaatcgtgctgtagcggagtgaggaacattctgggttctgccagcaccacctttgacaaacaaaccgtgtgcaaatgtcttcagcaagctgctaataactatggcatcaacgacgaatacgctcaagcactcccggccgctgcaatgtcagcgtccc

SEQ ID NO: 8341 - DNA, 350 bp, Glycine max
  Clone ID: LIB3039-042-Q1-E1-E10
ggcacaagtgagtttgttgatcgagataactagaaacagtgtgatgaagatgaaggtccttgttttcttcgttgctacaattttggtagcatggcaatgccatgcgtacgatatgttccctctccgaatgaacactggctatggtgcccgtactccggaggtgaaatgcgcaagttggaggcttgctgtggaagcacacaacatctttggctttgagaccattcctgaagagtgcgttgaagcaacaaaggaatacatccatggcgaacattatagatcagactccaaaacagttaaccaacaagcttacttttatgccagaaacctcgaattcaatcccaaggacacat

SEQ ID NO: 8342 - DNA, 395 bp, Glycine max
  unsure (1)..(395): unsure at all n locations
  Clone ID: LIB3039-042-Q1-E1-E11
atacgtacggccacgagtacaggactgcaagaaaacgtacagaaaggggatcataaacctaatccctatttttcttcctcagtagtgtcatttacgcttctcttctctgcagcaactatgcctaaccctaaggtcttcttcgacatgaccatcggcagtcaatctgctggccgcatcgtgatggagctctacgccgacgtcactccccgcaccgccgagaacttccgcgcgctttgcancggcgagaagggcgtanggcggagcggcaagcccctcactacaagggctcgtctttccacgcgttatccgagtttcatgtgtcaaggtgggactttcacgcggaaacggaacggcggcgagtcgatttatggcgccaagttcgccgacgagaactt

SEQ ID NO: 8343 - DNA, 294 bp, Glycine max
  Clone ID: LIB3039-042-Q1-E1-E12
ctcccctgtcaacaggatattttgcttgcttggtttaatcgtttcttgaattctggtgaagattgcccaaatattcaaagagggtttgaagtttggtggagaagggctttctggaagaggaatggagagcaagaacggacaagacaatttcgaattgcaactacatcagttgagaacccttgaggatagattgttccactgtggaggaattggcagcaaattactgggtatgccaccttttaaccttatatcatgatcatttctatttgattcctctacgattatcagtactga

SEQ ID NO: 8344 - DNA, 281 bp, Glycine max
  Clone ID: LIB3039-042-Q1-E1-E2
gaacacattccagaatacagtcagatacattgtagtatcacttttgtctcagaatttgttcttttgagttatggcaagcgtaaaggttgcatgtgtggttttgatgtacatggctgtgaagagtgcattaatgatggtgcaagccgtgtcatgcaatgatgtttctgtgaacgtagcaccgtgcgtatcttagctgagtcagggtggagatgttagagaatcctgcagtagcagattgaaggacattctgggttctgccaacaacacctttgatagataac

SEQ ID NO: 8345 - DNA, 380 bp, Glycine max
  Clone ID: LIB3039-042-Q1-E1-E3
gatagcaaaatcgtttctccaatttaatcaccattgtacaacccaattcccttcgtcgttttcgattaagagagcaatggcacgtaccaagcaaaccgctcgcaagtccaccggaggaaaggctccgaggaagcaattggcaaccaaagccgctcgcaagtcagccccggcgaccggcggagtgaagaagccccaccgcttcaggccaggaacggtggctctgagggagattcgaaagtaccagaagagcaccgaacttctgatccgaaaactcccattccagaggctcgtcagagaaatcgctcaggatttcaaaaccgatctccgctttcagagcagcgccgtatcggctcttcaggaagccgcggaggcttatctcg

SEQ ID NO: 8346 - DNA, 375 bp, Glycine max
  unsure (1)..(375): unsure at all n locations
  Clone ID: LIB3039-042-Q1-E1-E4
gagtgcacaagtgagtttgttgatcgagataactagaaacagtgtgatgaaaatgaaggtccttgttttcttcgttgctacaattttggtagcatggcaatgccatgcgtacgatatgttccctctccgaatgaacactggctatggtgcccgtactccggaggtgaaatgcgcaagttggaggcttgctgtggaagcacacaacatctttggctttgagaccattcctgaagagtgcgttgaagcaacaaaggaatacatccatggcgaacaatatagatcagactccaaaacagttaaccaacaagcttacttttatgccagagacctcgaagtcaatcccaatgacacatttgtgttcagtatanatggcac

SEQ ID NO: 8347 - DNA, 379 bp, Glycine max
  Clone ID: LIB3039-042-Q1-E1-E5
gaagtgcaagagtttgttgtgagctataagctagtttatcgtgaggagaatatgaagttgtttgttttctttgttgctgcagtagttttggtagcatggccatgccatggcgcaggctaccaaaggttccctctccgaatgaaaactagctatggtgagcgttcttcggaggtaaaatgcgcaagttttaggcttgctgtggaagcacacaacatccgagcctttaaaaccattcctgaagagtgcgttgaaccaacaaaggactacattaatggcgaacaatttagatcagactctaaaacagttaaccaacaagctttcttttatgctagtgaacgcgaagtccatcacaacgacatatttatattcggcatagata

SEQ ID NO: 8348 - DNA, 367 bp, Glycine max
  Clone ID: LIB3039-042-Q1-E1-E6
ggcacaagtgagtttgttgatcgagataactagaaacagtgtgatgaaaatgaaggtccttgttttcttcgttgctacaattttggtagcatggcaatgccatgcgtacgatatgttccctctccgaatgaacactggctatggtgcccgtactccggaggtgaaatgcgcaagttggaggcttgctgtggaagcacacaacatctttggctttgagaccattcctgaagagtgcgttgaagcaacaaaggaatacatccatggcgaacaatatagatcagactccaaaacagttaaccaacaagcttacttttatgccagagacctcgaagtccatcccaaagacacatttgtgttcagtatagat

SEQ ID NO: 8349 - DNA, 409 bp, Glycine max
  Clone ID: LIB3039-042-Q1-E1-E7
aggctaatgaacgcgaagtccatcacaacgacatatttatattcggcatatataacaccgtactctctaatatcccatactatgaaaaacatggatatggggtggaggaatttaatgaaaccttatatgatgaatgggttaacaagggcgacgcaccggcattgccagagactcttaaaaattacaacaagctgttgtctcttggcttcaagattgtattcgtgtcaggaagatatcttgacaaaatggccgtaacagaagcaaacctaaacaatgctggcttccacacatgggagcagttaattctcaaggatccacatcatatcactccaaatgcactttcatacaaatcagcaatgcgagagaatctgttgatgcacggatacataattgttggaatcattggaga

SEQ ID NO: 8350 - DNA, 382 bp, Glycine max
  Clone ID: LIB3039-042-Q1-E1-E8
ggcacaagtgagtttgttgatcgagataactagaaacagtgtgatgaaaatgaaggtccttgttttcttcgttgctacaattttggtagcatggcaatgccatgcgtacgatatgttccctctccgaatgaacactggctatggtgcccgtactccggaggtgaaatgcgcaagttggaggcttgctgtggaagcacacaacatctttggctttgagaccattcctgaagagtgcgttgaagcaacaaaggaatacatccatggcgaacaatatagatcagactccaaaacagttaaccaacaagcttacttttatgccagagacctcgaagttccatcccaaggacacatttgtgttcagtatagatggcaccgtactctc

SEQ ID NO: 8351 - DNA, 371 bp, Glycine max
  unsure (1)..(371): unsure at all n locations
  Clone ID: LIB3039-042-Q1-E1-F1
ggcatcaattcaaaatatatcatcaattataagcatgggtttgtggaacacaacgaatgcagtgtcttgccgctttcacaagtttggtgatgaccaaaagaatctggtcttccaaggtgatgccacgtcttcttccaggggcatagaactcacaaagttagacggtggaggaaaaccagtgggtggcagtgtggggagagtgttatactcttctccagtgcacctttgggaaagctctacagtggtcgcaagctttgaaaccgacttcaccttttccatctcatcagactctactactccaggtgatggccttgccttcttcattgcaccatttgacactaanatccctccaaactctggtgggagcaacc

SEQ ID NO: 8352 - DNA, 357 bp, Glycine max
  unsure (1)..(357): unsure at all n locations
  Clone ID: LIB3039-042-Q1-E1-F10
gataacacaaggcagaaagcaagctcatcctagagttttaaaaatggcagcagcctcctccatggctctctcttccccatccttggctggcaaggccgtgaagctgggcccatcagcccccgaagtcgggagggtcagcatgaggaagaccgtcaccaagcaggcctcctccggaagcccatggtacggcccagaccgcgtcaagtacttgggcccattctctggcgagcccccgtcctacctcactggcgagttcccaggtgactacggctgggacactgctgggctttcggccgacccaganaccttcgccagaaaccgtgagctcgaagtgattcactccangtgggccatgct

SEQ ID NO: 8353 - DNA, 280 bp, Glycine max
  Clone ID: LIB3039-042-Q1-E1-F11
gaagcacaacatctctatcgagtaaattaactatgaagcctaccctactattatccctttccttcctgcctctctttgctttcctggctctttcagaagatgttgaacaagttgtggacataagtggcaaccccatttttccaggtggcacatattacattatgccatcaactttgggggcgctgccggtggtggattgaaactaggccggacaggaaactcaaactgcccagttactgttttgcaagattactcaaaaatcctccgtgggaaaacaatt

SEQ ID NO: 8354 - DNA, 367 bp, Glycine max
  Clone ID: LIB3039-042-Q1-E1-F12
gcacaagtttgttgagatagctagaagcaataagatgaaaatgaaagtgcttgttttgtttgttgctacagttttggtagcatatgaatgccatggctcagactaccagaagttccctctccaaatgaaaactgggtttggtgggcaatacagcaatgaggtggcatgtgccagttggaggcttggcgtggaagcaaacaacgtagtcaagtggcaaactgttcctgcagcttgcggagagtacatagctgactacgttctaagagaccaatatagatcagattccaaaacggttaaccaacaagcttaattccaatgcaaatccctcaaactcaacaacaaagatgtctttgtcttggacgttgac

SEQ ID NO: 8355 - DNA, 321 bp, Glycine max
  Clone ID: LIB3039-042-Q1-E1-F2
gagatcacatgaagcacaatttctctctttctttttgtgtccagaatggctcctagttctactcacaatactgggttctatgtgcttatgctagttgggatagtgattaccactatggttgctacctgtgctggtaacttctaccaagactttgatctaacatggggtggtgaccgtgctaagatattcaatggtggccagcttctatctctttcccttgacaaagtctctggctctggcttcaaatcaaagaaagaatacctatttgggatgattgatatgcagctcaagctcgttgctggcaactctgctggcactgtc

SEQ ID NO: 8356 - DNA, 269 bp, Glycine max
  Clone ID: LIB3039-042-Q1-E1-F3
gacccacacgtcagtagggtggcaaaaaaacaacggagggggcacaagtgagtctctagctcgagaatcaataatgtagtctacccaacgcttatgtcgttcgttcctgcatctctgtgatgtcatgactctcacagctcacgttggacaatctgtccgcacgcatcgggaagctcagtttagcgggtggtacatcctagatggggccagcaacttgcggaggtttcggtggtgacatgggactataggcggataggaaactcattctg

SEQ ID NO: 8357 - DNA, 380 bp, Glycine max
  Clone ID: LIB3039-042-Q1-E1-F4
ggcacaagtgagtttgttgatcgagataactagaaacagtgtgatgaaaatgaaggtccttgttttcttcgttgctacaattttggtagcatggcaatgccatgcgtacgatatgttccctctccgaatgaacactggctatggtgcccgtactccggaggtgaaatgcgcaagttggaggcttgctgtggaagcacacaacatctttggctttgagaccattcctgaagagtgcgttgaagcaacaaaggaatacatccatggcgaacaatatagatcagactccaaaacagttaaccaacaagcttacttttatgccagagacctcgaagtccatccccaaggacacatttgtgttcagtatagatggcaccgtactc

SEQ ID NO: 8358 - DNA, 373 bp, Glycine max
  unsure (1)..(373): unsure at all n locations
  Clone ID: LIB3039-042-Q1-E1-F5
ggagcaaaaccctaatccctatttttcttcctcagtagtgtcatttacgcttctcttctctgcagcaactatgcctaaccctaaggtcttcttcgacatgaccatcggcggtcaatctgctggccgcatcgtgatggagctctacgccgacgtcactccccgcaccgccgagaacttccgcgcgctttgcaccggcgagaagggcgtanggcggagcggcaagcccctccactacaagggctcgtccttccaccgcgtgatcccgagtttcatgtgtcagggtggcgacttcaccgccggaaacggaaccggcggcgagtcgatttatggcgccaagttcgccgacgagaacttcgtgaagaagcacaccggt

SEQ ID NO: 8359 - DNA, 384 bp, Glycine max
  Clone ID: LIB3039-042-Q1-E1-F6
ggcttcgcctcattttctggctaaccaaccctgacactccttcttctccgcttcctcttcgatcatcgcttcagaatgccgccgaagttcgacccctcccagatcgtcgacgtcttcgtacgcgtcaccggcggtgaggtcggcgcggcgagttccctcgccccgaagatcggtcccctcggtctctcccccaagaagatcggagaagatatcgccaaggaaaccgccaaggactggaagggcctccgcgtcaccgtcaagctcaccgtgcagaaccgtcaggccaaggtcacggtggtcccatccgccgccgcgctcgtcatcaaggccctcaaaggagcccgagcgtgaccgcaggaaaacgaagaacatcaagcacaacgg

SEQ ID NO: 8360 - DNA, 381 bp, Glycine max
  unsure (1)..(381): unsure at all n locations
  Clone ID: LIB3039-042-Q1-E1-F7
gggtcggccattagggcgcttgattttgctatgacgaagtacccgccggcttgtgagcgttttgtggatgttttggggttgaagaccgcgtttgcagctttcatgggtaagattcctttaagtaagaagaacaagaaagaaaggtaccaagaggatttggaggagcgcattgtgtcactgattgcgtcattatttggtggaatcttgaggggttctaggagagaaagattattaagtaaatttgttgaaaatgagtgtgagaagatagacaggctaatggaactatacatcagatattcagatagagtcaaagcagaaactgaacggttgaatcaagttgagcttgatgacttggagatggatgaagatganaaatacaac

SEQ ID NO: 8361 - DNA, 368 bp, Glycine max
  Clone ID: LIB3039-042-Q1-E1-F8
ggcacaagtgagtttgttgatcgagataactagaaacagtgtgatgaaaatgaaggtccttgttttcttcgttgctacaattttggtagcatggcaatgccatgcgtacgatatgttccctctccgaatgaacactggctatggtgcccgtactccggaggtgaaatgcgcaagttggaggcttgctgtggaagcacacaacatctttggctttgagaccattcctgaagagtgcgttgaagcaacaaaggaatacatccatggcgaacaatatagatcagactccaaaacagttaaccaacaagcttacttttatgccagagaactcgaagtccatcccaaggacacatttgtgttcagtatagatg

SEQ ID NO: 8362 - DNA, 268 bp, Glycine max
  Clone ID: LIB3039-042-Q1-E1-F9
ggcacaagtttgttgagatagctagaagcaataagatgaaaatgaaagtgcttgttttgtttgttgctacagttttggtagcatatgaatgccatggctcagactaccagaagttccctctccaaatgaaaactgggtttggtgggcaatacagcaatgaggtggcatgtgccagttggaggcttggcgtggaagcaaacaacgtagtcaagtggcaaactgttcctgcggcttgcggagagtacatagctgactacgtcctaggaga

SEQ ID NO: 8363 - DNA, 359 bp, Glycine max
  Clone ID: LIB3039-042-Q1-E1-G1
ggcaagagtttgttgtgagctataagctagtttatcgtgaggagaatatgaagttgtttgttttctttgttgctgcagtagttttggtagcatggccatgccatggcgcaggctaccaaaggttccctctccgaatgaaaactggctatggtgagcgttcttcggaggtaaaatgcgcaagttttaggcttgctgtggaagcacacaacatccgagcctttaaaaccattcctgaagagtgcgttgaaccaacaaaggactacattaatggcgaacaatttagatcagactctaaaacagttaaccaacaagctttcttttatgctagtgaacgcgaagtccatcacaacgacatattt

SEQ ID NO: 8364 - DNA, 374 bp, Glycine max
  unsure (1)..(374): unsure at all n locations
  Clone ID: LIB3039-042-Q1-E1-G10
ggaagtcgccgtttgttttcttttcgttcgcatcttctctctctctcagaaagatgaaggtggtcgccgcgtatttgctcgccgtcctcggtggcaacaacagcccctccgccgatgtcatcaaggaaatccttggctccgttggagtagaagcagatgaagataggattgaatcgtttttgtctgaagttaagggtaaggatatagttgagcttattgctgccggtacggaaaagttggccacggttccttctggtggtggtggtgccgttgccgtcgccgcagctcctgngggaagtgctgctgctgctgctcctgctgctgaggcaaagaacgaggaaaaggtggangagaaagaggaatctgatgatgat

SEQ ID NO: 8365 - DNA, 374 bp, Glycine max; identical to SEQ ID NO: 7696
  Clone ID: LIB3039-042-Q1-E1-G11

SEQ ID NO: 8366 - DNA, 378 bp, Glycine max
  Clone ID: LIB3039-042-Q1-E1-G12
gacacttcaaaatcctctagtaacccttcttttctctctctctctctcgtgttctgagctgctagaagcaatggagaggaaaagaagccatgcttctttcaccatgtttgcaatgcttgttggattgctctctcagagccttgtcattcctgtaatatccaccactgttgcagatcagaagaactactacaccccagatccacatgctggaagtccccccacaggtttctccgattctctgtgctcacacaatagtagtcctccatctcatggccatgggagctctccaccctcacatcacaatagtccaagtactccatcaacaccctcaggtggaaactgtggatcatcacccccacaacatcatgattcaacacc

SEQ ID NO: 8367 - DNA, 375 bp, Glycine max
  Clone ID: LIB3039-042-Q1-E1-G2
ggcacaagtgagtttgttgatcgagataactagaaacagtgtgatgaaaatgaaggtccttgttttcttcgttgctacaattttggtagcatggcaatgccatgcgtacgatatgttccctctccgaatgaacactggctatggtgcccgtactccggaggtgaaatgcgcaagttggaggcttgctgtggaagcacacaacatctttggctttgagaccattcctgaagagtgcgttgaagcaacaaaggaatacatccatggcgaacaatatagatcagactccaaaacagttaaccaacaagcttacttttatgccagagacctcgaagtccacccaaagacacatttgtgttcagtatagatggcaccgta

SEQ ID NO: 8368 - DNA, 382 bp, Glycine max
  unsure (1)..(382): unsure at all n locations
  Clone ID: LIB3039-042-Q1-E1-G3
ggcacaagtgagtttgttgatcgagataactagaaacagtgtgatgaaaatgaaggtccttgttttcttcgttgctacaattttggtagcatggcaatgccatgcgtacgatatgttccctctccgaatgaacactggctatggtgcccgtactccggaggtgaaatgcgcaagttggaggcttgctgtggaagcacacaacatctttggctttgagaccattcctgaagagtgcgttgaagcaacaaaggaatacatccatggcgaacaatatagatcagactccaaaacagtcaaccaacaagcttacttttatgccagagacctcgaagtcaatcncaaggacacatttgtgttcagtatagatggcaccgtactctct

SEQ ID NO: 8369 - DNA, 232 bp, Glycine max
  Clone ID: LIB3039-042-Q1-E1-G4
ggcacaagtgagtttgttgatcgagataactagaaacagtgtgatgaaaatgaaggtccttgttttcttcgttgctacaattttggtagcatggcaatgccatgcgtacgatatgttccctctccgaatgaacactggctatggtgcccgtactccggaggtgaaatgcgcaagttggaggcttgctgtggaagcacacaacatctttggctttgagaccattcctgaaaag

SEQ ID NO: 8370 - DNA, 382 bp, Glycine max
  unsure (1)..(382): unsure at all n locations
  Clone ID: LIB3039-042-Q1-E1-G5
gagaccaaatcgaacagcactagaagaagagaagacgatggagaaagaggagagcacggaacagcgaaagcaagcgaggcttgccattatggagctcgccaacatgataagcgttcccatggcgctaaacgccgtcgttcgcctcaacgtcgccgacgccatctggcaaggcggcgccaacaaccccctctccgccgctgagatcctcccccgcctccttcccgccggcggcggcgacgccgagaacctccagcggctcctccggatgctggccagttacggcgtcttctacgagcacctctccgccggcgagcggaagtactcnctcaccgacgtcggcaaaacgcttgtcaccgatgaacaaggcctgtcgtacgcgcat

SEQ ID NO: 8371 - DNA, 380 bp, Glycine max
  Clone ID: LIB3039-042-Q1-E1-G6
gacaacacaacgcaacacaacgcgcactctctcttttctctcttaacacaaaaaccctatcgttcttcgcggtttcgccgattctcgccatgccgaaagccaaatccgacgccaaagccgccgatagccggttgaagcgcaagggcgctggtgctggaaggaagcaatcgaagaaagctgctaaggatcctaacaagccaaagagacctccaagcgctttcttcgttttcatgtccgagttcagagagcagtttaagaaggagcatcctaacaataaatccgtcgctgttgtcggtaaagctggtggtgacaaatggaaatcgctgtctgatgctgaaaaaggcccccttcgttgccacggccgaaaagaagaaacaaga

SEQ ID NO: 8372 - DNA, 367 bp, Glycine max
  unsure (1)..(367): unsure at all n locations
  Clone ID: LIB3039-042-Q1-E1-G7
ggcacaagtgagtttgttgatcgagataactagaaacagtgtgatgaaaatgaaggtccttgttttcttcgttgctacaattttggtagcatggcaatgccatgcgtacgatatgttccctctccgaatgaacactggctatggtgcccgtactccggaggtgaaatgcgcaagttggaggcttgctgtggaagcacacaacatctttggctttgagaccattcctgaagagtgcgttgaagcaacaaaggaatacatccatggcgaacaatatagatcagactccaaaacagttaaccaacaagcttacttttatgccagagacctcgaagtccatcncaaggacacatttgtgttcagtatagat

SEQ ID NO: 8373 - DNA, 382 bp, Glycine max
  Clone ID: LIB3039-042-Q1-E1-G8
ggcacaagtgagtttgttgatcgagataactagaaacagtgtgatgaaaatgaaggtccttgttttcttcgttgctacaattttggtagcatggcaatgccatgcgtacgatatgttccctctccgaatgaacactggctatggtgcccgtactccggaggtgaaatgcgcaagttggaggcttgctgtggaagcacacaacatctttggctttgagaccattcctgaagagtgcgttgaagcaacaaaggaatacatccatggcgaacaatatagatcagactccaaaacagttaaccaacaagcttacttttatgccagagacctcgaagtcaatcccaaggacacatttgtgttcagtatagatggcaccgtactctct

SEQ ID NO: 8374 - DNA, 372 bp, Glycine max
  Clone ID: LIB3039-042-Q1-E1-G9
gacaacacaacgcaacacaacgcgcactctctctttttctctctgttttttgttctctcttcgcttaaaccctatcgttcttctcgttttcgccgattctcgccatgccgaaagctaaatccgacgccaaagccgccgatagcaggttgaagcggaagggcgctggtgctgggaggaagcaatcgaggaaagctgctaaggaccctaacaagccgaagagacctccaagcgctttcttcgttttcatgtccgagttcagagagcagttcaagaaggagcatcctaacaacaaatccgtcgctgttgtcggcaaagctggtggtgaaaaatggaaatcgctatctgatgctgaaaaggccctttcgttgctac

SEQ ID NO: 8375 - DNA, 380 bp, Glycine max
  Clone ID: LIB3039-042-Q1-E1-H1
gaaggtgcaagagtttgttgtgagctataagctagtttatcgtgaggagaatatgaagttgtttgttttctttgttgctgcagtagttttggtagcatggccatgccatggcgcaggctaccaaaggttccctctccgaatgaaaactggctatggtgagcgttcttcggaggtaaaatgcgcaagttttaggcttgctgtggaagcacacaacatccgagcctttaaaaccattcctgaagagtgcgttgaaccaacaaaggactacattaatggcgaacaatttagatcagactctaaaacagttaaccaacaagctttcttttatgctagtgaacgcgaagtccatcacaacgacatatttatattcggcatagata

SEQ ID NO: 8376 - DNA, 379 bp, Glycine max
  unsure (1)..(379): unsure at all n locations
  Clone ID: LIB3039-042-Q1-E1-H10
ggaaacgaagaagccctaactacgcacgcattcgtgagaaaactcaatattcgtcgctcatggcactctcttctcgtctcttttccaaatccaaattgatctatggcagtcaaatacttctacaaaaggagcatgctattccagttcgtcactttgctaaagagtctgcccctcctgcccttaagggagacgagatgctgaagaacatttttgtggaggtgaagaacanatttgagaccgccataggaatattaaagaaggagaaaatcaccattgacccagaagattcagctgctgtntctcattatgcanaggtcatgaaaacaattagagagaaggcaagcttattgtcggagtcncaagacatactatccaccaa

SEQ ID NO: 8377 - DNA, 375 bp, Glycine max
  Clone ID: LIB3039-042-Q1-E1-H12
gacttgtaataattcttataacacaacacaacccatggccaccacctccgcattcctcctccttcccctcctcctgctgctccacctcgccatcgccgctcacggcatcggcatcaactacggcacgctcggcgacaaccttccaccgcccgcggcggtggcgaacttcctgaagacgaagacgaccatcgaccgcgtgaagatctacgacgtgaacccggacatcctgcgggccttcgccggcagcggcatctccgtgacggtgaccgcccccaacggcgacatcgccgccttaaccaaaatcgactcggcgaggcagtgggtggcgacgcacatcaaaccctttcaccctcagaccaaaattaattacatcct

SEQ ID NO: 8378 - DNA, 339 bp, Glycine max
  Clone ID: LIB3039-042-Q1-E1-H2
gaaccctaacactgcgaatcgaggaaaacacccttcggtggaatcatcactgcgtcttcttcaaccaaccaccgcgaccagagctcttctccgccgcgtccggagctcttctccaccacgttcaagttgtttaaggataatgggtcggaaagctggtacgctttttatcaaccccaagagattcggtaatcttcaaaaaccttgcatgaaggaaatggcattgtttctcagttgtatggctgcaaaccatagtgacaccgaagcctgtgctcgtcggaaggaactattgaatgtctgtattgatgctcagagtaaaaagaacaggaagtcctgggggag

SEQ ID NO: 8379 - DNA, 378 bp, Glycine max
  Clone ID: LIB3039-042-Q1-E1-H3
gaaggtgcaagagtttgttgtgagctataagctagtttatcgtgaggagaatatgaagttgtttgttttctttgttgctgcagtagttttggtagcatggccatgccatggcgcaggctaccaaaggttccctctccgaatgaaaactggctatggtgagcgttcttcggaggtaaaatgcgcaagttttaggcttgctgtggaagcacacaacatccgagcctttaaaaccattcctgaagagtgcgttgaaccaacaaaggactacattaatggcgaacaatttagatcagactctaaaacagttaaccaacaagctttcttttatgctagtgaacgcgaagtcatcacaacgacatatttatattcggcatagat

SEQ ID NO: 8380 - DNA, 377 bp, Glycine max
  unsure (1)..(377): unsure at all n locations
  Clone ID: LIB3039-042-Q1-E1-H4
ggcacttcaattgcaatcaaattagttcattctctttgcgcagttccctacctctcctttcaagatgcagatcttcgtcaagaccctcaccggaaagaccatcacccttgaggtggaaagctctgacaccatcgacaacgtcaaggccaagatccaggacaaggaaggaattcccccggatcagcaacgtctcatcttcgccggaaagcagctcgaggacggccgtaccctcgccgactacaacatccagaaggagtcaacccttcaccttgtccttcgtctccgtggtggcatgcagatcttcgtcaagactctcactggcaaaaccataaccctagaggtcgaaagctctgacnacattgacaacgtcaaggcca

SEQ ID NO: 8381 - DNA, 391 bp, Glycine max
  Clone ID: LIB3039-042-Q1-E1-H5
gggcgcacccagagaggaagcttagagagagagagagagagagagagagagaggagagagtattggcgcttcatcaagatgggtatttctagggattccatgcacaagaggcgtgccactggtggcaagaaaaaggcttggagaaagaagagaaagtatgagcttgggcgtcaggcagcaaacaccaagttatcaagcaacaagacaatcaggaggattcgtgttagaggtggcaatgttaaatggtgggcattgaggctggatactggcaattactcatggggtagtgaagcagttactcgcaagactcgtattctagacgttgtttacaatgcctcaaacaacgagcttgtgcgaactcagaccctggtcaagagtgctattgtccagg

SEQ ID NO: 8382 - DNA, 293 bp, Glycine max
  Clone ID: LIB3039-042-Q1-E1-H6
ggcacaagtgagtttgttgatcgagataactagaaacagtgtgatgaaaatgaaggtccttgttttcttcgttgctacaattttggtagcatggcaatgccatgcgtacgatatgttccctctccgaatgaacactggctatggtgcccgtactccggaggtgaaatgcgcaagttggaggcttgctgtggaagcacacaacatctttggctttgagaccattcctgaagagtgcgttgaagcaacaaaggaatacatccatggcgaacaatatagatcagactccaaaacag

SEQ ID NO: 8383 - DNA, 381 bp, Glycine max
  Clone ID: LIB3039-042-Q1-E1-H7
ggggtttccgatggcgacgtggcctctgtttgcggagcattttttcaacgagaagctggtggtggatgtgttgaagattggggtgccggtgggggcgaaagagtggaggaactggaacgagtttgggagtgaggtggtgaaacgggaggagattggaaacgcgattgcttcgttgatgagtgaggaagaagaagatggaggaatgaggaagagagccaaggagctaagcgttgcggcgaagagtgctataaaggttggtggatcttcgcacaacaacatgaaggaattgattcgggagctcaaggagatcaagctttccaaggaggctcaagagaccgcacccaatccttaagactggttctgcttttcatcttttgaaca

SEQ ID NO: 8384 - DNA, 141 bp, Glycine max
  Clone ID: LIB3039-042-Q1-E1-H8
gagggttgggctatccatttgtttcgagaatgcggtctctctcagccaacccttccttactgccacaagcggtccaagttttggccaaaccctacaaaccaatcccccctcaagaatcctccttaacttccccggcttcaa

SEQ ID NO: 8385 - DNA, 355 bp, Glycine max
  Clone ID: LIB3039-042-Q1-E1-H9
ggcacaagtgagtttgttgatcgagataactagaaacagtgtgatgaaaatgaaggtccttgttttcttcgttgctacaattttggtagcatggcaatgccatgcgtacgatatgttccctctccgaatgaacactggctatggtgcccgtactccggaggtgaaatgcgcaagttggaggcttgctgtggaagcacacaacatctttggctttgagaccattcctgaagagtgcgttgaagcaacaaaggaatacatccatggcgaacaatatagatcagactccaaaacagttaaccaacaagcttacttttatgccagagacctcgaagtccatcccaaggacacatttgtg

SEQ ID NO: 8386 - DNA, 155 bp, Glycine max
  Clone ID: LIB3039-043-Q1-E1-A1
tgtctgccgcttagcaacattttcggcatcgaagcaatgccacgcgtacgagctgttcgttctccgaatgtgcactgactagatgtgcccgtacaccagttgtgcaatgtgcaagttgaatgcttgctgtcgtatcacagaacatctttggcttt

SEQ ID NO: 8387 - DNA, 310 bp, Glycine max
  Clone ID: LIB3039-043-Q1-E1-A10
ctggtcacctgatttacaagcttggaggcattgacaagcgtgttattgagaggtttgagaaggaagctgctgagatgaacaagaggtctttcaagtatgcctgggtgctggacaaacttaaggctgagcgtgaaagaggaatcaccattgatattgctttgtggaagtttgaaacaacaaagcattattgcacagttattgatgcgcctggacatagggatttcattaagaatatgattactgggacatcccaagctgactgtgctgttcttatcattgattcgaccactggtggttttgaagctggtat

SEQ ID NO: 8388 - DNA, 303 bp, Glycine max
  Clone ID: LIB3039-043-Q1-E1-A11
gagggtttcgagttacagccgcaccttgattcagagcagagcgaccttgaagagctatggctgtcggaaagaataagaggatttccaagggaaagaagggtggcaagaagaaagccgctgatccctttgccaagaaggactggtacgatatcaaggccccttccgtctttcaggtcaagaatgttggcaaaaccctcgtctctcgtacccagggaaccaagattgcttctgaaggactcaaacataaattgtttgaggtctcattggctgatctccaaggagatgaagacaatgccttcaaga

SEQ ID NO: 8389 - DNA, 334 bp, Glycine max
  Clone ID: LIB3039-043-Q1-E1-A12
ggtggttcttcatttcggacattcatatcttcttcgtcctctgaatcaagtttcgactttatttgagtagttttgctctttccttccaaaatgagccggccaatggaggaagatactgcaggtaagaatgaggaagaggagttcaacaccggaccactatctgtactcatgatgagtgttaaaaataatactcaggtactgataaattgtcggaacaacaaaaagcttctgggtcgtgtaagggcttttgacaggcactgcaacatggttcttgaaaatgtcagggagatgtggactgaggtgccaaagactggtaaaggaaagaaaaagtccc

SEQ ID NO: 8390 - DNA, 333 bp, Glycine max
  Clone ID: LIB3039-043-Q1-E1-A3
gacacttgcccatcatcaaagtttcttcctttctctgctctttgccttctctgacacatttggtgccttgtacagcgtgttttggcaggaaggtggtatggcgaaggacgttgaggttgctgagcgtggctccttctctgggaaggactaccaggaccctccaccagcaccactcattgatgctgaggagctcacaaagtggtccttttaaagggctctcattgctgaattcattgccactttgctcttcctctacattactgtgcccacagtcatagggtaaagcaccagactgacctcaaggaaaatggtgaaatctgtggtggggttggc

SEQ ID NO: 8391 - DNA, 331 bp, Glycine max
  Clone ID: LIB3039-043-Q1-E1-A4
ggggatttaaccctcacacataagacattaccatggttaattttaaggttggcaatttttgtggcctcccttgtattagtcgtcaaatcccaggttccaaacatatgggaaaccaagcccttccaccacatgttgtctttggttcaaccaaaccctgttgtcctcaactaccacaggggtccaatccttaagggaaacgtcaccgttcatatcaactggtacggcaacttcacacccattcaccgttccatcatcgttgatttcatccaatcccttggttccattccccactctcgtcaggacccatcagccttttcgtggtggcgaatca

SEQ ID NO: 8392 - DNA, 180 bp, Glycine max
  Clone ID: LIB3039-043-Q1-E1-A5
ggcacaagtgagtttgttgctcgagataactagtcacagtgtgatgacaatgaaggtccttgttttcttcgatgctacaattttggtagcactgcaatgccatgcgtaccatatgttcccctctccgaagaagcccggactatggtgcccgtactccggaggtgaaatgcgcaagttgaa

SEQ ID NO: 8393 - DNA, 275 bp, Glycine max
  Clone ID: LIB3039-043-Q1-E1-A6
gaaggtgcaagactttgttgtgagctataagctagtttatcgtgaggagaatatgaagttgtttgttttctttgttgctgcagtagttttggtagcatggccatgccatggcgcaggctatcaaaggttccctctccgaatgaaaactggctatggtgagcgttcttcggaggtaaaatgcgcaagttttaggcttgctgtggaagcacacaacatccgagcctttaaaaccattcctgaagagtgcgttgcaccaataaaggactacattaatg

SEQ ID NO: 8394 - DNA, 315 bp, Glycine max
  Clone ID: LIB3039-043-Q1-E1-A7
gatcagtatacattgtctattccatcttccactctttcacactcacctatggctccaatctcaaaactcagtcctttcctattcttaacaacccttttagtttccctccaagttaatgccagagacagccaattcttcagcaaagtcacccctctcaacagcaacatcaaggagactgagactcgcacacatgaaggccaagtaaacaagccagaacaacaaccaacattcattcctgaaactgaaaacagttatggcctatatggtcatgagactggtctgcaccctctcatgactacaacatctaatgctgca

SEQ ID NO: 8395 - DNA, 265 bp, Glycine max
  Clone ID: LIB3039-043-Q1-E1-A8
gatcagtagtgagtgtgtagactaagatccagacattcagtgtcatgaatgggacggtccttgttacccacgccgctcctattctggtcacatggtttagcttcgcgtcaaatttatgccctcgacaaataattcttgagcatggtgacccgtctcaggaggtgaactgcgcaagttggaagcttgctgtggaaggacacatcatcattggctttgagccgataccagacaatcttgttgctgcaaccagtgattgcctctatgg

SEQ ID NO: 8396 - DNA, 354 bp, Glycine max
  Clone ID: LIB3039-043-Q1-E1-A9
ggagtttgttgtgagctataagctagtttatcgtgaggagaatatgaagttgtttgttttctttgttgctgcagtagttttggtagcatggccatgccatggcgcaggctaccaaaggttccctctccgaatgaaaactggctatggtgagcgttcttcggaggtaaaatgcgcaagttttaggcttgctgtggaagcacacaacatccgagcctttaaaaccattcctgaagagtgcgttgaaccaacaaaggactacattaatggcgaacaatttagatcagactctaaaacagttaaccaacaagctttcttttatgctagtgaacgcgaagtccatcacaacgacatatt

SEQ ID NO: 8397 - DNA, 287 bp, Glycine max
  Clone ID: LIB3039-043-Q1-E1-B10
ggcacaagtttgttgagatagctagaagcaataagatgaaaatgaaagtgcttgttttgtttgttgctacagttttggtagcatatgaatgccatggctcagactaccagaagttccctctccaaatgaaaactgggtttggtgggcaatacagcaatgaggtggcatgtgccagttggaggcttggcgtggaagcacacaacgtagtcaagtggcaaactgttcctgcagcttgcggagagtacatagctgactacgttctacgagaccaatatacatcagattcc

SEQ ID NO: 8398 - DNA, 330 bp, Glycine max
  Clone ID: LIB3039-043-Q1-E1-B11
ggaacttctcacgttcatttctacacatccctagctctgtcgttccgtcgttgacgatggcgtttcgggtgcgaagccctgacctccgctctctctttcttctctctctcttgtccatcgcttccgccaatgtcttcttcgaagagcgtttcgatgacgggtgggaaaatcgatgggttaaatcagattggaaaaaagatgagaacgtggctggggagtggaaccacacctctggtcaatggaatggagacgctaatgacaaaggtattcaaaccagtgaggattacagattctatgctatttcagctgagtaccctgaattcagcaaca

SEQ ID NO: 8399 - DNA, 313 bp, Glycine max
  unsure (1)..(313): unsure at all n locations
  Clone ID: LIB3039-043-Q1-E1-B12
gatatcagaagctcagacctagggatttcggccgtttgctcnccaaaaaggaaagaagcagattctgtcctttgaaatcaacaagaaaagatgtcaggtgaagaggtagctgttgcagttgaggtacctgctacttcaattccaggtgagccaatggacatcatgactgctctacagcttgtgctgagaaaatctctggcctatggtggtcttgcacgaggtcttcatgaaggtgccaaggtgatcgagaagcatgctgcacagctatgtgttctagcagaagattgtgaccaacctgattatgtgaaactgg

SEQ ID NO: 8400 - DNA, 399 bp, Glycine max
  Clone ID: LIB3039-043-Q1-E1-B2
cgtcagatgcaatgtgaagcatgtgctcaagttatacaaaagcgaatccgcaagattcaaggagtaaagtcagtgaaaacaagcttgggaaatgatcaagtcatagtaaaaggtgtgattgacccagcaaagctagtcgattatgtgtacaagaggaccaaaaagcaagcttctatagtgaaagaggaggaaaaggaaaagaatgaagaagaggagaagaaagaggacgagaaaaatgaagagaaagaagaagagaaaaaaggagaagatggtgaagaggttgatactaaaactgacatcaagcgaagtgaatactggccattaagattccacgttgactacgttgactacccatatgcttctcagattttcagtgatgagaacccacatgcatgcact

SEQ ID NO: 8401 - DNA, 341 bp, Glycine max
  Clone ID: LIB3039-043-Q1-E1-B4
aaagacaaccgaaagggggttattgatcatcagggacacaagaatccttatcgtcgcaaaacgcataatttaggggcggtcatgggaggttcatcggcggatttcacgctgatggtgctgacttcggacgtcggcgtcgatacgcgacctttcatcgaacacaatcaagatgatgacgacaacaattgtcacgactgttcccagtaccactcccccgacgaggacgtctccgatctcgattagttgcaattcctccacctcgatagctctaacaagaactccaatcgcattctactcatcgtcagcaagtactttcccgcaactgttgtgagtgcggaaca

SEQ ID NO: 8402 - DNA, 308 bp, Glycine max
  Clone ID: LIB3039-043-Q1-E1-B5
gggacaagttaatttggttgttcaaaatacttagaaccattgtaatgaaaatgaaggtccttgtttccttcgttgcaacaattttggtaccatgcattgcaatgcgtacgatatgttccctctcgaatgaacactggctatggtgcccgtactccggaggtgaaatgcgcaagttggaggcttgctgtggaagcacacaacatctttggctttgagaccattcctgaagagtgcgttgaagcaacaaaggaatacatccatggcgaacaatatagatcagactccaaaacagttaaccaacaagctta

SEQ ID NO: 8403 - DNA, 352 bp, Glycine max
  Clone ID: LIB3039-043-Q1-E1-B6
ggtgcacaagtgagtttgttgatcgagataactagaaacagtgtgatgaaaatgaaggtccttgttttcttcgttgctacaattttggtagcatggcaatgccatgcgtacgatatgttccctctccgaatgaacactggctatggtgcccgtactccggaggtgaaatgcgcaagttggaggcttgctgtggaagcacacaacatctttggctttgagaccattcctgaagagtgcgttgaagcaacaaaggaatacatccatggcgaacaatatagatcagactccaaaacagttaaccaacaagcttacttttatgccagagacctcgaagtccatcccagggacacat

SEQ ID NO: 8404 - DNA, 322 bp, Glycine max
  Clone ID: LIB3039-043-Q1-E1-B8
gaccgccgttctcatctctcttcccagttctcacctcagcgctgcatcttcacgtcgtctctaacgagggaaaatgagtcgaggaggtgcagcagcagcgaagggaaagaagaagggtgctacattcaccattgactgtgcaaagccagtagaagagaagatcatggacattgcttctctcgagaagtttcttcaagagaggatcaaggttggtggcaaagctggtgctcttggtgactctgttaccgttacacgtgagaagacgaagattattctcacctctgactgtaacttttccacacggtatttgaagtacttgacg

SEQ ID NO: 8405 - DNA, 341 bp, Glycine max
  Clone ID: LIB3039-043-Q1-E1-B9
gccaagcaaaaccctaatccctctttcttcaccttcctcagtattgcgattttcgattctcttcgctgcaactatgcctaaccctaaggtcttcttcgacatgaccatcggcggtcaacctgccggccgcatcgtgatggagctctacgccgacgtgactccgagcaccgccgagaacttccgcgcgctctgcaccggcgataagggcgccgggcggagcggcaagctcctccactacaaaggctcgtcattccaccgcgtgataccgaacttcatgtgccacggcggcgacttcaccgccggaaacggcaccggatgcgagtcgatctacggcgccaagt

SEQ ID NO: 8406 - DNA, 321 bp, Glycine max
  Clone ID: LIB3039-043-Q1-E1-C1
gcatcacaacagtaatagaaaatggaagaattatgggtagtttaccaagagtaccggcttcaaatattgctgacaagttatggttagtcttccaaggaattggtgatattgcctttgcctatccatacacagtcatcctccttgagatacaggacactctagagtctcctccaccagaaaacaagaccatgaaaaacgcctccatgattgctatcctcattacaacattcttctacctctgctgtggatgctttggatatgcggcttttggaaatcaaacaccaggaaacctcttgacagggtttggattttacgagcttt

SEQ ID NO: 8407 - DNA, 373 bp, Glycine max
  Clone ID: LIB3039-043-Q1-E1-C10
gaattccatggccgacccgacgcgtcagcccacgcatccgtcgcgacgcaaggggacggttttgcgcggtagatgcggctcagccgctgtagactccgagctctgctgtgatgaacgtgaccgtcggtaatatccacggagcgggatctgcggtcacacggaagtcccatccctagaagcagttgtgggccgacatgtcatacggcaaatcgtatccgtggtcctgatgtaaaatgcccttttctggtgcatgccgtgccaacggacttgtcctttggcatagaggtcatgccgcaaaactgcgtagatccgccattcgtatatgtgccagggtacaacttatcatcagacggaagaacattgccgcatttgt

SEQ ID NO: 8408 - DNA, 339 bp, Glycine max
  Clone ID: LIB3039-043-Q1-E1-C11
gagatttggctgactatgtagtaattgaaatttactgaacatgtacacaaatcttgctcaggacttcacagtgtactttaacttggaagaatgcatctcatacttatgcgaatatattacagccaatggtccctttgatggcttccttggcttctcacagggtgcaactctttcagcacttttgataggttaccaggcacagggaaagttactaaaggagcatccaccaataaaatttctcatatcaatatcaggatgcaaattcagaaatcccagcatatgcgatgttgcctacaaagacaccatcaaagctaaatctgttcatttcattggggaaaa

SEQ ID NO: 8409 - DNA, 333 bp, Glycine max
  Clone ID: LIB3039-043-Q1-E1-C2
ggcacaattgattttgttgatcgagataactagaaacagtgtgatgaaaatgaaggtccttgttttcttcgttgctacaattttggtagcatggcaatgccatgcgtacgatatgttccctctccgaatgaacactggctatggtgcccgtactccggaggtgaaatgcgcaagttggaggcttgctgtggaagcacacaacatctttggctttgagaccattcctgaagagtgcgttgaagcaacaaaggaatacatccatggcgaacaatatagatcagactccaaaacagttaaccaacaagcttacttttatgccagagacctcgaagt

SEQ ID NO: 8410 - DNA, 303 bp, Glycine max
  Clone ID: LIB3039-043-Q1-E1-C3
acctttctcattccccatctcctcaccttattcagccactgctaatttctagggttccgaaatggacgctggcggaaagatcaagaagggcgccggaggaagaaagggcggcggccccaagaagaagccggtttcaaggtccgtcaaggccggtctccaattccccgtcggaagaattggccgttatttgaagaaaggaatgtacgcccagcgtgtcggtaccggtgctcccgtttacttggccgcaattctcgagtacctaactgctgaggtgcttgagttggctgggaatgctgcacgtga

SEQ ID NO: 8411 - DNA, 353 bp, Glycine max
  Clone ID: LIB3039-043-Q1-E1-C4
gctcaaaacttcaacaaagaatatctcacgatgcaggtgatgtgatcaaccacgaataccaacttctttaactgttttcgcaaaaatgttctcaaagctacactcacaacactcagaacagcctcaaccttttcaattctctcgggaatgtcaatcctctacagaggatgatatcgcaagcacttgtggtctcaatttgatcaccgcccataaatctggtttgagcggtgatcaacataatgagaccacaagtgaaataatgcagcgccctagaggacgcccatccggttccaaaaacatgcccaagccgcctctcataataacgtgcgagcccgagcacgtcatgagcccgt

SEQ ID NO: 8412 - DNA, 301 bp, Glycine max
  Clone ID: LIB3039-043-Q1-E1-C5
gaaggtgcaagagtttgttgtgagctataagctagtttatcgtgaggagaatatgaagttgtttgttttctttgttgctgcagtagttttggtagcatggccatgccatggcgcaggctaccaaaggttccctctccgaatgaaaactggctatggtgagcgttcttcggaggtaaaatgcgcaagttttaggcttgctgtggaagcacacaacatccgagcctttaaaaccattcctgaagagtgcgttgaaccaacaaaggactacattaatggcgaacaatttatatcagactctaaa

SEQ ID NO: 8413 - DNA, 256 bp, Glycine max
  Clone ID: LIB3039-043-Q1-E1-C6
gagcgtacacgagtttgttatgcactagccgctgatttatcatgcggagaatatgatgttgtttgttttctttgttgctgcagtagttttggtcacatggtcatgccatggcgcaggctatcatcagttcgctcaccgattgacaactggctatggtgaacgttcttcgggcgtataatgcacgttgttttatgcgtgctgtggacgcacacaagatccgagcctttagtagcattcctgaagcgtacgttgaacc

SEQ ID NO: 8414 - DNA, 187 bp, Glycine max
  Clone ID: LIB3039-043-Q1-E1-C7
gatagaggtcgcttgtatcgacttgttctgtcttgaaaatccattttgcgtcatgtcattcctcagatttgtttcgcctccggagagagcttgttgggtctgctgcgacttcatgttcatcagggtgtcctccttggcagcacgggtgtggtcagcggtgtcgcatacggtggtaggcgcatgggca

SEQ ID NO: 8415 - DNA, 319 bp, Glycine max
  Clone ID: LIB3039-043-Q1-E1-C9
gatttccacccttctttctctctctctctctctctctctctgttttctctctctcgtctcacttgaaactccacaacccaattttcttttcctatgacccaattccaaatccaaatcaccaattctaattccattcttcaggagttgaattgaattcgtgatgaagagggaccacaaagatagctgcggcggcggcggcgccgccggagggactgtgaagggtgagtgttcctcaatgcagtcaaacgggaaggcgaagatgtgggaggaagagcaacagcagcagcagcagcaacaacagcaacaacaacaacagggg

SEQ ID NO: 8416 - DNA, 243 bp, Glycine max
  Clone ID: LIB3039-043-Q1-E1-D1
gggatgttgatcgagataactagaaacagtgtgatgcaaatgaaggtccgtgttttcctcgtttcgattcgtctggggacatggcaatcccatgcctacgatatgttccctctcctcaggaacactgcctctgctgcccgtcctccaaaggtgacgttgccaccttgggtgcttgctgtggcagcatacaacatctttaactttgacatcattcctgacgactttattcccgcttcaatggaa

SEQ ID NO: 8417 - DNA, 327 bp, Glycine max
  Clone ID: LIB3039-043-Q1-E1-D10
gattatatttgagttcaaacaaatcaaagccatggccacctccaacttctctattgttctctccgtctccctagccttctttttggtgctacttaccaaggcacactcgaccgataccgtttctttcaccttcaacaagttcaacccagtccaaccaaacattatgctccaaaaagatgctagtatttcatcctctggggtgttacaactcaccaaagttggcggcaacggcgtgcccacctcgggatctctcggtcgtgccctttacgctgccccaatccagatttgggacagcgaaaccggcaaggtagccagctgggctacatc

SEQ ID NO: 8418 - DNA, 351 bp, Glycine max
  Clone ID: LIB3039-043-Q1-E1-D11
ggcacaagtgagtttgttgatcgagataactagaaacagtgtgatgaaaatgaaggtccttgttttcttcgttgctacaattttggtagcatggcaatgccatgcgtacgatatgttccctctccgaatgaacactggctatggtgcccgtactccggaggtgaaatgcgcaagttggaggcttgctgtggaagcacacaacatctttggctttgagaccattcctgaagagtgcgttgaagcaacaaaggaatacatccatggcgaacaatatagatcagactccaaaacagttaaccaacaagcttacttttatgccagagacctcgaagtccatcccaaggacacatt

SEQ ID NO: 8419 - DNA, 324 bp, Glycine max
  Clone ID: LIB3039-043-Q1-E1-D12
gatatttgagttcaaacaaatcaaagccatggccacctccaacttctctattgttctctccgtctccctagccttctttttggtgctacttaccaaggcacactcgaccgataccgtttctttcaccttcaacaagttcaacccagtccaaccaaacattatgctccaaaaagatgctagtatttcatcctctggggtgttacaactcaccaaagttggcagcaacggcgtgcccacctcgggatctctcggtcgtgccctttacgctgccccaatccagatttgggacagcgaaaccggcaaggtagccagctgggctacatc

SEQ ID NO: 8420 - DNA, 325 bp, Glycine max
  Clone ID: LIB3039-043-Q1-E1-D3
ggaatccaataaagcaaaaactaatccgaatccggtcctcggaatccggcaatggaacttccttcaacggaacttcaggcgcacccgttttcggttccgattgcattgaatcaaatctgagaaccattctcattgcccgtctgtaatcatgtcaggaaagtatatcatttctgctattcttggatcatttggagttgcatgggtttgtgattattatgtttcagagaaaaagctatttggaggttctacccctggcactattacgaacaatgagtgggcagaagagactgacaaaaaattgcaggcatggcctcgtactgccggt

SEQ ID NO: 8421 - DNA, 341 bp, Glycine max
  Clone ID: LIB3039-043-Q1-E1-D4
caaaaacccaacaaaggggggccttgcaggcaaaaagatggccaccgttccagggcagctcgtgtgggagatcgtcaagaaaaagaattccttcttggtcaagcattttggaaggggcacccagagcgtcgacttcagcagagagagcaagaatctctataacctcaattcgatcaagtactcaggtttggcatacatgaatactgttactgttcagcctgagggcaaagatcaggctgtgttgttggctacaaccaagacacagaagcaaaacaagcccgctgcattgctccacaaatctgtgatgaagaaggagttcaggacgatggcacaaactgttg

SEQ ID NO: 8422 - DNA, 270 bp, Glycine max
  Clone ID: LIB3039-043-Q1-E1-D5
ggcagaagtgagtttgttgatcgagataactagaaatagtgtgatgaaaatgaaggtccttgttttcttcgttgctacaattttggtagcatggcaatgccatgcgtacgatatgttccctctccgaatgaatactggctatggtgcccgtactccggaggtgaaatgcgcaccgttggaagcatgctgtggaagcacaaaatatcctttggctttgagaccattcctgacgaatgcgttgaagcagcaaaggaatacatccatggcgaa

SEQ ID NO: 8423 - DNA, 337 bp, Glycine max
  Clone ID: LIB3039-043-Q1-E1-D6
ggatgaggtgtgaacagataagcgatctctttcttcgtttatctgtaaagtaaccctctaagcttcaattctgcctttatataagctcagtgtataaggttggttgctccaaccacaacacaacacaacacaacacaattacacacacgaatttccttagttaggcattgctttgcgatggaaaaaatggaactggcagagacacctctacctttgctttcactaaaccacgtttcttttgtatgtaagagtgtgagtgagtcagtgaaattctatgaggatgtccttggatttttgctcatcaagaggccatcttctttcaaatttgaaagggcct

SEQ ID NO: 8424 - DNA, 200 bp, Glycine max
  Clone ID: LIB3039-043-Q1-E1-D7
ggatgaggtgtgaacaggtaagcgatctctttcgtcggttatctgtaaaggacccttctaagcttcaagtctgcctttaggtaagctcaatgtctaaggttggttgcgcaaagcagaacagaatacaacacaagtacagttacacacaccactttccttagttagcgcattgctttgcgatggccagaatggcactggca

SEQ ID NO: 8425 - DNA, 321 bp, Glycine max
  Clone ID: LIB3039-043-Q1-E1-D8
ggcacaagtgagtttgttgatcgagataactagaaacagtgtgatgaaaatgaaggtccttgttttcttcgttgctacaattttggtagcatggcaatgccatgcgtacgatatgttccctctccgaatgaacactggctatggtgcccgtactccggaggtgaaatgcgcaagttggaggcttgctgtggaagcacacaacatctttggctttgagaccattcctgaagagtgcgttgaagcaacaaaggaatacatccatggcgaacaatatagatcagactccaaaacagttaaccaacaagcttacttttatgccag

SEQ ID NO: 8426 - DNA, 358 bp, Glycine max
  Clone ID: LIB3039-043-Q1-E1-E1
aaaagacgacaagaagggggaaaagttaatttggtgattcaaaatactaagaacaattttgtgaaaattaaaggccctggtttcctccgtggcaaaaattttggaaccatggcattgcaatgcttacaaaagtttccctctccgaatgaacactggctatggtgcccgtactcgggaggtgaaatgcgcaatttggacgcttgctgtggaagcacacaacatctttggctttgagaccattcctgaagagtgcgttgaagcaacagaggaatacatccatggcgaacaatatagatcagactccagaacagttaagcaacaagcttacttttatgccagagacctcgaaatccatccc

SEQ ID NO: 8427 - DNA, 314 bp, Glycine max
  unsure (1)..(314): unsure at all n locations
  Clone ID: LIB3039-043-Q1-E1-E10
tgatgtttttcaaaatgccagggcttgcataaggctcanggctgcctgtgagaagatcaagaagatgcttagtgcaaatcctgaggcacctctcaacattgagtgcttgatggatgagaaggatgtccggggcttcatcaagcgagatgaatttgagcaactaagtcttccaattttggaacgtgtgaaagggcctctggagaaggcacttgctgaagcaggtcttaccgtcgaaaatgtgcacacggttgaggtggttggttcaggttctcgtgtgccggccattaacaaaatattgacagagtttttcaaaa

SEQ ID NO: 8428 - DNA, 358 bp, Glycine max; identical to SEQ ID NO: 7611
  Clone ID: LIB3039-043-Q1-E1-E11

SEQ ID NO: 8429 - DNA, 282 bp, Glycine max
  Clone ID: LIB3039-043-Q1-E1-E12
gacaaacattattcctaaaccttatcctgtttgcttccatggaaatgatttccgcttcgaacttgaatcccaaagctccgatgttcgtgcctctcgcccatcggacagtggaggaattctccgaccaatggtgggaccccctccaaacctccccctggtttccccaaaactgggtcccccaatgtttccaagatccccaggtacaaatacacagaatttttccacttcgactttgacccaagatctccaagataaagattaaaattaacggaaggaagggaa

SEQ ID NO: 8430 - DNA, 351 bp, Glycine max
  Clone ID: LIB3039-043-Q1-E1-E2
ggcccttctacctttttcccattcaaagcagcctcaaattcgtgccactctcttcaaaatggccgttaccttctcaaatctccacacagaatcaggtctcaagtccctcgacgacttcctctctgggaaggtctacgtttctggggatcagttcacaaaggacgacatcaaagtgtatggtgctgttttggagaagccaggtgactcttttcccaatgctgccaagtggtacgaggttgtctcatctcagcttgctgcaagcttccccggcaatgctcaaggggtgagattcagtggcaaagcttctgctccagcggaggctgctcctgcgaaaccggatgcctctgctgc

SEQ ID NO: 8431 - DNA, 339 bp, Glycine max
  Clone ID: LIB3039-043-Q1-E1-E4
cagaaggggagcaacttaggcaatggaaaaggaaaaccctaggaaatgagaagaattctaacctggttccgccccttcttcctccttggtgccttaacctcaaatcaaccttcagcaacggcggatgatgatcaggtgtagaacattgacgggaataagcttcaatacggtgtcaattatttcgtgtggccattgataagaggaaatggcggtggattacagttagcaaaagcaggaaacgaaacttgccctctgactgtggtgcaatctggcaacaagctctctgaggggttaccgataaagattgcatcccgataagcaagagtcgctttcatcacc

SEQ ID NO: 8432 - DNA, 343 bp, Glycine max
  Clone ID: LIB3039-043-Q1-E1-E5
ggcacaagtttgttgagatagctagaagcaataagatgaaaatgaaagtgcttgttttgtttgttgctacagttttggtagcatatgaatgccatggctcagactaccagaagttccctctccaaatgaaaactgggtttggttggccataccaccatgaagttgccagttcccattggaagcctggccttgaaaccaacaacgtattccagtgtgcaaactgttcctgcaacctgccggagagtacatagctgactacgttctaggagaccaatatagatcagattccagaacagttaaccaacaagcttatttctatgctaaatccctcaaactcaccaac

SEQ ID NO: 8433 - DNA, 349 bp, Glycine max
  Clone ID: LIB3039-043-Q1-E1-E6
gacagctattcctcttaagcttgctactgagtttccacactgcataccttaggtcttccgaattcgaagttaatttgcaagatggctaaggaaaaggctcagatcaacattgtggtggttggtcatgtggaccctgaggaggcaaccaccattaacgagctgaagaagcctgttgtggagaaagaagctccagggcatgccatatgagggcatgcacgtacggcctcggaggggaaccagaaaattatgttaacagaataatctggaaccctaatgtatcagtgtcatcatcagtgtgtagtttaagctagctttgctatggttacgttccttgagatgagagtcttga

SEQ ID NO: 8434 - DNA, 337 bp, Glycine max
  Clone ID: LIB3039-043-Q1-E1-E7
ggagtagcgatggagaagaagaatggtgagctaaagtcaattttccttcctttcctttccactagtcatataatcgcgctagtggacatggtcagactcatcgccttgcacgacgtcgaggtcactatcatcacgaccgcacataacgccatcgttttccaaaagtccatcgatttagatgcgagtcgcggtcgccccatcagaacgcacgttgtcaacttccccgccgcacaagtgggtctccccgttgggatcgaagccttcaacgtcgatacgcctcgggaaatgaccccagaatctacatgggcctatcccttcgccaacaattctttgaaaa

SEQ ID NO: 8435 - DNA, 393 bp, Glycine max
  Clone ID: LIB3039-043-Q1-E1-E8
gacacacagagcggttctcatattttggagaatccgaaaaacacgttaaagaaagtcccattcccactaccgaagcaaattaagaagatgaagcagcagagagtggagtttatgggcatgggcatgggcatgggcatgggcctgggccttttggtggtgatgatggcatgtgggtcggcgagtggtgcggatgatttggcaaccaagtgttcagcggtgattcagaaggtaataccgtgtttggatttcgcgaaggggaaggaagaaacgccgaaaaagcaatgttgcgacgcagcaacgtccataaaggagagcaacccagagtgcctctgctacaacattgaagagacccacaagggtagcccacagggtaaaagcttgggcattcaagag

SEQ ID NO: 8436 - DNA, 357 bp, Glycine max
  Clone ID: LIB3039-043-Q1-E1-E9
gatattttcacacgatcaaaaccctcgcgctctctattcgcatctgaattctcagtcgcttctcgaaccctacttcttccgcggtgattgcatttgaattcctgtaatggcgattgataatatttttaaacatgaagccagtgaagaaaaaggagagcgggccagaatggcttcttttgttggagccatggctattgctgacttggtgaagacaaccttggggccaaagggaatggataaaattttgcagtcaacaggtagaggacgtgaagttactgtcactaatgatggtgctacaatcttgaagtccctccatattgataacccagctgctaaagtccttgttgacatatcaaa

SEQ ID NO: 8437 - DNA, 152 bp, Glycine max
  Clone ID: LIB3039-043-Q1-E1-F10
gaccacaccaccctactacattcccacctttagtcctgttcttagagatggcttgtgaaaccaagtcatgggtggttatgtttcctgttttcctggttgctaaatgcatgcaacattgtgtccaacgggtgtctcaagtgccttgccctttt

SEQ ID NO: 8438 - DNA, 328 bp, Glycine max
  Clone ID: LIB3039-043-Q1-E1-F11
ggactgaagccagccagtgagcgagcgagcgaggtagggttttcgttgttcccccgtctttgaattcagttcgggactatggggtccatccccgatccacgcgagttgagcgagtttactcagccgagcttcaacgagttccagcgccaaactttcctcaagaacagctggaaccttctccgggaaggagtcctcgaacaatttctcttccctcgaccaagacttcacccacaaacccgaagccttcaaacgcaagattcgcacccccgataacactacttccgactccctcggcctcctcaattgccgcaaaacctccctcgaagcc

SEQ ID NO: 8439 - DNA, 295 bp, Glycine max
  Clone ID: LIB3039-043-Q1-E1-F12
ggtcagttcattgacttgcccacagtgagaatgaagatgttgcgaacgacaatactgcaattcgctgcgttgcaggttttgtttattctgttgggtgttggtgccgattacataccgccttcgagatttgatggcttcgtctacgggaaggggaacttgaatttgttggatacggttttgatagaagcgttttatgacccagtgtgcccagatagcagggattcctggcctccactcaaacaagctcttcatcactacgcttctcgggtttcgctccttcttcaactcctccctc

SEQ ID NO: 8440 - DNA, 370 bp, Glycine max
  Clone ID: LIB3039-043-Q1-E1-F2
gataccgaaacagaaagtggtttcagtgagtgatcggtgttcacttgatccttcataagtcgtcatcatcatcatcatcatcaccgttgattgaagaagatgccgatcagaaacatcgccatcggaaggcctgaagaggctactcaccccgacacgttgaatgcggggttggctgagttcatctccaccttgatcttcgtgttcgccggttcaggttccggcatcgcctagaagaagctcaccgacaacggcgccgccactcccgccggcctcatctccgcttccatcgcccatgctttcgccctcttcgtcgccgtctccgtcggcgccaacatctccggcggccacgtcaacccggccgtcaccttcg

SEQ ID NO: 8441 - DNA, 348 bp, Glycine max
  Clone ID: LIB3039-043-Q1-E1-F4
gattatatttgagttcaaccaattcaaagccatggccacctcaaatttctcaattgttctctccgtctccctagccttctttttggtgctacttaccaaggcacactcgaccgataccgtttctttcaccttcaacaagttcaacccagtccaaccaaacattatgctccaaaaagatgctagtatttcatcctctggggtgttacaactcaccaaagttggcagcaacggcgtgcccacctcgggatctctcggtcgtgccctttacgctgccccaatccagatttgggacagcgaaaccggcaaggtagccagctgggctacatcctttaaattcaacattttcgc

SEQ ID NO: 8442 - DNA, 325 bp, Glycine max
  unsure (1)..(325): unsure at all n locations
  Clone ID: LIB3039-043-Q1-E1-F5
gaaggtgcaagagtttgttgtgagctataagctagtttatcgtgaggagaatatgaagttgtttgttttctttgttgctgcagtagttttggtagcatggccatgccatggcgcaggctaccaaaggttccctctccgaatgaaaactggctatggtgagcgttcttcggaggtaaaatgcgcaagttttaggcttgcagtggaagcacagaacatccgagcctttaaaaccattcctgaagagtgcgttgaagcaacaaaggactacattaatggcgaacaatttagattagactctaaaacagtttaacaacangctttcttt

SEQ ID NO: 8443 - DNA, 317 bp, Glycine max
  Clone ID: LIB3039-043-Q1-E1-F6
gggacaagtgagtttgttgatcgagataactagatacagtgtgatgaaaatgaaggtccttggtttcctcggtgctagaattttggtagcatggcaatgccatgcgtacgatatgttccctctccgaatgaacactggctatggtgcccgtactccggaggtgaactgcgcaagttggcggcttgctgtggcagcacataacatctttggctttgagaccattcctgaagagtgcgttgaagcaacataggaatacatccatggagattaatatagatcagactccatcacagttaaccaacatgcttacttttatg

SEQ ID NO: 8444 - DNA, 333 bp, Glycine max
  Clone ID: LIB3039-043-Q1-E1-F7
gctctctgaaccgaaacgaacctcaacaacgctgagcgcagaaaggggaaaaggggattagggtttaggaagcagcgacaacaatggatttcacagtggagaagaaggaatcagagaacaacgccgaaaatgctcacccaacaacgttagattcttcttctcaattggcatcggcacttgattccaacaacaaagaaatcgaagaacgacaagctcgtgaactcaaagccggacttcaccccctaaagcacaagtttgtcttctggtacactcgtcgaacacctggagttcgaaatcaaacatcatatgaggacaacataaagaaaattgttg

SEQ ID NO: 8445 - DNA, 336 bp, Glycine max
  Clone ID: LIB3039-043-Q1-E1-F8
ggatagtagattgagcaaacaaaggaacaatgtcgaagaagaacaagctcgccaggagaaagaagcaatacgaattcgatctccaaagagagaaacaagagaagataaagaaagagcagaagctccatgcgaagaaaaacaagatgaaagttgatggtagtggcaagaaaaagaaaggtgggagtggatttcaggtggggaagagaaaagtgaagaccaagttgactgcccttgctaaagctaaggctgcccaggcaatggagcttgacaaatgaggttcgacttgtgtaattttagacaatgtgttgaaaattggtagatgacagtgttgttttg

SEQ ID NO: 8446 - DNA, 361 bp, Glycine max
  Clone ID: LIB3039-043-Q1-E1-F9
gcgtcagtacagctgcaaaaagaggggaaaagggggcacttgcagttgcaatcaaattagatcaatcgcgttgcgcagttccgtacctctcctctcaggatgcagatcttcggcaagaccctcaccgcgaaagaccatcacccgtgaggtggcaagctctgacacgatcgacgacgtcagtgccaagatgcaggacaaggaaggaattccgccggatgagcaacgtcacatcatcgccggaacgcagctcaaggacggccgtagcctcgccgactacaacgtccagaacgagtcagcccttcaccttgtccatcgtctccgtggtggcatgcagatcttcgtcaagactctcaatggcaaa

SEQ ID NO: 8447 - DNA, 326 bp, Glycine max
  Clone ID: LIB3039-043-Q1-E1-G1
agggggacaagttaatttggtgattgaaattactaaaaacaatgtgatgaaaatgaaaggccctggtttcctccgtgccaaaaatttgggaacaatggaaagccatgcgtaagataagtcccctctccgaatgaacactggctatggtgcccgtactccggaggtgaaatgcgcaagttggaggcttgctgtggaagcacacaacatctttggctttgagaccattcctgaagagtgcgttgaagcaacaaaggaatacatccatggcgaacaatatagatcagactccaaaacagttaaccaacaagcttacttttatgccagag

SEQ ID NO: 8448 - DNA, 343 bp, Glycine max
  Clone ID: LIB3039-043-Q1-E1-G10
ggcacaagtgagtttgttgatcgagataactagaaacagtgtgatgaaaatgaaggtccttgttttcttcgttgctacaattttggtagcatggcaatgccatgcgtacgatatgttccctctccgaatgaacactggctatggtgcccgtactccggaggtgaaatgcgcaagttggaggcttgctgtggaagcacacaacatctttggctttgagaccattcctgaagagtgcgttgaagcaacaaaggaatacatccatggcgaacaatatagatcagactccaaaacagttaaccaacaagcttacttttatgccagagacctccaagtccatcccaaa

SEQ ID NO: 8449 - DNA, 279 bp, Glycine max
  Clone ID: LIB3039-043-Q1-E1-G12
gagaaataaagagcgaaggacaacatatgaaggtgaagaaggttgagttcagagttgaaacttgagagagtgtcgttgattccaatttacgacggaggagtgaggaatcacaatctccaccggcgaaacctgtaactgttggcgacgctcaacactcgcactacgccgatagtgatggagagtgcttttgcaagcgcctctgcgattactgaccagaggcagaagatagagcactataagcaaatacttgctgctgtcatttcatctaatgacattgtt

SEQ ID NO: 8450 - DNA, 310 bp, Glycine max
  Clone ID: LIB3039-043-Q1-E1-G2
aggggaccaattgaaccagtatacccaaggccctatacaaccatgccctaaaacacacccatttgattcacttccaagggctagcctcaaggttacatttttggcagcagtgctctgcatggttgtggtgagtgcacccatggcacatgcacctatcacgtgcgggcaggtgaccaatatcctgatcaattgcatcagttacctccataacggaggaacacagccgtcgggatgctgcaactgagtgaacagcctcaatgccgccgccaagaacaccaccgatcgccagacggcgtgcaactgcctcaag

SEQ ID NO: 8451 - DNA, 263 bp, Glycine max
  Clone ID: LIB3039-043-Q1-E1-G3
aaaacccgacaaaggggggcaaatttttgttgaaatacctaaacccaataatttgaaagtgaaattgctggtttgtgtttgtcgcaacattcctggaaccaaagggttgccatggtcaaacaaacaagaagttcctcctccaaatgaaacacgggtttggtgggcattacaccattaaggtggaatttgccatttggaggcttggcttggaagcaaccaacgtattcaattggcaaactgttcctgaaccttgcggaaattac

SEQ ID NO: 8452 - DNA, 359 bp, Glycine max
  Clone ID: LIB3039-043-Q1-E1-G4
aaaagacgaccagaagggggaaaaatttggttgaaataccaagaaccattaggatgaaattgaaagtgcttgttttgttggttgcaacagttttggtaccatatgaatgccatggttcagactaccagaagttccctctccaaatgaaaactgggtttggtgggcaatacagcaatgaggtggcatgtgccatttggaggcttggcttggaagcaaacaacgtagtcaattggcaaactgttcctgcagcttgcggaaattacatagctgactactttctaggagaccaatatagatcagattccaaaacagttaaccaacaagcttatttctatgctaaatccctcaaactcaacaac

SEQ ID NO: 8453 - DNA, 313 bp, Glycine max
  Clone ID: LIB3039-043-Q1-E1-G5
ggcacaagtttgttgcgatatctagaagcactaagatgcacatgacagtgcttgttttgtttgttgctacagttttggtagcatacgaatgccatggctcagactaccagaagttccctctccacatgaaaactgggtttggtgggcaatacagcaatgaggtggcatgtgccagttggaggcttggcgtggaatcaaacaacgtactcaagtggcaaactgttcctgcagcttgcggagagtacatagctgactacgttcgaagagaccaatatagattagattccaaagcagttaactaacaagcttattt

SEQ ID NO: 8454 - DNA, 335 bp, Glycine max
  Clone ID: LIB3039-043-Q1-E1-G6
ggcatcaattcaaaatatatcatcaattataagcatgggtttgtggaacacaacgaatgcagtgtcttgccgctttcacaagtttggtgatgaccaaaagaatctggtcttccaaggtgatgccacgtcttcttccaggggcatataactcacaaagttagacggtggaggaaaaccagtgggtggcagtgtggggagagtgttatactcttctctagtgcacctttgggaaagctctacagtggtcgcaagctttgaaaccgacttcaccattttccatctcatcagactctactactccaggtgatggcctagccttcttcattgcaccattt

SEQ ID NO: 8455 - DNA, 363 bp, Glycine max
  Clone ID: LIB3039-043-Q1-E1-G7
gatcacaacactaacacagattttgattcgattcgattcgattcagtcgaggttttaagcagcagcaagatgtctgggcgtggaaagggaggaaagggattgggaaaaggaggagcaaaacgacatcgtaaggtgctccgcgacaacattcagggaattacgaagccagcgattcgtcgtttggctcgcaggggtggcgtgaagcgtatcagcggtttgatctacgaggagactcgcggtgttctcaagatcttcttggagaatgtcatccgtgacgccgttacttacacggagcacgctaggaggaagaccgttacggctatggacgttgtttacgcccttaagaggaaggaaaggaccctc

SEQ ID NO: 8456 - DNA, 392 bp, Glycine max
  Clone ID: LIB3039-043-Q1-E1-G8
gacaagtgagtttgttgatcgagataactagaaacagtgtgatgaaaatgaaggtccttgttttcttcgttgctacaattttggtagcatggcaatgccatgcgtacgatatgttccctctccgaatgaacactggctatggtgcccgtactccggaggtgaaatgcgcaagttggaggcttgctgtggaagcacacaacatctttggctttgagaccattcctgaagagtgcgttgaagcaacaaaggaatacatccatggcgaacaatatagatcagactccaaaacagttaaccaacaagcttacttttatgccagagacctcgaagtcgatcccaaggacacatttgtgttcagtatagatggcaccgtactctctaatattccatac

SEQ ID NO: 8457 - DNA, 349 bp, Glycine max
  Clone ID: LIB3039-043-Q1-E1-G9
gaagataaattgtttctcttctctgcaaaaaggcgtgtcctattgaaaacatattttggggaaaaaaagtataagaagattgaaatcaaattgagccctaaagatctctcgtcggacgcggagagtttcactttcacccttcggttctcgatgtcagcgtttgacaatgttgttggtgggaaattgaagttgaagggaaaagcactggatgtggctggtggagtgaagaagaagaaaaagaagaacaagagaaatcaggaacaacttctgcaagtcgccgaaggtgaagtttcagcaagtggaaatacagaacaggccaaagatcctaatgatggagatataaatgatg

SEQ ID NO: 8458 - DNA, 55 bp, Glycine max
  Clone ID: LIB3039-043-Q1-E1-H1
aaaaaaaccaccaaaggggaaacaaaacctagggtcctaatttccaaccaaacgg

SEQ ID NO: 8459 - DNA, 317 bp, Glycine max; identical to SEQ ID NO: 7580
  Clone ID: LIB3039-043-Q1-E1-H10

SEQ ID NO: 8460 - DNA, 343 bp, Glycine max
  Clone ID: LIB3039-043-Q1-E1-H11
tgacaaaagaacaacaaaaggggaaaaagtaactgtgctaatcgaaacatctgcacatagtgtgctgaaaatgcatgtccctgcattcatcggcgctgtcaatatgggaaccaggcgatttcaaacatatgacagtttggctcccagaatcaatatgggctaagatgaccttaaacccgatgtcataaacgaaactttcatgcctactgattaatcacatacatctttggctattacagtattcacgaacactgcattcatcacaatgtcgaagtaaacgatgacaaaacacttctattagatgacaaagcagtcaatgaatatgcatacatttacgccaaag

SEQ ID NO: 8461 - DNA, 326 bp, Glycine max
  Clone ID: LIB3039-043-Q1-E1-H12
gacacttcaaaatcctctagtaacccttcttttctctctctctctctcgtgttctgagctgctagaagcaatggagaggaaaagaagccatgcttctttcaccatgtttgcaatgcttgttggattgctctctcagagccttgtcattcctgtaatatccaccactgttgcagatcagaagaactactacaccccagatccacatgctggaagtccccccacaggctcacacaatagtagtcctccatctcatggccatgggagctctccaccctcacatcacaatagtccaagtactccatcaacaccctcaggtggaaactgtg

SEQ ID NO: 8462 - DNA, 394 bp, Glycine max
  Clone ID: LIB3039-043-Q1-E1-H2
ggcacaagtgattttgttgatcgagataactagaaacagtgtgatgaaaatgaaggtccttgttttcttcgttgctacaattttggtagcatggcaatgccatgcgtacgatatgttccctctccgaatgaacactggctatggtgcccgtactccggaggtgaaatgcgcaagttggaggcttgctgtggaagcacacaacatctttggctttgagaccattcctgaagagtgcgttgaagcaacaaaggaatacatccatggcgaacaatatagatcagactccaaaacagttaaccaacaagcttacttttatgccagagaactcgaagtcaatcccaaggacacaattgtgttcagtatagatgggcacgtactctctaatattccatac

SEQ ID NO: 8463 - DNA, 355 bp, Glycine max
  Clone ID: LIB3039-043-Q1-E1-H3
agggaatgcacaagtgaatttggtgattgagataactagaaacaatgtgatgaaaatgaaaggccctggtttcctccgtgccaaaaattttggaacctgggaatggcaagccgtacgataggtttcctctccgaatgaacaccggctatggtgcccgtactcccggaggtgaaatgcgcaagttggaggcttgctgtggaagcacacaacatctttggctttgagaccattcctgaagagtgcgttgaagcaacaaaggaatacatccatggcgaacaatatagattagactccaaaacagttaaccaacaagcttacttttatgccagagacctcgaagttcacccaaggacac

SEQ ID NO: 8464 - DNA, 380 bp, Glycine max
  Clone ID: LIB3039-043-Q1-E1-H4
gaagacaacagaaggggaaggtgcaaaagtttgttgtgagctataagctagtttatcgtgaggagaatatgaagttgtttgttttctttgttgctgcattatttttggtagcatggccatgccatggcgcaagctatcaaaggttccctctccgaatgaaaactggctatggtgagcgttcttcggaggtaaaatgcgcaagttttaggcttgctgtggaagcacacaacatccgagcctttaaaaccattcctgaagagtgcgttgaaccaacaaaggactacattaatggcgaacaatttagattagactctaaaacagttaaccaacaagctttcctttatgctagtgaacgcgaagttcatcacaacgacatattt

SEQ ID NO: 8465 - DNA, 341 bp, Glycine max
  Clone ID: LIB3039-043-Q1-E1-H5
gatcgctctcacacctgtgattattcctcttttaacaatccacacccaaattctagggttccgaaatggacgctggcggaaagatcaagaagggcgccggaggtagaaagggcggcggcccaaagaagaagccggtttcaaggtccgtcaaagccggtctccaattccccgtcggaagaattggccgttatttgaagaaaggaaggtacgctcagcgtgtcggtaccggtgctcccgtatacttggctgcagttctcgaatacctagctgccgaggtgcttgagttggctgggaatgccgcacgtgacaacaagaagaacaggattattccaagacacgtg

SEQ ID NO: 8466 - DNA, 352 bp, Glycine max
  Clone ID: LIB3039-043-Q1-E1-H6
ggcacaattgatttggttgatcgaaataactaaaaccagtgtgatgaaaatgaaggtccttgtttccttcgttgcaacaattttggtaccatggcaatgccatgcgtacaatatgttccctctccgaatgaacactggcaatggtgcccgtactccggaggtgaaatgcgcaatttggaggcttgctgtggaagcacacaacatctttggctttgaaaccattcctaaaaattgcgttgaagcaccaaaggaatacatccatggcaaacaatatagatcagactccaaaccagttaaccaacaagcttacttttatgccagagacttcaaattccatcccaagggacacatt

SEQ ID NO: 8467 - DNA, 330 bp, Glycine max
  Clone ID: LIB3039-043-Q1-E1-H7
ggcacaagtgagtttgttgatcgagataactagaaacagtgtgatgaaaatgaaggtccttgttttcttcgttgctacaattttggtagcatggcaatgccatgcgtacgatatgttccctctccgaatgaacactggctatggtgcccgtactccggaggtgaaatgcgcaagttggaggcttgctgtggaagcacacaacatctttggctttgagaccattcctgaagagtgcgttgaagcaacaaaggaatacatccatggcgaacaatatagatcagactccaaaacagttaaccaacaagcttacttttatgccagagacctcga

SEQ ID NO: 8468 - DNA, 373 bp, Glycine max
  unsure (1)..(373): unsure at all n locations
  Clone ID: LIB3039-043-Q1-E1-H8
gaatcatataaataaataaacatagtataattaattgatcgtcgatggtagtagtatgttgagggggctgtttgtgtttggtggcacgtgctgcaggagattgacgttggcacgacagtccacgcagaaacagaaacagtggtgggatcatcttcatcatcatcttcgctccaaaaaccttcattgggcaggtctcatggagagtaatgggaactcggtgaaggatgctgagaaacanatcacccgtgttttgttttgtggaccccgtttccctgcttctcatgaatatacaattgagtatttgcaaaatcattcacatatcaaggttgatgttctccctttagaagatgtgccanaggatattgccaactat

SEQ ID NO: 8469 - DNA, 349 bp, Glycine max
  Clone ID: LIB3039-043-Q1-E1-H9
gactacctcaaagacaacactacaatagcataacccttcgaagtcgtcgtttatcgctcctcgttcgcatcgtcatcctttccctgtctctcagaaagatgaaagtggtcgctgcgtatctgcgcgccgtcctcggtggcaacaacaccccctctagcgatgacatcagtgaaatcctcgggtccgttggaatataaggagatgaatataggattgaaacattcttgtctgaagttaaaggtaaggatatagtttagctaattgctgccagtaaagaataactggcctcggtgccttctggtggaggtggttccgttgcagtcatcgctgcacctgatggaagtggaag

SEQ ID NO: 8470 - DNA, 410 bp, Glycine max
  Clone ID: LIB3039-044-Q1-E1-A1
gaaggtgcaagagtttgttgtgagctataagctagtttatcgtgaggagaatatgaagttgtttgttttctttgttgctgcagtagttttggtagcatggccatgccatggcgcaggctaccaaaggttccctctccgaatgaaaactggctatggtgagcgttcttcggaggtaaaatgcgcaagttttaggcttgctgtggaagcacacaacatccgagcctttaaaaccattcctgaagagtgcgttgaaccaacaaaggactacattaatggcgaacaatttagatcagactctaaaacagttaaccaacaagctttcttttatgctagtgaacgcgaagtccatcacaacgacatatttatattcggcatagataacaccgtactctctaatatcccatactatg

SEQ ID NO: 8471 - DNA, 347 bp, Glycine max
  Clone ID: LIB3039-044-Q1-E1-A10
ggttgtgtgagtgaagaagcagggggagtagcggcattaaaaatgcagatcttcgtgaaaactctgacagggaagactataaccctcgaggtcgagagcagcgacaccatcgacaatgtcaaggccaagattcaagacaaggaaggcattcctccggatcagcagcgtttgattttcgccggaaagcagcttgaagatggaaggaccctggccgattacaacatccagaaggaatcaacccttcatctcgtcctcaggcttcgtggtggcatcattgagccttccctcatggctttggctcgcaaatacaaccaggacaagatgatttgccgcaagtgctatgcccg

SEQ ID NO: 8472 - DNA, 369 bp, Glycine max
  unsure (1)..(369): unsure at all n locations
  Clone ID: LIB3039-044-Q1-E1-A11
agacgacagaaggggattcctatctcaagtctcacttttttcagcttctctaaattctctgtctacttcaccaagcacttttggttgcagctttggttaatttccaatatggtgtttcctctcctatctatctttgctttactcaatcttgcagtggtggcaacccatgcagaaaccttgccccctgaagtttactggaagtcgaagcttcccaccactccaatgccgaaagccattacagatatccttcacccagatttggcagaagacaaaagcacctctgtggccgtaggaaaggggggcgtaaacgttaacgcagggaaaacaaagccaggaggcacatcagtgaacgtangaaaaggaggagtt

SEQ ID NO: 8473 - DNA, 322 bp, Glycine max
  Clone ID: LIB3039-044-Q1-E1-A12
gaatgctctgaaactcacattcccataaagttgagaaatatgagaattccaagcaattgcgagttcacacgaatcacgccctctgctttcagctaccaccgtctcaaatcctacgtttccgactgcagagccgtgcttctcccctcattcggcggcccgcacgtgctccagcttcgctcgcacgtgccagtccctccgctcaagcctcacgatgtcctcgttcgtgcgcgcgccgtctccgtcaaccccttggacacccgaatgcgtgctggctacgggcgttccatcttcgagccgctgttgcctctcattttggggcgcg

SEQ ID NO: 8474 - DNA, 405 bp, Glycine max
  unsure (1)..(405): unsure at all n locations
  Clone ID: LIB3039-044-Q1-E1-A2
ggaacctttgcattctattcattcaagattcagcaagtgcgttttggaagcagagaccgaaatacttcgagatggcccgtacaaagcaaactgctcgtaagtcaactggaggaaaagctcccaggaagcagcttgcaaccaaggctgcacgtaagtctgcaccaacaactggtggtgtgaagaagcctcatcgttatcgccctggaactgttgctcttcgtgagattaggaaataccagaagagcactgagctcctaatcaggaagcttcctttccagaggttggttcgtgaaattgcccaggatttcaagactgatctgcgtntccagagccatgctgtgcttgcaatggcagaggctgctgaggcatnacttgttgggctctttgaggacactaacttgtgtg

SEQ ID NO: 8475 - DNA, 407 bp, Glycine max
  Clone ID: LIB3039-044-Q1-E1-A3
ggcacaagtgagtttgttgatcgagataactagaaacagtgtgatgaaaatgaaggtccttgttttcttcgttgctacaattttggtagcatggcaatgccatgcgtacgatatgttccctctccgaatgaacactggctatggtgcccgtactccggaggtgaaatgcgcaagttggaggcttgctgtggaagcacacaacatctttggctttgagaccattcctgaagagtgcgttgaagcaacaaaggaatacatccatggcgaacaatatagatcagactccaaaacagtttaccaacaagcttacttttatgccagagacctccaagtccatcccaaggacacatttgtgttcagtatagatggcaccgtactctctaatattccatactacaaaaaacatg

SEQ ID NO: 8476 - DNA, 413 bp, Glycine max
  unsure (1)..(413): unsure at all n locations
  Clone ID: LIB3039-044-Q1-E1-A4
gaaagaggtgcatacaactacaaaggttgctgtaggagataagatattgaagtagtgctaagtgcctaacacctgcagtgaacaatggcctctgcatcagcatctcttctcaagtcttcacttgttcttgacaagtctgagtggatgaagggacaaacacttcgccaaccttctgctgcatcagttgtgagatgcaaccccaccaccccatcaggcctcaccatcagagctggttcctatgctgatgagctcgttaagaccgcgaaaacagtggcttcaccagggaggggtattttggccatggatgagtccaatgctacctgtgggaagcgtttggcttcaattgggctanaaaacactgaagctaaccgccaggcataccgtaccctccttgtgacagttccaggacttgg

SEQ ID NO: 8477 - DNA, 405 bp, Glycine max
  Clone ID: LIB3039-044-Q1-E1-A5
ggcacaagtgagtttgttgatcgagataactagaaacagtgtgatgaaaatgaaggtccttgttttcttcgttgctacaattttggtagcatggcaatgccatgcgtacgatatgttccctctccgaatgaacactggctatggtgcccgtactccggaggtgaaatgcgcaagttggaggcttgctgtggaagcacacaacatctttggctttgagaccattcctgaagagtgcgttgaagcaacaaaggaatacatccatggcgaacaatatagatcagactccaaaacagttaaccaacaagcttacttttatgccagagacctcgaagtcaatcccaaggacacatttgtgttcagtatagatggcaccgtactctctaatattccatactacaaaaaaca

SEQ ID NO: 8478 - DNA, 407 bp, Glycine max
  Clone ID: LIB3039-044-Q1-E1-A6
ggcacaagtgagtttgttgatcgagataactagaaacagtgtgatgaaaatgaaggtccttgttttcttcgttgctacaattttggtagcatggcaatgccatgcgtacgatatgttccctctccgaatgaacactggctatggtgcccgtactccggaggtgaaatgcgcaagttggaggcttgctgtggaagcacacaacatctttggctttgagaccattcctgaagagtgcgttgaagcaacaaaggaatacatccatggcgaacaatatagatcagactccaaaacagttaaccaacaagcttacttttatgccagagacctcgaagtccatcccaaggacacatttgtgttcagtttagatgggaccgtactccctaatattccatactacagaaacatgg

SEQ ID NO: 8479 - DNA, 379 bp, Glycine max
  Clone ID: LIB3039-044-Q1-E1-A7
gtctcaccacttcaaaacactcataacacaaagcacaaagcaaagctcatccttgagttaaaaaatggcagcagcttcttccatggctctctcatccccatccttggctggcaaggccgtgaagctgggcccatcagccccagaagtgggaagggtgagcatgaggaagaccgtcaccaagcaggtctcctcaggaagcccatggtacggcccagaccgagtcaagtacttgggcccattctctggcgagcccccgtcctacctaaccggtgagttcccaagcgactacggctgggacactgctgggctttccgcagacccaagaacctttcgcaaggaaccgtgaactcgaagtgatccactccaggtgggccatgct

SEQ ID NO: 8480 - DNA, 407 bp, Glycine max
  Clone ID: LIB3039-044-Q1-E1-A8
gaaggtgcaagagtttgttgtgagctataagctagtttatcgtgaggagaatatgaagttgtttgttttctttgttgctgcagtagttttggtagcatggccatgccatggcgcaggctaccaaaggttccctctccgaatgaaaactggctatggtgagcgttcttcggaggtaaaatgcgcaagttttaggcttgctgtggaagcacacaacatccgagcctttaaaaccattcctgaagagtgcgttgaaccaacaaaggactacattaatggcgaacaatttagatcagactctaaaacagttaaccaacaagctttcttttatgctagtgaacgcgaagtccatcacaacgacataattaatattcggcatagataacacggtaccctctaatatcccatac

SEQ ID NO: 8481 - DNA, 403 bp, Glycine max
  Clone ID: LIB3039-044-Q1-E1-B1
gggggtctagttagagtgaatccatgaccgtgaccatggcggctgcgtttacaagtacaagtgcaacactgagactgtcaaatgttggagagagcagaggtttgcagctgcgtaagtgtaaccctaatcctaataagctgaaggttatgggggggtttggaggttgttctggagtggcagtgggtgtgagagaaagaaaaggaattggaagggttagggttcgggttcgggcgagttcttcgtcggacgaggcagtgagtgcgcagtcaaaagtgactcagaaagtattctttgacgtcagtattggaaatccagttgggaagcttgtgggacgtattgtgattggactgtacggcgacgatgtcccccaaacggccgagaacttccgtgccctttgtactgg

SEQ ID NO: 8482 - DNA, 336 bp, Glycine max
  Clone ID: LIB3039-044-Q1-E1-B10
gacaggcaaaaaccctagccttcgaaaaccctaatcctgaggcactgtgatatggcaagagccgtttcctcttcctgcgcgcgcctcacaatgcgcctcttctccaccaccaccaccaccaccaccgctgcgttcgccgttacattacccataccctcgtcattctcagtctcaatgcgtcgattcctcttccctctctctcacgccaacgtcactctctctacctgcatcgccggaatccggtgccgtgtcaatcgcaccggcgactcagagtaatcgccgctgaactcaacttcatcatcgtcatcgtcgttcagcgacagggctcccactgac

SEQ ID NO: 8483 - DNA, 175 bp, Glycine max
  Clone ID: LIB3039-044-Q1-E1-B11
gtggggtgcggtgggtttgttgctctcttttcctggcttccctgtctctgtcgttccggcctttgttttcgtctttccggtgcgttttcggtggcctcggctctctctttcttctggctctcgtgtctctcgcttccggctgtgtcttcttcgcgtttcctttcggtgtccggtg

SEQ ID NO: 8484 - DNA, 385 bp, Glycine max
  Clone ID: LIB3039-044-Q1-E1-B12
ggtgcatttgaagaaagaaaaaaaaaaagggttggtttttggttttggtttggttaactccttccacttccacccatggtctccgaatccgaactcatcggccgcctccgcgagttcctccggagctccgacctcaacaccaccaccaccgccaccgtccgccgccagttggaggccgatttcggaatcgacttatccgaccgcaaggcattcattagggaacaggtcgacttgttcctccagactgagcacaaccaatcacaacaagaagaagaagaaaaggaagaaaaacaccaaaacgaccacgtagaggaacaagaagaggatgcgcctaataatccccaaaaaaaggcaacccttcggatttccagggaattaaccgatg

SEQ ID NO: 8485 - DNA, 403 bp, Glycine max
  unsure (1)..(403): unsure at all n locations
  Clone ID: LIB3039-044-Q1-E1-B2
ggaacttctcacgttcatttctacacatccctagctctgtcgttccgtcgttgacgatggcgtttcgggtgcgaagccctgacctccgctctctctttcttctctctctcttgtccatcgcttccgccaatgtcttcttcgaagagcgtttcgatgacgggtgggaaaatcgatgggttaaatcagattggaaaaaagatgagaacgtggctggggagtggaaccacacctctggtcaatggaatggagacgctaatgacaaaggtattcaaaccagtgaggattacagattctatgctatttcagctgagtaccctgaattcagcaacaagggtaagacactagtccttcaaatttccggtaaaccacaancagaaccttgactgtggtggtggctacatga

SEQ ID NO: 8486 - DNA, 411 bp, Glycine max
  Clone ID: LIB3039-044-Q1-E1-B3
gaaggtgcaagagtttgttgtgagctataagctagtttatcgtgaggagaatatgaagttgtttgttttctttgttgctgcagtagttttggtagcatggccatgccatggcgcaggctaccaaaggttccctctccgaatgaaaactggctatggtgagcgttcttcggaggtaaaatgcgcaagttttaggcttgctgtggaagcacacaacatccgagcctttaaaaccattcctgaagagtgcgttgaaccaacaaaggactacattaatggcgaacaatttagatcagactctaaaacagttaaccaacaagctttcttttatgctagtgaacgcgaagtccatcacaacgacatatttataatcggcatagataacaccgtactctctaatatcccatactatga

SEQ ID NO: 8487 - DNA, 392 bp, Glycine max
  unsure (1)..(392): unsure at all n locations
  Clone ID: LIB3039-044-Q1-E1-B4
gacactcactctttcactcttcttcgtctcaaacctcttcgttccttcgattcattccatttcttccaaaatggccaaagacccagttcgcgttctcgtcactggagccgcagggcaaattggatatgctcttgtccctatgattgctangggagtgatgctgggtcctgaccagcccgtgatcctccacatgcttgacattcctccagcagcagagtcgttgaatggggttaaaatggaattggtggatgctgcattccctcttcttaaaggtgttgttgctacaaccgatgtggttgaggcatgcactggggtcaatattgcagtgatggttggtggattccctagaannagaaggtatggaaaggaaggatgtgatgactaagaacgtc

SEQ ID NO: 8488 - DNA, 397 bp, Glycine max
  Clone ID: LIB3039-044-Q1-E1-B5
ggtgcacaagtgagtttgttgatcgagataactagaaacagtgtgatgaaaatgaaggtccttgttttcttcgttgctacaattttggtagcatggcaatgccatgcgtacgatatgttccctctccgaatgaacactggctatggtgcccgtactccggaggtgaaatgcgcaagttggaggcttgctgtggaagcacacaacatctttggctttgagaccattcctgaagagtgcgttgaagcaacaaaggaatacatccatggcgaacaatatagattagactccaaaacggttaaccaacaagcttacttttatgccagagacctcgaagtccatcccaaggacacatttgtgttcagtatagatggcaccgtactctctaatatccatacta

SEQ ID NO: 8489 - DNA, 363 bp, Glycine max
  unsure (1)..(363): unsure at all n locations
  Clone ID: LIB3039-044-Q1-E1-B6
ggaacctttgcattctattcattcaagattcagcaagtgcgttttggaagcagagaccgaaatacttcgagatggcccgtacaaagcaaactgctcgtaagtcaactggaggaaaagctcccaggaagcagcttgcaaccaaggctgcacgtaagtctgcaccaacaactggtggtgtgaagaagcctcatcgttatcgccctggaactgttgctcttcgtgagattangaaataccagaagagcactgagctcctaatcaggaagcttcctttccagaggttggttcgtgaaattgcccaggatttcaagactgatctgcgtttccagagccatgctgtgcttgcattgcaagaggctgctg

SEQ ID NO: 8490 - DNA, 398 bp, Glycine max
  Clone ID: LIB3039-044-Q1-E1-B7
ggcacaagtgagtttgttgatcgagataactagaaacagtgtgatgaaaatgaaggtccttgttttcttcgttgctacaattttggtagcatggcaatgccatgcgtacgatatgttccctctccgaatgaacactggctatggtgcccgtactccggaggtgaaatgcgcaagttggaggcttgctgtggaagcacacaacatctttggctttgagaccattcctgaagagtgcgttgaagcaacaaaggaatacatccatggcgaacaatatagatcagactccaaaacagttaaccaacaagcttacttttatgccagagacctcgaagtccatccccaaggacacatttgtggtcagtatagatggcaccgtactctctaatattccatactac

SEQ ID NO: 8491 - DNA, 155 bp, Glycine max
  Clone ID: LIB3039-044-Q1-E1-B9
gaaaacacacttctataatggatcggaaaagcctcctctccctcgcaatcatcgccattgtcgtcgccgccgtcggaggacagtctccagcggcgtcgcccaccacttctcctccggctgccacaacaatccctttgcatccccaaccaaaagcc

SEQ ID NO: 8492 - DNA, 402 bp, Glycine max
  Clone ID: LIB3039-044-Q1-E1-C1
ggtccttctttgcgagattgaatcgtaagcagcggctaccctaatcctctcctcttcctctctactaatttcagctatggccgacgaagctgtggttgttccagatcccacccagatcgatgtcaagctctttaaccgctggagcttcgacgatattgagattactgacatttctctggctgattatatcggagtggcgacatccaagcacgccacgtatgtgcctcacaccgccggcaggtactcggtgaagcggttcaggaaggcgcaatgccccattgttgagaggctgaccaactctctcatgatgcacggtagaaacaatggcaagaaactcttggctgtttagatcatcaaacatgctatggagattattcatttgttgactgaccagaaccccat

SEQ ID NO: 8493 - DNA, 323 bp, Glycine max
  unsure (1)..(323): unsure at all n locations
  Clone ID: LIB3039-044-Q1-E1-C11
gtctgtgacattcccccaaccggcttgaagatggcttcaacattcattggcaactctacctccattcaggagatgttccgtanagtgagtgagcaattcactgctatgttcaagaagaaggccttcttgcattggtataccggggaaagcatggacgagatggatttcactaaggctgagagcaccatgaacaatcttgtgtcaaattaccatcattaccagaatgccactgctaataaggataattataaggaggataagaagaagaagaattatggccaccataaaagttaattttgaacttggtaatgtattccggtggc

SEQ ID NO: 8494 - DNA, 337 bp, Glycine max
  Clone ID: LIB3039-044-Q1-E1-C12
gaagactgcgacgacgatccaagtgatagacactcgtcgcgatggaacgtgtagctgaagccgatcgaactctgtacccatacgtgactggatcctctgtagtcgctatcaaatacaaagatgggattctaatggccgctgacatgggaggttcgtatggatctaccctgcggtacaagagtgttgagcgtatcaagcctattggaaagcattctcttcttggtgctagcggggagataagtgactttcaggagattctgcgttaccttgatgagcttatcctatatgacaacatgtgggatgatgggaattctctatggccgaaggacgtgcataa

SEQ ID NO: 8495 - DNA, 409 bp, Glycine max
  Clone ID: LIB3039-044-Q1-E1-C2
ggtgcacaagtgagtttgttgatcgagataactagaaacagtgtgatgaaaatgaaggtccttgttttcttcgttgctacaattttggtagcatggcaatgccatgcgtacgatatgttccctctccgaatgaacactggctatggtgcccgtactccggaggtgaaatgcgcaagttggaggcttgctgtggaagcacacaacatctttggctttgagaccattcctgaagagtgcgttgaagcaacaaaggaatacatccatggcgaacaatatagatcagactccaaaacagttaaccaacaagcttacttttatgccagagacctcgaagtccatcccaaggacacatttgtgttaattataaatggcaccgtactctctaatattccatactacaaaaaacatg

SEQ ID NO: 8496 - DNA, 285 bp, Glycine max
  Clone ID: LIB3039-042-Q1-E1-D10
gcataagtgagtttgttgatcgagataactacaaatagtgtgatgacaatgaatgtccatgttttcatcgattgctacaattttggtatcatggcaatactatgcgtacgatatgttccctcaccgaatgacaactggctatggtgcccgtactccggatgtgaaatgctcaagttggatgcatgctgtagaagcacacatcatctttggctctgagaccattcctgacgagtgcctagacgcaacaaatgaatacatctatggcgaacaatatatattatactc

SEQ ID NO: 8497 - DNA, 393 bp, Glycine max
  Clone ID: LIB3039-040-Q1-E1-E10
gacgaacagcaacactcgtggtcgtggccgcgaaactcgtcgtcgtgttcttgccgcacaccacttcgttgcgccatcttctttcaacaatcagccacagctcttctcccactttccctaacttcgaggccaccaacttctcatatttcaagacaaaaggaatggtgggtttatctcttggagaaacgcatttcatccaaggtggcattgctcaagatcttcgttgtgatggtagaaagagattgacatatcgaccaatctctgttgaaactggagtgattccccagaccaatggttcagcaagagtcagaatgggtgccacagatgttattgccaacgtttaacggctgaacttggaaaagcaaagcttgttgcaacctgacaaacgaaaag

SEQ ID NO: 8498 - DNA, 390 bp, Glycine max
  Clone ID: LIB3039-040-Q1-E1-E11
gagtgaagaacaagtcttgcattgggtggagcatacttagaaacagcaactatgtctctcatgcagcttactagctcccctgttggctcactggtccgtttcattgtaatatttgctttatggtacagaaccatggctttggccaagttgccaccaaacgcttcatcagttccagcagttttagcgtttggagattccatcgtggacccaggcaacaacaacaacataaaaacattgatcaagtgcaacttcccaccttatggaaaggattttcagggaggaaacccaacgggtcgattttgcaatggaaaaattccttctgacttaatagttgaacaattgggtattaaggagtatttgcctgcatatttggatccgaatctcaaatct

SEQ ID NO: 8499 - DNA, 377 bp, Glycine max
  Clone ID: LIB3039-040-Q1-E1-E2
ggcacaagtgagtttgttgatcgagataactagaaacagtgtgatgaaaatgaaggtccttgttttcttcgttgctacaattttggtagcatggcaatgccatgcgtacgatatgttccctctccgaatgaacactggctatggtgcccgtactccggaggtgaaatgcgcaagttggaggcttgctgtggaagcacacaacatctttggctttgagaccattcctgaagagtgcgttgaagcaacaaaggaatacatccatggcgaacaatatagatcagactccaaaacagttaaccaacaagcttacttttatgccagagacctcgaagtcaatcccaaggacacatttgtgttcagtatagatggcaccgtac

SEQ ID NO: 8500 - DNA, 353 bp, Glycine max
  Clone ID: LIB3039-040-Q1-E1-E4
gagtgcaaggctttcattacatcgatgccatggataccctctcaaggattagattcccccccacttgttacagccttcagttaccaaaaatctctgcattatctcgtttcccaaatgctttttccaaaaccactcaccaggtttcagtgctaagagtaagagcttctcgtccttcagtgagtaatgcagacgaggatgtcttgcaaatattttttaaggagagagaattaaatggggattttatatcaagagcttccgatttactatggagaagagatttcagaagttctggtgattatgatattagcgagctcaacaacaacacttctcaacatactgagcagatcatagag

SEQ ID NO: 8501 - DNA, 375 bp, Glycine max
  Clone ID: LIB3039-040-Q1-E1-E5
gcacaagtgagtttgttgatcgagataactagaaacagtgtgatgaaaatgaaggtccttgttttcttcgttgctacaattttggtagcatggcaatgccatgcgtacgatatgttccctctccgaatgaacactggctatggtgcccgtactccggaggtgaaatgcgcaagttggaggcttgctgtggaagcacacaacatctttggctttgagaccattcctgaagagtgcgttgaagcaacaaaggaatacatccatggcgaacaatatagatcagactccaaaacagttaaccaacaagcttacttttatgccagagacctcgaagtccatcccaaggacacatttgtgttcagtatagatggcaccgta

SEQ ID NO: 8502 - DNA, 377 bp, Glycine max
  Clone ID: LIB3039-040-Q1-E1-E6
gagcgtttttcattgtgcattattcaatggccaccacagcagctctatccggaaccatggtgagcacctccttcatgaggaagcaacctatgacgaccaagagcctaaagacattccccaacgctctttttggtctgaaaggtggacgaggtggtcgtgtaacttgcatggcctcgtacaaggtgaagctcataaccccagaaggagaagtggagtttgaatgcccagatgatgttttcattgttgacaaggctgaggaagaaggcattgaacttccctactcgtgcagggctggttcttgcgtttcatgtgttgggaaaattgtgaaaggtgacgtggaccattcagatggtagcttccttgatgatgaacaaata

SEQ ID NO: 8503 - DNA, 380 bp, Glycine max
  Clone ID: LIB3039-040-Q1-E1-E7
ggcacaagtgagtttgttgatcgagataactagaaacagtgtgatgaaaatgaaggtccttgttttcttcgttgctacaattttggtagcatggcaatgccatgcgtacgatatgttccctctccgaatgaacactggctatggtgcccgtactccggaggtgaaatgcgcaagttggaggcttgctgtggaagcacacaacatctttggctttgagaccattcctgaagagtgcgttgaagcaacaaaggaatacatccatggcgaacaatatagatcagactccaaaacagttaaccaacaagcttacttttatgccagagaactcgaagtcaatcccaaggacacatttgtgttcagtatagatggcaccgtactct

SEQ ID NO: 8504 - DNA, 378 bp, Glycine max
  Clone ID: LIB3039-040-Q1-E1-E8
gggcacaagtgagtttgttgatcgagataactagaaacagtgtgatgaaaatgaaggtccttgttttcttcgttgctacaattttggtagcatggcaatgccatgcgtacgatatgttccctctccgaatgaacactggctatggtgcccgtactccggaggtgaaatgcgcaagttggaggcttgctgtggaagcacacaacatctttggctttgagaccattcctgaagagtgcgttgaagcaacaaaggaatacatccatggcgaacaatatagatcagactccaaaacagttaaccaacaagcttacttttatgccagagacctcgaagtccatcccaaggacacatttgtgttcagtatagatggcaccgtac

SEQ ID NO: 8505 - DNA, 388 bp, Glycine max
  Clone ID: LIB3039-040-Q1-E1-E9
gaaggtgcaagagtttgttgtgagctataagctagtttatcgtgaggagaatatgaagttgtttgttttctttgttgctgcagtagttttggtagcatggccatgccatggcgcaggctaccaaaggttccctctccgaatgaaaactggctatggtgagcgttcttcggaggtaaaatgcgcaagttttaggcttgctgtggaagcacacaacatccgagcctttaaaaccattcctgaagagtgcgttgaaccaacaaaggactacattaatggcgaacaatttagatcagactctaaaacagttaaccaacaagctttcttttatgctagtgaacgcgaagtccatcacaacgacatatttatattcggcatacataacaccgta

SEQ ID NO: 8506 - DNA, 292 bp, Glycine max
  Clone ID: LIB3039-040-Q1-E1-F1
gaactcaaacaacaaaaataagacattgtttggtttggttacttgctcgaatttcctcgaatcgcttaatttgtatttgattagttaaaccgcaacgcggaatctcttttctcgaactggctaactctcaggcaagtggttcggacgctgattccagcaacaagcggctggtgctcgcactgtatgacgccctaaactccggcgactccgacgccgtcgtcaagatcgtcgccgccgacctcgagtggtggttccatggtccgccctcacaccagtttttgatgcgcatgct

SEQ ID NO: 8507 - DNA, 349 bp, Glycine max
  Clone ID: LIB3039-040-Q1-E1-F10
agtcgggtgccaaaacaacacaaaggggggcacaagttcatttgttgatcaaaatcgctaccaacggtgggatgagaatgtaagtccttgtattcttcgctgctacggatttgtgatcatggtccagacattcgtagaatatgatgactctctcaataaaggatggcaatcgtgcccgtaatctgtgatgtgatatactgcagtttggtgcttgccatgccatcacattgcatcatttcctttgggaacagtcatgaagattgcgtttgtccacctcctgaatgtatccatggctaacattataaatgaatccacagactgttaacttgaagccatacttttattccaa

SEQ ID NO: 8508 - DNA, 390 bp, Glycine max
  Clone ID: LIB3039-040-Q1-E1-F11
ggcacaagtgagtttgttgatcgagataactagaaacagtgtgatgaaaatgaaggtccttgttttcttcgttgctacaattttggtagcatggcaatgccatgcgtacgatatgttccctctccgaatgaacactggctatggtgcccgtactccggaggtgaaatgcgcaagttggaggcttgctgtggaagcacacaacatctttggctttgagaccattcctgaagagtgcgttgaagcaacaaaggaatacatccatggcgaacaatatagatcagactccaaaacagttaaccaacaagcttacttttatgccagagacctcgaagtccatcccaaggacacattttgtgtcagtttagatggcaccgtactctccaatattcc

SEQ ID NO: 8509 - DNA, 381 bp, Glycine max
  Clone ID: LIB3039-040-Q1-E1-F2
gctcctcctttgtggtgtcgagctgagaataccagttgctccagtagccggcactaaacaacatggcggacaaggcagtcaccatccgaaccaggaagtttatgacgaacaggcttctctccagaaagcagttcgtcgttgatgtccttcatccaaggagggctaatgtttccaaggctgaactgaaggagaagctgggaagaatgtatgacgtgaaagacaccaacactgtatttgtcttcaagttccgaactcattttggtggtggcaagtccactgggtttggtttgatctatgattcagttgagaatgctaagaaatatgaccctaaatacaggcttatcaggaatggacttgataccaaagtagagaaatcaagga

SEQ ID NO: 8510 - DNA, 336 bp, Glycine max
  unsure (1)..(336): unsure at all n locations
  Clone ID: LIB3039-040-Q1-E1-F3
gattccaatttaaatcaaaatcaaaaacaacaaatcctccaaatcaagtttgcaacaagttttcctgaaaaaatgtccgggccttgaaaaggttgaaaaggtttgggaaaaggaagtgccaanaggcacaagaaggttcttcgcgacaacattcaaggcattacgaaacctgcgattcgtaggttagcgagaagaggtggcgtgaagaggatcagtggtttgatctacgaggaaaccagaggggttctgaagatattcttggagaacgtgattcgcgatgctgtgacttataccgagcacgctangaggaagacggttactgccatggatgttgtt

SEQ ID NO: 8511 - DNA, 294 bp, Glycine max
  Clone ID: LIB3039-040-Q1-E1-F4
tgggacacacagtctcttcttcttgcaattccttcctcgttatggagtcccgagtgctgtcactcgccgtgaacttgtcctccctggctcaggtccggaaggtgccgcgggaagacgtctcgatcgtctccctcgctctccgtgaatgacgtgggctccgtctcggacggcagaaacatgatttgggggaagcagcttcactcggatctctgatcaccagtgctgaagagtgatgctgtcctcctccggcaatgctactccgcagcctcttcgcctagcacgaaggtagtgatt

SEQ ID NO: 8512 - DNA, 308 bp, Glycine max
  Clone ID: LIB3039-040-Q1-E1-F5
ggagtgagagtgtttattggcatggattcagcatttgcgagaacgagatccatgttcttcgcagcttcactcctcctctacatattcgcagtcaccaccaccaccttcgcatccatccacatctacgatcatgaacctttcagagaactcgggaattcctaactcctcgctggcggcagcgaagggatcgtcacttcccaaccctaatccgtccacgatgatgggcgttcctacatccgatttgagaatataaccttccggagaaccaaagcttcagccaagggacgcggttctgtgccaatacacat

SEQ ID NO: 8513 - DNA, 380 bp, Glycine max
  Clone ID: LIB3039-040-Q1-E1-F6
ggaacctttgcattctattcattcaagattcagcaagtgcgttttggaagcagagaccgaaatacttcgagatggcccgtacaaagcaaactgctcgtaagtcaactggaggaaaagctcccaggaagcagcttgcaaccaaggctgcacgtaagtctgcaccaacaactggtggtgtgaagaagcctcatcgttatcgccctggaactgttgctcttcgtgagattaggaaataccagaagagcactgagctcctaatcaggaagcttcctttccagaggttggttcgtgaaattgcccaggatttcaagactgatctgcgtttccaagagcaatgctgtgcttgcattgcaagaggctgctgaggcataccttgttgg

SEQ ID NO: 8514 - DNA, 362 bp, Glycine max
  Clone ID: LIB3039-040-Q1-E1-F7
ggccctttcgcctacgcactgcggagagagaaattgagtttccgagataaccagttttctctttgattcatcaatggcaactgcgaggaccgtgaaggatgtttcgcctcacgatttcgtgaaggcttatgcttcccacctcaagcgttccggcaagatggagcttcctgagtggaccgatattgtaaaaacagcaaaatttaaggagttggctccatatgatcctgactggtactacattaaggctgcctcaatggcaagaaagatctatttgagaggtggtcttggtgttggtgctttccaaaggatctatggtggaagcaaaagaaatggaagccgtcccccacatttctgcaagagca

SEQ ID NO: 8515 - DNA, 395 bp, Glycine max
  Clone ID: LIB3039-040-Q1-E1-F9
ggtgtccatttcgtgatccactctctgagccccaatctcttgagcagcagaatcttcaggccaagccaggtaagcaagcacaacacaaccccgaaatggcttctgcttctgttcccatggctttctcgctgagctctgttatcaacaacaacaagccttcatccgaagccttcttcaggccactacccctacggcaaccaaagaggaccctcttcaccacaaaggcagtgtcaaactccaaggctcaaatcaatgcatctttgaaggagaaggcagttgcaggactcacagcagcttctgtgacagcatctatggtggttccggaggtggctcatgctgctggatatgagttccccccttccctcaagaactttctgctaagcatctttgctggt

SEQ ID NO: 8516 - DNA, 379 bp, Glycine max
  Clone ID: LIB3039-040-Q1-E1-G1
gatccataaccatggcgtctaactctgcttccgctctttacttccttttatgcctatcgcccatcactttgcttctttctgcgtttcgtgctcaagctcaatctcatgctccagctcccactttcaagtactgtgaaaagaatgcagactatgctgtgaaggtgagtggagtggaaatattgcctgaccccgtggagagaggagtgccattcacctttaagatcccagcttatactcctgaaccaattcaaagcggggacttgttatatgaaatttcttatgctggaatagaagcacaacctgctacatttctccatgatctctgtgaggaagcaccatgcccagttactgcaggcaactttgtgctcgttcacaccga

SEQ ID NO: 8517 - DNA, 394 bp, Glycine max
  Clone ID: LIB3039-040-Q1-E1-G10
gaaggtgcaagagtttgttgtgagctataagctagtttatcgtgaggagaatatgaagttgtttgttttctttgttgctgcagtagttttggtagcatggccatgccatggcgcaggctaccaaaggttccctctccgaatgaaaactggctatggtgagcgttcttcggaggtaaaatgcgcaagttttaggcttgctgtggaagcacacaacatccgagcctttaaaaccattcctgaagagtgcgttgaaccaacacaggactacattaatggcgaacaatttagatcagactctaaaacagttaaccaacaagctttcttttatgccagttgaacccaagtccaaccacaacacatatttataattcggcatagataacaccgtactctc

SEQ ID NO: 8518 - DNA, 335 bp, Glycine max
  Clone ID: LIB3039-040-Q1-E1-G11
gaaggtgcaagagtttgttgtgagctataagctagtttatcgtgaggagaatatgaagttgtttgttttctttgttgctgcagtagttttggtagcatggccatgccatggcgcaggctaccaaaggttccctctccgaatgaaaactggctatggtgagcgttcttcggaggtaaaatgcgcaagttttaggcttgctgtggaagcacacaacatccgagcctttaaaaccattcctgaagagtgcgttgaaccaacaaaggactacattaatggcgaacaatttagatcagactctaaaacagttaaccaacaagctttcttttatgctagtg

SEQ ID NO: 8519 - DNA, 398 bp, Glycine max
  Clone ID: LIB3039-040-Q1-E1-G12
gcacaagtgagtttgttgatcgagataactagaaacagtgtgatgaaaatgaaggtccttgttttcttcgttgctacaattttggtagcatggcaatgccatgcgtacgatatgttccctctccgaatgaacactggctatggtgcccgtactccggaggtgaaatgcgcaagttggaggcttgctgtggaagcacacaacatctttggctttgagaccattcctgaagagtgcgttgaagcaacaaaggaatacatccatggcgaacaatatagatcagactccaaaacagttaaccaacaagcttacttttatgccagagacctcgaagtccatcccaaagacacatttgtgttcagtatagatggcaccgtaccctctaatattccatactacaa

SEQ ID NO: 8520 - DNA, 381 bp, Glycine max
  Clone ID: LIB3039-040-Q1-E1-G2
ggagatggctctgggaagaggcagtgcagtggttctactactttgcttcttgctgcttcactctcagatggctcgtgctgccacctacacagttggagattctgggggttggacctttaacactgttgcctggcccaaaggaaagctctttcgggctggtgacacacttgctttcaattatagccctgggactcacaatgtggtggccgtgaacaaggctggatatgatagctgcaagactccaagaggagccaaagtgtataagtcagggacggatcagatcagacttgccaagggacagaactacttcatctgcaattatgttggtcactgcgagtctgggatgaaaattgccatcaacgctgcctgagtttaataata

SEQ ID NO: 8521 - DNA, 346 bp, Glycine max
  unsure (1)..(346): unsure at all n locations
  Clone ID: LIB3039-040-Q1-E1-G3
aaatgaaaattgcttgtttttgtttgttgctacagttttggtagcatatgaatgccatggctcagactaccagaagttccctctccaaatgaaaactgggtttggtgggcaatacagcaatgaggtggcatgtgccagttggaggcttggcgtggaagcaaacaacgtagtcaagtggcaaactgttcctgcagcttgcggagagtacatagctgactacgttctaagagaccaatatagatcagattccaaaacagttaaccaacaagcttatttctatgctaaatccctcaaactcacaaacanagatgtctttgtcctggacgttgacgacactactctctct

SEQ ID NO: 8522 - DNA, 407 bp, Glycine max
  unsure (1)..(407): unsure at all n locations
  Clone ID: LIB3039-040-Q1-E1-G4
aagacgacagaagggggaacggaaaagcactggcgcagctaccctgaggcttctcttctcttctcttccctgtcgtgagtcaccatggtgagggttagtgtgctgaacgatgctctgaagagcatgtacaatgctgagaaaaggggaaagcgccaagtcatgattaggccatcctccaaagtcattatcaaattccttttggtgatgcaaaagcacggatacatcggagagtttgagtatgttgatgaccacagggctggtaaaatcgtggttgaattgaacggtagactgaacaagtgtggggttattagtccccgttttgatgtgggcgtcaaagagatttaanggttggactgctaggcttctcncctcaagacagtttgggtatattgtattgactacctctg

SEQ ID NO: 8523 - DNA, 378 bp, Glycine max
  Clone ID: LIB3039-040-Q1-E1-G5
gaacagccacaacactttccacttgtctccgaattagttatcttgagaaacattattcccattgctatatattatggctagcatgaaggttacatgggtggttgtgatcatgtgcatggccgtggtgggtgcaccgatgatggcgcaagccatgacatgcaatgatgtgacggtgaacatggcacagtgcctatcctacctgatgcagggaggaacaccttcaacactttgctgcagcggagtcaagaacattcttggctctgctgtcaccaccgttgacaaacaaactgtgtgcaactgtctcaaggcggatgctgctaggtacaacatcaatgaccagtatgctcaagcactccctggtttctgcaaggtcaatgt

SEQ ID NO: 8524 - DNA, 379 bp, Glycine max
  Clone ID: LIB3039-040-Q1-E1-G6
ggcacaagtgagtttgttgatcgagataactagaaacagtgtgatgaaaatgaaggtccttgttttcttcgttgctacaattttggtagcatggcaatgccatgcgtacgatatgttccctctccgaatgaacactggctatggtgcccgtactccggaggtgaaatgcgcaagttggaggcttgctgtggaagcacacaacatctttggctttgagaccattcctgaagagtgcgttgaagcaacaaaggaatacatccatggcgaacaatatagatcagactccaaaacagttaaccaacaagcttacttttatgccagagaactcgaagtccatcccaaggacacatttgtgttcagtatagatggcaccgtactc

SEQ ID NO: 8525 - DNA, 379 bp, Glycine max
  unsure (1)..(379): unsure at all n locations
  Clone ID: LIB3039-040-Q1-E1-G7
ggtgcacaagtgagtttgttgatcgagataactagaaacagtgtgatgaaaatgaaggtccttgttttcttcgttgctacaattttggtagcatggcaatgccatgcgtacgatatgttccctctccgaatgaacactggctatggtgcccgtactccggaggtgaaatgcgcaagttggaggcttgctgtggaagcacacaacatctttggctttgagaccattcctgaagagtgcgttgaagcaacanaggaatacatccatggcgaacaatatagatcagactccaaaacagttaaccaacaagcttacttttaatgcagagacctcgaagtcaatcccagggacacatttgtgttcagtatagatggcaccgtac

SEQ ID NO: 8526 - DNA, 240 bp, Glycine max
  Clone ID: LIB3039-040-Q1-E1-G8
gaattctcgtcatacatttgttcaatcttcatcacttgcgtctagggattaaacgcagcttcatctagatttaaggcatatgggtaaagatgacgttcacatcagtattgtagacactcgcaatgtcaactctgggaaatcgatgaccattggtcagctgaattacaagcttgtgtgcattgaccacagtgttattgcaatggttgtgaaggacaccgctgaattgaaaattaggtcttt

SEQ ID NO: 8527 - DNA, 351 bp, Glycine max
  Clone ID: LIB3039-040-Q1-E1-G9
ggcacaagtgagtttgttgatcgagataactagaaacagtgtgatgaaaatgaaggtccttgttttcttcgttgctacaattttggtagcatggcaatgccatgcgtacgatatgttccctctccgaatgaacactggctatggtgcccgtactccggaggtgaaatgcgcaagttggaggcttgctgtggaagcacacaacatctttggctttgagaccattcctgaagagtgcgttgaagcaacaaaggaatacatccatggcgaacaatatagatcagactccaaaacagttaaccaacaagcttacttttatgccagagacctcgaagtccatcccaaagacacatt

SEQ ID NO: 8528 - DNA, 378 bp, Glycine max
  unsure (1)..(378): unsure at all n locations
  Clone ID: LIB3039-040-Q1-E1-H1
ggatacccaactttccgtgccacaccttccatcaagagtactgaaaccatataaaaccttaggccacattcatagttgtagagaagcttgcaatggccaaagactacggagaagttgagttgtttggtgtggggggaagcccttttgccagaagggtgcagattgccctggaactgaagggagtccaatacacttactttgaagaagatcttaggaacaagagtgatcttcttatcaaatacaaccctattcacaagaaggtacctgtgcttgtccacaatggaagaccattggctgagtcccttgtgatccttgaatacattgatgagacatgggagaaccnccaccccatcttgcctcaacaaccttatgatagag

SEQ ID NO: 8529 - DNA, 384 bp, Glycine max
  unsure (1)..(384): unsure at all n locations
  Clone ID: LIB3039-040-Q1-E1-H10
ggcgaaacagagagtgatttcagtgagtgatcggtgttcacttgatctcatcataatcgtcagcgtcaattgaagaagatgccgatcagaaacatcgccgtcggaaggcctgaagaggcgactcaccccgacacgttgaaggcggctttggctgagttcatctcaaccttcatcttcgtgttcgccggctcaggctccggcatcgcctacaacaagctcaccgacaacggcgctgccacccctgccggcctcatctccgcctccatcgcccatgcattcgccctcttcgtcgccgtctccgtcggcgccaacatctccggcggccacgtcaaccccgccgtcaccttcggcgccttcgtcngcggcaacatcaacttccctcgc

SEQ ID NO: 8530 - DNA, 386 bp, Glycine max
  Clone ID: LIB3039-040-Q1-E1-H11
ggttttgaatgaatcattgaccaatctaatgtctcatcaggagcaagccgtgttgtcccttctctccaagctcgccctttccttcgacggtgccgttttgggcgttgccttggccttcgccgccgtccgcaccctcttcaaattcaccgccacctccgcctccctccgcaagctccgccgcgcaccctccatctccgtctccgacctccgctccctcctcgccgagccaccctccgatgccgacgccggcgaaatcgtaattatccgtggcactgtcgacgccaagtccgccgtcgacggcacctgcaaaactttgaaacccggcgtactggtttctcgccaattcggggataaaggtgtcattcttcaaagaactcacacgtgta

SEQ ID NO: 8531 - DNA, 362 bp, Glycine max
  Clone ID: LIB3039-040-Q1-E1-H12
gaccaacgcgtcagacgacagaaggggaccttgcttccattatcttcaattcttcttctcatcacttctttttccacaaaaaagaaaccatggaagggagaacgggactcttgtttcttgttgtattaggtgctgcttgggcatgtgattcaagggaactgactaactctggtacttccgaactaagcataaagccggatgtgtgtgcactttgtgaggaatatattaccaaggcacttgattatctatatgaaaacaagaccgagacagagatcattaatatcctgcacaacacttgccaccagcttccctctttcaagcagaagtgcgttgcttttggggacttttatgctcctcctttc

SEQ ID NO: 8532 - DNA, 367 bp, Glycine max
  Clone ID: LIB3039-040-Q1-E1-H2
gattgttggcttgtgctctgctcgtgcctctagggttatcatatctccatttccatttcctctctctcagtttccaagaaccttaagctatgggaaagtcttacccaaccgtgagcgctgattaccagaaggccgttgagaaggcgaagaagaagctctgaggcttcatcgctgagaagagatgcgctcctctaatgctccgtttggcatggcactctgctggaacttacgacgtgagctcgaagaccggtggtcccttcggaaccataaagcacccctccgaactcgctcacggcgctaacaacggtcttgacatcgctgttaggcttttggagccactcaaagcggagtttcctattttgagcta

SEQ ID NO: 8533 - DNA, 226 bp, Glycine max
  Clone ID: LIB3039-040-Q1-E1-H3
cgggaaagtgcattaatttgttgtgagctatacactattttaacgttaagagaccatgaattcgtctgtgctacatgttgcgtgcacatagttttggtatcattgccatacgatggctcacgctatgaacagttcccactctgaatgtacactggctgtggtatgcgtacgttggaggcatgctgtgcaagtttacagcatccttggctttgacaccatacctgaa

SEQ ID NO: 8534 - DNA, 386 bp, Glycine max
  Clone ID: LIB3039-040-Q1-E1-H4
ggtacaatacaaacacaaagtcagaaacacaaatctgggtatagtggagtagtagggtttttgcgtttgagagagaagaagcatgagcaggagtttgggaattccggtgaagctgctccacgaggcttcggggcacgtggtgacggtggagctcaagagcggagaactctacagaggaagcatgatcgagtgcgaggacaactggaactgtcaactcgagagcatcacctacactgccaaggatggcaaaacatcgcaacttgagcatgtgtttattcgaggcagcaaagtcaggtttatggtcatccctgacatgctgaagaatgctcctatgtttaagcgtttggatgcaagaatcaagggtaagggtgcatcacttggtgttg

SEQ ID NO: 8535 - DNA, 302 bp, Glycine max
  Clone ID: LIB3039-040-Q1-E1-H5
caaaaagacgggggcacgggaaagtttgttaatttgtagtgcgctatacactatgttaacgttgagagacctatgatttcgtctgtgctcattgttggtgacatagtattgccatgattgccatatgttcgctcacggtatgaacagtggccacggtgcacgtactctggatgtgatatgcgcacgttggaggcatgctgtgcaagtatacagcatccttggctttgagaccatacctgaacagtgcgttgcattcataaaggattacatccatggcgaacagtatacatcagactccaaaa

SEQ ID NO: 8536 - DNA, 325 bp, Glycine max
  Clone ID: LIB3039-040-Q1-E1-H7
gacaagtgagtttgttgatcgagataactagaaacagtgtgatgaaaatgaaggtccttgttttcttcgttgctacaattttggtagcatggcaatgccatgcgtacgatatgttccctctccgaatgaacactggctatggtgcccgtactccggaggtgaaatgcgcaagttggaggcttgctgtggaagcacacaacatctttggctttgagaccattcctgaagagtgcgttgaagcaacaaaggaatacatccatggcgaacaatatagatcagactccaaaacagttaaccaacaagcttacttttatgcaagagacct

SEQ ID NO: 8537 - DNA, 383 bp, Glycine max
  Clone ID: LIB3039-040-Q1-E1-H8
gacaacacagaacataaacaaagaaaaaaaaaacccttagccaacacaaccatcatggccacctctgctattcagcaatcagcattcactggtcaaactgctctgaagcagctcaatgagttcgtccgcaagaccggtggcgccggcaaaggtcgcactaacatgcgccgcaccgtcaagagtgctcctcagagcatttggtatggccctgaccgtcccaagtacttgggtccattctcggagcagattccatcatacctgaccggagaattccctggtgactacggatgggacactgctggattatcagctgacccggaaaccttcgccaggaaccgggagctggaggtgattcacagcagatgggcaatgcttggtgccct

SEQ ID NO: 8538 - DNA, 389 bp, Glycine max
  Clone ID: LIB3039-040-Q1-E1-H9
ggctctatcgcgcgtggctcaatcgtcgccatcacagtcgaatcttttgaaacccctctcgtcgtacttatccctacgacgccgttcggtgtcgacctcgtcggagcccctcaccgtggagacctcggtgcccttcacctcccacaactgcgatgcgcctccacgcgccgtggagacgtcctcggcggagctcttctcgttcttccgtgacatggcgctgatgcggcggatggagatcgcggcggactcgctctacaaggccaagctcatacgcggcttctgccacctctacgatggccaggaggccgtcgccgtcggcatggacgccgccatcacgcgcaaagattgtatcatcaccgcctaccgcgaccactgcaccttcctcgccc

SEQ ID NO: 8539 - DNA, 293 bp, Glycine max
  Clone ID: LIB3039-041-Q1-E1-A1
tgggtgcacaagtgagtttgttgatcgagataactagaaacagtgtgatgaaaatgaaggtccttgttttcttcgttgctacaattttggtagcatggcaatgccatgcgtacgatatgttccctctccgaatgaacactggctatggtgcccgtactccggaagtgaaatgcgcaagttggaggcttgctgtggaagcacacaacatctttggctttgagaccattcctgaagagtgcgttgaaccaacaaacgaatacatccatggccaacaatatagattagactccaaa

SEQ ID NO: 8540 - DNA, 206 bp, Glycine max
  Clone ID: LIB3039-041-Q1-E1-A10
ggagcaaatccctaagccctactattcttcctcagtaatgtcaattaagcttctcgtctctgcagcaactattcctaaccctaaggtcttcttcgaaatgaccatctgcggtcaatctgctggccgcatcatgatggagctctacgcccatatcactcaccgcaacgccgagaatttccgcgcgcttttcaacggccagaacggcg

SEQ ID NO: 8541 - DNA, 420 bp, Glycine max
  unsure (1)..(420): unsure at all n locations
  Clone ID: LIB3039-041-Q1-E1-A11
ctcgacccatacgtacgccgccgtcgccgctcattgccagtgctccattttctgatcaggaagaatgaggcctacaatgatgcttagggctctaaccaagcagtttcttggaattgtaggcgatgcagcaaacactgttgctaagaagccccccctgcctcctcctctggtgtcacgcaaacctgctttcattgatgcattcttgtacaagatgaagaagaacccaaatcttttgtcgaacaagaccatttggtcacggagatccactatcttgccagaatttgttgataccactgtcaagatttacaatgggaaaaccactattcgttgtaggatcactganggaaaagtgggtcataagtttggagagtttgctctcaccaggaaacgcaagaccagagaacaagccaatgccaaaaa

SEQ ID NO: 8542 - DNA, 227 bp, Glycine max
  Clone ID: LIB3039-041-Q1-E1-A12
ggaacttctcacgttcatttctacacatccctagctctgtcgttccgtcgttgacgatggcgtttcgggtgcgaagccctgacctccgctctctctttcttctctctctcttgtccatcgcttccgccaatgtcttcttcgaagagcgtttcgatgacgggtgggaaaatcgatgggttaaatcagattggaaaaaagatgagaacgtggctggggagtggaaccac

SEQ ID NO: 8543 - DNA, 70 bp, Glycine max
  Clone ID: LIB3039-041-Q1-E1-A2
gaccctcatattttcgcccatttcacatactagaacagattgtgtttcttgcaaagaccattctatcctc

SEQ ID NO: 8544 - DNA, 235 bp, Glycine max
  Clone ID: LIB3039-041-Q1-E1-A3
gcttcagtaagactacagaaagggctgccaaggttttggttttggctgggaacgctcaacaagatgagattggggatggagctaatttaaccatttcatttgctggggagctcctgcagggtgcccaggaacctatcaggatcggtttgcatttgagcgagatcatcagtggatacactctccccatcaacaacactgttcacatcttggatgaactagttgaggatcgctctga

SEQ ID NO: 8545 - DNA, 272 bp, Glycine max
  Clone ID: LIB3039-041-Q1-E1-A5
ggcacaagtttgttgagatagctagatgcaataagatgaaaatgaaagtgcttgttttgttgtcgctacagttctggtagcatatgcatgccatggctcagagtagcagaatttccctcgccagatgaacactgggtttggtcagcaatgcaccaatgacgtggcatgtgccagttcgacgcgtggcttttacgcagccagcgtcgttgagtggcggaacgttcatgttgcttgcgtagaattgctctctgaccaggtacaatgagactgat

SEQ ID NO: 8546 - DNA, 355 bp, Glycine max
  Clone ID: LIB3039-041-Q1-E1-A6
gacagaaaagaaaaaggaaaccctagctggataggtcaaacatcatcatgtcggacgaagagcaccatttcgagtccaaggcagacgccggtgcctccaaaacctaccctcagcaagccggtaccattcgcaagaacggctacatcgtcatcaaaggacgcccctgcaaggttgtggaagtttcgacttccaaaactggaaagcacggtcacgccaagtgccactttgttggaattgatattttcactgccaagaaacttgaggatattgtgccctcttctcacaactgtgatgttcctcatgtgaatcgtactgattaccagctcattgatattgcctatgatggatttttgag

SEQ ID NO: 8547 - DNA, 357 bp, Glycine max
  Clone ID: LIB3039-041-Q1-E1-A7
acaacacaacgcaacacaacgcgcactctctcttttctctcttaacacaaaaaccctatcgttcttcgcggtttcgccgattctcgccatgccgaaagccaaatccgacgccaaagccgccgatagccggttgaagcgcaagggcgctggtgctggaaggaagcaatcgaagaaagctgctaaggatcctaacaagccaaagagacctccaagcgctttcttcgttttcatgtccgagttcagagagcagtttaagaaggagcatcctaacaacaaatccgtcgctgttgtcggtaaagctggtggtgacaaatggaaatcgctgtctgatgctgaaaagggcccctttcttgccaa

SEQ ID NO: 8548 - DNA, 312 bp, Glycine max
  Clone ID: LIB3039-041-Q1-E1-A8
ggcagttcaattccaatatattccattctctctgtgtatttccctacctctcccttcaagatgcagatcttcgtcaagaccctcaccggcaagaccatcacccttgaggtggaaagctctgacaccatcgacaacgtcaaggccaagatccaggacaaggaaggaatccccccggaccagcaacgtctcattttcgccggaaagcaacttgaggacggccgtacccttgctgactacaacattcagaaggagagtactcttcacctcgtcctccgtctccgtggtggcatgcagatcttcgttaagacactc

SEQ ID NO: 8549 - DNA, 182 bp, Glycine max
  Clone ID: LIB3039-041-Q1-E1-B1
agcatttacatgtcccatttgggctgggaacagtggagcttgtggctggtatggaaagtgccaatgcccagatccactgtgaagttaccaacggtctttactatcttcgattctcagtttgagatgccatggctgggtgccatggattaatgatggtcgcagcaagtgccgccagggatagg

SEQ ID NO: 8550 - DNA, 375 bp, Glycine max
  Clone ID: LIB3039-041-Q1-E1-B11
ggcacaagtgagtttgttgatcgagataactagaaacagtgtgatgaaaatgaaggtccttgttttcttcgttgctacaattttggtagcatggcaatgccatgcgtacgatatgttccctctccgaatgaacactggctatggtgcccgtactccggaggtgaaatgcgcaagttggaggcttgctgtggaagcacacaacatctttggctttgagaccattcctgaagagtgcgttgaagcaacaaaggaatacatccatggcgaacaatatagatcagactccaaaacagttaaccaacaagcttacttttatgccagagacctcgaagtccatcccaaggacacatttgtgttcagtatagatggcaccgt

SEQ ID NO: 8551 - DNA, 365 bp, Glycine max
  Clone ID: LIB3039-041-Q1-E1-B12
gacgttcacattcaggaatcgttttcttcagaaaatttgccatcgttgagggaagcgcgagagccttcgttgttcaagatgagagctaagtggaagaagaagcgcatgaggaggttgaagaggaagcgccgaaagatgagacaaagatctaagtaggtgcttgaacaaggagtggagatgatgtgcttttccatctgctaccggcttcatgacattttatgctgtcatggctcttatgatgatcttgaggtccagtggcgaggggagcttccatcctgactttagtttagctttactggtctaaagattgctgttttagtgtgggttaagtgatgatattgagagttttgtgttatctaattatg

SEQ ID NO: 8552 - DNA, 93 bp, Glycine max
  Clone ID: LIB3039-041-Q1-E1-B2
acagtagggggcactgattagtttgttgatcgacatttctagacacactgtgatgataattctgcgtcttgtcttcgtcgatgcgcaaatttt

SEQ ID NO: 8553 - DNA, 168 bp, Glycine max
  Clone ID: LIB3039-041-Q1-E1-B3
tgggacaacaacaataacaatggctgcctcactacaagctgcatctagcttcatgcaacccatcaaggttggcatagtctctcgcatcctcaaatctacacaactcatttctaacgcttttggcttggaacctgttgcattcattttcacttgctccctctagcctga

SEQ ID NO: 8554 - DNA, 325 bp, Glycine max
  Clone ID: LIB3039-041-Q1-E1-B4
gaaggtgcaagagtttgttgtgagctataagctagtttatcgtgaggagaatatgaagttgtttgttttctttgttgctgcagtagttttggtagcatggccatgccatggcgcaggctaccaaaggttccctctccgaatgaaaactggctatggtgagcgttcttcggaggtaaaatgcgcaagttttaggcttgctgtggaagcacacaacatccgagcctttaaaaccattcctgaagagtgcgttgaaccaacacaggactacattaatggcgaacaatttagattagactctaaaacagttaaccaacaagccttcttt

SEQ ID NO: 8555 - DNA, 218 bp, Glycine max
  Clone ID: LIB3039-041-Q1-E1-B6
gatcgatgccaatggagtctaactcggcatccgctctttacttccttttaagcctatcgtgcatcactttgcttctttctgcgttacgtgctcaagctcaatctcatgctccagctcccactttcaagtactgtgaaaagaatgcagactatgctgtgaacgtgagtggagtggaaatattgcttgacctcgtggagagaggagtgccattcaacttt

SEQ ID NO: 8556 - DNA, 374 bp, Glycine max
  Clone ID: LIB3039-041-Q1-E1-B7
atccatcttgctggattctccacccattatgcaagataaaaactaaaatgggtaattataaagttctaatttttttttttccaatcttaccccagacaaaagttctatcgtcaatagtgcacaacctctttttttgtctgccggtgacatattatattgctctaggccggtccactaaccgtgccattcgtgtgccaaaatatatataaaacatttttctatgtctttgattatcgctagaaaaatattcttaatgagtaaatacgaatcaaaaggctttttgttggacttgacaacaggacagatccagtggacaactttccttagcactcattttctccttttgccttaaaaatccattctttggggtccct

SEQ ID NO: 8557 - DNA, 330 bp, Glycine max
  Clone ID: LIB3039-041-Q1-E1-B8
ggcacaagtgagtttgttgatcgagataactagaaacagtgtgatgaaaatgaaggtccttgttttcttcgttgctacaattttggtagcatggcaatgctatgcgtacgatatgttccctctccgaatgaacactggctatggtgcccgtactccggaggtgaaatgcgcaagttggaggcttgctgtggaagcacacaacatctttggctttgagaccattcctgaagagtgcgttgaagcaacaaaggaatacatccatgggcgaacaatatagatcagactccaaaacagttaaccaacaagccttactttatgccagagacctcg

SEQ ID NO: 8558 - DNA, 344 bp, Glycine max
  Clone ID: LIB3039-041-Q1-E1-B9
gactcatcactcatcatattcattcacacttcccactttccaatatggaatgctgcataatcgccaggctcaagacccaacctttatggttcgcgctgctcttcgttgtcggattgttaacgattctcaaattggctttcgttgttttcagatgggtctacgtcaatttcctccgaccaccgaagaatctcaaaaagtacggatcttgggcagtggttactggacccactgacggcattggaaagagcttcgctttcgagctcgctcgcaagggcctgaacctcgtccttgtcggaaggaaccccgacaagctcaaagacgtgtcggattcgatcgcggcgaag

SEQ ID NO: 8559 - DNA, 406 bp, Glycine max
  Clone ID: LIB3039-041-Q1-E1-C10
ttgtatccagccccaggcataggccacattgtatccatggttgagcttgctaagcttctccaattacatgctcattcaatcacaattcttctcaccacgggtctccttgaccacccctctatcgacacctacatacaccgaatctccatctctcacccttccatcttcttccaccgcctcccccacacatcactctccaccatcaccaccgtgagcatggccgccaaagccttcaacttcatcaacataaacacccccaacgtatccaccaccctcaccccaatccccaaatccaccaatatcaaagccttcaaaatcgatctcttctgcacctccgcaatgggaaccggcttcctcatttgggaatccccgtctaccacttcttcacctccggcgccgccgttct

SEQ ID NO: 8560 - DNA, 364 bp, Glycine max
  Clone ID: LIB3039-041-Q1-E1-C11
ggcacaagtgagtttgttgatcgagataactagaaacagtgtgatgaaaatgaaggtccttgttttcttcgttgctacaattttggtagcatggcaatgccatgcgtacgatatgttccctctccgaatgaacactggctatggtgcccgtactccggaggtgaaatgcgcaagttggaggcttgctgtggaagcacacaacatctttggctttgagaccattcctgaagagtgcgttgaagcaacaaaggaatacatccatggcgaacaatatagatcagactccaaaacagttaaccaacaagcttacttttatgccagagacctcgaagtccaccccaaggacacatttgtgttcagtata

SEQ ID NO: 8561 - DNA, 199 bp, Glycine max
  Clone ID: LIB3039-041-Q1-E1-C12
gacagacacaatcacaaaccacatcattttcgccactctctctctctctctctgatatccaaataatggtatcaaaggtgaagagaagcccagtgaagtccatcaaggacctccgcaacaacaacaaccgtcgctggcgacggaaaacccccataaaaaatgtggtggcggcttcctccgccgcgctggccaacatccg

SEQ ID NO: 8562 - DNA, 314 bp, Glycine max
  Clone ID: LIB3039-041-Q1-E1-C3
ggcacaagtgagtttgttgattgagaaaactagaaacagttttatgaaaatgaaagtccttgttttcttcgttgccacaattttggtagcatggcaatgccatgcgtacgatatgttccctccccgaatgaacactggctatggtgcccgtactccggaaggtaaattcccaagttggacgcttgctgtggaagcacacaacatccttggctttgagaccattcctgaagagtgcgttgaagcaacacaggaatacatccatggcgaacaatatagatcagactccacaacagttaaccaacaagcttactttt

SEQ ID NO: 8563 - DNA, 233 bp, Glycine max
  Clone ID: LIB3039-041-Q1-E1-C5
ggcacaagtgagtttgttgatcgagataactagaaacagtgtgatgaaaatgaaggtccttgttttcttcgttgctacaattttggtagcatggcaatgccatgcgtacgatacgttccctctccgaatgaacactggctatggtgcccgtactccggaggtgaaacgcgcaagttggaggcttgctctggaagcacagaacatctttggccttgagcacattcctgaacagt

SEQ ID NO: 8564 - DNA, 239 bp, Glycine max
  Clone ID: LIB3039-041-Q1-E1-C6
gacccaaaggtgcaaaaatattaagatgataaacattggagcacttgttgtactctttgcatttctcttcctcagttgtgccgatgcacaagacacaacaacccttgtgcctgcaatcataacttttggtgactcagccgtggatgtagggaataatgactatcttcccacccttttcaaggctgattaccctccttatgggagggactttgctaaccaccaccctattgggaggtttt

SEQ ID NO: 8565 - DNA, 87 bp, Glycine max
  Clone ID: LIB3039-041-Q1-E1-C7
ggggaggaagaataattgtgaggcgagggtaaggtcgcgttgtgtttcatccagctcttccacatgtcctcttccttctcggtcccg

SEQ ID NO: 8566 - DNA, 298 bp, Glycine max
  Clone ID: LIB3039-041-Q1-E1-C8
gacttgtaataattcttataacacaacacaacccatggccaccacctccgcattcctcctccttcccctcctcctgctgctccacctcgccatcgccgctcacggcatcggcatcaactacggcacgctcggcgacaaccttccaccgcccgcggcggtggcgaacttcctgaagacgaagacgaccatcgaccgcgtgaagatctacgacgtgaacccggacatcctgcgggccttcgccggcagcggcatctccgtgacggtgaccgcccccaacggcgacatcgccgccttaacc

SEQ ID NO: 8567 - DNA, 368 bp, Glycine max
  Clone ID: LIB3039-041-Q1-E1-C9
gaacaaaagaacacacattactagaaagttagaaaacatggcagcggtggccggagcatcctcgtccgtgattaaggtggctgcactttccggatctttaaggaaaggctcttacaacagagccctcattcgttctgctattgagctaagccaaggtagagttgaaggccttcaaatcgagtacgttgatatttcgcctttgccccttctcaacaccgatcttgaggtgaatgggacctaccccccacaagttgaagcctttcgccagaagattctcgcagctgatagtatcctctttgcttcccctgagtacaattactctgtcgcaagtcctttaaagaatgcacttgactgggcatcaaagggca

SEQ ID NO: 8568 - DNA, 185 bp, Glycine max
  Clone ID: LIB3039-041-Q1-E1-D1
gatcgcatttcatagcactcaccctcattaccaacacgaaagcatagccaaaaccttttttcgaagtctctgattttcctaatggctccggcaaaggcagacaagaagccggcggagaagaagccagcggcggagaaggcaccggcggagaacaagccgaacgcggacaagaagatctcctaacg

SEQ ID NO: 8569 - DNA, 209 bp, Glycine max
  Clone ID: LIB3039-041-Q1-E1-D10
tggggccattgttgctgtcatcatccgcagctgctgttattcgcatcgcaaacaaacagtgagccatggccgtcggaaagaacaagcgcatctccaaagggaaaaacggtggcaagaagaaggcagctgatccctttgccaagaacgattggtacgacactaaggccccctcccctttttcaagtgaaaaatgttggcaaaaccctcgt

SEQ ID NO: 8570 - DNA, 375 bp, Glycine max
  Clone ID: LIB3039-041-Q1-E1-D11
ggatttcaaaatcacaaggataacctttcattgtcgcacctcatcgcaacctgagcacatctcacatcatcccaacctgatcacatctcacatcatcgtcacacattgttgtagcctaagcattgtctcaaatcgccgcaatgagaacaatgcgcatcgccctcattgcaacctgagctttgcttcaccgaatttggagttgcttcacttttcagttcaaacatctgataaatactctttaaccccaatcttcaacaatccagtcttcacaaatcttctcaggttactctaacctctagtttgtaaaacctttcaactattccatggtcgtgatttgtgcccctttgaattggaaccttggattgtaaaacccta

SEQ ID NO: 8571 - DNA, 224 bp, Glycine max
  unsure (1)..(224): unsure at all n locations
  Clone ID: LIB3039-041-Q1-E1-D12
gacactaaacaagttaaaagaagagcatcactgaactaacanagcaaccctatgtcgaaggtggtttgtgtcaccggagccagcggcgccatcggatcatgggtggtcctactcctcctccagcgtggttacaccgtccatgccaccgtccaagatatcaaggatgaaaatgagacgaaacatttggaggaaatggaaggagcaaagagtcatctccatttttt

SEQ ID NO: 8572 - DNA, 88 bp, Glycine max
  Clone ID: LIB3039-041-Q1-E1-D2
ggtgcacaagtgagtttgttgatccagataactagaatcagtgtgatgaaaatgaacgtccttggcttcctcgttgctacaattttgg

SEQ ID NO: 8573 - DNA, 107 bp, Glycine max
  Clone ID: LIB3039-041-Q1-E1-D3
ggaggttcagggaattgttcaaaccggtgttctagtttatcgttgtgtgttgttgtaattcgttgttctccttttgtgggtctatggttgggtttgatttttttctc

SEQ ID NO: 8574 - DNA, 274 bp, Glycine max
  Clone ID: LIB3039-041-Q1-E1-D4
gacacttcaaaatcctctggtaacccttattttatctattctctctctttcttttgtgttctaagcagctagaagcaatggagaggaaaagaagccatgcctctttcaccatgtttgcaatgcttgttggagtgatctctcagagccttgtcattcctgtagtatccaccactgttgaagatcagaagacctactacgtctcagatgcacatgctggaagtcgcccctcatgctcacagagtagtacgccgtccatctcatggccatggaagct

SEQ ID NO: 8575 - DNA, 224 bp, Glycine max
  Clone ID: LIB3039-041-Q1-E1-D5
gaaggtgcaagagtttgttgtgagctataagctagtttatcgtgaggagaatatgaagttgtttgttttctttgttgctgcagtagttctggtagcatggccatgctatggcgcaggctaccatgcgttccctctccgactgaacattggctatggtgagcgttcttcggacgtagcatgctcacgttctaagcttgctgtggatgcacatgttatccgagccc

SEQ ID NO: 8576 - DNA, 377 bp, Glycine max
  Clone ID: LIB3039-041-Q1-E1-D6
aggacgacagaaggggaatccaatagtaagagaactgagaatcacattgagaaagatacagagctgaagcatgggaatttcaaagctggggaagatcatgctgaaaatgtaatggatgggcctggagcggtattggtaaacttgttgacaagtttaaggcatttgccacctgccatgcattcagtcctggttgtaatggctctcacttggttgtcttggtttcccttctttctgtttgatacggattggatggggagagaagtttatcatggtgatccaaaaggggacacttctgaagtagatctttatgatcaaggagttagagaaggtgcatttggtttgctattgaattctgttgtccttggaattagctcttt

SEQ ID NO: 8577 - DNA, 150 bp, Glycine max
  Clone ID: LIB3039-041-Q1-E1-D7
ggattcccatagtgggagaactgagaatcacattgagaaagatacagagctgaagcatgggaatttcaaagctggggaagatcatgctgaaaatgtgatggatgggcctggagcggtactggtaagacttgttgacacttttaaggcatt

SEQ ID NO: 8578 - DNA, 107 bp, Glycine max
  Clone ID: LIB3039-041-Q1-E1-D8
ggaaatcaaatcaggagcgggggaaaaagaaaagagagagaagtagggttcgaaaatggcagcagaatcatcagagggcgaatataaaactcaagttaagccgaggg

SEQ ID NO: 8579 - DNA, 338 bp, Glycine max
  Clone ID: LIB3039-041-Q1-E1-D9
ggagagtcagattcgcacgcattgcttcgcctcacaacagcagctgcagcagcaatggctcccaaacgaggtggaaaggctccggctcttgccgctaagaagaagcctgagaaggtcacgaatccgttgttcgagaacgtccgaagcattcgatcgagggcgttgcctcgaaaagactgacagttcgtgaatggcaaaagtcaattcaagaagagagattctgacagagttgaagttccccagctttgaaccagtttaccaaaactcttgacaaaaacctagcaacaagtctgttcaagttgcttctgaagtacaggcccgaggacaaagctgaaaag

SEQ ID NO: 8580 - DNA, 311 bp, Glycine max
  Clone ID: LIB3039-041-Q1-E1-E1
tttattgatatgaatttgaagttgcagtgtgataaatattatagtccttgatttcttcgttgcaacaattttggtagcatggtaatgccatgcgtactatatgtgccctctccgaatgaatactggctatggtgcccgtactctggaagtgaaatgcgcagctttgaggcttgctgtggaagcacacaacatcgttggctttgagaccattcctgaagagtgcgttgaagcatcaacggaatacatccatggcaaacactatacatcagactcccaaacagttaaccaacaagcttacttttatgccagag

SEQ ID NO: 8581 - DNA, 228 bp, Glycine max
  Clone ID: LIB3039-041-Q1-E1-E10
gcacaagtgagtttgttgattgaaaatactagaaacaattttaagaaaatgaaaggtcctgttttcctcggttccaaaattttgggtgcatggcaaatccaatgcgtaacatatgttccctccccgaaataacactggctatggtgcccgttctccggacgttaaattcccaagttggacgcatgctgtggaagcacacaacatctttggcttttaaaccattcctga

SEQ ID NO: 8582 - DNA, 376 bp, Glycine max
  Clone ID: LIB3039-041-Q1-E1-E11
ggtggcaacgagcaaaggcgccattaacagtaacgcctaaacgcaacgaaacgcaagtctccacctcttctctctctgcggaccaaaacacagacacgttccaattcccccttctttctttcacatgcacactcttcagattccacttcaacaaaccctaaagcctaatgctctgaaactcacattcccataaagttgagaaatatgagaattccaagcaattgcgagttcacacgaatcacgccctctgctttcagctaccaccgtctcagatcctacgtatccgactgcagagccgtgcttctcccctcattcggcggcccgcacgtgctccagcttcgctcgcacgtgccagtccctccgctcaagcctcacg

SEQ ID NO: 8583 - DNA, 212 bp, Glycine max
  Clone ID: LIB3039-041-Q1-E1-E12
gactcacaatcgaacgggaaaatgcgtcttcataaacgctgtccaaaacttctcatagccttttattcattccattcctttctagggttttcttttctttgccgagaaaatcagagagtgcatttcgatttacattggccaggccggtatccaggttggaaactcctgctgggaactctatcgcctctaatacgggattcagcccgattgat

SEQ ID NO: 8584 - DNA, 286 bp, Glycine max
  Clone ID: LIB3039-041-Q1-E1-E2
ggcacaagtgagtttgttgatcgagataactagaaacagtgtgatgaaaatgaaggtccttgttttcttcgttgctacaattttggtagcatggcaatgccatgcgtacgatatgttccctctccgaatgaacactggctatggtgcccgtactccggaggtgaaatgcgcaagttggaggcttgctgtggaagcacacaacatctttggctttgagaccattcctgaaaactgcgttgaagcaacagaggaatacatccatggcgaacaatatagatcagactcc

SEQ ID NO: 8585 - DNA, 168 bp, Glycine max
  Clone ID: LIB3039-041-Q1-E1-E4
gagcgaaacagagagtgatttcagtgagtgatcggtgttcacttgatgtcaccataatcgtcagcgtcatttgaagaatatgccgatgagaacgatcgccgtcggaaggcgttacgacgcgactcacctctatctcgttccaggtcgccttccgctgactccagtcct

SEQ ID NO: 8586 - DNA, 125 bp, Glycine max
  Clone ID: LIB3039-041-Q1-E1-E6
ctttggacagtatccatatggaggtttactcctaaacaggccaaccattagcacgagattcatgcctgagaaaggggctgctgagtatgcagctttggctaagaaccctgagaaggagtttttga

SEQ ID NO: 8587 - DNA, 199 bp, Glycine max
  Clone ID: LIB3039-041-Q1-E1-E7
ggagtagcgatggagaagatgatcggttagctacagtcaattgtccttcccttcgtttccattattctgatgcttccgcgagtttagagggcaagactcttctccgtgcgcgacgtgtactgcgccatcttcggtcaacgggcataatgcccccatttttggacggtgcatccacttccgatgcgagtcactgtggggg

SEQ ID NO: 8588 - DNA, 360 bp, Glycine max
  Clone ID: LIB3039-041-Q1-E1-E8
gggcgcagtgagatggaagaagaaggtgttccggtggaaggttcttcaggtacggtgagtcgggcacggaagcttctgtttcggcgaatgctggtggggatcaaagacggaaggttcttcttgggctccttctactgcatcgacaagcaaggcaacatcattctccaggacgccgtcgaatatcgcagcacgcgccaatcttcgccttctcccatggaacagaggtacctcggccttattctcattccttcctcttgccgcacctcttgtcacgtcgattgcgccatccacgaacagttatctctcccttcgctgaatcaaataccaccgcactagccagggttttactgtgccccttca

SEQ ID NO: 8589 - DNA, 373 bp, Glycine max
  Clone ID: LIB3039-041-Q1-E1-E9
gacaccttcgaattttcttttccttcactttcccgagaaaaaaaaaacactctttcactttcttgactacggtctcacttcgacatggctcgtactaagcaaactgctcgcaagtccaccggcggcaaggcgccacgtaagcagttggcgaccaaggccgcccggaagtccgctcccgcgaccggaggagtgaagaagccccaccgcttcaggccgggaaccgtggcgctgagggaaatcagaaagtttcagaagaagcacgagcttctcatcaggaagcttccgtttcagagactcgtgagggaaatcgcgcaggacttcaagaccgatttgcgttttcagagtagcgccgtttctgcgcttcaagaagctg

SEQ ID NO: 8590 - DNA, 171 bp, Glycine max
  Clone ID: LIB3039-041-Q1-E1-F1
tggcttagattctactaattccaaaacttcatattctgcaacatggtcgagtctgttttcttcagtccaatgactctaggtaaatagattctgaatctgtacgatatgatgactctccgattgaacactgtgataaagtatccatcctccggtagttagctgcacctgttg

SEQ ID NO: 8591 - DNA, 117 bp, Glycine max
  Clone ID: LIB3039-041-Q1-E1-F10
gacgagaaaggtttggaaattattctccaactacccgttttagagatagcaggagtctcctccatggctcgctcgtcgagatccttgcctgctatcgccgttatactttgcccatca

SEQ ID NO: 8592 - DNA, 172 bp, Glycine max
  Clone ID: LIB3039-041-Q1-E1-F12
tacatcctttgtggtacaagtagagggtacatctacttgggtatgactgagaacaagagagggtacatctcttgtggatcaattctagtggagggtacatccactaggttcaaagagaacaagggaggatacatcccttgtggatctttgcttgtaaatggatttttacaag

SEQ ID NO: 8593 - DNA, 339 bp, Glycine max
  Clone ID: LIB3039-041-Q1-E1-F2
gagaaagggacacttaagaaggaacctgtgtggatgttgatcgatagaactagaaacagtgtgatgaacatgaacgtccttgttttcttcgttgctacaattttggtagcatggcaatgccatgcgtacgatatgttccctctccgaatgaacactggatatggtgcccgtactccggaggtgaaatgcgcaagttggacgcttgctgtggaagcacacaacatctttggctttgagaccactcctgaagagtgcgttgaatcaacaaaggaacacatccatggggaacaatatagattaaactccaaaacagttaacaaacatccttacttttatccc

SEQ ID NO: 8594 - DNA, 330 bp, Glycine max
  Clone ID: LIB3039-041-Q1-E1-F3
gaacaaaacaaccatcatcatggccacctctgctattcagcaatcagcattcgcaggtcaaactgctctgaagcagctcaatgagttggtccgcaagaccggtggcgccggcaaaggtcgcaccaacatgcgccgtatcgtcaagagtgctcctcagagcatttggtatggccctgatcgtcccaagtacctgggtccattctcagagcagattccgtcatacctgatcggagaaatccccggggactacggaatgggacactgctggactatcagctgacccggactacttctccaggaaccgggagctggaggtgatcacagcatatt

SEQ ID NO: 8595 - DNA, 314 bp, Glycine max
  Clone ID: LIB3039-041-Q1-E1-F4
ggcacaagtgagtttgttgatcgagataactagaaacagtgtgatgaaaatgaaggtccttgttttcttcgttgctacaattttggtagcatggcaatgccatgcgtacgatatgttccctctccgaatgaacactggctatggtgcccgtactccggaggtgaaatgcgcaagttggaggcctgctgtggaagcacacaacatctttggctttgagaccattcctgaagagtgcgttgaagcaacaaacgaatacatccatggcgaacaatatagatcatactccacaacagttaaccaacaagcttactttt

SEQ ID NO: 8596 - DNA, 134 bp, Glycine max
  Clone ID: LIB3039-041-Q1-E1-F5
gagagtggtggactgtgcaaaatagcgtcgtggtcgtgatttttttcatactaagtgcatcttgaacccagtgacgtcccccatccatgggttgtacgcaccgacgcggtaatggttcatccgcttctgcttcg

SEQ ID NO: 8597 - DNA, 287 bp, Glycine max
  Clone ID: LIB3039-041-Q1-E1-F6
ggcacaagtgagtttgttgatcgagataactagaaacagtgtgatgaaaatgaaggtccttgttttcttcgttgctacaattttggtagcatggcaatgccatgcgtacgatatgttccctctccgaatgaacactggctatggtgcccgtactccggaggtgaaatgcgcaagttggaggcttgctgtggaagcacacaacatctttggctttgagaccatccctgacgagtgcgttgaagcaacacaggactacatccatggcgcaaactacagatcagacccca

SEQ ID NO: 8598 - DNA, 177 bp, Glycine max
  Clone ID: LIB3039-041-Q1-E1-F7
cacgcgtcagacgggtgccaaaagaacaacaaaagggggaacaattgatttggttgatcaaaataacaagaacaattttaagaaaattgaaggcccttgtttcctccgttccccaagttttggcaccacggaattccattccttcgaactgttccctctcctaatggacccttgctc

SEQ ID NO: 8599 - DNA, 215 bp, Glycine max
  Clone ID: LIB3039-041-Q1-E1-F8
gagagatcatgcctcatcgtgatgagcaaatcacccaacatgcacaaccgtctgtagacggaatcatcacattggaggaatgtcttgctgaggcgcattatgatgcgctacattggatccccgcaccaattcaacgttcgttacagtatccgttctcccgagttcatttgccgcaacttggtggcttgctgtgctctcacacatcatctttggct

SEQ ID NO: 8600 - DNA, 147 bp, Glycine max
  Clone ID: LIB3039-041-Q1-E1-F9
atgggctttttctttgagcttaatttaatgttgcgaatctttgttttgggtcatcatttgttggttgtagatcagcgaggtgtggagtgtggtatttttcatagattaattggggatattgtatggcattgcttgtgctggtgttgt

SEQ ID NO: 8601 - DNA, 148 bp, Glycine max
  Clone ID: LIB3039-041-Q1-E1-G1
tggggcacaactgagtttcatgttccacatggttatgttcagtgtgctgaacatggttgtccttgttttcctcgttgcgaccagtttggtcgcatggtagctgccattcgtattgtcttttgcctctccgaatcgacactggctacgg

SEQ ID NO: 8602 - DNA, 85 bp, Glycine max
  Clone ID: LIB3039-041-Q1-E1-G10
aggggcacaagttagtttgttgattcaaaatactagaaacattttaataaaattaaaggtcttgttttcctccttgccaaaaatt

SEQ ID NO: 8603 - DNA, 363 bp, Glycine max
  unsure (1)..(363): unsure at all n locations
  Clone ID: LIB3039-041-Q1-E1-G11
ggcacaaagtgaagttttgtttaattcaagaataacttagaaaacaagtgttaattaacaaattaaaggtcccttgtnttccttccgtttcctaacaatttggtagcaatgcaattccatgcgtacgaaatgttcctctccgaatgaacactggctattgtcccctacccggaagtaaatgccaagttggacgctttctgtggaagcacacaacatccttggctttgagaccattcctgaagagttccttgaaacaacataggaatacatccatggcgaacaatataaattagactccaaaacagttaaccaacaagcttacttttatgccagagacctcgaagtccatcccaaggacacatt

SEQ ID NO: 8604 - DNA, 329 bp, Glycine max
  Clone ID: LIB3039-041-Q1-E1-G12
gatccatctaacagaatcaaaaagaaaagaatagagaagagagtgaggtttggtggtttggttaatttccaaattgccgccaatataagccctttacccctgatgaagtacctgagagtgcccgtggacgctcttccccgcaacactcccttgaccctcgcttccaacttgttgattcgccgcttctccgaaagggttaggggttgttttctcgacaagtccgaggtcacagatcgcgtcatttcctgcgtcaaaaacttccagaaagtcgattcttccaaggttaaccctaatgctcacttccagaatgaccttggaatggatagttt

SEQ ID NO: 8605 - DNA, 193 bp, Glycine max
  Clone ID: LIB3039-041-Q1-E1-G2
agataaaaatagagaaacaaagggtccagaaatttgtgtgttaatccatcaaccaatatatagtgcgatcaacatggctgtccttattttagtcgttgcaatcatttctgaaacaggttaatgccaaacgttactataagttccctcaccgaatgaataccggatatggtgctcgtactccggtggtgaaatt

SEQ ID NO: 8606 - DNA, 315 bp, Glycine max
  Clone ID: LIB3039-041-Q1-E1-G3
gagtgacaagggtttcttccgggttcacgtttcacaatcactttttgcgcttctctcagtcactcactcttcttcttcctcttcgtgtggttttctttctcgaactcgatcgaagatgcgtgagattcttcacatccagggagggcaatgcgggaaccagatcggagcccagttctgggaggtggtgtgcgcggagcacgggatcgattcaacggggaagtaccaatgggacaactagttgcaactcgagcgagtcaacgtccactacaatgaatcgagttgcggaaggttcgtgcctatggcggtgctcatgga

SEQ ID NO: 8607 - DNA, 352 bp, Glycine max
  Clone ID: LIB3039-041-Q1-E1-G4
gatgcacaagtttgttgagatagctagaagcaataagatgaaaatgaaagtgcttgttttgtttgttgctacagttttggtagcatatgaatgccatggctcagactaccagaagttccctctccaaatgaaaactgggtttggtgggcaatacagcaatgaggtggcatgtgccagttggaggcttggcgtggaagcaaacaacgtagtcaagtggcaaactgttcctgcagcttgcggagagtacatagctgactacgttctaggagaccaatatagattagattccaaaacagttaaaccaacaagcttagttctatgctaaatccctcaaactcgccaacaaagatgt

SEQ ID NO: 8608 - DNA, 240 bp, Glycine max
  Clone ID: LIB3039-041-Q1-E1-G5
ggcacaagtgagtttgttgatcgagataactagaaccagtgtgatgaaattgaaggtccttgttttcctcgttgctagaatttcggtagcatggcaatgccacgtctaggacatgttccctcgcggactgactactggtcacggtccccgtactccggaggtcaacggcccaagtttgaggcttcttcaggcaccctgcaccaccgtagcctttctgaccctccattatcattccttaaa

SEQ ID NO: 8609 - DNA, 190 bp, Glycine max
  Clone ID: LIB3039-041-Q1-E1-G6
gacacttcataatcctctagtaacccttcttttctctctctctctctcgtgttctgagctgctagaaccactggagaggaattgaagtcatgcgtctttcaccatgtttgcaatgcttgttggactgctctctcacagccttgtctttcgtgtcacaggcattactgttcccgattttatcacctgcctc

SEQ ID NO: 8610 - DNA, 276 bp, Glycine max
  Clone ID: LIB3039-041-Q1-E1-G7
ggcacaagtgagtttgttgatcgagataactagaaacagtgtgatgaaaatgaaggtccttgttttcttcgttgctacaattttggtagcatggcaatgccatgcgtgcgatatgttccctctccgaatgaacactggctatggtgcccgtactccggaggtgaaatgcgcaagttggaggcctgctgtggaagcacagaggatctttggccttgagaccactcctgaatagtgccttgacgcacccggggaccacctccatgggcgaatcatctc

SEQ ID NO: 8611 - DNA, 77 bp, Glycine max
  Clone ID: LIB3039-041-Q1-E1-G8
gatagcgatacatatagtggtttcagtgactgatcagtgttcacttgatctcatcgtccttgttatcatcattgcca

SEQ ID NO: 8612 - DNA, 225 bp, Glycine max
  Clone ID: LIB3039-041-Q1-E1-G9
ggagctagatagatatagattaggcagaacgcaaacgaatgacctttctaactaatctacagtccatcctgtaataatctccgtttcaacaccaaacaccaagcgaaacctgaattaagcctcttcttcttcatcgaatcgaaacaacctcgtccgtgctaaggaaactcaacgacagagactgcaacaatgtacgtagatcacgcgttctcgatttcggacgag

SEQ ID NO: 8613 - DNA, 130 bp, Glycine max
  Clone ID: LIB3039-041-Q1-E1-H1
cgggatagcaaaatcgtttctccaatttaatcaccattgtagaacccaattcgcttcgtcgttttcgattaagacagcaatggcacgtaccaagcaaaccgctcgcaagtccaccggatgaaacgccccg

SEQ ID NO: 8614 - DNA, 211 bp, Glycine max
  Clone ID: LIB3039-041-Q1-E1-H10
gaacctttgcattctattcattcaagattcagcaagtgcgttttggaagcagagaccgaaatacttcgagatggcccgtactaagccaactgctcgtaagtcaactggaggaaaagcttccaggaagcagcttgcaaccaaagctgcacgtaagtctgcaccaacaactggtggtgtgaagaagcctcatcctcatcgccctggaactgtt

SEQ ID NO: 8615 - DNA, 128 bp, Glycine max
  Clone ID: LIB3039-041-Q1-E1-H11
aagggggcccaattaattttgttaatcaagataactagaaacattttgatgaaaataaaggtccttgttttcttcgttgcaaaaattttggtaccatggcaatgccatgcgtacaaaatgttccctcc

SEQ ID NO: 8616 - DNA, 75 bp, Glycine max
  Clone ID: LIB3039-041-Q1-E1-H2
aagactaagaagaccattaaggaggtatctcatgagtggtcattggtgaacaagcataagcctagttggatgagg

SEQ ID NO: 8617 - DNA, 217 bp, Glycine max
  Clone ID: LIB3039-041-Q1-E1-H3
gacaacacaagactatgcagtccctatgggcatagccttgagcagcaattgtgatcttatcagctatggcggagaaacacagcccttaagaatctggccgtgacgcggattctccatcactttaaggagatccgctccagcccatctgacgactacttgagcttccaccttgaggaagatctatgttcagtgccctttgccactacggggtctcgtc

SEQ ID NO: 8618 - DNA, 169 bp, Glycine max
  Clone ID: LIB3039-041-Q1-E1-H4
gatcaataatctattttatactatacctacattttgataattttctttgtagttgatagccatggctacccgtggaaagcttgaggttgacattgatcgcaagtcccgcgcatatagctgctggcaaatgcttctgaattctaccgagctatgtcctcacggcttcgct

SEQ ID NO: 8619 - DNA, 111 bp, Glycine max
  Clone ID: LIB3039-041-Q1-E1-H5
gtgtgcagtaacatttccatttcatttggagagacagagtagtgagtagtgagagggccaatctatgcatcctccagatcgttacgagcgtttcgtcgtccctgaccgccc

SEQ ID NO: 8620 - DNA, 345 bp, Glycine max
  Clone ID: LIB3039-041-Q1-E1-H6
gatccataaccacggcgtctaactctgcttccgctctttacttccttttatgcctatcgcccatcactttgcttctttctgcgtttcgtgctcaagctcaatctcatgctccagctcccactttcaagtactgtgaaaagaatgcagactatgctgtgaaggtgagtggagtggaaatattgcctgaccccgtggagagaggagtgccattcacctttaagatcccagcttatactcctgaaccaattcaaagcggggacttgttatatgaaatttcttatgctggaatagaagcacaacctgctacatttctccatgattcccgtgaggaagcaccatgcccag

SEQ ID NO: 8621 - DNA, 341 bp, Glycine max
  Clone ID: LIB3039-041-Q1-E1-H7
ggagtttgttgatcgagataactagaaacagtgtgatgaaaatgaaggtccttgttttcttcgttgctacaattttggtagcatggcaatgccatgcgtacgatatgttccctctccgaatgaacactggctatggtgcccgtactccggaggtgaaatgcgcaagttggaggcttgctgtggaagcacacaacatctttggctttgagaccattcctgaagagtgcgttgaagcaacaaaggaatacatccatggcgaacaatatagatcagactccaaaacagttaaccaacaagcttacttttatgccagagacctccaaattcatcccaatgacaca

SEQ ID NO: 8622 - DNA, 268 bp, Glycine max
  Clone ID: LIB3039-041-Q1-E1-H8
ggtgcttaatggaaggcccttgagcttttctttctttctctgctctcttttcttttaggtttccactctcacacactctccctcttctctttctctgcaataatctctcttctcttcttcactctctcaactcctgccaaacccccatttccgcagatgaagggcagtgccatgcctcgatggtagcatctgcatcttcaccatccctgaactgtttctccctaaatgaggccggatttaaagaatgcaattacctgggattgtcaga

SEQ ID NO: 8623 - DNA, 204 bp, Glycine max
  unsure (1)..(204): unsure at all n locations
  Clone ID: LIB3039-041-Q1-E1-H9
aaaaccctaactaagggtcaaaccgtgaccccacaatccgccttcggcaatctttgcaacgggatcaggtgctccctcgtccttcacgatggcgggaactgaagccaaaaaaactgaatccaaaaaacctgccgctaagcaatccggtgcgaagaagaaggaggtgaanaangaaactggcttaagtctcacgcatccgaaagc

SEQ ID NO: 8624 - DNA, 380 bp, Glycine max
  unsure (1)..(380): unsure at all n locations
  Clone ID: LIB3039-042-Q1-E1-A1
ggcacaagtgagtttgttgatcgagataactagaaacagtgtgatgaaaatgaaggtccttgttttcttcgttgctacaattttggtagcatggcaatgccatgcgtacgatatgttccctctccgaatgaacactggctatggtgcccgtactccggaggtgaaatgcgcaagttggaggcttgctgtggaagcacacaacatctttggctttgagaccattcctgaagagtgcgttgaagcaacaaaggaatacatccatggcgaacaatatagatcagactccaaaacagttaaccaacaagcttacttttatgccagagacctcgaagtccatcncaaggacacatttgtgttcagtatagatggcaccgtactct

SEQ ID NO: 8625 - DNA, 373 bp, Glycine max
  Clone ID: LIB3039-042-Q1-E1-A10
gaaaggtagaagatcgaagagagaaagagagtgaagagagaagaagatggcgtcgagcggagcggtgccgttttggagggcagcggggatgacatacatcacatactcaaacatatgcgcgaatctggtcaggaattgcctcaaggaaccctacaaggctgaagccatctctcgtgagaaggtccattttgctctctccaaatgggtcgacgccaagcctgaaaaacctactattcgttcagacaccccagagcagtgatccggaatagttggaagctataaatgcataaatctttgagatctggaagttcattgtcattttgaacctttctgtgatgtttaattcctttgcttctttttttttcattccatg

SEQ ID NO: 8626 - DNA, 260 bp, Glycine max
  Clone ID: LIB3039-042-Q1-E1-A11
tggggtcttgcagggcgaagagatggccacagttacagggcacctcgtgtgggagatcgtcaagaaaaacaattccttcctgggcaagcagtttggaacgggcacccagagcgtcgaactcagcagagagagcaacaatctctacaacctcaattcgttcaagtactctggtttggcaaataagaaaactgttactgtccagcctgagggcaaagatcaagtcgtgtggagtgcttactggacccactgacagcattgga

SEQ ID NO: 8627 - DNA, 208 bp, Glycine max
  Clone ID: LIB3039-042-Q1-E1-A12
gggcacaagtttgttgagatagctagaagcaataagatgaaaatgaaagtgcttgttttgtttgttgctacagttttggtagcatatgaatgccatgggtccaaactacaaaaatttccctcctccaaatgaaaactgggtttggtgggcaatacaacaattaagggtgaatttgccatttggaggcttggcgtggaagcaaacaacg

SEQ ID NO: 8628 - DNA, 380 bp, Glycine max
  unsure (1)..(380): unsure at all n locations
  Clone ID: LIB3039-042-Q1-E1-A2
ggcacaagtgagtttgttgatcgagataactagaaacagtgtgatgaaaatgaaggtccttgttttcttcgttgctacaattttggtagcatggcaatgccatgcgtacgatatgttccctctccgaatgaacactggctatggtgcccgtactccggaggtgaaatgcgcaagttggaggcttgctgtggaagcacacaacatctttggctttgagaccattccagaagagtgcgttgaagcaacaaaggaatacatccatggcgaacaatatagatcagactccaaaacagttaaccaacaagcttacttttatgccagagacctcgaagtccatcncaaggacacatttgtgttcagtatagatggcaccgtactct

SEQ ID NO: 8629 - DNA, 380 bp, Glycine max
  Clone ID: LIB3039-042-Q1-E1-A3
ggcacttcaattgcaatcaaattagttcattctctttgcgcagttccctacctctcctttcaagatgcagatcttcgtcaagaccctcaccggaaagaccatcacccttgaggtggaaagctctgacaccatcgacaacgtcaaggccaagatccaggacaaggaaggaattcccccggatcagcaacgtctcatcttcgccggaaagcagctcgaggacggccgtaccctcgccgactacaacatccagaaggagtcaacccttcaccttgtccttcgtctccgtggtggcatgcagatcttcgtcaagactctcactggcaaaaccattaacctagaggtcgaaaactctgacaccattgacaacgtcaaggccaaga

SEQ ID NO: 8630 - DNA, 380 bp, Glycine max; identical to SEQ ID NO: 7921
  Clone ID: LIB3039-042-Q1-E1-A4

SEQ ID NO: 8631 - DNA, 317 bp, Glycine max
  Clone ID: LIB3039-042-Q1-E1-A5
ggcagttcagttgcaagcagattagttcattctctttgcgcagttcgctacctctcccttgaaggtgcacatcgtcgtcagcgaccctcaccggcaagaggatcacgcttgacgtgggcagctctgagatcatcgacaccgtcaaggccaggatacaggacacggacggcatccgcccggtccatcagcgtcacacttgcgccggaaagcaacatgaggacggccgtacccatgctgactacagcatgcatatggagagtactcgtcaactcgtcctccgtctcagtggaggtatgcagatcttcggtaagacactc

SEQ ID NO: 8632 - DNA, 389 bp, Glycine max
  Clone ID: LIB3039-042-Q1-E1-A6
gtcacacacttcctctaactctcactcccaaacccaaactcaataacagtaaccgtttttcgttcttcacttcctcactctctctctcttccaccacactcatggccactgctcacaaggtcctcgttcccatcgccgacggcaccgagcccatggaggccgtcatcatcatcgacgtcctccgccgctccggcgccgatgtcaccgtcgcttcctcctccgccaacctcgccgtccaagctctccacggcgtcaagatcatcgccgacgcctccgtctccgacgtcgccgccaccgcctttgacctcgtcgctctccccggaggtttacagggtgatgagaatctgagagactgtaaagttcttgaagggtttgtgaagaagcatgtt

SEQ ID NO: 8633 - DNA, 370 bp, Glycine max
  unsure (1)..(370): unsure at all n locations
  Clone ID: LIB3039-042-Q1-E1-A7
ggaaactcaactcctgaaaggcaagagtgagagagaaatggagaatgcggaggagatgatgcagcaaaacgacgaggttttgtcggttgaacttccagctccctccggttggaatanactgtttttcccctaaaaaactggaaacacaaggaaaaattgagattgtattcattgctccaactggagaggagatcagtaccaaaaaacaattggagcagtacctaaaggcacatcctggcaatcctgtcatttcaaagtttgactggggaactggtgagacccctaggcgatcagcaaggatcagtgagaaggtcaagtcaactccaccagcagatagtgatactcaanagaaacgagctcggaaatcatc

SEQ ID NO: 8634 - DNA, 297 bp, Glycine max
  Clone ID: LIB3039-042-Q1-E1-A8
gtgcacaagtgagtttgttgatcgagataactagaaacagtgtgatgaaaatgaaggtccttgttttcttcgttgctacaattttggtagcatggcaatgccatgcgtacgatatgttccctctccgaatgaacactggctatggtgcccgtactccggaggtgaaatgcgcaagttggaggcttgctgtggaagcacacaacatctttggcctttgagaccattccctgaagagtgcgttgaagcaacaaaagaatacatccatggcgaacaatatagattagactccaaaacagt

SEQ ID NO: 8635 - DNA, 356 bp, Glycine max
  Clone ID: LIB3039-042-Q1-E1-A9
ggcacaagtgagtttgttgatcgagataactagaaacagtgtgatgaaaatgaaggtccttgttttcttcgttgctacagattttggtagcatggcgatgccatgcgtacgatatgttccctcccccaatgaacactggctatggtgcccgtactccggacgtgaaatgcgcaagttggaggcttgctgtggaagcacacaacatctttggctttgagaccattcctgacgagtgcgttgatgcagcaaacgaatacatccatggcgaacggtatagatcagactccatgacagttaaccaacggacttacttttatgccatagacctcgaatgtcatcccaaggacacatttgtg

SEQ ID NO: 8636 - DNA, 320 bp, Glycine max
  Clone ID: LIB3039-042-Q1-E1-B1
gctagaatcccagttcaaaggtaaggtaggttaacactcttcttcatcgtcgtcgcaatgggacgtgtgatccgtgcgcagcgtaagggagcaggctcggtcttcaagtcccacacgcaccaccgcaagggccctgcacgcttccggagcctggacttcggggagcgcaacggctacctcaagggcgtggtcaccgacgtcatccatgaccctggccgcggcgcgccgctcgccaaggtcgccttccgccaccctttcagatacaagaagcagaacgagctcttcattgccgccgagggcctctacaccggtcagttcat

SEQ ID NO: 8637 - DNA, 368 bp, Glycine max
  Clone ID: LIB3039-042-Q1-E1-B10
gcacagcacagcactctttgcaacacaacaaaaaaagacaacacagagagaagcgtcttaataaacgctcttctctgaaaaacctgatttcttctcttcttctcttctctttcgtttcgatcttcgatctctgaaaatgagagagtgcatttcaatccacatcggtcaggccggtattcaggtcggaaacgcctgctgggagctctactgcctcgaacacggcattcagcctgatgggcagatgccaagtgataagactgttggtggaggtgatgatgctttcaacaccttcctcagtgaaactggggctggaaagcacgtgcctcgtgcgatttttgtagatctcgagcctactgtgattgatgaag

SEQ ID NO: 8638 - DNA, 322 bp, Glycine max
  Clone ID: LIB3039-042-Q1-E1-B11
gcagccaaagaaaagaaaatcctcaattttctgagcagccaaacactctctctctgtctctcgaaaattctcagtttgcagagaaaatctgaatcatgtcgtggcaagcgtatgtcgacgatcaccttctgtgtgacatcgaaggtaaccatctcacgcacgctgctatcatcggccaagacggcagcgtttgggctcagagtaccgacttccctcagttcaaacctgaggagataactgccatcatgaatgactttaatgagcctggattacttgctccaactggattgtatctcggtgggcacaaatatatggtcatcca

SEQ ID NO: 8639 - DNA, 192 bp, Glycine max
  Clone ID: LIB3039-042-Q1-E1-B12
gacaagtttgttgagatagctagaagcaataagatgaaaatgaaagtgcttgttttgtttgttgctacagttttggtagcatatgaatgccatggctcagacaacaaaaatttccctctccaaatgaaaactgggtttggtgggcaatacagcattgaggtggcatttgcaatttgaaggcttgccttgaaa

SEQ ID NO: 8640 - DNA, 374 bp, Glycine max
  Clone ID: LIB3039-042-Q1-E1-B2
gactcacaaccacaacaaggcagcagtgcgaagagaaagaaagagaagaagcgcttatcgaactcggacggaagcactgagttaactcagagcgagtgaaagtgttgctgcgtgatgtctggtggtatcgcccgtggacgcctcaccgaggagcgcaagtcgtggcggaagaaccatccccatggttttgttgcgaagccggagacgctgcccgatggaaccgtgaacttgatggtgtggcattgcactagtcccgggaagactgggactgattgggagggtggctacttcccgcttacgctgcactttagtgaagactacccaagcaagcctccaaagtgtaaatttccacaaggtttcttcaaccctaatgt

SEQ ID NO: 8641 - DNA, 399 bp, Glycine max
  Clone ID: LIB3039-042-Q1-E1-B3
acgacagaagggggtgtcctattgaaaacatattttggggaaaaaaagtataagaagattgaaatcaaattgagccctaaagatctctcgtcggacgcggagagtttcactttcaccctccggttctcgatgtcagcgtttgacaatgttgttggtgggaaattgaagttgaagggaaaagcactggatgtggctggtggagtgaagaagaagaaaaagaagaacaagagaaatcaggaacaacttctgcaagtcgccgaagatgaaatttcagcaggtggaaatacagaacaggccaaagatcctaatgatggagatataaatgatgtgagtgaattaagcgggaaagggaagacagcccattatgatgatcatcttacaccggcggagaggcgatac

SEQ ID NO: 8642 - DNA, 381 bp, Glycine max
  Clone ID: LIB3039-042-Q1-E1-B4
ggccagacgcagtgactaaaccaaacctctcactcgccgtcgtagggtttctcctttcgtttagcaacaacaacaatggttgcagccaagaaaaccaagaagacccatgagagcatcaacaacaggctcgctcttgtcatgaagagtggaaaattcaccctcggttacaagacggttctcaaatcacttaggagctccaaagggaaattgattatcattgctaacaactgcccccctttgaggaaatcagagattgaatactatgctatgttggccaaggttggagttcatcattacaatgggaacaatgtggatttgggcactgcatgtggaaaatattacagagtgtgctgccttagcattattgatcctggtgattct

SEQ ID NO: 8643 - DNA, 378 bp, Glycine max
  Clone ID: LIB3039-042-Q1-E1-B5
gcagccaaagaaaagaaaatcctcaattttctgagcagccaaacactctctctctgtctctcgaaaattctcagtttgcagagaaaatctgaatcatgtcgtggcaagcgtatgtcgacgatcaccttctgtgtgacatcgaaggtaaccacctcactcacgctgctatcatcggccaagacggcagcgtttggactcagagtaccgacttccctcagttcaaacctgaggagataactgccatcatgaatgactttaatgagcctggatcacttgctccaactggattgtatctcggtggcaccaaatatatggtcatccagggtgaacccggtgctgtcattcgagggaagaaaggtcctggtggtgttactgtga

SEQ ID NO: 8644 - DNA, 385 bp, Glycine max
  Clone ID: LIB3039-042-Q1-E1-B6
gacaacacagaacaaaaacaaagaaaaaaaaaaacccttagccaacacaaccatcatggccacctctgctattcagcaatcagcattcactggtcaaactgctctgaagcagctcaatgagttcgtccgcaagaccggtggcgccggcaaaggtcgcactaacatgcgccgcaccgtcaagagtgctcctcagagcatttggtatggccctgaccgtcccaagtacttgggtccattctcggagcagattccatcatacctgaccggagaattccctggtgactacggatgggacactgctggattatcagctgacccggaaaccttcgccaggaaccgggagctggaggtgattcacagcagatgggcaatgcttggtgccctt

SEQ ID NO: 8645 - DNA, 376 bp, Glycine max
  Clone ID: LIB3039-042-Q1-E1-B7
gagcgcgaacatacactcccccaatcctttctctcccgaaaccgtacggttacgtaaccgtaggcgatatcagaattcacggcacacacacagtccccactctctacgatgaccggtcaacgcatctcctacggcaaacgctcccactcgcactccgattccgacgccggctccaaaaacaagcgccgcaaccccgcagctgatgactcctcctcctccctcatcaccgccgacgacaccgtcttccgctacctctgccccgtccgcaagattggcagcgtcatcggccgcggcggcgacatcgtcaagcagctccgcgccgacaccaaggccaagatccgcatcggcgacgcgctccccggttgcgacgagcgtg

SEQ ID NO: 8646 - DNA, 367 bp, Glycine max
  unsure (1)..(367): unsure at all n locations
  Clone ID: LIB3039-042-Q1-E1-B8
ggcacaagtgagtttgttgatcgagataactagaaacagtgtgatgaaaatgaaggtccttgttttcttcgttgctacaattttggtagcatggcaatgccatgcgtacgatatgttccctctccgaatgaacactggctatggtgcccgtactccggaggtgaaatgcgcaagttggaggcttgctgtggaagcacacaacatctttggctttgagaccattcctgaagagtgcgttgaagcaacaaaggaatacatccatggcgaacaatatagatcagactccaaaacagttaaccaacaagcttacttttatgccagagacctcgaagtcnatcncaaggacacatttgtgttcagtatagat

SEQ ID NO: 8647 - DNA, 312 bp, Glycine max
  Clone ID: LIB3039-042-Q1-E1-B9
gacacttcaaaatcctctagtaacccttcttttctctctctctctctcgtgttctgagctgctataagcactggagaggaaaagaagccatgcttctttcatcatgtttgcaatgcttgttggattgctctctcagagccttgtcattcctgtaatatccaccactgttgcagatcagaagaagtactacatcccagattcacatgctggaagtctccccaaaggctcacacaatagtagtcctccatctcatggccatgggagctctccaccctcacattacaatagttcaagtattccatcaacatcctc

SEQ ID NO: 8648 - DNA, 401 bp, Glycine max
  Clone ID: LIB3039-042-Q1-E1-C1
aggaagacgacagaaggggaagggagaattaggtttttagggtttacaccgagcagcgacacctccctcccgcagtagccatggttctcaaaactgaactatgccgattcagtggtgccaagatctaccccggaaagggcatcagatttgttcgtggtgattctcaggttttcctgtttgccaactcaaaatgtaagcggtatttccacaaccgcctgaagccctcaaagctcacctggactgctatgtacagaaagcaacacaaaaaggacattgctcaagaagctgtgaagaagaggagacgcgctgccaaaaagccttactctaggtccattgttggtgccactctggaagttatccagaaaaagagagctgagaagccagaagttcgagatgcagct

SEQ ID NO: 8649 - DNA, 374 bp, Glycine max; identical to SEQ ID NO: 7696
  Clone ID: LIB3039-042-Q1-E1-C10

SEQ ID NO: 8650 - DNA, 374 bp, Glycine max
  Clone ID: LIB3039-042-Q1-E1-C11
gaaagcacaattcatcgttcccttgagctaataattttgcacttatattcctgcctttacttggattctgtcgcaaaaggcaaatacatagcatcttgagcagttgagcaattgagctatcatacaaaagcaagcgaaggtagaagagatcagttatgatgagcaattccaaacaaaagaagaaattgaaggcacacaagaaaaatgatgaatggttgaaggacatgaggggtaacctaagtttgctggctaccgtaattgcaactatgacctttcagagtgctattaatccaccatgtggcattaggccagcaagtgaaactggagacatcacatgtccaggtacaagcataaacattaccgttccatgccct

SEQ ID NO: 8651 - DNA, 324 bp, Glycine max
  unsure (1)..(324): unsure at all n locations
  Clone ID: LIB3039-042-Q1-E1-C12
ggttgaaagaggaaggaagaagaaatcgttttatgtgagtaacagaacaacacatcatagacagacacaacattagtatctttcaactgttgctctgcttctgcacacagagaatggtgtgggtggggaaacagagatgatctatctgtgttcacagcaccactgtttccctgcctcacccttatgtacaagaacaagaataagcacacacacccgccacaacgctatagtcatcacttcgaagaacttcacaattttgttttcttggatatggggagtcttgctcttganaccgaggatgtaatctcagatatatacctttcg

SEQ ID NO: 8652 - DNA, 377 bp, Glycine max
  Clone ID: LIB3039-042-Q1-E1-C2
ggcacaagtgagtttgttgatcgagataactagaaacagtgtgatgaaaatgaatgtccttgttttcttcgttgctacaattttggtagcatggcaatgccatgcgtacgatatgttccctctccgaatgaacactggctatggtgcccatactccggaggtgaaatgcgcaagttggaggcttgctgtggaagcacacaacatctttggctttgagaccattcctgaagagtgcgttgaagcaacaaaggaatacatccatggcgaacaatatagatcagactccagaacagttaaccaacaagcttacttttatgccagagacctcgaagtccatccaaagacacatttgtgttcagtatagatggcaccgtact

SEQ ID NO: 8653 - DNA, 383 bp, Glycine max
  unsure (1)..(383): unsure at all n locations
  Clone ID: LIB3039-042-Q1-E1-C3
gattatatttgagttcaaacaaatcaaagccatggccacctccaacttctctattgttctctccgtctccctagccttctttttggtgctacttaccaaggcacactcgaccgataccgtttctttcaccttcaacaagttcaacccagtccaaccaaacattatgctccaaaaagatgctagtatttcatcctctggggtgttacaactcaccaaagttggcagcaacggcgtgcccacctcgggatctctcggtcgtgccctttacgctgccccaatccagatttgggacagcgaaaccggcaaggtagccagctgggctacatcctttaaattcaacattttcgcacccaacanatcanactcagctgacgggcttgcct

SEQ ID NO: 8654 - DNA, 405 bp, Glycine max
  unsure (1)..(405): unsure at all n locations
  Clone ID: LIB3039-042-Q1-E1-C4
aagacgacagaagggggctagttagagtgaatccatgaccgtgaccatggcggctgcgtttacaagtacaagtgcaacactgagactgtcaaatgttggagagagcagaggtttgcagctgcgtaagtgtaaccctaatcctaataagctgaaggttatgggggggtttggaggttgttctggagtggcagtgggtgtgagagaaagaaaaggaattggaagggttagggttcgggttcgggcgagttcttcgtcggacgaggcagtgagtgcgcagtcaaaagtgactcagaaagtattctttgacgtcagtattggaaatccagttgggaagcttgtgggacgtattgtgattggactgtacggcgacgatgtcncccaaacggccgagaacttccgtgccct

SEQ ID NO: 8655 - DNA, 376 bp, Glycine max
  Clone ID: LIB3039-042-Q1-E1-C5
ggcacaagtgagtttgttgatcgagataactagaaacagtgtgatgaaaatgaaggtccttgttttcttcgttgctacaattttggtagcatggcaatgccatgcgtacgatatgttccctctccgaatgaacactggctatggtgcccgtactccggaggtgaaatgcgcaagttggaggcttgctgtggaagcacacaacatctttggctttgagaccattcctgaagagtgcgttgaagcaacaaaggaatacatccatggcgaacaatatagatcagactccaaaacagttaaccaacaagcttacttttatgccagagacctcgaagtccatcccaaggacacatttgtgttcagtatagatggcaccgta

SEQ ID NO: 8656 - DNA, 386 bp, Glycine max
  Clone ID: LIB3039-042-Q1-E1-C6
ggcacaagtttgttgagatagctagaagcaataagatgaaaatgaaagtgcttgttttgtttgttgctacagttttggtagcatatgaatgccatggctcagactaccagaagttccctctccaaatgaaaactgggtttggtgggcaatacagcaatgaggtggcatgtgccagttggaggcttggcgtggaagcaaacaacgtagtcaagtggcaaactgttcctgcagcttgcggagagtacatagctgactacgttctaggagaccaatatagatcagattccaaaacagttaaccaacaagcttatttctatgctaaatccctcaaactcaccaacaaagatgtctttgtcctggacgttgacgacactactctctctaat

SEQ ID NO: 8657 - DNA, 376 bp, Glycine max
  Clone ID: LIB3039-042-Q1-E1-C7
ggctgctgcggtttagtagtgcagctaaacgtcgacgaacaaggaaggaataacgaaagagccttcaacgctgatttttgtagaatattggaccgacaaatagttaccagcttccaccctgtctctctgcgattgagaaagggactcacgttctctgttcatcacaccctctctctctctctcttcgtctctctctctcatccatgtgcatttcttgtctcatattaggcttcgagttcagaggtcgcccccttcatagcttagaagcaacttccgcaacgttttctccttgatttcttcagctctagttctctctcccaagctttctccagctttgcaactagctgtgtctggctctggccatcatcaagtcttc

SEQ ID NO: 8658 - DNA, 380 bp, Glycine max
  unsure (1)..(380): unsure at all n locations
  Clone ID: LIB3039-042-Q1-E1-C8
ggcacaagtgagtttgttgatcgagataactagaaacagtgtgatgaaaatgaaggtccttgttttcttcgttgctacaattttggtagcatggcaatgccatgcgtacgatatgttccctctccgaatgaacactggctatggtgcccgtactccggaggtgaaatgcgcaagttggaggcttgctgtggaagcacacaacatctttggctttgagaccattcctgaagagtgcgttgaagcaacaaaggaatacatccatggcgaacaatatagatcagactccaaaacagttaaccaacaagcttacttttatgccagagacctcgaagttcatcncaaggacacatttgtgttcagtatagatggcaccgtactct

SEQ ID NO: 8659 - DNA, 441 bp, Glycine max
  Clone ID: LIB3039-042-Q1-E1-C9
ccacgcgtaagacacgcgtccgcacaagactacaaagggggcgagaagaacacacattgggagttagatagagagaatgcgagatgtggccggaacatcctcgtccctgactaaggggggccgcacctttccgagattctttacaggagaaaggcatctttacacacatgagcccctcaactccgtttctgcgtaattgacgcctcatcacacccggtaatgtcgttaattcggccgtatcaacggccggtctttcgttctcaccaactctcgagctgttaggcccttctggtcatcataacattttcttggagattgggacgtaatccccatgaggttaaacctttcgccagaagattctcgcaactgaaaatatcctctttgcttcccctgagtacaattactctgtcccaagtcctttaaagaatgcacttgactggg

SEQ ID NO: 8660 - DNA, 370 bp, Glycine max
  Clone ID: LIB3039-042-Q1-E1-D1
gagcgaaacagagagtggtttcagtgagtgatcggtgttcacttgatccttcataagtcgtcatcatcatcatcatcatcaacgttgattgaagaagatgccgatcagaaacatcgccatcggaaggcctgaagaggctactcaccccgacacgttgaaggcggggttggctgagttcatctccaccttgatcttcgtgttcgccggttcaggttccggcatcgcctacaacaagctcaccgacaacggcgccgccactcccgccggcctcatctccgcttccatcgcccatgctttcgccctcttcgtcgccgtctccgtcggcgccaacatctccggcggccacgtcaaccccgccgtcaccttcggc

SEQ ID NO: 8661 - DNA, 302 bp, Glycine max
  Clone ID: LIB3039-040-Q1-E1-E1
ggtcgtgaggacaaaagaagaagtatcactcatataatactctgtatcatttcatttcgataatcatccatagctactgaagaaaatggcaaccatctctgctgctatcacaaccccatcgatctcccgcgcaactcttgtgcaaaagcgggtctcatctcccgttcttggtttgccagcaatgggtaaggtgggaagagtgagttgctccatggaggaaaaaccttattctgtgaaggaaagcagctctagcatgttggggatgggggcatctctgatggcagctgccaacgctgcagcca

SEQ ID NO: 8662 - DNA, 329 bp, Glycine max
  Clone ID: LIB3039-038-Q1-E1-F2
gaggcacgcgtccaacggctactacgacgggagagaaagggagagcaacagggactcattccactgactacggtttgcggcttcagagattgcgacgcacgcacccacggtcaccacctagaacggtgcacgtatctccgtcgcgtcagctcacggagaaagtggtcgcatccagatgatgttggcaggagaatcgattgcagcagcaacgactgcaacttccatgtcgcatgtaacatcttcgaacgtcgcatcgacgggattgagactaggaaacttgggatcacatgggacaaccttcacttatcacctagggttactgttgcact

SEQ ID NO: 8663 - DNA, 326 bp, Glycine max
  Clone ID: LIB3039-038-Q1-E1-F3
gaaggtgcaagagtttgttgtgagctataagctagtttatcgtgaggagaatatgaagttgtttgttttctttgttgctgcagtagttttggtagcatggccatgccatggcgcaggctagcaaaggttccctctccgaatgaaaactggctatggtgagcgttcttcggaggtaaaatgcgcaagttttaggcttgctgtggaagcacacaacatccgagcctttaaaaccattcctgaagagtgcgttgaaccaacaaaggactacattaatggcgaacaatttagattagactctaaaacagttaaccaacaagctttctttt

SEQ ID NO: 8664 - DNA, 303 bp, Glycine max
  Clone ID: LIB3039-038-Q1-E1-F4
ggcacaagtgagtttgttgatcgagataactagaaacagtgtgatgaaaatgaaggtccttgttttcttcgttgctacaattttggtagcatggcaatgccatgcgtacgatatgttccctctccgaatgaacactggctatggtgcccgtactccggaggtgaaatgcgcaagttggaggcttgctgttgaaacacacagcatccttggctttgagaacattcctgaagagtgcgttgaagcatcaaagaatacatcaatggggacaatatagatcagactccaaaacagttaaccaacaag

SEQ ID NO: 8665 - DNA, 349 bp, Glycine max
  Clone ID: LIB3039-038-Q1-E1-F5
ggcacaagtgagtttgttgatcgagataactagaaacagtgtgatgaaaatgaaggtccttgttttcgtcgttgctacaattttggtagcatggcaatgccatgcgtacgatatgttccctctccgaatgaacactggctatggtgcccgtactccggaggtgaaatgcgcaagttggaggcttgctgtggaagcacacaacatctttggctttgagaccattcctgaagagtgcgttgaagcaacaaaggaatacatccatggcgaacaatatagatcagactccaaaacagttaaccaacaacgctacgtttaggccagagacctcgaagtccatcccaaggacaca

SEQ ID NO: 8666 - DNA, 346 bp, Glycine max
  Clone ID: LIB3039-038-Q1-E1-F6
gcacaagtttgttgagatagctagaagcaataagatgaaaatgaaagtgcttgttttgtttgttgctacagttttggtagcatatgaatgccatggctcagactaccagaagttccctctccaaatgaaaactgggtttggtgggcaatacagcaatgaggtggcatgtgccagttggaggcttggcgtggaagcaaacaacgtagtcaagtggcaaactgttcctgcagcttgcggagagtacatagctgactacgttctaggagaccaatatagatcagattccaaaacagttaaccaacaagcttatttctatgctaaatccctcaaactcacgagcaaagat

SEQ ID NO: 8667 - DNA, 350 bp, Glycine max
  Clone ID: LIB3039-038-Q1-E1-F7
ggcacaagtgagtttgttgatcgagataactagaaacagtgtgatgaaaatgaaggtccttgttttcttcgttgctacaattttggtagcatggcaatgccatgcgtacgatatgttccctctccgaatgaacactggctatggtgcccgtactccggaggtgaaatgcgcaagttggaggcttgctgtggaagcacacaacatctttggctttgagaccattcctgaagagtgcgttgaagcaacaaaggaatacatccatggcgaacaatatagatcagactccaaaacagttaaccaacaagcttacttttatgccaggagacgtcgaagtccatcccaaggacaca

SEQ ID NO: 8668 - DNA, 352 bp, Glycine max
  Clone ID: LIB3039-038-Q1-E1-F8
ggcacaagtgagtttgttgatcgagataactagaaacagtgtgatgaaaatgaaggtccttgttttcttcgttgctacaattttggtagcatggcaatgccatgcgtacgatatgttccctctccgaatgaacactggctatggtgcccgtactccggaggtgaaatgcgcaagttggtggcttgctgtggaagcacacaacatctttggctttgagaccattcctgaagagtgcgtggaagcaacaaaggaatacatccaaggcgaacaatatagattaaactccaagacagttaaccaacaagcttacttttaagccagaaaactcgaagtccatcccaaggacacattt

SEQ ID NO: 8669 - DNA, 287 bp, Glycine max
  Clone ID: LIB3039-038-Q1-E1-G1
gctagaataaacaataatgagatcactgttttagtaaatgatgcggaaaagggtagtgacattgatccacaagaagcacagcaaactcttgaaatagcagaagctaatttgaataaggcggaaggcaagagacaaacaattgaggcaaatctagctcttagacgagctaggacacgagtagaggctatcaatgtgatttcataacaagttgatgcgtccgaatatcggaataactaaaaaatgggaaatgaaacagtaagaaaagatagaaaaaaattaaaaggatg

SEQ ID NO: 8670 - DNA, 396 bp, Glycine max
  unsure (1)..(396): unsure at all n locations
  Clone ID: LIB3039-038-Q1-E1-G10
gatcacatttaaaatcaaaacaacaaattttcagactcaacaagcttcgaaccaaatcttattgagaaaatgtctggtcgtggaaagggtggaaagggtttgggaaagggaggtgccaagaggcacaggaaggttcttcgtgacaacatccagggcatcacgaaacctgcgattcgtaggttagcgagaagaggtggcgtgaagaggatcagtggtttgatctacgaggaaaccagaggagttctgaagatattcttggagaacgtgattcgcgatgctgtgacctacactgagcacgctaggaggaagacggttactgctatggatgttgtttatgctcttaagaagcaaggaanggacctctatggttttggaggctaaaaagttcttagtgtt

SEQ ID NO: 8671 - DNA, 411 bp, Glycine max
  Clone ID: LIB3039-038-Q1-E1-G11
ggggaaccctaattctgcgaggtgagtgaaaatggcggtacccttgctctccaagaagatcgtgaagaagcgcgtcaagaagtttatacgcccccagagtgatcgcaagatctccgtcaagccaagctggcgcagacccaagggtattgattctcgtgtcaggagaaagttcaaaggatgcactttgatgcccaacattggttatggctcagacaagaaaacccgccattatctaccaaatggtttcaagaaatttgtcgtgcacaatgtgaaagacctggaacttctcatgatgcataacaggacatattgtgctgagattgctcacaatgtatccacaaggaagaggaaggacatagttgagagagctgctcagcttgatgttgtcttgacgaacaagacggccagact

SEQ ID NO: 8672 - DNA, 396 bp, Glycine max
  Clone ID: LIB3039-038-Q1-E1-G12
gcacaagtgagtttgttgatcgagataactagaaacagtgtgatgaaaatgaaggtccttgttttcttcgttgctacaattttggtagcatggcaatgccatgcgtacgatatgttccctctccgaatgaacactggctatggtgcccgtactccggaggtgaaatgcgcaagttggaggcttgctgtggaagcacacaacatctttggctttgagaccattcctgaagagtgcgttgaagcaacaaaggaatacatccatggcgaacaatatagatcagactccaaaacagttaaccaacaagcttacttttatgccagagacctcgaagtccatcccaaggacacatttgtgttcagtatagatggcaccgtactctccaatattccatactac

SEQ ID NO: 8673 - DNA, 214 bp, Glycine max
  Clone ID: LIB3039-038-Q1-E1-G2
gactcctaacctttttttcttccgttcacctcttcagcagtcgttacagagactccataacccgaaaatgcctttcaagaggtacgttgagattgcgagggttgctcagatcaactatggcaaagagtatgggaggctcgtggttattgtcgatgtcattgaccagaatagggctcttgttgatgctcctgacatggtgaggtcccaagtgaac

SEQ ID NO: 8674 - DNA, 314 bp, Glycine max
  Clone ID: LIB3039-038-Q1-E1-G3
ggcacaagtgagtttgttgatcgagataactagaaacagtgtgatgaaaatgaaggtccttgttttcttcgttgctacaattttggtagcatggcaatgccatgcgtacgatatgttccctctccgaatgaacactggctatggtgcccgtactccggaggtgaaatgcgcaagttggaggcttgctgtggaagcacacaacatctttggctttgagaccattcctgaagagtgcgttgaagcaacaaaggaatacatccatggcgaacaatatagattagactccaaaacagttaaacaacaagcttaccttt

SEQ ID NO: 8675 - DNA, 127 bp, Glycine max
  Clone ID: LIB3039-038-Q1-E1-G4
gggggggcataagtgagtttgttgatcgagatagctacagtctgtgtgatgtgaatgtccgtgcttgcttccgggcgacgcttttgggtaggtggcatggccatgccgtgcgatatgttccgtcccc

SEQ ID NO: 8676 - DNA, 285 bp, Glycine max
  Clone ID: LIB3039-038-Q1-E1-G5
aggcacaagtgagtttgttgatcgagataactagaaacagtgtgatgaaaatgaaggtccttgttttcttcgtggcgacgattttggtagcgtgggaatgcgatgcgtacgatgtgttccctctccgaatgaacactggctagggtgcccgtactccggaggtgaaatgcgcaagttgggggcttgcggtggaagcacacagcatctttggctttgagaccagtcctggagagtggcttgaagcaggaaaggaagacatccatggggaacaatatagatcaggct

SEQ ID NO: 8677 - DNA, 353 bp, Glycine max
  unsure (1)..(353): unsure at all n locations
  Clone ID: LIB3039-038-Q1-E1-G6
ggcacaagtgagtttgttgatcgagataactagaaacagtgtgatgaaaatgaaggtccttgttttcttcggtgcgacaattttggtancatggcaatgccatgcgtacgatatgttccctctccgaatgaacactggctatggtgcccgtactccggaggtgaaatgcgcaagttggaggcttgctgtggaagcacacaacatctttggctttgagaccattcctgaagagtgcgttgaagcaacaaaggaatacatccatggcgaacaatatagattagactccaaaacagttaaccaacaagcttacttttatggcgagagacctcgaagttcatcccaaggacacattt

SEQ ID NO: 8678 - DNA, 323 bp, Glycine max
  Clone ID: LIB3039-038-Q1-E1-G7
gctcgtctcgtggaagtgtaagcaagcaaaaccctagcggcgcctgctttctttgttcgtgttttgcatcaggatggagtctcaggtgaagcacgcacttgttgtcaaagttatgggtcgtactggatccagaggacaagtgacccaggttagagtgaagtttttggatgatcagaaccgtcacatcatgaggaatgtgaaaggacctgtgagagaaggagacattctcaccctactcgagtctgaaagggaagcaagaagattgcgctagatggtctcttttttttggcttgcctccaaattcgaacaaaagcaatattttt

SEQ ID NO: 8679 - DNA, 355 bp, Glycine max
  Clone ID: LIB3039-038-Q1-E1-G8
gcacaagtgagtttgttgatcgagataactagaaacagtgtgatgaaaatgaaggtccttgttttcttcgttgctacaattttggtagcatggcaatgccatgcgtacgatatgttccctctccgaatgaacactggctatggtgcccgtactccggaggtgaaatgcgcaagttggaggcttgctgtggaagcacacaacatccttggctttgagaccattcctgaagagtgcgttgaagcaacaaaggaatacatccatggcgaacaatatagatcagactccaaaacagttaaccaacaagcttacttttatgccacagacctcgaagtccatcccaaggacacatttgtgt

SEQ ID NO: 8680 - DNA, 410 bp, Glycine max
  Clone ID: LIB3039-038-Q1-E1-G9
gatcaccacttggacgcaaaaatggcacctgcaacactgtctccgtctctcctcctcctgttctcactcagcatcgccgtaaccgttagatcgagcgactacgactacgattgtgtgtacactgcatacgttagaaccggttcggtgttgaagggcggaacggactctaagatcgggctgaagctgtacgacaagtacggctactacatctacattaaaaacctcgaagcatggggcggcttgatgggcaagggctacgactacttcgagcgcggcaacctcgacatcttcagcggaaggggaccctgtcttgacggacccgtctgtgccgttaacgttacttctgacggatcgggttctcaccacgggctggtacttaactacgtccaggtcacctccactgggcccca

SEQ ID NO: 8681 - DNA, 239 bp, Glycine max
  unsure (1)..(239): unsure at all n locations
  Clone ID: LIB3039-038-Q1-E1-H1
gaaggtgcaagagtttgttgtgagctataagctagtttatcgtgaggagaatatgaagttgtttgttttctttgttgctgcagtagttttggtancatggccatgccatggcgcaggctaccaaaggttccctctccgaatgaaaactggctatggtgagcgttcttcggaggtaaaatgcgcaagttttaggcttgctgtggaagcacacaacatccgagcctttaaaaccattcctg

SEQ ID NO: 8682 - DNA, 404 bp, Glycine max
  Clone ID: LIB3039-038-Q1-E1-H10
ggcacaagtgagtttgttgatcgagataactagaaacagtgtgatgaaaatgaaggtccttgttttcttcgttgctacaattttggtagcatggcaatgccatgcgtacgatatgttccctctccgaatgaacactggctatggtgcccgtactccggaggtgaaatgcgcaagttggaggcttgctgtggaagcacacaacatctttggctttgagaccattcctgaagagtgcgttgaagcaacaaaggaatacatccatggcgaacaatatagatcagactccaaaacagttaaccaacaagcttacttttatgccagagacctcgaagtccatcccaaggacacatttgtgttcagtatagatggcaccgtactctccaatattccataactacaaaaac

SEQ ID NO: 8683 - DNA, 401 bp, Glycine max
  Clone ID: LIB3039-038-Q1-E1-H11
gtacttatgattatagcagtgacatctggagtttgggtatggtagtgcttgagtgtgccataggacggtttccttatatacagtctgaagatcagcaaagctggcctagtttttatgagcttctggcagcaattgtggaaagccccccaccttctgctccacccgatcagttctcccctgagttctgtacattcgtgtcatcctgcatccaaaaggatcctcgggatagattaacatcattggagctactggatcatcctttcataaaaaagtttgaagataaagatctagatcttgggattttggtaggtggcttggaacctcctgtaaactttccgagataatttttacaatagagtgtaaaatttgtactagacagccacaactcttggtgatggaac

SEQ ID NO: 8684 - DNA, 152 bp, Glycine max
  Clone ID: LIB3039-038-Q1-E1-H12
aaacaacacaaaggggggagtttgctgatcgcaatacatagaccaagtgtaatagctcatgcattgccctgctttcctcgcctcctagcagtttagcaccatagcaatgccacacgtatcagaagttccctctgcaaactcagacaggatat

SEQ ID NO: 8685 - DNA, 216 bp, Glycine max
  Clone ID: LIB3039-038-Q1-E1-H2
ggcacaagtgagtttgttgatcgagataactagaaacagtgtgatgaaaatgaaggtccttgttttcttcgttgctacaattttggtagcatggcaatgccatgcgtacgatatgttccctctccgaatgaacactggctatggtgcccgtactccggaggtgaaatgcgcaagttggaggcttgctgtggaagcacacaacatctttggctttga

SEQ ID NO: 8686 - DNA, 339 bp, Glycine max
  Clone ID: LIB3039-038-Q1-E1-H5
ggagtgctttctttctgtaactaacttgttccctcgttaaccctaatcatcaactcaagcagtgaatgaatctgtggacggacgagaactcctcggtgatggaggccttcatgtcgtcctccgatctctcctcaatctggccctcgccggcgccgccgcaatccacggcggtcttcaatcaggacaccctccagcatcgcctgcaggccttgatcgaaggcgcccgagagacctggacctacgccatcttctggcagtcctcttatgactattctggctccactctcctcggctggggcgacggttactacaaaggcgacgacgacaaagccaaagcca

SEQ ID NO: 8687 - DNA, 272 bp, Glycine max
  Clone ID: LIB3039-038-Q1-E1-H6
gatttatccctctcttagccatcgttgttcataatcattacacatcataggctctctctctagggtttgatcagactcaagggtttaagccatgggaaaaaggaaggcaaaggcaaagcctcctccaaagaagcgaatggataagctcgataccgtcttcagctgccctttctgcaatcatggcagcagcgtcgaatgccgccttgacatgaagaacttgataggggaagctatttgcgggatatgccaagagagctttagcactaacatca

SEQ ID NO: 8688 - DNA, 348 bp, Glycine max
  Clone ID: LIB3039-038-Q1-E1-H7
gctttttgtttggggttttctgattaactctttcttctcataactctgccgccgcaacagccccaaatccaatggcttcagagaagaaactttcgaacccaatgagggagataaaggtgcagaagctcgttctcaatatctctgttggcgagagtggagatcgtctcaccagagccgccaaggtgtcggaacaacttagtggccaaaccccagtgttttccaaagcaaggtacactgttcgttcctttgggattagaagaaatgagaagattgcatgctatgtcactgtcagaggtgacaaggcaatgcaacttttggagagtggtttgaaggttaaggaatatgaac

SEQ ID NO: 8689 - DNA, 339 bp, Glycine max
  Clone ID: LIB3039-038-Q1-E1-H8
gataatgtggctgattggtaacgtagtgaatcctgtgcatacatccgctcgtagcctcttcctgcgactctcttctcagtgggtctccgtattctccctcaatcctattaaccttttcttctttcatttcccaccccattctataatcaatcagtgtcaatggcttcttcaatcgctaatgcgccttctgcgttcaattctcagtactactttggtctcagaacgccactgaggtccttcaacttttcttctcctcaagctgccaaacttccacgctcgcattgccttttcgtcgtcagagcctccgattcggtcttcgaaaccgccgttgtcgccggt

SEQ ID NO: 8690 - DNA, 408 bp, Glycine max
  Clone ID: LIB3039-038-Q1-E1-H9
gaaggtgcaagagtttgttgtgagctataagctagtttatcgtgaggagaatatgaagttgtttgttttctttgttgctgcagtagttttggtagcatggccatgccatggcgcaggctaccaaaggttccctctccgaatgaaaactggctatggtgagcgttcttcggaggtaaaatgcgcaagttttaggcttgctgtggaagcacacaacatccgagcctttaaaaccattcctgaagagtgcgttgaaccaacaaaggactacattaatggcgaacaatttagatcagactctaaaacagttaaccaacaagctttcttttatgctagtgaacgcgaagtccatcacaacgacatatttatattcggcatagataacaccgtactctctaatatcccatacta

SEQ ID NO: 8691 - DNA, 375 bp, Glycine max
  Clone ID: LIB3039-039-Q1-E1-A1
ggattgattccctcattcttcatccatagacatggccaccgtcacttctgcagccgttgctattccctcattcactggcctcaaggcaagcgcaggcaaagtgagtgccgcagttaaagtctcagctccccaagccacaaggttgggcatcaaggcttcgctgaaagacgttggagtcgctgttgtggccactgccgcgagtgcagtgctggctagcaacgccatggccattgaagtgttgctgggtggtgatgaccggtccctggctttcgttcgcaacaatttccccgtggcctctggggagaagatcgtgttcaagaacaacgcaggtttcccccacaacgttgtgttcgacgaggacgagattcctagcgg

SEQ ID NO: 8692 - DNA, 339 bp, Glycine max
  Clone ID: LIB3039-039-Q1-E1-A10
atcatttaagaaggcaacaggacaaaaaccattgagaataatcttttacagggatggggtaagtgagggacagttctaccaggttttgctatatgagcttgatgccattcgcagggcttgtgcatccttggaacctagttaccaacctccagtaacatttgtagttgttcaaaaacggcatcacgctagactcttcgcaaacaatcatgacgacagaaatagcactgataagagtgggaatatcttacctggtactgtggtagattctaagatctgtcatccttccgaattcgacttctacttatgcagtcatgcacgaattcatggtacaagtagacc

SEQ ID NO: 8693 - DNA, 335 bp, Glycine max
  Clone ID: LIB3039-039-Q1-E1-A11
gatccatctttttcttcttactctagactcttctttttctctaagtctaaggggtgccctgagatcactttgagcaatggtgaaagctgtggcagttcttggcagcagcgacggtgtcactggaactattttcttcactcacgaaggaaatggtccaaccaccgtaactggatctcttgctggtcttaagcctggtctccatggcttccatgtccatgccttgggggacactatcaatggttgcctgtcaactggagcgcatttcaatcctaataacaacgatcaccgtgcccctgatgacgagaatcgtcatgccggtgatcttgggaatgtta

SEQ ID NO: 8694 - DNA, 309 bp, Glycine max
  Clone ID: LIB3039-039-Q1-E1-A12
gacaacatcctaaaattgattttggtccatttgaaattaccaattaccaaagatgtttggaatcatcggaggaaacaagggtcacaagataaaggggaacttggtgattatccaaaaaaatttgttggaaatcacaaacattacaatgtgttaagggtctcaccggaaccggcattaacaccattgggagactcctccacaccgtaagcgctttggtctcacatatctatatacatcacaatagtgacaacagcgcatatacacatgagaaagaaaaagttggaaacgctacaaatttaagaagacaag

SEQ ID NO: 8695 - DNA, 396 bp, Glycine max
  Clone ID: LIB3039-039-Q1-E1-A2
ggcacaagtgagtttgttgatcgagataactagaaacagtgtgatgaaaatgaaggtccttgttttcttcgttgctacaattttggtagcatggcaatgccatgcgtacgatatgttccctctccgaatgaacactggctatggtgcccgtactccggaggtgaaatgcgcaagttggaggcttgctgtggaagcacacaacatctttggctttgagaccattcctgaagagtgcgttgaagcaacaaaggaatacatccatggcgaacaatatagatcagactccaaaacagttaaccaacaagcttacttttatgccagagacctcgaagtccatcccaaggacacatttgtgttcagtatagatggcaccgtactctctaatattccatacta

SEQ ID NO: 8696 - DNA, 398 bp, Glycine max
  Clone ID: LIB3039-039-Q1-E1-A4
gacaacacaacgcaacacaacgcgcactctctcttttctctcttaacacaaaaaccctatcgttcttcgcggtttcgccgattctcgccatgccgaaagccaaatccgacgccaaagccgccgatagccggttgaagcgcaagggcgctggtgctggaaggaagcaatcgaagaaagctgctaaggatcctaacaagccaaagagacctccaagcgctttcttcgttttcatgtccgagttcagagagcagtttaagaaggagcatcctaacaacaaatccgtcgctgttgtcggtaaagctggtggtgacaaatggaaatcgctgtctgatgctgaaaagggccccttcgttgccacggccgaaaagaagaaacaagagtatgagaaaactattttg

SEQ ID NO: 8697 - DNA, 396 bp, Glycine max
  Clone ID: LIB3039-039-Q1-E1-A5
ggcagtccaattccaatatattccattctctctgtgtatttccctacctctcccttcaagatgcagatcttcgtcaagaccctcaccggcaagaccatcacccttgaggtggaaagctctgacaccatcgacaacgtcaaggccaagatccaggacaaggaaggaatccccccggaccagcaacgtctcattttcgccggaaagcaacttgaggacggccgtacccttgctgactacaacattcagaaggagagtactcttcacctcgtcctccgtctccgtggtggcatgcagatcttcgttaagacactcaccggcaagaccataaacctagaggttgaaagctccgacaccatcgataacgtcaaggccaagatccacgacaaggagggtatc

SEQ ID NO: 8698 - DNA, 325 bp, Glycine max
  Clone ID: LIB3039-039-Q1-E1-A6
atactataacaattaaattaaataaataaaaatgtttgatttatcaatgtaatattttcctttaaaaaatgttctatcgggcattaatttatacaatatcaactgagagcttcgaaatgtctaattagtttttcagagttacgaattaatttgcgcttagtaaaaatttgactttaatatattttagcgttcgcaagagtactacatccagcatcatttgatctatgcatagctttcactcttttacaggcaatctcattgtaaatagttcaataaattatgatttctaaaccttgaagagtgcaacaatggctcccactcatac

SEQ ID NO: 8699 - DNA, 381 bp, Glycine max
  Clone ID: LIB3039-039-Q1-E1-A7
ggagcaaaaccctaatccctatttttcttcctcagtagtgtcatttacgcttctcttctctgcagcaactatgcctaaccctaaggtcttcttcgacatgaccatcggcggtcaatctgctggccgcatcgtgatggagctctacgccgacgtcactccccgcaccgccgagaacttccgcgcgctttgcaccggcgagaagggcgtagggcggagcggcaagcccctccactacaagggctcgtccttccaccgcgtgatcccgagtttcatgtgtcagggtggcgacttcaccgccggaaacggaaccggcggcgagtcgatttatggcgccaagttcgccgacgagaacttcgtgaagaaacacaccggtcccggcat

SEQ ID NO: 8700 - DNA, 391 bp, Glycine max
  Clone ID: LIB3039-039-Q1-E1-A8
ggcacaagtgagtttgttgatcgagataactagaaacagtgtgatgaaaatgaaggtccttgttttcttcgttgctacaattttggtagcatggcaatgccatgcgtacgatatgttccctctccgaatgaacactggctatggtgcccgtactccggaggtgaaatgcgcaagttggaggcttgctgtggaagcacacaacatcgttggctttgagaccattcctgaagagtgcgttgaagcaacaaaggaatacatccatggcgaacaatatagatcagactccaaaacagtgaaccaacaagcttacatttatgccagaaacctcgaagtctatcccaacgacacatttgtgttcactatagatggcaccgtactcgctaatattcca

SEQ ID NO: 8701 - DNA, 335 bp, Glycine max
  Clone ID: LIB3039-039-Q1-E1-A9
gatcttcgcccggaaaagaaaggggggaagaagaaagaaccgttcctttatgatcgaaaaggtgcctttggtcatcatcgcggtgttaatcttggtggtgcaatcctctgcagcgttccacggtataaacagaatcatgaaggtccaccctgttcctcgaaaacgcaacatctcaatccaatttggcggcgacgggggcaacccgatgtcggaggctcatgcgctgttggggatcgccgggaagaagctccggcgactaccgcacgtgttcaactgcgtgctggagctgcccttccgctccgacgccgacgtttgcgtggaggaaaccccgactg

SEQ ID NO: 8702 - DNA, 183 bp, Glycine max
  Clone ID: LIB3039-039-Q1-E1-B1
ccatcggtggtcaatctgctggctgcatcgtgatggagctctacgccgacgtcactccccgcaccgccgattaacattgtgctcattcctaatgtaagaagggcttagtgcggagcgggaatcccctccactagaacggctcgtcctttcactgcgtgattccgagtttcatgtgtcagggtg

SEQ ID NO: 8703 - DNA, 372 bp, Glycine max
  Clone ID: LIB3039-039-Q1-E1-B10
gagggcgaggaagccacatagagacacaatacagagtgagttgttgctccttcgccacaactctctgccaacatgggtatctccagagattctatgcacaagaggcgtgccactggtggcaagaagaaggcctggaggaaaaagagaaagtatgagcttggtcgccagcctgctaacactaagctgtcaagcaacaagacagtcaggaggatccgtgttagaggtggaaatgtgaaatggagggcattgagattggatactggaaattactcctggggaagtgaagctgtaactcgcaagactcgtgtactagatgtggttttaaatgcctcaaacaatgaagcttgtgcgtactcaaactcttgtcaaaag

SEQ ID NO: 8704 - DNA, 397 bp, Glycine max
  unsure (1)..(397): unsure at all n locations
  Clone ID: LIB3039-039-Q1-E1-B11
gatgttctgttctacttgctctcaagtttcatcttgggctgtaggctgtagcataccatgaccaccaaggatccaaaatccgtgtacgactttgttgtcaaggatgctaagggagatgatgtanatctctccttttacaagggaaaagtccttctgattgtcaatgttgcttctcaatgcggcttgaccaactccaattatacggagctgaatcaattgtatgacaagtataaagaccaaggcctggagattctggcatttccatgtaatcaatttggtaagcaagaaccagaaagcaatgataaaattgtggattttgtctgcagtcccttcaaatccgaaatccccatccttgaaaagattgacatgaatggggacaattctgctcctttgtaca

SEQ ID NO: 8705 - DNA, 385 bp, Glycine max
  Clone ID: LIB3039-039-Q1-E1-B12
ggttgtggtgtagactgtcgagcagtgaataccagttgctcctatagccggcgctcaacaacatggcggacaaggcagtcaccatccgaaccagaaagttcatgacgaacaggcttctctccagaaagcaattcatcgttgatgtccttcatccagggagggctaatgtttccaaggctgaactgaaggagaaattgggcagaatgtatgacgtgaaagacactaacactgtatttgtcttcaagtttcgaactcattttggtggtggcaagtccactgggtttggtttgatctatgattcagttgagaatgccaagaagtacgagcccaagttcaagcttatcacgaatggacttgatactaaagtagagaaatcaaggaagca

SEQ ID NO: 8706 - DNA, 400 bp, Glycine max
  Clone ID: LIB3039-039-Q1-E1-B2
gcctcatctcaagccacttcagagaaaatggcggtacctctgctctcgaagaagatcgtgaagaagagggtgaagaagttcaagaggcctcagagtgacaggaaaatttccgtcaagacaaactggcgtagaccaaagggtatagattcccgtgttaggagaaagttcaagggatgcactttgatgccaaacatcggttatggttctgacaagaagacccgccactatctccctaatggttttaagaaatttgttgttcacaatgtgaaggacttggaactgctcatgatgcacaacaggacttactgtgctgagattgctcacaatatatccacaagaaagagaaaagatatagttgagagagctgcgcaacttgatgttgttgtgacaaacaaaacag

SEQ ID NO: 8707 - DNA, 325 bp, Glycine max
  Clone ID: LIB3039-039-Q1-E1-B3
gacacacagagcggttctcatattttggagaatccgaaaaacacgttaaagaaagtcccattcccactaccgaagcaaattaagaagatgaagcagcagagagtggagtttatgggcatgggcatgggcatgggcatgggcctgggccttttggtggtgatgatggcatgtgggtcggcgagtggtgcggatgatttggcaaccaagtgttcagcggtgattcagaaggtaataccgtgtttggatttcgcgaaggggaaggaagaaacgcccaaaaagcaatgttgcgacgcagcaacgttcatgaaacgagagcaacccagag

SEQ ID NO: 8708 - DNA, 397 bp, Glycine max
  Clone ID: LIB3039-039-Q1-E1-B4
gacaacacaacgcaacacaacgcgcactctctcttttctctcttaacacaaaaaccctatcgttcttcgcggtttcgccgattctcgccatgccgaaagccaaatccgacgccaaagccgccgatagccggttgaagcgcaagggcgctggtgctggaaggaagcaatcgaagaaagctgctaaggatcctaacaagccaaagagacctccaagcgctttcttcgttttcatgtccgagttcagagagcagtttaagaaggagcatcctaacaacaaatccgtcgctgttgtccgtaaagctggtggtgacaaatggaaatcgctgtctgatgctgaaaacgccccttcgttgccacggccgaaaagaagaaacaagagtatgagaaaactattttg

SEQ ID NO: 8709 - DNA, 390 bp, Glycine max
  Clone ID: LIB3039-039-Q1-E1-B5
ggttctagtgtatgtgattgttgtgactcgttcttcttcgtcgttatcttcttcttttgttgtttgtgtgtttgttttttctctcacctgaaaatgtcttgctgcggtggtaactgtggttgcggaagcgcctgcaagtgcggcaacggctgcggaggctgcaagatgtacccagacttgagctacaccgagtcaaccaccaccgagaccttggtcatgggagtggcaccagttaaggctcaattcgagagtgctgaaatgggtgttcccgctgagaacgatggctgcaaatgtggagctaactgcacctgcaacccctgcacttgcaagtgacgtgttggagagctaaagcttcaagcagaaatggccttagaaataatgataaaaact

SEQ ID NO: 8710 - DNA, 389 bp, Glycine max
  Clone ID: LIB3039-039-Q1-E1-B6
gaatcaaatttctcagatctatccgacgtcgtcgcagatccaccaaccgttatggctgccttcagcggtgatgaaacggctccgtttttcggcttccttggagccgcagctgccctcgtcttctcctgtatgggagctgcctatggcacagcaaagagtggtgtgggcgtggcttccatgggtgtgatgagacctgagctggtgatgaagtctattgtccctgttgtcatggctggagttttgggtatttatggccttattattgctgttattatcagtaccggtattaatccaaaggccaaatcttattacctctttgatggttatgcacatctctcctctggtcttgcctgtggcttggctggcctttctgctggcatggctattgg

SEQ ID NO: 8711 - DNA, 310 bp, Glycine max
  Clone ID: LIB3039-039-Q1-E1-B7
gcgctctttctgtcacacactcacattccggtgcaaaatgaaggtcatcgccgcctacttgctcgccgtattgggaggcaatgcagccccttccgctgacgacttaaggaccatccttggctccgttggagctgacgcgaatgatgacaacatcagcaacttcttgcctgaagttaagggcaaagacattgcggagcttatcgccgccggtacggaaaagttggcctccgtgccttctggcggtggcgccgcagtttccgtggccgctgctcacggtggtggcgctgctgcaccggctgccgccgaatct

SEQ ID NO: 8712 - DNA, 385 bp, Glycine max
  Clone ID: LIB3039-039-Q1-E1-B8
gggcgaaaacccgaaaagcttaatcgcttcgtgttcagttctccgatccaaacagaaccttattattatcattcccctttccgttttctcgttctcctttcagtttcagcgagaaaacgaaaacgaaaacgcgcttcgttcgatcgcgtgcgtgcgtcgcaatgaacaacgatttcgtttggcttccttcgctgtattccgatccggaactattcacctatctggagccattcgtgttccgcagttctccgagctcgcatttcctgcaatcgatggcgaacaattccagaagcttcgcgctcgaggaggcgttcggacacgtgtcgcggttcgccggggcgttgctgttctgggtctcgcgcgcgtcgagtttcaatttggggcg

SEQ ID NO: 8713 - DNA, 330 bp, Glycine max
  Clone ID: LIB3039-039-Q1-E1-B9
gacacttcaaaatcctctggtaacccttattttatctattctctctctttcttttgtgttctaagcagctagaagcaatggagaggaaaagaagccatgcctctttcaccatgtttgcaatgcttgttggagtgatctctcagagccttgtcattcctgtagtatccaccactgttgaagatcagaagaactactacaccccagatccacatgctggaagtcccccctcaggctcacacagtagtactcctccatctcatggccatggaagctctccaccctcacatcatcacagtagtccaagtactccatcaacaccctcaggtggaa

SEQ ID NO: 8714 - DNA, 380 bp, Glycine max
  Clone ID: LIB3039-039-Q1-E1-C1
ggcacaagtgagtttgttgatcgagataactagaaacagtgtgatgaaaatgaaggtccttgttttcttcgttgctacaattttggtagcatggcaatgccatgcgtacgatatgttccctctccgaatgaacactggctatggtgcccgtactccggaggtgaaatgcgcaagttggaggcttgctgtggaagcacacaacatctttggctttgagaccattcctgaagagtgcgttgaagcaacaaaggaatacatccatggcgaacaatatagatcagactccaaaacagttaaccaacaagcttacttttatgccagagacctcgaagtccatcccaaggacacatttgtgttcagtatagaatggcacgtactct

SEQ ID NO: 8715 - DNA, 394 bp, Glycine max
  Clone ID: LIB3039-039-Q1-E1-C10
ggcacaagtgagtttgttgatcgagataactagaaacagtgtgatgaaaatgaaggtccttgttttcttcgttgctacaattttggtagcatggcaatgccatgcgtacgatatgttccctctccgaatgaacactggctatggtgcccgtactccggaggtgaaatgcgcaagttggaggcttgctgtggaagcacacaacatctttggctttgagaccattcctgaagagtgcgttgaagcaacaaaggaatacatccatggcgaacaatatagatcagactccaaaacagttaaccaacaagcttacttttatgccagaggcctcgaagtccatcccaaggacacatttgtgttcagtatagatggcaccgtactctctaatattccatac

SEQ ID NO: 8716 - DNA, 397 bp, Glycine max
  Clone ID: LIB3039-039-Q1-E1-C11
ggcacaagtgagtttgttgatcgagataactagaaacagtgtgatgaaaatgaaggtccttgttttcttcgttgctacaattttggtagcatggcaatgccgtgcgtacgatatgttccctctccgaatgaacactggctatggtgcccgtactccggaggtgaaatgcgcaagttggaggcttgctgtggaagcacacaacatctttggctttgagaccattcctgaagagtgcgttgaagcaacaaaggaatacatccatggcgaacaatatagatcagactccaaaacagttaaccaacaagcttacttttatgccagagacctcgaagtccatcccaaggacaaatttgtgttcagtatagatggcaccgtactctctaatattccatactac

SEQ ID NO: 8717 - DNA, 391 bp, Glycine max
  Clone ID: LIB3039-039-Q1-E1-C12
ggggaaaatttgtcaaataaattcatctaaccccaaacaaaaccctagcacacttttatcgcttagtggcagcagcagtggcggcaagcaactccatccgcaatgggaatcgatttgaaggcaggaggtaagtccaagaagaccaagcgaaccgcccccaaatccgatgatatctacctcaagcttctcgtcaagctgtaccgttttcttgttcggaggactgggagtaacttcaatgctgttgtcctcaagcgccttttcatgagcaaggtcaacaagcccccgctatccctctctagattgatccgttacacgaagggaaaggaggataagatagctgtggtttgttggtgccgtgaccgatgacattacggtttatgaaatccctgct

SEQ ID NO: 8718 - DNA, 397 bp, Glycine max
  Clone ID: LIB3039-039-Q1-E1-C2
gattctgattctgtccatccaaatcttaaaaatattcagtgaagatcaacctcaatggcatctcttggcgtgcgaccagttcttccccctccattaacttccatctccgacccacctcctcttttcgatggcaccaccaggttgtacatcagttattcttgcccctatgcacaacgtgtgtggatcgctaggaactacaaggggctacaagataagatcaatttggtccctattaaccttcaagacaggccagcttggtataaggagaaagtctaccctgaaaataaggtgccatccttggagcacaatggcaacgtgttgggagaaagtcctgatttgatcaaatatgtagatgcagactttgaagggacacctttgttttccagtgatcctgcca

SEQ ID NO: 8719 - DNA, 356 bp, Glycine max
  Clone ID: LIB3039-039-Q1-E1-C3
ggcacaagtgagtttgttgatcgagataactagaaacagtgtgatgaaaatgaaggtccttgttttcttcgttgctacaattttggtagcatggcaatgccatgcgtacgatatgttccctctccgaatgaacactggctatggtgcccgtactccggaggtgaaatgcgcaagttggaggcttgctgtggaagcacacaacatctttggctttgagaccattcctgaagagtgcgttgaagcaacaaaggaatacatccatggcgaacaatatagatcagactccaaaacagttaaccaacaagcttacttttatgccagagacctcgaagtccatcccaaggacacattttgtg

SEQ ID NO: 8720 - DNA, 400 bp, Glycine max
  Clone ID: LIB3039-039-Q1-E1-C4
ggagcgaaagaggggttttggaacgtgcaagatccggtgctctaatctctgcattctgtgatggctccaaaaccgataacgagtcccgtccccgattcgtggtaccccacgctctccgtcttcaccctcgccatcggcctcgtcttaaccgcctctttcttcatttatgaagcaacatcttctaggaaaagtcgttcacttgttcaggagctgacaactggtgcagtggcttcagtcttcttgggttttgggtccttgttcctcctacttgcttctggtgtttatgtctaatttaaacattgaattggatgaaaattttgctaagcagatagctttaaatgaaaaattgcattggacgttttagtttgatatccgactctaaggtatgttcttaatctat

SEQ ID NO: 8721 - DNA, 393 bp, Glycine max
  Clone ID: LIB3039-039-Q1-E1-C5
ggagttgagaggatcgtgagaggggcagtagccgagattccgtgagttgcaaaaatgaagacgattctttccaccgagaccatgaacatcccggacggcgtgagcatcaaagttcatgccaaggtcatcgaagttgagggcccccgcggaaaattggtgcgagacttcaagcatttgaatctcgattttcagctcattactgacgaaaacggtaaaagaaagctgaaaatcgacgcgtggtttggttctcggaaaacatccgccgccattcgcaccgccttgagccacgtggagaatcttatcaccggcgtcaccaagggctaccgctacaaaatgaggttcgtttatgcccattttcccatcaacgcaagcatcggcaacagcaacaagtct

SEQ ID NO: 8722 - DNA, 380 bp, Glycine max
  Clone ID: LIB3039-039-Q1-E1-C6
gaacatcatcatcaacaacaagcagatcaatctctctctctctctcaaccataatagtcatgggtttgaaggaggattttgagcagtatgctgagaaagcaaagactttgccaccgactcaatcaaacgaagacttgcttatcctttatggattgtacaaacaggccaccgttggacctgtcaacaccagccgtcctggaatgttcaacatgagggacagagctaaatgggatgcatggaaggctgttgaagggaaatccaaggacgaagcaatgggtgattacatcattaaggtgaaacagctgctggaagcagctggcttgcctgcttgataacattgtcatgccttgctttctgattctgtgctagaagttcacaac

SEQ ID NO: 8723 - DNA, 376 bp, Glycine max
  Clone ID: LIB3039-039-Q1-E1-C7
ggtgcacaagtgagtttgttgatcgagataactagaaacagtgtgatgaaaatgagtgtccgtgttctcctcggtgctacaattttggtaacatggcaatgccatgcgtacgatatgttccctctccgaatgaacactggctatggtgcccgtactccggatgtgaaatgcgcatgttggacgcttgctgtggaaacacacaatatctttggctttgagaccactcctgaagagtgcgttgacgcaacacgggaatacatccatggagaacaatatatatcagactccaaaacagttaaccaacacgcttacttatatgccagagatctcgatgtccatcccagggacacatttgtgtacagtatagatggcaccg

SEQ ID NO: 8724 - DNA, 391 bp, Glycine max
  Clone ID: LIB3039-039-Q1-E1-C8
ggcacaagtttgttgagatagctagaagcaataagatgaaaatgaaagtgcttgttttgtttgttgctacagttttggtagcatatgaatgccatggctcagactaccagaagttccctctccaaatgaaaactgggtttggtgggcaatacagcaatgaggtggcatgtgccagttggaggcttggcgtggaagcaaacaacgtagtcaagtggcaaactgttcctgcagcttgcggagagtacatagctgactacgttctacgagaccaatatagatcagattccaaaacagttaaccaacaagcttatttctatgctaaatccctcaaactcaccaacaaagatgtctttgtcttggacgttgacgacactactctctctaatctcca

SEQ ID NO: 8725 - DNA, 385 bp, Glycine max
  Clone ID: LIB3039-039-Q1-E1-C9
gactcatccttcattaccaagcatatctcatttgaatacattccttgtagtttatactgaaagatgggtttgaagatggcgttactgatcctaggcctttccctcatgctccttttggtctcctctgaggtggcatccacgaatacaaaagaggaggcaaatggagtggatgatgccaaatatcccggtggaagctatggagggggttacccaggtcatggcggtggcggttatcctggccatggcggtggcggttatcctggccatggcggtggtggtggctatcctggtcatggtggtggccaccctggtcatggtggcggctaccctggccgtggtggtggatactgtacgcatggctgttgccgtggccggacatacaacg

SEQ ID NO: 8726 - DNA, 367 bp, Glycine max; identical to SEQ ID NO: 7990
  Clone ID: LIB3039-039-Q1-E1-D1

SEQ ID NO: 8727 - DNA, 395 bp, Glycine max
  Clone ID: LIB3039-039-Q1-E1-D10
ggcacaagtgagtttgttgatcgagataactagaaacagtgtgatgaaaatgaaggtccttgttttcttcgttgctacaattttggtagcatggcaatgccatgcgtacgatatgttccctctccgaatgaacactggctatggtgcccgtactccggaggtgaaatgcgcaagttggaggcttgctgtggaagcacacaacatctttggctttgagaccattcctgaagagtgcgttgaagcaacaaaggaatacatccatggcgaacaatatagatcagactccaaaacagttaaccaacaagcttacttttatgccagagacctcgaagtccaatcccaaagacacattttgtgttcagtatagatggcaccgtactctctaatattccata

SEQ ID NO: 8728 - DNA, 379 bp, Glycine max
  Clone ID: LIB3039-039-Q1-E1-D11
gcacaagtttgttgagatagctagaagcaataagatgaaaatgaaagtgcttgttttgtttgttgctacagttttggtagcatatgaatgccatggctcagactaccagaagttccctctccaaatgaaaactgggtttggtgggcaatacagcaatgaggtggcatgtgccagttggaggcttggcgtggaagcaaacaacgtagtcaagtggcaaactgttcctgcagcttgcggagagtacatagctgactacgttctaggagaccaatatagatcagattccaaaacagttaaccaacaagcttatttctatgctaaatcgctcaaactcaccaacaaagatgtctttgtcttggacgttgacgacactactctc

SEQ ID NO: 8729 - DNA, 394 bp, Glycine max
  Clone ID: LIB3039-039-Q1-E1-D12
ggcacaagtgagtttgttgatcgagataactagaaacagtgtgatgaaaatgaaggtccttgttttcttcgttgctacaattttggtagcatggcaatgccatgcgtacgatatgttccctctccgaatgaacactggctatggtgcccgtactccggaggtgaaatgcgcaagttggaggcttgctgtggaagcacacaacatctttggctttgagaccattcctgaagagtgcgttgaagcaacaaaggaatacatccatggcgaacaatatagatcagactccaaaacagttaaccaacaagcttacttttatgccagagacctcgaagtccatcccaaagacacaattgtgttcagtatagatggcaccgtactctctaatattccatac

SEQ ID NO: 8730 - DNA, 400 bp, Glycine max
  Clone ID: LIB3039-039-Q1-E1-D3
ggcacaagtgagtttgttgatcgagataactagaaacagtgtgatgaaaatgaaggtccttgttttcttcgttgctacaattttggtagcatggcaatgccatgcgtacgatatgttccctctccgaatgaacactggctatggtgcccgtactccggaggtgaaatgcgcaagttggaggcttgctgtggaagcacacaacatcttcggctttgagaccattcctgaagagtgcgttgaagcaacaaaggaatacatccatggcgaacaatatagatcagactccaaaacagttaaccaacaagcttacttttatgccagagacctcgaagtccatcccaacgacacatttgtgttcagtatagatggcaccgtactctctaataatccatactacaaa

SEQ ID NO: 8731 - DNA, 385 bp, Glycine max
  Clone ID: LIB3039-039-Q1-E1-D5
ggagaagaaaaaggaagaaaggtaatagagagagagagaaagagaagaggagagagaaacaaagaagagtgttcccacattacatggcctccttgcccttggggcaccaccaccatcaccaaccggcggcggcgactatacacccgtcgcaaccgccgcagtgtcagccgcaacccgaagttcctcgccggagctccgatatggagaccgataaggatatgtcagctactgtcattgaggggaatgatgccgttactggccacataatctccaccacaattggaggcaaaaatggggaacctaaacagaccatcagttacatggcagaacgtgttgttggcactggatcatttggagttgttttccacgcaaagtgcttggagac

SEQ ID NO: 8732 - DNA, 379 bp, Glycine max
  unsure (1)..(379): unsure at all n locations
  Clone ID: LIB3039-039-Q1-E1-D6
gaaccaaaagcatctatttctctctctctcgttttctcacacactcgcactttctctctctaaaaaccaccatttccgaggtcgagttttctggctctatttatatggtgtgtaatccgtgtttcgttgttgcgtgcgcgtgcgatttggaatctggtggtgcgaggggcatttgaatgtgagagaggattttttgatttttttttggattcgcggtaggtagatcggcgatggcggaggtttccggcgacggcggcggcgccgcgctgtcggtgtcgggatcgttcaaggaggggagaggctcggcaaggcngcgcggcggcggaggacgagtgacgccgcccagcatggacgccgacgagttcatgaatttgttgca

SEQ ID NO: 8733 - DNA, 393 bp, Glycine max
  Clone ID: LIB3039-039-Q1-E1-D7
ggcacaagtgagtttgttgatcgagataactagaaacagtgtgatgaaaatgaaggtccttgttttcttcgttgctacaattttggtagcatggcaatgccatgcgtacgatatgttccctctccgaatgaacactggctatggtgcccgtactccggaggtgaaatgcgcaagttggaggcttgctgtggaagcacacaacatctttggctttgagaccattcctgaagagtgcgttgaagcaacaaaggaatacatccatggcgaacaatatagatcagactccaaaacagttaaccaacaagcttacttttatgccagagacctcgaagtccatcccaaggacacatttgtgttcagtatagattgcaccgtactctctaatattccata

SEQ ID NO: 8734 - DNA, 393 bp, Glycine max
  Clone ID: LIB3039-039-Q1-E1-D8
ggcacaagtgagtttgttgatcgagataactagaaacagtgtgatgaaaatgaaggtccttgttttcttcgttgctacaattttggtagcatggcaatgccatgcgtacgatatgttccctctccgaatgaacactggctatggtgcccgtactccggaggtgaaatgcgcaagttggaggcttgctgtggaagcacacaacatctttggctttgagaccattcctgaagagtgcgttgaagcaacaaaggaatacatccatggcgaacaatatagatcagactccaaaacagttaaccaacaagcttacttttatgccagagacctcgaagtccatcccaaggacacatttgtgttcagtatagatggcaccgtactctctaatattccata

SEQ ID NO: 8735 - DNA, 394 bp, Glycine max
  Clone ID: LIB3039-039-Q1-E1-D9
ggcatctcaagccttgatctagatatttcacttttcaactttcattgccataccttggtgagtagtgtggccttggtatttgcacaatgaggaagagttacacttttcaaagggtgcctctgctgcttcttctttgcttttgttttgccaattctgctgctgtaactgctaatgaagactctacagctggaactgaggtgaacattgatggcaagcctttacatacaaagccatttccaatagaggaaaagacacttccaataccgttgtttaagcctctaccaaaattggttccaattgttacacctataccaaatcctctgcctatcccagttttccaaaagcctataacaaagtggattccagataataagcctatacaaaatccaattcc

SEQ ID NO: 8736 - DNA, 399 bp, Glycine max
  Clone ID: LIB3039-039-Q1-E1-E1
ggcacaagtgagtttgttgatcgagataactagaaacagtgtgatgaaaatgaaggtccttgttttcttcgttgctacaattttggtagcatggcaatgccatgcgtacgatatgttccctctccgaatgaacactggctatggtgcccgtactccggaggtgaaatgcgcaagttggaggcttgctgtggaagcacacaacatctttggctttaagaccattcctgaagagtgcgttgaagcaacaaaggaatacatccatggcgaacaatatagatcagactccaaaacagttaaccaacaagcttacttttatgccagagacctcgaagtccatcccaaggacacatttgtgttcagtatagatggcaccgtactctctaatattccatactacaa

SEQ ID NO: 8737 - DNA, 395 bp, Glycine max
  Clone ID: LIB3039-039-Q1-E1-E10
ggcagttcaattccaatatattccattctctctgtgtatttccctacctctcccttcaagatgcagatcttcgtcaagaccctcaccggcaagaccatcacccttgaagtggaaagctctgacaccatcgacaacgtcaaggccaagatccaggacaaggaaggaatccccccggaccagcaacgtctcattttcgccggaaagcaacttgaggacggccgtacccttgctgactacaacattcagaaggagagtactcttcacctcgtcctccgtctccgtggtggcatgcagatcttcgttaagacactcaccggcaagaccataaccctagaagttgaaagctccgacaccatcgataacgtcaaggccaagacccaggacaaggagggtat

SEQ ID NO: 8738 - DNA, 299 bp, Glycine max
  Clone ID: LIB3039-039-Q1-E1-E11
ggagtcgaacaagaaagaaaagaaaagaagaggaaaaggagagtggagaggaagaaaaggattgaagttgttgctgtgagaaagagaaagagtgaaatcggagtttgggaaggaattgcaatcaatggatgtgataaagacgcagcaaatctcatctcgaccaatcgagaaggtggtggttcaacctctcgtgcttctcagcatcctcgacaactacaacagagtcgccaaagacactcgcaagcgcgtcgtcggcgtcttgctccgctcctccttcaaaggcaccgtcgatgtcacca

SEQ ID NO: 8739 - DNA, 400 bp, Glycine max
  Clone ID: LIB3039-039-Q1-E1-E12
ggcacaagtgagtttgttgatcgagataactagaaacagtgtgatgaaaatgaaggtccttgttttcttcgttgctacaattttggtagcatggcaatgccatgcgtacgatatgttccctctccgaatgaacactggctatggtgcccgtactccggaggtgaaatgcgcaagttggaggcttgctgtggaagcacacaacatctttggctttgagaccattcctgaagagtgcgttgaagcaacaaaggaatacatccatggcgaacaatatagatcagactccaaaacagttaaccaacaagcttacttttatgccagagacctcgaagtccatcccaaaggacacattttgtgttcagtatagatggcaccgtactctctaatattccatactaca

SEQ ID NO: 8740 - DNA, 395 bp, Glycine max
  Clone ID: LIB3039-039-Q1-E1-E2
ggggagcgagaagcgagaagggagtgaggtttggagaagagagagatgggaaaggagaagaagaggtatcttctgaaaacggaaccgtcggagtggtcgtgggaggaccaggcagcatacggaggcataagcaaatgggatggggtgaagaacaagcaggcccagaaatacctcaagtccatgtccatcaacgacctctgcttcttctaccactccggccccaaggcccgccgtatcgtcggcgttgtttccgtcgtccgcgagtggtacggcgatgctgtcgacgtcaaggctgtcggggagatgaagaagcccgtcgacttaaaagagatgaaacatttcaaggatttcgctctctttaggaaacctaggctccctgttgtcactgttcccga

SEQ ID NO: 8741 - DNA, 397 bp, Glycine max
  Clone ID: LIB3039-039-Q1-E1-E3
gaaggtgcaagagtttgttgtgagctataagctagtttatcgtgaggagaatatgaagttgtttgttttctttgttgctgcagtagttttggtagcatggccatgccatggcgcaggctaccaaaggttccctctccgaatgaaaactggctatggtgagcgttcttcggaggtaaaatgcgcaagttttaggcttgctgtggaagcacacaacatccgagcctttaaaaccattcctgaagagtgcgttgaaccaacaaaggactacattaatggcgaacaatttagatcagactctaaaacagttaaccaacaagctttcttttatgctagtgaacgcgaagtctatcacaacgacatatttatattcggcatagataacaccgtactctctaat

SEQ ID NO: 8742 - DNA, 395 bp, Glycine max
  Clone ID: LIB3039-039-Q1-E1-E4
gaggcccggttgggtcatactgagtcaggcacatcaaaagcaaaagtccaaacgctcccatctcgccaccgtgaacaccccgacacaaacacactccaagcgcacgttagcagtctccgccgtcttcgccaccgtgccatcgccgtcgatggagtctctcttcggctcgatcaacgttcgcgacctcctctcggcgcaggacctctcggaccctaactcccctctctcagcgccggatctccgtctcctgatccagcgcctggagtcgcagtccttccagatccgttctcaggtgcagtcctaccttgtctcgcaccacgaagacttcgcgcgcctcttctctctttgtaacgacaccgtttcgcacacgcgcgacgtctccgatggtgtttccg

SEQ ID NO: 8743 - DNA, 382 bp, Glycine max
  Clone ID: LIB3039-039-Q1-E1-E5
ggcacaagtgagtttgttgatcgagataactagaaacagtgtgatgaaaatgaaggtccttgttttcttcgttgctacaattttggtagcatggcaatgccatgcgtacgatatgttccctctccgaatgaacactggctatggtgcccgtactccggaggtgaaatgcgcaagttggaggcttgctgtggaagcacacaacatctttggctttgagaccattcctgaagagtgcgttgaagcaacaaaggaatacatccatggcgaacaatatagatcagactccaaaacagttaaccaacaagcttacttttatgccagagacctcgaagtccatcccaaggacacatttgtgttcagtatagattgcaccgtactctct

SEQ ID NO: 8744 - DNA, 329 bp, Glycine max
  Clone ID: LIB3039-039-Q1-E1-E6
aagtacacaacactgggggacgtacttcctctacatcccacacggaaacccaagctcagtaagagtaatcgtgtttcgatcttcacttcctcaatctctctctcttccactacaatcatcagtactgctcacattggcatctgtcgcatcaccaacggaacagaacccatgacggccgtcatcattatcaatatcctcagtcacactcgtaacgaagtgaccgtcccttcctccacgttgaacctcccagtcaagtatctgcagcgatttcacatcaacaccaacggcatcatctacgacatcacgttcatcgccattaaactcctcac

SEQ ID NO: 8745 - DNA, 389 bp, Glycine max
  Clone ID: LIB3039-039-Q1-E1-E7
ggcacaagtgagtttgttgatcgagataactagaaacagtgtgatgaaaatgaaggtccttgttttcttcgttgctacaattttggtagcatggcaatgccatgcgtacgatatgttccctctccgaatgaacactggctatggtgcccgtactccggaggtgaaatgcgcaagttggaggcttgctgtggaagcacacaacatctttggctttgagaccattcctgaagagtgcgttgaagcaacaaaggaatacatccatggcgaacaatatagatcagactccaaaacagttaaccaacaagcttacttttatgccagagacctcgaagtccatcccaaggacacatttgtgttcagtatagatggcaccgtactctccaatattc

SEQ ID NO: 8746 - DNA, 378 bp, Glycine max
  Clone ID: LIB3039-039-Q1-E1-E8
ggcacaagtgagtttgttgatcgagataactagaaacagtgtgatgaaaatgaaggtccttgttttcttcgttgctacaattttggtagcatggcaatgccatgcgtacgatatgttccctctccgaatgaacactggctatggtgcccgtactccggaggtgaaatgcgcaagttggaggcttgctgtggaagcacacaacatctttggctttgagaccattcctgaagagtgcgttgaagcaacaaaggaatacatccatggcgaacaatatagatcagactccaaaacagttaaccaacaagcctacttttatgccaaagagctccaagtccatctcaaggacacatttgtgtccagtatacatggaaccgtact

SEQ ID NO: 8747 - DNA, 269 bp, Glycine max
  Clone ID: LIB3039-039-Q1-E1-E9
gagagtggtggagtgtgcaaaagagcgtcgtagtcgcaaccctaatcagaagaagcgcagcttcaagcgagtgacagccaccagccatgggtcgtatgcagagccgcggtaagggtatatcctcttctgctttgccctacaaaaggacacctcctagctggctcaagatctcttcgcaagatgtcgaagaaaatatctgcaagtttgccaacaaaggtttgaccccgtctcagattggtgtcattcccagagattctcacggtattgct

SEQ ID NO: 8748 - DNA, 392 bp, Glycine max
  Clone ID: LIB3039-039-Q1-E1-F1
gagggaccaaaacagcagaaaaccctcttttattttcaaaattacccttttcgagcttggagttcccaacaactatcttattccttcactcactcctctctgcgcttggctatggaaaaaacgcacagctccagcgcagaggagcaggatccgacccggcgccacctggatcccccacccgggttaactgctgaagagttcgaggacctcaaaccctccgtgctggagcaccacacctactccgtcacacccacccgccaaagctcctccctcctcgcgcagcgcatccacgcgccaccacacgcggtgtggtccgtcgtgcgctgcttcgacaacccacaggcctacaagcacttcatcaagagctgccacgtcaaggatggcttccagct

SEQ ID NO: 8749 - DNA, 330 bp, Glycine max
  Clone ID: LIB3039-039-Q1-E1-F10
gagtgcacaagtgagtttgttgatcgagataactagaaacagtgtgatgaaaatgaaggtccttgttttcttcgttgctacaattttggtagcatggcaatgccatgcgtacgatatgttccctctccgaatgaacactggctatggtgcccgtactccggaggtgaaatgcgcaagttggaggcttgctgtggaagcacacaacatctttggctttgagaccattcctgaagagtgcgttgaagcaacaaaggaatacatccatggcgaacaatatagatcagactccaaaacagttaaccaacaagcttacttttatgccagagacct

SEQ ID NO: 8750 - DNA, 383 bp, Glycine max
  Clone ID: LIB3039-039-Q1-E1-F11
gagagacgcagatatctgtaatttgtgtctgctcactcgctcttctccgccacttctgaatctattgaatcaacaatcatgtcggacgaagagcaccatttcgagtccaaggccgacgccggagcctccaaaacctaccctcagcaagccggtaccatccgcaagaacggctacatcgtcatcaaaggccgcccctgcaaggttgtggaagtttcgacttccaaaactggaaagcacggtcacgctaagtgtcactttgttggaattgatattttcactgccaagaaacttgaggatattgtgccctcttctcacaactgtgatgttcctcatgtgaatcgtactgattaccagctcattgatattgctgaggatggattttt

SEQ ID NO: 8751 - DNA, 271 bp, Glycine max
  Clone ID: LIB3039-039-Q1-E1-F12
ggatatattatccctacaacgtaataataaccaaaacagcagagagaagagaaggtgtagacaaacacaatctctaatggcactcaggatgtgggcttcttccactgccaatgcactcaaagtctcttctacctccagacctcatctcttgcatcctttttctttctccagatgcttgtcttccgtcttggatggacttaagtatgcagattcacacgaatgggtcaagcacgaaggctcagtcgccaccattggtatcactgaccatgcc

SEQ ID NO: 8752 - DNA, 395 bp, Glycine max
  Clone ID: LIB3039-039-Q1-E1-F2
gactcgcagattcaaacgtttccgaggtgaggctgaggcatctctctctgctttctagaatgggagctgggcgtggagtctccatctcacttgatggggtgagggacaagaaccttatgcagctcaaaaagctcaatctcgctcttttccccgttcgttacaatgacaaatactatgtcgatgcactcgcttccggtgaatttaccaaactagcttactatagtgatatttgtgttggagcaattgcatgccggctggagaagaaggaacgtggggggcaagttcgggtttacatcatgacgttaggtgttttggcaccttaccgtggacttggtattggaacacagttattgaatcatgttcttgatctttgctccaagcaaaacatttctgag

SEQ ID NO: 8753 - DNA, 374 bp, Glycine max
  Clone ID: LIB3039-039-Q1-E1-F3
ggcacaagtgagtttgttgatcgagataactagaaacagtgtgatgaaaatgaaggtccttgttttcttcgttgctacaattttggtagcatggcaatgccatgcgtacgatatgttccctctccgaatgaacactggctatggtgcccgtactccggaggtgaaatgcgcaagttggaggcttgctgtggaagcacacaacatctttggctttgagaccattcctgaagagtgcgttgaaacaacaaaggaatacatccatggcgaacaatatagatcagactccaaaacagttaaccaacaagcttacttttatgccaaagacctcgaagtccatcccaaaggcacatttgtgttcagtatacatggcaccg

SEQ ID NO: 8754 - DNA, 390 bp, Glycine max
  Clone ID: LIB3039-039-Q1-E1-F4
ggaacacagatccacttgaaagggttaggtttcgggagaaaaagcaatccactcagagagctagaagaattcaacgatgcctcgctatgatgataaatacggcaatacccgcctctatgtggggcacttatcttcgaggactcgttcccgggatctggagcgtgccttcagcagatatggaagagttcggggtgtggatatgaagaatgatttcgcctttgttgattttagtgatcctcgagatgctgatgatgcaagatataacttggatggtcgggatgttgatggaagtcgtattattgtggaatttgcaaaagggctcctcgtgggtccggggaatatttggggcgaggtcctcctcctggctctggacgctgctttaattgtggc

SEQ ID NO: 8755 - DNA, 386 bp, Glycine max
  Clone ID: LIB3039-039-Q1-E1-F5
gaaggtgcaagagtttgttgtgagctataagctagtttatcgtgaggagaatatgaagttgtttgttttccttgttgctgcagtagttttggtagcatggccatgccatggcgcaggctaccaaaggttccctctccgaatgaaaactggctatggtgagcgttcttcggaggtaaaatgcgcaagttttaggcttgctgtggaagcacacaacatccgagcctttaaaaccattcctgaagagtgcgttgaaccaacaaaggactacattaatggcgaacaatttagatcagactctaaaacagttaaccaacaagctttcttttaggctagtgaacgcgaagtccatcacaacgacatatttatattcggcatagataacaccg

SEQ ID NO: 8756 - DNA, 381 bp, Glycine max
  Clone ID: LIB3039-039-Q1-E1-F6
gatatatatcaataatctattttatactatacctacattttgataattttctttgtagttgatagccatggctacccgtggaaagcttgaggttgacattgatctcaagtccaacgcagacaagtactggcaaacccttaggaattctactgaaatattccctaaggccttcccacatgattacaaaagcattgaggttcttgagggtgatggcaagtctcctggttctatccgccacataagttatggtgaaggttcaccacttgtgaaatcatcctttgagaagattgaggctgttgatgacgaaaaaaacgtaatgtcctacactatcattgatggggaactcctctagcactacaaaacattcaagggagacatttc

SEQ ID NO: 8757 - DNA, 395 bp, Glycine max
  Clone ID: LIB3039-039-Q1-E1-F7
ggcgcattaaacgagaattagggtttgtagtgcagcaggaagaagcaataatggcgccgaagataacacgtaaggttagcagaaaccccgaattgataaggggaatcggaaagtactcgaggtctcaaatgtaccacaagaggggcatttgggctatcaaggccaaaaacggtggcgttttacctcgccacggccctaaacccaaacctgaaactcccgctgaaaaaccacccaaattttaccctgctgacgatgtcaagaaaccccttgtcgacaagcacaaacccaaacccgcgaagctcacggctagcattactcccgggacagtgttgattcttcttgccggtagatttaagggaaagacggtcgtccttttgaagcagcttccttctggg

SEQ ID NO: 8758 - DNA, 387 bp, Glycine max
  Clone ID: LIB3039-039-Q1-E1-F8
gatttctttttcttttaccttaatttattgttgcgaatctttgttttgggtcatcgtttgttggttgcagagcagcgaggtgtttagtgtgcaattgttgacaaattaatggcggaaattgtagggcctcgcttgtactgctgttgtaattgtagaaaccaagtctcccttcacgatgatataattgctaaaacctttcagggaagatatggccgaggttttctgttctcccatgcaatgaatattgtggtagggccaaaagaagacaggcacctcatgactggcctccacaccgttgctgatgtttattgtggtgactgccgtgaagtgttgggttggaaataaaaaagagcttatgaagcatcacagaagtacaaggaaggaaaa

SEQ ID NO: 8759 - DNA, 395 bp, Glycine max
  unsure (1)..(395): unsure at all n locations
  Clone ID: LIB3039-039-Q1-E1-F9
gccacaaaaaccaagtactacaagggaagaagaacttagctacaagctaaggaaggatcaaagagaatggctcaagcaatggcatcaatgactagcttacgtggttcctctcaggctgtgttggaaggtagccttggctccacacgcttgaatgtggggagtggaagcagggtggcctcagtcacacgtgcagggttcacagttagagcacagcaacaacaagtgaatggtggtgaggtacaaagtagccgtanggcagtgctttcacttgttgctgctggtttgaccactggctcttttgttcaagctgtgcttgctgatgccaaacctatcaaagttggaccacctcgcccaccttccggcggattacctggaacattgaactcagatgaacc

SEQ ID NO: 8760 - DNA, 397 bp, Glycine max
  Clone ID: LIB3039-039-Q1-E1-G1
ggcacaagtgagtttgttgatcgagataactagaaacagtgtgatgaaaatgaaggtccttgttttcttcgttgctacaattttggtagcatggcaatgccatgcgtacgatatgttccctctccgaatgaacactggctatggtgcccgtactccggaggtgaaatgcgcaagttggaggcttgctgtggaagcacacaacatctttggctttgagaccattcctgaagagtgcgttgaagcaacaaaggaatacatccatggcgaacaatatagatcagactccaaaacagttaaccaacaagcttacttttatgccagagaccccgaagtccatcccaaggacacatttgtgttcagtatagatggcaccgtactccctaatattccatactac

SEQ ID NO: 8761 - DNA, 333 bp, Glycine max
  Clone ID: LIB3039-039-Q1-E1-G10
gcgtcagcccacacgtccgagaagggggcacaagtttgttgagatagctagaagcaataagatgaaaatgaaagtgcttgttttgtttgttgctacagttttggtagcatatgaatgccatggctcagactaccagaagttccctctccaaatgaaaactgggtttggtgggcaatacagcaatgaggtggcatgtgccagttggaggcttggcgtggaagcaaacaacgtagtcaagtggcaaactgttcctgcagcttgcggagagtacatacctgactacgttctaggaaacaatatagatagcatccaaaacagttaaccatcaagctt

SEQ ID NO: 8762 - DNA, 292 bp, Glycine max
  Clone ID: LIB3039-039-Q1-E1-G11
ggcgcattgaacgaaaattagggtttgtagtgtagcaggaagaagcagcaatggcgccgaagataacacgtaaggttagcagaaaccctgaattgataaggggaatcggaaagtactcgaggtcgcagatgtaccacaagaggggcatttgggctatcaaggccaaaaacggtggcgttttacctcgccacgaccctaaacccaagcctgaagctcctgctgaaaaaccacccaaattttaccctgctgatgatatcaagaagccccttgtcaacaagcacaaaccgaaacc

SEQ ID NO: 8763 - DNA, 339 bp, Glycine max
  unsure (1)..(339): unsure at all n locations
  Clone ID: LIB3039-039-Q1-E1-G12
gtttccttcagaacatattcccaacacctgatgctatgagagagaaaatgtctttcgatgctggtgggaacactaaagcaagtttcatggatagtaaaattagcatgggaggaaccttcataggtttggcagtgctggtgataatggtgatcgtgacaaagagagcttagactctaacaagcaaaactacaatttgtcgacttttctgatagttttgaaaccatgttattaaatatgaactgtttttaaattgagatgtgtcgcacttggtgatttatttccattaaaataaaatttgaaaaanaaaaaaaaaaaaaaaaaaaaaaaaacggccgctct

SEQ ID NO: 8764 - DNA, 206 bp, Glycine max
  Clone ID: LIB3039-039-Q1-E1-G2
tgttgcagcgagaaaatgacagatgggggcacacgtgacgtctgtctgatgatgattccgagtatgagtgtgattaatctcacagtcgatgatgtcttccttgcgagaaatttggtagcacgggaatgtcatgcatatgatatattcgctctccaagatgaaacaggtaatgatgcctgtactccaggaagtgaaatacgaaagtt

SEQ ID NO: 8765 - DNA, 325 bp, Glycine max
  Clone ID: LIB3039-039-Q1-E1-G3
ggcattggggcatgcttttaatttcctagatctcccaaacaaattgtagcataagtcccatggccaaagagactagtgttgtttatctatatcccagcaaatcacaagtttggggtgagaattttgatcataaaaaacttgtaataacaacactagctgctaatggaaagaaggaggagagtaatggagcacctaatgacacatatcctgcgtttcccgggtggtatgctgatgtttcctggccaggagaagcacacacatataaaatacaaaagattctattccacgggaaatcagaattccaagagcttcttgtatttgagtc

SEQ ID NO: 8766 - DNA, 390 bp, Glycine max
  Clone ID: LIB3039-039-Q1-E1-G4
gacaacaaaatttgccaattgccatttcaatcctcagtttctttcttcaacgtttccatcatacacagatcccaatcctctctcaagccctaatttcccctcatttccatggccacagaagagcccactgtcgcggtggaacccgctcccgaacctgcctccgccgatcctcccccggaggagaaggaggagaccaaacctgaagccaaggctaagaaaaccaatgagcccaaacctaaaaaggtttccagacctcgcaaccctctcactcatccttcctactaagagatggttagagatgcaattacctcgcctgaacgagaagaccggttcgagccaatacgcgattgcgaagttcatcgaggagaagcacaagcatgttccaccgaa

SEQ ID NO: 8767 - DNA, 391 bp, Glycine max
  Clone ID: LIB3039-039-Q1-E1-G5
gacgtataatactactagtttgtgacccatttctggacaaagacacatctttgaatttcattggattcaattcatttgggtatcaatcaagattgaattgttgttgtcgtcgtcttggggatgggatcgtgcctgtagatgacgggggcacgggtgtgacgttgctgaagcagggacaggaccttgttattgtgaatgtagatgactccagagctgtattagctgcccaagatcgtagcaatggttctcttattgctgtccagttgagcactgaccacaagccacatcttccaagggaagcagagaggataaggatttgtaaaggaagggtcttcgccattaagaacgaaccagggattgctcgagtatggctccccaacattgattcccc

SEQ ID NO: 8768 - DNA, 312 bp, Glycine max
  Clone ID: LIB3039-039-Q1-E1-G6
ataacacaaacacaaattacatagcctcagtaatctgagagagaaacaaaaacaatgaaggtttccattgccaagttccactcccttcccctatgttttttccttctcttggccttcaacacaaaacccctcctagcagcagaaccagagccagtggttgataagcaagggaaccctttggagccaggagtagggtactacgtgtggccactttgggctgatgaaggaggcctcacactaggccaaacaaggaacaagacatgccctctttatgttatccgtgacccttcattcattggcaccccagtttca

SEQ ID NO: 8769 - DNA, 391 bp, Glycine max
  Clone ID: LIB3039-039-Q1-E1-G7
gacttgtaataattcttataacacaacacaacccatgggcaccacctccgcattcctcctccttcccctcctcctgctgctccacctcgccatcgccgctcacggcatcggcatcaactacggcacgctcggcgacaaccttccaccgcccgcggcggtggcgaacttcctgaagacgaagacgaccatcgaccgcgtgaagatctacgacgtgaacccggacatcctgcggggcttcgtcggcagcggcatctccgtgacggtgaccgcccccaacggcgacatcgccgccttaaccaaaatcgactcggcgaggcattgggtggcgacgcacatcaaaccctttcaccctcagaccaaaattaattacatcctcgtcggcagcgaggtt

SEQ ID NO: 8770 - DNA, 348 bp, Glycine max
  Clone ID: LIB3039-039-Q1-E1-G9
acgcgtcaacgagaaaacgacagaaggggactctctgaagtaaccaacgcaacccatcactctttctttcttcctcttccccccacatactattttttcaaatctagggtttcctctgcgtctagggtttcttccttctgcaaccatcaatggcggcaatcacagctccccagcaccgatcctcgaagacggagtcctacgttgacaacaagcgcaaggatgacatccgccacgccaacatcgtggccgcacgctccgtcgccaacgcggttcccaacagtctgggccccaaaggcattgacaagatgatctccacctcctccgacgaggtcatcatcaacaatgacc

SEQ ID NO: 8771 - DNA, 334 bp, Glycine max
  Clone ID: LIB3039-039-Q1-E1-H1
ggaaggcgaggaatccacattcagacacaatacagagtgagttgttgctccttcggcacatgtctccgccaacatgggtatcttccagagattctatgcacacaacgcttgccactggtggcaccaagaatgcctgcaggaaaaagagaacgtatgcccttggtcgccagcctgctaacactaggctgtcaagcaacaagacagtcacgaggatctgtgttacatgctggaatatgaaatggaaggcattgagattggatactggaaattactcctggggtagtgatcctgtaactcacacgactcgtgtactatatgtcgattacaatgcctc

SEQ ID NO: 8772 - DNA, 404 bp, Glycine max
  Clone ID: LIB3039-039-Q1-E1-H10
ggcacaagtgagtttgttgatcgagataactagaaacagtgtgatggaaatgaaggtccttgttttcttcgttgctacaattttggtagcatggcaatgccatgcgtacgatatgttccctctccgaatgaacactggctatggtgcccgtactccggaggtgaaatgcgcaagttggaggcttgctgtggaagcacacaacatctttggctttgagaccattcctgaagagtgcgttgaagcaacaaaggaatacatccatggcgaacaatatagatcagactccaaaacagttaaccaacaagcttacttttatgccagagaactcgaaatccatcccaaagacacatttgtgttcagtatacatggcaccgtactctctaatattccatactacacaaaac

SEQ ID NO: 8773 - DNA, 401 bp, Glycine max
  Clone ID: LIB3039-039-Q1-E1-H11
ggcacaagtttgttgagatagctagaagcaataagatgaaaatgaaagtgcttgttttgtttgttgctacagttttggtagcatatgaatgccatggctcagactaccagaagttccctctccaaatgaaaactgggtttggtgggcaatacagcaatgaggtggcatgtgccagttggaggcttggcgtggaagcaaacaacgtagtcaagtggcaaactgttcctgcagcctgcggagagtacatagctgactacgttctaggagaccaatatagatcagattccaaaacagttaaccaacaagcttatttctatgctaaatccctcaaactcaccaacaaagatgtctttgtcttggacgttgacgacactactctctctaatctccagtattttgct

SEQ ID NO: 8774 - DNA, 363 bp, Glycine max
  unsure (1)..(363): unsure at all n locations
  Clone ID: LIB3039-039-Q1-E1-H12
ggaacgcagctgagaagcagttgattttccgatcagaaaatctgaatcatgtcgtggcaagcgtacgtggatgatcacctgctgtgtgaaatcgaaggtaaccacctcactcacgccgctattatcggccacgacggcagcgtttgggctcagagcgccaacttccctcaggtaacgcttctagattcgccgatccctgagagtgttgattatatactgtgcaactatgtttgattttggtgtagttcaaagctgaggaaataactgctatcatgaatgactttaacgagcctggatcacttgctccaactggattgtttctcgctnngcacaaatacatggtcatccaaggccaccctggtg

SEQ ID NO: 8775 - DNA, 396 bp, Glycine max
  Clone ID: LIB3039-039-Q1-E1-H2
ggagagaagagagatggatccagacgcgttggcaaaggcattcgtggagcactactacagcaccttcgacaccaaccggaacggtttagcgaatctgtatcaggagggttccatgctgaccttcgaagggcagaagatccagggcgcttccagcatcgtcgctaagctcacttccctccctttccagcagtgccaccactccatctccaccgtcgactgccagccctccggtgtcaacgctggcatgcttgtctttgtcagcggcaacctccagctcgctggcgaacagcacactctcaagttcagccagatgttccatttgataccaacgcctcacggaagctattatgtgttgaatgacatattccgtttgaactatgcatgaagatagaccat

SEQ ID NO: 8776 - DNA, 351 bp, Glycine max
  Clone ID: LIB3039-039-Q1-E1-H3
ggcacaagtgagtttgttgatcgagataactagaaacagtgtgatgaaaatgaaggtccttgttttcttcgttgctacaattttggtaccatggaaatgccatgcttacaaaatgttccctcttcgaaggaacactggatatggtgcccgtactccgggtgtgaaatgcacaatttggaggcttgctgtggaagcacacaaaatctttggctttgacaccattcctgaagagctgcttgaaccaacaagggaatacctccaggggccaacaatatatattagactccaaaacagttaaccaacagtcttacttttatgccagacacctcaatgtccatcccaaggaaacat

SEQ ID NO: 8777 - DNA, 390 bp, Glycine max
  Clone ID: LIB3039-039-Q1-E1-H4
ggcagaagacacaagaagtcacaaaatgtatcacgttcttaaccgcgctttctgcaccgccacagagcccgccaccaccatcgccgcttccatcaggtccatttcggaggatctgtacaaggaagtgaagctgaagaacgtggtggagaagttcaagaaagcctccgacaacgaccgcttccgcaaaaaaaccggcatctacgaggacaccgttcggcgcctcgccggcgcccggcgcttccggtgggtccgcgacatcctcgagcaccagaagcagtactccgacatctccaacgagggcttctccgcgcgcctcaattccctctacggtaaatccggcatgaccaagcacgcgcgcaaggtgttcgacgaaatgccgcagcgaaactg

SEQ ID NO: 8778 - DNA, 345 bp, Glycine max
  Clone ID: LIB3039-039-Q1-E1-H5
ggtgagtatcaacaagaatactcataataatatagtggctagcatagagctagtaataatattaatattgttaagctagctctaagccatggctaatgaacgtgatctgttctcggcggagattgtgaaccgtggaattgaatcgtcaggaccaaacgctgggtcgttgacgttttcggtgagggtgagaaggcgcttaccggattttcttcaatcggtgaaccttaagtacgtgaaattgggttaccattatctgataaaccatggcatatacttgttcaccataccggttcttctcgtggtgtttagtgctgaagttggaagcctcagcaaagaagaactatg

SEQ ID NO: 8779 - DNA, 375 bp, Glycine max
  Clone ID: LIB3039-039-Q1-E1-H6
gacaggcacaaaccctagccttcgaaaaccctaatcctgaggcactgtgatatggcaagagccgtttcctcttcctgcgcgcgcctcacaatgcgcctcttctccaccattatcagcaccactaccaccaccgctgcgttcgccgttacattacccaaaccctcgtcactctcagtctcaacgcgtcgattccgcttctctctctcccacgccatcgtctctccctccactcgcgtcgcctgaatccggtgccgtgtcaaccgcaccggcgactcatcgtaatcaccgctgaactcagcttcgtcatcatcgtcgtcgttcagagaccggactcccacggacattgcgccgctctttccgagctgcgactataac

SEQ ID NO: 8780 - DNA, 317 bp, Glycine max; identical to SEQ ID NO: 7580
  Clone ID: LIB3039-039-Q1-E1-H7

SEQ ID NO: 8781 - DNA, 388 bp, Glycine max
  Clone ID: LIB3039-039-Q1-E1-H8
gaacaacagaaataaagcacaatggactacctttttcttcttccactaatcaccatagtgtggataagcattcatgtactcatctctagcttcaaaccactcaaatcttctaaaaatcccccggggcctcacccttttccaatcataggaaacatattggagcttggcaaccagcctcaccaagcacttgccaaactttctcaaatttatggtcctataatgagtcttaagctcggtaacactaccaccatagtcatttcctctccacaagttgccatagaagtactgcaaaaaaatgatcaaatcttagctaatagaatggtcccagactgtgttcgagcacttgaccatcacatactttcggttgcatggatgccacctttaccac

SEQ ID NO: 8782 - DNA, 395 bp, Glycine max
  Clone ID: LIB3039-039-Q1-E1-H9
gaaggtgcaagagtttgttgtgagctataagctagtttatcgtgaggagaatatgaagttgtttgttttctttgttgctgcagtagttttggtagcatggccatgccatggcgcaggctaccaaaggttccctctccgaatgaaaactggctatggtgagcgttcttcggaggtaaaatgcgcaagttttaggcttgctgtggaagcacacaacatccgagcctttaaaaccattcctgaagagtgcgttgaaccaacaaaggactacattaatggcgaacaatttagatcagactctaaaacagttaaccaacaagctttcttttatgctagtgaacgccaagtccatcacaacgacatatttatattcggcatagataacaccgtactctcta

SEQ ID NO: 8783 - DNA, 260 bp, Glycine max
  Clone ID: LIB3039-040-Q1-E1-A1
ggaacctttgcattctattcattcaagattcagcaagtgcgttttggaagcagagaccgaaatacttcgagatggcccgtacaaagcaaactgctcgtaagtcaactggaggaaaagctcccaggaagcagcttgcaaccaaggctgcacgtaagtctgcaccaacaactggtggtgtgaagaagcctcatcgttatcgccctggaactgttgctcttcgtgagattatgaaataccagaagagcactgagctcctaatc

SEQ ID NO: 8784 - DNA, 295 bp, Glycine max
  Clone ID: LIB3039-040-Q1-E1-A10
gacgattactaccaagtgaaaaagcaattaactaaccatatataccgtgtaagacattgaaaaaaaaattgttgtgtaaaaagaaatggctaggtggtgcaccttggtggttcttgcccttgtcgtggttgcaattgccagaaacatgcccaatgacgcaggtttggaggaccagaagaacttcctcgggtatgggttctctggagttggaaacagggggtctctttttgggagagtggtttcggttttagaggaaaataggggtggcctctctgggctctgtatttttgggaga

SEQ ID NO: 8785 - DNA, 394 bp, Glycine max
  Clone ID: LIB3039-040-Q1-E1-A11
ggccgttgtagttgtagctgtagaagggtgagagaagatgtttcctcaggagaatcatagtaacggctatcagcatcagcagggttacagtcacagagagcgagtccgtcggggcacttgcaggtcacgtgcctccacttcctcacactctcactccgttagggtttacgaccaacctcgtcctccttgcactgatttcgacttgcctatttccattcctacgctcaccttggcatccaccaagagatgatcaaggatcgtgtgcgtactgatacttatagggatgcaatcatgcagcatcagagtttcattgcaggcaaagttgtcgttgatgttggatgccggacatgaatccctttctatattttgtgctcaggctggtgcagaacgggtg

SEQ ID NO: 8786 - DNA, 350 bp, Glycine max
  Clone ID: LIB3039-040-Q1-E1-A12
ggcacaagtgagtttgttgatcgagataactagaaacagtgtgatgaaaatgaaggtccttgttttcttcgttgctacaattttggtagcatggcaatgccatgcgtacgatatgttccctctccgaatgaacactggctatggtgcccgtactccggaggtgaaatgcgcaagttggaggcttgctgtggaagcacacaacatctttggctttgagaccattcctgaagagtgcgttgaagcaataaaggaatacatccatggcgaacaatatatatcagactccaaaacagttaaccaataagcttaactttaggcaagagacctcgatgtccatcccaaggacacat

SEQ ID NO: 8787 - DNA, 383 bp, Glycine max
  Clone ID: LIB3039-040-Q1-E1-A2
gacctcaccgagtcgcagcgatcgaagtttcacatcagccttatccagtttagggtttcggttccttaccctacctttgacgtatcgaaaccttaaatttgggattaggtctgagcaatctggttggtagaacctttggtcttagagagtcaagttttatgtctggattagacgatcaaattcctactgccttcgatccttttgctgatgcaaatgctgatgactcgggtgctgggtcaaaggagtatgtgcatattcgcgttcagcagcgaaatggtaggaaaagcctgacaaccgttcagggattgaaaaaaagaatcagctataacaagatacttaaagacgttaagaaagagttctgttgcaatggaacagttgttcag

SEQ ID NO: 8788 - DNA, 323 bp, Glycine max
  unsure (1)..(323): unsure at all n locations
  Clone ID: LIB3039-040-Q1-E1-A3
aaaaaccacaaaaaggtaccgcttccaaaaaaccacaaaaaggtaccgcttccaaaaaaccacaaaaaggtaccgcttccaaaaaaccacaaaaaggtaccggttccaaaaaaccacaaaaaggttacggttccaaaaaaagaacaaaaaggtaacgggctgccaagaaagacgaacaaaaagggggaatatcgccttaacagtaaagaaggttgagaaaagagaagacaaaatccgcagaaagcaaagaagctgagagcgagagagcaactgcacgcactgtaactcctaacttcccagatcgtcntcttcctcttttctct

SEQ ID NO: 8789 - DNA, 140 bp, Glycine max
  Clone ID: LIB3039-040-Q1-E1-A4
aaaaggggacacttcaaaatcctcctgggaaaccctaatttaatctattccctccctttcttttgtgttctaagcagctagaaccaatggagaggaaaagaagccatgcctctttcacaatgtttgcaatgcttgttgga

SEQ ID NO: 8790 - DNA, 294 bp, Glycine max
  Clone ID: LIB3039-040-Q1-E1-A5
ggcacaagtgagtttgttgatcgagataactagaaacagtgtgatgaaaatgaaggtccttgttttcttcgttgctacaattttggtagcatggcaatgccatgcgtacgatatgttccctctccgaatgaacactggctatggtgcccgtactccggaggtgaaatgcgcaagttggaggcttgctgtggaagcacacaacatctttggctttgagaccattcctgaagagtgcgttgaagcaacaaaggaatacatccatggcgaacaatatagatcagactccaaaacagt

SEQ ID NO: 8791 - DNA, 382 bp, Glycine max
  unsure (1)..(382): unsure at all n locations
  Clone ID: LIB3039-040-Q1-E1-A6
ggcgtacgcagcttcatccctaacgcgtgcatagcagagtcagagacagagacgcagccatagggcggagacctgcgaggtgttataggcaaattaagaacaagccataccccaagtcacgtttctgccgtggtgttcctgatcccaagatcaggatttatgatgttggtatgaagaagaagggtgttgatgagtttcctttctgtgtccatctggttagttgggagaaggaaaatgtttcaagtgaggccctggaagctgctcgcattgcttgcaacaagtacatggccaaatttgctggaaaggatgctttccacttgagagtcagggtgcanccattccatgttcttaagatcaacangatgctttcgtgtgctggtgc

SEQ ID NO: 8792 - DNA, 377 bp, Glycine max
  Clone ID: LIB3039-040-Q1-E1-A7
gaagaagagaacgttcaagaagttcagttttcgaggcgtggatctcgatgcacttctcgacatgtccaccgatgaactcgtcaagatgttcagtgcccgcgctcgtagaaggttccagagaggcctcaccagaaagcccatggccttgatcaagaagctccgtaaagcgaaaagggaagctccaccaggtgagaagccagaaccagtacgcacccacctccgcaacatgattattgtgcctgagatgattggtagcattattggagtgtacaatggcaaaacctttaatcaggttgaaatcaaacctgagatgattgggcattatcttgctgagttttctatttcatacatacccgttaagcacggaagacctggta

SEQ ID NO: 8793 - DNA, 369 bp, Glycine max
  Clone ID: LIB3039-040-Q1-E1-A8
gacacaccgtttgttctattcttaactcaacttctgctacccactctcttcttccaagtccaaccacgcttttctctacagtcatgggcaaggtcaagatcggaatcaacggatttggaagaattggccgtttggttgccagagtcgctctgcaaagagacgatgtggagctcgttgccgttaacgaccctttcattaccaccgattacatgacatacatgtttaaatacgacagtgttcacggacactggaagcatcacgatgtcaccgttaaggacgagaagacccttctcttcggtgacaagccagtcactgtttttggacacaggaaccctgacgagattccatgggggtcaactggagctgata

SEQ ID NO: 8794 - DNA, 379 bp, Glycine max
  Clone ID: LIB3039-040-Q1-E1-A9
gacagaagagagagagagagagagagagagtcctgaaacttgggtgcgattccttcactcacaacaacaacacatcactatggctcttctgagtcgagcctcttcacgcttccctcagctggtttcccctcaaagggtagtttcactccacacaacgctcccatctctgaacgcatccccatccacagccacgcctacaccatatgccccgccaccgcctccgtccgcttcctctcccgccggcgtttcgaaggcggcggagttcgtgatctcgaaggtggacgatctgatgaactgggcccgccgcggctccatctggcccatgaccttcggcctcgcctgctgcgccgttcaaattgatcacaccggggccgcccgc

SEQ ID NO: 8795 - DNA, 384 bp, Glycine max; identical to SEQ ID NO: 7708
  Clone ID: LIB3039-040-Q1-E1-B1

SEQ ID NO: 8796 - DNA, 394 bp, Glycine max
  Clone ID: LIB3039-040-Q1-E1-B10
gacaccaacaccaaaacaaacccactaagatggcttcccttgtatccttcctagtgctgcttcttgcagcccttatcctcatgcctcaagggcttgctacttactacaaaccaattaagaagccaccagtgtacaagcctccagtgtacaagccaccagtgtacaaaccaccggtttataagccaaaaccaccggtttacaagccgaaaccaccggtttacaagccaccatataagaagccaccatacaagaaaccaccttatggaaagtaccctccagtagaggacaacacccatgcctaaagcaagcaatgaggtctattatctacttaataaataaaaagaactgctttgtgttttccagcattgtgatttacaacttcgtagcaatgcat

SEQ ID NO: 8797 - DNA, 369 bp, Glycine max
  unsure (1)..(369): unsure at all n locations
  Clone ID: LIB3039-040-Q1-E1-B11
gacttctcttcacacctttgttcactcttcttctcttgcggctagggttttagcgcagcttcttctagatttaaggaagatgggtaaggaaaaggttcacatcagtattgtggtcattggccatgtcgactctgggaaatccactaccactggtcacctgatttacaagcttggaggcattgacaagcgtgttattgagaggtttgagaaggaagctgctgagatgaacaagaggtctttcaagtatgcctgggtgctggacaaacttaaggctgagcgtgaaagaggaatcaccattgatattgctttgtggaagtttgaaacaacanagttatattgcacagttattgatgcgcctggacataggga

SEQ ID NO: 8798 - DNA, 368 bp, Glycine max
  Clone ID: LIB3039-040-Q1-E1-B12
cttccaccgttgtttgcagatacacctaatgcagttcatgaattaacaataccaagggatatatacgagcatgctgttgtccttagtgtgaaaaatgaggatcaagatgcttttgaaagggatttcttccagttgaagccttattatacatatgcctgcaatcgacttccaccatctcctcaggagtacccaattctgggtctcaacctgttgagattacttgtgcagaataggattgctgaattccatactgagttggaattgctttcatctgctgctcttgagaatccttgcattaagcatgctgtggagttggcacaatcttttatggaatgggcttacaatcgtgtcttgagtgcaagacacac

SEQ ID NO: 8799 - DNA, 327 bp, Glycine max
  Clone ID: LIB3039-040-Q1-E1-B3
agggggacaagttaatttgttgatcgagataactagaaacagtgtgatgaaaatgaaaggccttgttttcttcgttgccaaaattttggtagcatggcaatgccaatgcgtacgatatgttccctctccgaatgaacactggctatggtgcccgtactccggaggtgaaatgcgcaagttggaagcttgctgtggaagcacacaacatctttggctttgagaccattcctgaagagtgcgttgaagcaacaaaggaatacatccatggcgaacaatatagatcagactccaaaacagttaaccaacaagcttacttttatgccagag

SEQ ID NO: 8800 - DNA, 382 bp, Glycine max
  Clone ID: LIB3039-040-Q1-E1-B4
gaagcaaaaccctaatccctctttcttcctcttcctcagtagtgcgattttcgattctcttctctgcaactatgcctaaccctaaggtcttcttcgacatgaccatcggcggtcaacctgccggccgcatcgtgatggagctctacgccgacgtgactccgagcaccgccgagaacttccgcgcgctctgcaccggcgagaagggcgccgggcggagcggcaagcccctccactacaaaggctcgtccttccaccgcgtgatcccgaacttcatgtgccaaggcggcgacttcaccgccggaaacggcaccggatgcgagtcgatctacggcgccaagttcgccgacgagaacttcgtgaagaagcacactggtcccggcat

SEQ ID NO: 8801 - DNA, 375 bp, Glycine max
  Clone ID: LIB3039-040-Q1-E1-B5
gagagtacttagcgatctccgtgaatacatagtaacacaataaaccacctccgcgcgagccaccttacccagtgaaccctaccgcaccgaaacaaaaccctcgcaaaccctaaccctaatctcataggaacatggacggcgacgacgagacctcgggtccgatgatcgacgaaatctacgccaacggcggtggcgtcggcgacgacggagacaagcggagccgccgcgcaatcatgagcggcgaccagctcgacatcgaggcgtacgcggcgctatactcggggcgcacgaagatcatgaggctcctcttcttcgccgacaagatgaacaacgcggagacgcagctcgaggcgctgcgcatggcctacgacgaga

SEQ ID NO: 8802 - DNA, 375 bp, Glycine max
  Clone ID: LIB3039-040-Q1-E1-B6
ggttctagtgtgtgattgtttgttgttgtaactcgttcttcttcttttgttgttctgtgtttgtgtttgttttttctctcacctgaaaatgtcttgctgcggtggtaactgtggttgcggaagctcctgcgagtgcggcaacggctgcagaggctgcaagatgtacccagacttgagctacactgagtcaaccatcaccgagaccttggtcatgggagtggcacctgttaaggctcaatttgagggtgctgaaatgggtgtgcccgctgagaacgatggctgcaaatgtggatcaaactgctcctgcaacccctgcacttgcaagtgaagtgttgggagagcaaccttcaaccagagatagcccttaattaggaa

SEQ ID NO: 8803 - DNA, 363 bp, Glycine max
  Clone ID: LIB3039-040-Q1-E1-B8
ggcacaagtgagtttgttgatcgagataactagaaacagtgtgatgaaaatgaaggtccttgttttcttcgttgctacaattttggtagcatggcaatgccatgcgtacgatatgttccctctccgaatgaacactggctatggtgcccgtactccggaggtgaaatgcgcaagttggaggcttgctgtggaagcacacaacatctttggctttgagaccattcctgaagagtgcgttgaagcaacaaaggaatacatccatggcgaacaatatagatcagactccaaaacagttaaccaacaggcttacttttatgccagagacctcgaagtccatcccaaggacacatttgtgttcagtat

SEQ ID NO: 8804 - DNA, 354 bp, Glycine max
  Clone ID: LIB3039-040-Q1-E1-B9
ggattaatactaggtttctgtaaaatcgcaaagaaacacacagttagcaccgtcaacctctgcgaccagcgattccaaccatgcttcccctttcccttctcaagactgcccaaggccaccccatgctggtggaactgaaaaatggggagacttataacgggcacttggctaattgtgatacatggatgaacatcgatctccgagaagtcatttgtacctctaaagatggagatagattttggcgtatgcctgagtgctacattcgtggcaataccattaagtaccttcgggttcctgatgaggttattgacaaagtccaggaagaatcagagagccgtactgattgcaaaaccc

SEQ ID NO: 8805 - DNA, 308 bp, Glycine max
  Clone ID: LIB3039-040-Q1-E1-C1
ggcacaattgagtttgttgatctatatatctagaaacaatgtgatcaacataaaggtccttgctatcttacatgtcaaaattttggtatcattgaaatgccatccctatcatacgttcccacaccgaatgaacaatgtctatggtactcgtatcccggaagtaaaatgcccacattagaggcttgctgttggaacataaaacatcattggcattgacaccattcctgaacagtgcgttgacacaacaaaagaatacatccaaggcgaccaatatacatcacactccaacacagttaatcaacaagctt

SEQ ID NO: 8806 - DNA, 354 bp, Glycine max
  Clone ID: LIB3039-040-Q1-E1-C10
ggccagaaaggaggcagagaccgagagagcaactgcacgcactgtaactctctcaccgtttcttccgctttgatggaacaggttggtaaaacgcatgcgttttgaagcttccattccatttcagtttcgattttcgattcttttccctctactctgcagtacgagaaggttgagaagataggcgagggaacatacggcgtcgtttacaacggtcgcgaccgctccaccaacgagaccatcgccttgaagaagattcgcttggagcaggacgatgacggggttcccagcaccgccattcgcgagatttctctcttgaaacaaatgcagcacacggacattgttaagtttcaggat

SEQ ID NO: 8807 - DNA, 389 bp, Glycine max
  Clone ID: LIB3039-040-Q1-E1-C11
aaacgcggcggtgaggtctaaaatgagcggcggcgagggagttgcggtcaccgggaattctggtcggaaagggacgctgagatacagagaatgtcagaagaaccacgccgtcagcattggaggccaagccgtcgacggctgctgcgagtttttggccgccggggaggaaggtacgctggaggccgtaatttgcgccgcctgcaactgccaccgtaatttccaccgcaaggagatcgacggcgaaaccagcccttaccggcagcgttcgcagccgcagcctcagcctctgcaccctcagtaccaccaccaattctccccttactaccagcgcgccccaacaccttccggctgccgggtacctccaccaccacctggtaactcctccggtg

SEQ ID NO: 8808 - DNA, 391 bp, Glycine max
  Clone ID: LIB3039-040-Q1-E1-C12
ggcacaagtgagtttgttgatcgagataactagaaacagtgtgatgaaaatgaaggtccttgttttcttcgttgctacaattttggtagcatggcaatgccatgcgtacgatatgttccctctccgaatgaacactggctatggtgcccgtactccggaggtgaaatgcgcaagttggaggcttgctgtggaagcacacaacatctttggctttgagaccattcctgaagagtgcgttgaagcaacaaaggaatacatccatggcgaacaatatagatcagactccaaaacagttaaccaacaagcttacttttatgccagagacctccaagtccatcccaaggacacatttgtgttcagtatagatggcaccgtactctctaatattcca

SEQ ID NO: 8809 - DNA, 343 bp, Glycine max
  Clone ID: LIB3039-040-Q1-E1-C3
aggggaagcacaagtttgtttagaaaaccaaaaacaataagatgaaaatgaaagtgcctgttttgtttgttgctacagttttggtagcatatgaatgccatggctcagactaccagaagttccctctccaaatgaaaactgggtttggtgggcaatacagcaatgaggtggcatgtgccagttggaggcttggcgtggaagcaaacaacgtagtcaagtggcaaactgttcctgcagcttgcggagagtacatagctgactacgttctacgagaccaatatagatcagattccaaaacagttaaccaacaagcttatttctatgctaaatccctcaaactcac

SEQ ID NO: 8810 - DNA, 381 bp, Glycine max
  Clone ID: LIB3039-040-Q1-E1-C4
ggcacaagtgagtttgttgatcgagataactagaaacagtgtgatgaaaatgaaggtccttgttttcttcgttgctacaattttggtagcatggcaatgccatgcgtacgacatgttccctctccgaatgaacactggctatggtgcccgtactccggaggtgaaatgcgcaagttggaggcttgctgtggaagcacacaacatctttggctttgagaccattcctgaagagtgcgttgaagcaacaaaggaatacatccatggcgaacaatatagatcagactccaaaacagttaaccaacaagcttacttttatgccagagacctcgaagtccatcccaaggacacatttgtgttcagtatagatggcaccgtactctc

SEQ ID NO: 8811 - DNA, 291 bp, Glycine max
  Clone ID: LIB3039-040-Q1-E1-C5
cttctaaaggttaaccagattggtacagtgaccgaatctattcaggctgcacttgactcaaaggctgcaggttggggtgtcatggttagtcatcggagtggcgagactgaggataacttcatcgcggatctctctgttggcttggccagtggacagataaagactggtgctccttgccgaggtgagcgattggcaaagtataatcagcttcttcggattgaagaggaacttggaagcgtgcgatatgctggtgaaactttcagatcaccttaaagtgaactcaattgatcc

SEQ ID NO: 8812 - DNA, 377 bp, Glycine max
  Clone ID: LIB3039-040-Q1-E1-C6
gatagtgctaggaaagtgagtgagagaaagagatcacatagcagaatggcttctactcaatgtttcttgcaccaccatgctcttaccacccctgccagatccccatcacaacgcatcatggttagcaccaagcctaaccagcttgtttgcaaggcacagaagcaagaggatattgatgtcagcccaatctctcgccggttagctctaaccgtgctcattggtgctgctgctgttggctccaaagtccaacctgctgatgcagcttatggggaagctgccaatgtgtttggaaagccaaagacagacacagatttcctgccatacaatggagatggattcaaactatcgattccctcaaagtggaacccaagcaaaga

SEQ ID NO: 8813 - DNA, 300 bp, Glycine max
  Clone ID: LIB3039-040-Q1-E1-C7
gataatatattggcatggtaagtcctcaatttggtcccgaatcgcacctcaccacaacctctctttctcgtctccgtccgtgcaacctgggaagcaatggcatggagaggaaatcttttgaaaaacataaaagaacttcggtttttgatgtgccagtcatcacctgcaagctcacccacaagggcttttgtggaaaggaattataaggaactaaagacattgaacccaaaattgcccatattaatccgtgagtgcagtggagttgaaccccaattatgggcaagatatgaattggggtgt

SEQ ID NO: 8814 - DNA, 333 bp, Glycine max
  Clone ID: LIB3039-040-Q1-E1-C8
gacctctcttattgttgttctcttcttcttttcttgtttccttttccattcttctttttctctctgtactcaaactcacgtccccacttagttatacaatgtcggcttagaaagaccaggatacccgtcttcatggcatcaatactaagattcgtgtcgtcaccaatttccccaaatccggtattatgttccaagacattactactcgattgcttgatcccaaagcatttatggacacaatagatttgttcgttgagcggtacaagggcaaaaacatttctgttgttgcatgaattgaagctccaggttttatttttggtcgtcccattgcgc

SEQ ID NO: 8815 - DNA, 393 bp, Glycine max
  Clone ID: LIB3039-040-Q1-E1-C9
gaaggtgcaagagtttgttgtgagctataagctagtttatcgtgaggagaatatgaagttgtttgttttctttgttgctgcagtagttttggtagcatggccatgccatggcgcaggctaccaaaggttccctctccgaatgaaaactggctatggtgagcgttcttcggaggtaaaatgcgcaagttttaggcttgctgtggaagcacacaacatccgagcctttaaaaccattcctgaagagtgcgttgaaccaacaaaggactacattaatggcgaacaatttagatcagactctaaaacagttaaccaacaagctttcttttatgctagtgaacgcgaagtccatcacaacgacatatttatattcggcatagataacaccgtactctc

SEQ ID NO: 8816 - DNA, 311 bp, Glycine max
  Clone ID: LIB3039-040-Q1-E1-D1
ggcacaagtgagtttgttgatcgagataactagaaacagtgtgatgaaaatgaaggtccttgttttcttcgttgctacaattttggtagcatggcaatgccatgcgtacgatatgttccctctccgaatgaacactggctatggtgcccgtactccggaggtgaaatgcgcaagttggaggcttgctgtggaagcacacaacatctttggctttgagaccattcctgaagagtgcgttgaagcaacaaaggaatacatccatggcgaacaatatagatcagactccaaaacagttaaccaacaagcttact

SEQ ID NO: 8817 - DNA, 387 bp, Glycine max
  Clone ID: LIB3039-040-Q1-E1-D10
ggcacaagtttgttgagatagctagaagcaataagatgaaaatgaaagtgcttgttttgtttgttgctacagttttggtagcatatgaatgccatggctcagactaccagaagttccctctccaaatgaaaactgggtttggtgggcaatacagcaatgaggtggcatgtgccagttggaggcttggcgtggaagcaaacaacgtagtcaagtggcaaactgttcctgcagcttgcggagagtacatagctgactacgttctaggagaccaatatagatcagattccaaaacagttaaccaacaagcttatttctatgctaaatccctcaaactcaccaacaaagatgtccttgtcttggacgttgacgacactactctctctaatc

SEQ ID NO: 8818 - DNA, 295 bp, Glycine max
  Clone ID: LIB3039-040-Q1-E1-D11
gacatcacatcacatcgcagagagagagagatccatcgatcaattaatttccaatggccgatcagctcaccgacgaacagatctctgagttcaaggaagcctttagcctcttcgacaaggacggcgatggttgtattaccaccaaggaacttgggactgtgatgcggtcgcttgggcagaacccaactgaggctgagctgcaggacatgataaatgaggttgatgctgatgggaatggtaccattgatttcccagaattcctcaatctcatggcgcgcaagatgaaagacactga

SEQ ID NO: 8819 - DNA, 389 bp, Glycine max
  Clone ID: LIB3039-040-Q1-E1-D12
gacacttcaaaatcctctggtaacccttattttatctattctctctctttcttttgtgttctaagcagctagaagcaatggagaggaaaagaagccatgcctctttcaccatgtttgcaatgcttgttggagtgatctctcagagccttgtcattcctgtagtatccaccactgttgaagatcagaagaactactacaccccagatccacatgctggaagtcccccctcaggctcacacagtagtactcctccatctcatggccatggaagctctccaccctcacatcatcacagtagtccaagtactccatcaacaccctcaggtggaaactgtgggttatcacctccacaacatcatgattcaacagcaccctcaactccatcaaca

SEQ ID NO: 8820 - DNA, 298 bp, Glycine max
  Clone ID: LIB3039-040-Q1-E1-D2
gaaggtgcaagagtttgttgtgagctagaagctagtttatcgtgaggagaatatgaagttgtttgttttctttgttgctgcagtagttttggtagcatggccatgccatggcacaggctaccaaaggttccctctccgagtgaaaactggctatggtgagcgttcttcggaggtaaaatgcgcaagttttaggcttgctgtggaagcacacaacatccgagcctttaaaaccattcctgaagagtgcgttgaaccaacaaaggactacattaatggcgaacaattttagatcagactc

SEQ ID NO: 8821 - DNA, 382 bp, Glycine max
  Clone ID: LIB3039-040-Q1-E1-D4
gatgtcatagtattatcattcattctcatctttctctcttctctctccacccaaaccctaactcccgaccctgttcccctctcgtatccgtcatgaaaggaggaaagtccaagaccgaatctaagagagccgatcccaaacttgctgtgaataagaagggagccgccaccaaggctaggaaacccgccggcaaggggaaggcagcgaaagaccctaacaagccaaagaggcctccaagtgctttcttcgttttcatggaggagttcaggaaggtattcaacatagaacatcctgaaaacaaagcagtgtctgctgtgggcaaagctgctggagcaaaatggaagaccatgtctgatgctgaaaaagcaccttatgtggcaaa

SEQ ID NO: 8822 - DNA, 380 bp, Glycine max
  Clone ID: LIB3039-040-Q1-E1-D5
ggcacaagtgagtttgttgatcgagataactagaaacagtgtgatgaaaatgaaggtccttgttttcttcgttgctacaattttggtagcatggcaatgccatgcgtacgatatgttccctctccgaatgaacactggctatggtgcccgtactccggaggtgaaatgcgcaagttggaggcttgctgtggaagcacacaacatctttggctttgagaccattcctgaagagtgcgttgaagcaacaaaggaatacatccatggcgaacaatatagatcagactccaaaacagttaaccaacaagcttacttttatggcagagaactcgaggtccaatccaaggacacatctgtgtccagtatagatggcaccgtactct

SEQ ID NO: 8823 - DNA, 366 bp, Glycine max
  Clone ID: LIB3039-040-Q1-E1-D7
ggcattttgtgaaaaaaaataaaaaatggggataggggtactatttgttgggtttttcttgctatcttgtgttgtgtgtgtgaagggtgtggagccaaaagcctcacccacttgtacatttccggcagtttacaactttggggactcaaactcagacactggaggcatatcagctccatttgtgccaattcctgcaccttatggcgagggcttctttcacaagccttctggaagggactgtgatggccgtctcattgtagatttcatagctgagaagctaaacttgccatacttaagtgcttatctgaattcccttggaaccaatttaccggcatggggcaaaatttgccactgggggatccacca

SEQ ID NO: 8824 - DNA, 351 bp, Glycine max
  Clone ID: LIB3039-040-Q1-E1-D8
gggaacctgatctcttgctggttgccacactacaccgatatttccaccaaacccgtttgcgttgttgtttgcgaataaatggcaactaagaggagcgtgggaacgttgaaggagggtgatttgaaggggaagagggtattcgtgagggtcgatctgaacgtgcctttggatgacaaccttaacatcaccgatgacactagagtccgtgctgctgttcccaccatcaagtacttgactggttatggtgctaaagtgatcctttctagccatttgggacatccaaaaggtgtaacacctaaatacagttgaaaccctcttgtgccaaggctgtctcaacttcttggaattgag

SEQ ID NO: 8825 - DNA, 394 bp, Glycine max
  Clone ID: LIB3039-040-Q1-E1-D9
agtgcacaagtgagtttgttgatcgagataactagaaacagtgtgatgaaaatgaaggtccttgttttcttcgttgctacaattttggtagcatggcaatgccatgcgtacgatatgttccctctccgaatgaacactggctatggtgcccgtactccggaggtgaaatgcgcaagttggaggcttgctgtggaagcacacaacatctttggctttgagaccattcctgaagagtgcgttgaagcaacaaaggaatacatccatggcgaacaatatagatcagactccaaaacagttaaccaacaagcttacttttatgccagagacctcgaagtccatcccaaggaaacatttgtgttcagtaaagatggcaccgtactctctaatattccat

SEQ ID NO: 8826 - DNA, 399 bp, Glycine max
  Clone ID: LIB3039-038-Q1-E1-F12
ggcacaagtttgttgagatagctagaagcaataagatgaaaatgaaagtgcttgttttgtttgttgctacagttttggtagcatatgaatgccatggctcagactaccagaagttccctctccaaatgaaaactgggtttggtgggcaatacagcaatgaggtggcatgtgccagttggaggcttggcgtggaagcaaacaacgtagtcaagtggcaaactgttcctgcagcttgcggagagtacatagctgactacgttctaggagaccaatatagatcagattccaaaacagttaaccaacaagcttatttctatgctaaatccctcaaactcaccaacaaagatgtctttgtcttggacgttgacgacactactctctctaatctccagtattttg

SEQ ID NO: 8827 - DNA, 385 bp, Glycine max
  Clone ID: LIB3039-036-Q1-E1-E2
ggttgtgcgtcggagctgtctgtgcaaatttgcgttgttcttcgcggcacacctcactcactgaacggtaagtatggcggacaaggctgttacaatccgaacccgaaagttcatgaccaacaggcttctttccaggaagcagtttgtcgttgatgtccttcatccagggagggcaaatgtttccaacgctgaacttaaggagaagctggctaggatgtatgaagtgaaagaccctaatactgtatttgtcttcaaattccgaacacattttggaggtggcaaatccactggatttggtttgatttatgatacagtggagaatgccaagaagtatgagcccaaatacaggcttatcaagaacggccttgacaccaaggtagaaaag

SEQ ID NO: 8828 - DNA, 268 bp, Glycine max
  Clone ID: LIB3039-036-Q1-E1-E3
aacagtttgtattgcaggcaaagctgtgttactccgaaacctatacttcatgagcaggtagcatctttccaaaaagcaatatggtcatcatatgattcatctacagagtgtgtggagtttccaacgttgaaattggagagaacggtcatacgatgtatcaatttgttggaactagatactgtcactgtcatcaaattctaagcacattttggctgttgcaaatccagtgaagttggtcagatttatcatacagtggacaatgccatta

SEQ ID NO: 8829 - DNA, 385 bp, Glycine max
  Clone ID: LIB3039-036-Q1-E1-E4
gcacaagtgagtttgttgatcgagataactagaaacagtgtgatgaaaatgaaggtccttgttttcttcgttgctacaattttggtagcatggcaatgccatgcgtacgatatgttccctctccgaatgaacactggctatggtgcccgtactccggaggtgaaatgcgcaagttggaggcttgctgtggaagcacacaacatctttggctttgagaccattcctgaagagtgcgttgaagcaacaaaggaatacatccatggtgaacaatatagatcagactccaaaacagttaaccaacaagcttacttttatgccagagacctcgaagtccatcccaaggacacatttgtgttcagtatagatggcaccgtactctctaata

SEQ ID NO: 8830 - DNA, 387 bp, Glycine max
  Clone ID: LIB3039-036-Q1-E1-E5
gacaatgtaaaaagttttacacggtcatctaatcataacccatcatgtatgataagtttattgacttttaaaataattattttaaaatgatttaaatgataatttgttattagatgacggtgtaaccgttagtacatatacattaaattcatgcaaaagtattagtaagatataaaaaaaaattgcaatgaatttaacataggtagccccaacgttgaagatggagtaaaattgtaaaaatgaagagattttcatgttttcagagaccttcacagttcacacttggtagagccatagaaattagaaaatgaaacagaataggtcaacttcaatcctttgcaagaatgaagtagatgcaaaataaagaattgcaaatatcataatttt

SEQ ID NO: 8831 - DNA, 383 bp, Glycine max
  Clone ID: LIB3039-036-Q1-E1-E6
tggtagtgagattcgcagtgttgttctggctgggcgtcgcttttatgagaaagagggtctacctgcttttcccatgggtaacattgatcaaacccgcatgtggaaggttggtgagcgtgtccgatctacaagagcagccggtgatcaaggcccattatatcctttcactgctggtgtctttgtggcattgatgatggcccagattgagatcctgaggaagaaagggcattcctactcggaaatcattaatgagagtgtcatcgaggcagttgactctttgaatcctttcatgcatgctcgtggtgtttctttcatggttgataactgttcaaccacagctaggttgggttcgaggaaatgggctccacgatttgactacatcc

SEQ ID NO: 8832 - DNA, 384 bp, Glycine max
  Clone ID: LIB3039-036-Q1-E1-E8
gaaacaaaaaccatcagcaacataaaaaaaaaaaaatatagaaagaaaaatgatgctcggagaacaccatcgcgggaatccgacggtcctcgtgccaccgtggccagcccacgacgatccgacggctgagatgtactccgcgttcttaacaaacgacgtcaatgctggtgagtactctccgtaccatcttcaagaagcactaacggcgctgcagcgttttctgccgtcaaacgaaacggacgcagactcggactcctcggaggcggctcagcccgacgcggcggtggacgcgtacacgtgcgaccatttccgcatgtacgagttcaaggtccgtcgatgcgcacgtggcaggtcacacgactggacggagtgtccgtacgcgca

SEQ ID NO: 8833 - DNA, 353 bp, Glycine max
  Clone ID: LIB3039-036-Q1-E1-E9
ggcagttgaattacagatgcagtctacaatcatccatcgttcatcatctgtctacgatgagctgtcactgagttgcgcagatatcgcgcgtgtacacagcctgctcacatccatcacgcatacttcatgaatatagcagcagtgtaaatgatgacattattagcaacttgttgagttctactaaagttccagtagacactcatgggtgaaacatgtgtgcaaaacatgctgctaggagatatcatggcaaattgagaacgcattcgtgaagcagttgcggatgaattgctgttacatccggctgatttgctgctgccgctggtcgtactgctacctgatcacgagatgctgaa

SEQ ID NO: 8834 - DNA, 385 bp, Glycine max
  Clone ID: LIB3039-036-Q1-E1-F1
ggcacaagtgagtttgttgatcgagataactagaaacagtgtgatgaaaatgaaggtccttgttttcttcgttgctacaattttggtagcatggcaatgccatgcgtacgatatgttccctctccgaatgaacactggctatggtgcccgtactccggaggtgaaatgcgcaagttggaggcttgctgtggaagcacacaacatctttggctttgagaccattcctgaagagtgcgttgaagcaacaaaggaatacatccatggcgaacaatatagatcagactccaaaacagttaaccaacaagcttacttttatgccagagacctcgaagtccatcccaaggacacatttgtgttcagtatagatggcaccgtactctctaat

SEQ ID NO: 8835 - DNA, 383 bp, Glycine max
  Clone ID: LIB3039-036-Q1-E1-F10
gattgacttaatagagaaacagagaaaagtaaggtgcgaaaagagtgaggcggagaaaaatgaagtgcccgtattgttcggcggcgcaggggcgttgcgccaccacgagcggcgggcgttcgatcacggaatgcacgtcttgcgggcgcgtggtggaagagcgacagtcgcatccccaccacgtgttccacgtgcgcgcccaggacaaccctctgtgtctcgtcacatcggatctcgctctccccgcgctcaatcaaaacaacgacgaggaggaccctttcgagcccacgggcttcatcaccgccttctccacctgggccctcgagcccaacccactttacctccagtcctccctctccttctccggctacctcgccgagctc

SEQ ID NO: 8836 - DNA, 375 bp, Glycine max
  Clone ID: LIB3039-036-Q1-E1-F11
gaaggtgcaagagtttgttgtgagctataagctagtttatcgtgaggagaatatgaagttgtttgctttctttgttgctgcagtagttttggtagcatggccatgccatggcgcaggctaccaaaggttccctctccgaatgaaaactggctatggtgagcgttcttcggaggtaaaatgcgcaagttttaggcttgctgtggaagcacacaacatccgagcctttaaaaccattcctgaagagtgcgttgaaccaacaaaggactacattaatggcgaacaatttagatcagactctaaaacagttaaccaacaagctttcttttatgctagtgaacgcgaagtccatcacaacgacatatttatattcggcat

SEQ ID NO: 8837 - DNA, 379 bp, Glycine max
  Clone ID: LIB3039-036-Q1-E1-F12
ggcacaagtgagtttgttgatcgagataactagaaacagtgtgatgaaaatgaaggtccttgttttcttcgttgctacaattttggtagcatggcaatgccatgcgtacgatatgttccctctccgaatgaacactggctatggtgcccgtactccggaggtgaaatgcgcaagttggaggcttgctgtggaagcacacaacatctttggctttgagaccattcctgaagagtgcgttgaagcaacaaaggaatacatccatggcgaacaatatagatcagactccaaaacagttaaccaacaagcttacttttatgccagagacctcgaagtccatcccaaggacacatttgtgttcagtatagatggcaccgtactc

SEQ ID NO: 8838 - DNA, 389 bp, Glycine max
  Clone ID: LIB3039-036-Q1-E1-F2
ggcagttcaattccaatatattccattctctctgtgtacttccctacctctcccttcaagatgcagatcttcgtcaagaccctcaccggcatgaccatcacccttgaggtggaaagctctgacaccatcgacaacgtcaaggccaagatccaggacaaggaaggaatccccccggaccagcaacgtctcattttcgccggaaagcaacttgaggacggccgtacccttgctgactacaacattcagaaggagagtactcttcacctcgtcctccgtctccgtggtggcatgcagatcttcgttaagacactcaccggcaagaccataaccctagaggttgaaagctccgacaccatcgataacgtcaaggccaagatccaggacaagga

SEQ ID NO: 8839 - DNA, 413 bp, Glycine max
  unsure (1)..(413): unsure at all n locations
  Clone ID: LIB3039-036-Q1-E1-F3
agaacaacaagaaagggggaaacctttgtgcaattccaatccaatccaggattccagcaagttgcgttttgggaagcaagaaaaccgaaaatactttcgagaagggcccgtacanagcaaactgctcgtaagtcaactggaggaaaagctcccaggaagcagcttgcaaccaaggctgcacgtaagtctgcaccaacaactggtggtgtgaagaagcctcatcgttatcgccctggaactgttgctcttcgtgagattaggaaataccagaagagcactgagctcctaatcaggaagcttcctttccagaggttggttcgtgaaattgcccaggatttcaagactgatctgcgtttccagagccatgctgtgcttgcattgcaagaggctgctgaggcataccttgttgggct

SEQ ID NO: 8840 - DNA, 388 bp, Glycine max
  Clone ID: LIB3039-036-Q1-E1-F4
ggcagcatccattcttgttctcttcattctttcgatcagggtttcccctcgtctccgggctcgtttcgttctcgaataatcgatctacgataatgactcacggtagccagagggatcctgatcgcgaaagggctcaagctaaaactggtgctaaaggcaagcataaagatgatggattgacccctgaacaacgcaaggaaagagatgcaaaagcgctgcatgagaatgccgcaaagaaagctgcacatggtgcaagaaggaataatgcacctggaagcacaaaatatgcaataattcactgagtagtttgagtttgccgtttgttgattgtggacatggaatttgtgcgaattttatgttgcattattcatggagtatgatgtgttta

SEQ ID NO: 8841 - DNA, 380 bp, Glycine max
  Clone ID: LIB3039-036-Q1-E1-F5
gagaatagtgagagtgagagatggatcagtttttgtggagggtgttgcctttgcttgcaatccttgtttcctttggagtgttcttctacttgcaggattcttacacagcacagttatttcctctcataaagttaccgcgggataagtgcagccttcttccccatcgccacttctggatatccagcaaacgtattgtgaccccacaagggatcatttctggttcagtggagataaatgatgggaaaataatatctgtcgttgagggacatgctattcaggggaagcctaagcaagaagaagtaattgattatggagatgctgttatcatgcctggcttgattgatgtgcacgtacatcttaatgagcctggaagaactgag

SEQ ID NO: 8842 - DNA, 385 bp, Glycine max; identical to SEQ ID NO: 8834
  Clone ID: LIB3039-036-Q1-E1-F6

SEQ ID NO: 8843 - DNA, 369 bp, Glycine max
  Clone ID: LIB3039-036-Q1-E1-F7
ggcagccaagaaaagaaaatcctcacccattttcttcgtagccaaacactctgaaattctcagttatgtcgtggcaagcgtatgtggatgatcacctactgtgtgaaatcgaaggtaaccacctcactcacgccgctatcatcggccaagacggaagcgtttgggctcagagcaccaacttccctcagttcaaacctgaggaaataactgccatcaataatgactttaatgagcctggatcacttgctccaactggattgtatatcggtggcaccaaatacatggtcatccagggtgagcctggtgctgtcattcgagggaagaagggtcctggtggtgttactgtgaagaagaccggtgcggccttga

SEQ ID NO: 8844 - DNA, 380 bp, Glycine max
  Clone ID: LIB3039-036-Q1-E1-F8
gacactaaacaagttaaaagaagagcatcactgaactaacaaagcaaccctatgtcgaaggtggtttgtgtcaccggagccagcggcgccatcggatcatgggtggtcctactcctcctccagcgtggttacaccgtccatgccaccgtccaagatatcaaggatgaaaatgagacgaaacatttggaggaaatggaaggagcaaagagtcatctccatttttttgaaatggatcttcttgacatcgactccattgccgctgccataaagggttgttccggcgtaatccaccttgcatgtcctaacatcattggtcaagtcgaagatcccgagaaacagatattggaaccggcgataaaaggaacggttaatgtgttgaa

SEQ ID NO: 8845 - DNA, 379 bp, Glycine max
  Clone ID: LIB3039-036-Q1-E1-F9
gcacaagtgagtttgttgatcgagataactagaaacagtgtgatgaaaatgaaggtccttgttttcttcgttgctacaattttggtagcatggcaatgccatgcgtacgatatgttccctctccgaatgaacactggctatggtgcccgtactccggaggtgaaatgcgcaagttggaggcttgctgtggaagcacacaacatctttggctttgagaccattcctgaagagtgcgttgaagcaacaaaggaatacatccatggcgaacaatatagatcagactccaaaacagttaaccaacaagcttacttttatgccagagacctcgaagtccatcccaaggacacatttgtgttcagtatagatggcaccgtactct

SEQ ID NO: 8846 - DNA, 387 bp, Glycine max
  Clone ID: LIB3039-036-Q1-E1-G1
ggcacaagtttgttgagatagctagaagcaataagatgaaaatgaaagtgcttgttttgtttgttgctacagttttggtagcatatgaatgccatggctcagactaccagaagttccctctccaaatgaaaactgggtttggtgggcaatacagcaatgaggtggcatgtgccagttggaggcttggcgtggaagcaaacaacgtagtcaagtggcaaactgttcctgcagcttgcggagagtacatagctgactacgttctaggagaccaatatagatcagattccaaaacagttaaccaacaagcttatttctatgctaaatccctcaaactcaccaacaaagatgtctttgtcttggacgttgacgacactactctctctaatc

SEQ ID NO: 8847 - DNA, 378 bp, Glycine max; identical to SEQ ID NO: 7899
  Clone ID: LIB3039-036-Q1-E1-G10

SEQ ID NO: 8848 - DNA, 379 bp, Glycine max; identical to SEQ ID NO: 8837
  Clone ID: LIB3039-036-Q1-E1-G11

SEQ ID NO: 8849 - DNA, 196 bp, Glycine max
  Clone ID: LIB3039-036-Q1-E1-G12
gacgacattccaaaacacaaacacatacattgtagtatcacttgtgtctcggaacttgttcgtttgagttatggcaagcttaaaggttgcatgtgtggatttgacgtgcctggctgtgatgagtgcaccaatgatggtgcaacccgtgtcatgcaatgcagtttctgtgaatctagcaccgtgcctaacttacctg

SEQ ID NO: 8850 - DNA, 376 bp, Glycine max
  Clone ID: LIB3039-036-Q1-E1-G2
gacaacaaatcacaatgcagcaagctccaaccacactcaccggattgctccatcgcgtcgccggaatattcccctcccgccgcgccgtctccgtctccggcaagttcgacctcacgcactcccgtctccaccacctcgtcgaactcgccgcctcgcgcctcctctccgccggcatcaaacccggcgatgtcgtcgccctcaccttccccaacaccgtcgagtttataataacgttcttggccgttattcgagcgcgagccacggcggcgccattgaacgcggcttacaccgccgaggagttcgagttttatctatctgactcagattcaaagctgttactaacctcaaaagaaggaaacgagccggctcaagccgc

SEQ ID NO: 8851 - DNA, 385 bp, Glycine max
  Clone ID: LIB3039-036-Q1-E1-G3
ggttctagtgtgtgattgtttgttgttgtaactcgttcttcttcttttgttgttctgtgtttgtgtttgttttttctctcacctgaaaatgtcttgctgcggtggtaactgtggttgcagaagctcctgcaagtgctgcaacagctgcagaggctgcaatatgtacccacacttgagctacactgattcaaacaccaccgagaccttggtcatgggagtggcacctgttaaggctcaatttgacggtgctgaaatgggtgtgcccgctgagaacgatggctgcaaatgtggaccaaactgctcctgcaacacctgcacttgcaagtgagatgttgggagagcaagcttcatgcagagatagcccttaattatgaataatgataaa

SEQ ID NO: 8852 - DNA, 379 bp, Glycine max
  Clone ID: LIB3039-036-Q1-E1-G4
gacacacacacacactctctttccatgggtccgtttcgtaaacccttccttgcatttctctcggttgttctatttctgggtctctatgaggcagcagcagaacagactcagactcacaagagtacttacattgtacacgtggcgaaatcggagatgcccgagagcttcgagcaccacgctgtgtggtatgagtcgtcactgaagaccgtgtctgactcggcggagatgatttacacctacgacaacgccatccacggctacgcgacgagattaaccgctgaggaagcgcgtttgctccagcgccaaacggggattctggctgttttgccggagacgaggtacgagcttttcacgacgcgaacgcctttgtttctcggac

SEQ ID NO: 8853 - DNA, 377 bp, Glycine max
  Clone ID: LIB3039-036-Q1-E1-G5
gagaaaagaaaaaggaaaccctagctggataggtcaaacatcatcatgtcggacgaagagcaccatttcgagtccaaggcagacgccggtgcctccaaaacctaccctcagcaagccggtaccattcgcaagaacggctacatcgtcatcaaaggacgcccctgcaaggttgtggaagtttcgacttccaaaactggaaagcacggtcacgccaagtgccactttgttggaattgatattttcactgccaagaaacttgaggatattgtgccctcttctcacaactgtgatgttcctcatgtgaatcgtactgattaccagctcattgatattgctgaggatggatttttgagtctgcttactgaaaatgggaacac

SEQ ID NO: 8854 - DNA, 373 bp, Glycine max
  Clone ID: LIB3039-036-Q1-E1-G6
gagattcagatccactgcactgcactcgtccaatttcactcactctcacattcccaatttctccatgaaaccctaatttcagccatggttgttacatccaaaccttctccaatggcgctagatctcaaaacctccttcactctccccaaaaccctaaagctcaagacgaagcagcaagagcttctgatccgcgtcgccacgctctccctcatctacgtcctcgccttcatcacgcgcctcttcagcgtgctccgctacgagtccatgatccacgagttcgacccctacttcaactaccgcaccacgctcttcctcactcgcaacggcttcgccgagttctggaactggttcgactcggaatcatggtacccgc

SEQ ID NO: 8855 - DNA, 368 bp, Glycine max; identical to SEQ ID NO: 8085
  Clone ID: LIB3039-036-Q1-E1-G7

SEQ ID NO: 8856 - DNA, 378 bp, Glycine max
  unsure (1)..(378): unsure at all n locations
  Clone ID: LIB3039-036-Q1-E1-G8
ggatttcatttcgtttgcaattgaatttcaatttccctaggggcttaatatctcccctcacttgtgcctagccttatgtcatagtattatcattcattctcatctttctctcttctctctccacccaaaccctaactcccgaccctgttcccctctcgtatccgtcatgaaaggaggaaagtccaagaccgaatctaagagagccgatcccaaacttgctgtgaataagaagggagccgccaccaaggctaggaaacccgccggcaaggggaaggcagcgaaagaccctaacaagccaaagaggcctccaagtgctttcttcgttttcatggaggagttcaggaaggtattcaacanagaacatcctgaaaacaaagc

SEQ ID NO: 8857 - DNA, 381 bp, Glycine max
  Clone ID: LIB3039-036-Q1-E1-G9
gaaaacacagacacaaattacataacctcagtaatctgacatagagacaaaaacaatgaaggtttccattgccaagttccactcccttcccctatgttttttccttctcttggacttcatcacaaaacccctcctaccagcaggaccagagccagtggttgataagcaagggaaccctttggagccatcagtatggtactacgtgtggccactttgggctgatgaatgaggcctcacactaggccacacaacgaacaagacatgccctctttatgtaaaccgtgacccttcattcattggaaccccagtttcattcttagcatcacgacatgaacatgttccaacactcactgatcgaagcattgatttccctgtggtgac

SEQ ID NO: 8858 - DNA, 382 bp, Glycine max
  Clone ID: LIB3039-036-Q1-E1-H1
gacagcagagcaaaagaaagaaagaaactgcaacttcctctgttttgctcccctgtttaggccttttcataagcttagaatgacacacaaggaattttccattgctctagtgactctcattgctgttctctttgtcaacatgaacatccaaggtgccactgctgactatggtagttggcagagtgctcatgccactttttatggcgggggtgatgcttctggcacaatgggtggagcatgtgggtatggaaatttgtatagccagggctatggaactgacactgtggctctaagcactgctttgttcaacaatggcttaagctgtggatcttgctatgaaatgagatgtgatgatgacccaagatggtgcaaacctggctcc

SEQ ID NO: 8859 - DNA, 381 bp, Glycine max
  Clone ID: LIB3039-036-Q1-E1-H11
gagggcgaggaagccacatagagacacaatacagagtgagttgttgctccttcgccacaactctctgccaacatgggtatctccagagattctatgcacaagaggcgtgccactggtggcaagaagaaggcctggaggaaaaagagaaagtatgagcttggtcgcgaacctgctaacactaagctgtcaagcaacaagacagtcaggaggatccgtgttagaggtggaaatgtgaaatggagggcattgagattggatactggaaattactcctggggaagtgaagctgtaactcgcaatactcatgtactagatgtggtttacaatgcctcaaacaatgagcttgtgcgtactcagactcttgtcaaaagtgctatcgtt

SEQ ID NO: 8860 - DNA, 245 bp, Glycine max
  Clone ID: LIB3039-036-Q1-E1-H12
ggagcgtagttgaggttttgcttttgccacttcgaaaccaaattttcttcgttcgtccttctgtgatctcttcttccaccatgagcaggtcagggcaaccaccggatttgaagaagtacatggataagaagcttcagatcaagctgaacgcaaatcgcatggttgttggtactctccgtggctttgaccagtttatgaatttagttgttgacaacactgtggaagtgaatggcaatgagaaaaat

SEQ ID NO: 8861 - DNA, 391 bp, Glycine max
  Clone ID: LIB3039-036-Q1-E1-H2
gacagagaagggtttcgtcgggggtcacgtttcacaatcacgttttgcgcatctctcactcactgactcctctgctgccgcatcatgtggggttccatcgcgaagtcaagggacaaggcatgagatgcttcatatccagggagggcaatgcgggaaccagatttgatccaaggtctgggacgtagtgtgtacggatgacgggatcgaatcaacggggaggtaccatagggacaatcaggtgcaacgcgatcgagtcaaagtcgactacaatgatgcgaattgcggtaggttcgtgcctaaggcagtgctcaaggattcggacccatagaccatggacagcgtcatctatggtcactacagtcatatattccggacagataacatcgtcctc

SEQ ID NO: 8862 - DNA, 387 bp, Glycine max
  Clone ID: LIB3039-036-Q1-E1-H3
gagagaaagagagagaaagatgtcgaagcgtggtcgtggtggttcggcggggaacaagttccgcatgtcgctgggtcttccagtggcggcgacggtgagctgcgccgacaacacgggggcgaagaacctctacatcatttcggtgaaagggatcaaaggccgtttgaaccgtcttccctcggcctgcgttggcgacatggtgatggccaccgtgaagaagggaaaacccgatctgaggaagaaggtcttgccagctgtcatcgttcgccagcgcaagccatggcgccgaaaggacggcgtctacatgtacttcgaagataatgctggtgttattgtcaatcccaagggagaaatgaaaggttctgctatcactggtcccattgggaa

SEQ ID NO: 8863 - DNA, 392 bp, Glycine max
  Clone ID: LIB3039-036-Q1-E1-H4
gagcgaaacagagagtgatttcagtgagtgatcggtgttcacttgatctcatcataatcgtcagcgtcaattgaagaagatgccgatcagaaacatcgccgtcggaaggcctgaagaggcgacccaccccgacacgttgaaggcggctttggctgagttcatctcaaccttcatcttcgtgttcgccggctcaggctccggcatcgcctacaacaagctcaccgacaacggcgctgccacccctgccggcctcatctccgcctccatcgcccatgcattcgccctcttcgtcgccgtctccgtcggcgccaacatctccggcggccacgtcaaccccgccgtcaccttcggcgccttcgtcgggggcaacatcaccttcctccgcgggaacg

SEQ ID NO: 8864 - DNA, 387 bp, Glycine max; identical to SEQ ID NO: 8846
  Clone ID: LIB3039-036-Q1-E1-H5

SEQ ID NO: 8865 - DNA, 423 bp, Glycine max
  Clone ID: LIB3039-036-Q1-E1-H6
gacccacgcgtcaggacagaaggggacaggcaaaaaccctagccttcgaaaaccctaatcctgaggcactgtgatatggcaagagccgtttcctcttcctgcgcgcgcctcacaatgcgcctcttctccaccaccaccaccaccaccaccaccaccgctgcgttcgccgttacattacccaaaccctcgtcactctcagtctcaacgcgtcgattcctcttccctctctcccatgccatcgtccctccctccacccgcgtcgccggaatccggtgccgtgtcaaccgcgccggcgactcatcgtactcgccgctgaactcagcttcgtcatcgtcgtcgtcgttcagcgaccggcctcccacggagatggcgccgctctttcacggctgcgactacaaccactggctcatcgtcatggaccat

SEQ ID NO: 8866 - DNA, 388 bp, Glycine max
  Clone ID: LIB3039-036-Q1-E1-H7
gaaggtgcaagagtttgttgtgagctataagctagtttatcgtgaggagaatatgaagttgtttgttttctttgttgctgcagtagttttggtagcatggccatgccatggcgcaggctaccaaaggttccctctccgaatgaaaactggctatggtgagcgttcttcggaggtaaaatgcgcaagttttaggcttgctgtggaagcacacaacatccgagcctttaaaaccattcctgaagagtgcgttgaaccaacaaaggactacattaatggcgaacaatttagatcagactctaaaacagttaaccaacaagctttcttttatgctagtgaacgcgaagtccatcacaacgacatatttatattcggcatagataacaccgtt

SEQ ID NO: 8867 - DNA, 314 bp, Glycine max
  Clone ID: LIB3039-036-Q1-E1-H8
ggcagttcaaagcgaagaaagattcgaaacgaagaaagaaagcgttgtgaagaatggcggaagagggacaagtgatcggtgtccacagcgtagaggagtggaaggaacatctcaagaagggagaagagtccaagaaattgattgtggtggattttactgcttcttggtgcggtccatgccgtttcattgccccaattcttgcagagtttgctaaaaagttgccgaatgtcaccttcctcaaggtggatgtggatgaattggagactgtttccaaggagtggggaattgaggctatgccaaccttcctgttcttg

SEQ ID NO: 8868 - DNA, 381 bp, Glycine max
  Clone ID: LIB3039-036-Q1-E1-H9
ggagcaagagtgaagagcgaagagaatggctcccaagggtttaatctttttggctgtgttatgcttctcagcactgtcactgagtcgttgtcttgcggaggataatggacttgttatgaacttctacaaggaatcatgccctcaggctgaagacatcatcaaagaacaagtcaagcttctctacaagcgccacaagaacactgctttctcctggctcagaaacatcttccatgactgtgctgttcagagttgtgatgcttcactgttgctggactccacaagaaggagcttgtctgagaaggaaacagatagaagctttgggttgagaaatttcaggtacattgagaccatcaaagaagctttggaaagggaatgcccagg

SEQ ID NO: 8869 - DNA, 363 bp, Glycine max
  Clone ID: LIB3039-037-Q1-E1-A11
acgacagaaaggggcacaagtgaatatgttgatctagataactagaaacagtgtgatgaaaatgaaagtccttgttttcatcgttgctacaattttggtagcatggcaatgccatgcgtaagatatgttccctctccgaacgaacactggctatggtgcccgtactccggatgtgaaatgtgcaagttggaggcttgctgttgaagcacacaacatctttggctttgagaccattcatgaacagtgcgttgaagcatcaacggaatacatccatggcgaacaatatagatcagactccaaaacagttaaacttcaagcttacttttatgccagagacctcgacctccatctcaatgacacagt

SEQ ID NO: 8870 - DNA, 294 bp, Glycine max
  unsure (1)..(294): unsure at all n locations
  Clone ID: LIB3039-037-Q1-E1-A12
ggcacaagtttgttgagatagctagaagcaataagatgaaaatgaaagtgcttgttttgtttgttgctacagttttggtagcatatgaatgccatggctcagactaccagaagttccctctccaaatgaaaactgggtttggtgggcaatacagcaatgaggtggcatgtgccagttggaggcttggcgtggaagcaaacaacgtagtcaagtggcaaactgttcctgcagcttgcggagagtacatagctgactacgttctangagaacaatatagatcagattccaaaacag

SEQ ID NO: 8871 - DNA, 85 bp, Glycine max
  Clone ID: LIB3039-037-Q1-E1-A3
gaaggtgcaagagtttgttgtgagctataagctagtttatcgtgaggagaacatgaatttgttggttgtcgctgttgctttggta

SEQ ID NO: 8872 - DNA, 67 bp, Glycine max
  Clone ID: LIB3039-037-Q1-E1-A7
ggcacaagtttgttgagatagctagaagcaataagatgaatatgaaagtgcctgttttgtttgttgc

SEQ ID NO: 8873 - DNA, 71 bp, Glycine max
  Clone ID: LIB3039-037-Q1-E1-A8
ggcacaagtgagtttgttgatcgagatcactagaaacagtgtgatgaaaatgaacgtccttgttttcttcg

SEQ ID NO: 8874 - DNA, 289 bp, Glycine max
  Clone ID: LIB3039-037-Q1-E1-B1
gataactcaaatcctcggagagaaaaaaagttagggttttgcattttggatcagtcagactcagacatgggaggaggcaatgcccagaagtcaaagatggctcgcgagaagaatctcgagaagcagaaagcagcggctaaggggagccagttggattcacacaagaaagctatgtctattcagtgtaaggtgtgcatgcaaacatttatatgcaccacatcagaagtgaagtgtaaggagcatgctgaagccaaacacccccaatcccgatctccatggtttgttttcc

SEQ ID NO: 8875 - DNA, 259 bp, Glycine max
  Clone ID: LIB3039-037-Q1-E1-B10
cgagaagacacagatgggactctggagcagcacttttgatcgccaagacatttatccaatctccgaatcccttcagcgcttttttatcacgtcgatacgacttgtgttccatcgtcatgatcttcgtctgacttgggccctctccgttgcacatctggctcatgtgtccgtactccgtaggtgatgtgcgccctttgctggcttgcctgttccagtacactttttcttttgctttgccactcttcctgcttagtgcctt

SEQ ID NO: 8876 - DNA, 389 bp, Glycine max
  Clone ID: LIB3039-037-Q1-E1-B11
ggtgccctgctcgtgcctctagggttatcatttctccatttccattttctctctcacttttcaagaatcgtaagctatgggaaagtcttacccagctgtgagtgctgattaccagaaggccgttgagaaggcgaagaagaagctcagaggcttcatcgctgagaagagatgcgctcctctaatgctccgtttggcatggcactctgctggaacctttgacaagggcacgaagaccggtggacccttcggaaccatcaagcaccctgccgaactggctcacagcgctaacaacggtcctgacatcgctgttaggcttttggagccactcaaggcggagttccctattttgagctacgccgattttctacagttggctggcgttgttgccg

SEQ ID NO: 8877 - DNA, 373 bp, Glycine max
  Clone ID: LIB3039-037-Q1-E1-B12
acaatcagtatcgtgaccatgatgggatggaagatgactaccatgctggacgtgcaacatctgaatcgcatgaaaaggagagaagtcatgatgtggaccgtgaatatcaacgctcagagagatcacattcccgggagtatgattattaggacttgggcatagttcttctcaactttgttggtaagattttataatttggtatgtttacttttgaatcttgctcacctgccggtattggtagttgttgaatggattaaggcacagtgtgatcattaaaaagaaaactgtagctgctgctatccatatggcccatatttgaaagctgccttttgtcaacgtggacttggacatctaatattggtaattgtttggc

SEQ ID NO: 8878 - DNA, 85 bp, Glycine max
  Clone ID: LIB3039-037-Q1-E1-B2
tgggaggaacaacaagcgaaaataggccacatcgcttgtactttcatcatcgcataatcccgttgtagttttctcacatggctcg

SEQ ID NO: 8879 - DNA, 96 bp, Glycine max
  Clone ID: LIB3039-037-Q1-E1-B3
gacagcatagcactaatctattttacacgacacccacattttgatcattacttttctagttggtaagccatggctacgcgaggagagcttgaggtt

SEQ ID NO: 8880 - DNA, 212 bp, Glycine max
  Clone ID: LIB3039-037-Q1-E1-B4
gacccacacgtccagcggacagaagggttaccctcgaagagtacaaagcagcagtgagaacaatggggtggggaatccatggcactgatatcgattagtcttctcacgtgatcgactctgatggacattgcgacactcacatccaagcgtgcatcgcagattatcaggctgacgttgatgatgcgaccaacaagctcagaggcttcatcgct

SEQ ID NO: 8881 - DNA, 68 bp, Glycine max
  Clone ID: LIB3039-037-Q1-E1-B7
ggcacaagtgagtttgttgatcgagataactataaacagtgtgatgaatatgaaggtcgttgttttct

SEQ ID NO: 8882 - DNA, 56 bp, Glycine max
  Clone ID: LIB3039-037-Q1-E1-B8
ggtgcacaagtgagtttgttgctggagatatctacaaagtgtgtgatcagtgctca

SEQ ID NO: 8883 - DNA, 358 bp, Glycine max
  Clone ID: LIB3039-037-Q1-E1-B9
tgtgatggtaatgaaggtccttgatttcttcgatgctacaattttggtagcatggcaatgccatgcgtacgcattgttcccactccgaatgaacactggctatggtgcccgtactccggatgtgaaatgcgcaagttggaagcttgctgtggaatcacacaacatctttggctttgagaccattcctgaagagtgcgttgaagcaacaaacgaatacatccatggcgaacaatatagatcagactccaaaacagttaaccaacaagcttacttttatgccagatacctcgaggtccatcccaacgacacatttgtgttcagtatagatggcaccgtactctctaatattccatactac

SEQ ID NO: 8884 - DNA, 233 bp, Glycine max
  Clone ID: LIB3039-037-Q1-E1-C10
ggaccacattccaaaacacaaacacatacattgtagtatcacttttgtctcggaatttgttcttttgagtcatcgcaagcttaaaggttgcatgtgtggttttgacgtcgctggctgtgatcagtgcatcactgatggtccaagccgtgtcatgcaatgatctctctgtgaacctagtactgtgcctatggtacctcatgccaggtgtagatgtgccacaagctttgaatttc

SEQ ID NO: 8885 - DNA, 397 bp, Glycine max
  Clone ID: LIB3039-037-Q1-E1-C11
gactcaccacttcaaaacactcataacacaaagcacaaagcaaagctcatccttgagttaaaaaatggcagcagcttcttccatggctctctcatccccatccttggctggcaaggccgtgaagctgggcccatcagccccagaagtgggaagggtgagcatgaggaagaccgtcaccaagcaggtctcctcaggaagcccatggtacggcccagaccgagtcaagtacttgggcccattctctggcgagcccccgtcctacctaaccggtgagttcccaggcgactacggctgggacactgctgggctttccgcagacccagaaaccttcgccaagaaccgtgaactcgaagtgattcactccaggtgggccatgctcggagccttgggctgcgtc

SEQ ID NO: 8886 - DNA, 410 bp, Glycine max
  unsure (1)..(410): unsure at all n locations
  Clone ID: LIB3039-037-Q1-E1-C12
gaaggatcagcagggagaattaggtttttagggtttacaccgagcagccacacctcccgcagcagccatggttctcaaaactgaactatgccgattcagtggtgccaagatctacccaggaaagggcatcagatttgttcgtggtgattctcaggttttcctgtttgcaaactcaaaatgtaagaggtatttccacaatcgcctgaagccttcaaagctcacctggactgcaatgtacagaaagcaacacaaaaaggacattgctcaagaagctgtgaggaagaggagacgtgctgccaaaaagccttactctaggtccattgttggtgcgaccttggaagtaatccagaanaagagagctgagaagccagaagttcgagatgcagctagggaagctgctcttcgtgaaa

SEQ ID NO: 8887 - DNA, 77 bp, Glycine max
  Clone ID: LIB3039-037-Q1-E1-C2
gcacccagaaaatacaggttcaatttcaactgtttcacccccttcatgtactatctttgtgcacgtcagtccgagtg

SEQ ID NO: 8888 - DNA, 159 bp, Glycine max
  Clone ID: LIB3039-037-Q1-E1-C5
ggagcataaccctaatccctacttttcttcctcactactgtcatttacgcttctcttctctgcagcaactattcctaaccctaaggtcttccttgacatgactatcggcggtcaatctgctggccgcatcgtgatggacctctacgctcacatgtctcc

SEQ ID NO: 8889 - DNA, 75 bp, Glycine max
  Clone ID: LIB3039-037-Q1-E1-C7
ggcacaagtgagtttgttgatccagataaccacaaacactctgatgaacatgaaggtcctcgttttcttcgttgc

SEQ ID NO: 8890 - DNA, 163 bp, Glycine max
  Clone ID: LIB3039-037-Q1-E1-C8
ggtacctaaaattccgaagttctttttcttataatggggctcttgtggaaaactcacacgaggatacacgtgattagaacattttttgcaatccttttggttgcactgctgagttcagagagagtagagagcagaagagccaaagttgtgaccacttccttgg

SEQ ID NO: 8891 - DNA, 343 bp, Glycine max
  Clone ID: LIB3039-037-Q1-E1-C9
gcatcactctcttcatcttcgatttccattgcgacgcgtgactttttcatcttctttctcgtcattttcttcgctcttcgatcttcgtcaggggactgctccgactaccagcagtaccactcactggtggccacgatcggacgcttacacgattcccaaagctctcacaacagcgtctaaactgacaccctcgctcgattcgccgtagtcgatcacttcagatggcataattcgcttctggagtttgctacggtggttatggcacaggaacaggttgttgctggaaccctgcatcatcttaaccttgaggctatttacgctggtcacaacaagctctatgaag

SEQ ID NO: 8892 - DNA, 66 bp, Glycine max
  Clone ID: LIB3039-037-Q1-E1-D1
ctatcataaccatacagaatttgactacaaaagtggattttatgagacttaatcatgactctcagc

SEQ ID NO: 8893 - DNA, 189 bp, Glycine max
  Clone ID: LIB3039-037-Q1-E1-D10
gagacacgtgatctaagatctctctctatctgggatctgcttccttctcttctctttctcaaatctcactcatagtcctaatgcagtcctcggatctgctacgttctaattctccttcaacgcatcacgagactacatgttcctctttcactcgggctatggcattcgtgcttccctcgtgtctctggc

SEQ ID NO: 8894 - DNA, 372 bp, Glycine max
  Clone ID: LIB3039-037-Q1-E1-D11
ggcctcagccctaaaacccaaggctgctgagtgttgcagaggcatgtctgagtcggacacgaagaagaagaagcagcagcagcgcagcggcggaaagcatgaaggagaagaagggttgatgatcaagccccagagcttcactccccccatcgacacctcccaatggcccattctcctcaaaaactacgagcgcctcaacgtccgcaccggccactacacccccattccctccggctactcccccctgaagcgccccctctccgagtacctcaaatacggcgtcctcaacctcgacaagcccgccaacccttcctcccacgaggtcgtggcctggatcaagcgcctcctccgcgtcgaaaaaaccggccactc

SEQ ID NO: 8895 - DNA, 379 bp, Glycine max
  Clone ID: LIB3039-037-Q1-E1-D12
gatccaaattcaagttcgcaccaaattttcctcccaaaatgtcaggccgtggaaaaggtgggaagggtttgggaaagggaggagctaagaggcacagaaaggttcttcgtgacaacattcaaggaatcacgaaacctgcgattcgtaggttagcgagaagaggtggcgtgaagaggatcagtggtttgatttacgaggaaaccagaggagttctgaagatattcttggagaacgtgattcgcgatgctgtaacctacactgagcacgctaggaggaaaactgttactgctatggatgtcgtttatgctctcaagagacagggaaggaccctctatggctttggaggctaaagaatagaatctttaagtttaatgactgt

SEQ ID NO: 8896 - DNA, 80 bp, Glycine max
  Clone ID: LIB3039-037-Q1-E1-D3
ggctcaagtgagtttgtcgcttgagattttcatcacaattcttacgaccgtctacgtcgttgtatggttttctgacacgg

SEQ ID NO: 8897 - DNA, 193 bp, Glycine max
  Clone ID: LIB3039-037-Q1-E1-D6
acccacacgtccaccggctgctacatgcggctgcaaggtgactacagaagggtatcggtcttttgataagccctctgataagaataatgggtacttgcttcccatgcccaagatggttaactcggatcttgccaggattagtaagtctgacgaggttcagtctgttgtgaggcccattaagaaggatgtgaag

SEQ ID NO: 8898 - DNA, 60 bp, Glycine max
  Clone ID: LIB3039-037-Q1-E1-D7
tggggctctttcgtggttgtgccacctctataattctcttgtactgtgctgtgttctcct

SEQ ID NO: 8899 - DNA, 255 bp, Glycine max
  Clone ID: LIB3039-037-Q1-E1-D9
acgacgcgtccgatacagcagtcagaacacgcactcaaaggggcacaagtgagtgtgttgatggagagagttatggcacattgttaatgaatttgaaagtccgtctggttctcatgactacggatgagagtatgcgcttaatatcctcagatctgttactcctccgtggggaaatcgtgcctgctgtccgtctacgcgcggtaagatttcaacatgcaatccatggccaccatatgcgtcaagttccaggctcag

SEQ ID NO: 8900 - DNA, 391 bp, Glycine max
  Clone ID: LIB3039-037-Q1-E1-E11
gacaacacaacgcaacacaacgcgcactctctcttttctctcttaacacaaaaaccctatcgttcttcgcggtttcgccgattctcgccatgccgaaagccaaatccgacgccaaagccgccgatagccggttgaagcgcaagggcgctggtgctggaaggaagcaatcgaagaaagctgctaaggatcctaacaagccaaagagacctccaagcgctttcttcgttttcatgtccgagttcagagagcagtttaagaaggagcatcctaacaacaaatccgtcgctgttgtcggtaaagctggtggtgacaaatggaaatcgctgtctgatgctgaaaaggcccccttcgttgccacggccgaaaagaagaaacaagagtatgagaaaac

SEQ ID NO: 8901 - DNA, 364 bp, Glycine max
  Clone ID: LIB3039-037-Q1-E1-E12
ggcacaagtgagtttgttgatcgagataactagaaacagtgtgatgaaaatgaacgtccatgttatcttcgttgctacaattttggtagcatggctatgccatgcgtacgatatgttccctctccgaatgaacactggctatggtgcccgtacgccggatgtgaaatgcgcaagttggacgcttgctgtggaagcacacagcatctttggctttgagaccattcctgaacagtgctttgaagcaacataggaatacatccatggggagcaatatacatcagactccataacagttaaccatcaagcttacatttatgccagatacctccaagtccatcccaaggacatatttgtgttcagtata

SEQ ID NO: 8902 - DNA, 71 bp, Glycine max
  Clone ID: LIB3039-037-Q1-E1-E3
ggcagtgcaattccattaatctcgatactcactgtgaatttcttcaccttgctcgtcaatattttcatcgt

SEQ ID NO: 8903 - DNA, 216 bp, Glycine max
  Clone ID: LIB3039-037-Q1-E1-E4
atgtgttctttctttttttttttctgtttttttttctttttattttttttcttttttctttcctttttttttttgtcttctttttttttttcttttttgtctttttactattctttgtttttcttcttgtttttttttttcctattttttgtttttttttttttttgtttttctttctctttctttcctctttcttttttttttcgcttttttttt

SEQ ID NO: 8904 - DNA, 85 bp, Glycine max
  Clone ID: LIB3039-037-Q1-E1-E7
ggcacaagtgagtttgttcatcgagatttctctaaacagtgtgatgaacatgaccgtccttgttttcttcgttcctataattttg

SEQ ID NO: 8905 - DNA, 70 bp, Glycine max
  Clone ID: LIB3039-037-Q1-E1-E8
gaccacacgacagacacatctcattattcattagacacgaaggatgagtccaagatgggtttttgtgtca

SEQ ID NO: 8906 - DNA, 291 bp, Glycine max
  Clone ID: LIB3039-037-Q1-E1-E9
tcatcggtatcggtcatcgtaagggatactctcagtctctgcaaacctctcaatttctctcctctgtctttttcactctcttgctatccttttggctagttgcactgctgcaagtgcaactccagagaagcacattgccaagccagcatgtttcaacattcaacagaatcctttttccttccatttttctctttggcattggatcttctgcgtaacaagcagcaggagcagcaagtttaaatgggataggtccattcatatgagacacctacactacacagcatactgaaa

SEQ ID NO: 8907 - DNA, 66 bp, Glycine max
  Clone ID: LIB3039-037-Q1-E1-F1
gaaagcagtcaccacagagagagaggttttgatgcaacgctgtcactgacaacggatctctatcta

SEQ ID NO: 8908 - DNA, 232 bp, Glycine max
  Clone ID: LIB3039-037-Q1-E1-F10
tgggactcaggcacattcatctctatcgagtaaattaactatgaagcctatcctactattatccctttccgtcctgcctctctttgctttcgtggctctttcagaagatcttgacctcgttgtggacatcactggctcttccattttcgcaggtggcacatattacattgtgccatgaacttggggcgctgccggtggtggactgtgttgttgtcggatcggatgactcctt

SEQ ID NO: 8909 - DNA, 385 bp, Glycine max
  Clone ID: LIB3039-037-Q1-E1-F11
gagcgaaacagagagtgatttcagtgagtgatcggtgttcacttgatctcatcataatcgtcagcgtcaattgaagaagatgccgatcagaaacatcgccgtcggaaggcctgaagaggcgactcaccccgacacgttgaaggcggctttggctgagttcatctcaaccttcatcttcgtgttcgccggctcaggctccggcatcgcctacaacaagctcaccgacaacggcgctgccacccctgccggcctcatctccgcctccatcgcccatgcattcgccctcttcgtcgccgtctccgtcggcgccaacatctccggcggccacgtcaaccccgccgtcaccttccgcgccttcgtcggcggcaacatcaccttcctccgc

SEQ ID NO: 8910 - DNA, 231 bp, Glycine max
  Clone ID: LIB3039-037-Q1-E1-F3
acccacacgtcaaataggtgccagacaaatagagaagggtggcctgttatcggctaaggtcgaattcgacaaccttgactcggtccaattatggacatattggaaggtgtatacagcattagtgccagtgcctggtaatatcgtggctctgacggttactcgtctcgactatgatgatctccgtcttcctcccagcatctctccgtgacgtttccaccccgccaatgctct

SEQ ID NO: 8911 - DNA, 87 bp, Glycine max
  Clone ID: LIB3039-037-Q1-E1-F4
tggggcatcaattcagaatatatcatcaattataatcatgggtttgtgtaacagttcgaatgctctctcctgccgcgttcacatctt

SEQ ID NO: 8912 - DNA, 59 bp, Glycine max
  Clone ID: LIB3039-037-Q1-E1-F6
gagagtggtggattgcgccaacttccgtcgtatcctcatccctccgcacttctgctcca

SEQ ID NO: 8913 - DNA, 201 bp, Glycine max
  Clone ID: LIB3039-037-Q1-E1-F7
gagccacgtacgcaactgaaaaggaaaaccctaagagatgaagagaactcctatcttgttccctctcttctttcttctttgtgccttcagctcatatctatcttcagccaccgctgatgatgatcatgtgtacgacactgactgcgataagcttcaatacggtgtcaattatttcgtgttgccagttattagaggaaatgg

SEQ ID NO: 8914 - DNA, 266 bp, Glycine max
  Clone ID: LIB3039-037-Q1-E1-F8
ggaagcgcttgagaccaagccccactcaaccaccacaccactctctctgctcttcttctacctttcaagtttttaaagtagtaagatggcagagacattcctatttacctcagagtcagtgaacgagggacaccctgacaagctctgcgaccacgatctccgatgccgtcctcgacgcttgccttgaacaggacgcagatcgcactgttgcctgcgaaagcatgcactaacaccaacttggtcatcgccttcggagagatcaccac

SEQ ID NO: 8915 - DNA, 398 bp, Glycine max
  unsure (1)..(398): unsure at all n locations
  Clone ID: LIB3039-037-Q1-E1-F9
cgacgcgtccaaccggaagcaanaggacaacagaagggggcacaagtgagtttgttgatccagataactagaatcagtgtgatgaaaatgaaggtccttgttttcttcgctgctacaattttggtaacatggaaatgccatgcgtagcgatatgttcccgctccgaatgaagcactggctatggtgcccgtactccggacgtgagatgcacaaattggacgcctgctgtggaagcacacagcatctttggctttgacaccattcctgaatagtgcgttgaatcaacaaaggaatatatccatggcgaacaatatagatcagactccagaacagttaaccaacaagcttacttttatgccagagacctccaagtccatcccaaggacacatttgtgttc

SEQ ID NO: 8916 - DNA, 71 bp, Glycine max
  Clone ID: LIB3039-037-Q1-E1-G1
gggcacaagtgagtttgttgatcgagataactagagcccgtgtgattacaatgatggttcctgttctcttc

SEQ ID NO: 8917 - DNA, 187 bp, Glycine max
  Clone ID: LIB3039-037-Q1-E1-G10
cgacgcgtcaagagaaaacacatatgggacacacagaacaggacatacattgttcaaacccttacccaacacaaccatcatggccacctctgctattcagcactcagcattcactggtcaaactgctctgaagcagctcaatcagttcgtctgcaacaccggtggcgccggtacatgtcgcactaat

SEQ ID NO: 8918 - DNA, 350 bp, Glycine max
  Clone ID: LIB3039-037-Q1-E1-G11
ggaacaagtacatagaggaaccaaagcggcggttacaggagaccaagcagaggttgggtcgagtgagaccgaaaacggttcaaatgtcatctcggcaggtgataaagcctcaccagtcggtcatgaacctgcacttctagaccatgaagatgcttctggacgaagtggcgatacttccgtcggaaatgctaatgaacacgatcacgaggttctcgacgcacctgatgaagctcatcaagaacgggactgtgcgcagcaacaccgtcaatctccacgacgacgagctcaagctccacaaggacgtcctcgaccacctcatcgacatcatcaccgaccacatcgacgtcaac

SEQ ID NO: 8919 - DNA, 392 bp, Glycine max
  unsure (1)..(392): unsure at all n locations
  Clone ID: LIB3039-037-Q1-E1-G12
ggaagcccaacatgtcaacttttggtgctgaccaattcgatgacttcagacccaaagaaaaagtgctaaaagtttcatacttcaactggtggtcgtttaacactgcatttggcactttagccgctacactgtttgttgtgtacattcaagagaggtttgggtggggattggggtatggaatatcagcgattggttttctagttgcctctgttaccttctttatgggtgttccaatatataggcataaatccagaaaggggaagagccatgcaaaggagtttttcagtgtccctgttgttgctttcagaaatangaagcttcaacttcctagtagcccttctgaactgcatgagtgtgagatgcaacattacattgatangggaagacgacaa

SEQ ID NO: 8920 - DNA, 170 bp, Glycine max
  Clone ID: LIB3039-037-Q1-E1-G3
cgtttccgcttttagtccacaacatatcggtaatgttacaacaagactattcatgcgtatggtttcaagcttccgatggtggtcttttgacactacatttgggtctttagtcgctatcctgtttgttgtgtacattccttagaggtttgggtgtgatttgtggtatggtc

SEQ ID NO: 8921 - DNA, 57 bp, Glycine max
  Clone ID: LIB3039-037-Q1-E1-G6
tcctgggacattcctactttcctttcgtttcctttccttttccctcactttctcgct

SEQ ID NO: 8922 - DNA, 287 bp, Glycine max
  Clone ID: LIB3039-037-Q1-E1-G7
ggacacaataccacatcacacagtagtaacaccaaccactcttctctcactctcgcaaaagctctctccaaccttattgctatcaacaaacaattcacggtttaactctcttttgttgttgtttgatggaaagctgcatcttccgctaccatcacccaacactcctcactctcccatcaatttcgcacaaaccccacttcagattcttcacaacgcctgatcttggtggtcgtggtgtctcttcgtcctcttcctgttttttatactatacgccaagaccctttatc

SEQ ID NO: 8923 - DNA, 205 bp, Glycine max
  Clone ID: LIB3039-037-Q1-E1-G9
ggcacaagtgagtttgttgatcgagataaccataaacagtgtgatgatcatgaaggtccttgtcttcgtcgttgctaccattttggtagcatggcaatgccatgcgtactatatgttctctctcctattgaatcctggctatggtacccgtactctggacgtgaattgcgctggttggatgcctggtttgtagcctaacgagatc

SEQ ID NO: 8924 - DNA, 90 bp, Glycine max
  Clone ID: LIB3039-037-Q1-E1-H1
gaccacacttcaaaatcctctggtaacacttattttatctattctctctctttcttttgtgttccaagcagctacaagcaatggagagga

SEQ ID NO: 8925 - DNA, 158 bp, Glycine max
  Clone ID: LIB3039-037-Q1-E1-H10
gatgcacaagtttgttgagatatcttccagcaatatgatgacactgtgagtactcgatatgtccctgttttcttccttgctagacttttgggtgcatctgcatgccctacgctcgatattttccctctctcaatgtcaactgtcgctagtgctcctac

SEQ ID NO: 8926 - DNA, 387 bp, Glycine max
  Clone ID: LIB3039-037-Q1-E1-H11
gacagaacacaacacaaacacagagaaagagagtgaataaatccagcatcgttctgttctctgcaacattctccactctcaaccatggcttcaaagcttttactcatcactgtcttcgtttttgatttgattgcttttggacttgccgtggctgctgagcagagaagaagcaccgctagtgttgtgacggacaatgaaaagaattataattactgtgtctataactctgatatagcaactggctatggtgttggagcatttttgtttctcttggttagtcaagtcctgataatggtggcaagtcgatgcttctgttgcgggaagcctcttaaccctggaggctcaagggcctgtgcagttgttcttttcataatctgctgggtgttt

SEQ ID NO: 8927 - DNA, 405 bp, Glycine max
  Clone ID: LIB3039-037-Q1-E1-H12
gacagaacggggcacaagtgagtttgttgatcgagataactagaaacagtgtgatgaaaatgaaggtccttgttttcttcgttgctacaattttggtagcatggcaatgccatgcgtacgatatgttccctctccgaatgaacactggctatggtgcccgtactccggatgtgaaatgcgcaagttggaggcttgctgtggaagcacacaacatctttggctttgagaccattcctgaagagtgcgttgaagcaacaaaggaatacatccatggccaacaatatagatcagactccaaaacagttaaccaacaagcttacttttatgccagagacctcgaagtccatcccaatgacacatttgtgtttagtatagatgggcacgtactctctaatattccatact

SEQ ID NO: 8928 - DNA, 290 bp, Glycine max
  Clone ID: LIB3039-037-Q1-E1-H2
tttttgttttttttttttttgtttgtttatttgtttctctcttttttttctcttttttttcttgttcttttttttttttttctttttgtttttgtttctttttttttgttgttttgttttgttgttcttttctttcttttgtttttgtgttttttgttttttgtttttgttttttgtttttcttttttcttttcttgttttttttttttgttttttctctttcttctttttttgtttttttttctttcttttttttttgttttttttcttttttgtttgttttttttttt

SEQ ID NO: 8929 - DNA, 72 bp, Glycine max
  Clone ID: LIB3039-037-Q1-E1-H3
gatcgcagctaagtttcttgatgatgaggttgatgttgtgtatcagtaagtggtaggtccattgttatcttc

SEQ ID NO: 8930 - DNA, 88 bp, Glycine max
  Clone ID: LIB3039-037-Q1-E1-H7
cgtccaccggcaccaagagaacatccgatggggaacgttcacgagtttgttgttcgctattccgtattttatttttgggagcatacac

SEQ ID NO: 8931 - DNA, 124 bp, Glycine max
  Clone ID: LIB3039-037-Q1-E1-H8
gaagcattaccctaatccctctttcttcctcttcctcagtactgcgattttcgattctctcctccgcgactatgcctaatcctacggtcgtcttcgacatgaccatcgtcggtcaaccctgcgg

SEQ ID NO: 8932 - DNA, 397 bp, Glycine max
  Clone ID: LIB3039-037-Q1-E1-H9
gtagcaacaatgtccaagcgaagtccccgaagatccgcgggaaacaagttccgcatgtccctgggtcctgccggtggcggcaaccgtgaactgcgccgacaacaccggcgcgaacaacctctacatcatatcagttaaagggattaagggtacgctgacacggttgccgtcagcttgcgtccgagacatggttatggccaccgtcaataacggaaagcccgatctccgtaagaaggtgctgctcgccgtcatcgtccgccagcgcaagccttggcgccgaaacgacggtgtttacatgtacttcgaagataatgctggtgttatcgtgaatcccaatggtgaaatgaaacgttctgctatcactggtccaattgggaaagactttgctgatctgtgg

SEQ ID NO: 8933 - DNA, 344 bp, Glycine max
  Clone ID: LIB3039-038-Q1-E1-A1
ggaggtgcaagagtttgttgtgagctataagctagtttatcgtgaggagaatatgaagttgtttgttttctttgttgctgcagtagttttggtagcatggccatgccatggcgcaggctaccaaaggttccctctccgaatgaaaactggctatggtgagcgttcttcggaggtaaaatgcgcaagttttaggcttgctgtggaagcacacaacatccgagcctttaaaaccattcctgaagagtgcgttgaaccaacaaaggactacattaatggcgaacaatttagatcagactctaaaacagtttaacaacaagctttcgtttatgctagtgaacgcgaag

SEQ ID NO: 8934 - DNA, 406 bp, Glycine max
  unsure (1)..(406): unsure at all n locations
  Clone ID: LIB3039-038-Q1-E1-A11
ggcacaagtgagtttgttgatcgagataactagaaacagtgtgatgaaaatgaaggtccttgttttcttcgttgctacaattttggtagcatggcaatgccatgcgtacgatatgttccctctccgaatgaacactggctatggtgcccgtactccggaggtgaaatgcgcaagttggaggcttgctgtggaagcacacaacatctttggctttgagaccattcctgaagagtgcgttgaagcaacaaaggaatacatccatggcgaacaatatagatcagactccaaaacagttaaccaacaagcttacttttatgccagagacctcgaagtcaatctccaagacacatttgtgttcagtatagatggcaacgtactctctaatattccatactacanaaaacat

SEQ ID NO: 8935 - DNA, 409 bp, Glycine max
  unsure (1)..(409): unsure at all n locations
  Clone ID: LIB3039-038-Q1-E1-A12
gactcaccacttcaaaacactcataacacaaagcacaaagcaaagctcatccttgagttaaaaaatggcagcagcttcttccatggctctctcatccccatccttggctggcaaggccgtgaagctgggcccatcagccccagaagtgggaagggtgagcatgaggaagaccgtcaccaagcaggcctcctccggaagcccatggtacggcccagaccgcgtcaagtacttgggcccattctctggcgagcccccgtcctacctcactggcgagttcncaggtgactacggctgggacactgctgggcttttcggccgaccagaaaccttcgccagaaaccgtgagctcgaagtgatccactccaagtgggccatgctcnggggcttgggctgcgtcttccccgaactg

SEQ ID NO: 8936 - DNA, 251 bp, Glycine max
  Clone ID: LIB3039-038-Q1-E1-A2
gactctcgctcagatttcttttctcttctcttcgacttttatttctctttcatttttcaatttatagtttaggattatggaggagccatcttctcttagctcggtggagaggaacgtccacatagcctctgttgtggaagccatggcggtggacactattctcgctgctgccaaatctctcatttgcttcttcattctgactggatttctgctgactgacttcatcaattcattttcccaaaatttaaccc

SEQ ID NO: 8937 - DNA, 351 bp, Glycine max; identical to SEQ ID NO: 8418
  Clone ID: LIB3039-038-Q1-E1-A3

SEQ ID NO: 8938 - DNA, 260 bp, Glycine max
  Clone ID: LIB3039-038-Q1-E1-A4
gacacattgtgagtatcaacaagaatactcataatataggtagcatatagagctatagttatattgatattgctatttgttaagctcttatttccgcggccatggctaataatgaacgtgatctcttctcggcggagattgtgaatcgtggaattgaaccgtcggggaccaacgctggctcgttgacattctctgtgacggtgaagaggcgctttacggattttctgcaatcggtgaaccttaagtacgttaaatttggt

SEQ ID NO: 8939 - DNA, 358 bp, Glycine max
  Clone ID: LIB3039-038-Q1-E1-A5
ggcacaagtgagtttgttgatcgagataactagaaacagtgtgatgaaaatgaaggtccttgttttcttcgttgctacaattttggtggcatggcaatgccatgcgtacgatatgttccctctccgaatgaacactggctatggtgcccgtactccggaggtgaaatgcgcaagttggaggcttgctgtggaagcacacaacatctttggctttgagaccattcctgaagagtgcgttgaagcaacaaaggaatacatccatggcgaacaatatagatcagactccaaaacagttaaccaacaagcttacttttatgccagagacctcgaagtccatcccaaggacacatttgtgttc

SEQ ID NO: 8940 - DNA, 323 bp, Glycine max
  Clone ID: LIB3039-038-Q1-E1-A6
ggctgccgctctctgagaaaaacagatagtgtgggagagagaagagcggaagagaaaatgacgaccaggttcaagaagaacaggaagaagagaggtcacgtcagcgccggacacggccgtatcggaaagcaccgcaagcatcccggaggtcgcggtaacgccggtggcatgcatcaccgccgtatcctcttcgacaagtaccatcctggtttcttcgggaaggtacgcatgcgctacttccacaaacttcgcaacaaattctacaatccgatcatcaacatcgacaagctgtggtccctcctcccccaggaggccaaaaacaa

SEQ ID NO: 8941 - DNA, 327 bp, Glycine max
  Clone ID: LIB3039-038-Q1-E1-A7
gactcatcgttctctctgttctttctctctcaaaggaaagaaaaggaaagaaaagaaaagaaaaagaagagagtgtaggtaaacagaagcacacactacacagttaccaaaatcaggttcaaacgcacagatctgggagaagagaagaagaagaagaagaagatgggacaggatcagaaccagagatcgctgatctacgcgttcgtgtctcgcggcacggtgattctcgccgagtacactgaattcagtggcaacttcaacacaatcgcgttccagtgcctccagaagctccctggctccaacaacaagttcacctacaactgtgac

SEQ ID NO: 8942 - DNA, 350 bp, Glycine max
  Clone ID: LIB3039-038-Q1-E1-A8
ggcacaagtgagtttgttgatcgagataactagaaacagtgtgatgaaaatgaaggtccttgttttcttcgttgctacaattttggtaacatggcaatgccatgcgtacgatatgttccctctccgaatgaacactggctatggtgcccgtactccggaggtgaaatgcgcaagttggaggcttgctgtggaagcacacaacatctttggctttgagaccattcctgaagagtgcgttgaagcaacaaaggaatacatccatggcgaacaatatagatcagactccaaaacagttaaccaacaagcttacgtttatgccagagacctcgaagtccatcccaaggacacat

SEQ ID NO: 8943 - DNA, 405 bp, Glycine max
  unsure (1)..(405): unsure at all n locations
  Clone ID: LIB3039-038-Q1-E1-A9
gaacaacaagtcttacattatgtggaggatatttggaaacagctagcaactatggctctcatgcagcttactagctctcctgttgccttattgctccgtttcatagtaatatttgctctatgttacagaacaatggctttggtgaagttgccaccaaacgcttcatcagttccggcggttttagcgtttggagattcgatcgtggactcaggcaacaacaacaacataaaaacactgattaagtgcaacttcncaccttatggaaaagattttcagggaggaaaaccaactggtcgattttgcaatggaaaaattcttctgacctaatagttgaacaattgggtantaaggagtatttgcctgcatatttggatccgaatctcaaatctagcgatcttgttaccg

SEQ ID NO: 8944 - DNA, 335 bp, Glycine max
  Clone ID: LIB3039-038-Q1-E1-B1
ggtattttaatcttctttatcttcattcattggttctctctaaccaaccctctcttttcctaaatcctaattaaacacccctcaaccagaaaaagcatgaagaagctcaatctaatactcagtaagtgcaagaacttgtcaaagcatctaggaagatcttcatcatttaatagcctaaggtccaagtttgctaaggaagacttatgggaaggaaatggcatgcaagaaggtgaacattgtgaaactgtatttgttggcagcacaaggaaacggtatgtgataagctccaagtatttgaaccatcctctcctcaaagctctcatcaacaattccaa

SEQ ID NO: 8945 - DNA, 410 bp, Glycine max
  unsure (1)..(410): unsure at all n locations
  Clone ID: LIB3039-038-Q1-E1-B10
ggcacaagtgagtttgttgatcgagataactagaaacagtgtgatgaaaatgaaggtccttgttttcttcgttgctacaattttggtagcatggcaatgccatgcgtacgatgtgttccctctccgaatgaacactggctatggtgcccgtactccggaggtgaaatgcgcaagttggaggcttgctgtggaagcacacaacatctttggctttgagaccattcctgaagagtgcgttgaagcaacaaaggaatacatccatggcgaacaatatagatcagactccaaaacagttaaccaacaagcttacttttatgccaaagacctcgaagtccatcccaaggacacatttgtgttcagtatagatggcaccgtactctctaatattccatactacaanaaacatggat

SEQ ID NO: 8946 - DNA, 398 bp, Glycine max
  Clone ID: LIB3039-038-Q1-E1-B11
ggcatcaattcaaaatatatcatcaattataagcatgggtttgtggaacacaacgaatgcagtgtcttgccgctttcacaactttggtgatgagcaaaagaatctggtcttccaaggtgatgccacgtcttcttccaggggcatagaactcacaaagttagactgtggaggaaaaccagtgggtggcagtgtggggagagtgttatactcgtctccagtgcacctttgggaaagctctacagtggtcgcaagctttgaaaccgacttcaccttttccatctcatcatactcgactactccaagtgatggccttgccttcttcattgcaccatttgacacgaatatcgctccaaactctggtgggagcaaccttggactcgtcccatcacacaatgttg

SEQ ID NO: 8947 - DNA, 395 bp, Glycine max
  Clone ID: LIB3039-038-Q1-E1-B12
ggcacaagtgagtttgttgatcgagataactagaaacagtgtgatgaaaatgaaggtccttgttttcttcgttgctacaattttggtagcatggcaatgccatgcgtacgatatgttccctctccgaatgaacactggctatggtgcccgtactccggaggtgaaatgcgcaagttggaggcttgctgtggaagcacacaacatctttggctttgagaccattcctgaagagtgcgttgaagcaacaaaggaatacatccatggcgaacaatatagatcagactccaaaacagttaaccaacaagcttacttttatgccagagacctcgaagtcaatcccaaggacatttgtgttcagtatagatggcaccgtactctctaatattccatactac

SEQ ID NO: 8948 - DNA, 177 bp, Glycine max
  Clone ID: LIB3039-038-Q1-E1-B2
ggcacaagtgagtttgttgatcgagataactagaaacagtgtgatgaaaatgaaggtccttgttttcgtcgttgctacaattttggtagcatggcaatgccatgcgtacgatatgttccctctccgaatgaacactggctatggtgcccgtactccggaggtgaaatgcgcaagttg

SEQ ID NO: 8949 - DNA, 352 bp, Glycine max
  Clone ID: LIB3039-038-Q1-E1-B3
ggcacaagtgagtttgttgatcgagataactagaaacagtgtgatgaaaatgaaggtccttgttttcttcgttgctacaattttggtagcatggcaatgccatgcgtacgatatgttccctctccgaatgaacactggctatggtgcccgtactccggaggtgaaatgcgcaagttggaggcttgctgtggaagcacacaacatctttggctttgagaccattcctgaagagtgcgttgaagcaacaaaggaatacatccatggcgaacaatatagatcagactccaaaacagttaaccaacaagcttacttttatgccagagacctcgaagtccaacccaaggacacattt

SEQ ID NO: 8950 - DNA, 205 bp, Glycine max
  Clone ID: LIB3039-038-Q1-E1-B4
ggcacaagtgagtttgttgatcgagataactagaaacagtgtgatgaaaatgaaggtccttgttttcttcgttgcgacaattttggtagcatggcagtgccatgcgtacgatatgttccctctccgaatgaacactggctatggtgcccgtactccggaggtgaaatgcgcaagttggaagcttgctgtggaagcacacaacatc

SEQ ID NO: 8951 - DNA, 367 bp, Glycine max
  Clone ID: LIB3039-038-Q1-E1-B5
ggttctagtgtgtgattgtttgttgttgtcactcgttcttcttcttttgttgttctgtgtttgtgtttgttttttcgctcacctgaaaatgtcttgctgcggtggtaactgtggttgcggaagctcctgcaagtgcggcaacggctgcggaggctgcaagatgtacccatacttgagctacactgagtcaaccaccaccgagaccttggtcatgggagtggcacctgttaaggctcaatttgagggtgctgaaatgggtgtgcccgctgagaactatggctgcaaatgtggaccaaactgctcctgcaacccctgcacttgcaagtgaggtgttgggagagcaagcttcaagcagagatagccctta

SEQ ID NO: 8952 - DNA, 214 bp, Glycine max
  Clone ID: LIB3039-038-Q1-E1-B6
gaaggtgcaagagtttgttgtgagctataagctagtttatcgtgaggagaatatgaagttgtttgttttctgtgttgctgcagtagtggtggtagcatgggcatgccatggcgcacgctaccaaaggttccctctccgaatgaaaactggctagggtgagcgttcttcggaggtaaaatgcgcaggttttaggcgtgcggtggaaccacacaac

SEQ ID NO: 8953 - DNA, 307 bp, Glycine max
  Clone ID: LIB3039-038-Q1-E1-B7
ctacaattttggtagcatggcaatgccatgcgtacgatatgttccctctccgaatgaacactggctatggtgcccgtactccggaggtgaggtgcgcaagttggaggcttgctgtggaagcacacaacatctttggctttgggaccattcctgaagagtgcgttgaagcaacaaaggaatacatccatggcgaacaatatagatcagactccaaaacagttaaccaacaagcttacttttatgccagagacctcgaagtccatcccaaggacacatttgtgttcagtatacgtggcagcgtactcgc

SEQ ID NO: 8954 - DNA, 320 bp, Glycine max
  Clone ID: LIB3039-038-Q1-E1-B8
ggcacaagtgagtttgttgatcgagataactagaaacagtgtgatgaaaatgaaggtccttgttttcttcgttgctacaattttggtagcatggcaatgccatgcgtacgatatgttccctctccgaatgaacactggctatggtgcccgtactccggaggtgaaatgcgcaagttggaggcttgctgtggaagcacacaacatctttggctttgagaccattcctgaagagtgcgttgaagcaacaaaggaatacatccatggcgaacaatatagatcagactccaagacagttaaccaacaagcttacttttaagcca

SEQ ID NO: 8955 - DNA, 391 bp, Glycine max
  unsure (1)..(391): unsure at all n locations
  Clone ID: LIB3039-038-Q1-E1-B9
gatgtcatagtattatcattcattctcatctttctctcttctctctccacccaaaccctaactcccgaccctgttcccctctcgtatccgtcatgaaaggaggaaagtccaagaccgaatctaagagagccgatcccaaacttgctgtgaataagaagggagccgccaccaaggctaggaaacccgccggcaaggggaaggcagcgaaagaccctaacaagccaaagaggcctccaagtgctttcttcgttttcatggaggagttcaggaaggtattcaacanagaacatcctgaaaacaaagcagtgtctgctgtgggcaaagctgctggagcaaaatggaagaacatgtctgatgctgaaaaagcaccttatgtggcaaagtctgagaa

SEQ ID NO: 8956 - DNA, 352 bp, Glycine max
  Clone ID: LIB3039-038-Q1-E1-C1
ggcacaagtgagtttgtagatcgagataactagaaacagtgtgatgaaaatgaaggtccttgttttcttcgttgctacaattttggtagcatggcaatgccatgcgtacgatatgttccctctccgaatgaacactggctatggtgcccgtactccggaggtgaaatgcgcaagttggaggcttgctgtggaagcacacaacatctttggctttgagaccattcctgaagagtgcgttgaagcaacaaaggaatacatccatggcgaacaatatagatcagactccaaaacagttaaccaacaagcttacttttatgccagagacctcgaagtccatcccaaggacacattt

SEQ ID NO: 8957 - DNA, 399 bp, Glycine max
  Clone ID: LIB3039-038-Q1-E1-C10
gacaacaaaaaatttctttagttcactatatccatggcaatgtcttaccaaattagaaattctggtgtcttctttttcctttgtgttcttctctttggtgtgtctgctctgggtcgaccagccacttttctgcaagactttcatgtcacgtggtctgactcccacatcaagcaacttgatcaaggcagggcaatccaactcagacttgaccaaagctctggatgtggatttgcttccaaggtgaagtacatgttcgggcgtgttagcatgaagattaaactcgtccccggagactctgctggcacggtcactgcattttatttgaactctgacacgaactacgttcgcgacgagcttgatttcgagttcttgggcaaccgtactgggcaaccttacaca

SEQ ID NO: 8958 - DNA, 371 bp, Glycine max
  unsure (1)..(371): unsure at all n locations
  Clone ID: LIB3039-038-Q1-E1-C11
ggaacttggatgttacggtacctaaattgcttttcacaccgtttaaggatatanggtttcatggaaagaccgtgagtgtaaagattggaggggtgcatgcattgggtgataatcggtgaaaagatagtgagtaagtattcctgtttcaaaggaggacactgctattgttaaaggaaaatgggacctgctttggtcacgattgacttggatgattatgatgatgtgagagagattccgaaaccgaaaggtcctaattctgaggattataggttagaaagacgatggaagagatttgaacattcaagttcaaataaacgattgaagcaaaatcacagtgacagtggtacaagaactgtgaagagtcatggaaa

SEQ ID NO: 8959 - DNA, 407 bp, Glycine max
  Clone ID: LIB3039-038-Q1-E1-C12
gaaggtgcaagagtttgttgtgagctataagctagtttatcgtgaggagaatatgaagttgtttgttttctttgttgctgcagtagttttggtagcatggccatgccatggcgcaggctaccaaaggttccctctccgaatgaaaactggctatggtgagcgttcttcggaggtaaaatgcgcaagttttaggcttgctgtggaagcacacaacatccgagcctttaaaaccattcctgaagagtgcgttgaaccaacaaaggactacattaatggcgaacaatttagatcagactctaaaacagttaaccaacaagctttcttttatgctagtgaacgcgaagtccatcacaacgacatatttatattcggcatagataacaccgtactctctaatatcccatact

SEQ ID NO: 8960 - DNA, 253 bp, Glycine max
  unsure (1)..(253): unsure at all n locations
  Clone ID: LIB3039-038-Q1-E1-C2
ggcacaagtttgttgagatagctagaagcaataagatgaaaatgaaagtgcttgttttgtttgttgctacagttttggtagcatatgaatgccatggctcagactaccagaagttccctctccaaatgaaaactgggcttggtgggcaatacagcaatgaggtggcatgtaccagttggaggcttggcgtggaagcanacaacgtagtcaagtggcaaactgtccctgcagcttgcggagaatacatagctga

SEQ ID NO: 8961 - DNA, 348 bp, Glycine max
  Clone ID: LIB3039-038-Q1-E1-C3
agcacaagtgagtttgttgatcgagataactagaaacagtgtgatgaaaatgaaggtccttgttttcttcgttgctacaattttggtagcatggcaatgccatgcgtacgatatgttccctctccgaatgaacactggctatggtgcccgtactccggaggtgaaatgcgcaagttggaggcttgctgtggaagcacacaacatctttggctttgagaccattcctgaagagtgcgttgaagcaacaaaggaatacatccatggcgaacaatatagatcagactccaaaacagttaaccaacaagcttacttttatgccagagacctcgaagtcaatccaaggacaca

SEQ ID NO: 8962 - DNA, 204 bp, Glycine max
  Clone ID: LIB3039-038-Q1-E1-C4
gaagaaaggaagaaacataccgaatgagagcatcaaactcttcttcttcgatttccattgcgaagcgttactttttcttcttctttctcttcattttcgtcgctcttcgatcttcgtccggggactgctccgaataccacgacgaccactccgccgatggccacgatcggaggcatacacgactccaaatgctctcaaaacagc

SEQ ID NO: 8963 - DNA, 268 bp, Glycine max
  Clone ID: LIB3039-038-Q1-E1-C5
gactcaaacgtccaacgacgacagaaaggggttgcgtgtgtgcgtgacataagcaagatgaaagaatatcatcaaggtaaagtagattccttacgagacattgcgttcaacgagacatgctacatagctcagggatcaccagctttgtccatagatgaatccactcaggccaggaagttccttcagtcatggaagagggacgtgtatcctcaaagattggcttcaagtcgtgtcatcgctggtcattgggaaacctcagttcacacgg

SEQ ID NO: 8964 - DNA, 224 bp, Glycine max
  Clone ID: LIB3039-038-Q1-E1-C6
gagaaaacaacagggaaagaaatttctgaccctagccgcgtgtcgttaaaatcctcaaacgcagagtagacatagaattatcaaaaagcggggaaagggagattgaattcgatcctgggacgttaacgttgtttcaattcaattgtggtcctgtcggtgccctatctcagacgacgatgtcatctttaaatagaggggaatccaggaggtacaacaataaacca

SEQ ID NO: 8965 - DNA, 318 bp, Glycine max
  Clone ID: LIB3039-038-Q1-E1-C7
gactgttgcttgcttaaaccaatttctctctctctctctgtttgtgtgattaattaacttatggacggttttccaccggaggcggaggcaacagcggtggccgtacggcgggcgttggagcttctgcagctgaacgaccccgttttgagggtccaagcggcgagggacatccggcgcctcaccaagacctcgcagcggtgccgccgccagctctggcaagccgtggcgccactcgtgtccatgctccgagtcgactcgcccgagttccatgaacctgcgcttctcgctctgcttaacctcgccgtacaagacgaaacg

SEQ ID NO: 8966 - DNA, 217 bp, Glycine max
  Clone ID: LIB3039-038-Q1-E1-C8
ggcacaagtgagtttgttgatcgagataactagaaacagtgtgatgaaaatgaaggtccttgttttcttcgttgctacaattttggtagcatggcaatgccatgcgtacgatatgttccctctccgaatgaacactggctatggtgcccgtactccggaggtgaaatgcgcaagttggaggcttgctgtggaagcacacaacatctttggctttgag

SEQ ID NO: 8967 - DNA, 367 bp, Glycine max
  Clone ID: LIB3039-038-Q1-E1-C9
gatccagatctggcagactagtatccgatcctctgtcctctcgaagctttcatcgttcaacatattctcaccatctcagtcatgggcctgctatcttgttttaggtctaccgtcctgagaaaatgttccaaaggaagctctggcatgtcaagattcctgtatacgaacaattttcaacgaaacttgatttcgtctggtggcaatgaatcgtattatgggtattttaacaggagatcatacacttcactttatatgggaactggaactgtgggtgggattacaagtgctagaatcagggtgccaaatgtaggatgtgaaggattcatgtgctcaagtcatctgtcaatcactcaaagaaattcaagat

SEQ ID NO: 8968 - DNA, 398 bp, Glycine max
  Clone ID: LIB3039-038-Q1-E1-D10
ggcacaagtgagtttgttgatcgagataactagaaacagtgtgatgaaaatgaaggtccttgttttcttcgttgctacaattttggtagcatggcaatgccatgcgtacgatatgttccctctccgaatgaacactggctatggtgcccgtactccggaggtgaaatgcgcaagttggaggcttgctgtggaagcacacaacatctttggctttgagaccattcctgaagagtgcgttgaagcaacaaaggaatacatccatggcgaacaatatagatcagactccaaaacagttaaccaacaagcttacttttatgccagagacctcgaagtccatcccaaggacacatttgtgttcagtatagatggcaccgtactctctaatatttcatactaca

SEQ ID NO: 8969 - DNA, 290 bp, Glycine max
  Clone ID: LIB3039-038-Q1-E1-D11
gcacaagtgagtttgttgatcgagataactagaaacagtgtgatgaaaatgaaggtccttgttttcttcgttgctacaattttggtagcatggcaatgccatgcgtacgatatgttccctctccgaatgaacactggctatggtgcccgtactccggaggtgaaatgcgcaagttggaggcttgctgtggaagcacacaacatctttggctttgagaccattcctgaagagtgcgtttaagcaacaaaagaatacatccatggcgaacaatatagattagactccaaaac

SEQ ID NO: 8970 - DNA, 364 bp, Glycine max
  unsure (1)..(364): unsure at all n locations
  Clone ID: LIB3039-038-Q1-E1-D12
ggtcacttttctcagctgctgttcctgcgcgtgaacaagcctcaggtaagccaaagccatggttaagcataacaatgttatccccaacggacacttccgtaagcactggcagaactatgtgaagacctggttcaatcagccagcacggaagacaagaaggcggttggctcgtcagaagaaagctgtgaagattttccccagacctacagctggacctcttagacccattgtacatggtcaaactttgaaatacaacatgaaagtgagagctggaaggggattttcccttgaagaactcaaggcagcanggattcccaaaaagcttgcaccaacaattggtaatgctgttgatcatcgccgcaag

SEQ ID NO: 8971 - DNA, 91 bp, Glycine max
  Clone ID: LIB3039-038-Q1-E1-D2
gaaggtgcaagagtttgttgtgagctataagctagtttatcgtgaggagaatatgaagttggttgtgttcgttgctagcgcagtagttttg

SEQ ID NO: 8972 - DNA, 379 bp, Glycine max
  Clone ID: LIB3039-038-Q1-E1-D3
gaaggtgcaagagtttgttgtgagctataagctagtttatcgtgaggagaatatgaagttgtttgttttctttgttgctgcagtagttttggtagcatggccatgccatggcgcaggctaccaaaggttccctctccgaatgaaaactggctatggtgagcgttcttcggaggtaaaatgcgcaagttttacgcttgctgtggaagcacacaacatccgagcctttaaaaccattcctgaagagtgcgttgaaccaacaaaggactacattaatggcgaacaatttagatcagactctaaaacagttaaccaacaagctttcgtttatgcgattgaacgcgaagtccatcacaacgacatatttaaattccgcatagat

SEQ ID NO: 8973 - DNA, 162 bp, Glycine max
  Clone ID: LIB3039-038-Q1-E1-D4
ggtgagttgtggaaattgattagaattggaaataatgtctggttcggaggactatggaggagaagagtgtctctgcaagatcgtcagaatcggagactccgccgtggggaaatcgaacctgctgtcccgctacgcccggaacgagtttagcatgcagtccaa

SEQ ID NO: 8974 - DNA, 304 bp, Glycine max
  Clone ID: LIB3039-038-Q1-E1-D5
gacttgtaataattcttataacacaacacaacccatggccaccacctccgcattcctcctccttcccctcctcctgctgctccacctcgcgatcgccgctcacggcatcggcatcaactacggcacgctcggcgagaaccttccaccgcccgcggcggtggcgaacttcctgaagacgaagacgacgatcgaccgcgtgaagatctacgacgtgaacccggacatcctgcgggccttcgccggcagcggcatcgccgtgacggtgaccgcccccaacggcgacatcaccgcgttaaccaaaatc

SEQ ID NO: 8975 - DNA, 219 bp, Glycine max
  Clone ID: LIB3039-038-Q1-E1-D6
gatgcacaagtttgttgagatagctagaagcaataagatgaaaatgaaagtgcttgttttgtttgttgcgagaggttgtggtagcatatggagtgcatggcggcggactagcagaggttccctctccagatgaaaagtgggtttggtgggcaatagagcaatgaggtggcatgtgccagttgggggcgtggcgtgggagcagagaaggtagtcaagtgg

SEQ ID NO: 8976 - DNA, 368 bp, Glycine max
  Clone ID: LIB3039-038-Q1-E1-D7
gactcttcagtctttttttcatgtccagttcccgctccatttgctctctctgtctctgtgtctctctaaacctggtctcatcgcagattcgcaaacacacacacttcagatccgaatctccatccatggcggagtccgaattcgaaccaaacgttgacctcgaagagaaatcgtggcacctcctcgcgctcctcctccgaattggccacgccgtttacccgcaacgcctcgccgcgcagtgtcgtttgttcgctgcctcgccgaacttcgtctgccacgtcggcactctccgcggctcgccgatctccgtcaccgacaacggactggtcacgcgctccgtcggcaccgtcttccccctcggaagcttc

SEQ ID NO: 8977 - DNA, 289 bp, Glycine max
  Clone ID: LIB3039-038-Q1-E1-D8
gggcatcaattcaaaatatatcatcaattataagcatgggtttgtggaacacaacgaatgcagtgtcttgccgctttcacaagtttggtgatgaccaagagaatctggtcttccaaggtgatgccacgtcttcttccaggggcatagaactcacagagttagacggtggaggaaaaccagtgggtggcagtgtggggagagtgttatgctcttctccagtgcacctttgggaaagctctacagtggtcgcaagctttgaaaccgacttcaccttttccatctcatcaga

SEQ ID NO: 8978 - DNA, 222 bp, Glycine max
  Clone ID: LIB3039-038-Q1-E1-E10
ggcacaagtgagtttgttgatcgagataactagaaacagtgtgatgaaaatgaaggtccttgctttcttcgttgctacaattttggtaccatggcaatgccatgcttacaatatgttccctctcgaattgaacacgggcaatggtgcccttatcccggaggtaaattccccaatttgaaggcttccgttggaacaaaacacaaccttgggctttaaaacaat

SEQ ID NO: 8979 - DNA, 400 bp, Glycine max
  Clone ID: LIB3039-038-Q1-E1-E11
ggcgcaagtaagacacagagatagatctgacctcagcggcggcggcagcggcaacagaagaacatccaccaccatacacactgggtcgcgtgagaacaggtaccgtgaagaaatcctcccgccaagtgattgagcgttactactcgcgcatgaccctcgacttccacacaaacaagtagcttctcgaagaagtgggcatcatcccttccaagaggctgccgaacaagatcgcaggtttctccacgcatctcatgaagcgcatccagaaaggtcccgttcgcagcatctcactctagctccaggaggaggatcgcgagcgccgcatggacttcgtcaccgacgtctccgtcatcaacaccgaccacatcgaattccatatagaaagccttgacatgcctca

SEQ ID NO: 8980 - DNA, 321 bp, Glycine max
  Clone ID: LIB3039-038-Q1-E1-E12
atgggtttgtggaacacaacgaatgcagtgtcttgccgctttcacaagtttggtgatgaccaaaagaatctggtcttccaaggtgatgccacgtcttcttccaggggcatagaactcacaaagttagacggtggaggaaaaccagtgggtggcagtgtggggagagtgttatactcttctccagtgcacctttgggaaagctctacagtggtcgcaagctttgaaaccgacttcaccttttccatctcatcagactctactactccaggtgatggccttgccttcttcattgcaccatttgacactaaaatccctccaaac

SEQ ID NO: 8981 - DNA, 327 bp, Glycine max
  Clone ID: LIB3039-038-Q1-E1-E2
ggagacattttcataatcgaaattggaagcgaggaacgaaaacccaaatcgaaaatggcagtgatggagaggttgaacatgttcgtcgttcaagagccagttgttgccgcttcctgtctcatcgctggcttcggtcattttcgtccaacttttgtgaggcccatgttggattcatatcacgcaagcaagcaacctccccagcctgctttaagtgacgtggttgcaggaatgactggtaaaaagttaaggggatttacttgacagatgcaacggcaaatttggcaagtttcttgtttgaacttattttaagtcccaaatgtgagagaa

SEQ ID NO: 8982 - DNA, 251 bp, Glycine max
  Clone ID: LIB3039-038-Q1-E1-E3
gacttgtgataattcttataacacaacacaacccatggccaccacctccgcattcctcctccttcgcctcctcctgctgctccacgtcgccatcgccgctcacgggatcggcatcaactacggtacgctcggggacaaccttccaccgcccgcggcggtggcgaacttcctgaagacgaagacgaccatcgaccgcgtgaagatctacgacgctgaacccggacatcctgcgggccttctccagcagcggc

SEQ ID NO: 8983 - DNA, 350 bp, Glycine max
  Clone ID: LIB3039-038-Q1-E1-E6
ggtgcacaagtgagtttgttgatcgagataactagaaacagtgtgatgaaaatgaaggtccttgttttcttcgttgctacaattttggtagcatggcaatgccatgcgtacgatatgttccctctccgaatgaacactggctatggtgcccgtactccggaggtgaaatgcgcaagttggaggcttgctgtggaagcacacaacatctttggctttgagaccattcctgaagagtgcgttgaagcaacaaaggaatacatccatggcgaacaatatagatcagactccaaaacagttaaccaacaagcttacttttatgccagagacgccagagtccatcccaaggacac

SEQ ID NO: 8984 - DNA, 351 bp, Glycine max
  Clone ID: LIB3039-038-Q1-E1-E7
ggtgcacaagtgagtttgttgatcgagataactagaaacagtgtgatgaaaatgaaggtccttgttttcttcgttgcgacaattttggtaccatggcaatgccatgcgtacgatatgttccctctccgaatgaacactggctatggtgcccgtactccggaggtgaaatgcgcaagttggaggcttgctgtggaagcacacaacatctttggctttgagaccattcctgaagagtgcgttgaagcaacaaaggaatacatccatggcgaacaatataaatcagactccaagacagttaaccaacaagcttacttttatgccagaagaactcgaagtccatcccaaggacac

SEQ ID NO: 8985 - DNA, 356 bp, Glycine max
  Clone ID: LIB3039-038-Q1-E1-E8
ggcgtgcacaggcgaaaaccctaatcctgaggcactgaaagtgtgatatggcaagagtcatttcctcttcctgcgcacgcctcgcaatgcgcctcttctccaccaccaccacagccaccgcgttcgccgtcactttacccaaaccctcatcactctccctctcatcgcgtcgattcctcttccctctctcccatgccatcgtccctccctccacccgcgtcgccggaatccggtgccgcgttaaccgcgccggagactcggcgtactcaccgctgaactcggggtcgtcctcttcgtcgttccgcgaccgcccccccacggagatggcgccgcgcttccccggctggcactacaac

SEQ ID NO: 8986 - DNA, 396 bp, Glycine max
  Clone ID: LIB3039-038-Q1-E1-E9
gatcgaagcaaaaaatgaaaacccaaagtgcttctctcctctgtctttttctctctcttgctatccttttggctagtggcactgctgcaagtgcaactccaagaagcgcagtgccaagccaccatgtttcaacattcaacagaagcctttttccttccacttttctctttggaattggttcttctgcttaccaggcagaaggagcagcaagtgtagatgggagaggaccaagcatatgggacacctacactagacagcatactgaaaagatttgggatcatagcaccggtgacatgggagctgatttttatcatcgatacaagggtgacataaaaatagcgaaagaaattgggctggactctttcagattccctatctcatggtcaagaatattcc

SEQ ID NO: 8987 - DNA, 331 bp, Glycine max
  Clone ID: LIB3039-038-Q1-E1-F1
gaccacattccaaaacacaaacacatacattgtagtatcacttttgtctcggaatttgttcttttgagttatggcaagcttaaaggttgcatgtgtggttttgatgtgcatggctgtgatgagtgcaccaatgatggtgcaagccgtgtcatgcaatgatgtttctgtgaacctagcaccgtgcctatcttacctgatgcagggtggagatgttccagaatcgtgctgtagcggagtgaggaacattctgggttctgctagcaccacctttgacaaacaaaccgtgtgcaaatgtcttcagcaagctgctaataactatgggatcaacgac

SEQ ID NO: 8988 - DNA, 393 bp, Glycine max
  Clone ID: LIB3039-038-Q1-E1-F10
ggaagaacaagtcttgcattgggtggagcatacttagaaacagcaactatgtctctcatgcagcttactagctcccctgttggctcactggtccgtttcattgtaatatttgctttatggtacagaaccatggctttggccaagttgccaccaaacgcttcatcagttccagcagttttagcgtttggagattccatcgtggacccaggcaacaacaacaacataaaaacattgatcaagtgcaacttcccaccttatggaaaggattttcagggaggaaacccaacgggtcgattttgcaatggaaaaattccttctgacttaatagttgaacaattgggtattaaggagtatttgcctgcatatttggattcgaatctcaaatctagtgat

SEQ ID NO: 8989 - DNA, 397 bp, Glycine max; identical to SEQ ID NO: 7408
  Clone ID: LIB3039-038-Q1-E1-F11

SEQ ID NO: 8990 - DNA, 371 bp, Glycine max
  Clone ID: LIB3039-036-Q1-E1-E12
ggcacttcaattgcaatcaaattagttcattctctttgcgcagttccctacctctcctttcaagatgcagatcttcgtcaagaccctcaccggaaagaccatcacccttgaggtggaaagctctgacaccatcgacaacgtcaaggccaagatccaggacaaggaaggaattcccccggatcagcaacgtctcatcttcgccggaaagcagctcgaggacggacgtaccctcgccgactacaacatccagaaggagtcaacccttcaccttgtccttcgtctccgtggtggcatgcagatcttcgtcaagactctcactggcaaaaccataaccctagaggtcgaaagctctgacaccattgacaacgtca

SEQ ID NO: 8991 - DNA, 391 bp, Glycine max
  Clone ID: LIB3039-034-Q1-E1-G1
gattggacacattcttcagcgactgcgtttttggatcggaacctcttctgcggcgtagcaatgggacactccaacgtttggaactctcacccaaaaaactacggtcctggttctcgcacttgccgtgtgtgtgggaatccacatggactgatcaggaagtatggccttatgtgctgcaggcagtgcttccgtagcaatgccaaggaaattggcttcatcaagtatcgctaaaagagcagttgtcaactacggaccaatattgtgttctggcactaagatgttttgaggatgttatgtttgaagaaacttgagactttctttttttcatctaattaattatcagacgtaatttgtgggactaagaatacttttatataaattgttttgaact

SEQ ID NO: 8992 - DNA, 279 bp, Glycine max
  Clone ID: LIB3039-034-Q1-E1-G10
gagttcaattccaatatattccattctctctgtgtatttccctacctctcccttcaagatgcagatcttcgtcaagaccctcaccggcaagaccatcacccttgaggtggaaagctctgacaccatcgacaacgtcaaggccaagatccaggacaaggaaggaatccccccggaccagcaacgtctcattttcgccggaaagcaacttgaggacggccgtacccttgctgactacaacattcagaaggagagtactcttcaactcgtcctccgtctccg

SEQ ID NO: 8993 - DNA, 384 bp, Glycine max
  Clone ID: LIB3039-034-Q1-E1-G11
gacgtaaacataagcgagggcatctagacaagcacacaacatgaagttggttcctgctttatttttttccctggaaagtttagataatttttcctgttcgcacgggcttattgagggggatgtatctttcctgtcgtgtggggttttgaatattttacttctctttttttgggtgaggtaactttaggatgtttcactgtagaaaagggcacacaatatgtttaggtgtttatgtattatcagtttatcactttgttatatttgttattagaccttgcactcccttttcctggcgggtttaatttcctaaaatcttgacatagtaaaaatgtttcctcataatgtatgtttattaaaatcagaactagttcctgtctattgcgg

SEQ ID NO: 8994 - DNA, 398 bp, Glycine max
  Clone ID: LIB3039-034-Q1-E1-G12
ggcacaagtgagtttgttgatcgagataactagaaacagtgtgatgaaaatgaaggtccttgttttcttcgttgctacaattttggtagcatggcaatgccatgcgtacgatatgttccctctccgaatgaacactggctatggtgcccgtactccggaggtgaaatgcgcaagttggaggcttgctgtggaagcacacaacatctttggctttgagaccattcctgaagagtgcgttgaagcaacaaaggaatacatccatggcgaacaatatagatcagactccaaaacagttaaccaacaagcttacttttatgccagagacctcgaagtccatcccaaggacacatttgtgttcagtatagatggcaccgtactctctaatattccatactaca

SEQ ID NO: 8995 - DNA, 428 bp, Glycine max
  Clone ID: LIB3039-034-Q1-E1-G2
ttcattacggatggcaaaagaacaacaaaagggggaaaaattgattttgttgttcaagatacctaaaaaaattttaatgaaaatgaaggtccttgttttcttcgttgcaacaattttggtagcatggaaatgccatgcgtacgatatgttccctctccgaatgaacactggctatggtgcccgtactccggaggtgaaatgcgcaagttggaagcttgctgtggaagcacacaacatctttggctttgagaccattcctgaagagtgcgttgaagcaacaaaggaatacatccatggcgaacaatatagatcagactccaaaacagttaaccaacaagcttacttttatgccagagacctcgaagtccatcccaaagacacatttgtgttcagtatagatggcaacgtactctctaatattccatact

SEQ ID NO: 8996 - DNA, 395 bp, Glycine max
  Clone ID: LIB3039-034-Q1-E1-G3
ggagagtctgtttcggtcacagcagagcagaaagtagtaagaagacactgcacagatctgagtggtgactgaaggaatctagcttctttcatttctcatcactattcttaggtctgagggctcattgccattatcatgtcaaggaggccagtaaatccttcgcgtcggttaggtgatggtggaagtataccatttgctgcatctatccggtctaaatctcaaaactctcccctactatctattgggcttgtcattgtgggtgcaatccttctgattggttattgttacagcaattcaggtggagctagcggtggtattaaggatgtaagtaaacttgaaggtggtgcatcatgctcatcagaagtcctacaagcattgcccgttttgaagaaatc

SEQ ID NO: 8997 - DNA, 380 bp, Glycine max
  Clone ID: LIB3039-034-Q1-E1-G4
ggaggcagacataacgcagatccgtcttgaacttctctgtgttctgaaacagcatcaatggcaaaaaccatgactatgtggtttctgttggtcactctttccttcgtttatgctgctgccactgctaatactcaaatcaaagttactaacaaccctgcggacaagttggtagttgcgattaacgaaaacagaactgctcacaaggtgtcagccttaacggacaatccggggcttgcgtgtattgctctacaatacattaaggcataccagggtgaatgtgatgctgtgggtggatctgatggcaagaaacctcctgaatctcgatttgctgaagtttttgctccaaactgtggtgttgaggcatcaactcttgctcctat

SEQ ID NO: 8998 - DNA, 393 bp, Glycine max
  Clone ID: LIB3039-034-Q1-E1-G5
gggtgttgtcttgttggtaaagaaagaaagagaagagaagaatcgaagacgaagatggaggacgcatcagcatcaaagttcattccacaccaaatcggaggggtccaaaacgacgcgcttcgattcggtctccatggagtcaagagcgacatcgttggttctcaccctcttcaatcttcactccaatctacaaggaaaatggatgaagcgatgaagaggcaatgcaaagttaacctgtacggaactgcttttcccatgaaggaggagcttgacaggcaaatcctgtccaggctccagcggcctcctgggacaattccttcttcaatgctgggtttggagactgttacaggaagtgttgatcactttggttttgaggaatgtctaaatgacccc

SEQ ID NO: 8999 - DNA, 344 bp, Glycine max
  Clone ID: LIB3039-034-Q1-E1-G6
ggatttgtggtgtgaagagagattttgagagacacatatgtgtgttgtgttgtgtctcataggagagaaaatgtgagatgtggacagtgtgtcccctcgcgacatatagactcgcgttctcgtgcgatatcactctgttggcaaccagaataacaacacgcgtctcatgtgagacattctcgacaacatataagacacatctagtgatagtgattttgtgtcaaacactgtgtctcgtgaatatagatgtgctcgtgtggcgttttgagatagtgcagggcaagagagatttagatctcacactccgctctatatgagatactcctctggtgcggatagagtat

SEQ ID NO: 9000 - DNA, 221 bp, Glycine max
  Clone ID: LIB3039-034-Q1-E1-G7
gaaggtgcaagagtttgttgtgagctataagctagtttatcgtgaaggaaaaaagaaattggttggtttccttggtgctgcaataattttgggaacaagggcaagccaaggggcaaggtaacaaagggtccctctccgaatgaaaactggctaaggtgaacgttcctccgaggtgaaatgcgcaagttttaagcctgccgtgggagcacacaacatccgag

SEQ ID NO: 9001 - DNA, 398 bp, Glycine max
  Clone ID: LIB3039-034-Q1-E1-G8
gctccgaaaaccctaacaacacaggcgcagacgcaaacgcaaacgcaaacgcaaacgcaaacgcagagcgtgatccattgacgaagatggtgcagcgtctcatctaccgcaagcggcacagctatgccaccaagtccaaccaacacagggtcgtcaaaacccctggtgggaagctcgtttatcagactaccaagaagagggccagcggacccaagtgccccgtcactggcaagaggattcaggggattccacacttgaggcctgcagagtacaagaggtcaaggttacccagaaaccgtaggactgtcaaccgtgcatatggtggagttttatctggaagtgccgtcagggagaggattatccgagccttcttagttgaagagcacaagattgtgaag

SEQ ID NO: 9002 - DNA, 382 bp, Glycine max
  unsure (1)..(382): unsure at all n locations
  Clone ID: LIB3039-034-Q1-E1-G9
ggcacaagtttgttgagatagctagaagcaataagatgaaaatgaaagtgcttgttttgtttgttgctacagttttggtagcatatgaatgccatggctcagactaccagaagttccctctccaaatgaaaactgggtttggtgggcaatacagcaatgaggtggcatgtgccagttggaggcttggcgtggaagcaaacaacgtagtcaagtggcaaactgttcctgcagcttgcggagagtacatagctgactacgttctangagaacantatagatcagatttccaaaacagttaaccaacaagcttagttctatgctaaatccctcaaactcaccaacaaagatgtctttgtcttggacgttgacgacactactctct

SEQ ID NO: 9003 - DNA, 362 bp, Glycine max
  Clone ID: LIB3039-034-Q1-E1-H1
aagaacggcgtgctgagaacctgaaaatgaagagtaaagcaagcgaaaatttcacagtgatgaaggaagctaaacaaatgggttatcatcacagtgatagtgaagatgagcaaaagaagcttgagatcgaattgcggaacaaagctcttgaatccctcaaagcaaagaggggcgtgaataactaaatgcatcaaatccaagttttaagttgttttatgctttaaaaacttattgagaaatatcttagcttgttaaggaacttggctttacaaatgttatgtttttttattcattggtaagtgtttgatgtcatctatctttaatgctggcagcggaaatggataaatgacgctttctgagcc

SEQ ID NO: 9004 - DNA, 358 bp, Glycine max
  unsure (1)..(358): unsure at all n locations
  Clone ID: LIB3039-034-Q1-E1-H10
ggcacaagtgagtttgttgatcgagataactagaaacagtgtgatgaaaatgaaggtccttgttttcttcgttgctacaattttggtagcatggcaatgccatgcgtacgatatgttccctctccgaatgaacactggctatggtgcccgtactccggaggtgaaatgcgcaagttggaggcttgctgtggaagcacacaacatctttggctttgagaccattcctgaagagtgcgttgaagcaacaaaggaatacatccatggcgaacaatatagatcagactccanaacagttaaccaacaagcttacttttatgccagagacctcgaagtccatcncaaggacacatttgtgttc

SEQ ID NO: 9005 - DNA, 385 bp, Glycine max
  Clone ID: LIB3039-034-Q1-E1-H11
gattcatattttccttgcgtttccctttcattttccctcactttctcgctcgccaaacgcccctctctctcctccaatggccgaccagctcaccgacgaccagatcgccgagttcaaggaggccttcagcctcttcgacaaggacggcgatggttgtattactactaaggaacttgggactgtgatgcggtcactagggcaaaacccaactgaggcagaactgcaggatatgattaatgaggttgatgctgatggcaatggaaccatcgacttcccagagttcctcaacctgatggctcgcaagatgaaagacaccgactccgaagaggagcttaaagaagctttccgtgtgttcgacaaggatcagaatggtttcatctctgca

SEQ ID NO: 9006 - DNA, 386 bp, Glycine max
  Clone ID: LIB3039-034-Q1-E1-H12
cgtccactgggagacaacaacagacaggcagggagtcggaattacgttgcgtatctctttcattatccatcattttctcgctcgccaagcgcgcgtctctctcatccaatggtcgatcagctcaacgtcgagcaaatcgtcgagttcaatgaggccttcagactcttctggatggacggctatggatgtattactactaaggaacttgggactgtgatgcggtcactaaggcagcacccaactgatgcagaactgtccgatataattcatgaggttgatgctggtggcaatggaaccatcgacttcccagagttcctcaacctgattgctcgcaagatcatagacaccgactccgaagatgagcttaaagaggctttccgtgtgtt

SEQ ID NO: 9007 - DNA, 368 bp, Glycine max
  unsure (1)..(368): unsure at all n locations
  Clone ID: LIB3039-034-Q1-E1-H2
gttgtgagctataagctagtttatcgtgaggagaatatgaagttgtttgttttctttgttgctgcagtagttttggtagcatggtcatgccatggcgcaggctacgaaaggttccctctccgaatgaaaactggctatggtgagcgttcttcggaggtaaaatgcgcaagttttaggcttgctgtggaagcacacaacatccgagcctttatgaccattcctgaagagtgcgttgaaccaacaaaggactacattaatggcgaacaatttagatcagactctaaaacagttaaacaacaagctttcttttatgctagtgaacgcgaagtcgatcacaacgacatanttatattcggcatagataacac

SEQ ID NO: 9008 - DNA, 360 bp, Glycine max
  Clone ID: LIB3039-034-Q1-E1-H3
gagttgcactgctaccgacccagaccttaactacaagccggtgatcggaatcctgacccaccccggcgacggtgcctctggccggctcagcaacgccaccggggtttcttacatcgccgcctcctacgttaacttcctggaatccggtggtgctacagttattccccgtatctacaatgagtcagctgagaaccttaacaagaagctcgatttggtcaatggagtgctcttcactggtgggtgggctgtttctggtccataattggatactcttggcaacatttttaagaaagctttagagaataatgttgctggagaccatttcccagtaattgccttcaacttatgtggaaacctcgt

SEQ ID NO: 9009 - DNA, 354 bp, Glycine max
  Clone ID: LIB3039-034-Q1-E1-H4
ggcacaagtgagtttgttgatcgacataactagaaacagtgtgatgaaaatgaaggtccttgttttcttcgttgctacaattttggtagcatggcattgccatgcgtacgatatgttccctctccgaatgaacactggctatggtgcccgtactccggacgtgaaatgctcaagttggaggcttgctgtggaatcacacaacatctttggctttgagaccattcctgaagagtgcgttgaagcaacaaaggaatacatccatggcgaacaatatagatcagactccaaaacagttaaccaacaagcttacttttatgccagagacctcgaagtccattccaaagacacatttgt

SEQ ID NO: 9010 - DNA, 239 bp, Glycine max
  Clone ID: LIB3039-034-Q1-E1-H5
ggaacctttgaattcaatccattaaggattcagcaggtgctttttgaaaccagaaaccgaaatatttcgaaatggcccgtacaaagcaaactgctcgtaggtcaggtggaggaaaagctcacaggaagcatcttgcaaccaaggctgcacgtaagtctgcaccaacatctggtggtgtgaaaaagcctcatcgttaccgccctgaaagtgttgctcttcgtgatattaggaaataccag

SEQ ID NO: 9011 - DNA, 397 bp, Glycine max
  Clone ID: LIB3039-034-Q1-E1-H6
gaacacaaacacaaattacatagcctcagtaatctgagagagaaacaaaaacaatgaaggtttccattgccaagttccactcccttcccctatgttttttccttctcttggccttcaacacaaaacccctcctagcagcagaaccagagccagtggttgataagcaagggaaccctttggagccaggagtagggtactacgtgtggccactttgggctgatgaaggaggcctcacactaggccaaacaaggaacaagacatgccctctttatgttatccgtgacccttcattcattggcaccccagtttcattcttagcaccaggccttgaccatgttccaacactcactgatctaaccattgatttccctgtggtgacagtgtgtaaccagccaac

SEQ ID NO: 9012 - DNA, 419 bp, Glycine max
  unsure (1)..(419): unsure at all n locations
  Clone ID: LIB3039-034-Q1-E1-H7
agcgaagacgacagaagggggtggtgaagaaggcatggagcagtggtggatgtggtcgggtaggagcactagagatgggaagctgcccgggacccatagagacacccgctcttctcctatctactcgtaaagggcttcctcactttatctcccctgacctactcacttctctcccttcccccgattcccatctccttcaaatttctccactccactttttggaaggacttgcttcaaccactatatcaaaattaggagggcttcaccaaatgcttggtttgcaccaatatggaatggcggctgtagccagggattccattcaatgccttcctgagtctaagggagctaccaaactcggagcctcttttganactccttgtggtcgtctgttgattaaacccaaagattatgttgaaatg

SEQ ID NO: 9013 - DNA, 336 bp, Glycine max
  Clone ID: LIB3039-034-Q1-E1-H8
gatagaaggtgtgtggagttagggctttacagtgtttcacttccttcgtcatcttcttcgtcatcttcttcgttgaatcgcgattgttctgtgcgagagaaagaagagagagatcgagcatggcgttggctttcgacgagttcggaacgccgttcataatcctgaatgagcatgatcagaacagcagactccgaggattggacgctcagaatgccaacatctccgccggcaaatccgtggctcgcatcctccgaagctgcctcggccgcaaatgtatggacaggatgctccaaatccccgactgcgacgtcagcatcacgaacgatggagccacga

SEQ ID NO: 9014 - DNA, 388 bp, Glycine max
  Clone ID: LIB3039-034-Q1-E1-H9
gagtgcacaagtgagtttgttgatcgagataactagaaacagtgtgatgaaaatgaaggtccttgttttcttcgttgctacaattttggtagcatggcaatgccatgcgtacgatatgttccctctccgaatgaacactggctatggtgcccgtactccggaggtgaaatgcgcaagttggaggcttgctgtggaagcacacaacatctttggctttgagaccattcctgaagagtgcgttgaagcaacaaaggaatacatccatggcgaacaatatagatcagactccaaaacagttaaccaacaagcttacttttatgccagagacctcgaagtccatcccaaggacacatttgtgttcagtatagatggcaccgtactctctaat

SEQ ID NO: 9015 - DNA, 334 bp, Glycine max
  Clone ID: LIB3039-035-Q1-E1-A1
ggcacaagtgagtttgttgatcgagataactagaaacagtgtgatgaaaatgaaggtccttgttttcttcgttgctacaattttggtagcatggcaatgccatgcgtacgatatgttccctctccgaatgaacactggctatggtgcccgtactccggaggtgaaatgcgcaagttggaggcttgctgtgggagcacacaacatctttggctttgagaccattcctgaagagtgcgttgatgcatcgaagagcagtggtcacttcggaaacataaagctaacctccgaactcgctcacggagctaacaacggtcatgacatcgatgttaagctt

SEQ ID NO: 9016 - DNA, 349 bp, Glycine max
  Clone ID: LIB3039-035-Q1-E1-A10
ggcacaagtgagtttgttgatcgagataactagaaacagtgtgatgaaaatgaaggtccttgttttcttcgttgctacaattttggtagcatggcaatgccatgcgtacgatatgttccctctccgaatgaacactggctatggtgcccgtactccggaggtgaaatgcgcaagttggaggcttgctgtggaagcacacaacatctttggctttgagaccattcctgaagagtgcgttgaagcaacaaaggaatacatccatggcgaacaatatagatcagactccaaaacagttaaccaacaagcttacttttatgccagagacctcgaagtccatcccaaggacaca

SEQ ID NO: 9017 - DNA, 373 bp, Glycine max
  Clone ID: LIB3039-035-Q1-E1-A11
ggctactcactcacattacacacaccacctcgcactcgcagggacagagagtggggaaggaaaaacacagactaaatggcgccaaatgctctctttctcttctctttcctcgccatgctcctccttctgctccgctcaaccgccgccggccacaactaccgcgacgccctccgcaaaagcattctcttcttcgaaggccaacgctccggcaaactccccgccgaccaacgcctccgctggcgccacgactctgcattgcacgacggcgccaccgccggagtggacttgagtggagggtactacgacgccggggataacataaagttcgggtttccgatggcgttcacgacgacgatgctgtcgtggagcgtga

SEQ ID NO: 9018 - DNA, 379 bp, Glycine max
  Clone ID: LIB3039-035-Q1-E1-A12
gaaggtgcaagagtttgttgtgagctataagctagtttatcgtgaggagaatatgaagttgtttgttttctttgttgctgcagtagttttggtagcatggccatgccttggcgcaggctaccaaaggttccctctccgaatgaaaactggctatggtgagcgttcttcggaggtaaaatgcgcaagttttaagcttgctgtggaagcacacaacatccgagcctttaaaaccattcctgaagagtgcgttgaaccaacaaaggactacattaatggcgaacaatttagatcagactctaaaacagttaaccaacaagcttacttttatgccagagacctcgaagtccatcccaaggacacatttgtgttcagtatagat

SEQ ID NO: 9019 - DNA, 375 bp, Glycine max
  Clone ID: LIB3039-035-Q1-E1-A2
ggctgtgagtgagattacccatagatagagagcgcggcataacctaaacttacccttcttctctctgtgtgtgtgcgcatcaaatgcaaccagaagcagccatggccactgcaagaactgtgaaggacgtttctcctcatgagttcgtcaaagcttactcttctcacctcaagcgatctggcaagatggagctgccagagtggactgatattgtgaaaactgcaagatttaaggagttggctccttatgatcctgactggtactatgtcagagctgcttccatggcaagaaagatctacttgagaggaggacttggtgttggtgcctttcagaggatttatggtgggagcaagaggaatggtagccgccctcctc

SEQ ID NO: 9020 - DNA, 344 bp, Glycine max
  Clone ID: LIB3039-035-Q1-E1-A3
ggtaggagaggctttgtttagcaacggcggtgttacgtgctaggtgggcggagccatggtggtgcctgaaacccctctctgttacgtaggtgtcaccaggcaatccgctgcttttcgcctcatgaagcaaatggggtgggaagaaggtggacgtctgggaaaagagaagcatgggattataggacacgttcgagtaaaaagcatacatgacactagtggtattggcctggagaagccaaacaactgggccttctacaccactcacattggtaatatccttaatagattgaaagttcaatctccgcaatcccatgacacagggtataatatattatcatgtcatt

SEQ ID NO: 9021 - DNA, 363 bp, Glycine max
  Clone ID: LIB3039-035-Q1-E1-A4
ggcacaagtgagtttgttgatcgagataactagaaacagtgtgatgaaaatgaaggtccttgttttcttcgttgctacaattttggtagcatggcaatgccatgcgtacgatatgttccctctccgaatgaacactggctatggtgcccgtactccggaggtgaaatgcgcaagttggacgcttgctgtggaagcacacaacatctttggctttgagaccattcctgaagagtgcgttgaagcaacaaaggaatacatccatggcgaacaatatagatcagactccaaaacagttaaccaacaagcttacttttatgccagagacctcgacatccatcccaatgacacatttgtgttcagtat

SEQ ID NO: 9022 - DNA, 375 bp, Glycine max
  unsure (1)..(375): unsure at all n locations
  Clone ID: LIB3039-035-Q1-E1-A5
gattgttggcttgtgctctgctcgtgcctctagggttatcatatctccatttccatttcctctctctcagtttccaagaatcttaagctatgggaaagtcttacccaaccgtgagcgctgattaccagaaggccgttgagaaggcgaagaagaagctcagaggcttcatcgctgagaagagatgcgctcctctaatgctccgtttggcatggcactctgctggaacttacgacgtgagctcgaagaccggtggtcncttcggaaccataaagcacccctccgaactcgctcacggggctaacaacggtcttgacatcgctgttaggcttttggagccactcaaagcggagtttcctattttgagctacgccgatt

SEQ ID NO: 9023 - DNA, 328 bp, Glycine max
  Clone ID: LIB3039-035-Q1-E1-A6
ggtgcacaagtgagtttgttgatcgacataactagacacagtgtgatgaaaatgaaggtccttgttttcttcgttgctacaattttggtagcatggcaatgccatgcgtacgatatgttccctctcagactgaacactggctatggtgcccgtactccggatgtgaaatgcgcaagttggaggcatgctgtggaagcacacaccatctttggctttgagaccattcctgaagagtgcgtagaagcaacaaaggaatacatccatggcgagcaatatagattagactccatgacagttaaccaccaggcttacttttatgccagagacc

SEQ ID NO: 9024 - DNA, 243 bp, Glycine max
  Clone ID: LIB3039-035-Q1-E1-A7
ggcacacgtgagtttgttgatcgatataactagaaacagtgtgatgaatatgaatgtccgtgtttgcttcgttgctagaattttggtagcatgcaaatgacatgcatgcgatatgttccctctccgaatgaacactggctatggtgcccgtactccggacgtgagttgcgcacgttggatgcttgctgtggaagcacacaacatctttggctttgagaccaatcatgaatagtgcgttgatgc

SEQ ID NO: 9025 - DNA, 361 bp, Glycine max
  Clone ID: LIB3039-035-Q1-E1-A8
gcacaagtgagtttgttgatcgagataactagaaacagtgtgatgaaaatgaaggtccttgttttcttcgttgctacaattttggtagcatggcaatgccatgcgtacgatatgttccctctccgaatgaacactggctatggtgcccgtactccggaggtgaaatgcgcaagttggaggcttgctgtggaagcacacaacatctttggctttgagaccattcctgaagagtgcgttgaagcaacaaaggaatacatccatggcgaacaatatagatcagactccaaaacagttaaccaacaagcttacttttatgccagagacctcgaagtccatcccaaggacacatttgtgttcagta

SEQ ID NO: 9026 - DNA, 300 bp, Glycine max
  unsure (1)..(300): unsure at all n locations
  Clone ID: LIB3039-035-Q1-E1-A9
agcccacacgtccgaaacgacagaagggggtttctaaaacactatcccttttacggtttattgacaaagagaaacaatcggaggatctgttctgttccataagatggctggacttttaggatataggagccttccacctaatgcaaagaatctggtanttgctgggggtttgacagcttttgtctttggtgcatacttctacaccatgagggctgttggaggcactgatgaactgcaggtagcaattgataagtttgaagctgacaagagcaagaatgacggtgaagccaacatgccatc

SEQ ID NO: 9027 - DNA, 358 bp, Glycine max
  Clone ID: LIB3039-035-Q1-E1-B1
ggcacaagtgagtttgttgatcgagataactagaaacagtgtgatgaaaatgaaggtccttgttttcttcgttgctacaattttggtagcatggcaatgccatgcgtacgatatgttccctctccgaatgaacactggctatggtgcccgtactccggaggtgaaatgcgcaagttggaggcttgctgtggaagcacacaacatctttggctttgagaccattcctgaagagtgcgttgaagcaacaaaggaatacatccatggcgaacaatatagatcagactccaaaacagttaaccaacaagcttacttttatgccagagacctcgaagtccatcccaaagacacatttgtgttc

SEQ ID NO: 9028 - DNA, 383 bp, Glycine max
  Clone ID: LIB3039-035-Q1-E1-B10
ggcacaagtttgttgagatagctagaagcaataagatgaaaatgaaagtgcttgttttgtttgttgctacagttttggtagcatatgaatgccgtggctcagactaccagaagttccctctccaaatgaaaactgggtttggtgggcaatacagcaatgaggtggcatgtgccagttggaggcttggcgtggaagcaaacaacgtagtcaagtggcaaactgttcctgcagcttgcggagagtacatagctgactacgttctaggagaccaatatagatcagattccaaaacagttaaccaacaagcttatttctatgctaaatccctcaaactcaccaacaaagatgtctttgtctcggacgttgacgacactactctctct

SEQ ID NO: 9029 - DNA, 381 bp, Glycine max; identical to SEQ ID NO: 7754
  Clone ID: LIB3039-035-Q1-E1-B11

SEQ ID NO: 9030 - DNA, 356 bp, Glycine max
  Clone ID: LIB3039-035-Q1-E1-B12
caagaaatgaacagaaaggacagggaaattgatgggctgaatgaacagctggaggaggattcacggtgtctagagcacttgcaactccagcttgtggatgaaaaaaagcaaacgcgctcgagtggaaagagaaaatgcaatgctgcaagaacaagtgaacatgcttatgaacatgttgcaagaagcagaacaaatgggagatgaaggcccacatgaaccttaaagtttattattataccgtgtgtgtgtgtgtgtgtgtttgcttgtgcgtattaaattctttttgtaggttttgttcgtcatgtctaattggctgcgcatgtccgatgtctctgcagttataaaaatagagtgca

SEQ ID NO: 9031 - DNA, 343 bp, Glycine max
  Clone ID: LIB3039-035-Q1-E1-B2
ggcacaagtgagtttgttgatcgagataactagaaacagtgtgatgaaaatgaaggtccttgttttcttcgttgctacaattttggtagcatggcaatgccatgcgtacgatatgttccctctccgaatgaacactggctatggtgcccgtactccggaggtgaaatgcgcaagttggaggcttgctgtggaagcacacaacatctttggctttgagaccattcctgaaaagtgcgttgaagcaacaaaggaatacatccatggcgaacaatatagatcagactccaaaacagttaaccaacaagcttacttttatgccagagacctcgaagtccatcccaag

SEQ ID NO: 9032 - DNA, 348 bp, Glycine max
  Clone ID: LIB3039-035-Q1-E1-B3
ggcacaagtttgttgagatagctagaagcaataagatgaaaatgaaagtgcttgttttgtttgttgctacagttttggtagcatatgaatgccatggctcagactaccagaagttccctctccaaatgaaaactgggtttggtgggcaatacagcaatgaggtggcatgtgccagttggaggcttggcgtggaagcaaacaacgtagtcaagtggcaaactgttcctgcagcttgcggagagtacatagctgactacgttctaggagaccaatatagatcagattccaaaacagttaaccaacaagcttatttctatgctaaatccctcaaactcaccaacaaagatg

SEQ ID NO: 9033 - DNA, 344 bp, Glycine max
  Clone ID: LIB3039-035-Q1-E1-B4
ggatgcacaagtttgttgagatagctagaagcaatatgatgatgatgaaactgcttgtgttggttgctgcaacagttttggtatcatatgaatgccatggctcagactaccagaagttccctctccaaatgaaaactgggtttggtgggcactacagcaatgaggtagcatgtaccagttggatgcttgtcgtggaagcaaacatcgtcgtctagtggcaaactgttcctgcatcctgcggatagtacatagctgactaccttcgaggagaccaatattcatcatcttccacaatagttcaccaacatgcttacttcgatgctacatccctcatcatcaccaac

SEQ ID NO: 9034 - DNA, 363 bp, Glycine max
  Clone ID: LIB3039-035-Q1-E1-B5
gagtgtgtgattgtttgttgttgtaactcgttcttcttcttttgttgttctgtgtttgtgtttgttttttctctcacctgaaaatgtcttgctgcggtggtaactgtggttgcggaagctcctgcaagtgcggcaacggctgcggaggctgcaagatgtacccagacttgagctacactgagtcaaccaccaccgagaccttggtcatgggagtggcacctgttaaggctcaatttgagggtgctgaaatgggtgtgcccgctgagaacgatggctgcaaatgtggaccaaactgctcctgcaacccctgcacttgcaagtgaggtgttgggagagcaagcttcaagcagagatagcccttaa

SEQ ID NO: 9035 - DNA, 322 bp, Glycine max
  Clone ID: LIB3039-035-Q1-E1-B6
gattcacagattagtttgttgatcgagacaaccatcatcagtgtgatgaacatgatagtgtccttggtttcttcgctgctacaattttggcatcatggcaatgccatgcttactacatgttccctctccgattgaacactggctatggtgcccgtactccggaggtaaaatgcacatattggaagcctgctgtgaaagcacacatcatcattggatttgaaactattcctgaacagtgcgttgatgcagcaatggattacatccatgacgaatattatatatcatactccacaacagttaaccagcaagcttacatttatgc

SEQ ID NO: 9036 - DNA, 369 bp, Glycine max
  Clone ID: LIB3039-035-Q1-E1-B7
gaccgtgcgctagttctgagtattctgatcgctccctgagagagctcgtcgcggcggttgcagaagaagattgcaagatgaagttcaacatcgcgaatcccaccactggatgccagaagaagctcgagatcgacgacgatctgaaactgcgagcattttgggacaagaggatctcacaggaggtcatcggagatgcactcggtgaggaatttaagggctatgtcttcaaaattaccggaggttgtgacaaacaaggatttccaatgaagcagggagtgctgactcctggtcgtgttagacttttgcttcacaggggaactccttgcttccgtggatatggaaggcgtaatggagagcgtaagagaaagt

SEQ ID NO: 9037 - DNA, 295 bp, Glycine max
  Clone ID: LIB3039-035-Q1-E1-B8
ggtgttgcgttgtgcgtgagaaagtgcgcgtggtgaaaaagcatggcttctcagctcctgagacgaaccttcggaagtcgtttccttgcaaaccctagggccttctcctccgctgcttccactccgatccgcgccactctcttccccggcgacggcatcggccccgagatcgccgattccgtcaaacagatattccaagcagctgatgtcgcaatagaatgggaagagcactatgtaggaactgaaattgaccctagaacgcagagctttctgacatgggaaagtttagaatctg

SEQ ID NO: 9038 - DNA, 377 bp, Glycine max
  Clone ID: LIB3039-035-Q1-E1-B9
ggcacaagtttgttgagatagctagaagcaataagatgaaaatgaaagtgcttgttttgtttgttgctacagttttggtagcatatgaatgccatggctcagactaccagaagttccctctccaaatgaaaactgggtttggtgggcaatacagcaatgaggtggcatgtgccagttggaggcttggcgtggaagcaaacaacgtagtcaagtggcaaactgttcctgcagcttgcggagagtacatagctgactacgttctatgagaccaatatagatcagattccaaaacagttaaccaacaagcttatttctatgctaaatccctcaaactcaccaacaaagatgtctttgtcttggacgttgacgacactact

SEQ ID NO: 9039 - DNA, 359 bp, Glycine max
  Clone ID: LIB3039-035-Q1-E1-C1
gatagtattatcattcattctcatctttctctcttctctctccacccaaaccctaactcccgaccctgttcccctctcgtatccgtcatgaaaggaggaaagtccaagaccgaatctaagagagccgatcccaaacttgctgtgaataagaagggagccgccaccaaggctaggaaacccgccggcaaggggaaggcagcgaaagaccctaacaagccaaagaggcctccaagtgctttcttcgttttcatggaggagttcaggaaggtattcaacaaagaacatcctgaaaacaaagcagtgtctgctgtgggcaaagctgctggagcaaaatggaagaccatgtctgatgctgaaaa

SEQ ID NO: 9040 - DNA, 369 bp, Glycine max
  Clone ID: LIB3039-035-Q1-E1-C10
gacacaaagacacagacacagattgttatcccaacgttttatcctttcagctttaagctcaccgaactaactcagcattcaacaacaatggtgatgctcatccgttgctcttgcttcttcgctcgccctcgcttctcacaacctcaattctacggcaacaacaccaaacccttactcccagggaaattagcttttctttctctaaaacctgacaagggtgttccacactttgaagatacgcttgatgggtcttctaagatttcatgtttgctgcactgctcaaagtgtaaggaagacatacaccaaaggttcccatcactgatatttgttgcgagcaatgttttgatgttctctatgcctaacacagct

SEQ ID NO: 9041 - DNA, 382 bp, Glycine max
  Clone ID: LIB3039-035-Q1-E1-C11
ggaaacagagagtgatttcagtgagtgatcggtgttcacttgatctcatcataatcgtcagcgtcaattgaagaagatgccgatcagaaacatcgccgtcggaaggcctgaagaggcgactcaccccgacacgttgaaggcggctttggctgagttcatctcaaccttcatcttcgtgttcgccggctcaggctccggcatcgcctacaacaagctcaccgacaacggcgctgccacccctgccggcctcatctccgcctccatcgcccatgcattcgccctcttcgtcgccgtctccgtcggcgccaacatctccggcgggcacgtcaaccccgccgtcaccttcggcgccttcgtcggcggcaacatcaccttcctccgc

SEQ ID NO: 9042 - DNA, 383 bp, Glycine max
  Clone ID: LIB3039-035-Q1-E1-C12
ggagcagagaaaaagcatatggtctcccgtcacagatccaagaagtggtttcaaccgggaatccagaactttccacagcctcaagccccctctccgtctccctccccccaacgccgccgtctccgcagccgccttcgccctcttcctccgccgcaactcgcagttcccggactcctccaccgcctttatcgactctgccaccggccaccgcctctcctacggcgagctcctccaccgcgccaaaaccctagcctcgaatctcgccacaatcctcaaactcaccaaaggcgacacagcgctcgttctctcaccaaatattctccaagttccgatcctctgcttcgcgcttctttctctcggggtggtcgtctcccccgcgaaac

SEQ ID NO: 9043 - DNA, 360 bp, Glycine max
  Clone ID: LIB3039-035-Q1-E1-C2
ggcacaagtgagtttgttgatcgagataactagaaacagtgtgatgaaaatgaaggtccttgttttcttcgttgctacaattttggtagcatggcaatgccatgcgtacgatatgttccctctccgaatgaacactggctatggtgcccgtactccggaggtgaaatgcgcaagttggaggcttgctgtggaagcacacaacatctttggctttgagaccattcctgaagagtgcgttgaagcaacaaaggaatacatccatggcgaacaatatagattagactccaaaacagttaaccaacaagcttacttttatgccagagacctcgaagtccatcccaaggacacatttgtgttcag

SEQ ID NO: 9044 - DNA, 349 bp, Glycine max; identical to SEQ ID NO: 9016
  Clone ID: LIB3039-035-Q1-E1-C3

SEQ ID NO: 9045 - DNA, 374 bp, Glycine max
  Clone ID: LIB3039-035-Q1-E1-C4
gacaacacaacgcaacacaacgcgcactctctcttttctctcttaacacaaaaaccctatcgttcttcgcggtttcgccgattctcgccatgccgaaagccaaatccgacgccaaagccgccgatagccggttgaagcgcaagggcgctggtgctggaaggaagcaatcgaagaaagctgctaaggatcctaacaagccaaagagacctccaagcgctttcttcgttttcatgtccgagttcagagagcaatttaagaaagagcatcctaacaacaaatccgtcgctgttgtcggtaaagctggtggtgacaaatggaaatcgctgtctgatgctgaaaaagcccccttcgtttgcacggccgaaaagaagaaa

SEQ ID NO: 9046 - DNA, 378 bp, Glycine max
  Clone ID: LIB3039-035-Q1-E1-C5
ggaacaagggtttctctttctctttctctgtctgcttcttcactttctctcgtttcaatcgaaaaaaatcatgggcagaaaattcttcgtcggtggcaactggaaatgcaatgggaccactgaggaggtgaagaagattgttactactttaaatgaagctaaagtccctggagaagatgttgtagaagttgttgtgagccctccttttgtgttccttccttttgtaaaaagtttgctgcgccctgatttccatgtctcggcccaaaattgttgggttcgcaaaggtggtgcttatactggagaggttagtgctgaaatgcttgttaatttgggaattccttgggttattattggtcactctgaacggaggcagctttt

SEQ ID NO: 9047 - DNA, 370 bp, Glycine max
  Clone ID: LIB3039-035-Q1-E1-C6
gagtcaaacaatcaaacaaactcatttagcatagacagtgaagcaggctttctctagcagctagagatggcagagggaagagggtccactctcgtgcacctcttggtcgtggttctgtgcttggtcgctttcgggttcgccattgccgccgagagaagaagaagcgtcggaaccatgcacaaaattgaaggaacaaatgaaacattctgcagctatagttcagatgttgccactggttatggagtgggcgctttcctgtttcttctttctggtgaatcactgctaatgggagtgacaaagtgcatgtgctttgggaggcccttaacacctggggtaaatcgagcgtggtccattatatattttccttcct

SEQ ID NO: 9048 - DNA, 369 bp, Glycine max
  Clone ID: LIB3039-035-Q1-E1-C7
gagggtttttgtcgttgcgactaagagttgctgcttcttccgccactcagcacttcgctccctctgtgcttcaccaaccatggccgaaatcgaagctaccgttccagatccctctcaaatcgacgtcaaacttttcaaccgctggagcttcgacgacgttgaggttactgatatgtctctggctgattacattggagtgtccccgtcaaagcatgctacatatgttcctcacactgctggtaggtactcagtgaagaggttcaggaaggcgcagtgccccattgttgagagactcaccaactctctcatgatgcacggaaggaacaatggaaagaagctcatggctgtcaggattatcaagcatgcaat

SEQ ID NO: 9049 - DNA, 358 bp, Glycine max
  Clone ID: LIB3039-035-Q1-E1-C8
ggcacaagtgcgtttgttgatcgagataactagaaacagtgtgatgaaaatgaaggtccttgttttcttcgttgctacaattttggtagcatggcaatgccatgcgtacgatatgttccctctccgaatgaacactggctatggtgcccgtactccggaggtgaaatgcgcaagttggaggcttgctgtggaagcacacaacatctctggctttgagaccattcctgaagagtgcgttgaagcaacaaaggaatacatccatggcgaacaatatagatcagactccaaaacagttaaccaacaagcttacttttatgccagagacctcgaagtccatcccaaggacacatttgtgttc

SEQ ID NO: 9050 - DNA, 360 bp, Glycine max
  unsure (1)..(360): unsure at all n locations
  Clone ID: LIB3039-035-Q1-E1-C9
gaccacattccaaaacacaaacacatacattgtagtatcacttttgtctcggaatttgttcttttgagttatggcaagcttaaaggttgcatgtgtggttttgatgtgcatggctgtgatgagtgcaccaatgatggtgcaagccgtgtcatgcaatgatgtttctgtgaacctagcaccgtgcctatcttacctgatgcagggtggagatgttccagaatcgtgctgtagcggagtgaggaacattctgggttctgccagcaccacctttgacaaacaaaccgtgtgcanatgtcttcagcaagctgctaataactatggcatcaacgacgaatacgctcaagcactccccgcccgctg

SEQ ID NO: 9051 - DNA, 358 bp, Glycine max
  Clone ID: LIB3039-035-Q1-E1-D1
gatccttcatttccaaacatatctcatttatagtttactattgaaagatgggtttgaaaatggcaatactgatcctaggcctgctggccatgttccttttggtctcctcagaggtggcatccacgaattcaaaagaggtgacgaatggagttgaagatgccaaatatcctggtggaggctatggtgggggttacccaggcaatggcggtggtggctatcctggccgtggtggtggctaccctggtcgtggtggtggctatccaggtcgcggtggtggttaccctggtcgtggtggcggctatccaggccgtggaggagggtattgtcgctatggctgttgcggtggccggacatacaa

SEQ ID NO: 9052 - DNA, 379 bp, Glycine max
  Clone ID: LIB3039-035-Q1-E1-D10
gagagaaagagagagaaagatgtcgaagcgtggtcgtggtggttcggcggggaacaagttccgcatgtcgctgggtcttccagtggcggcgacggtgaactgcgccgacaacacgggggcgaagaacctctacatcatttcggtgaaagggatcaaaggccgtttgaaccgtcttccctcggcctgcgttggcgacatggtgatggccaccgtgaagaagggaaaacccgatctgaggaagaaggtcttgccagctgtcatcgttcgccagcgcaagccatggcgccgaaaggacggcgtctacatgtacttcgaagataatgctggtgttattgtcaatcccaagggagaaatgaaaggttctgctatcactggtccc

SEQ ID NO: 9053 - DNA, 351 bp, Glycine max
  Clone ID: LIB3039-035-Q1-E1-D11
ggcagcagcacacggcacacacaaagaacaaaagacaaagacagagagaaacaatgtcttccccaagcaaacgccgagacatggacttggtgaagctgtcatcaggatgatgagtgattacaaggtggagacggtcaacgatggcatgcaagagttctttgtggaattccacggacccaaagacagtccttatcaaggtggtgtgtggaaagtaagggtggatctacctgatgcctatccttataagtctccatctattggctttgtcaacatatttttccatcgtaatgtggatgagatgtctggttctgtttgcttagatgttattagccagacctggggtccaatgtt

SEQ ID NO: 9054 - DNA, 368 bp, Glycine max
  Clone ID: LIB3039-035-Q1-E1-D12
ggtcaagcctgccgagaaaaccctagttcgcttgcagtcacacaagaggccaatcctattcatagctcgagatgggtgaagaagtgaaggtagttgttccagaatcagtgttgaagaagcgcaagagggaggaggaatgggcgttagccaagaagcaagaactcgatgctgccaagaagaagagagccgagagccgcaaactcatctacaacagagctaagcagtacgctaaggagtacgatcaccaggagaaggaattgattcggttgaaacgctaggccaagctgaaaggtgggttctatgtggatccacaggctaaactgttgtttattaatcccattcgtggtattaatgccatggaccccaaa

SEQ ID NO: 9055 - DNA, 348 bp, Glycine max
  Clone ID: LIB3039-035-Q1-E1-D2
gataaccatggcgtctaactctgcttccgctctttacttccttttatgcctatcgcccatcactttgcttctttctgcgtttcgtgctcaagctcaatctcatgctccagctcccactttcaagtactgtgaaaagaatgcagactatgctgtgaaggtgagtggagtggaaatattgcctgaccccgtggagagaggagtgccattcacctttaagatcccagcttatactcctgaaccaattcaaagcggggacttgttatatgaaatttcttatgctggaatagaagcacaacctgctacatttctccatgatctctgtgaggaagcaccatgcccagtacctgc

SEQ ID NO: 9056 - DNA, 359 bp, Glycine max
  Clone ID: LIB3039-035-Q1-E1-D3
ggaacttctcacgttcatttctacacatccctagctctgtcgttccgtcgttgacgatggcgtttcgggtgcgaagccctgacctccgctctctctttcttctctctctcttgtccatcgcttccgccaatgtcttcttcgaagagcgtttcgatgacgggtgggaaaatcgatgggttaaatcagattggaaaaaagatgagaacgtggctggggagtggaaccacacctctggtcaatggaatggagacgctaatgacaaaggtattcaaaccagtgaggattacagattctatgctatttcagctgagtaccctgaattcagcaacaagggtaagacactagtctttcaattttct

SEQ ID NO: 9057 - DNA, 404 bp, Glycine max
  Clone ID: LIB3039-035-Q1-E1-D4
gcacaagtgagtttgttgatcgagataactagaaacagtgtgatgaaaatgaaggtccttgttttcttcgttgctacaattttggtagcatggcaatgccatgcgtacgatatgttccctctccgaatgaacactggctatggtgcccgtactccggaggtgaaatgcgcaagttggaggcttgctgtggaagcacacaacatctttggctttgagaccattcctgaagagtgcgttgaagcaacaaaggaatacatccatggcgaacaatatagatcagactccaaaacagttaaccaacaagcttacttttatgccagagacctcgaagtccatcccaaggacacatttgtgttcagtatagatggcaccgtactctctaatatttcatactacaaaaaaca

SEQ ID NO: 9058 - DNA, 380 bp, Glycine max
  Clone ID: LIB3039-035-Q1-E1-D5
ggtaataatttcttccatcagatatattttcttcaaaaacaatggcaggcgaggtggtgaagaaggaagactctctcaacctgaaagtcactaacaagagtcatgttcaacctgaggagaaaattggaaggaaagagtaccagctggtcacttttgatcttccctacttggccttttactacaaccagaagctgctgttttacaagggtgaagattttgagggtatggtccaaaaactcaaagttggacttggtgtggtgctgaaggagtttcaccaacttgctggtaagttagggaaagatgaagagggggtgttcagagtggagtatgttgatgacatgcttggtgtggaggttgttgaagctgttgttgttgatgat

SEQ ID NO: 9059 - DNA, 381 bp, Glycine max
  Clone ID: LIB3039-035-Q1-E1-D6
ggcacaagtgagtttgttgatcgagataactagaaacagtgtgatgaaaatgaaggtccttgttttcttcgttgctacaattttggtagcatggcaatgccatgcgtacgatatgttccctctccgaatgaacactggctatggtgcccgtactccggaggtgaaatgcgcaagttggaggcttgctgtggaagcacacaacatctttggctttgagaccattcctgaagagtgcgttgaggcaacaaaggaatacatccatggcgaacaatatagatcagactccaaaacagttaaccaacaagcttacttttatgccagagacctcgaagtccatcccaaggacacatttgtgttcagtatagatggcaccgtactccc

SEQ ID NO: 9060 - DNA, 220 bp, Glycine max
  Clone ID: LIB3039-035-Q1-E1-D7
gacagcactggatgagttgatcagaatagtcgatagccttctgatcgaacctcaaggtcgctagtgctcctgcgagagccacagcgtattgatgcattcttcgagcaatacttcggtcaggtcgtctctctcaatgctcactgcatatgattcgcttactccgaaggcgatctcctcacgttcaaagcctactgtcatatcacactcaatgcttgcactt

SEQ ID NO: 9061 - DNA, 413 bp, Glycine max
  Clone ID: LIB3039-035-Q1-E1-D8
agagttcccatgtgagatggagcattacttgccagtggtgttttcaccgcctcgagatgggaaagaactgacggagccacttccactagtggggaacaagcagcagcagcagcaacaagccattccaattccaatctcaagtggcggtgatggtgacgtggctagcagcaaaagtggtggcgtaggtggtgatgatgagacaaatgaagaagaagtggcctagtgagttctcaagggtagtgttgtgattgtgaatcagtgttagcaggagaaccagacagacagcatttaaggtggttgggcaacgacccacacctctgttccaaccaacctacaactacagcaaccatttctcaatctctctcatcaactcaacctttcctccattatccttaatttttcctttttaaaat

SEQ ID NO: 9062 - DNA, 371 bp, Glycine max
  Clone ID: LIB3039-035-Q1-E1-D9
ggcacaagtgagtttgttgatcgagataactagaaacagtgtgatgaaaatgaaggtccttgttttcttcgttgctacaattttggtagcatggcaatgccatgcgtacgatatgttccctctccgaatgaacactggctatggtgcccgtactccggaggtgagatgcgcaagttggaggcttgctgtggaagcacacaacatctttggctttgagaccattcctgaagagtgcgttgaagcaacaaaggaatacatccatggcgaacaatatagattagactccaaaacagttaaccaacaagcttacttttatgccagagacctccaagtccatcccaacgacacatttgtgttcagtatacatggca

SEQ ID NO: 9063 - DNA, 364 bp, Glycine max
  Clone ID: LIB3039-035-Q1-E1-E1
ggtgatccttctacactaactaaagccgagcagcgagggagagaaaccctagcaaaaatgccggctggtcacggtttgagatcccgcaccagagattccttctctcgtcccttcaggaagaagggtaccatcgccctcaccacatacctcagaacctaccacgtcggcgattatgtcgacgtcaaggttaacggcgccgtccacaagggaatgcctcacaagttctaccatggccgcaccggtcgcgtctggaatgccaccaaacgtgctgttggggtcgaagtcaacaagcaggtcggcaacagaatcataaggaagaggattcacgtgcgtgtggagcatgttatgccatcaaggtgcactg

SEQ ID NO: 9064 - DNA, 377 bp, Glycine max
  Clone ID: LIB3039-035-Q1-E1-E10
ggcacaagtttgttgagatagctagaagcaataagatgaaaatgaaagtgcttgttttgtttgttgctacagttttggtagcatatgaatgccatggctcagactaccagaagttccctctccaaatgaaaactgggtttggtgggcaatacagcaatgaggtggcatgtgccagttggaggcttggcgtggaagcaaacaacgtagtcaagtggcaaactgttcctgcagcttgcggagagtacataactgactacgttctacgagaccaatatagatcagattccaaaacagttaaccaacaagcttatttctatgctaaatccctcacactcaccaacaaagatgtctttgtcttggacgttgacgacactact

SEQ ID NO: 9065 - DNA, 379 bp, Glycine max
  Clone ID: LIB3039-035-Q1-E1-E11
ggaacttctcacgttcatttctacacatccctagctctgtcgttccgtcgttgacgatggcgtttcgggtgcgaagccctgacctccgctctctctttcttctctctctcttgtccatcgcttccgccaatgtcttcttcgaagagcgtttcgatgacgggtgggaaaatcgatgggttaaatcagattggaaaaaagatgagaacgtggctggggagtggaaccacacctctggtcaatggaatggagacgctaatgacaaaggtattcaaaccagtgaggattacagattctatgctatttcagctgagtaccctgaattcagcaacaagggtaagacactagtctttcaattttctgttaagcacgaacagaagct

SEQ ID NO: 9066 - DNA, 383 bp, Glycine max
  Clone ID: LIB3039-035-Q1-E1-E12
gaaggtgcaagagtttgttgtgagctataagctagtttatcgtgaggagaatatgaagttgtttgttttctttgttgctgcagtagttttggtagcatggccatgccatggcgcaggctaccaaaggttccctctccgaatgaaaactggctatggtgagcgttcttcggaggtaaaatgcgcaagttttaggcttgctgtggaagcacacaacatccgagcctttaaaaccattcctgaagagtgcgttgaaccaacaaaggactacattaatggcgaacaatttagatcagactctaaaacagttaaccaacaagctttcttttatgctagtgaacgcgaagtccatcacaacgacatatttatattcggcatagataaca

SEQ ID NO: 9067 - DNA, 354 bp, Glycine max
  Clone ID: LIB3039-035-Q1-E1-E2
gacacaacatcactgcaattcctttttccctcgagcaacgacgatggacgacgcggaagcggcgaacacgcttcgcattctggtggcgacggactgccacctcggttacatggagaaggatgaggtgcgccgccacgactccttccacgccttcgaggagatttgcgccgtcgccgagcgccaccgcgtcgacttcgtcctcctcggcggcgacctcttccacgagaacaagccctctcgctccacgctcgtcaaggccatcgagattctccgccgctactgcctcaacgaccgccccgtccccttccaggtcgtcagcgaccagacgctcaatttccagaacgcgtttggtca

SEQ ID NO: 9068 - DNA, 345 bp, Glycine max
  Clone ID: LIB3039-035-Q1-E1-E3
ggtgcgtgaatcatgtcggacgaagagcatcacttcgattctaaggcggatgcgggagcgtccaagacgtatcctcagcaggctggtaccattcgcaagaatggctacatcgtcatcagatccaggccttgcaaggttgtagaggtctctacgtcaaagacaggcaagcatggacatgcaaagtgtcactttgttgcaattgatatttttaatgggaaaaagcttgaagatattgttccatcatcccacaactgtgatgttccacatgtgaatcgcactgactatcagcttattgatatctctgaagacggctttgtgagtctgttgactgataatggaaatacc

SEQ ID NO: 9069 - DNA, 348 bp, Glycine max
  Clone ID: LIB3039-035-Q1-E1-E4
ggcacactacggtactatagtatagtgtttacatacttaattactcagcactctcaaaaaaataaaaacttcttttataaattggaaaagggactcttcactcttctctttctctctctgcaatgtaggtcgtctgagaatggcaaagtgtcatcagaacaacgtcggatccatcgctcttgatcaccgtcactccgccaaaaatgccaccgccgccggccacttccgcgtgctccgccgcttgatcttcgacgccgtcagctgcggcggcaactctcgctaccggtatcgccagcacggtggcgatgtcagcgacagcggtgacttcagctcaacggcgtgtcacac

SEQ ID NO: 9070 - DNA, 373 bp, Glycine max
  Clone ID: LIB3039-035-Q1-E1-E5
gggagtgtgaggccatcgacgcagtttgaaatcatctgctcctgctcgtttttctgttctgcacgttgtgcaggaacattctcttcagaaaaagggtgaatttgtgtttctgttataccctattaagtgaggaatcattttttggctttttgcccctaaaaaaatggtgcaagttgtgtcattgagcactctggcaacctgtggaaatagcacgttatgtggatgctcaccatcttggatggcaccctttgagccatacaagagatcccaaattacctcttccaatggcagacacttggtttggaacaattctgtgcatagcttgttcttaacaacgcgcagtgaatttagggctgaagcaacatggatgttt

SEQ ID NO: 9071 - DNA, 221 bp, Glycine max
  Clone ID: LIB3039-035-Q1-E1-E6
caaaaagaggggaagaggtgggtttgtgtagccatctacgcagtttgagtacatctgcactcactgttcttgctgtcctgcatgctgcgcttgtagattcgcgtcaggactctgcagacttcgcgttcccgctctgcactattagttgtcggagaatttgttggcgtcatgagaataacgtcagttcgatcgttgttgaagaccgccattcggccataggt

SEQ ID NO: 9072 - DNA, 361 bp, Glycine max
  Clone ID: LIB3039-035-Q1-E1-E7
gagggttggttcatttgatctgcgagtggagaagagaatcgtgatgggagggggacacggtcacggcaccacctacaaaggagttaccgttcatcacccaaagcgctggcacactatcaccggcaagggtttgtgcgcggtcatgtggttttgggtattctacagggcaaagcaagacggtcctgttgtattgggctggaggcatccttgggagggtcatcacgatgatcatggcaagggccattaagcattccttaggcatgagctccaagaacaggaagaacagaatttgaagtgtctgttgctgtgggtgtgctgttagttgaaatgtttactttgatcaattcaatacatttggctg

SEQ ID NO: 9073 - DNA, 355 bp, Glycine max
  Clone ID: LIB3039-035-Q1-E1-E8
ggcacaagtgagtttgttgatcgagataactagaaacagtgtgatgaaaatgaaggtccttgttttcttcgttgctacaattttggtagcatggcaatgccatgcgtacgatatgttccctctccgaatgaacactggctatggtgcccgtactccggaggtgaaatgcgcaagttggaggcttgctgtggaagcacacaacatctttggctttgagaccattcctgaagagtgcgttgaagcaacaaaggaatacatccatggcgaacaatatagattagactccaaaacagttaaccaacaagcttacttttatgccagagacctcgaagtccatcccaaggacacatttgtg

SEQ ID NO: 9074 - DNA, 382 bp, Glycine max
  Clone ID: LIB3039-035-Q1-E1-E9
ggcaagtcacacatacacgatatgataccccgtcctccctctcttcacttttgactattgacttcctcaaccgatccactcttctctctatctgcagatggcaagtgggtttggggaatcaacagggagatcacccccaagcccttcctacttcaacaacagtaataacaatgatgctgccaattttgaatgcaacatttgctttgaattagcgcaagacccgataattactttgtgtggtcatcttttctgctggccctgtctttacaaatggcttcactttcactcacaatcacgagaatgcccggtgtgcaaggccctcgtggaggaggagaagctggttcccttgtatgggagaggaaagtcgtcgactgatccaaga

SEQ ID NO: 9075 - DNA, 391 bp, Glycine max
  Clone ID: LIB3039-035-Q1-E1-F1
ggcacaagtttgttgagatagctagaagcaataagatgaaaatgaaagtgcttgttttgtttgttgctacagttttggtagcatatgaatgccatggctcagactaccagaagttccctctccaaatgaaaactgggtttggtgggcaatacagcaatgaggtggcatgtgccagttggaggcttggcgtggaagcaaacaacgtagtcaagtggcaaactgttcctgcagcttgcggagagtacatagctgactgcgttctaagagaccaatatagatcagattccaaaacagttaaccaacaagcttatttctatgctaaatccctcaaactcaccaacaaagatgtccttgtcctggacgttgacgacactactctccccaaacccca

SEQ ID NO: 9076 - DNA, 388 bp, Glycine max
  Clone ID: LIB3039-035-Q1-E1-F10
ggttgcagaagacacaaaagaagtcacaaaatgtatcgcgttcttcaccgcgctttctgcaccgccaccgagcccgccaccaccgccaccgtcaccgtttccatcaagtccatttcggaggatctgtacaaggaagtgaagctaaagaatgtggtggagaagttcaagaaagcctcggacatcgaccgcttccgcaaaaaaaccggcatctacgaagacaccgtccgccgcctcgccggcgcccgacgcttccggtggatccgcgacatcctcgagcaccagaagcagtactccgacatctccaacgagggcttctccgcgcgcctcatctccctgtacggcaagtccggcatgaccaagcacgcgcgcaaggtgttcgacgaaatgc

SEQ ID NO: 9077 - DNA, 364 bp, Glycine max
  Clone ID: LIB3039-035-Q1-E1-F11
ggcacttcaattgcaatcaaattagttcattctctttgcgcagttccctacctctcctttcaagatgcagatcttcgtcaagaccctcaccggaaagaccatcacccttgaggtggaaagctctgacaccatcgacaacgtcaaggccaagatccaggacaaggaaggaattcccccggatcagcaacgtctcatcttcgccggaaagcagctcgaggacggccgtaccctcgccgactacaacatccagaaggagtcaacccttcaccttgtccttcgtctccgtggtggcatgcagatcttcgtcaagactctcactgggaaaaccataaccctagaggtcgaaagctctgacaccattgac

SEQ ID NO: 9078 - DNA, 380 bp, Glycine max
  Clone ID: LIB3039-035-Q1-E1-F12
gcccccaagattcaaaatctgaaaacacacacataattcccgacaccatcttcaactctcacaaaaaaaacatcattaggccttttgagttttgtcacaaaagccgcattcgttgtcgagaaacaccttcttcatctaacttgaacactcgagaatggtgtactcctactacacccccacgtactactcaaccctccatgactcactcacctctctgtgcaagaccattcttcctttcagcttcaagaaacgaccgttacctgcggcggaatacaaattgtcgaaactgcaatccgacaaccttaaatggcagcaagactctttccaccaggtgctgaacttgatgggtctccaaaaagaaggcatcgtcgctgaatctg

SEQ ID NO: 9079 - DNA, 357 bp, Glycine max
  Clone ID: LIB3039-035-Q1-E1-F2
attcaagctcggatgtgggtagcactgtcaaccttcttcttgacggtattaactctcttacgccaagttgcataccctgtgaccaagaaatttccagcattaccttccaatgatgataagagtacttcaaaaccacttcctgatacaacaaacatggaagttcttcctccttcatcaactccatcatgtacagaggaaaatctccttccctccatgctgaaaaggttaggtgagcttgaagagaaggttgacacactccaatctaagccatctgagatgccttatgagaaagaggaattgttgaatgctgctgtatgccgggtggatgctttggaacctgagttaaatgcaactaaa

SEQ ID NO: 9080 - DNA, 355 bp, Glycine max
  Clone ID: LIB3039-035-Q1-E1-F3
ggcacaagtgagtttgttgatcgagataactagaaacagtgtgatgaaaatgaaggtccttgttttcttcgttgctacaattttggtagcatggcaatgccatgcgtacgatatgttccctctccgaatgaacactggctatggtgcccgtactccggaggtgaaatgcgcaagttggaggcttgctgtggaagcacacaacatctttggctttgagaccattcctgaagagtgcgttgaagcaacaaaggaatacatccatggcgaacaatatagatcagactccaaaacagttaaccaacaagcttacttttatgccagagacctcgaagtccatcccaatgacacatttgtg

SEQ ID NO: 9081 - DNA, 349 bp, Glycine max
  Clone ID: LIB3039-035-Q1-E1-F4
ggcacaagtgagtttgttgatcgagataactagaaacagtgtgatgaaaatgaaggtccttgttttcttcgttgctacaattttggtagcatggcaatgccatgcgtacgatatgttccctctccgaatgaacactggctatggtgcccgtactccggaggtgaaatgcgcaagttggaggcttgctgtggaagcacacaacatctttggctttgagaccattcctgaagagtgcgttgaagcaacaaaggaatacatccatggcgaacaatatagattagactccaaaacagttaaccaacaagcttacttttatgccagagacctcgaagtccatcccaaggacaca

SEQ ID NO: 9082 - DNA, 366 bp, Glycine max
  Clone ID: LIB3039-035-Q1-E1-F5
gcacaagtgagtttgttgatcgagataactagaaacagtgtgatgaaaatgaaggtccttgttttcttcgttgctacaattttggtagcatggcaatgccatgcgtacgatatgttccctctccgaatgaacactggctatggtgcccgtactccggaggtgaaatgcgcaagttggaggcttgctgtggaagcacacaacatctttggctttgagaccattcctgaagagtgcgttgaagcaacaaaggaatacatccatggcgaacaatatagatcagactccaaaacagttaaccaacaagcttacttttatgccagagacctcgaagtccatcccaaggacacatttgtgttcagtatagat

SEQ ID NO: 9083 - DNA, 396 bp, Glycine max
  Clone ID: LIB3039-035-Q1-E1-F6
gataacacaaacacaaattacatagcctcagtaatctgagagagaaacaaaaacaatgaaggtttccattgccaagttccactcccttcccctatgttttttccttctcttggccttcaacacaaaacccctcctagcagcagaaccagagccagtggttgataagcaagggaaccctttggagccaggagtagggtactacgtgtggccactttgggctgatgaaggaggcctcacactaggccaaacaaggaacaagacatgccctctttatgttatccgtgacccttcattcattggcaccccagtttcattcttagcaccaggccttgaccatgttccaacactcactgatctaaccattgatttccctgtggtgacagtgtgtaaacaacc

SEQ ID NO: 9084 - DNA, 268 bp, Glycine max
  Clone ID: LIB3039-035-Q1-E1-F7
agcagtgccggtgcattgcccttgttaacccattcatcatacaaggtcgagttaaatttctccaccccatatccatgttttttgtagtatggaatattagagagtacggtgccatctatactgaacacaaatgtgtccttgggatggacttcgaggtctctggcacaagtgagtttgttgatcgagataactagaaacagtgtgatgaaaatgaaggtccttgttttcttcgttgctacaattttggtagcatggcaatgccatgcgt

SEQ ID NO: 9085 - DNA, 376 bp, Glycine max
  unsure (1)..(376): unsure at all n locations
  Clone ID: LIB3039-035-Q1-E1-F9
gataaaaaaacttctaataaccccaaagggttgccttggggttcggtttgtgctgccggattcgtatgttgatcctgaaaacaaggactatggtgctgaattatttgtgaatggagagatcgtccagagatcacctgaaagacagagaagggtggaaccacagccacaaaggcatcatgacagaccacgatacaatgatagaacaaggtatgtccggcgcagagaaaacatgcagtgaaggaccaatttgagatanggagagggatgtgatgtacatacactatggaagtactttgttacatgcactattttagtcttgcctttggagacattccatatatttccggtggggtaactcaaatgtttgttgtcaaac

SEQ ID NO: 9086 - DNA, 381 bp, Glycine max
  Clone ID: LIB3039-035-Q1-E1-G10
ggagggcgaggaagccacatagagacacaatacagagtgagttgttgctccttcgccacaactctctgccaacatgggtatctccagagattctatgcacaagaggcgtgccactggtggcaagaagaaggcctggaggaaaaagagaaagtatgagcttggtcgccagcctgctaacactaagctgtcaagcaacaagacagtcaggaggatccgtgttagaggtggaaatgtgaaatggagggcattgagattggatactggaaattactcctggggaagtgaagctgtaactcgcaagactcgtgtactaaatgtggtttacaatgcctcaaacaatgagcttgtgcgtactcagactcttgtcaaaagtgctatcgt

SEQ ID NO: 9087 - DNA, 386 bp, Glycine max
  Clone ID: LIB3039-035-Q1-E1-G11
ggcagttcaaagcgaagaaagattcgaaacgaagaaagaaagcgttgtgaagaatggcggaagagggacaagtgatcggtgtccacagcgtagaggagtggaaggaacatctcaagaagggagaagagtccaagaaattgattgtggtggattttactgcttcttggtgcggtccatgccgtttcattgccccgattcttgcagagtttgctaaaaagttgccgaatgtcaccttcctcaaggtggatgtggatgaattggagactgtttccaaggagtggggaattgaggctatgccaaccttcctgttcttgaaagaaggcaagctggtggacaaggttgtgggtgccaagaaagaggagctgcaattgacaatagccaaacat

SEQ ID NO: 9088 - DNA, 385 bp, Glycine max
  Clone ID: LIB3039-035-Q1-E1-G12
ggacgaattcaagggtagataagaaaaagaaaaaatgtgtagcctcgagaagcgtggcaacgcctgggtactaaccctcgacggcgacgacggcgacgtccaacaccgcctcaacccaaccctaattgattccctcctctcaacgcttaaccgtctcgcatctcaagccactcccggctccgtcctcgtcaccaccgccaccggcaaattcttctccaacggcttcgacctttcctgggcgcgcgccgccgcttccgcctccgccgccaccgaccgcctccagttcatggtggactccctcaagcccgtcttggcggcgatcatgtcccttcccatgcccaccatcgtcgccatcaacggccacgcctccgccgccggggttcct

SEQ ID NO: 9089 - DNA, 359 bp, Glycine max
  Clone ID: LIB3039-035-Q1-E1-G2
ggcacaagtgagtttgttgatcgagataactagaaacagtgtgatgaaaatgaaggtccttgttttcttcgttgctacaattttggtagcatggcaatgccatgcgtacgatatgttccctctccgaatgaacactggctatggtgcccgtactccggaggtgaaatgcgcaagttggaggcttgctgtggaagcacacaacatctttggctttgagaccattcctgaagagtgcgttgaagcaacaaaggaatacatccatggcgaacaatatacatcagactccaaaacagttaaccaacaagcttacttttatgccagagacctcgaagtccatcccaaggacacatttgtgttca

SEQ ID NO: 9090 - DNA, 338 bp, Glycine max
  Clone ID: LIB3039-035-Q1-E1-G3
gaacgcatgaatatggtaaggttgacgtcttcatcgactatcgcgcagatgaaagtcgatgtctacatcaatagcatccctatggacacactgggactgcccgctatactcatcgattgcctctacgactaccaactgggaatagtcgatgttctacgacggtgaagtggggcagttcgaggtctaccgtgacaagccctgggatcattaggctagtaactaatcctgatgaatgattccgcactcgcgctgctcacaatggtcgtcaacactcgctctggcagtcccatccaggtcatcggcctcattcattgtatgaccgacacctacaccttcat

SEQ ID NO: 9091 - DNA, 342 bp, Glycine max
  Clone ID: LIB3039-035-Q1-E1-G4
ggcgaaacagagagtgatttcagtgagtgatcggtgttcacttgatctcatcataatcgtcagcgtcaattgaagaagatgccgatcagaaacatcgccgtcggaaggcctgaagaggcgactcaccccgacacgttgaaggcggctttggctgagttcatctcaaccttcatcttcgtgttcgccggctcaggctccggcatcgcctacaacaagctcaccgacaacggcgctgccacccctgccggcctcatctccgcctccatcgcccatgcattcgccctcttcgtcgccgtctccgtcggcgccaacatctccggcggccacgtcaaccccgccgtc

SEQ ID NO: 9092 - DNA, 359 bp, Glycine max
  Clone ID: LIB3039-035-Q1-E1-G5
gcacaagtgagtttgttgatcgagataactagaaacagtgtgatgaaaatgaaggtccttgttttcttcgttgctacaattttggtagcatggcaatgccatgcgtacgatatgttccctctccgaatgaacactggctatggtgcccgtactccggaggtgaaatgcgcaagttggaggcttgctgtggaagcacacaacatctttggctttgagaccattcctgaagagtgcgttgaagcaacaaaggaatacatccatggcgaacaatatagatcagactccaaaacagttaaccaacaagcttacttttatgccagagacctcgaagtccatcccaaggacacatttgtgttcag

SEQ ID NO: 9093 - DNA, 368 bp, Glycine max
  Clone ID: LIB3039-035-Q1-E1-G7
tgggattcggagaggttctcaatctccggttcggcacagaatgctcgatcaatctcatgcactgtcacatctactgcacaagcgacagtcacgcgaccaaatccaaccagcacatcgtcatcaggactcccggtggcatgcttgtgtagcagacgacgactaggagggccagctgttgcaactgccctgtcactgggaagaggattcaagggattccacatatagagccagcacagtatcatgtatcaatgttacacagtggccggccgactgtgagccgtgcatatggtagtgtgttgtctggcagtgctgttagagattgaatcattcaagctttcgtggatgaggagcaaaggattgtgacaaag

SEQ ID NO: 9094 - DNA, 359 bp, Glycine max
  unsure (1)..(359): unsure at all n locations
  Clone ID: LIB3039-035-Q1-E1-G8
gagggtttacaccgaggagacacaccttcagcagcagcagccatggttctcaaaaccgaactatgccgattcagcggtgccaagatctacccagggaaaggcatcagatttgttcgtggtgattctcaggttttcctgtttgctaactcgaaatgtaagaggtatttccacaacaggttgaagccatcaaagctcacctggactgcaatgtacagaaagcaacacaagaaggacattgctcaagaagctgtgaagaaaagaagacgtgctgccaaaaagccttactccaggtccattgtcggtgccactttggaagttatccagaanaagagagctgagaagccagaagttcgagatgc

SEQ ID NO: 9095 - DNA, 383 bp, Glycine max
  Clone ID: LIB3039-035-Q1-E1-G9
gaggaaagaagagagagaacaaagcacttagtgctattcaataattacgataaaaccaacagcgagtgttgtttttgtttggtccatgctggaccagggaatgaatagagatgagaggctttcggttgaagagaactgagttaagcggcgaagccaaacgcagaatcggcggcagaaattgccaccggaagcacgtcgattacgggtgaaccaaacacaaaattccatccaccacttctcttttcaatccgcaactcaaatctgtgaagaaaatctcaatttctaaattgtaattcttatcactactgctagtagtagtaaaatcaaacaattagaaagtactagagtgtttttttttcgttgtttcgtctgtattacattta

SEQ ID NO: 9096 - DNA, 351 bp, Glycine max
  Clone ID: LIB3039-035-Q1-E1-H1
gacagcaaaacaattttcaaactcaattaccattccataacctaaatctcctctttgtttccgagtcagagagcaatggcacgtaccaagcaaaccgctcgcaagtccaccggcggaaaggcgccgaggaagcaattggcgactaaagccgctcgcaagtcagctccggccaccggcggagtgaagaagccccaccgcttcaggcccggaacggtggctctgagggagatcagaaagtaccggaagagcactgaacttctgatccgaaaactcccattccagaggctcgtcagagaaatcgctcaggatttcaaaacagatcttcgtttccagagcagcgctgtttctgcg

SEQ ID NO: 9097 - DNA, 361 bp, Glycine max
  Clone ID: LIB3039-035-Q1-E1-H10
ggaacttctcacgttcatttctacacatccctagctctgtcgttccgtcgttgacgatggcgtttcgggtgcgaagccctgacctccgctctctctttcttctctctctcttgtccatcgcttccgccaatgtcttcttcgaagagcgtttcgatgacgggtgggaaaatcgatgggttaaatcagattggaaaaaagatgagaacgtggctggggagtggaaccacacctctggtcaatggaatggagacgctaatgacaaaagtattcataccagtgaggattacagattctatgctaattcagctgagtaccctgaattcaacaacaagggtaagacactagtcttttcattttctgt

SEQ ID NO: 9098 - DNA, 383 bp, Glycine max
  Clone ID: LIB3039-035-Q1-E1-H11
ggcacaagtgagtttgttgatcgagataactagaaacagtgtgatgaaaatgaaggtccttgttttcttcgttgctacaattttggtagcatggcaatgccatgcgtacgatatgttccctctccgaatgaacactggctatggtgcccgtactccggaggtgaaatgcgcaagttggaggcttgctgtggaagcacacaacatctttggctttgagaccattcctgaagagtgcgttgaagcaacaaaggaatacatccatggcgaacaatatagatcagactccaaaacagttaaccaacaagcttacttttatgccagagacctcgaagtccatcccaaggacacatttgtgttcagtatagatggcaccgtactctcta

SEQ ID NO: 9099 - DNA, 375 bp, Glycine max
  Clone ID: LIB3039-035-Q1-E1-H12
gacttgtaataattcttataacacaacacaacccatggccaccacctccgcattcctcctccttcccctcctcctgctgctccacctcgccatcgccgctcacggcatcggcatcaactacggcacgctcggcgacaaccttccaccgcccgcggcggtggcgaacttcctgaagacgaagacgaccatcgaccgcgtgaagatctacgacgtgaacccggacatcctgcgggccttcgccggcagcggcatctccgtgacggtgaccgcccccaacggtgacatcgccgccttaaccaaaatcgactcggcgatgcagtgggtggcgacgcacatcaaaccctttcaccctcagaccacaattaattacatcct

SEQ ID NO: 9100 - DNA, 366 bp, Glycine max
  Clone ID: LIB3039-035-Q1-E1-H2
ggcacgcactagcactgtctctcactgaaacttgttcgcacattttcacggatctaactaagttatcgccatgaatcgccaccacgatcccaatcccttcgaagaagaagaagtcaatcctttttcgaatggcactactgctcctgcatcaaagtcacgtattccaccattagcatctgagtcactgggctttggtcaaaggcatgatgctacagttgatattcctttggatactacaaatgactccaagaaaaaaggtcaagagctagcagcttgggaagcagatttaaaacggagagagaaggaaataaaaagaagagaagaggctgtttctaaagctggtgttcctgttgatgataagaattg

SEQ ID NO: 9101 - DNA, 349 bp, Glycine max
  unsure (1)..(349): unsure at all n locations
  Clone ID: LIB3039-035-Q1-E1-H3
ggcacaagtttgttgagatagctagaagcaataagatgaaaatgaaagtgcttgttttgtttgttgctaccgttttggtagcatatgaatgccatggctcagactaccagaagttccctctccaaatgaaaactgggtttggtgggcaatacagcaatgaggtggcatgtgccagttggaggcttggcgtggaggcaaacaacgtagtcaagtggcaaactgttcctgcagcttgcggagagtacatagctgactacgttctangagaacaatatagatcagattccanaacagttaaccaacaagcttatttctatgctaaatccctcaaactcaccaacaaagatgt

SEQ ID NO: 9102 - DNA, 365 bp, Glycine max
  Clone ID: LIB3039-035-Q1-E1-H4
acggcagcaagacaaaaagggaccaccactactaccaagtgaaaaagcaactaagcatagtgtgtaagaaagggagaaaaacaagtgctgtgtagagagaaaaatggctaggtggtgcatgatcttggtggttcttgctcttgccgtggttgcaagtgccagaaacatgcccaatgacgctggtttggaggaccagaagaacttccttgggtatgggttttcgggagttggcaacaatggccttccctttggtggagtgggttctgcgttagttcgcaatattgctggttactctgcgctaagaggacttggaggattcggtgggcctggtgggcttggcggactcggaggtcctggtaacggtg

SEQ ID NO: 9103 - DNA, 377 bp, Glycine max
  unsure (1)..(377): unsure at all n locations
  Clone ID: LIB3039-035-Q1-E1-H5
gacttgtaataattcttataacacaacacaacccatggccaccacctccgcattcctcctccttcccctcctcctgctgctccacctcgccatcgccgctcacggcatcggcatcaactacggcacgctcggcgacaaccttccaccgcccgcggcggtggcgaacttcctgaagacgaagacgaccatcgaccgcgtgaagatctacgacgtgaacccggacatcctgcgggccttcgccggcagcggcatctccgtgacggtgaccgcccccaacggcgacatcgccgccttaaccaaaatcgactcggcgaggcagtgggtggcgacgcacatcanaccctttcaccctcagaccanaattaattacatcctcg

SEQ ID NO: 9104 - DNA, 365 bp, Glycine max
  Clone ID: LIB3039-035-Q1-E1-H6
gaaggtgcaagagtttgttgtgagctataagctagtttatcgtgaggagaatatgaagttgtttgttttctttgttgctgcagtagttttggtagcatggccatgccatggcgcaggctaccaaaggttccctctccgaatgaaaactggctatggtgagcgttcttcggaggtaaaatgcgcaagttttaggcttgctgtggaagcacacaacatccgagcctttaaaaccattcctgaagagtgcgttgaaccaacaaaggactacattaatggcgaacaatttagatcagactctaaaacagttaaccaacaagctttcttttatgctagtgaacgcgaagtccatcacaacgacatattta

SEQ ID NO: 9105 - DNA, 85 bp, Glycine max
  Clone ID: LIB3039-035-Q1-E1-H7
ggcacaagtgagtttgttgatcgaaataactagaaacagtgtgatgaaaatgaaaggccttgatttcttcgttgctagaattttg

SEQ ID NO: 9106 - DNA, 302 bp, Glycine max
  Clone ID: LIB3039-035-Q1-E1-H8
gattatatttgagttcaaacaaatcaaagccatggccacctccaacttctctattgttctctccgtctccctagccttctttttggtgctacttaccaaggcacactcgaccgataccgtttctttcaccttcaacaagttcaacccagtccaaccaaacattatgctccaaaaagatgctagtatttcatcctctggggtgttacaactcaccaaagttggcagcaacggcgtgcccacctcgggatctctcggtcgtgccctttacgctgccccaatccagatttgggacagcgaaaccg

SEQ ID NO: 9107 - DNA, 381 bp, Glycine max
  Clone ID: LIB3039-035-Q1-E1-H9
gacacttcaaaatcctctagtaacccttcttttctctctcactctctcgtgttctgagctgctagaagcaatggagaggaaaagaatgccatgcttctttcatcatgtttgcaatgcttgttggattgctctctcatagccttgtcattcctgtaatatcaaccaatgttacagattagaagaactactacaacccagatgcacatgctggaagtccccccacaagtttctccgattcactgtggtcagacaatactagtcctccatctcatgggcatgggagctcttcatcctcatatcagaatagtccaagtactccatcaacaacctcaagtggaaactgtggatcatcacccccataacatcatgattcaacatcct

SEQ ID NO: 9108 - DNA, 380 bp, Glycine max
  Clone ID: LIB3039-036-Q1-E1-A10
gacgtacgcaactgaaaaggaaaaccctaagagatgaagagaactcctatcttgttccctctcttctttcttctttgtgccttcacctcatatctaccttcagccaccgctgatgatgatcatgtgtacgacactgacggcgataagcttcaatacggtgtcaattatttcgtgttgccagtgataagaggaaatggcggtggaatacaagtagcaaaagcaggaaacgaaacttgccctctgactgtggtgcaatctggcaacgagctctctgaggggttaccgataaagattgcatctcgatcagcaggagtcgctttcatcacccaaggccagcttttcaagagcattcagttcggtgtgtttccatccacactcag

SEQ ID NO: 9109 - DNA, 382 bp, Glycine max
  Clone ID: LIB3039-036-Q1-E1-A11
gacagcgaaacagagagtgatttcagtgagtgatcggtgttcacttgatctcagcataatcgtcagcgtcaactgaagaagatgccgatcagaaacatcgccgtcggaaggcctgaagatgcgactcaccccgacacgttgaaggcggctttggctgagttcatctcaaccttcatcttcgtgttcgccggctcaggctccggcatcgcctataacaagctcaccgacaacggcgctgccacccctgccggcctcatctccgcctccatcgcccatgcattcgccctcttcgtcgccgtctccgtcggcgccaacatctccggcggccacgtgaaccccgccgtcaccttcggcgccttcgtcggcggcaacatcaccttcc

SEQ ID NO: 9110 - DNA, 368 bp, Glycine max
  Clone ID: LIB3039-036-Q1-E1-A12
ggcacaagtgagtttgttgatcgagataactagaaacagtgtgatgaaaatgaaggtccttgttttcttcgttgctacaattttggtagcatggcaatgccatgcgtacgatatgttccctctccgaatgaacactggctatggtgcccgtactccggaggtgaaatgcgcaagttggaggcttgctgtggaagcacacaacatctttggctttgagaccattcctgaagagtgcgttgaagcaacaaaggaatacatccatggcgaacaatatagatcagactccaaaacagttaaccaacaagcttacttttatgccagagacctcgaagtccatcccaaggacacatttgtgttcagtatagatg

SEQ ID NO: 9111 - DNA, 385 bp, Glycine max
  Clone ID: LIB3039-036-Q1-E1-A2
ggcacaagtgagtttgttgatcgagataactagaaacagtgtgatgaaaatgaaggtccttgttttcttcgttgctacaattttggtagcatggcaatgccatgcgtacgatatgttccctctccgaatgaacactggctatggtgcccgtactccggaggtgaaatgcgcaagttggaggcttgctgtggaggcacacaacatctttggctttgagaccattcctgaagagtgcgttgaagcaacaaaggaatacatccatggcgaacaatatagatcagactccaaaacagttaaccaacaagcttacttttatgccagagacctcgaagtccatcccagggacacatttgtgttcagtatagatggcaccgtactctctaat

SEQ ID NO: 9112 - DNA, 389 bp, Glycine max
  Clone ID: LIB3039-036-Q1-E1-A4
gacacagtctcttcgtcttgcaattccttcctcgttatggagtcgcgagtgctgtcacgcgccggaaccttgtcctccctccctcacctccgcaagccgccgcgggaggccgtctccagcgcctccctcgtcgccgtgaaggccgtgggctccgtcgcggacggcggaaacctgatttgggggaggcagctgcgcccggagctctgctcgccggtgctgaagaaggaggctgtcctcctccggccatgcctcgccgccgcctcctcgccggccgagggtagtgattccgccggagaagcaaaggttgctccggcggggttcttcgacaagtacccggctctggtcaccggatttttcatcttcacgtggtacttcttgaacgtgatttt

SEQ ID NO: 9113 - DNA, 380 bp, Glycine max; identical to SEQ ID NO: 7921
  Clone ID: LIB3039-036-Q1-E1-A5

SEQ ID NO: 9114 - DNA, 385 bp, Glycine max
  Clone ID: LIB3039-036-Q1-E1-A6
ggcacccaaaggtgcaaaaatattaagatgataaacattggagcacttgttgtactctttgcatttctcttcctcagttgtgcctatgcacaagacacaacaacccttgtgcctgcaatcataacttttggtgactcagccgtggatgtatggaataatgactatcttcccacccttttcaaggctgattaccctccttatgggagggactttgctaaccaccaacctactgggaggttttgcaatggcaaattagctactgattttactgctgacactttgggttttaagacctatgctccagcatatcttagcccacaggcatcagggaaaaacctccttattggagcaaactttgcttctgctgcatctggttatgatgaaa

SEQ ID NO: 9115 - DNA, 387 bp, Glycine max
  Clone ID: LIB3039-036-Q1-E1-A7
ggggaaccctaattctgcgaggtgagtgaaaatggcggtacccttgctctccaagaagatcgtgaagaagcgcgtcaagaagtttatacgcccccagagtgatcgcaagatctccgtcaagccaagctggcgcagacccaagggtattgattctcgtgtcaggagaaagttcaaaggatgcactttgatgcccaacattggttatggctcagacaagaaaacccgccattatctaccaaatggtttcaagaaatttgtcgtgcacaatgtgaaagacctggaacttctcatgatgcataacaggacatattgtgctgagattgctcacaatgtatccacaaggaagaggaaggacatagttgagagagctgctcagcttgatgttgt

SEQ ID NO: 9116 - DNA, 366 bp, Glycine max
  Clone ID: LIB3039-036-Q1-E1-A8
gaccgcgaaacacacatttcacgagtcattctcgtttccctttcgactgcgattgtttgttaactgaacttttcgaccaaaatgtctggacgtggaaaggggggcaagggtttgggaaagggaggagcgaaacgacaccgtagggtgttgcgcgataacattcagggaatcaccaagcctgcgattcggcgtttggctcgcatgggtggcgtgaagcgtatcactggactcatctacgaggagacacgtggcgtgctcaagatctttctggagaacgtgattcgtgacaccgttacctacactgaacacgctacgagaaagaccgttacggcaatggatgtggtttatgctctcaatagacaagga

SEQ ID NO: 9117 - DNA, 326 bp, Glycine max
  Clone ID: LIB3039-036-Q1-E1-A9
gactcacttcagtgtcattttttcttactctcttcctctctctccactctgagatacatgggaaaattacattacattatggctggttattcataagcttcagctctttggattctttttcgtctctttggcttctctgtatctagtgaaattctggttggacgtaagactgatgaatggaaggtttcagcctctgattcaaattcactcatccaatgtgcaaatgagtctcgtttccaagttgagacactatcttgtctggatatatcatggtggaatagatccagtgttgcatgtgtacactgagaactatgtgagatgcagca

SEQ ID NO: 9118 - DNA, 421 bp, Glycine max
  Clone ID: LIB3039-036-Q1-E1-B1
ccgggccgactacgattcgatggcaaaaaaccaccaaaggggaaaaaacccaataaccggtaattggggccggccaatccgcccttcccggcaacttcggaaccaatggatccaacatccaggtcggacaaaaagcacaatttcagtcaaaggcgacccggagcctccaaacctaccctcagcaagccggtaccatccgcaagagcggctacatcgtcatcaaaggccgcccctgcaaggttgtggaagtttcgacttccaaaactggaaagcacggtcacgctaagtgtcactttgttggaattgatattttcactgccaagaaacttgaggatattgtgccctcttctcacaactgtgatgttcctcatgtgaatcgtactgattaccagctcattgatattgctgaggatggattttt

SEQ ID NO: 9119 - DNA, 378 bp, Glycine max
  Clone ID: LIB3039-036-Q1-E1-B10
gataccatagaagaagcacaaagagaagcattagcactaggagcagcaacaactagtctcagctgaaatggcctcttcagtgatggcatctgtggccctcaaacctgcccctttcactgttgagaagtcctcagtgagaggccttccctctctctcaaggaactcttcttcattcagagttgtggccagtggcaagaagatcaagactgacaaaccttatggaattaatggtggcatggctttgagggatggaactgatgcatctggcaggaaaggaaagggaaagggtgtttaccagtttgtagacaaatacggtgctaatgtcgatggttacagtcctatctacgacaccaaggactggtctccaaccggtgatgt

SEQ ID NO: 9120 - DNA, 380 bp, Glycine max
  Clone ID: LIB3039-036-Q1-E1-B11
ggcagcagttgggaggaggcactgtggcagaagtcttaggagtgtaaaacagagacgcacaatgaagacgattctatcgtccgagaccatgaatattcccgacggtgtgagcatcaaggttcacgctaaggttatcgaagttgatggccctcgtggaaaactcgtgcgagacttccaccatctgaacttggacttccaacttattaccgacgatggcggtaaaaggaagctcaagattgattcttgggttggttctcgtaaaacctccgccgccatccgcaccgccctcagccacgttgagaatttgatcaccggcgtcaccaatggatagcgatacaaaatgagattcgtgtgcgctcattttccgatcaacgctatca

SEQ ID NO: 9121 - DNA, 358 bp, Glycine max; identical to SEQ ID NO: 7611
  Clone ID: LIB3039-036-Q1-E1-B12

SEQ ID NO: 9122 - DNA, 385 bp, Glycine max
  Clone ID: LIB3039-036-Q1-E1-B2
gacacacaccatttaaccatttttcccgcacaaacaacacagacactgactctctcactacacgcgcgcgcgcgcgagagagaaagacctcagtgtctgagacgcacgcagcgtgcattttcccataagacggacagcatcacgccgttttcgcctccccgtcgtttccggatccgtcgtcgtcgttttcgtcttcttcaattagtttagttgagaatcaatcccaggacaccgagctggagcctccgcccgccgcctcctccaacggtcagatccgctaccggtcgccgtcctccgctgagctcttcgacggccaggccagcagcaactctccgccgtcgcacgccgccgaccagcactcgccggagttcgagtccagcaaaat

SEQ ID NO: 9123 - DNA, 382 bp, Glycine max
  unsure (1)..(382): unsure at all n locations
  Clone ID: LIB3039-036-Q1-E1-B3
ggactgcaactttgccctcggtgaggcttcaatttccaattagggtttcgcttagagtaaccaattaccatgggagtcttcacctttgtcgttcgcaaatccggcgccgaatggagcgccaagcaacattccggcgacatcgaggcctccgccgactccacctacgatctccaaaggaagctcgtgcaagccgctctcgccgttgattcctccggtggagtccagtcctccttctctcccgtgtctcctacctccgctgtgttccaggtgatagtgggtggtgctgtatacgttggaggtggcggtggtgctgttgcagctgcacctgcangtggtgctgctgcagctgatgctgccccggctgctgagaaaaaggaagaaa

SEQ ID NO: 9124 - DNA, 364 bp, Glycine max
  Clone ID: LIB3039-036-Q1-E1-B4
gaaagatgaactggggaattgactagtgcggcgcgctcctattatcaccgtagacggcggaggtggcggtggtggtgtagacacggcgtgacggcgatctcttgagataaatgttggttgaaagaggaagaacaacaacagttgtattgtagaatgagccaaccaacggtgatacttgccactgcgagctatgatcacactattcgtttttgggaggccaatagtggccgttgctaccgcaccatccaatatcctgattcgcaagtaaaccggctggagataaccccggataaacgcttcctggctgcagctggcaatccacacatacgactgtttgatgttaactcaaatagtcctcaaccag

SEQ ID NO: 9125 - DNA, 385 bp, Glycine max
  Clone ID: LIB3039-036-Q1-E1-B6
gatgcacaagtttgttgagatagctagaagcaataagatgaaaatgaaagtgcttgttttgtttgttgctacagttttggtagcatatgaatgccatggctcagactaccagaagttccctctccaaatgaaaactgggtttggtgggcaatacagcaatgaggtggcatgtgccagttggaggcttggcgtggaagcaaacaacgtagtcaagtggcaaactgttcctgcagcttgcggagagtacatagctgactacgttctaggagaccaatatagatcagattccaaaacagttaaccaacaagcttatttctatgctaaatccctcaaactcaccaacaaagatgtctttgtcttggacgttgacgacactactctctct

SEQ ID NO: 9126 - DNA, 385 bp, Glycine max
  Clone ID: LIB3039-036-Q1-E1-B7
gaaagaaacccccaaattcgtagattgttcgttcgaacattctcaaaaccctaattccacccctgaaatcctcttccctccaatcagatctcaatctcatcatgactaataaagagttcaaagtcccgccggttgcgttcccctccgccggcaaccccgcctcggcgggtccaaacctccagcagcggcgcatgcccacgccgccgttccagccgaattccggcatccccttcatgtccttcgacataggctccgccgcggcgtccacctcctcggggccgatctacaccggccccgccgtgggcgccggcggctccgccaacttcgacgacgaggagcccctcctcgacgagctcgggattcaacccgaccaaatctggagcaa

SEQ ID NO: 9127 - DNA, 340 bp, Glycine max; identical to SEQ ID NO: 8202
  Clone ID: LIB3039-036-Q1-E1-B8

SEQ ID NO: 9128 - DNA, 374 bp, Glycine max
  Clone ID: LIB3039-036-Q1-E1-B9
ggaaacagagagtgatttcagtgagtgatcggtgttcacttgatctcatcataatcgtcagcgtcaattgaagaagatgccgatcagaaacatcgccgtcggaaggcctgaagaggcgactcaccccgacacgttgaaggcggctttggctgagttcatctcaaccttcatcttcgtgttcgccggctcaagctccggcatcgcctacaacaagctcaccgacaacggcgctgccacccctgccggcctcatctccgcctccatcgcccatgcattcgccctcttcgtcgccgtctccgtcggcgccaacatctccggcggccacgtcaaccccgcagtcaccttcggcgccttcgtcagcggcaacatcacct

SEQ ID NO: 9129 - DNA, 291 bp, Glycine max
  Clone ID: LIB3039-036-Q1-E1-C1
aaccactcctccacacaagcgtccgtggcgcagctaaatttgtagatcaaggggcacctctttcgcgttttgtcaaagtctgccgttgaacacgtctgtgctttggtatcagcattagggtaattggacgttgacaatgggtgccaactccgatgtaacactgatgaaggcgtccgtacacgttcagttttctggacatcatatgggcgtgttttagcaacacacagcatccatggcattgccaacaatctcaaaaactgagatgtatcaacaaccgtttgtcaccagtgt

SEQ ID NO: 9130 - DNA, 383 bp, Glycine max
  Clone ID: LIB3039-036-Q1-E1-C10
ggcacaagtgagtttgttgatcgagatcactacaaacagtgtgatgaaaatgaacgtccttgttttcatcgttgctacaattttggtacgcatggcaatgccatgcgtacgatatgttctctctccgaatgaacagagggtacggtgcacgtacatccagacgtgaaatgcgcacattataggcttgctgtggaagcacacaagatctttggctttgataccattcctgaagagtgcgttgatcgcaacaagagaatacatccatggcgaacaatacatatcagactccagcacagttaaccaacacacatacttatatgccagatacctcgatgtatatcccaacgacacatgtgtgttcagtagatatggcaccgtactct

SEQ ID NO: 9131 - DNA, 381 bp, Glycine max
  Clone ID: LIB3039-036-Q1-E1-C11
gacaagtgagtttgttgatcgagataactagaaacagtgtgatgaaaatgaaggtccttgttttcttcgttgctacaattttggtagcatggcaatgccatgcgtacgatatgttccctctccgaatgaacactggctatggtgcccgtactccggaggtgaaatgcgcaagttggaggcttgctgtggaagcacacaacatctttggctttgagaccattcctgaagagtgcgttgaagcaacaaaggaatacatccatggcgaacaatatagatcagactccaaaacagttaaccaacaagcttacttttatgccagagacctcgaagtccatcccaaggacacatttgtgttcagtatagatggcaccgtactctcta

SEQ ID NO: 9132 - DNA, 369 bp, Glycine max
  Clone ID: LIB3039-036-Q1-E1-C12
ggcacaagtgagtttgttgatcgagataactagaaacagtgtgatgaaaatgaaggtccttgttttcttcgttgctacaattttggtagcatggcaatgccatgcgtacgatatgttccctctccgaatgaacactggctatggtgcccgtactccggaggtgaaatgcgcaagttggaggcttgctgtggaagcacacaacatctttggctttgagaccattcctgaagagtgcgttgaagcaacaaaggaatacatccatggcgaacaatatagatcagactccaaaacagttaaccaacaagcttacttttatgccagagacctcgaagtccatcccaaggacacatttgtgttcagtatagatgg

SEQ ID NO: 9133 - DNA, 346 bp, Glycine max
  unsure (1)..(346): unsure at all n locations
  Clone ID: LIB3039-036-Q1-E1-C2
ggcacctctttctccttttgtcaaattcttctgttcaacaggtgtgtgctttggaatcagcatttggctatttggtctttgccaatggatgctaagtcggctgtagaattaatggagtcttcctcagaggttcatttttctggatttcacatggatggttttgagcaaagaaaggctagcatagaacaaccaacaacctcagaaactgacatgtataaacaaccttttgtcatangtgttgctgggggtgcagcatctggcaagacaacagtttgtgatatgattattcagcagcttcatgatcaacgagttgtacttgttaatcaggattctttttacaataact

SEQ ID NO: 9134 - DNA, 292 bp, Glycine max
  Clone ID: LIB3039-036-Q1-E1-C3
atccatatttgccacctatgagtagagaggaaatctcttcaagctcttatttggctgggggaagatcgttgattggaagtgatatcttacaaaggagggaggctgttcacgatacgctttattcaacatattctgcggctgatgctttgtctgaatacaatcgaatgcagcactaccaagagagtttggaagctacagctgtgccagtttcatcccgttactctttcgctggtccttcatattcacttcgctaaattaaacatgcacttttgaaaaccccttgcatgtgttt

SEQ ID NO: 9135 - DNA, 388 bp, Glycine max
  Clone ID: LIB3039-036-Q1-E1-C4
attccaattcaaacagaaaacctaatttctcaaatttgatttcgcacaaaattttcctcactaaaatgtctggtcgtggaaagggtggcaagggtttgggaaagggaggtgccaagaggcacaggaaggttctgcgcgataacattcaaggaatcacgaaacctgcgattcgtaggttagcgagaagaggtggcgtgaaaaggatcagtggtttgatctacgaggaaaccagaggagttctgaagatattcttggagaacgtgattcgtgatgctgtgacctacactgagcacgctaggaggaggacagtgactgctatggacgtggtttatgctcttaagaggcaaggaaggaccctctacggttttggaggctgaacaattccttt

SEQ ID NO: 9136 - DNA, 383 bp, Glycine max
  Clone ID: LIB3039-036-Q1-E1-C5
gaccacattccaaaacacaaacacatacattgtagtatcacttttgtctcggaatttgttcttttgagttatggcaagcttaaaggttgcatgtgtggttttgatgtgcatggctgtgatgagtgcaccaatgatggtgcaagccgtgtcatgcaatgatgtttctgtgaacctagcaccgtgcctatcttacctgatgcagggtggagatgttccagaatcgtgctgtagcggagtgaggaacattctgggttctgccagcaccacctttgacaaacaaaccgtgtgcaaatgtcttcagcaagctgctaataactatggcatcaacgacgaatacgctcaggcactccccgcccgctgcaatgtcagcgtcccttacaaga

SEQ ID NO: 9137 - DNA, 381 bp, Glycine max
  Clone ID: LIB3039-036-Q1-E1-C6
caagacgttcggggagtgcacgctgaaggacacggtgaagcccgtgctgatcccctgctacgacctcgtcacgcgcgcgccgttcgttttctcgcgcgccgacgcgcttgaagtggacggctacgatttcaagatgcgcgatgtgtgcgccgccacgtcagcggacccatcctctgcccccacagagatgcggtccgtcgacggcaggaccaggatcatggccgtcgacggaggcgtcgccatgaacaatccaacggctgccgccatcacgcacgtgctcaataacaaacatgagttcccgttctgtaacggcgtttccgacctcctcgtactctccctcggtaacggagagtcagactttaacgccgttaagtcctcctc

SEQ ID NO: 9138 - DNA, 389 bp, Glycine max
  Clone ID: LIB3039-036-Q1-E1-C7
ggcttcacgtccactctgtctctctcggtctctcctctcacacccccactcacagttcccttctcttgtcgttcttgagcatcaccactttctttcgtctcactctcacaggaaaacccagttctcgccgcctctgttgttgtctcttccattcacgtgaagagaattgcgtagactggtagccaaacagaatggcagaagcagcgaagagcagagacgcccgaagacgaagaagaatcctccaacaaggttccgaccgtctcgctttcatcacgggtcggatccaaacactgccggatccactttcatcttcccaaccccaatcccaatcccaccatccaaacgttgatgactccgattccatttcgcaaaattccgaacccgacaac

SEQ ID NO: 9139 - DNA, 378 bp, Glycine max
  Clone ID: LIB3039-036-Q1-E1-C8
gaaggtgcaagagtttgttgtgagctataagctagtttatcgtgaggagaatatgaagttgtttgttttctttgttgctgcagtagttttggtagcatggccatgccatggcgcaggctaccaaaggttccctctccgaatgaaaactggctatggtgagcgttcttcggaggtaaaatgcgcaagttttaggcttgctgtggaagcacacaacatccgagcctttaaaaccattcctgaagagtgcgttgaaccaacaaaggactacattaatggcgaacaatttagatcagactctaaaacagttaaccaacaagctttcttttatgctagtgaacgcgaagtccatcacaacgacatatttatattcggcataga

SEQ ID NO: 9140 - DNA, 380 bp, Glycine max
  Clone ID: LIB3039-036-Q1-E1-C9
gaaggatcagcagggagaattaggtttttagggtttacaccgagcagccacacctcccgcagcagccatggttctcaaaactgaactatgccgattcagtggtgccaagatctacccaggaaagggcatcagatttgttcgtggtgattctcaggttttcctgtttgcaaactcaaaatgtaagaggtatttccacaatcgcctgaagccttcaaagctcacctggactgcaatgtacagaaagcaacacaaaaaggacattgctcaagaagctgtgaggaagaggagacgtgctgccaaaaagccttactctaggtccattgttggtgcgaccttggaagtaatccagaaaaagagagctgagaagccagaagttcgag

SEQ ID NO: 9141 - DNA, 371 bp, Glycine max
  Clone ID: LIB3039-036-Q1-E1-D1
attgttaaggaggtctcttcctacttgaagaaagtatgatatacccctgacaagattccttttgttcctatctctggctttgagggagacaacatgattgacaggtccagaaaccttgactggtacaacggtccaactctgcttgatgcacttgaccagattattgagcccaagaagccctctgacaagcccctcaggcttccccttcaggatgtgtacaacattggacgtattggaactgtgccagtgggacgtgttgagaccggtgtcttgaagcctggaatggtggagacttttgcaccaactggactgacaactgaagtcaaatctgtggaaatgcaccattgatcacttacatacgcacatccagg

SEQ ID NO: 9142 - DNA, 379 bp, Glycine max
  Clone ID: LIB3039-036-Q1-E1-D10
gacaccgttccatttctcaacaacttctgctacttcctactccaaccgcacttctgctccgcaattatcatgggcaaggtcaagatcggaatcaacggatttggaagaattggccgtttggtagccagagtggctctgcagagagacgatgttgaactcgttgccgttaacgaccctttcatcaccaccgattacatgacatacatgtttaaatacgacagtgttcatggacactggaagcatcacgatgtcaccgttaaggacgagaagacccttctcttcggtgacaagccagtcactatttttggacacagaaaccctgaagagatcccatgggggtcaactggagctgacatcattgttgagtccaccggagttt

SEQ ID NO: 9143 - DNA, 377 bp, Glycine max
  Clone ID: LIB3039-036-Q1-E1-D11
gaccacattccaaaacacaaacacatacattgtagtatcacttttgtctcggaatttgttcttttgagttatggcaagcttaaaggttgcatgtgtggttttgatgtgcatggctgtgatgagtgcaccaatgatggtgcaagccgtgtcatgcaatgatgtttctgtgaacctagcaccgtgcctatcttacctgatgcagggtggagatgttccagaatcgtgctgtagcggagtgaggaacattctgggttctgccagcaccacctttgacaaacaaaccgtgtgcaaatgtcttcagcaagctgctaataactatggcatcaacgacgaatacgctcaggcactccccgcccgctgcaatgtcagcgtctctt

SEQ ID NO: 9144 - DNA, 380 bp, Glycine max
  Clone ID: LIB3039-036-Q1-E1-D12
gccttacaatcccctctgtcagtgaagactgaagagtaatggcgcttccgagagcatgtttggcgaggattttgtcacatcgtaatccaatgtttttgtcactctcaccacttacaatgcacgccaactacctctctcattctcaaacgcactctctcacactctctgcttcgctttctacttccgaggccccttcttcacacgagcctcactttcgcaggaaacccatgtgcttgtaccactcccagggaaagtgcactaagatggatgatcctatccaccttgagacgtttaaccatgattgcttcagggagcttctagtgaacaccgctgagttgaacaaaatacgctctcgggatctagactttttccttgtgctt

SEQ ID NO: 9145 - DNA, 375 bp, Glycine max
  Clone ID: LIB3039-036-Q1-E1-D2
gattctataatcaatcaatggcaatggcttcttcaatccctaatgcgccttctgcgttcaattctcagagctacgttggtctcagagcgccactgaggaccttcaacttttcttctcctcaagctgccaaaattcctcgctcccaacgccttttcgtcgtcagagcctccgattcggagttcgaagccgccgttgtcgccggtaaggttccgccggcgcctcccgtgccgcccagaccggcggctccggttggaacaccggtggttccttcacttccacttcaccggcgtcctcgtcggaaccggaagtcgccggcgcttcggtcggcttttcaggaaacgagcatttcgccggcgaatttcgtgtatccgcttt

SEQ ID NO: 9146 - DNA, 372 bp, Glycine max
  Clone ID: LIB3039-036-Q1-E1-D3
gcaaaagagaaagaagcgcttatcgaactcggacggaagcactgagttgactcggagggagtggaaagtgttgttgcgtaatgtctggtggtatcgctcgtggacgcctcaccgaggagcgcaagtcgtggcagaagaaccatccccatggttttgttgcgaagccggagacgctgcccgatggaaccgtgaatttgatggtgtggcattgcactattcccgggaagactgggactgattgggagggtggctacttcccacttacgctgcactttagtgaagactaccctagcaagcctccaaagtgtaaattcccacaaggtttcttccaccctaatgtttatccttctgggactgtttgcttgtctatac

SEQ ID NO: 9147 - DNA, 386 bp, Glycine max
  Clone ID: LIB3039-036-Q1-E1-D4
ggcacaagtgagtttgttgatcgagataactagaaacagtgtgatgaaaatgaaggtccttgttttcttcgttgctacaattttggtagcatggcaatgccatgcgtacgatatgttccctctccgaatgaacactggctatggtgcccgtactccggaggtgaaatgcgcaagttggaggcttgctgtggaagcacacaacatctttggctttgagaccattcctgaagagtgcgttgaagcaacaaaggaatacatccatggcgaacaatatagatcagactccaaaacagttaaccaacaagcttacttttatgccagagacctcgaagtccatcccaaggacacatttgtgttcagtatagatggcaccgtactctcaaata

SEQ ID NO: 9148 - DNA, 385 bp, Glycine max
  Clone ID: LIB3039-036-Q1-E1-D5
ggagtgtgagagaaaccagtgactgacttttcgagaaagaaaaacaaaaatgagtttccgtcattccatcatgaacgctcttcccattctcctcttcttcctcttcgtttctgcattagtttctgcgaagaaaactggtgatgtgacggagctgcaaattggcgtgaagcataaaccagtatcatgtgaagttcaggcacacaaaggtgacagagtcaaagtacactataggggaaaactcactgatggaactgttttcgattctagctttgaaagaaataatccaattgaatttgagcttggtactggtcaagtgatcaaaggttgggaccagggattattgggaatgtgtcttggtgagaagcgtaagctgaaaataccatca

SEQ ID NO: 9149 - DNA, 354 bp, Glycine max
  Clone ID: LIB3039-036-Q1-E1-D6
tcctcaatataagcctaaatttgatgcccttttgattgagcttaaagaagcagaggagaaatctctgaaggagtctgagcgcttggaaaaggaaattgctgaagtacaagagttgaagaaaaagcttagtaccatgacggcagatgagtactttgaaaagcatcctgagctgaggaagaagtttgatgatgagatcaggaatgataactggggttattgatttttcaattagcaaaatgtcaggttgatgttgttctggctggtttaataataactacattgatttctttgtaactcggttctctttttcagttcaaaggatcttatatattaaagtgtcgaaattttttgtgg

SEQ ID NO: 9150 - DNA, 375 bp, Glycine max
  Clone ID: LIB3039-036-Q1-E1-D7
ggcacaagtgagtttgttgatcgagataactagaaacagtgtgatgaaaatgaaggtccttgttttcttcgttgctacaattttggtagcatggcaatgccatgcgtacgatatgttccctctccgaatgaacactggctatggtgcccgtactccggaggtgaaatgcgcaagttggaggcttgctgtggaagcacacaacatctttggctttgagaccattcctgaagagtgcgttgaagcaacaaaggaatacatccatggcgaacaatatagatcagactccaaaacagttaaccaacaagcttacttttatgccagagacctcgaagtccatcccaaggacacatttgtgttcagtataaatggcaccgg

SEQ ID NO: 9151 - DNA, 350 bp, Glycine max
  Clone ID: LIB3039-036-Q1-E1-D8
gatatctctctctcacacacacagtctcttcttcttgcaattccttcctcgttatggagtcgcgagtgctgtcacgcgccggaaccttgtcctccctccctcacctccgcaagccgccgcgggaggccgtctccagcgcctccctcgtcgccgtgaaggccgtgggctccgtcgcggacggcggaaacctgatttgggggaggcagctgcgcccggagctctgctcgccggtgctgaagaaggaggctgtcctcctccggccatgcctcgccgccgcctcctcgccggccgagggtagtgattccgccggagaagcaaaggttgctccggcggggttcttcgacaagtac

SEQ ID NO: 9152 - DNA, 382 bp, Glycine max; identical to SEQ ID NO: 7731
  Clone ID: LIB3039-036-Q1-E1-D9

SEQ ID NO: 9153 - DNA, 391 bp, Glycine max
  Clone ID: LIB3039-036-Q1-E1-E1
ggcacaagtgagtttgttgatcgagataactagaaacagtgtgatgaaaatgaaggtccttgttttcttcgttgctacaattttggtagcatggcaatgccatgcgtacgatatgttccctctccgaatgaacactggctatggtgcccgtactccggaggtgaaatgcgcaagttggaggcttgctgtggaagcacacaacatctttggctttgagaccattcctgaagagtgcgttgaagcaacaaaggaatacatccatggcgaacaatatagatcagactccaaaacagttaaccaacaagcttacttttatgccagagacctcgaagtccatcccaaggacacatttgtgttcagtatagatggcaccgtactctctaatattcca

SEQ ID NO: 9154 - DNA, 369 bp, Glycine max
  Clone ID: LIB3039-036-Q1-E1-E10
gattctgaatcagaagaagcgagcgaagatgtcgggtcgtggaaagggaggcaagggtttgggaaagggaggagccaagaggcacaggaaggtgcttcgtgacaacatccagggtatcaccaaacccgcaattcggcgtttggctcgcagaggtggtgttaagagaatcagtggtctcatctacgaggagacacgtggcgtcctcaagatcttcctcgagaacgttattcgcgacgctgttacctacaccgagcacgctagaagaaagaccgttaccgctatggatgttgtttatgctctcaagaggcagggcaggactctctacggtttcggtggttaatttctaaggtttccatcggcgtagcagct

SEQ ID NO: 9155 - DNA, 386 bp, Glycine max
  Clone ID: LIB3039-036-Q1-E1-E11
ggtcaagcctgccgagaaaaccctagttcgcttgcagtcacacaagaggccaatcctattcatagctcgagatgggtgaagaagtgaaggtagttgttccagaatcagtgttgaagaagcgcaagagggaggaggaatgggcgttggccaagaagcaagaactcgatgctgccaagaagaagagagccgagagccgcaaactcatctacaacagagctaagcagtacgctaaggagtacgatcaccaggagaaggaattgattcggttgaaacgcgaggccaagctgaaaggtggtttctatgtggatccagaggctaagctgttgtttattattcgcattcgtggtattaatgccatggaccccaaatcaaggaagatcctgcag

SEQ ID NO: 9156 - DNA, 356 bp, Glycine max
  unsure (1)..(356): unsure at all n locations
  Clone ID: LIB3039-034-Q1-E1-F9
ggcacaagtgagtttgttgatcgagataactagaaacagtgtgatgaaaatgaaggtccttgttttcttcgttgctacaattttggtagcatggcaatgccatgcgtacgatatgttccctctccgaatgaacactggctatggtgcccgtactccggaggtgaaatgcgcaagttggaggcttgctgtggaagcacacaacatctttggctttgagaccattcctgaagagtgcgttgaagcaacanacgaatacatccatggcgaacaatatagatcagactccaaaacagttaaccaacaagcttacttttatgccagagacctcgaagtccatcccaatgacacatttgtgt

SEQ ID NO: 9157 - DNA, 363 bp, Glycine max
  Clone ID: LIB3039-032-Q1-E1-G9
gagaaatcgaattcaccatccaaatgtgacacgtagattcagcaatgggaactccatcatcgaaccctctcttcatcttcttccttttctattcctctgtatcacttaatccttcagatttgactttcgaatcgacctacgctcgcctctgcaaccaccatgtccctgcaccgccctctcgttccgccgaaggaaccttccccggcgtcgccgacgagctccggttccaatttggctactttgccggcggccaccgattcttcaaccgatccgtctcgatgaagaaccgcgcgtcgtgacgcgtgacctccgttcgccgaagcgcgagcgacggcgtgttcgaattacacgggcgaatgcttc

SEQ ID NO: 9158 - DNA, 404 bp, Glycine max
  Clone ID: LIB3039-032-Q1-E1-H1
gactgccgcgaaaacagaacagggactcactctggcagcggcactctcggtggctataatctttctgtggtgagttgtcaagatgtacacatcaaggaagaaaatccacaaggataaggatgctgagccaactgaatttgaggaatcagtcggacaggcattgtttgatctggaaaataccaacaatgagctgaaaagtgatctgaaagatttatacataaactcagctgtccaaattgatgtttctgggaaccgcaaggctgtggttatccatgtcccctacagattaaggaaaggattccggaagattcatgtcaggcttgtgagagaacttgagaaaaagtttagtggaaaggatgtaatcctgattgccacccggaggatattgaggccaccaaagaaag

SEQ ID NO: 9159 - DNA, 356 bp, Glycine max
  Clone ID: LIB3039-032-Q1-E1-H10
gatccataaccatggcgtctaactctgcttccgctctttacttccttttatgcctatcgcccatcagtttgcttctttctgcgtttcgtgctcaagctcaatctcatgctccagttcccactttcaagtactgtgaaaagaatgcagactatgctgtgaatgtgagtggagtggaaatattgcctgaccccgtggagagaggagtgccattcacctttaagatcccagcttatactcctgaaccaattcaaagcggggacttgttatatgaaatttcttatgctggaatagaagcacaacctgctacatttctccatgatctctgtgaggaagcactatgcccagtacctgcaggc

SEQ ID NO: 9160 - DNA, 361 bp, Glycine max
  Clone ID: LIB3039-032-Q1-E1-H11
ggggcgaggtagccagagagtgatacaatacagagtgcgttgttgctccttcgccacaactccctgccaacatgggtatctccagagattctatgcacaagaggcgtgccactggtggcaagaagaaggcatggaggaagaagagaaagtatgagcttggtcgccagcctgctaacactaagctgtcaagcaacaagacagtcaggaggatccgggttagaggtggaaatgtgaagtggagggcactgagattggatactggaaattactcctggggaagtgaagctgtaactcgcaagactcgtatactagatgtggtttacaatgcctcaaacaacgagcttgtgcgtactcagactct

SEQ ID NO: 9161 - DNA, 364 bp, Glycine max
  Clone ID: LIB3039-032-Q1-E1-H12
ggcacgagtttgttgtgagctataagctactttatcgtgtggagaatatgtcgttgtctgtgttctctgctgctgcagtacttttggtaccatggccatgccatggtgcacgctattaaatgttccctctccgaatgaaaactggctatggtgaccgttcgtcagatgtacaatgcgcaagttttatgcttgctgtggaagcacacaacatccgagcctttatcaccattcctgaatagtgcgttgaaccaacaacagactacattaatggtgaacattttagatcatactctataacagttaaccatcaagctttcttttatgctactgaacgcgaagtccatcacaacgacatatttatatt

SEQ ID NO: 9162 - DNA, 406 bp, Glycine max
  Clone ID: LIB3039-032-Q1-E1-H2
ggaaggtgcaagagtttgttgtgagctataagctagtttatcgtgaggagaatatgaagttgtttgttttctttgttgctgcagtagttttggtagcatggccatgccatggcgcaggctaccaaaggttccctctccgaatgaaaactggctatggtgagcgttcttcggaggtaaaatgcgcaagttttaggcttgctgtggaagcacacaacatccgagcctttaaaaccattcctgaagagtgcgttgaaccaacaaaggactacattaatggcgaacaatttagatcagactctaaaacagttaaccaacaagctttcttttatgctagtgaacgcgaagtccatcacaacgacatatttatattcggcatagataacaccgtactctctaatatcccata

SEQ ID NO: 9163 - DNA, 403 bp, Glycine max
  Clone ID: LIB3039-032-Q1-E1-H3
ggaaagacaccgacacagatctgtcttccgaagcaggaactaaatatggctgacttgttggaatggtcaaagcaagataagaaacgaatgcttcatgtcgtctaccgtgttggtgaccttgatcgcaccatcaaattttacacagaatgtttaggaatgaagcttttgaggcaaagagatatcccagaggagaaatatgctaatgcttttcttggatttggccctgaagaatcccattttgttgttgaattaacatataattatggggttacctcgtatgacattggcgatggctttggacattttgcaattgcaactcaggacatttataaattggttgagcacatcagggccaagggtggaaacatcacaagggaacctggtccagttcaaggtggaacta

SEQ ID NO: 9164 - DNA, 393 bp, Glycine max
  Clone ID: LIB3039-032-Q1-E1-H4
gaaataaaaacgtgattagctcacagtcgtttcggggtagcattcttgcgcactcagttattctctctctctctctggagcgtcgtcgtttcgttagggcacaaaaccccttttcggatcggtggagcaaggcctcgccggcgagattcccgaggctgttcaatcagcgatcgagcaccggcgaaaagcggcgaagatgaaggttttcgtgaagactctcaagggcacgcacttcgaaattgaagtgaacccttcggacacgctttctgaagtgaagaaaaatatagaaactgttcagggtgcagatgtctatcctgctgcacagcaaatgcttattcatcaaggaaaagttctaaaggatggtactactttggaggaaaataaagtagctga

SEQ ID NO: 9165 - DNA, 403 bp, Glycine max
  Clone ID: LIB3039-032-Q1-E1-H5
ggaaacagagagtgatttcagtgagtgatcggtgttcacttgatctcatcataatcgtcagcgtcaattgaagaagatgccgatcagaaacatcgccgtcggaaggcctgaagaggcgactcaccccgacacgttgaaggcggctttggctgagttcatctcaaccttcatcttcgtgttcgccggctcaggctccggcatcgcctacaacaagctcaccgacaacggcgctgccacccctgccggcctcatctccgcctccatcgcccatgcattcgccctcttcgtcgccgtctccgtcggcgccaacatctccggcggccacgtcaaccccgccgtcaccttcggcgccttcgtcggcggcaacatcaccttcctccgcggcatcgtctacgtcatcgcc

SEQ ID NO: 9166 - DNA, 397 bp, Glycine max; identical to SEQ ID NO: 7408
  Clone ID: LIB3039-032-Q1-E1-H6

SEQ ID NO: 9167 - DNA, 373 bp, Glycine max
  Clone ID: LIB3039-032-Q1-E1-H7
gattatatttgagttcaaacaaatcaaagccatggccacctccaacttctctattgttctctccgtctccctagccttctttttggtgctacttaccaaggcacactcgaccgataccgtttctttcaccttcaacaagttcaacccagtccaaccaaacattatgctccaaaaagatgctagtatttcatcctctggggtgttacaactcaccaaagttggcagcaacggcgtgcccacctcgggatctctcggtcgtgccctttacgctgccccaatccagatttgggacagcgaaaccggcaaggtagccagctgggctacatcctttaaattcaacattttcgcacccaacacatcaaactcagctgac

SEQ ID NO: 9168 - DNA, 397 bp, Glycine max
  Clone ID: LIB3039-032-Q1-E1-H8
ggcacaagtgagtttgttgatcgagataactagaaacagtgtgatgaaaatgaaggtccttgttttcttcgttgctacaattttggtagcatggcaatgccatgcgtacgatatgttccctctccgaatgaacactggctatggtgcccgtactccggaggtgaaatgcgcaagttggaggcttgctgtggaagcacacaacatctttggctttgagaccattcctgaagagcgcgttgaagcaacaaaggaatacatccatggcgaacaatatagatcagactccaaaacagttaaccaacaagcttacttttatgccagagacctcgaagtccatcccaaggacacatttgtgttcagtatagatggcaccgtactctctaatattccatactac

SEQ ID NO: 9169 - DNA, 351 bp, Glycine max; identical to SEQ ID NO: 8418
  Clone ID: LIB3039-032-Q1-E1-H9

SEQ ID NO: 9170 - DNA, 338 bp, Glycine max
  Clone ID: LIB3039-033-Q1-E1-A1
ggggtgccattgttgttgctattatcatccgcagctgcttttattcgcaccgcaaacagtgagccatggccgtcggaaagaacaagcgatctccaaggggaagaagggtggcaagaagaaggcagctgatccctttgccaagaaggattggtatgacattaaggctccttctgtttttcaagtgaaaaatgttggcaaaaccctcgtctctcgtactcagggtaccaagattgcttctgaaggactcaagcatagagtgtttgaggtctccttggctgatcttcaaggggatgaggatcatgcattcaagaagattaggttgagagctgaagatgtgc

SEQ ID NO: 9171 - DNA, 290 bp, Glycine max
  Clone ID: LIB3039-033-Q1-E1-A10
ggagtttacctgcagaaggtaaagaaagagaaaaatggagagcataaagcacagaacggtggaagtgaacggcataaagatgcatgttgcagagaaaggagaaggagcagtggtgttgttcttgcacggcttcccagaactctggtactcatggcgccaccagattctagctctgagctccctcggttaccgtgcggtggcacctgatctccgtggctacggtgacacagaggccccttctacggtgaacagctacacgtgttttcatctggtgggtgatatcattgctc

SEQ ID NO: 9172 - DNA, 341 bp, Glycine max
  Clone ID: LIB3039-033-Q1-E1-A11
gggggaacctaattccgccaagtgagtggaaaatgcggtagccttgctctccaagaaggatcgtccataagcgcgtcaaaaaatttataagcacccacagtggtcgcaagatgtccgtcaaggcaagctggcgcagacccaagggtattgatttctcgtgtcatgagaaagttcaaacgatgcactttgatgcccaacattggttatggctcagacaagaaataccggcattatctaccaaatggtttcaagaaatttgtcgtgcacaatgtgaaaaacctgtaacatctcatgatgcaaaacatgacataatgtgctgagattgctcacaatgtatccac

SEQ ID NO: 9173 - DNA, 392 bp, Glycine max
  Clone ID: LIB3039-033-Q1-E1-A12
gacttgcggctgcagcagagaagcactcatcattcttcgtttgtctaagatccgccttctctgaattgtaaaaatgtcgctcggagaaactgcttgttcatacgcagctctcatccttcatgaagatggaatcagtgtaactgccgacaagatcagcaccttgttggaaactgcaaaggttcaagtagatacctattggccaaccttatttgctaaacttgctgagaagaaaaatcttggcgatttgatagccaatgcagcaggcggtggtgcaccagttgctgttgcagctgcccctgttgctgcctcaggtggtggtggtgctgctgctgccgccccagctgctgaggagaaaaagaaggaggaacctgaagaagagagtgatgatgata

SEQ ID NO: 9174 - DNA, 364 bp, Glycine max
  Clone ID: LIB3039-033-Q1-E1-A2
gaaggtgcaagagtttgttgtgagctataacctagtttatcgtgaggagaatatgaacttgtttgttttctttgttgctgcactacttttggtagcatggctatgccatggcgcaagctaccaaaggttccctctccgaatgacaactggctatggtgagcgttcttcggaagtgaaatgcccaagttttaggcttgctgtggaagcacacaacatccgagcctttaacaccattcctgaagagtgtgttgaagcaacaaaggactacattattggcgaacaatttagatcagactctaagacagttatccaacatgctttcttttatgctagtgaactcgaagtctatcacaacgacatattt

SEQ ID NO: 9175 - DNA, 347 bp, Glycine max
  Clone ID: LIB3039-033-Q1-E1-A3
ggaacctttgcattctattcattcaagattcagcaagtgcgttttggaagcagagaccgaaatacttcgagatggcccgtacaaagcaaactgctcgtaagtcaactggaggaaaagctcccaggaagcagcttgcaaccaaggctgcacgtaagtctgcaccaacaactggtggtgtgaagaagcctcatcgttatcgccctggaactgttgctcttcgtgagattaggaaataccagaagagcactgagctcctaatcaggaagcttcctttccagaggttggttcgtgaaattgcccaggatttcaagactgatctgcgtttccagagccatgctgtgcttgca

SEQ ID NO: 9176 - DNA, 373 bp, Glycine max
  Clone ID: LIB3039-033-Q1-E1-A4
ggagctggtatagatgttacctttgattgtgctggttttgacaaaaccatgtctacagcactgagtgctactcagccaggtggcaaagtttgcctagtgggaatgggacattctgaaatgactgtcccactcaccccagctgcagcaagggaagttgatgtggttggagtttttcgctatatgaacacatggcctctttgccttgagtttctaaggagtggcaaaattgatgtgaaaccccttataacgcacaggtttggattctctcaaaaggaagtggaagaagcctttgaaacaagtgctcgtggtggtaacgccatcaaggtcatgttcaatctttagatactggactgtgactttacaaactgtcgta

SEQ ID NO: 9177 - DNA, 348 bp, Glycine max
  Clone ID: LIB3039-033-Q1-E1-A5
ggcacaagtgagtttgttgatcgagataactagaaacagtgtgatgaaaatgaaggtccttgttttcttcgttgctacaattttggtagcatggcaatgccatgcgtacgatatgttccctctccgaatgaacactggctatggtgcccgtactccggaggtgaaatgcgcaagttggaggcttgctgtggaagcacacaacatctttggctttgagaccattcctgaagagtgcgttgaagcaacaaaggaatacatccatggcgaacaatatagatcagactccaaaacagttaaccaacaagcttacttttatgccagagacctcgaagtccatcccaaggacac

SEQ ID NO: 9178 - DNA, 295 bp, Glycine max
  Clone ID: LIB3039-033-Q1-E1-A6
gatagcgaaacagagagtggtttcagtgagtgatcggtgttcacttgatccttcataagtcgtcatcagcatcagcatcatcaccgttgattgaagaagatgccgatcagaaccatcgccatcggaaggcctgaagaggctactcagcccgacacgttgaaggcggggttggcggagttcatctccaccttgatcttcgtgtacgccggttcaggttccggcatcgcctagaacatgctcaccgatatcggcgccgccactcacgccggcctcatctacgcttccatcgcatatg

SEQ ID NO: 9179 - DNA, 352 bp, Glycine max
  Clone ID: LIB3039-033-Q1-E1-A7
ggagagcaattgagaacgttcaaactccacaactaacaaagattatccaaagtgcgattcgcatggccaccaacattcgtagagcaacctatcgctttctccctgccatggacacagattctttctccgattccaccttcgaattccacgaatccgatctctacaactccgcgcgcgctaactctcccgaacttgccaaatccgtacgctcctccagatttcacaactactcctcttcctctgccgcccgcgtcggtgctccggcgtcgcttccggtgaacgtgccggactggtcgaagattctcggcgatgagtacggacggaaccagaggaggaactacgacgacgacga

SEQ ID NO: 9180 - DNA, 365 bp, Glycine max
  Clone ID: LIB3039-033-Q1-E1-A8
ggcacaagtgagtttgttgatcgagataactagaaacagtgtgatgaaaatgaaggtccttgttttcttcgttgctacaattttggtagcatggcaatgccatgcgtacgatatgttccctctccgaatgaacactggctatggtgcccgtactccggaggtgaaatgcgcaagttggaggcttgctgtggaagcacacaacatctttggctttgagaccattcctgaagagtgcgttgaagcaacaaaggaatacatccatggcgaacaatatagattagactccaaaacagttaaccaacaagcttacttttatgccagagacctcgaagtccatcccaaggacacatttgtgttcagtatag

SEQ ID NO: 9181 - DNA, 375 bp, Glycine max
  Clone ID: LIB3039-033-Q1-E1-A9
ggttgtggtgtagactgtcgagcagtgaataccagttgttcctatagccggcgctcaacaacatggcggacaaggcagtcaccatccgaaccagaaagttcatgacgaacaggcttctctccagaaagcaattcatcgttgatgtccttcatccagggagggctaatgtttccaaggctgaactgaaggagaaattgggcagaatgtatgacgtgaaagacactaacactgtatttgtcttcaagtttcgaactcattttggtggtggcaagtccactgggtttggtttgatctatgattcagttgagaatgccaagaagtacgagcccaagtacaagcttatcaggaatggacttgatactaaagtagagaaat

SEQ ID NO: 9182 - DNA, 358 bp, Glycine max
  Clone ID: LIB3039-033-Q1-E1-B1
ggagcttttctttctttctctgctctcttttcttttaggtttccactctcacacactctccctcttctctttctctgcaataatctctcttctcttcttcactctctcaactcctgccaaacccccatttccgcagttcttaaatttggagtctgatgtctccgccattgctggttaccgaagatgaagggcagtgccatgcctcgatggtagcatctgcatcttcaccatccctgaactgtttctccctaaatgaggccggatttaaagaatgcaattacctgggattgtcagattgctcttcggtggacagttctactgtcccgaatttgtctgatgagaaaaaggagaatctgaa

SEQ ID NO: 9183 - DNA, 389 bp, Glycine max
  unsure (1)..(389): unsure at all n locations
  Clone ID: LIB3039-033-Q1-E1-B10
gactactaccaagtgaaaaagcaactaagcatagtgtgtaagaaagggagaaaaacaagtgctgtgtagagagaaaaatggctaggtggtgcatgatcttggtggttcttgctcttgccgtggttgcaagtgccagaaacatgcccaatgacgctggtttggaggaccagaagaacttccttgggtatgggttttcgggagttggcaacaatggccttccctttggtggagtgggttctgggtttgatggtaatatgggtgggccttctgggctcggaggacttggangattcggtgggcctggtgggcttggcggactccgaggtcctggtaacggtaaaggacccagtcttcctctcccttgagagttgagaacacacaccttcgtg

SEQ ID NO: 9184 - DNA, 325 bp, Glycine max
  Clone ID: LIB3039-033-Q1-E1-B12
aaggtcaaaattttggttttagcctataacctagtttatcgttaggagaatatgaaattgtttgttttctttgttgctgcagtagttttggtagcatggccatgccatggcgcaggctaccaaaggttccctctccgaatgaaaactggctatggtgagcgttcttcggaggtaaaatgcgcaagttttaggcttgctgtggaagcacacaacatccgagcctttaaaaccattcctgaagagtgcgttgaaccaacaaaggactacattaatggcgaacaatttagattagactctaaaacagttaaccaacaagctttctttt

SEQ ID NO: 9185 - DNA, 359 bp, Glycine max
  Clone ID: LIB3039-033-Q1-E1-B2
ggcacaagtgagtttgttgatcgagataaccagaaacagtgtgatgaacatgaacgtccttgctttcctcgctgcgacaattttggtagcatggcaatgccatgcgtacgacatgttccctctccgaatgaacactggctatggtgcccgtactccggaggtgaaatgcgcaagttggaggcttgctgtggaagcacacaacatctttggctttgagagcattcctgaagagtgcgttgaagcaccacaggaatacatccatggcgaacaatatagattagactccaaagcagttaagcaccacgcttacttttacgccagagacctcgaagtccatcccaaggacacatttgtgttca

SEQ ID NO: 9186 - DNA, 368 bp, Glycine max
  Clone ID: LIB3039-033-Q1-E1-B3
gtgcacaagtgagtttgttgatcgagataactagaaacagtgtgatgaaaatgaaggtccttgttttcttcgttgctacaattttggtagcatggcaatgccatgcgtacgatatgttccctctccgaatgaacactggctatggtgcccgtactccggaggtgaaatgcgcaagttggaggcttgctgtggaagcacacaacatctttggctttgagaccattcctgaagagtgcgttgaagcaacaaaggaatacatccatggcgaacaatatagatcagactccaaaacagttaaccaacaagcttacttttatgccagagacctcgaagtccatcccaaggacacatttgtgttcagtatagat

SEQ ID NO: 9187 - DNA, 369 bp, Glycine max
  Clone ID: LIB3039-033-Q1-E1-B4
ggaaaccgagaagaagaagatggagatgtatcagatctggagcaggagaatagcgttgggagcgttcgcgtttgttctgcttttcctatcggcctcagcagacgacgtcgttgtgctctctgaagataacttcgagaaggaagttggtcaggacagaggagctctcgttgagttctatgctccttggtgtggacactgcaaaaagcttgctccagaatatgaaaagcttggtagcagcttcaagaaagccaaatctgttttaatcggcaaggttgactgtgatgagcacaagagtttgtgcagcaaatatggagtctctgggtacccaacaattcagtggtttccaaaaggatctcttgaacccaaaaa

SEQ ID NO: 9188 - DNA, 58 bp, Glycine max
  Clone ID: LIB3039-033-Q1-E1-B5
ggtagttccacttcgtatcaatcatgtcgaagggaagtccctgagtctctattgttct

SEQ ID NO: 9189 - DNA, 65 bp, Glycine max
  Clone ID: LIB3039-033-Q1-E1-B6
ggtagcgcttgatttctctacgggtcctctgatcctgcgtctgccttctccgccgttgtcttcgt

SEQ ID NO: 9190 - DNA, 352 bp, Glycine max
  Clone ID: LIB3039-033-Q1-E1-B7
acccaagcgtcagcccacgcgtccggctgatttcaatcttgtcgaaaaattaaaactcacaaagcaatgattgaaattaacaagctactgaactttgcattgcccccattatcactaattgtcatcttcatcttcacgccacctttgctcttagtgaagctgcttatgtgtgttaaaaagtttctatacaccgaaaacgtggcagggaaagtagtattaatcactgcagcagcctcagggattggccagcaagtagcatatgaatatgctatgcgcggagcacagctgtctctggttgacagtagacaggacagactctgtagcagtggatggaggggcacgatgtttgggt

SEQ ID NO: 9191 - DNA, 365 bp, Glycine max
  Clone ID: LIB3039-033-Q1-E1-B8
ggatagaagaagcagaaagagaagcattagcaaaagcaagaagaactagtctaagcagaaatggcctcttcagtgatggcatctgtggccctcaaacctgcccctttcactgttgagaagtcctcagttagaggccttccctccctctcaaggaactcctcttcattcagagttgtggccagtggtggcaagaagatcaagactgacaagccttatggaattaatggtggcatggctttgagggaaggagttgatgcatctggcaggaaaggaaagggaaagggcgtttaccagtttgtagacaaatacggtgctaatgtcgatggttacagtcctatctacgacaccaaggactggtctccaac

SEQ ID NO: 9192 - DNA, 375 bp, Glycine max
  Clone ID: LIB3039-033-Q1-E1-B9
gaattgaatttcaattgagttcaacgcaatgcgatattaccctcctgaccattaaaggttcagataaccttttagggaacaagcctcttggagaaggttggttccggtatcaagcacttaaccaggtggaaaagtactgccaagctccagtatacggctcgtcttctcccagatcttcaacttcttcgcagtcatcgaaggcatcgccagggcagtcgtaacatctcagacgatggcatacactgcgattaaccaacacaggactacattattagccatcaatttatattagactctaaaacagttaaccatcaggctttcttttatgctagtgaacgctaggtcgatcacatcgacatatttatagtcggcata

SEQ ID NO: 9193 - DNA, 361 bp, Glycine max
  Clone ID: LIB3039-033-Q1-E1-C1
ggcacaagtgagtttgttgatcgagataactagaaacagtgtgatgaaaatgaaggtccttgttttcttcgttgctacaattttggtagcatggcaatgccatgcgtacgatatgttccctctccgaatgaacactggctatggtgcccgtactccggaggtgaaatgcgcaagttggaggcttgctgtggaagcacacaacatctttggctttgagaccattcctgaagagtgcgttgaagcaacaaaggaatacatccatggcgaacaatatagatcagactccaaaacagttaaccaacaagcttacttttatgccagagacctcgaagtccatcccaaggacacatttgtgttcagt

SEQ ID NO: 9194 - DNA, 363 bp, Glycine max
  Clone ID: LIB3039-033-Q1-E1-C10
gactcacattagcattccacctcaaagcaacacaagaacactctcttgaacattcatggatccagtgagcgtgtggggtaacacgcccttggcgacggtggatcccgagatccatgacctcatcgagaaggagaagcaccgccaatgccgcggcatcgagctcatcgcctccgagaacttcaactccttcgcagtcatcgaggccctcggcagcgccctcaccaacaaatactccgagggcatgcccggcaaccgctactacggcggcaacgaattcatcgaccagatcgaaaacctctgccgctcacgcgccctccaggccttccacctcgacgcccaatcctggggcgtcaatgtgcaccc

SEQ ID NO: 9195 - DNA, 376 bp, Glycine max
  Clone ID: LIB3039-033-Q1-E1-C11
cctttgggaaaccattattataacctaatcctccaataactcgaacgctgggcaataacctcctcctggatgcagaacattgaatgaactgctctacatctgctgtacgtcacctctcatcaagtggtgttgatgtatatactgctattgctggggctgttggagctctatatggacctcttcatggtggagccaatgaggctgtcctcaaaatgttgagtgaaattggaactgttgagaacattccagcattcattgagggtgctaaagccaggaaacggaagctcagtggttttggacatcgtgtgtacaaaaattatgatccaagagcaaaggtcttgaggaaactgacagaggaagtgttttccattgttgg

SEQ ID NO: 9196 - DNA, 303 bp, Glycine max
  Clone ID: LIB3039-033-Q1-E1-C12
gaggaacataaatctaactgcagtaacaaatctactgagattaaaagattccctcctgcttctgagaactgcgatgaggcttacaaaagaaaaacacctgagaatacatggaagcctccacggtctgagattgttctcaatcaagaggatcatcttcatgacccttggagggtgttggttacttgtatgcttctcaatcggactgctggtggccagacaaaaaatgttgtgtcaaacttcttcaagttatgtccatatgcataatcctgtacacaagttacaagataggaaatacagaagaca

SEQ ID NO: 9197 - DNA, 373 bp, Glycine max
  Clone ID: LIB3039-033-Q1-E1-C2
gattgttggcttgtgctctgctcgtgcctctagggttatcatatctccatttccatttcctctctctcagtttccaagaatcttaagctatgggaaagttttacccaaccgtgagcgctgattaccagaaggccgttgagaaggcgaagaagaagctcagaggcttcatcgctgagaagagatgcgctcctctaatgctccgtttggcatggcactctgctggaacttacgacgtgagctcgaagaccggtggtcccttcggaaccataaagcacccctccgaactcgctcacggcgctaacaacggtcttgacatcgctgttaggcttttggagccactcaaagcggagtttcctattttgagctacgccga

SEQ ID NO: 9198 - DNA, 380 bp, Glycine max
  unsure (1)..(380): unsure at all n locations
  Clone ID: LIB3039-033-Q1-E1-C3
gtagaatagagagctcccccaattagggtttttgtgatctgcagctacgatgggtaagggaacggggagtttcggtaagaggaggaacaagacccacaccctctgtgtgaggtgtggccgccgcagcttccacctccagaagagtcgttgctctgcgtgcgcttaccccgctgcgcgcaccaggaaatataactggagcgtgaaggccattangagaaagaccaccggaactggaaggatgaggtacttgcgtaacgtgcctcgcagattcaagagcggcttcagagagggtaccgaagctgcacccaggaagagaggagctgctgcctctgcctaagctttgaatgaatgacagcaatttttgctgggtcagtgaatta

SEQ ID NO: 9199 - DNA, 360 bp, Glycine max; identical to SEQ ID NO: 9043
  Clone ID: LIB3039-033-Q1-E1-C4

SEQ ID NO: 9200 - DNA, 299 bp, Glycine max
  Clone ID: LIB3039-033-Q1-E1-C5
gacggacgagggtttcgtttcgggtttgacgttgttcacaatcactttctgcgcttcactcactcccttcgtgcggttttctttctttgtcgaactcgtgcgaaaatgcgtgagattcttcacatacagggagggcaatgcggaaaccagatcggagcgaagttctgggaggtggtgtgcgcggagcacgggatcgattccacggggaggtaccagggggacaactagttgcaactcgagcgagtcaacgtctattacaatgaagcgagttgcggaaggttcgtgccgagggcggtgct

SEQ ID NO: 9201 - DNA, 334 bp, Glycine max
  Clone ID: LIB3039-033-Q1-E1-C6
ggaacttctcacgttcatttctacacatccctagctctgtcgttccgtcgttgacgatggcgtttcgggtgcgaagccctgacctccgctctctctttcttctctctctcttgtccatcgcttccgccaatgtcttcttcgaagagcgtttcgatgacgggtgggaaaatcgatgggttaaatcagattggaaaaaagatgagaacgtggctggggagtggaaccacacctctggtcaatggaatggagacgctaatgacaaaggtattcaaaccagtgaggattacagattctatgctatttcagctgagtaccctgaattcagcaacaaggg

SEQ ID NO: 9202 - DNA, 374 bp, Glycine max
  Clone ID: LIB3039-033-Q1-E1-C7
ggcattggggcatgcttttaatttcctagatctcccaaacaaattgtagcataagtcccatggccaaagagactagtgttgtttatctatatcccagcaaatcacaagtttggggtgagaattttgatcataaaaaacttgtaataacaacactagctgctaatggaaagaaggaggagagtaatggagcacctaatgacacatatcctgcgtttcccgggtggtatgctgatgtttcctggccaggagaagcacacacatataaaatagaaaagattctattccacgggaaatcagaattccaagagcttcttgtatttgagtcttctagacaaggcaaggttgcaattcttgatgggcatatccagctgaca

SEQ ID NO: 9203 - DNA, 384 bp, Glycine max
  Clone ID: LIB3039-033-Q1-E1-C8
gattcttaggttgggaaaccgaaacaagtaacgagagaccaaagtagccaagaacgaagcttgacgttgtcttgaagtcattacaatttcatacccacattccgctttctttggaacactctcgctttcgccttcttccttcacactcagcaaatgagtcgctatccagaagttctgtgggcacaacgttctgataaggtttaccttactgttgctctacctgatgccaagaatgtttctgtgaagtgtgagcctcagggtttgtttactttctctgcttctggggttcaagaagaagcctacagctttagcttggagctgtacggatgcattgaacctgagggttgtaaaactaaatctggcttaagaaacatactaagctca

SEQ ID NO: 9204 - DNA, 404 bp, Glycine max
  unsure (1)..(404): unsure at all n locations
  Clone ID: LIB3039-033-Q1-E1-C9
agaagggggcacaaagtggagtttgtttgattcgnagataaactagaaaacagtgtgattaaaaatgaaggtccttgttttcttcgttgctacaattttggtagcatggcaatgccatgcgtacgatatgttccctctccgaatgaacactggctatggtgcccgtactccggaggtgaaatgcgcaagttggaggcttgctgtggaagcacacaacatctttggctttgagaccattcctgaagagtgcgttgaagcaacaaaggaatacatccatggcgaacaatatagatcagactccaaaacagttaaccaacaagcttacttttatgccagagacctcgaagtccatcncaaggacacatttgtgttcagtatagatggcaccgtactctctaatattc

SEQ ID NO: 9205 - DNA, 234 bp, Glycine max
  Clone ID: LIB3039-033-Q1-E1-D1
gaccgttttcatcaatttcttatcttttctcattcccttctcttcttcctcaacacacacaaaatatctcttccaatttcaatttctcgtcgtccctcatcatggctcgtctcgcgatcgctgtcgccgccgtgctcctcgtggccctctccgcctccaccgcgacggcgcgtccctgcaggagcttcataatctcctcctacgcgtttcgcaaccctaactccaagaccttcg

SEQ ID NO: 9206 - DNA, 390 bp, Glycine max
  Clone ID: LIB3039-033-Q1-E1-D10
gacaacacaacgcaacacaacgcgcactctctcttttctctcttaacacaaaaaccctatcgttcttcgcggtttcgccgattctcgccatgccgaaagccaaatccgacgccaaagccgccgatagccggttgaagcgcaagggcgctggtgctggaaggaagcaatcgaagaaagctgctaaggatcctaacaagccaaagagacctccaagcgctttcttcgttttcatgtccgagttcagagagcagtttaagaaggagcatcctaacaacaaatccgtcgctgttgtcggtaaagctggtggtgacaaatggaaatcgctgtctgatgctgaaaagggccccttcgttgccacgggcgaaaagaaagaacaagagtatgagaaaa

SEQ ID NO: 9207 - DNA, 380 bp, Glycine max
  Clone ID: LIB3039-033-Q1-E1-D11
gaatccccaaatttcccaatcccccattcctccccggagcccccattaatcccaaggggtcctaaaattggttccccaacggtcgccccctggagaaacaacaacacaatcttcaatcacatgggcaaacgcagcatctggtatggcagtccatgatgactgcaagttgaggtttttggagctgaagggataaaggacacaccgtttcatagtttttaagattgaggagcagcagaagcaggtcattgtggagaagcttggtgagcctgcccagggctatgaagatttcactgccagccttcctgctgacgagtgccgttatgctgtttatgattttgagtatctgactgaagggaatgtcgctaaaagcagaatttttt

SEQ ID NO: 9208 - DNA, 311 bp, Glycine max
  unsure (1)..(311): unsure at all n locations
  Clone ID: LIB3039-033-Q1-E1-D12
gagattcgtcttcagtttcagcctttctctcncactcactcactcacaggtaagcaatggcgggaaaaggagggaaggggcttcttgcagcgaaaaccaccgcggcgaataaggacaaagacaaggacaagaagagacctatttctcgctcttcccgtgctggaatccagtttcctgtgggacgtatccataggcagctgaaacaaagggtccaagccaatggacgtgttggggcaacagctgcagtgtacttagcctcaattctagagtatctgactgctgaagttcttgaacttgctgggaatgcaagc

SEQ ID NO: 9209 - DNA, 362 bp, Glycine max
  Clone ID: LIB3039-033-Q1-E1-D2
gacctcaaaaaacaaagatcaataccttagagaaaacaaaagcacagaatcgaaagaagagttcttttttgagagagattgggatggcttcgacgaagaagatcacactgaagagttcggacggcgaggccttcgaggtggaggaggcggtggcggtggagtcccagacgatcaagcacatgatcgaggacaactgcgccgacagcggaattcctctccccaatgttaccagcaagattctggccaaggttatcgagtattgcaagaagcacgttgaggccaattgcgctgatgagaagcccagtgaggatgaactcaaggcttgggacgctgatttcgtcaacgttgatcgggccacactc

SEQ ID NO: 9210 - DNA, 376 bp, Glycine max
  Clone ID: LIB3039-033-Q1-E1-D3
gcacaagtgagtttgttgatcgagataactagaaacagtgtgatgaaaatgaaggtccatgttttcttcgttgctacaattttggtagcatggcaatgccatgcgtaagatatgttccctctccgaatgaacactggctatggtgcccgtaatccggaagtgaaatgcgcaagttggaggcttgctgtggaagcacacaacatctttggctttgagaccattcctgaagagtgcgttgaagcaacaaaggaatacatccatggcgaacaatatagatcagactccaaaacagttaaccaagaagcttacttttatgcaagagacctccatgtccatcccaaggacacatttgtgttcagtatagaaggcaccgtac

SEQ ID NO: 9211 - DNA, 168 bp, Glycine max
  Clone ID: LIB3039-033-Q1-E1-D5
ggcacaagtgagtttgtcgatcgagatcactcgcaccagtgtgctgaagttgaaggtccttgtattctgcgttgctgcgcttctggcagcatggcactgccatgcgtatcatgagtccgctctgcgaatgaacacatggctatcgcgcccgtcccctggaggtgtcca

SEQ ID NO: 9212 - DNA, 94 bp, Glycine max
  Clone ID: LIB3039-033-Q1-E1-D6
acccacacgtcagtcgggttgcaaaaaaacgacaaaggggggattcatcttctttttcatcctttctctctcactcactcattcataagtatcc

SEQ ID NO: 9213 - DNA, 258 bp, Glycine max
  Clone ID: LIB3039-033-Q1-E1-D7
taatttgggaattattgctcccatcgccattggtttcattgtcggcgctaacattttgttgggtggggccttctctggagcggccatgaaccccgctgtgacatttgggcctgctgtcgtgagctggacctggaccaaccactggatctactgggccgggcctctcatcggtggtggaatcgctggccttgtttacgaggttgtctttatcagccacacccacgagcagcttcccaccactgactactagaggggggg

SEQ ID NO: 9214 - DNA, 363 bp, Glycine max
  Clone ID: LIB3039-033-Q1-E1-D8
gacacaccgtttgttcgattcttaactcaacttctgctacccactctcttcttccaagtccaaccacgcttttctctacagtcatgggcaaggtcaagatcggaatcaacggatttggaagaattggccgtttggttgccagagtcgctctgcaaagagacgatgtggagctcgttgccgttaacgaccctttcattaccaccgattacatgacatacatgtttaaatacgacagtgttcacggacactggaagcatcacgatgtcaccgttaaggacgagaagacccttctcttcggtgacaagccagtcactgtttttggacacatgaaccctgaagagattccatgggggtcaactggag

SEQ ID NO: 9215 - DNA, 391 bp, Glycine max
  Clone ID: LIB3039-033-Q1-E1-D9
ccaaaacacagaaaggggttgataaaaaaggttggaaaccgattaagttccgccttcacaagccaaaaccctaatcctgaaggaactaaaattttataatgcaagaattcattcccccttccttggccacgccctcccaatgcgcctcttctccaccaccaccacagccaccgcgttcgccgtcactttacccaaaccctcatcactctccctctcatcgcgtcgattcctcttccctctctcccatgccatcgtccctccctccacccgcgtcgccggaatccggtgccgcgttaaccgcgccggagactcggcgtactcaccgctgaactcggggtcgtcgtcttcgtcgttcagcgaccgcccccccacggagattgcgccgctcttc

SEQ ID NO: 9216 - DNA, 398 bp, Glycine max
  unsure (1)..(398): unsure at all n locations
  Clone ID: LIB3039-033-Q1-E1-E10
gcacaagtgagtttgttgatcgagataactagaaacagtgtgatgaaaatgaaggtccttgttttcttcgttgctacaattttggtagcatggcaatgccatgcgtacgatatgttccctctccgaatgaacactggctatggtgcccgtactccggaggtgaaatgcgcaagttggaggcttgctgtggaagcacacaacatctttggctttgagaccattcctgaagagtgcgttgaagcaacaaaggaatacatccatggcgaacaatatagatcagactccanaacagttaaccaacaagcttacttttatgccagagacctcgaagtcaatcccaaggacacatttgtgttcagtatagatggcaccgtactctctaatatttcatactacaa

SEQ ID NO: 9217 - DNA, 307 bp, Glycine max
  Clone ID: LIB3039-033-Q1-E1-E11
agggattcaacaaagaaggaaattgaattttggggggtgggttaatggccaatggggggcaattaaaacaactttcccccgaatgaaaaacttgaaattgccctccgacgctcttcccccgcaaaacccccttaaccctcgctcccaactttttgattcgccgcttctgtgaagaggttaggggttgttttctcgacaagtctgaggtcacagatcgcgtcatttcctgcgtcaaaaacttccagaaagttgatccttcaaaggttaaccctaatgctcacttccagaatgaccttggattggatag

SEQ ID NO: 9218 - DNA, 382 bp, Glycine max
  Clone ID: LIB3039-033-Q1-E1-E12
gatagctattcgcagttcccaaattcagtttaatcctaattctgcacttcttgatcattcgatttttctcctcaagatgcagatattcgtaaaaactttgaccggcaagaccatcacccttgaggtggaatcctccgacaccattgacaacgtaaaagctaagattcaagacaaggaatggatcccacctgaccagcagagacttatctttgcgggtaaacaacttgaggatggtcgcacccttgccgattacaacatccaaaaggaatcaaccctccatctcgtgcttcgcctcaggggtggcatgcaaatctttgtcaagactttgaccgggaagaccatcacccttgaagtggaatcctcggacaccattgataatgtt

SEQ ID NO: 9219 - DNA, 358 bp, Glycine max; identical to SEQ ID NO: 7611
  Clone ID: LIB3039-033-Q1-E1-E3

SEQ ID NO: 9220 - DNA, 354 bp, Glycine max
  Clone ID: LIB3039-033-Q1-E1-E4
gcatatccaaaggaacaaaaatattattaagatgatcaacattattggagcacttgttctactctttgcatttctcttcctcagttgtgtgtatgcacaagacacaacaacccttgtgcctgcaatcataacttttggtgattctgctgtggatgtagggaacaatgactatcttcccacccttttcaaggctgattaccctccttatgggagggactttgttaaccaccaacctactgggaggttttgcaatggcaaattagctactgatttcactgctgacacattgggtttcaagacctatgctccagcatatcttagcccacatgcatcagggaaaaacctccttaatgg

SEQ ID NO: 9221 - DNA, 346 bp, Glycine max
  Clone ID: LIB3039-033-Q1-E1-E5
gacgaaagcaaattcttcaatttaaacacagaaacaaaatcaccaccttcaaagtcttctctctcgagaatcatcgaataaaactagggtttccgatcgtcgtcgaggagaatgccgaagaacaagggaaagggaggaaagaaccggaagcgcgggaagaacgaggcggacgacgagaagcgggagcttgtgttcaaggaggacggccaggagtacgcgcaggtgctccggatgctggggaacggccgctgcgaggcgatgtgcatcgacggcaccaagcgcctctgccacatccgcggcaagatgcacaagaaggtctggatcgccgccggcgacatcatcctcg

SEQ ID NO: 9222 - DNA, 326 bp, Glycine max
  Clone ID: LIB3039-033-Q1-E1-E6
gacacacagagcggttctcatattttggagaatccgaaaaacacgttaaagaaagtcccattcccactaccgaagcaaattaagaagatgaagcagcagagagtggagtttatgggcatgggcatgggcatgggcatgggcctgggccttttggtggtgatgatggcatgtgggtcggcgagtggtgcggatgatttggcaaccaagtgttcagcggtgattcagaaggtaataccgtgtttggatttcgcgaaggggaaggaagaaacgccgaaaaagcaatgttgcgacgcagcaacgtccataaaggagagcaacccagagtg

SEQ ID NO: 9223 - DNA, 336 bp, Glycine max
  Clone ID: LIB3039-033-Q1-E1-E7
gaccgcacagaattagggttttccaattcacagagcaacacaacgaaccaacaatggcgcagcctcagccgcagtcgcagccgcagcacgggcaagcagcgctggagcaggtgcagtgcttcggtcgcaagaagaccgccgtggccgtgacctactgcaagcgcgggcgcggtctcatcaagatcaacggctgccccattgagctcgtggagccggagatcctccgcttcaaggccttcgagcctatcctcctgttgggtaagagccgcttcgccggcgtcgacatgcgcatccgcgtcaagggtggcggccacacctcccagatctacgccatcc

SEQ ID NO: 9224 - DNA, 350 bp, Glycine max
  Clone ID: LIB3039-033-Q1-E1-E8
gataagaggaaagagtagaaacgtgaaccagaaccagaatggatcttcaacaacgaccactgaaacttcactttattccttacctgtcaccggggcatgtgatccctctctgcggcattgcaacactcttcgcctcacgcgggcagcacgtgacggtgatcaccactccctactacgcccaaatcctccgcaagtcaagcccctccctccaactccacgtcgttgactttcccgccaaagatgtgggccttcccgacggcgtcgaaatcaagtccgctgtcaccgacctcgctgacactgcaaagttctaccaagccgccatgctcctccgcagacccatctcccatttc

SEQ ID NO: 9225 - DNA, 348 bp, Glycine max; identical to SEQ ID NO: 9032
  Clone ID: LIB3039-033-Q1-E1-F1

SEQ ID NO: 9226 - DNA, 397 bp, Glycine max
  Clone ID: LIB3039-033-Q1-E1-F10
gaaggtgcaagagtttgttgtgagctataagctagtttatcgtgaggagaatatgaagttgtttgttttctttgttgctgcagtagttttggtagcatggccatgccatggcgcaggctaccaaaggttccctctccgaatgaaaactggctatggtgagcgttcttcggaggtaaaatgcgcaagttttaggcttgctgtggaagcacacaacatccgagcctttaaaaccattcctgaagagtgcgttgaaccaacaaaggactacattaatggcgaacaatttagatcagactctaaaacagttaaccaacaagctttcttttatgctagtgaacgcgaagtccatcacaacgacatatttatattcggcatagataacaccgcactctctaat

SEQ ID NO: 9227 - DNA, 342 bp, Glycine max
  unsure (1)..(342): unsure at all n locations
  Clone ID: LIB3039-033-Q1-E1-F11
gaaggtgcaagagtttgttgtgagctataagctagtttatcgtgaggagaatatgaagttgtttgttttctttgttgctgcagtagttttggtagcatggccatgccatggcgcaggctaccaaaggttccctctccgaatgaaaactggatatggtgagcgttcttcggaggtaaaatgcgcaagttttaggcttgctgtggaagcacacaacatccgagcctttaaaaccattcctgaagagtgcgttgaaccaacaaaggactaacattaatggcgaacattttagatcagactctanaacagttaaacaacaagctttccttttatgctagtgaacgc

SEQ ID NO: 9228 - DNA, 396 bp, Glycine max
  Clone ID: LIB3039-033-Q1-E1-F12
gatcgcatttcatagcactcaccctcattaccaacacgaaagcatagccaaaaccttttttcgaagtctctgattttcctaatggctccggcaaaggcagagaagaagccggcggagaagaagccagcggcggagaaggcaccggcggagaagaagccgaaggcggagaagaagatctcgaaggaaggagggagcgagaagaagaagaagcgcacgaagaagagcgtggagacctacaagatctacatcttcaaggtcctcaagcaggttcaccccgacattggtatttccagcaaggccatgggcatcatgaacagcttcatcaacgacatcttcgagaagctcgccaagaaacgtcgcgtttggctcgctacaacaagaagccaacatcacctc

SEQ ID NO: 9229 - DNA, 293 bp, Glycine max
  Clone ID: LIB3039-033-Q1-E1-F2
gaatttagctttgccttagatgcatgtcagctttttcttgcttccatagttcagggcgtgtgttcaagtcagtatagttcctctctttgcattgggtcttgcacaaattgacttctcaccatgccaaatggtgcagggtagagtcctctgcgttgactgcactcacaattatgacttatctgcatagtaaggtttcagtcaggtgtgacggtgtgaaaacagtgtgctttggcatgtagagaataagaatgcgccttcatggttgatcatcccttatactacgcttccgcttc

SEQ ID NO: 9230 - DNA, 338 bp, Glycine max
  Clone ID: LIB3039-033-Q1-E1-F3
gactcaccacttcagaacactcataacacaaagcacaaagcaaagctcatccttgagttaaaaaatggcagcagcttcttccatggctctctcatccccatccttggctggcaaggccgtgaagctgggcccatcagccccagaagtgggaagggtgagcatgaggaagaccgtcaccaagcaggtctcctcaggaagcccatggtacggcccagaccgagtcaagtacttgggcccattctctggcgagcccccgtcctacctaaccggtgagttcccaggcgactacggctgggacactgctgggctttccgcagacccagaaaccttcgccaaga

SEQ ID NO: 9231 - DNA, 337 bp, Glycine max
  Clone ID: LIB3039-033-Q1-E1-F4
gaattcaaaatatatcatcaattataagcatgggtttgtggaacacaacgaatgcagtgtcttgccgctttcacaagtttggtgatgaccaaaagaatctggtcttccaaggtgatgccacgtcttcttccaggggcatagaactcacaaagttagacggtggaggaaaaccagtgggtggcagtgtggggagagtgttatactcttctccagtgcacctttgggaaagctctacagtggtcgcaagctttgaaaccgacttcaccttttccatctcatcagactctactactccaggtgatggccttgccttcttcattgcaccatttgacactaa

SEQ ID NO: 9232 - DNA, 354 bp, Glycine max
  Clone ID: LIB3039-033-Q1-E1-F5
ggcacaagtgagtttgttgatcgagataactagaaacagtgtgatgaaaatgaaggtccttgttttcttcgttgctacaattttggtagcatggcaatgccatgcgtacgatatgttccctctccgaatgaacactggctatggtgcccgtactccggaggtgaaatgcgcaagttggaggcttgctgtggaagcacacaacatctttggctttgagaccattcctgaagagtgcgttgatgcaacacaggaatacatccatggcgaacaatatagatcagactccaaaacagttaaccaacaagcttacttttatgccagagacctcgacgtccatcccaaggacacatttgt

SEQ ID NO: 9233 - DNA, 363 bp, Glycine max
  Clone ID: LIB3039-033-Q1-E1-F6
gaaccattttacatttacagtaacagtattgaaatttcggaaaaaatggcgatggctttcaagatggcgacgactggaatgtgggttacagatgagtgcaagaactcgttcatggatatgaaatggaagaaggagcacagatacattgttttcaagatcgacgaaggatcaaggctcgtcaccgttgataaactcggtggccccaccgagggctatgatgatctcaccgcctccttgcccaccgatgattgccgatacgcggtttttgacttcgactttgtcaccgttgataactgccgcaagagcaagatcttcttcattgcatggtctccaacagcatcaaggattagagcaaagattcta

SEQ ID NO: 9234 - DNA, 367 bp, Glycine max
  Clone ID: LIB3039-033-Q1-E1-F7
ggtgcacaagtgagtttgttgatcgagataactagaaacagtgtgatgaaaatgaaggtccttgttttcttcgttgctacaattttggtagcatggcaatgccatgcgtacgatatgttccctctccgaatgaacactggctatggtgcccgtactccggaggtgaaatgcgcaagttggaggcttgctgtagaagcacacaacatctttggctttgagaccattcctgaagagtgcgttgaagcaacaaaggaatacatccatggcgaacaatatagatcagactccaaaacagttaaccaacaagcttacttttatgccaaagaactccaagtccaacccaaaggcacaattggggtcaattaaa

SEQ ID NO: 9235 - DNA, 354 bp, Glycine max
  Clone ID: LIB3039-033-Q1-E1-F8
ggctgagaagcagagagaggcagagatgcaaggaagcgcagctgacggtgaagccttggatttcgagcctgaggacgatgacttgatggacgaggacggcgcccccgacgccgacgcttctccgcctcaacctaagctcaaatccgccatcaccgccgccgccgcccccaaaaagaccaagggtcgcggattccggcaggacaccgacgccaaccgtgacactcgcctctccggctccgacttcgactctctcaccaccgagggcggccctggccctcaaagatccattgaaggatggatcattctggtcaccggcgtgcacgaggaagcgcaagaagacgatttgcaaaacac

SEQ ID NO: 9236 - DNA, 222 bp, Glycine max
  Clone ID: LIB3039-033-Q1-E1-F9
aggaacccacctgacggtgaagccttggatttcgagcctgaagacgatgacttgatggacgaggacggcgcccccgacgccgacgcttctccgcctcaacctaagctcaaatccgccatcaccgccgccgccgcccccaaaaagaccaagggtcgcggattccggcaggacaccgacgccaaccgtgacactcgcctctccggctccgacttcgactctctc

SEQ ID NO: 9237 - DNA, 351 bp, Glycine max; identical to SEQ ID NO: 8418
  Clone ID: LIB3039-033-Q1-E1-G1

SEQ ID NO: 9238 - DNA, 260 bp, Glycine max
  Clone ID: LIB3039-033-Q1-E1-G10
gggcgcggcacacacagacacacacatttcgtcggaatgggaagggtgattcgcgcacagcgtaagggtgcggggtcggtgttcaagtcccacacccaccaccgcaagggtccggcgaggttccgcagcctcgacttcggcgagcgcaacggctacctcaaaggggtcgtcaccgatatcatccacgaccctggtcgcagtgctcgactagccaacgtgtcgtgacgacaacacttccgctacaagaagcagatggagct

SEQ ID NO: 9239 - DNA, 388 bp, Glycine max
  unsure (1)..(388): unsure at all n locations
  Clone ID: LIB3039-033-Q1-E1-G11
agggcacaagtgagtttgttgatcgagataactagaaacagtgtgatgaaaatgaaggtccttgttttcttcgttgctacaattttggtagcatggcaatgccatgcgtacgatatgttccctctccgaatgaacactggctatggtgcccgtactccggaggtgaaatgcgcaagttggaggcttgctgtggaagcacacaacatctttggctttgagaccattcctgaagagtgcgttgaagcaacaaaggaatacatccatggcgaacaatatagattagacaacanaacagtttaccaacaagcttacttttatgccagagacctcgaagtccatcccaaggacacatttgtgttcagtatagatggcaccgtactctctaata

SEQ ID NO: 9240 - DNA, 280 bp, Glycine max
  Clone ID: LIB3039-033-Q1-E1-G12
gaggcgcggcgggatcatcacgagattgcaaaatgaagttcaacattgcaaatcccaccactgggtgccacaagaagctggaaatcgatgacgacctgaagcttcgggcattttgggacaagaggatctcccaagaggtccttggtgacgccctgtgtgaggagtttaaaggatatgttttcaaaatcactggtgggtgtgacaaacaacgattcccaatgaagcaaggagtgttgacccctggtcgtgttcgactcttgctccatagaggaactccttg

SEQ ID NO: 9241 - DNA, 377 bp, Glycine max
  Clone ID: LIB3039-033-Q1-E1-G2
gacaacacacattcccatcatcacaccaacaacaacacaccatgttcacagttctgcttctcttctcactccttcttaccacctctactccccacaacataatatcataccctcatttccaacaactcaatgtcaaacaaatcctcacagaaaccaaactcaacccaacaaatacctacaaacacctccaacaccaaaaactcaacattgccaccgaagcatcttcaccggcaaaatataaactgaagctagttcacagagacaaagtccccacgtttaacacctcccacgaccaccgaacccgattcaatgcacgaatgcagcgagacaccaaaagggtcgccgccctccgccgccatctggccgccggaaaaacc

SEQ ID NO: 9242 - DNA, 359 bp, Glycine max
  Clone ID: LIB3039-033-Q1-E1-G3
ggagtgagcgtagttgaggttttgccacttcgaaaccaaattttcttccttcgttggcatctgtgatctcttctcctcacaatgagcagatcagggcaaccaccggatttgaagaagtacatggacaagaagcttcagatcaagctgaatgcaaatcgcatggttgttggtactctccgtggcttcgaccagtttatgaatttagttgttgacaacactgtggaagtgaatggcaatgagaaaaatgacatagggatggtggtaatcagaggaaatagtgtggtcactgttgaggcgcttgaacctgtgaacaggacttgatttctgtggcttgtaaacattctatataagtattttct

SEQ ID NO: 9243 - DNA, 344 bp, Glycine max
  Clone ID: LIB3039-033-Q1-E1-G4
gacgattactaccaagtgaaaaagcaattaactaagcatatatagcgtgtaagacagtgagaaaaaaagtgttgtgtagagagaaatggctaggtggtgcatcttggtggttcttgcccttgtcgtggttgcaagtgccagaaacatgcccaatgacgcaggtttggaggaccagaagaacttcctcgggtatgggttctctggagttggcaacaatgggcttccctttggaggagtgggttctgggtttgatggtaatatgggtgggccttctgggctcggtggatttggaggattcggtgggcctaacgggctcggaggtcttggtaacggtgaagggccca

SEQ ID NO: 9244 - DNA, 370 bp, Glycine max
  Clone ID: LIB3039-033-Q1-E1-G5
ggtgtgtgtgaaaagaagaaactttgtaagctcaatttgtttccaaggttgctctgggaatccgaggttctaaactctgcaactaactttaatggcaactgggcaagtcattaataaacctccttcacttcctccgtaccctgagatgattcgggaggcaattgaagcactgaatgaagagaatggttcgaataaatcatcaatttcgaagtacatcgaatccacctatggtggattgcctcaggcccacaaggttttgctcaatgtgcacctcgcgaaaatgagggaaagtggagtgctagtgttttggaagaacaactacaccaagcgtgacccaaatgcgccgccacggccgggccgttgcaaggca

SEQ ID NO: 9245 - DNA, 362 bp, Glycine max
  Clone ID: LIB3039-033-Q1-E1-G6
gaattctttgtgtaggtgctaaatccctagtaagccgccatggtgaagtactcaagggagcctgacaatccaaccaagtcttgcaaggctagaggcgccgaccttagggttcattttaagaacactagggaaactgcctttgcaatcaggaagttgcccttggttaaagctaaaaggtacttggaagatgttcttgcgcacaagcaggccattccgttcagacgtttctgtcgtggtgttggaaggacagctcaagcaaagaatagacactctaatggccaaggaaggtggcctgtcaagtcagcaaaattcatccttgatttgctcaaaaatgctgagagcaatgctgaagtgaaaggttt

SEQ ID NO: 9246 - DNA, 339 bp, Glycine max
  Clone ID: LIB3039-033-Q1-E1-G7
gcagcaatacagacattcaagcacagaagagtgcaccttctcccaataacttgcagaagacagcgaaagaaagagataattcagatcaagtttctgaagtgcaccatgatgcttccgatgcttttccaacagagtgggtgccaccaaatttgagtgtacccattttggatctggttgatgttatcttccaggttcatgatggtggatggattaggcggaaggctttttgggttgctaaacaaatcttacaactaggaatgggtgatgcctttgatgactggttgatagagaaaattcagcttctccgtaagggttcagtggttgcttcaggggtcaagc

SEQ ID NO: 9247 - DNA, 354 bp, Glycine max
  Clone ID: LIB3039-033-Q1-E1-G8
gaattaagaatgaagctgggtggactgaaatcggtggagaacgcgcacgatgattcggtgtgggcggtcacctgggtacccgcaaccgccaaccgaccaccgctcctcctaaccggttccctcgacgagaccgtcaggctctggcgctccgacgacctcgttttggaccgcaccaacaccggccactgcctcggcgtcgcctccgtcgccgcccaccccctcggctctgtcgccgcctcctcctccctcgacagcttcgtccgcgtcttcgatgtcgattccaacgccaccatcgccaccctcgaggctcctccctctgaagtttggcaaatgcgcttcgatcccaagggtgcc

SEQ ID NO: 9248 - DNA, 309 bp, Glycine max
  Clone ID: LIB3039-033-Q1-E1-G9
aaaaggggcacaagtttgtttagataactagaaacaataagatgaaaatgaaagtgcttgttttgtttgttgctacagttttggtagcatatgaatgccatggctcagactaccagaagttccctctccaaatgaaaactgggtttggtgggcaatacagcaatgaagtggcatgtgccagttggaggcttggcgtggaagcaaacaacgtagtcaagtggcaaactgttcctgcagcttgcggagagtacatagctgactacgttctaggagaccaatatagatcagattccaaaacagttaaccaac

SEQ ID NO: 9249 - DNA, 355 bp, Glycine max
  Clone ID: LIB3039-033-Q1-E1-H1
gaggtgcaggaaaattaatctccctttcattttctctgcatctgtactctccaaaatgccgtccttagaggaggagctcttcccttcaaccccaggcaagttcaagatcgagcgggcccaccacatgaaccgccagctctaccgctgcttcgcctccaccagcaccatgttcctgtgggccctctttttaatcgccctcaccgcttcatatctcagcttccaaggcttcgttgattccggcagccgctacctctccgcctcctggggcgggatccagtgggagaagcaggtccgcacctccgcccagatccaccgtcaaggcggcatgtccgtcctcgtcaccggcgctgccggc

SEQ ID NO: 9250 - DNA, 337 bp, Glycine max
  Clone ID: LIB3039-033-Q1-E1-H10
gactcaccacttcaaaacactcataacacaaagcacaaagcaaagctcatccttgagttaaaaaatggcagcagcttcttccatggctctctcatccccatccttggctggcaaggccgtgaagctgggcccatcagccccagaagtgggaagggtgagcatgaggaagaccgtcaccaagcaggtctcctcaggaagcccatggtacggcccagaccgagtcaagtacttgggcccattctctggcgagcccccgtcctacctaaccggtgagttcccaggcgactacggctgggacactgctgggctttccgcagaccagaaaccttcgccaaga

SEQ ID NO: 9251 - DNA, 265 bp, Glycine max
  Clone ID: LIB3039-033-Q1-E1-H11
gactcttcagtctttttttcatgtcaagttcccgctccatttgctcactctggctctgtgtctctctaaacctggtctcatcgcacattcgcagacacacacacttcagatgggaatctccatccatggcggagtccgagttctaggcaagcgttgacctcgaagagaaatcgtggcacctcctcgcgctcgtcctccgaattggccacgccgtttatccgcaacgcctcgccgagcagtgtcgtttgtttcgctgcgtcgccga

SEQ ID NO: 9252 - DNA, 288 bp, Glycine max
  Clone ID: LIB3039-033-Q1-E1-H12
gatctggcagcagaagaacaagtagttgagaactaagaaggagaagcaaatggcttcctcaatgatctcttccccagctgttaccactgtcaagcgtgccggtgccggcatggttgctccattcactggcctcaagtccatggctggcttccccaccagatagaccagcaatgacattacctccattgctagcaacggtggaagagtgcaatgcatgcatgtgtggccaccagttggcaagaagaagtttgagactcgttcctacctgccagaccttgatgatgcaca

SEQ ID NO: 9253 - DNA, 361 bp, Glycine max
  Clone ID: LIB3039-033-Q1-E1-H2
ggcgaaacagagagtgatttcagtgagtgatcggtgttcacttgatctcatcataatcgtcagcgtcaattgaagaagatgccgatcagaaacatcgccgtcggaaggtctgaagaggcgactcaccccgacacgttgaaagcggctttggctgagttcatctcaaccttcatcttcgtgttcgccggctcaggctccggcatcgcctacaacaagctcaccgagaacggcgctgccacccctgccggcctcatctccgcctccatcgcccatgcattcgccctcttcgtcgccgtctccgtcggcgccaacatctccggcggccacgtcaaccccgccgtcaccttcggcgccttcgtcg

SEQ ID NO: 9254 - DNA, 361 bp, Glycine max
  Clone ID: LIB3039-033-Q1-E1-H3
ggaacctttgcattctattcattcaagattcagcaagtgcgttttggaagcagagaccgaaatacttcgagatggcccgtacaaagcaaactgctcgtaagtcaactggaggaaaagctcccaggaagcagcttgcaaccaaggctgcacgtaagtctgcaccaacaactggtggtgtgaagaagcctcatcgttatcgccctggaactgttgctcttcgtgagattaggaaataccagaagagcactgagctcctaatcaggaagcttcctttccagaggttggttcgtgaaattgcccaggatttcaagactgatctgcgtttccagagccatgctgtgcttgcattgcaagaggctgc

SEQ ID NO: 9255 - DNA, 385 bp, Glycine max
  Clone ID: LIB3039-033-Q1-E1-H4
ggcacaagtgagtttgttgatcgagataactagaaacagtgtgatgaaaatgaaggtccttgttttcttcgttgctacaattttggtagcatggcaatgccatgcgtacgatatgttccctctccgaatgaacactggctatggtgcccgtactccggaggtgaaatgcgcaagttggaggcttgctgtggaagcacacaacatctttggctttgagaccattcctgaagagtgcgttgaagcaacaaaggaatacatccatggcgaacaatatagatcagactccaaaacagttaaccaacaagcttacttttatgccagagacctcgaagtccatcccaaggacacatttgtgttcagtatagatggcaacgtactctctaat

SEQ ID NO: 9256 - DNA, 358 bp, Glycine max; identical to SEQ ID NO: 7611
  Clone ID: LIB3039-033-Q1-E1-H5

SEQ ID NO: 9257 - DNA, 359 bp, Glycine max
  Clone ID: LIB3039-033-Q1-E1-H6
gatccacacctctctctctctctcagaagttctagctatctcctgtttcaatttcaacaacggttactcctttttcgttttgagtttcaatcaagccatcatcatgtctaccgcatcgcaacccaaggccaagaaaacggcgtcgtccaagaagcccctctctcaccctcccttcgccgtgatgatagcagaggcgattgcgagtctgaaagagagaaccggttcgagccaatacgcgataaccatatacatcgaagggaagcacaatgagttgcctgcaatctatatgaagcttgtcctcgttcatctcaagaaatctgttgctgctggcaagcttgttaaggtgaaaaactccttta

SEQ ID NO: 9258 - DNA, 348 bp, Glycine max
  Clone ID: LIB3039-033-Q1-E1-H7
ggcacaagtgagtttgttgatcgagataactagaaacagtgtgatgaaaatgaaggtccttgttttcttcgttgctacaattttggtagcatgacaatgccatgcgtacgatatgttccctctccgaatgaacactggctatggtgcccgtactccggaggtgaaatgcgcaagttggaggcttgctgtggaagcacacaacatctttggctttgagaccattcctgaagagtgcgttgaagcaacaaaggaatacatccatggcgaacagtatagatcagactccaaaacagttaaccaacaagcttacttttatgccagagacctcgaagtccatcccaaagacac

SEQ ID NO: 9259 - DNA, 300 bp, Glycine max
  Clone ID: LIB3039-033-Q1-E1-H8
ggcacaagttcctctattgctgctcactcataaaaacattgtcgcggccgttgaagtccgatgatttcatcattactatcatcatcgcaagacgcacaagtgaatgctacaatacgttcgatactcaagatgatcactgactacgggacaccgtgggacactggggtctcacacgaagtcgacgcttatcgtcatgtcgcagaatatcatgggtatctcgaccattctacaagacgttgttacaggcacagagtcacgcatgcacagggagtgcttactattagactcgatcacaatttg

SEQ ID NO: 9260 - DNA, 286 bp, Glycine max
  Clone ID: LIB3039-033-Q1-E1-H9
gacgattactaccaagtgaaaaagcagttaactaagcatatatagcgtgtaagacagtgagaaaaagactgttgtgtagacagaaatggctatgtggtgcatcttggtggttcttgcccttgtcgtggctgcaagtgccagaaacatgcccaatgacgcacgtttggaggaccagaagaacttcctcgggtatgggttctctggagttggcaacaatgggcttccctttggaggactgggttctgggtttgatggtaatatgggtgggccttctgggctcagtgga

SEQ ID NO: 9261 - DNA, 397 bp, Glycine max
  Clone ID: LIB3039-034-Q1-E1-A1
ggcacaagtttgttgagatagctagaagcaataagatgaaaatgaaagtgcttgttttgtttgttgctacagttttggtagcatatgaatgccatggctcagactaccagaagttccctctccaaatgaaaactgggtttggtgggcaatacagcaatgaggtggcatgtgccagttggaggcttggcgtggaagcaaacaacgtagtcaagtggcaaactgttcctgcagcttgcggagagtacatagctgactacgttctaggagaccaatatagatcagattccagaacagttaaccaacaagattatttctatgctaaatccctcaaactcaccaacaaagatgtctttggcttggacgttgacgacactactctctctaatctccagtattt

SEQ ID NO: 9262 - DNA, 354 bp, Glycine max
  unsure (1)..(354): unsure at all n locations
  Clone ID: LIB3039-034-Q1-E1-A10
gttgctctcgatttgtgccctgttgacggaccctaatcctgatgatcctttggtccgcgaaatagcccacatgtacaagacagacagaaacaagtacgagtcaactgccagaagctggacccagaaatatgccatgggttaagtgacctgtggtatgtgtgaggaagagcctttctactcccagtgtttaggcctctcagcccttgtatgaatatttgtcgtttttaataaagcccctccagttgaagattgatggagcaaaacgtttctcctgttgtttgtactgcanatgttaatttagaacagtgaaatgtttgccccaatcacatatgctcaaatttttaggccgttcta

SEQ ID NO: 9263 - DNA, 384 bp, Glycine max
  unsure (1)..(384): unsure at all n locations
  Clone ID: LIB3039-034-Q1-E1-A11
gaaggtgcaagagtttgttgtgagctataagctagtttatcgtgaggagaatatgaagttgtttgttttctttgttgctgcagtagttttggtagcatggccatgccatggcgcaggctaccaaaggttccctctccgaatgaaaactggctatggtgagcgttcttcggaggtaaaatgcgcangttttaggcttgctgtggaagcacacaacatccgagcctttanaaccattcctgaagagtgcgttgaaccaacanaggactacattaatggcgaacaatttagatcagactctanaacagttaaccaacaagctttcttttatgctagtgaacgcgaagtccatcacaacgacatatttatattcggcatagataacac

SEQ ID NO: 9264 - DNA, 389 bp, Glycine max
  unsure (1)..(389): unsure at all n locations
  Clone ID: LIB3039-034-Q1-E1-A12
gattgtgaaatcatcatcatcatgggttgctcagcctcaagaaccatcaccatagtggccaacaacaataaccaattagaggatccatcttctgcttctcttgcttcttctttctcttcctcttctgcctcacacaaatccattaactctacttcttcaccagcagcagcaccagttagaagaagagctctttctctcccaatgcctcttgttcatcaccctcccataaaaaagggtgacacacaccaccttgtctccctcacctccaccacctatggctcccttctcctcattgaccaaaaagacccaaacttgacccaaaaaaaccaaccccgcctcaccaaaacctcaaaccaaactgacccagcacactcactctncccagactc

SEQ ID NO: 9265 - DNA, 355 bp, Glycine max
  Clone ID: LIB3039-034-Q1-E1-A3
ggcacaagtgagtttgttgatggacataactagaaacagtgtgatgaaaatggaggtccttgttttcttcgttgctacaattttggtagcatggcaatgccatgcgtacgatatgttccctctccgaatgaacactggctatggtgcccgtactccggaggtgaaatgcgcaagttggaggcttgctgtggaggcacacaacatctttgggtttgagaccattcctgaagagtgcgttgaagcaacaaaggaatacatccatggcgaacagtatagatcagactccaaaacagttaaccaacaagcttacttttatgccagagacctcgaagtccatcccaaggacacatttgtg

SEQ ID NO: 9266 - DNA, 175 bp, Glycine max
  Clone ID: LIB3039-034-Q1-E1-A4
caaaggggcacaagtgagtttgttggtctagatgagtagaaagagtgtgaggaaaatgaaggtccgtgttgtcttcgttgctacaattttggtagcatggcaactgccaggggtgacacgtgttccctctccgaatgaacagtggctatggtgcccgtactccggatgtgaaatt

SEQ ID NO: 9267 - DNA, 356 bp, Glycine max
  Clone ID: LIB3039-034-Q1-E1-A5
ggtgtggaagtatttgcagaactttgtttcccaacctccattgcctccgcttctacctcgctaccatgatcattcctgagaagaaccgcaaggagatctgcaaatacctcttccaagagggaatttgctttgcgaagaaggacttcaatttggcgaagcaccctgagattgacgtgccgaatctgcaggtgattaagctgatgcagagtttcaagtctcgcgagtatgtgagggagacttttgcttggatgcactattactggttcctcaccaacgatggaatcgagtttctcagaacttaccttaaccttccttccgaaattgtccctgctactttgaagaaacaagccaagcca

SEQ ID NO: 9268 - DNA, 333 bp, Glycine max
  Clone ID: LIB3039-034-Q1-E1-A6
ggcacaagtgagtttgttgatcgagataactagaaacagtgtgatgaaaatgaaggtccttgttttcctcgttgctacaattttggtagcatggcaatgccatgcgtacgatatgttccctctccgaatgaacactggctatggtgcccgtactccggaggtgaaatgcgcaagttggaggcttgctgtggaagcacacaacatccttggctttgagaccattcctgaagagtgcgttgaagcaacaaaggaatacatccatggcaaacaatatagatcagactccaaaacagttaaccaacaagcttacttttatgccagagacctcgaagt

SEQ ID NO: 9269 - DNA, 378 bp, Glycine max
  Clone ID: LIB3039-034-Q1-E1-A7
ggcacaagtgagtttgttgatcgagataactagaaacagtgtgatgaaaatgaaggtccttgttttcttcgttgctacaattttggtagcatggcaatgccatgcgtacgatatgttccctctccgaatgaacactggctatggtgcccgtactccggaggtgaaatgcgcaagttggaggcttgctgtggaagcacacaacatctttggctttgagaccattcctgaagagtgcgttgaagcaacaaaggaatacatccatggcgaacaatatagatcagactccaaaacagttaaccaacaagcttacttttatgccagagacctcgaagtccatcccaaggacacatttgttgtcagtatagatggcaccgtact

SEQ ID NO: 9270 - DNA, 387 bp, Glycine max
  unsure (1)..(387): unsure at all n locations
  Clone ID: LIB3039-034-Q1-E1-A8
gataacacaaacacaaattacatagcctcagtaatctgagagagaaacaaaaacaatgaaggtttccattgccaagttccactcccttcccctatgttttttccttctcttggccttcaacacaaaacccctcctagcagcagaaccagagccagtggttgataagcaagggaaccctttggagccaggagtagggtactacgtgtggccactttgggctgatgaaggaggcctcacactaggccaaacaaggaacaagacatgccctctttatgttatccgtgacccttcattcattggcaccccagtttcattcttagcaccaggccttgaccatgttccaacactcactgatctaancattgatttccctgtggtgacagtgtg

SEQ ID NO: 9271 - DNA, 357 bp, Glycine max
  Clone ID: LIB3039-034-Q1-E1-A9
ggcacaagtgagtttgttgatcgagataactagagacagtgtgatgaaaatgaaggtccttgttttcttcgttgctacaattttggtagcatggcaatgccatgcgtacgatatgttccctctccgaatgaacactggctatggtgcccgtactccggaggtgaaatgcgcaagttggaggcttgctgtggaagcacacaacatctttggctttgaaacaatcctgaagaattccttgaagcaaccaaagaatacatccatggcgaacaatatagattaagatccaaaacagtttaccaacaaacttacatttatgccagagacctctaagtccatcccaaggacacatttgtgttc

SEQ ID NO: 9272 - DNA, 224 bp, Glycine max
  Clone ID: LIB3039-034-Q1-E1-B1
gaggagagggaacttggagaaaggtgcgaacgtttgctgcttctttgagggcatttttgtgccttgctaaaactttgggtgcacgggcatgacaggcggtaggaagatacgaccttcaaggactcatgcgcttcagtagcagttcctcgttcatattcagagtcatctctgggctggaggtgtccatattctggaggactagagccacttccctgtgtcaaaat

SEQ ID NO: 9273 - DNA, 370 bp, Glycine max
  Clone ID: LIB3039-034-Q1-E1-B10
gatactcaattcattttcttcttctgcttcaccttctcttctcttctctcatagggttagggtttttttctcttcattgctctctctgtcgttttatttccatggctcagcaagatgctcagaatggtgggtcggagaatgccgctgctgcggtgtcgtttgtcgctttgaagccgcagctcctcatcgaagctcccaaagcgaacgacgccgttctgttctacaaggccgcgtttgccgctgaggaggttggccgtacgctcaaccctaagcgtatagcggagcacgagcttcctctcatactctccgcagagctcagaatcgctggctctaccattctcgttgctgacctcgttgatgactctgcttc

SEQ ID NO: 9274 - DNA, 383 bp, Glycine max; identical to SEQ ID NO: 9098
  Clone ID: LIB3039-034-Q1-E1-B11

SEQ ID NO: 9275 - DNA, 376 bp, Glycine max
  Clone ID: LIB3039-034-Q1-E1-B12
ggcacaagtgagtttgttgatcgagataactagaaacagtgtgatgaaaatgaaggtccttgttttcttcgttgctacaattttggtagcatggcaatgccatgcgtacgatatgttccctctccgaatgaacactggctatggtgcccgtactccggaagtgaaatgcgcaagttggaagcttgctgtggaagcacacaacatctttggctttgagaccattcctgaagagtgcgttgaagcaacaaaggaatacatccatggcgaacaatatagatcagactccaaaacagttaaccaacaagcttacttttatgccagagacctcgaagtccatcccaaggacacatttgtgttcagtatagatggcaccgta

SEQ ID NO: 9276 - DNA, 405 bp, Glycine max
  unsure (1)..(405): unsure at all n locations
  Clone ID: LIB3039-034-Q1-E1-B2
ccaaaccttcgaacggtggcaaaagaccaaagaaagggaacaaaagtaatggaaattgcaaaaaaaaaaagaacgtttgaattgtaattgaaaaaccccttgaggtttcccctggcaacttcggaatctgtaggcttcagttgtgctatttaacagtgtagggcactgcgtgtttacgaaataataagtttgtataattactgtaattaatatcagtatgggtgaggaagaaccagcgaatgaagtttccaagactgattcanatggaaagagcttgcaggagaaaactttggatgaaactactgagaaaaaggacttggaaactgatggaggaaaagtcttggagaacaatggaatcaaagagaatattgtaaaagaaattgaagataagaaagctgatggtgt

SEQ ID NO: 9277 - DNA, 375 bp, Glycine max
  Clone ID: LIB3039-034-Q1-E1-B5
gggtattctattcttcaagattcaggtactgcgtttcggaagcagacacagatggctcgtacgaagcaaaccgctcgtaagtccacaggaggaaaggctcctaggaagcagcttgcaaccaaggctgcacgtaagtctgcaccaactactggtggtgtgaagaagccccaccgttatcgtcctggtaccgttgctcttcgtgagattaggaaataccagaagagtaccgagcttttgatccggaagctccccttccagaggctggttcgtgaaattgctcaggacttcaagactgatctgcgtttccagagccacgccgtgcttgcattgcaagaagctgctgaggcataccttgttgggctctttgaggacact

SEQ ID NO: 9278 - DNA, 402 bp, Glycine max
  Clone ID: LIB3039-034-Q1-E1-B6
gagtgccagacgcagtgactaaaccaaacctctcactcgccgtcgtagggtttctcctttcgtttagcaacaacaacaatggttgcagccaagaaaaccaagaagacccatgagagcatcaacaacaggctcgctcttgtcatgaagagtggaaaattcaccctcggttacaagacggttctcaaatcacttaggagctccaaagggaaattgattatcattgctaacaactgcccccctttgaggaaatcagagattgaatactatgctatgttggccaaggttggagttcatcattacaatgggaacaatgtggatttgggcactgcatgtggaaaatattacagagtgtgctgccttagcattattgatcctggtgattctgatatcatcaagacacta

SEQ ID NO: 9279 - DNA, 390 bp, Glycine max
  Clone ID: LIB3039-034-Q1-E1-B8
gaacacgcggctgccgccggaggtgaaccgcgtgctgtacgttcggaaccttcccttcaacatcacgagcgaggagatgtacgacatcgtcggcaggtacggcgccattcggcagatccgcatcggcaccaacaaggacactcgcggaacggccttcatcgtctacgaggacatctaggacgccaaaaccgccgtcgacgacctctccggcttcagcgtcgccaaccgctacctcatcgttctctactaccagcaagcgaagatgagcaagaagttcgatcagaagacgaaggaggacgagatcgcgcgcatgcacgagaagtacggcgtctccacgaaagataagtagattaagtacttccttctcggaaatgccgagggttagggtta

SEQ ID NO: 9280 - DNA, 385 bp, Glycine max
  Clone ID: LIB3039-034-Q1-E1-B9
gacacattagcattccacctcaaagcaacacaagaacactctcttgaacattcatggatccagtgagcgtgtggggtaacacgcccttggcgacggtggatcccgagatccatgacctcatcgagaaggagaagcaccgccaatgccgcggcatcgagctcatcgcctccgagaacttcacctccttcgcagtcatcgaggccctcggcagcgccctcaccaacaaatactccgagggcatgcccggcaaccgctactacggcggcaacgaattcatcgaccagatcgaaaacctctgccgctcacgcgccctccaggccttccacctcgacgcccaatcctggggcgtcaatgtgcagccctactccggctcccctgccaactt

SEQ ID NO: 9281 - DNA, 374 bp, Glycine max
  Clone ID: LIB3039-034-Q1-E1-C1
gcagcatctcctcaaacacaaacatccctcttgatttgaaggttgttttgtgcttatagataaaagttctgccaaatcaagaggggttttcagatcatagtgtgtgtgtgtgtgtgttaaacaatggctaagttctttgctgctatgatcttggcactcattgccatttccatgcttcaaacagtggttatggctgctaatgagcaaggaggccacttgtatgacaacaagagcaaatatggaagtgggagtgtcaagagataccaatgcccatcacaatgctcgaggagatgtagccagacccaatatcacaagccctgcatgtttttctgtcagaagtgctgcaggaaatgcctgtgtgtgcccccggggta

SEQ ID NO: 9282 - DNA, 384 bp, Glycine max
  Clone ID: LIB3039-034-Q1-E1-C10
gtaatgggtgattgtgctgccggagaatggtgccacttaaaagatgcagacaaagatttgaggttctgctactgattttttgtaggtttggtaagctgaaaatatgtaactctctttggcaaaatatttatctattttttattaattctttcttaattatttaaattttgattagttcaattaataaattttatgcatgttcgatataattgagggccactcaaatataactatcatcttatgctcatacattttggttccaagggatagaacatataaataatgttagtacgtaaactataaaaaagaaaatgcatgtcatgagacggcttgatgttttatctgaaaccggggtgaatggagacttgtgggaagttttgtgcc

SEQ ID NO: 9283 - DNA, 375 bp, Glycine max
  Clone ID: LIB3039-034-Q1-E1-C11
ggtggtggggtgtgcagaagagcgtcgcagttgtaaccctaatcagaagaagcgcagcttcaagcgagtgacagccaccagccatgggtcgtatgcacagccgcggtaagggtatatcctcttctgctttgccctacaaaaggacacctcctagctggctcaagatctcttcgcaagatgtcgaagaaaatatctgcaagtttgcgaagaaaggtttgaccccgtctcagattggtgtcattctcagagattctcacggtattgctcaggtcaatagcgtcactggcagcaaaatccttcgcatcctcaaagctcacggacttgcgcctgaaattccagaggatctgtaccatttgattaagaaggcagtttcaa

SEQ ID NO: 9284 - DNA, 187 bp, Glycine max
  Clone ID: LIB3039-034-Q1-E1-C12
ggtggtggtgtgtgtacagccgcgtcacggttgcacttctaatctgcagacacggatcttcagttctgcgactgacagtattgtaggtttggtatgcatagccgtatgtatggctcattctcttcagatttgcctaacttttagaaactccttctcaggtacataatttcttctcatgatatctaat

SEQ ID NO: 9285 - DNA, 374 bp, Glycine max
  Clone ID: LIB3039-034-Q1-E1-C2
gcacaagtgagtttgttgatcgagataactagaaacagtgtgatgaaaatgaaggtccttgttttcttcgttgctacaattttggtagcatggcaatgccatgcgtacgatatgttccctctccgaatgaacactggctatggtgcccgtactccggaggtgaaatgcgcaagttggaggcttgctgtggaagcacacaacatctttggctttgagaccattcctgaagagtgcgttgaagcaacaaaggaatacatccatggcgaacaatatagattagactccagaacagttaaccaacaagcttacttttaatgcagagacctcgaagtccatcgcaaggacacatttgtgttcagtagagatggcaccgt

SEQ ID NO: 9286 - DNA, 358 bp, Glycine max
  Clone ID: LIB3039-034-Q1-E1-C4
gcacaagtgagtttgttgatcgacataactagaaacactgtgatgaaaatgaaggtccttgttttcttcgttgctacaattttggtagcatggcaatgccatgcgtacgatatgttccctctccgaatgaacactggctatggtgcccgtactccggaggtgaaatgcgcaagttggaggcttgctgtggaggcacacaacatctttggctttgagaccattcctgaagagtgcgttgaagcagcagaggaatacatccatggcgaacactatagatcagactccagaacagttaaccaacaagcttacttttatgccagagacctcgaagtccatcccaaggacacatttgtgttca

SEQ ID NO: 9287 - DNA, 351 bp, Glycine max
  Clone ID: LIB3039-034-Q1-E1-C5
ggaacctttgcattctagtcattcaagattcagcaagtgcgttttggaagcagagaccgaaatacttccagatggcccgtacaaagcaaactgctcgtaagtcaactggaagaaaagctcccaagaagcaacttgcaaccaaggctgcacgtaagtctgcaccaacaactggtggtgtgaagaagcctcatcgttatcgccctggaactgttgctcttcgtgagattaggaaataccaaaagagcactgaactcctaatcaggaagcttcctttccagaggttggttcgtgaaattgcccaggatttcaagactgatctgcgtttccagagccatgctgtgcttgcattgc

SEQ ID NO: 9288 - DNA, 336 bp, Glycine max
  Clone ID: LIB3039-034-Q1-E1-C6
ggtgctctgctcgtgcctctagggttatcatttctccatttccattttctctctcacttttcacgaatcgtaagctatgggaaagtcttactcaactgtgagtgctgattaccacaacgccgttgagaacgctaagaagaagctcagaggcctcatcgctgagaagagatgcgctcctcgaatgctcctttgggcatggcactctgctggaacctttgacaagggcactaacactggtgtatccttcggaagcatcgagcaccctcccgaactggctcagatcgctaacaacggtcttgacatcgctgttacgcttttggagccactcaaggcgga

SEQ ID NO: 9289 - DNA, 376 bp, Glycine max
  Clone ID: LIB3039-034-Q1-E1-C7
ggccgatacgaagccagctgtttcactcttttctctctttccctttctattatctctccaacttcactccttttattcccttatcacttcttagttctttccttatcctttcgctatccagacatgtaatctctcctttaccaagttttgttttactatttgatcggatcggatcggatcttgctttcgccattaattactcatggagatccgtgccgatgcagataccagctccttttcaagtttgttcgcagctgtgtcatatggatttacatcaatggccatggtttttatcagcaaggctgttcttatgcagtatgcatattcaatgactctcctcactctgcagcaattggttaccaccttgcttattcac

SEQ ID NO: 9290 - DNA, 401 bp, Glycine max
  Clone ID: LIB3039-034-Q1-E1-C8
ggcacaagtgagtttgttgatcgagataactagaaacagtgtgatgaaaatgaaggtccttgttttcttcgttgctacaattttggtagcatggcaatgccatgcgtacgatatgttccctctccgaatgaacactggctatggtgcccgtactccggaggtgaaatgcgcaagttggaggcttgctgtggaagcacacaacatctttggctttgagaccattcctgaagagtgcgttgaagcaacaaaggaatacatccatggcgaacaatatagatcagactccaaaacagttaaccaacaagcttacttttatgccagagacctcgaagtccatcccaaggacacatttgtgttcagtatagatggcaccgtactctctaatattccatactacaaaa

SEQ ID NO: 9291 - DNA, 376 bp, Glycine max
  Clone ID: LIB3039-034-Q1-E1-C9
ggtgcacaagtgagtttgttgatcgagataactagaaacagtgtgatgaaaatgaacgtccttgtcttcttcgttgctacaattttggtatcatggcaatgccatgcgtacgagatgttccctctccgaatgaacactggctatggtgctcgtactccggaggtgaaatgcgcatgttggatgcctgctgtggaagcacacaacatcgttggctttgagaccattcctgaatactgcgttgaagcaacagaggaatacatccatggcgaacaatattgatcagactccacaatagttaaccaacaagcttacttttatgccagagacctcgacgtccatcccaaggacacatttgtgttcagtatagatggcatcg

SEQ ID NO: 9292 - DNA, 368 bp, Glycine max
  Clone ID: LIB3039-034-Q1-E1-D1
ggagaaagtagacacagccatgtccactactggtactgttctggcttccactccaacacaaaggctattaggcaaagtggcattggttactggtggagcgtctggaattggagaaagcattgtgcgcctcttccatatccatggtgctaaaatatgtatagctgatgtgcaagacaaccttggaaagcaggtctgtcagtctcttggtgatgaagcaaatgttgtttttgtccattgtgatgttacagtagaggatgatgtttcccatgcagtggacttcactgtgggtaaatttggcacccttcacatcatagtcaacaatgccggaatttctggatcaccttgttccgatatccgcaatgcagact

SEQ ID NO: 9293 - DNA, 321 bp, Glycine max
  Clone ID: LIB3039-034-Q1-E1-D10
gaccacaccttcaaaccctaaccctagaagaagaaaaaaaccacaaccaccaccatctagggtttttctttttctcatggctagtttgtcaactaggattttcttcatcatgtcccttgtgtgcctggctctcggtccaatggcacaaggggaaatgacatgtggccaggttgtgagcaacctgaccccatgcatctcctatgtggtgtatggtggaaccaatgttcctgaacagtgctgcaatgggataagaaatctctatggcatggctcagaccaaaccaaaccgccaagctgtttgcaactgcatcaagaacggtgt

SEQ ID NO: 9294 - DNA, 380 bp, Glycine max; identical to SEQ ID NO: 7921
  Clone ID: LIB3039-034-Q1-E1-D11

SEQ ID NO: 9295 - DNA, 393 bp, Glycine max; identical to SEQ ID NO: 8734
  Clone ID: LIB3039-034-Q1-E1-D12

SEQ ID NO: 9296 - DNA, 404 bp, Glycine max
  unsure (1)..(404): unsure at all n locations
  Clone ID: LIB3039-034-Q1-E1-D2
ggtgtgtggcacaaaggacgganccgaagaagccgttttcgcatgcctgcaactccacccagtaacaaaggaagaatctctaccctcttcgctttcactcctcgccaagttttgttaagcaagcaaacaatgaagcacaccactgacaatggaacccccatctcggaacacaaagttcttcttcaccaatccattgcccgctacttggaacgcagtggcttctccaaaactctgaaaaaatttctctccgaagcgcatatcgagaaaaacgatttggagggatcaccagttgatctggaagaaatgtgtctcaagtatttagaaatatgtggcaaagatgggaagtcaaatattaatgatcaaaatgagcaagttgcaggtgggcacagcanaaacaaagaaga

SEQ ID NO: 9297 - DNA, 162 bp, Glycine max
  Clone ID: LIB3039-034-Q1-E1-D4
tgggggagtgagagtcagaaaatggaggaatcacgatcagggggtgtgtggtcgtgttgtgccccattgaagatcaccgtggagtcgcgaaggagcaccagctgcaagaaagtcgtgttcgcatccatcatgcgccgcagcagccttcctcgatcgaccctg

SEQ ID NO: 9298 - DNA, 350 bp, Glycine max
  Clone ID: LIB3039-034-Q1-E1-D5
gaacacagagataagaagacagaaagatccaacactcactcttccaacttccactctctctctttccgaccaaaatgtcgatcaacagcgaatcgacgccgccagcggtgatcggaaaaatcgggccttacaccgtcttcatgacgccgccgtctacacccaaacccgccgacgacaagcccgttaccagcaccaagatcgcacctccgccgcctcagattcccaaagccgttccttctcccaaaggcaagccgcgcgccgattccgacgattccgttttcggcttcttcagacacgccgttgccaaggtccaaaccgcccactcaggtttggatgatcaagtggcacgt

SEQ ID NO: 9299 - DNA, 401 bp, Glycine max
  Clone ID: LIB3039-034-Q1-E1-D6
gacttgtaataattcttataacgcaacacaacccatggccaccacctccgcattcctcctccttcccctcctcctgctgctccacctcgccatcgccgctcacggcatcggcatcaactacggcacgctcggcgacaaccttccaccgcccgcggcggtggcgaacttcctgaagacgaagacgaccatcgaccgcgtgaagatctacgacgtgaacccggacatcctgcgggccttcgccggcagcggcatctccgtgacggtgaccgcccccaacggcgacatcgccgccttaaccaaaatcgactcggcgaggcagtgggtggcgacgcacatcaaaccctttcagcctcagaccaaaattaattacatcctcgtcggcagcgaggttctccactggg

SEQ ID NO: 9300 - DNA, 402 bp, Glycine max
  Clone ID: LIB3039-034-Q1-E1-D7
ggcgtgcacaggcgaaaaccctaatcctgaggcactgaaagtgtgatatggcaagagtcatttcctcttcctgcgcacgcctcgcaatgcgcctcttctccagcaccaccacagccaccgcgttcgccgtcactttacccaaaccctcatcactctccctctcatcgcgtcgattcctcttccctctctcccatgccatcgtccctccctccacccgcgtcgccggaatccggggccgcgttaaccgcgccggagactcggcgtactcaccgctgaactcggggtcgtcgtcttcgtcgttcagcgaccgcccccccacggagatggcgccgctcttccccggctgcgactacaaccactggctcatcgtcatggagaatcccggtgttgagggcgccaaca

SEQ ID NO: 9301 - DNA, 397 bp, Glycine max
  Clone ID: LIB3039-034-Q1-E1-D8
ggcacaagtgagtttgttgatcgagataactagaaacagtgtgatgaaaatgaaggtccttgttttcttcgttgctacaattttggtagcatggcaatgccatgcgtacgatatgttccctctccgaatgaacactggctatggtgcccgtactccggaggtgaaatgcgcaagttggaggcttgctgtggaagcacacaacatctttggctttgagaccattcctgaagagtgcgttgaagcaacaaaggaatacatccatggcgaacaatatagatcagactccaaaacagttaaccaacaagcttacttttatgccagagacctcgaagtccatcccaaggacacatttgtgttcagtatagatgggcacgtactctctaatattccatactac

SEQ ID NO: 9302 - DNA, 372 bp, Glycine max
  Clone ID: LIB3039-034-Q1-E1-D9
ggaaagagaattatttggggctgtaagatttgttttgttgtcctcatccttccttccaccatggcgtattctactctttccctctcaatttcaaaagtttgaaacgcaccgtaaaaactaaacgtctaaacgctgcgtctcagttcccatggacgacgaagctattgctaacgctaacggagctccgtcacctccatgtgtcgtttcggtgtctgcactctccggttcccgccgccgcctctcgacgagcttcctggagctgagccgccgccctgtctcgtcgtcggagaagctcaagcctatggcgtggatatctctccagggacggctcctcaacgccgacgaagccagctcggcatcgaacatctgccg

SEQ ID NO: 9303 - DNA, 392 bp, Glycine max
  Clone ID: LIB3039-034-Q1-E1-E1
agggggcacaagtttgttgagatagctagaagcagtaagatgaaaatgaaagtgcttgttttgtttgttgctacagttttggtagcatatgaatgccatggctcagactaccagaagttccctctccaaatgaaaactgggtttggtgggcaatacagcaatgaggtggcatgtgccagttggaggcttggcgtggaagcaaacaacgtagtcaagtggcaaactgttcctgcagcttgcggagagtacatagctgactacgttctaggagaccaatatagatcagattccaaaacagttaaccaacaagcttatttctatgctaaatccctcaaactcaccaacaaagatgtctttgtcttggacgttgacgacactactctctctaatct

SEQ ID NO: 9304 - DNA, 378 bp, Glycine max
  Clone ID: LIB3039-034-Q1-E1-E10
gacgacagaaggggaatctctttcatcataaacaaagattcttctctattctccaactcttttgcttcttcttccaaagtggcatcaaaaactagaagaaaatggggtgtggcaatttgttcttcacagtcctcataaccttctcagtggcactcataacatacaacatcataatctctgccaatgcccctctcaagcaggacttcccaggcccctcacgcccctccatcaaggtggatcccctcatcaagatgccactccacagatcatcatcctcggagaaatcaaaaaagaggttgtttcacactgctgtcactgcctctgattctgtgtacaacacgtggcagtgcagagtgatgtactattggttcaagaagt

SEQ ID NO: 9305 - DNA, 377 bp, Glycine max
  Clone ID: LIB3039-034-Q1-E1-E11
gacaacaaaatttgccaattgccatttcaatcctcagtttctttcttcaacgtttccatcatacacagatcccaatcctctctcaagccctaatttcccctcatttccatggccacagaagagcccactgtcgcggtggaacccgctcccgaacctgcctccgccgatcctcccccggaggagaaggaggagaccaaacctgaagccaaggctaagaagaccaaggagcccaaacctaaaaaggtttccagacctcgcaaccctcccactcatccttccctacgaagagatggttaaagatgcaattacctcgctgaaggagaaaaccggttcgagccaatacgcgattgcgaagttcatcgaagagaagcacaagc

SEQ ID NO: 9306 - DNA, 380 bp, Glycine max
  unsure (1)..(380): unsure at all n locations
  Clone ID: LIB3039-034-Q1-E1-E12
gaagcttctgtgagttgtttttgcaatgtcttgttgaattgatgacatatatagtaatcagtttctttgagttgtttttgaaatgtcttgttgaattttctcgagtgacctaaatattctttctgcgtgctgtcagcgaatgctcaaggctgatggttactttccatcagaaagctggatcagggaaactcaccggtgtatatagaaagtacaatacatggaagtatggctgtgccgcgaaaatagaaccagccctgtttctactggataattaagggaatgcaagtaatcttctagtttctaatgcattgctttggttgttntgagagtttgcttgtgctagaagtttgttttgagagcttcagagacctatcaacaga

SEQ ID NO: 9307 - DNA, 386 bp, Glycine max
  Clone ID: LIB3039-034-Q1-E1-E2
ggcacaagtgagtttgttgatcgagataactagaaacagtgtgatgaaaatgaaggtccttgttttcttcgttgctacaattttggtagcatggcaatgccatgcgtacgatatgttccctctccgaatgaacactggctatggtgcccgtactccggaggtgaaatgcgcaagttggaggcttgctgtggaagcacacaacatctttggctttgagaccattcctgaagagtgcgttgaagcaacaaaggaatacatccatggcgaacaatatagatcagactccaaaacagttaaccaacaagcttacttttatgccagagacctcaaagtccatcccaaggacacatttgtgttcagtatagatggcaccgtactctctaata

SEQ ID NO: 9308 - DNA, 365 bp, Glycine max
  Clone ID: LIB3039-034-Q1-E1-E3
agaaaggggagctttagattcatttccccgacattcagccagagttggaagtaagaaaaaagttgttcgagatggcacgtacgaagcaaactgctcgtaaatccacaggaggaaaggcacctaggaagcagctcgcaaccaaggctgcacgtaagtctgcaccaactactggtggtgtgaagaagccacatcgttatcgtcctggtaccgttgctcttcgtgagattaggaaataccagaagagtaccgagcttttgatcaggaagctccccttccagaggctggttcgtgaaattgctcacgacttcaagactgatctgcgtttccagaaccatgctgtgcttgcattgcaagaagctgcttag

SEQ ID NO: 9309 - DNA, 394 bp, Glycine max
  Clone ID: LIB3039-034-Q1-E1-E4
ggcacaagtgagtttgttgatcgagataactagaaacagtgtgatgaaaatgaaggtccttgttttcttcgttgctacaattttggtagcatggcaatgccatgcgtacgatatgttccctctccgaatgaacactggctatggtgcccgtactccggaggtgaaatgcgcaagttggaggcttgctgtggaagcacacaacatctttggctttgagaccattcctgaagaatgcgttgaagcaacaaaggaatacatccatggcgaacaatatagatcagactccaaaacagttaaccaacaagcttacttttatgccagagacctcgaagtccatcccaagaacacatttgtgttcagtatagatgggcacgtactctctaatattccatac

SEQ ID NO: 9310 - DNA, 323 bp, Glycine max
  Clone ID: LIB3039-034-Q1-E1-E5
ggagaatctggggtgtgttgccattgccagctatgaattagaaggatcaaagctttcccaggagggtcaaagctgtcaaattttaatttcaaggctttttttttttttttccccttccctgtgtttcaccttatagctacatttacacgaaatccacatattaaacacccatataatccttcacttgttcttcctctctattccgttgccgtattctttctctcagaattcaagaaaaactctttctcttctctctagctctccctatatagtcctccctctttattattagagcacatagagaatttctgtacctgttttga

SEQ ID NO: 9311 - DNA, 381 bp, Glycine max
  Clone ID: LIB3039-034-Q1-E1-E6
gaagcacaacatctctatcgagtaaattaactatgaagcctagcctactattatccccttccttcctgcctctctttgctttcctggctctttcagaagatgttgaacaagttgtggacataagtggcaaccccattttcccaggtggcacatattacattatgccatcaacttggggcgctgccggtggtggattgaaactaggccggacaggaaactcaaactgcccagttactgttttgcaagattactcagaaatcttccgtggcacaccagtcaaattcagcatacctgggataagccctggaatcatctttacaggtactccacttgaaatcgagttcgcagagaaaccttattgtgctgaatcctccaaatggg

SEQ ID NO: 9312 - DNA, 410 bp, Glycine max
  Clone ID: LIB3039-034-Q1-E1-E7
aagacgacagaaggggaaggaagagaatggataacatcacagcaagtgaagtagctggtttcggagtgggtgctgtgctcctctgtgccactgttgctgccaccaaagtcgatgctttcttctcttcttctcagcgcagctcattagggatgtgcaagcgatgtggcaatcttaggcgattggcttgctcgacatgcaaaggaactgggtctatcagagaagggggaatacttggtattaaactcgtagaagatttgtttgaaacaattggtaatagtgaaccaaacgtgaagcagatagcatgtgtaaaatgtcaagccaaacgttacttttcatgtcctaattgttctgaactataatcactgtggttttatgttctatacctacaaggatttttgcccaaaacattc

SEQ ID NO: 9313 - DNA, 379 bp, Glycine max
  Clone ID: LIB3039-034-Q1-E1-E8
ggcacaagtgagtttgttgatcgatataactataaacagtgtgatgaaaatgaaggtccttgttttcttcgttgctacaattttggtagcatggcaatgccatgcgtacgatatgttccctctccgaatgaacactggctatggtgcccgtactccggaggtgaaatgcgcaagttggaggcttgctgtggaagcacacaacatctttggctttgagaccattcctgaagagtgcgttgaagcaacaaaggaatacatccatggcgaacaatatagatcagactccaaaacagttaaccaacaagcttacttttatgccagagacctcgaagtccatcccaaggacacatttgtgttcagtatagatgggaacgtactc

SEQ ID NO: 9314 - DNA, 383 bp, Glycine max
  Clone ID: LIB3039-034-Q1-E1-E9
ggttggcttgtgctctgctcgtgcctctagggttatcatatctccatttccatttccgctctctcagtttccaagaatcttaagctatgggaaagtcttacccaaccgtgagcgctgattaccagaaggccgttgagaaggcgaagaagaagctcagaggcttcatcgctgagaagagatgcgctcctctaatgctccgtttggcatggcactctgctggaacttacgacgtgagctcgaagaccggtggtcccttcggaaccataaagcacccctccgaactcgctcacggcgctaacaacggtcttgacatcgctgttaggcttttggagccactcaaagcggagtttcctattttgagctacgccgatttctaccaattg

SEQ ID NO: 9315 - DNA, 413 bp, Glycine max
  Clone ID: LIB3039-034-Q1-E1-F1
caaaaaggggaattcccaaaatcccaataactctctctctctgtgtcgctttcaccgaaagaataacttgactttcgcgaactccacctgagaaaaagatacccttaattcgcaggcgcgtcttgtgttggacaacaaccacaagatgattaacttcgaagaaaccgagttgcgactcggcctccctggcaacgactcagcactcaagggaagtgctgccaagagaggcttctctgaaactgcttctgttgatttgaagcttaatctttcttcctgcattaacgactctgcctcggattcaccctcatctatgtctacagagaagcccaaagagaacgagactaccactgctgaacctcctccagctaatgatccagcaaaaacacctgcaaaggcacaaatggtgggttggc

SEQ ID NO: 9316 - DNA, 391 bp, Glycine max
  unsure (1)..(391): unsure at all n locations
  Clone ID: LIB3039-034-Q1-E1-F10
gtgacaaatctgcttgctaccatcttgatcttcctaattgtgatatacttccaaggatttcgtgtggttttgcctgtgagatcaaagaatgcccgtggacagcaggggtcttatccaatcaagttattttatacctccaacatgcccattattcttcagtctgcccttgtttccaatctctacttcatttctcagcttctacgcagaaagtacagtggaaacttcattgtagatctattgggcaaatggaaggagtctgaatatggaggtggtcagtctgttcctgttggtggtattgcatactacatcactgcaccttccagcttagctgatatggcagccagtcctttcgatgcantattctaccttgtgtttatgttgtcagcctgtg

SEQ ID NO: 9317 - DNA, 376 bp, Glycine max
  Clone ID: LIB3039-034-Q1-E1-F11
ggtagtagtataaatgcatctagcagcaagtgttgaatacgagtagcgatggagaagaagaagggtgagctaaagtcaattttccttcctttcctttccactagtcacataatcccgctagtggacatggccagactcttcgccttgcacgacgtcgacgtcaccatcatcaccaccgcacatatcgccaccgttttccaaaagtccatcgatttagatgcgagtcgcggtcgccccatcagaacgcacgttgtcaacttccccgccgcacaagtgggtctccccgttgggatcgaacccttcaacgtcgatacgcctcgggaaatgacccccagaatctacatgggcctatcccttctccaacaagtcttcgaaa

SEQ ID NO: 9318 - DNA, 273 bp, Glycine max
  Clone ID: LIB3039-034-Q1-E1-F12
ggcacaagtgagtttgttgatcgagataactagaaacagtgtgatgaaaatgaaggtccttgttttcttcgttgctacaattttggtagcatggcaatgccatgcgtacgatatgttccctctccgaatgaacactggctatggtgcccgtactccggaggtgaaatgcgcaagttggaagcttgctgtggaagcacacaacatctttggctttgagaccattcctgaagagtgcgttgaagcaacaaaggaatacatccatggcgaacaata

SEQ ID NO: 9319 - DNA, 364 bp, Glycine max
  Clone ID: LIB3039-034-Q1-E1-F2
gacgttcacattcaggaatcgttttcttcagaaatttgccatcgttgagagaagcgtgagagccttagtcgttcaagatgagagctaagtggaagaagaagcgcatgaggaggttgaagaggaagcgccgaaagatgagacaaagatctaagtaggtgcttgagcaggagttgagatgagctttccatctgctaccagcctcatgacattttaggctgttatggctcttatgatcttgaggtctaatcgctaggggagcttcactcttgacttagtttgctttactggtcctggtcctggtccaagactattgagtgtgggttaagttgtgatgtttagtgttttgtggtatctaaatatgtac

SEQ ID NO: 9320 - DNA, 271 bp, Glycine max
  Clone ID: LIB3039-034-Q1-E1-F3
gggtgtgtcactcaaacattgtttgttgtaggaagaggaatcttgacaaatggcaagggacagcaatagcaagattctgttcatcggatggactggttacatcggacaattcatcgtggaagccagctccaaagctggccacccaacattccttttggtgatggagtccactctctccatccccgcagaatcacccctcatcaacaatttcaaacgcctccgtgtcaatcttgttttaggagatctatacgatcaccaaagtttggtgagt

SEQ ID NO: 9321 - DNA, 396 bp, Glycine max
  Clone ID: LIB3039-034-Q1-E1-F4
tcaggcaaaaaaacaacaaaagggaaaccaaaaccctaatccctctttcttcctcttcctcagtattgcaattttcaattctcttctctgcaactatgcctaaccctaaggtcttcttcaacatgaccatcggcggtcaacctgccggccgcatcgtgatggagctctacgccgacgtgactccgagcaccgccgagaacttccgcgcgctctgcaccggcgagaagggcgccgggcggagcggcaagcccctccactacaaaggctcgtccttccaccgcgtgatcccgaacttcatgtgccagggcggcgacttcaccgccggaaacggcaccggaggcgagtcgatctacggcgccaaatttccccaacagaacttcgtgaagaagcacactg

SEQ ID NO: 9322 - DNA, 395 bp, Glycine max
  Clone ID: LIB3039-034-Q1-E1-F5
gacaagtgagtttgttgatcgagataactagaaacagtgtgatgaaaatgaaggtccttgttttcttcgttgctacaattttggtagcatggcaatgccatgcgtacgatatgttccctctccgaatgaacactggctatggtgcccgtactccggaggtgaaatgcgcaagttggaggcttgctgtggaagcacacaacatctttggctttgagaccattcctgaagagtgcgttgaagcaacaaaggaatacatccatggcgaacaatatagatcagactccaaaacagttaaccaacaagcttacttttatgccagagacctcgaagtcgatcccaaggacacatttgtgttcagtatagatggcaccgtactctctaatattccatactac

SEQ ID NO: 9323 - DNA, 300 bp, Glycine max
  Clone ID: LIB3039-034-Q1-E1-F6
ggttctcacaccatatatagcaataatctagtttatactatacctacattttgataattttctttgtaattgatagccatggctacacgtggaaagcttgacgttgacattgatctcaactccaacgcatacaagtattggcatacgcgtatgaattcgactgaaaaatacgctaccgccttccaacatgatcacaacatcattcacgttcatgacgctgatggtcattctcctgactctatccgccagattcgttctggtgaaagttcaccacatgtgacctcatcctttgccaagact

SEQ ID NO: 9324 - DNA, 397 bp, Glycine max
  Clone ID: LIB3039-034-Q1-E1-F7
ggcacaagtgagtttgttgatcgagataactagaaacagtgtgatgaaaatgaaggtccttgttttcttcgttgctacaattttggtagcatggcaatgccatgcgtacgatatgttccctctccgaatgaacactggctatggtgcccgtactccggaggtgaaatgcgcaagttggaggcttgctgtggaagcacacaacatctttggctttgagaccattcctgaagagtgcgttgaagcaacaaaggaatacatccatggcgaacaatatagatcagactccaaaacagttaaccaacaagcttacttttatgccagagacctcgaagtcgatcccaaggacacatttgtgttcagtatagatggcaccgtactctctaatattcaatactac

SEQ ID NO: 9325 - DNA, 395 bp, Glycine max
  Clone ID: LIB3039-034-Q1-E1-F8
gaggtgaatgtgaaggtgatgatggaattggaagtcgacgagaacgacttgaaagccgccggtgctgagctcttcgtcgacggtggtcggcgcggcattcgcatcaatggctgggtgatcgagactcggaggcactccatactcaactcttccacactccaggagtgggaacagaatctcgatacgtctcatttaccagaaatggtttttggggaaaacactttgattctaaaacacttgagcagtggcacgaacattcattttaatgcatttgatgctctacgtggctggaaacaggaagcattgccgccagttgaagttcctgcggcggctacatggaaatgttagagcaagctctctcagcaagtaatacttgattacgactatacatttac

SEQ ID NO: 9326 - DNA, 399 bp, Glycine max
  Clone ID: LIB3039-032-Q1-E1-G8
ggcacaagtttgttgagatatctagaagcaataagatgatgatgaaagtgcttgtgttgtttgttgctacagttttggtagcatatgaatgccatggctcaaactaccagaagttccctctccaaatgaaaactgggtttggtgggcactacagcaatgaggtggcatgtgccagttggaggcttggcgtggaagcaaacaacgtagtcaagtggcaaactgttcctgcagcttgcggagagtacatagctgactacgttctaggagaccaatatagatcagattccaaaacagttaaccaacaagcttatttctatgctaaatccctcaaactcaccaacagggatgtctttgtcttagtcgttgacgacactactctctctaatctccagtattttg

SEQ ID NO: 9327 - DNA, 190 bp, Glycine max
  Clone ID: LIB3039-031-Q1-E1-A2
gggataatgatgatactgataatgagattgatgatttggatgcgaagatttaaaatggtcgtaatgttcaatacggggagactagaaatgggattgaactgaatgatgaagatgagtttactgatgcctcacatgtgaaagaatgcgaataggcccgtgtgtctgttagctttgatgaggattgcaatga

SEQ ID NO: 9328 - DNA, 376 bp, Glycine max
  Clone ID: LIB3039-031-Q1-E1-A3
cagaaggggactcacacctaccttgacacattttaaatgtagccactactaactttatcataccactcactcttacatcattgtccctaaatggcggaaaccctgatccaaatcggcgtggttgggtgcgccgacatagcccggaaggtctcccgcgccatcacgctcgcccccaacgccgccctctgcgccgtggcgagccgctctcacgacaaggcagccgcattcgccgccgccaacggcttccctctctcagccaaagtgtacggctcctacgagtcccttctggaggaccccgacgtggacgccgtctacatgccactccccaccagcctccatcttcactgggccgtgctcgcggcccagaacaagaaac

SEQ ID NO: 9329 - DNA, 298 bp, Glycine max
  unsure (1)..(298): unsure at all n locations
  Clone ID: LIB3039-031-Q1-E1-A4
aggggattangggttgtcattagcacttcttcttttcacactgccgctgcaacaatggcttcagagaagaaactttcgaacccaatgatggagataaaagtgcagaagctcgttctcaatatctctgttggcgagagtggagatcgtctcaccagagccgccaaggtgctggaacaacttagtggccaaaccccagtgttttccaaagcaaggtacactgttcgttcctttgggagtagaagaaatgagaagattgcatgctatgtcactgtcagaggtgacaaggcaatgcaacttt

SEQ ID NO: 9330 - DNA, 383 bp, Glycine max
  unsure (1)..(383): unsure at all n locations
  Clone ID: LIB3039-031-Q1-E1-A5
ggttgagatctgaatcaaaatcagaaacgataatggctacaccggaccacctcttcaacctccgcaacaacttctacctcggcgcttaccaagccgccatcaacagcagcgacgttgccaacctctcccaagaagataccctcgagcgcgacaccctcgtccaccgctgctacatcgccctcggccagctccagttcgtcatctccgagatccacgacgatgctcccacaccactccaagccgtcaaactcctcgccctctatttctcctctcccgacaccaaggattccgccatcgcgagtctcaaggagtggctcgccgattccgctattggaaacaacgccacgctgaggctcgtccgcggtctcgtcntcctccacgag

SEQ ID NO: 9331 - DNA, 90 bp, Glycine max
  Clone ID: LIB3039-031-Q1-E1-A6
ggcacaagtttgttgagatagctagaagcaataagatgaaaatgaaagtgcttgttttgtttgttgctacagttttggtagcatatgaat

SEQ ID NO: 9332 - DNA, 369 bp, Glycine max
  unsure (1)..(369): unsure at all n locations
  Clone ID: LIB3039-031-Q1-E1-A7
gacacaccgtttgttctattcttaactcaacttctgctacccactctcttcttccaagtccaaccacgcttttctctacagtcatgggcaaggtcaagatcggaatcaacggatttggaagaattggccgtttggttgccagagtcgctctgcaaagagacgatgtggagctcgttgccgttaacgaccctttcattaccaccgattacatgacatacatgtttaaatacgacagtgttcacggacactggaagcatcacgatgtcaccgttaaggacgagaagacccttctcttcggtgacaagccagtcactgtttttggacacaggaaccctgaagagatccatggnggtcaactggagctgatat

SEQ ID NO: 9333 - DNA, 376 bp, Glycine max
  unsure (1)..(376): unsure at all n locations
  Clone ID: LIB3039-031-Q1-E1-A8
tgaatcaaacgagtttgtgggagataaagttgcctatgcacttcaacaaggtctaaaagttattgcatgcattggggagactctcgaacagcgtgaagctggtacaacaacggctgttgtttctgagcaaacaaaagcaattgcagctaaaatatcaaattgggacaatgttgttttggcctacgagccagtttgggccattggaacaggaaaggttgctactcctgctcaggctcaagaggtccatgctgatttgaggaaatgggttcatgacaatgtgagtgccgaagttgctgcatctgtaagaattatctatggaggttctgtaaatggaaganactgcaaaaaattggccgcacagcccgatgttgatgga

SEQ ID NO: 9334 - DNA, 351 bp, Glycine max
  Clone ID: LIB3039-031-Q1-E1-A9
ggtgcacaagtgagtttgttgatcgagataactagaaacagtgtgatgaaaatgaaggtccttgttttcttcgttgctacaattttggtagcatggcaatgccatgcgtacgatatgttccctctccgaatgaacactggctatggtgcccgtactccggaggtgaaatgcgcaagttggaggcttgctgtggaagcacacaacatctttggctttgagaccattcctgaagagtgcgttgaagcaacaaaggaatacatccatggcgaacaatatagatcagactccaaaacagttaaccaacaagcttacttttatgccagagacctcgaagtccatcccaaggacaca

SEQ ID NO: 9335 - DNA, 355 bp, Glycine max
  Clone ID: LIB3039-031-Q1-E1-B1
ggtgcacaagtgagtttgttgatcgagataactagaaacagtgtgatgaaaatgaaagtccttgttttcttcgttgctacaattttggtagcatggcaatgccatgcgtacgatatgttccctctccgaatgaacactggctatggtgcccgtactccggaggtgaaatgcgcaagttggatgcttgctgtggaagcacacaacatctttggctttgagaccattcctgaagagtgcgttgaagcaacaaaggaatacatccatggcgaacaatatagatcagactccaaaacagttaaccaacaagcttacttttatgccagagacctcgaagtccatcccaaggacacatttg

SEQ ID NO: 9336 - DNA, 356 bp, Glycine max
  Clone ID: LIB3039-031-Q1-E1-B10
agaagttgcaagaacttgctgatcagccagctaataatcaacggttaattctacctgttactggagaagtattagaagactctaagactctggcagatcaaaaggttgaaaatgatgctgtcgttgcactgaccttgagaaaagatgataatgagtttgaggaggtcaacattgtccggccaaatgatttctaccaagctcgggatgcggatggtgccaattggtaaagccatactccaacaatggctggctcacagttaatggtggtatgatgaaatccatagtggctcagaaaacattttcaaacgattgatgaaatgacatgcttgtatgtataatactgaatttattgcctt

SEQ ID NO: 9337 - DNA, 371 bp, Glycine max
  Clone ID: LIB3039-031-Q1-E1-B11
gactctgcgaaggtgcaacctgacagcctccaaatccaatggcttcagagaagaaactttcgaacccaatgagggagataaaagtgcagaagctcgtcctcaatatctctgttggcgagagtggagatcgtctcaccagagccgccaaggtgttggaacaacttagtggccaaaccccagtgttttccaaagcacggtacaccgttcgttcctttgggattagaagaaatgagaagattgcatgctatgtcactgtcagaggtgacaaggcaatgcaacttttggagagtggtttgaaggtgaaggaatatgaacttcttagaaggaacttcagtgatactggttgcttcggctttggtattcaagagcat

SEQ ID NO: 9338 - DNA, 348 bp, Glycine max
  Clone ID: LIB3039-031-Q1-E1-B12
aaaaaaatgtcaatggacatgatggcaaccgaacgtgtttgttatgttcactgcaacttctgcaacaccactctagcggttagtgttccatgcagcagtttgctcaccatagttacggttagatgtggacattgtgccaatttgctgacagttaacatgggagcatcacttcaaacttttccttctcaagacactactcagcgattttctaccgttggtaagttacagagacagcatctcagtgttcaagaagcatgcagcaaggaactaggatcatcatcaaagtgcaaaacatttgagaccgtagaccatgatcagcaacctacgattcctcctattcgtccttct

SEQ ID NO: 9339 - DNA, 367 bp, Glycine max
  Clone ID: LIB3039-031-Q1-E1-B2
gggcgaggaagccacatatagacacaatacagagtgagttgttgctccttcgccacagctctctgccaacatgggtatctccagagattctatgcacaagaggcgtgccactggtggcaagaagaacgcctggaggaaaaagagaaagtatgagcttggtcgccagcctgctaacactaagctgtcaagcaacaagacagtcaggaggattcgtgttagaggtggaaatgtgaaatggatggcatttgagattggatactggaaattactcctggggaagttaagctgtaactcgcaagactcgtgtactagatgtgggttacaatgcctcaaacaatgagcttgtgcgtactcagaatcttgtcaa

SEQ ID NO: 9340 - DNA, 385 bp, Glycine max
  Clone ID: LIB3039-031-Q1-E1-B3
agggggacaagttaatttgttgattgaaaatactaaaaacaatgtgatgaaaatgaaaggccttgttttcctcgttgctaaaattttggtaacaaggcaatgccatgcgtacgatatgttccctctccgaatgaacactggctatggtgcccgtactccggaggtgaaatgcgcaagtttgaggcgtgctgtggaagcacacaacatcttttgctttgagaccattcctgaatagtgcgttgaagcaacaaatgaatacatccatggcgaacaatatagatcagactccaaaacagttaaacaacaagcttacatttatgccagagacctcgaagtctatcccaaggacacatttgtgttcagtatagatggcaacgtactctct

SEQ ID NO: 9341 - DNA, 344 bp, Glycine max
  Clone ID: LIB3039-031-Q1-E1-B4
aggcatgccactttggtcagagatatttttatttttagacatcatcactaacgatcagccctctatatatatacagcctgcacaacctcattaggaaccccccattactcacttttcatccttcgatcatacacttagttgcttccaattaagatggttctgctagagaagctctgggatgatgttgtggctggccctcaacctgagcgtggccttggcaagctcagaaaactcaccaccctcaaaagtattgatgaaggagaaagtaacaagctgcagaagacgttgtcgatgccgtcgacaccaacaaccccgatgactccgacgactccaacgacaccggg

SEQ ID NO: 9342 - DNA, 383 bp, Glycine max
  unsure (1)..(383): unsure at all n locations
  Clone ID: LIB3039-031-Q1-E1-B6
ggcacaagtttgttgagatagctagaagcaataagatgaaaatgaaagtgcttgttttgtttgttgctacagttttggtagcatatgaatgccatggctcagactaccagaagttccctctccaaatgaaaactgggtttggtgggcaatacagcaatgaggtggcatgtgccagttggaggcttggcgtggaagcaaacaacgtagtcaagtggcaaactgttcctgcagcttgcggagatgtacatagctgactacgttctangagaccaatatagatcagattccaaaacagttaaccaacaagcttatttctatgctaaatccctcaaaactcacaacanagatgtctttgtcttggacgttgacgacactactctctc

SEQ ID NO: 9343 - DNA, 347 bp, Glycine max
  Clone ID: LIB3039-031-Q1-E1-B7
gagggttttgcgctgttgttgctgctcatcctccgtaacctccgagctctgcaccgatgaacgaagccatggggaagacacatggaatgggatctgctcgcaagctcaagtcccaccgcatgaggcacaggtgggctgacaagtcatacaggaaatcacatcttggaaatgaatggcagaaaccttttgctggttcatcccatgccaagggaattgtccttgacaagataggtattgaggctaagcagcccaactctgccattcgtaagtgtgccagggttcaacttatcaagaatgggaagaagattgccgcttttgtccctaatgacagttgcttgaactacatt

SEQ ID NO: 9344 - DNA, 340 bp, Glycine max
  Clone ID: LIB3039-031-Q1-E1-B8
gactctgcgaaggtgcaacctgacagcctccaaatccaatggcttcagagaagaaactttcgaacccaatgagggagataaaagtgcagaagctcgtcctcaatatctctgttggcgagagtggagatcgtctcaccagagccgccaaggtgttggaacaacttagtggccaaaccccagtgttttccaaagcacggtacaccgttcgttcctttgggattagaagaaatgagaagattgcatgctatgtcactgtcagaggtgacaaggcaatgcaacttttggagagtggtttgaaggtgaaggaatatgaacttcttagaaggaacttcagtgatac

SEQ ID NO: 9345 - DNA, 374 bp, Glycine max
  Clone ID: LIB3039-031-Q1-E1-B9
agagaagttattagggtttttgagtgcggcggtccaaacactcttctctgcagcttttgcctacaactcccttcaccatggctgaacaaaccgagaaagcttttctgaagcaaccaaaagtgtttctcagcacaaagaagactgggaagggaaagagacctggaaaaggtgggaaccgcttttggaagtccattgggcttggatttaagactcccagggaagccatcgaaggaacctatattgacaagaagtgccccttcactggtaatgtttccatccgtggccgtatcttggctggaacatgtcacagtgctaagatgaacaggactattattgttagaaggaattatctccattttatcaagaagtaccag

SEQ ID NO: 9346 - DNA, 358 bp, Glycine max; identical to SEQ ID NO: 7611
  Clone ID: LIB3039-031-Q1-E1-C1

SEQ ID NO: 9347 - DNA, 381 bp, Glycine max
  Clone ID: LIB3039-031-Q1-E1-C10
cccacgcgtccgagacgacagaagggggcacaagtgagtttgttgatcgagataactagaaacagtgtgatgaaaatgaaggtccttgtcttcttcgttgctacaattttggtagcatggcaatgccatgcgtacgatatgttccctctccgaatgaacactggctatggtgcccgtactccggaggtgaaatgcgcaagttggaggcttgctgtggaagcacacaacatctttggctttgagaccattcctgaagagtgcgttgaagcaacaaaggaatacatccatggcgaacaatatagatcagactccaaaacagttaaccaacaagcttacttttatgccagagacctcgaagtccatcgcaaggacacatttgtg

SEQ ID NO: 9348 - DNA, 369 bp, Glycine max
  Clone ID: LIB3039-031-Q1-E1-C11
gggggtttgtttcacttcagatttggttaattagggttccgttggcgcgagctaagaacgaaggaagtcgaagcagtaaaacccaatcaaagaccctcactctcagcccactcttcacgtaagtgaaacagatctgtaattacaagaagcttagatttgacacaagcaggcacaatggacagcatagttgattctctgaataatgcctatcaagattttgttgctgcagcagctaatgtgttagaagccaaagaaaatgctggttccattaaaacaatggcaacagatactgctctagaaaactttaagcagaagtgggaattgtttagagtagcatgtgatcaagctgaggagtttgtggagtctgtg

SEQ ID NO: 9349 - DNA, 367 bp, Glycine max
  Clone ID: LIB3039-031-Q1-E1-C12
gattctcccaaactaacaaacaaatcccagggagccaccaaccatggcttccaagctctgcgactcatgcaaatcagccactgctaccttgtactgccgccccgacgcggccttcctctgcggcgcctgtgactctaaggttcatgccgccaacaagctcgcatcgcgccacccgcgcgtcgtgctctgcgaggtgtgcgagcaggcgcccgcgcatgtgacctgtaaagccgacgccgccgcgctctgccttgcctgcgatcgcgatatccactccgccaaccccctcgccagccgccacgagcgcatccccgtcacgccgttcttcgagtccgtacattcagtcaaggcctcctcgccgatcaac

SEQ ID NO: 9350 - DNA, 315 bp, Glycine max
  unsure (1)..(315): unsure at all n locations
  Clone ID: LIB3039-031-Q1-E1-C2
gggcttccatctctcaaaagctcaaccacttgccatggcagcagcagcgtcaatgtgtatgagcttcaacctggcaacagcattcaagggtctctctttttcttcttcctcctcatcgttcttcgctggaagtggtagttattctctccgcgcgggtcccacctcggtggtgtcgctgccccggcgctgcccgctgaccatatagaacgcccacaagaaaggggctggcagcatgaanaacggacgcgactcgcaaggcaagcgtctcggagtcaagatatactgcgaccaggtcgccaagcccggctccatcat

SEQ ID NO: 9351 - DNA, 384 bp, Glycine max
  Clone ID: LIB3039-031-Q1-E1-C4
gaaggtgcaagagtttgttgtgagctataagctagtttatcgtgaggagaatatgaagttgtttgttttctttgttgctgcagtagttttggtagcatggccatgccatggcgcatgctaccaaaggttccctctccgaatgaaaactggctatggtgagcgttcttcggaggtaaaatgcgcaagttttaggcttgcttgtggaagcacacaacatccgagcctttaaaaccattcctgaagagtgcgttgaaccaacaaaggactacattaatggcgaacaatttagatcagactctaaaacagttaaccaacaagctttcttttatgctagtgaacgcgaagtccatcacaacgacataattatattcggcataaataaca

SEQ ID NO: 9352 - DNA, 375 bp, Glycine max
  Clone ID: LIB3039-031-Q1-E1-C5
ggcggcacaaagcattcactgtgtcggaaaaagaagaagagaaaaaagatgagcgacggaggaaaacgacaaggtggaagagcgttgccgccgccgccaagaggccctccgcctcctcccccctctcgccctcgcctcgaacccgtcgatcgcgaaaagacatgtccgttactgctgcgagtgttcactaagattgggagtcaccattccatggaagactttgccgtcagaggcaaagagcccaaagacgaggttcagatttacacctggaaggacgctactctccgagaactcaccgatcttgtcaaagaagttgctccggctgcaaggagaagaaacgccaaactctccttcgcctttgtattccccgacaaa

SEQ ID NO: 9353 - DNA, 363 bp, Glycine max
  Clone ID: LIB3039-031-Q1-E1-C6
gaattgcaatcaaattagttcattctctttgcgcagttccctacctctcctttcaagatgcagatcttcgtcaagaccctcaccggaaagaccatcacccttgaggtggaaagctctgacaccatcgacaacgtcaaggccaagatccaggacaaggaaggaattcccccggatcagcaacgtctgatcttcgccggaaagcagctcgaggacggccgtaccctcgccgacgacaacatccagaaggagtcaacccttcaccttgtccttcgtctccgtggtggcatgcagatcttcgtcaagactctcactggcaaaaccataaccctagaggtcgaaagctctggacacattgacaacgtc

SEQ ID NO: 9354 - DNA, 380 bp, Glycine max
  unsure (1)..(380): unsure at all n locations
  Clone ID: LIB3039-031-Q1-E1-C7
gagcatatatatcaataatctattttatactatacctacattttgataattttctttgtagttgatagccatggctacccgtggaaagcttgaggttgacattgatctcaagtccaacgcagacaagtactggcaaacccttaggaattctactgaaatattccctaaggccttcccacatgattacaaaagcattgaggttcttgagggtgatggcaagtctcctggttctatccgccacataagttatggtgaaggttcaccacttgtgaaatcatcctttgagaagattgaggctgttgatgacgaaaagaaggtagtgtcgtacactatcattgatggggaactcctccagcactacannacaatcaagggagaca

SEQ ID NO: 9355 - DNA, 152 bp, Glycine max
  Clone ID: LIB3039-031-Q1-E1-C8
ggcacaattgagtttgttgctcgagataactagaaccactgtgaggaaaatgacggtccttgttttcgtcgttgcggcaggtttggtatcatgggaatgcgatgcgtacgatatgtgctctctccgactgacggcaggtcatggggcccgta

SEQ ID NO: 9356 - DNA, 359 bp, Glycine max
  Clone ID: LIB3039-031-Q1-E1-C9
gacaagtttgttgagatagctagaagcactaagatgaatatgaaagtgcttgttgtgtttgtcgccacagttttggtaacatatgaatgccatggctcacactaccagaagttccctctccaactgaaaactgggtttggtgggcactatagcactgaggtggcatgtgccagttggaggcttggcgtggaagcaaacaacgtactctagtggcaaactgttcctgcagcttgcggagagtacatagctgactacgttctaggagaccaatatagatcagattccaaaacagttaaccaacaagcttacttctatgctaaatccctcaaactcaccaccaaagatgtctttgtcttgga

SEQ ID NO: 9357 - DNA, 376 bp, Glycine max
  unsure (1)..(376): unsure at all n locations
  Clone ID: LIB3039-031-Q1-E1-D1
ggcacaagtttgttgagatagctagaagcaataagatgaaaatgaaagtgcttgttttgtttgttgctacagttttggtagcatatgaatgccatggctcagactaccagaagttccctctccaaatgaaaactgggtttggtgggcaatacagcaatgaggtggcatgtgccagttggaggcttggcgtggaagcaaacaacgtagtcaagtggcaaactgttcctgcagcttgcggagagtacatagctgactacgttctangagaccaatatagatcagattccaaaacagttaaccaacaagcttatttctatgctaaatccctcaaactcnacaacaaagatgtctttggcttggacgttgacgacactac

SEQ ID NO: 9358 - DNA, 367 bp, Glycine max
  Clone ID: LIB3039-031-Q1-E1-D10
gataacacaaacacaaattacatagcctcagtaatctgagagagaaacaaaaacaatgaaggtttccattgccaagttccactcccttcccctatgttttttccttctcttggccttcaacacaaaacccctcctagcagcagaaccagagccagtggttgataagcaagggaaccctttggagccaggagtagggtactacgtgtggccactttgggctgatgaaggaggcctcacactaggccaaacaaggaacaagacatgccctctttatgttatccgtgacccttcattcattggcaccccagtttcattcttagcaccaggccttgaccatgttccaacactcactgatctaaccattgat

SEQ ID NO: 9359 - DNA, 368 bp, Glycine max
  Clone ID: LIB3039-031-Q1-E1-D11
ggcacaagtgagtttgttgatcgagataactagaaacagtgtgatgaaaatgaaggtccttgttttcttcgttgctgcaattttggtagcatggcaatgccatgcgtacgatatgttccctctccgaatgaacactggctatggtgcccgtactccggaggtgaaatgcgcaagttggaggcttgctgtggaagcacacaacatctttggctttgagaccattcctgaagagtgcgttgaagcaacaaaggaatacatccatggcgaacaatatagatcagactccaaaacagttaaccaacaagcttacttttatgccagagacctcgaagtccatcccaaggacacatttgtgttcagtatagatg

SEQ ID NO: 9360 - DNA, 370 bp, Glycine max
  Clone ID: LIB3039-031-Q1-E1-D12
gatccctgtgccacctagtttcggagtttcaacattcaacaatggtacctcaagctttgtcagtgcctgcgagttccaacttgggtaacgcttctcgcaacaaaagtccctcccaactcgtattttctcaaagaaacccgtgctcgatagcttcctccttgccaaacccatatggccattcatcggaagttgggttatcaagtaaaagccgtggctttcctttaaaacatgatgagaaaaatatccatggtgctagtacaagttatggtgcaattgaagccaaggggaatccgccgataactccagcagtgatgactcctggaggacctcttgatctcacatctgttttgttcaggaatcgtatgatctt

SEQ ID NO: 9361 - DNA, 309 bp, Glycine max
  Clone ID: LIB3039-031-Q1-E1-D2
gatctggcagcagaagaacaagtagttgagaactaagaaggagaagcaaatggcttcctcaatgatctcttccccagctgttaccactgtcaaccgtgccggtgccggcatggttgctccattcactggcctcaggtccatggctggcttccccaccagaaagaccaacaatgacattacctccattgctagcaacggtgtgaagagtgcaatgcatgcaggtgtggccaccagttggcaagaagatgtttgagactctttcctacctgccagaccttgatgatgcacaattggcaaaggaagtagaat

SEQ ID NO: 9362 - DNA, 362 bp, Glycine max
  Clone ID: LIB3039-031-Q1-E1-D3
agggggagctgagtttctgtaatgtgttttggctgtggacaatggctctgtcttctgggcttttcttgtgttcttcttcccgtgttctcccaccaccagaaacccacactttcatgaggaccaggccttcttctgctgccttgcgcaccatttccgttagctgttgcaccgtctctcagtcgtctaagccagcccgcaaaatccgtggtatcatgaaaccccgcaaagtctcccccgagatggaagacctcgtcggcgctcccgagatggctcgaacccaagtcctcaaacggatttgggcttacattaaggacaacaatcttcaggaccctacagacaagaggactataaattgcgatgag

SEQ ID NO: 9363 - DNA, 327 bp, Glycine max
  Clone ID: LIB3039-031-Q1-E1-D4
ggcgagagaagttattatggtttttgagtgcggcggtccaaacactcttctctgcagcttttgcctacaactcccttcaccatggctgaacaaaccgagaaagcttttctgaagcaaccaaaagtgtttctcagcacaaagaagactgggaagggaaagagacctggaaaaggtgggaaccgcttttgggagtccattgggtgtggatttaagactcccagggaagccatcgaaggaacctatattgagaagaagtgccccttcactggcaatgtttccatccgtggccgtatcttggctggaacatgtcacagtgctaagatgaac

SEQ ID NO: 9364 - DNA, 379 bp, Glycine max
  Clone ID: LIB3039-031-Q1-E1-D5
gacccacagggaggcgaacagagaaactcagagacccgaaggcagatttcaagatgaagttcaacattgcgaatcccaccaccggttgtcagaagaagctggagatcgatgatgacctgaagctgcgagcattttgggacaagaggatctcacaagaggttgttggtgatgctctgggtgaggaattcaaaggttatgtcttcaaaattactggaggttgcgacaagcaaggatttccaatgaagcaaggagtgttgacccctggtcgtgttcgcctcttgctgcatagaggaactccttgtttccgtggttacggaaggcgcaatggagagcgtaggaggaagtctgttcgtgggtgcattgtcagccctgacctctc

SEQ ID NO: 9365 - DNA, 371 bp, Glycine max
  unsure (1)..(371): unsure at all n locations
  Clone ID: LIB3039-031-Q1-E1-D6
ggtgctctgctcgtgcctctagggttatcatttctccatttccattttctctctcacttttcaagaatcgtaagctatgggaaagtcttacccaactgtgagtgctgattaccagaaggccgttgagaaggcgaagaagaagctcagaggcttcatcgctgagaagagatgcgctcctctaaagctccgtttggcgtggcactctgctggaacctttgacaagggcacgaagaccggtggatgccttcggaaccatcaagcaccctgccgaactggctcacagcgctaacaacggtcttgacatcgctgttaggcttttggagccactcnaagcggagttccctattttgagctacgccgatttctaccag

SEQ ID NO: 9366 - DNA, 378 bp, Glycine max
  unsure (1)..(378): unsure at all n locations
  Clone ID: LIB3039-031-Q1-E1-D7
ggcagcggtccatacaattcaggagcagcatataagaatccttcaacacaagaggcatcgcctacaacaatggcagataattcaactgctcaaggaagcaacaccctattttctccttacaagatgcctaaattcaacctctctcatagggtggttttggctccgatgacaagatgcagagcgttgaactggattccccaggaagcacttgctgaatactacgctcaaagatcaacaccaggaggatttctcatcagcgaaggcaccttgatctctctcactgctcctgggtttccacatgtgcctgngatatattcagatgaacaagtggaggcgtggagaaacatagtggatgccgtgcatgccaaaggcagcatt

SEQ ID NO: 9367 - DNA, 379 bp, Glycine max
  Clone ID: LIB3039-031-Q1-E1-D8
gttctagtgtgtgattgtttgttgttgtaactcgttcttcttcttttgttgttctgtgtttgtgtttgttctttttctcacctgaaaatgtcttgctgcggtggtaactgtggttgcggaagctcctgcaagtgcggcaacggctgcggaggctgcaagatgtacccagacttgagctacatggagtcaaccaccgccgagaccttggtcatgggagtggcacctgttaaggctcaatttgagggtgctgaaatgggtgtgcccgctgagaacgatggctgcaaatgtggaccaaactgctcctgcaacccctgcacttgcaagtgaggtgttgggagagcaagcttcaagcagagatagcccttaattaagaataatg

SEQ ID NO: 9368 - DNA, 366 bp, Glycine max
  Clone ID: LIB3039-031-Q1-E1-D9
gaccctcatctttctctcaactcccttaaccaaaaccaaaacaatggccacccaaagaagctatcattcccctatcttattttcgtccctcatcttaacccttttcgttctctacttcccaagatgccaccacgccattcccaacaaccccatcaaaaccgtcgtcgttttggtaatggaaaatcgctccttcgaccacatgctgggctggatgaagagactaaacccggccatcgatggcgtgaccgggtcggagtccaatccgctgtccgtgtccgacccagactcgaagcggttcttcttcagggaccgggcccatttcgtggacccggaccctggtcactcgttccaggccatccgggaaca

SEQ ID NO: 9369 - DNA, 381 bp, Glycine max
  Clone ID: LIB3039-031-Q1-E1-E1
ggcacaagtgagtttgttgatcgagataactagaaacagtgtgatgaaaatgaaggtccttgttttcttcgttgctacaattttggtagcatggcaatgccatgcgtacgatatgttccctctccgaatgaacactggctatggtgcccgtactccggaggtgaaatgcgcaagttggaggcttgctgtggaagcacacaacatctttggctttgagaccattcctgaagagtgcgttgaagcaacaaaggaatacatccatggcgaacaatatagatcagactccaaaacagttaaacaacaagcttacttttatgccagagaactcgaagtccatcccaaggacacatttgtgttcagtatagatggcaccgttctctc

SEQ ID NO: 9370 - DNA, 375 bp, Glycine max
  Clone ID: LIB3039-031-Q1-E1-E10
ggcacaagtttgttgagatagctagaagcaataagatgaaaatgaaagtgcttgttttgtttgttgctacagttttggtagcatatgaatgccatggctcagactaccagaagttccctctccaaatgaaaactgggtttggtgggcaatacagcaatgaggtggcatgtgccagttggaggcttggcgtggaagcaaacaacgtagtcaagtggcaaactgttcctgcagcttgcggagagtacatagctgactacgttctaggagaccaatatagatcagattccaaaacagttaaccaacaagcttatttctatgctaaatccctcaaactcaccaacaaagatgtctttgtcttggacgttgacgacacta

SEQ ID NO: 9371 - DNA, 362 bp, Glycine max
  Clone ID: LIB3039-031-Q1-E1-E11
gcacacaccgtttgttctattcttaactcaacttctgctacccactctcttcttccaagtccaaccacgcttttctctacagtcatgggcaaggtcaagatcggaatcaacggatttggaagaattggccgtttggttgccagagtcgctctgcaaagagacgatgtggagctcgttgccgttaacgaccctttcattaccaccgattacatgacatacatgtttaaatacgacagtgttcacggacactggaagcatcacgatgtcaccgttaaggacgagaagacccttctcttcggtgacaagccagtcactgtttttggacacaggaaccctgaagagatccatgggggtcaactgga

SEQ ID NO: 9372 - DNA, 345 bp, Glycine max
  unsure (1)..(345): unsure at all n locations
  Clone ID: LIB3039-031-Q1-E1-E12
gacaagtttgttgagatagctagaagcaataagatgaaaatgaaagtgcttgttttgtttgttgctacagttttggtagcatatgaatgccatggctcagactaccagaagttccctctccaaatgaaaactgggtttggtgggcaatacagcaatgaggtggcatgtgccagttggaggcttggcgtggaagcaaacaacgtagtcaagtggcaaactgttcctgcagcttgcggagagtacatagctgactacgttctaggagaccaatatagatcagattccaaaacagttaaccaacaagcttatttctatgctaaatcnctcaaactcaccaacaaagat

SEQ ID NO: 9373 - DNA, 378 bp, Glycine max
  unsure (1)..(378): unsure at all n locations
  Clone ID: LIB3039-031-Q1-E1-E3
ggcaagagtttgttgtgagctataagctagtttatcgtgaggagaatatgaagttgtttgttttcgttgttgctgcagtagttttggtagcatggccatgccatggcgcaggctatcaaaggttccctctccgaatgaaaactggctatggtgagcgttcttcggaggtaaaatgcgcaagttttaggcttgctgtggaagcacacaacatccgagcctttaaaaccattcctgaagagtgcgttgaaccaacaaaggactacattaatggcgaacaatttagatcagactctaaaacagtttaacaacaagctttcttttatgctagtgaaacccangtccatcacaacgacatatttatattccgcatagataaca

SEQ ID NO: 9374 - DNA, 328 bp, Glycine max
  Clone ID: LIB3039-031-Q1-E1-E4
ggcacaagtgagtttgtcgatcgagataactagaaacagtgtgatgaaaatgaaggtccttgttttcttcgttgctacaattttggtagcatggcaatgccatgcgtacgatatgttccctctccgaatgaacactggctatggtgcccgtactccggaggtgaaatgcgcaaggtggaggcttgtgtgggaagcacacaatgatctttggctttgagaccattcctgaagagtgcgttgaagcaactgaggaatacatccatggcgaacaatatagatcagactccaaaacagttaaccaacaagcttacttttatgccagagacct

SEQ ID NO: 9375 - DNA, 289 bp, Glycine max
  Clone ID: LIB3039-031-Q1-E1-E5
aaaggaaagtaagagaagagaagaatggccgaagagggacaagtgattggtgtccacagcgtggaggagtgggaggaacatctcaagaagggacaagagtccaagaaattgattgtggtggattttactgcttcttggtgcggcccatgccgtttcattgccccaattcttgcggatatggctaaaaagttgccgaatgtcaccttcctcaaggtggatgtggatgaattggcgactgtttccagggagtgggaagttgaggctatgccaaccttcctattcttgaaag

SEQ ID NO: 9376 - DNA, 287 bp, Glycine max
  unsure (1)..(287): unsure at all n locations
  Clone ID: LIB3039-031-Q1-E1-E6
gacagaaacatcgagcaacagaagaaagaaactacagaaaaaagaaaaaagacatggcttccaattctgcaatttcactggctatgccaataacttatgccagccagaagagggtactggtgcctaactctgatgcattattcctcaaaccactgcctctacgttcttaatctagccaaagcaatgggagcatcaaaagtaagctatggaangtttcacgtgacggcgtccatgaaggagaaagttgtgacaagcctcacagcagctgcattcacagcctcaatgat

SEQ ID NO: 9377 - DNA, 330 bp, Glycine max
  unsure (1)..(330): unsure at all n locations
  Clone ID: LIB3039-031-Q1-E1-E7
gagagtggtggagtgtgcaaaagagcgtcgtagtcgcaaccctaatcagaagaagcgcagcttcaagcgagtgacagccaccagccatgggtcgtatgcacagccgcggtaagggtatatcctcttctgctttgccctacaaaaggacacctcctagctggctcaagatctcttcgcaagatgtcgaagaaaatatctgcaagtttgcgaagaaaggtttgaccccgtctcagattggtgtcattctcagagattctcacggtattgctcaggtcaatagcgtcactggcagcanaatccttcgcatcctcaaggctcacggacttgcgc

SEQ ID NO: 9378 - DNA, 360 bp, Glycine max
  Clone ID: LIB3039-031-Q1-E1-E8
ggattagggtttgtcattagcacttcttcttttcacactgccgctgcaacaatggcttcagagaagaaactttcgaacccaatgagggagataaaagtgcagaagctcgttctcaatatctctgttggcgagagtggagatcgtctcaccagagccgccaaggtgttgtgacaacttagtggtgaaaccccagtgtgttccaaagcaaggtacactgttcgttcctttgggattagaagaagtgagaagattgcatgctatgtcactgtcagaggtgacaaggcaatgcaacttttggagagtggtttgaaggttaaggaatatgaacttctcagaaggaatttcagtgatactggttgc

SEQ ID NO: 9379 - DNA, 367 bp, Glycine max; identical to SEQ ID NO: 8372
  unsure (1)..(367): unsure at all n locations
  Clone ID: LIB3039-031-Q1-E1-E9

SEQ ID NO: 9380 - DNA, 305 bp, Glycine max
  Clone ID: LIB3039-031-Q1-E1-F1
gtccaacacaaacaccacggccgccgccgccaccgagattatcacaacgcgccgccgccaccgagattatcacaacgcgccgccgcagcattcacctccccggagatccaccctttgcatggcagtgagctttctggcgcgcgatgtatcggacctctgccttgggaagccaccgctgaggtcgctctccgctgccgccaccgtcgccgacgccttagacgcgctcaagagctccgacggcgagatccacgtcagcgtgtggagcttcgagaatgaagtgggtcgatgcgtagggaaactgtgca

SEQ ID NO: 9381 - DNA, 373 bp, Glycine max
  Clone ID: LIB3039-031-Q1-E1-F10
gacaacaatgccgtcgataccagaagaacgactcctgactccgaacccagaccggttctgcatgttcccaatccaataccctcaaatctgggaaatgtataagaaagccgaggcctccttctggacggcggaggaggtggacctctcgcaggacctccgccactgggccaccctcagcgacggcgagcgccacttcatcacccacgtcctcgccttcttcgccgcctccgacggcatcgtcctagaaaacctcgccggccgcttcaccaaagaaatccaactcccggaggcccgcgctttctacggcttccaaatcgccatcgaaaatatccactccgaaatgtacagcctcctcttagaaacctacatcaaa

SEQ ID NO: 9382 - DNA, 365 bp, Glycine max
  Clone ID: LIB3039-031-Q1-E1-F11
ggcacaagtgagtttgttgatcgagataactagaaacagtgtgatgaaaatgaaggtccttgttttcttcgttgctacaattttggtagcatggcaatgccatgcgtacgatatgttccctctccgaatgaacactggctatggtgcccgtactccggaggtgaaatgcgcaagttggaggcttgctgtggaagcacacaacatctttggctttgagaccattcctgaagagtgcgttgaagcaacaaaggaatacatccatggcgaacaatatagatcagactccaaaacagttaaccaacaagcttacttttatgccagagacctcgaagtccatcccaaggacacatttgtgttcagtatag

SEQ ID NO: 9383 - DNA, 364 bp, Glycine max
  Clone ID: LIB3039-031-Q1-E1-F12
ttccagaggatgatcaggacgaagactgcgcagatggaagaagagtacgccgaaaagctttccaaactctgcttgcatgagaccgaggaaacgcagaggaagaaattggatgaactgaaagtcttgggaaattcctattttgattactaaaaaatgaaaaagagaatgcaagatgagaatgatgggttaatgccgagaatggaggcaacaaagcaacaatgggtttaattttaattttggtgcctttccttaagttttcctaatcaagatactgctaaatgtgtaaattaatgagatgtgatgtgttggtaatgaagtggttcccaaaatggatgggtttcaaattgataaaaacaaatttttt

SEQ ID NO: 9384 - DNA, 344 bp, Glycine max
  unsure (1)..(344): unsure at all n locations
  Clone ID: LIB3039-031-Q1-E1-F2
gacaacaaaatttgccaattgccatttcaatcctcagtttctttcttcaacgtttccatcatacacagatcccaatcctctctcaagccctaatttcccctcatttccatggccacagaagagcccactgtcgcggtggaacccgctcccgaacctgcctccgccgatcctcccgcggaggagaatgtggagaccaaacctgaagccaaggctaagaaaaccaaggagcccaaacctaaaaaggtttgcagacctcgcaaccctcccactcatccttcctacgaagagatggttaaagatgcaattacctcgctgaaggagaanacggttcgagccaatacgcg

SEQ ID NO: 9385 - DNA, 370 bp, Glycine max
  unsure (1)..(370): unsure at all n locations
  Clone ID: LIB3039-031-Q1-E1-F3
ggtttttcttcctcccagtgcagtatcgttgagaaataaggggaaaaaatggtgtcgctgaaactgcagaagcggctggccgcaagcgtgctcaagtgtggcagaggaaaggtgtggcttgaccccaatgaagtcaacgaaatctccatggccaattctcggcaaaacatcaggaagttggttaaggatgggtttatcatcaggaagccaaccaagattcactcacgctcgcgtgctcgtangatgaaggaggcanagaagaagggccggcactctggttatggtaagagaaagggtacacaggaggcgaggcttcccaccaagatactttggatgagaaggatgcgtgtgctcaagcggttgcttcgta

SEQ ID NO: 9386 - DNA, 380 bp, Glycine max
  Clone ID: LIB3039-031-Q1-E1-F4
gagtttgttgatcgagataactagaaacagtgtgatgaaaatgaacgtccttgttttcttcgttgctacaattttggtagcatggcaatgccatgcgtacgatatgttccctctccgaatgaacactggctatggtgcccgtactccggaggtgaaatgcgcaagttggaggcttgctgtggcgtgacacaacatctttggctttgagaccattcctgaagagtgcgttgaagcaacaaaggatgacatccatggcgaacaatatagatcagactccaaaacagttaaccaacaagcttacttgtatgccagagacctcgaagtccatcccaaggacacatttgtgttcagtatagatggcaccgtactctccaatattc

SEQ ID NO: 9387 - DNA, 356 bp, Glycine max
  unsure (1)..(356): unsure at all n locations
  Clone ID: LIB3039-031-Q1-E1-F5
ggcagcaacattgatggcagcaacaagttctggcactcttaaagcaactcctttcctaggccaaggcaagggtgccaatgccaatgctcttagggatgttgtttccatgggaactgggaagtacaccatgggcaatgatttgtggtatggaccagacagagtgaaatacttgggacccttttcagctcagaccccttcatacttgaaaggagaattcccaggggattatggatgggacactgctggcttatctgctgacccggaagtatttgccaagaacagggctcttgaggttatccatgggagatgggccatgcttggagcactangatgcatcaccccagaggtgctagaga

SEQ ID NO: 9388 - DNA, 367 bp, Glycine max
  unsure (1)..(367): unsure at all n locations
  Clone ID: LIB3039-031-Q1-E1-F6
ggcacaagtgagtttgttgatcgagataactagaaacagtgtgatgaaaatgaaggtccttgttttcttcgttgctacaattttggtagcatggcaatgccatgcgtacgatatgttccctctccgaatgaacactggctatggtgcccgtactcctgaggtgaaatggggaagttggaggcttgctgtggaagcacacaacatctttggctttgagaccattcctgaagagtgcgttgaagcaacaaaggaatacatccatggcgaacaatatagatcagactccaaaacagttaaccaacaagcttacttttatgccagagacctcgaagtccatcncaaagacacatttgtgttcagtatagat

SEQ ID NO: 9389 - DNA, 376 bp, Glycine max
  unsure (1)..(376): unsure at all n locations
  Clone ID: LIB3039-031-Q1-E1-F7
ggcacaagtgagtttgttgatcgagataactagaaacagtgtgatgaaaatgaaggtccttgttttcttcgttgctacaattttggtagcatggcaatgccatgcgtacgatatgttccctctccgaatgaacactggctatggtgcccgtactccggaggtgaaatgcgcaagttggaggcttgctgtggaagcacacaacatctttggctttgagaccattcctgaagagtgcgttgaagcaacanaggaatacatccatggcgaacaatatagatcagactccaaaacagttaaccaacaagcttacttttatgccggagacctcgaagtccatcccaaggacacatttgtgttcagtatagatggcaccgta

SEQ ID NO: 9390 - DNA, 344 bp, Glycine max
  Clone ID: LIB3039-031-Q1-E1-F8
ggtggttcttgtttgcgagatagaagcgtaagcagcggctaccctaacctcgtcttcctctctactaatttcagctatggccgacgaagctgtggttgttccagatcccacccagatcgatgtcaagctctttaaccgctggagcttcgaggatattggggttactgaccgtgcactggctgattgcattggagttgcggcatccaagcacgccacatatgttcctcacatggccggaaggtactccgtgaagcggttcaggaaggcgcagtgccccattgttgagaggctcaccaactctctcatgatgcacggtagaaacaatggcaagaaactcttggctg

SEQ ID NO: 9391 - DNA, 367 bp, Glycine max
  Clone ID: LIB3039-031-Q1-E1-F9
gataatcaatcaatggcaatggcttcttcaatccctaatgcgccttctgcgttcaattctcagagctacgttggtctcagagcgccactgaggaccttcaacttttcttctcctcaagctgccaaaattcctcgctcccaacgccttttcgtcgtcagagcctccgattcggagttcgaagccgccgttgtcgccggtaaggttccgccggcgcctcccgtgccgcccagaccggcggctccggttggaacaccggtggttccttcacttccacttcaccggcgtcctcgtcggaaccggaagtcgccggcgcttcggtcggcttttcaggaaacgagcatttcgccggcgaatttcgtgtatccgc

SEQ ID NO: 9392 - DNA, 329 bp, Glycine max
  unsure (1)..(329): unsure at all n locations
  Clone ID: LIB3039-031-Q1-E1-G1
ggtgcacaagtgagtttgttgatcgagataactagaaacagtgtgatgaaaatgaaggtccttgttttcttcgttgctacaattttggtagcatggcaatgccatgcgtacgatatgttccctctccgaatgaacactggctatggtgcccgtactccggaggtgaaatgcgcaagttggaggcttgctgtggaagcacacaacatctttggctttgagaccattcctgaagagtgcgttgaagcaacaaaggaatacatccatggcgaacaatatagatcagactccanaacagttaaccaacaagcttacttttatgccagagacct

SEQ ID NO: 9393 - DNA, 363 bp, Glycine max
  Clone ID: LIB3039-031-Q1-E1-G10
tcagttgcttaacaccagaaatggatggtctgcacagatgcatgacaatgctccatatttgcatgcatctgttacacctgcacaagtatcatctccatcatctgtgttaatgttccagcaagcagttaatccagtttcaaactgtgattataataaaaacaaacgtgataaggaaatggagggtagagtccattaccaaggtttatacacatctgaagtgaaaggtagaacatttgcatcttccccattcgatgatcctattttatccacgctagctgccgaaggtgctagttctttgggtatgtttgatgttcataaccagttgggtagttcacggccacatgaatcagtgtcagcattgag

SEQ ID NO: 9394 - DNA, 349 bp, Glycine max
  Clone ID: LIB3039-031-Q1-E1-G11
gcacaagtgagtttgttgatcgagataactagaaacagtgtgatgaaaatgaaggtccttgttttcttcgttgctacaattttggtagcatggcaatgccatgcgtacgatatgttccctctccgaatgaacactggctatggtgcccgtactccggaggtgaaatgcgcaagttggaggcttgctgtggaagcacacaacatctttggctttgaaaccattcctgaaaattgcgttgaaccaccaaaggaatacatccatggcgaacaatatagatcagactccaaaacagttaaccaacaagcttacttttatgccagaaacctcaaagtccatcccaaggacacat

SEQ ID NO: 9395 - DNA, 375 bp, Glycine max
  Clone ID: LIB3039-031-Q1-E1-G12
gactcaccaagtgaaccaatatagcccaagccctatacaaccaaaccctaatacacacccatttgattcagtttccatggctagcctcaaggttgcatttttggctgcagtgctctgcatggttgtggtgagtgcacccatggcacatgcagctatcacgtgcgggcaggtgacgaatagcctgatcaattgcatcggttacctccagaacggaggaacgccgccgtcgggatgctgcaacggagtgaagagcctcaatgccgccgccaagaccaccgccgaccgccagacggcgtgcaactgcctcaagtcggccgccagccaaatctccggcttcaaagccaacaacgccgcctcgctccccggcaaatgcgg

SEQ ID NO: 9396 - DNA, 235 bp, Glycine max
  Clone ID: LIB3039-031-Q1-E1-G2
gaaggtgcaagagtttgttgtgagctataagctagtttatcgtgaggagaatatgaagttgtttgttttctttgttgctgcagtagttttggtagcatggccatgccatggcgcaggctaccaaaggttccctctccgaatgaaaactggctatggtgagcgttcttcggatgtaaaatgcgccgtgtttaggcttgcggtggaaccacacaacatccaaccctttaaaacaatt

SEQ ID NO: 9397 - DNA, 309 bp, Glycine max
  Clone ID: LIB3039-031-Q1-E1-G3
gacagctattcctcttaagcttgctactgagtttccacactgcataccttaagtcttccgaattcgaagttaatttgcaagatggctaaggaaaaggctcagatcaacattgtggtggttggtcatgtggaccctgacgaggcaaccaccattaacgagctgaagaagcctgttgtggagaaagaagctccagggcatgccatatgagggcatgcacgtacggcctcggaagggaaccagaaaattatgttaacaaaataatctggaaccctaatgtaacagtgtcatcatcagtgtgtagtttaagct

SEQ ID NO: 9398 - DNA, 352 bp, Glycine max
  Clone ID: LIB3039-031-Q1-E1-G4
agaagataaataaataaataaacaaatcattgtaagttgtaactaataataatgcactagtagtaactcattcatcattccgtttccagttcaagaacttgttctactcttttatcctacgcactcctcccttcttatccggcgcatctttcgcggagatcctccccgtggcatcttcactttccaccatttcagtgggaaagaatcatgagtgtgtttcagctgttgcgaagaggatgacctccacaaggctgctgaaagtggaggaccatacgtcgtaaaaaatccaacaggaaatgatggaaattatcttgcttctgaaactgcaaagcagggcactcagcctgttaaa

SEQ ID NO: 9399 - DNA, 375 bp, Glycine max
  Clone ID: LIB3039-031-Q1-E1-G5
gatggttttgatggcactcaggtagaggctattttgccacttgttgcccctacgaagcgtactagtattggatcaacatctggaacacacagaaaatcattttcaagtgcagctcagtctaagcaggttatttcattgaacccattgcctcttaagaaacatggttgtggtagaggcccagtacagacatgctctgaggaggaatttcttaaagatgtcatggagttcctgattctccggggacataatagactgattcctcaaggagggcttaccgagttccctgatgccatactcaatggaaaacgccttgatctctacaatctaaataaagaggtggttacaaggggaggatttcatgttggcaatggcatc

SEQ ID NO: 9400 - DNA, 383 bp, Glycine max
  unsure (1)..(383): unsure at all n locations
  Clone ID: LIB3039-031-Q1-E1-G6
ggcacaagtgagtttgttgatcgagataactaggaacagtgtgatgaaaatgaaggtccttgttttcttcgttgctacaattttggtagcatggcaatgccatgcgtacgatatgttccctctccgaatgaacactggctatggtgcccgtactccggaggtgaaatgcgcaagttggaggctgtgctgtggaagcagagaacatctttggctttgagaccattcctgaagagtgcgttgaagcaacaaaggaatacatccatggcgaacaatatagatcagactccaaaacagttaaccaacaagcttacttttatgccagagacctcgaagtccatcncaaggacacatttgtgttcagtatagatggcaccgtactctct

SEQ ID NO: 9401 - DNA, 332 bp, Glycine max
  Clone ID: LIB3039-031-Q1-E1-G7
gacagtgcatcagtttgttgtgagcgataagctagtttatcttaaggagaatacgaacttgtttgtcttcgttgctgctgcactagtattggcaccatggccatgccatggcgcatgctatcacaggttccctccccgaaagacaactggctatggtgagcgttcttcggcagtaaaatgcccagcttttaggcttgctgtggcagcacacatcatccgaacccttaaaaccattcttgaagagtgcgttgaaccaacacaggactaccttaatggctaacaattgagatcagactctaaaacagcttacctacaagctttcttttacgcta

SEQ ID NO: 9402 - DNA, 384 bp, Glycine max
  Clone ID: LIB3039-031-Q1-E1-G8
gaaggtgcaagagtttgttgtgagctataagctagtttatcgtgaggagaatatgaagttgtttgttttctttgttgctgcagtagttttggtagcatggccatgccatggcgcaggctaccaaaggttccctctccgaatgaaaactggctatggtgagcgttcttctgaggtaaaatgcgtgagttttaggcttgcggtggaagcacacaacatccgagcctttaaaaccattcctgaatggtgcgttgaaccaacaaaggactacattaatggcgaacaatttagatcagactctaaaacagttaaccaacaagctttcttttatgctagtgaacgcgaagtcgatcacaacgacatatttatattcggcatagataacac

SEQ ID NO: 9403 - DNA, 354 bp, Glycine max
  Clone ID: LIB3039-031-Q1-E1-G9
ggcacaagtttgttgagatagctagaagcaataagatgaaaatgaaagtgcttgttttgtttgttgctacagttttggtagcatatgaatgccatggctcagactaccagaagttccctctccaaatgaaaactgggtttggtgggcaatacagcaatgaggtggcatgtgccagttggaggcttggcgtggaagcaaacaacgtagtcaagtggcaaactgttcctgcagcttgcggagagtacatagctgactacgttctaggagaccaatatagatcagattccaaaacagttaaccaacaagcttatttctatgctaaatccctcaaactcaccaacaaagatgtctttg

SEQ ID NO: 9404 - DNA, 365 bp, Glycine max
  unsure (1)..(365): unsure at all n locations
  Clone ID: LIB3039-031-Q1-E1-H1
gagtcaaagtgataactaatggggactgagcattttgatcgaagaaatggtttgtagaggttgttggccttgagtctctcaacaatggccatgttgctacaaacgcattaccctctcggtctacactcaccgcgttacccttatcttttcccaaacccttattatcattcatttctcattatccccaccaaacccctaccgcgattcaatgccgcagttgcattatccggtcaccggactctgtcgccacccccagccttcgcttccgaccgccacgcgcttccnggaacagcccctttccctcaaggtttttacgcgcgtcgccgtctccaccgtgctgtttctctgcttcggcgttcgcatgt

SEQ ID NO: 9405 - DNA, 365 bp, Glycine max
  Clone ID: LIB3039-031-Q1-E1-H10
gacaagtgagtttgttgatcgagataactagaaacagtgtgatgaaaatgaaggtccttgttttcttcgttgctacaattttggtagcatggcaatgccatgcgtacgatatgttccctctccgaatgaacactggctatggtgcccgtactccggaggtgaaatgcgcaagttggaggcttgctgtggaagcacacaacatctttggctttgagaccattcctgaagagtgcgttgaagcaacaaaggaatacatccatggcgaacaatatagatcagactccaaaacagttaaccaacaagcttacttttatgccatagacctcgaagtccatcccaaggacacatttgtgttcagtatagat

SEQ ID NO: 9406 - DNA, 376 bp, Glycine max
  Clone ID: LIB3039-031-Q1-E1-H12
gaatgcacaaaactgtaacgtgacgaaacagagggattataaaaagagaagttactcgatagttcaaatcagaagatggttcctgtcacaccaactcaataacagatcaaaccaaacccaaactgttaggtttcctttgtttggtgtgaagccatggctgattcttcttccaacctgaaatccgacgcgataatggagcagatgaagcaacacctcgccaccgacgctggcaaacaagtcaccaataaaattggactcgtttatcagtttcacattgctcctaagaaacttggattcgacgaggtcgtctacaccgttgatctcaagaaaggagaggtcaccaaagggtcatatgaaggaggaaagcctgatgcat

SEQ ID NO: 9407 - DNA, 368 bp, Glycine max
  unsure (1)..(368): unsure at all n locations
  Clone ID: LIB3039-031-Q1-E1-H2
gacaagtgagtttgttgatcgagataactagaaacagtgtgatgaaaatgaaggtccttgttttcttcgttgctacaattttggtagcatggcaatgccatgcgtacgatatgttccctctccgaatgaacactggctatggtgcccgtactccggaggtgaaatgcgcaagttgggaggcttgctgtggaagcacacaacgtgtttggctttgagaccattcctgaagagtgcgttgaagcaacatgggaatacatccatggcgaacaatatagatcagactccanaacagttaaccaacaagcttacttttatgccagagaactcgaattcaatccaaggacacatttgtgttcaatatagatggc

SEQ ID NO: 9408 - DNA, 327 bp, Glycine max
  Clone ID: LIB3039-031-Q1-E1-H3
agaaaacaacaaaagggggttgtttaattaaaaaacaaaggaattggcggaattaaaattgagattctccggaaaaatctgacaggaaaaacataacctccagtcaaaacaacacacaaccacaatttcaaaggcaagattcaagacaaggaaggcattcctccggattagcggcgtttgattttcgcccgaaagcagcttgaagatggaaaggacctggccgattacaacatccagaaggaatcaacccttcaactcgtcctcatgcttcgtggtggcatcaatgaaccttccctcatgggtttgactcccaaatacaaccaagac

SEQ ID NO: 9409 - DNA, 447 bp, Glycine max
  Clone ID: LIB3039-031-Q1-E1-H4
taacggttaggaagtcccgggctacgactacgcatgaatgcggatgcgacaagaaggggacaagaaaatttggttgttcaaaatactaaaaacagtgtgatgaaaatgaaagccctgttttcttcgttgctacaattttggtagcatggcaatgccatgcgtacgatatgttccctctccgaatgaacactggctatggtgcccgtactccggaggtgaaatgcgcaagtttgaggcttgctgtgtgagcacacaacatgtgtggctttgagaccattcctgaagagtgcgttgaagcaacaaatgaatacatccatggcgaacaatatagatcagactccaaaacagttaaccaacaagcttacttttatgccagagacctcgaagtccatcccaaggacacatttgtgttcagtatagatggcaccgttacctctaatattccaa

SEQ ID NO: 9410 - DNA, 355 bp, Glycine max
  unsure (1)..(355): unsure at all n locations
  Clone ID: LIB3039-031-Q1-E1-H5
gaccacattccaaaacacaaacacatacattgtagtatcacttttgtctcggaatttgttcttttgagttatggcaagcttaaaggttgcatgtgtggttttgatgtgcatggctgtgatgagtgcaccaatgatggtgcaagccgtgtcatgcaatgatgtttctgtgaacctagcaccgtgcctatcttacctgatgcagggtggagatgttccagaatcgtgctgtagcggagtgaagaacattctgggttctgccagcaccacctttgacaaacaaaccgtgtgcaaatgtcntcagcaagctgctaataactatggcatcaacgacgaatacgctcagggactcccccgc

SEQ ID NO: 9411 - DNA, 357 bp, Glycine max
  Clone ID: LIB3039-031-Q1-E1-H6
gagccacgtacgcaactgaaaaggaaaaccctaagagatgaagagaactcctatcttgttccctctcttctttcttctttgtgccttcacctcatatctaccttcagccaccgctgatgatgatcatgtgtacgacactgacggcgataagcttcaatacggtgtcaattgtttcgtgttgtgatgtgataagaggatgtggcggtggaatacaagtagcaaaagcaggaaacgaaacttgcctgctgactgtggtgcaatctggcaacgagctctctgaggggttaccgataaagattgcatctcgatcagcaggagtcgctttcatcacgcaatggcagcttttcaagagcattc

SEQ ID NO: 9412 - DNA, 213 bp, Glycine max
  Clone ID: LIB3039-031-Q1-E1-H7
ggtttttgtttcccatagcatagaagaagcagaaggagaagcattagcaaaagcaagaagaactagtctaagcagaaatggcctcttcagtgatggcatctgtggccctcaaacctgcccctttcactgttgagaagtcctcagttagaggccttccctccctcacaaggaactcctcatcattcagagttgtgactagtggtggcaagatta

SEQ ID NO: 9413 - DNA, 386 bp, Glycine max
  unsure (1)..(386): unsure at all n locations
  Clone ID: LIB3039-031-Q1-E1-H8
ggcacaagtgagtttgttgatcgagataactagaaacagtgtgatgaaaatgaaggtccttgttttcttcgttgctacaattttggtagcatggcaatgccatgcgtacgatatgttccctctccgaatgaacactggctatggtgcccgtactccggaggtgaaatgcggaagttggaggtgtgctgtggaagcacgcgacatcgttggctttgagaccattcctgaagagtgcgttgaagcgacaaaggaatacatccatggcgaacaatatagatcagactccaaaacagttaaccaacaagcttacttttatgccagagaactcgaagttcatcncaaggacacatttgtgttcagtatagatggcaccgtactctctaata

SEQ ID NO: 9414 - DNA, 365 bp, Glycine max
  Clone ID: LIB3039-031-Q1-E1-H9
gagaagaaaacataagatatggcaatgttcacgtaccacgttgaaacggttcaatcatggttggcactgagcagacttcacatactgatccacttagtggcagtgttgtcgctgtgttactaccgcataactcacttgttactggaacctccaacagcgccatggcttctgatgaccgtagcggagcttcttctctcggtgctctggttcttcaaccaagccttccggtggcggccggtgtcgcggagcgtcatgacggagaagctgccgagggatgagaagctgccggggcttgacatcttcgtgtgcacgctggatcccgagaaggagcccaccgtggaggtcatggacaccatcatctccgc

SEQ ID NO: 9415 - DNA, 397 bp, Glycine max
  unsure (1)..(397): unsure at all n locations
  Clone ID: LIB3039-032-Q1-E1-A1
ggcacaagtgagtttgttgatcgagataactagaaacagtgtgatgaaaatgaaggtccttgttttcttcgttgctacaattttggtagcatggcaatgccatgcgtacgatatgttccctctccgaatgaacactggctatggtgcccgtactccggaggtgaaatgcgcaagttggaggcttgctgtggaagcacacaacatctttggctttgagaccattcctgaagagtgcgttgaagcaacaaaggaatacatccatggcgaacaatatagatcagactccanaacagttaaccaacaagcttacttttatgccagagacctcgaagtccatcgcaaggacacatttgtgttcagtatagatggcaccgtactctctaatatttcatactac

SEQ ID NO: 9416 - DNA, 333 bp, Glycine max
  Clone ID: LIB3039-032-Q1-E1-A10
gacagctattcctcttaagcttgctactgagtttccacactgcataccttaggtcttccgaattcgaagttaatttgcaagatggctaaggaaaaggctcaaattaacattgttgtgggttgtcaagttgacccttaaggaggcaaccaacaataacgaacttaaaaaaccttgtgtggagaaagaaacttcaagggatgccattataaggcatgcaacttccggctccggagggaaacaacaaattaagtttacaaaattatcctgaaaccctaaggtaccattttcaccaccattttgtatttaagccaaccttgccaatggtaacttcct

SEQ ID NO: 9417 - DNA, 365 bp, Glycine max; identical to SEQ ID NO: 9104
  Clone ID: LIB3039-032-Q1-E1-A11

SEQ ID NO: 9418 - DNA, 286 bp, Glycine max
  Clone ID: LIB3039-032-Q1-E1-A12
gaaggtgcaagagtttgttgtgagctataagctagtttatcgtgaggagaatatgaagttgtttgttttctttgttgccgcagtagttttgggaacatgggcatgccatggcgcaagctaccaaagggtccctccccgaatgaaaactggctaaggtgaacgttcctccgaaggaaaatgcccaagttttaagcctgccgttgaaacacacaacaaccgaacctttaaaaccaatcctgaaaaatgccttgaaccaacaaaggagctacattaatggcgaacaatt

SEQ ID NO: 9419 - DNA, 314 bp, Glycine max
  Clone ID: LIB3039-032-Q1-E1-A2
ggaacctttgcattcgatgcactcaagattcagcaagtgtgttttggaaacaaagatccatgtactccgcgatggcacgtatttggcaacatgctcgtacctcacctggaagaaatgctcccacgaagcaacttgcaagctatgctgcacgtacgtcggcagtaacatgcgctggtttgaagaatgctcagcgttcacaccctagaactggcgctcatagtaagcctaagaaataccttaagaccactgaggacctaatccagagccatccatatcaatcgtacgcccgtgcaattgcccaagattcttacatt

SEQ ID NO: 9420 - DNA, 400 bp, Glycine max
  Clone ID: LIB3039-032-Q1-E1-A3
ggcacaagtgagtttgttgatcgagataactagaaacagtgtgatgaaaatgaaggtccttgttttcttcgttgctacaattttggtagcatggcaatgccatgcgtacgatatgttccctctccgaatgaacactggctatggtgcccgtactccggaggtgaaatgcgcaagttggaggcttgctgtggaagcacacaacatctttggctttgagaccattcctgaagagtgcgttgaagcaacaaaagaatacatccatggcgaacaatatagatcagactccaaaacagtttaccaacaagcttacttttatgccagagacctcgaagtccatcccaaagacacatttgtgttcagtatagatggcaacgtactctctaatattccatactacaaa

SEQ ID NO: 9421 - DNA, 400 bp, Glycine max
  unsure (1)..(400): unsure at all n locations
  Clone ID: LIB3039-032-Q1-E1-A4
ggcagttagaagtgtgtagttcgacttcgtgaaaaagcatcatgagccgctacgacagccgctccggcgacccaacttcctatcgtgaccggaggagcgattctgggctaggtgcacctacagggtttggtggttctgtacaacactcttcatcaaacaggagggattatgaagatggtgggtcaccanagaggaacctcagtttggatggtttacctcattttgagaaaaacttctacgttgagtcaccagctgtaagggcaatgacagatgctgaagttaatgagtaccggcagcagagggaaataactgttgaaggtcgagatatcccgaaacctgtcaagtcctttcatgatgctggttttccagaatatgtaatggaagaaattacaaaagctgg

SEQ ID NO: 9422 - DNA, 385 bp, Glycine max; identical to SEQ ID NO: 8834
  Clone ID: LIB3039-032-Q1-E1-A5

SEQ ID NO: 9423 - DNA, 397 bp, Glycine max; identical to SEQ ID NO: 7408
  Clone ID: LIB3039-032-Q1-E1-A6

SEQ ID NO: 9424 - DNA, 398 bp, Glycine max
  Clone ID: LIB3039-032-Q1-E1-A7
ggcacaagtttgttgagatagctagaagcaataagatgaaaatgaaagtgcttgttttgtttgttgctacagttttggtagcatatgaatgccatggctcagactaccagaagttccctctccgaatgaaaactgggtttggtgggcaatacagcaatgaggtggcatgtgccagttggaggcttggcgtggaagcaaacaacgtagtcaagtggcaaactgttcctgcagcttgcggagagtacatagctgactacgttctaggagaccaatatagatcagattccaaaacagttaaccaacaagcttatttctatgctaaatccctcaaactcaccaacaaagatgtctttgtcttggacgttgacgacactactctctctaatctccagtatttt

SEQ ID NO: 9425 - DNA, 397 bp, Glycine max
  Clone ID: LIB3039-032-Q1-E1-A8
ggcacaagtgagtttgttgatcgagataactagaaacagtgtgatgaaaatgaaggtccttgttttcttcgttgccacaattttggtagcatggcaatgccatgcgtacgatatgttccctctccgaatgaacactggctatggtgcccgtactccggaggtgaaatgcgcaagttggaggcttgctgtggaagcacacaacatctttggctttgagaccattcctgaagagtgcgttgaagcaacaaaggaatacatccatggcgaacaatatagatcagactccaaaacagttaaccaacaagcttacttttatgccagagacctcgaagtccatcccaaggacacatttgtgttcagtatagatggcaccgtactctctaatattccatactac

SEQ ID NO: 9426 - DNA, 372 bp, Glycine max
  Clone ID: LIB3039-032-Q1-E1-A9
ggagttgaatcggtgagtcagtgaccgagttgaaccatgtcggacgaagagcaccatttcgaatccaaggccgatgccggagcctccaagacctatcctcagcaggccggaaccatccgcaaaaacggctacatcgtcatcaagggtcgcccctgcaaggttgttgaagtttctacttccaagactggtaagcacggccatgctaagtgtcactttgttgggattgatattttcactgccaagaagcttgaagatattgtgccctcttcccacaactgtgatgttccccatgtgaatcgtactgattaccagttgattgacattgctgaggatggatttcttagcttgcttactgaaaatgggaacaccaag

SEQ ID NO: 9427 - DNA, 354 bp, Glycine max
  Clone ID: LIB3039-032-Q1-E1-B1
ggcacaagtgagtttgttgatcgagataactagaaacagtgtgatgaaaatgaaggtccatgttttcatcgatgctacaatttcggtagcatggcaatgccatgcgtacgataagttccctccccgcaagaacactggctaaggtgtccgtactccggaggtgaaatgcgcaagttggaggcttgctgtggaagcacacaacatctttggctttgagaccattcctgaagagtgcgttgaagcaacaaaagaatacatccatggcgaacaatatagatcagactccagaacagttaaccaacaagcttacttttatgccagagacctccaaatccatcccaaagacacatttgt

SEQ ID NO: 9428 - DNA, 351 bp, Glycine max
  Clone ID: LIB3039-032-Q1-E1-B10
gattcaaatttcccttgcgttcccctttcatttccccccacttccccgcccgcaaaaggccctcccccccctccaatgggcggacaactcaacgacgaacaaattgccgaattcaagggaggcttcagacccctcgacaaggacagcgaagggtgtattactactaaggaacctgggactgtgatgcggtcactagggcaaaacccaactgagggaaaactgcaggatatgattaaagagggtgaagctgatggcaatggaaccatcgacttcccagagttcctcaacctgatggctcgcaagatgaaagacgccgactccgaggaggagcttaaggaggttttccgtgtg

SEQ ID NO: 9429 - DNA, 366 bp, Glycine max
  Clone ID: LIB3039-032-Q1-E1-B11
gctacagattcttcagcaactgcgattttggatcggaacctcttctgcggcgtagcaatgggacactccaacgtttggaattctcacccaaaaaaactacggtcctggttctcgcacttgccgagtgtgtgggaatccacatggattaatcaggaagtatggccttatgtgctgcaggcagtgcttccgtagcaatgccaaggaaattggcttcatcaagtatcgctaaaagagctgttgtcacctacggaccaatattatgttctggcactaggatgttttgaagatgttatgtttgaagaaacttgagacttgtttttttcatctattttattatcagacataatgtgtggaacgaagaatact

SEQ ID NO: 9430 - DNA, 361 bp, Glycine max; identical to SEQ ID NO: 8010
  Clone ID: LIB3039-032-Q1-E1-B12

SEQ ID NO: 9431 - DNA, 392 bp, Glycine max
  unsure (1)..(392): unsure at all n locations
  Clone ID: LIB3039-032-Q1-E1-B2
ggtgcacaagtgagtttgttgatcgagataactagaaacagtgtgatgaaaatgaaggtccttgttttcttcgttgctacaattttggtagcatggcaatgccatgcgtacgatatgttccctctccgaatgaacactggctatggtgcccgtactccggaggtgaaatgcgcaagttggaggcttgctgtggaagcacacaacatctttggctttgagaccattcctgaagagtgcgttgaaacaacaaaggaatacatccatggcgaacaatatagatcagactccanaacagttaaccaacaagcttacttttatgccagagacctcgaagtccatcccaaggacacatttgtgttcagtatagatggcaccgtactctctaatattcc

SEQ ID NO: 9432 - DNA, 405 bp, Glycine max
  Clone ID: LIB3039-032-Q1-E1-B3
gacatctttcactcgttctctgaaattttaattgacttttctcccctcataaaaaaaacctaccaatggctcccgcaaaggcagagaagaagcccgcggagaagaagccggcagagaaggccccagcggagaagaagccgaaggcggagaagaagatatcgaaggaaggaggaagcgagaagaagaagaagagaacaaagaagagcgttgagacctacaagatctacatcttcaaggtgttgaagcaagtgcaccccgacatcgggatctccagcaaggctatggggatcatgaacagtttcataaacgacatcttcgagaagctcgcccaggagtcatcgcgtctcgctaggtacaacaagaagcccaccattacttccagggagattcaaacggcggtgcgtt

SEQ ID NO: 9433 - DNA, 402 bp, Glycine max
  Clone ID: LIB3039-032-Q1-E1-B4
ggcacaagtgagtttgttgatcgagataactagaaacagtgtgatgaaaatgaaggtccttgttttcttcgttgctacaattttggtagcatggcaatgccatgcgtacgatatgttccctctccgaatgaacactggctatggtgcccgtactccggaggtgaaatgcgcaagttggaggcttgctgtggaagcacacaacatctttggctttgagaacattcctgaagagtgcgttgaagcaacaaaggaatacatccatggcgaacaatatagatcagactccaaaacagttaaccaacaagcttacttttatgccagagacctcgaagtccatcccaaggacacatttgtgttcagtatagatggcaccgtactctctaatattccatactacaaaaa

SEQ ID NO: 9434 - DNA, 397 bp, Glycine max; identical to SEQ ID NO: 7408
  Clone ID: LIB3039-032-Q1-E1-B6

SEQ ID NO: 9435 - DNA, 392 bp, Glycine max
  Clone ID: LIB3039-032-Q1-E1-B7
ggccgaaaaccctaacaacacaggcgcagagcgtgatccattgacgaagatggtgcagcgtctcacctaccgcaagaggcacagctatgccaccaaatccaaccaacacagggtcgtcaaaacccctggtgggaagctcgtttatcagaccaccaagaagagggccagcgggcccaagtgccccgtcactggcaagaggattcaggggattccacacttgaggcctgcagagtacaagagatcaaggttacccagaaaccgtaggactgtcaaccgtgcatatggcggagttttgtctggaagtgctgtcagggagaggattatccgagctttcttagttgaagagcaaaagattgtgaagaaggtcttgaagatccagaaggcaaaggaaa

SEQ ID NO: 9436 - DNA, 398 bp, Glycine max
  Clone ID: LIB3039-032-Q1-E1-B8
gatataacacaaacacaaattacatagcctcagtaatctgagagagaaacaaaaacaatgaaggtttccattgccaagttccactcccttcccctatgttttttccttctcttggccttcaacacaaaacccctcctagcagcagaaccagagccagtggttgataagcaagggaaccctttggagccaggagtaagggtactacgtgtggccactttgggctgatgaaggaggcctcacactaggccaaacaaggaacaagacatgccctctttatgttatccgtgacccttcattcattggcaccccagtttcattcttagcaccaggccttgaccatgttccaacactcactgatctaaccattgatttccctgtggtgacagtgtgtaaccagc

SEQ ID NO: 9437 - DNA, 366 bp, Glycine max
  Clone ID: LIB3039-032-Q1-E1-B9
ggttttagagtggtggagtgtgcagaagagcgtcgcagtcgcaaccctaatcagaagaagcgcagcttcaagcgagtgacagccaccagccatgggtcgtatgcacagccgcggtaagggtatatcctcttctgctttgccctacaaaaggacacctcctagctggctcaagatctcttcgcaagatgtcgaagaaaatatctgcaagtttgcgaagaaaggtttgaccccgtctcagattggtgtcattctcagagattctcacggtattgctcaggtcaatagcgtcactggcagcaaaatccttcgcatcctcaaagctcacggacttgcgcctgaaattccagaggacctgtaccatttgat

SEQ ID NO: 9438 - DNA, 405 bp, Glycine max
  Clone ID: LIB3039-032-Q1-E1-C1
gaaaagcgatcaacgaatagagaaagaaagaaagcgaaatcaaattgttagagaaacgcgagttaatccagaaatcaaagaaagcgttacttgacgttcgtttgaacattaacaacattaacacaaatggcaacacgaactggtcgcttgtttcaaaatcaaaacctgaatgtccacgttaatggaggaggaactgtttctgagaaggctgatttaacaggacagaggaaagttagggctgggggaagaaaaccacttggagatctatccaatgcagggaacctcatcaaccattttgatggaaagaaaggccttgatggttcactgtacacgggcaaaccctctgttagtcatgcacaagcaccgaaattgcacaagtcaaaagaatcctgaaagtgacaaaag

SEQ ID NO: 9439 - DNA, 366 bp, Glycine max
  Clone ID: LIB3039-032-Q1-E1-C10
gactgtccgaagtagaattgatgtgccggaagacagaaatgaggggactgtccaaagtagaattgatgtgccggaagacagaagtgaggatttggttacaatgcaaaccttatcctgtgagaatgatgcaaaatcaaagttagtatgccctctatgcagagggcaaataaaagagtggaaagtagtggaggcggctcgtcatttcatgaatgaaaaatcaaggagctgttcttgtgagacttgcaacttcagtggcacatacccagatcttaggaagcatgcaagacttgaacatcctcttgagcgcccatctgcagtagacccagagcgtcagcgtagctggaggaggttggagcgccagaggga

SEQ ID NO: 9440 - DNA, 354 bp, Glycine max
  Clone ID: LIB3039-032-Q1-E1-C11
gacgattactaccaagtgaaaaagcaattaactaagcatatatagcgtgtaagacagtgagaaaaaaagtgttgtgtagagagaaatggctaggtggtgcatcttggtggttcttgcccttgtcgtggttgcaagtgccagaaacatgcccaatgacgcaggtttggaggaccagaagaacttcctcgggtatgggttctctggagttggcaacaatgggcttccctttggaggagtgggttctgggtttgatggtaatatgggtgggccttctgggctcggtggatttggaggattcggtgggcctagcgggctcggaggtcttggtaacggtgaagggcccaaccttcctct

SEQ ID NO: 9441 - DNA, 364 bp, Glycine max
  Clone ID: LIB3039-032-Q1-E1-C12
gaaggtgcaagagtttgttgtgagctataagctagtttatcgtgaggagaatatgaagttgtttgttttctttgttgctgcagtagttttggtagcatggccatgccatggcgcaggctaccaaaggttccctctccgaatgaaaactggctatggtgagcgttcttcggaggtaaaatgcgcaagttttaggcttgctgtggaagcacacaacatccgagcctttaaaaccattcctgaagagtgcgttgaaccaacaaaggactacattaatggcgaacaatttagatcagactctaaaacagttaaccaacaagctttcttttatgctagtgaacgcgaagtccatcacaacgacatattt

SEQ ID NO: 9442 - DNA, 390 bp, Glycine max
  Clone ID: LIB3039-032-Q1-E1-C2
gaacatgaacattagcagaaaataaataagacccacttgttagattggttacactagcagcacgcagggttctgttctgctttgcattctccgccatcatcatgcaagcgcttcactctcccaccctccgcgcttctcccttggaccctcttcgtggccccaacaatgccgccgccaaccgccgctcctccagcgccaagcgcgtgttcttcgtctccgccacggtggcgccgaaggtgtccgccccgcatcgacagaaggaccccaagaagcgcgttgtgatcaccggaatgggcctcgcgtcggtgttcggtaacgacgtggagggttactacgagaagctcctcgccggcgagagcggcatcaccgccatcgaccgcttcgacgcct

SEQ ID NO: 9443 - DNA, 397 bp, Glycine max
  Clone ID: LIB3039-032-Q1-E1-C3
ggcacaagtgagtttgttgatcgagataactagaaacagtgtgatgaaaatgaaggtccttgttttcttcgttgctacaattttggtagcatggcaatgccatgcgtacgatatgttccctctccgaatgaacactggctatggtgcccgtactccggaggtgaaatgcgcaagttggaggcttgctgtggaagcacacaacatctttggctttgagaccattcctgaagagtgcgttgaaccaacaaaggaatacatccatggcgaacaatatagattagactccaaaacagttaaccaacaagcttactttgatgccagagacctcgaagtccatcccaacgacacatttgtgttcagtatagatggcaccgtactctccaatgatccatactac

SEQ ID NO: 9444 - DNA, 401 bp, Glycine max
  Clone ID: LIB3039-032-Q1-E1-C4
ggcacaagtgagtttgttgatcgagataactagaaacagtgtgatgaaaatgaaggtccttgttttcttcgttgctacaattttggtagcatggcaatgccatgcgtacgatatgttccctctccgaatgaacactggctatggtgcccgtactccggaggtgaaatgcgcaagttggaggcttgctgtggaagcacacaacatctttggctttgagaccattcctgaagagtgcgttgaagcaacaaagggaatacatccatggcgaacaatatagatcagactccaaaacagttaaccaacaagcttacttttatgccagagacctcgaagtccatcccaaggacacatttgtgttcagtatagatggcaccgtactctctaatattccatactacaaa

SEQ ID NO: 9445 - DNA, 402 bp, Glycine max; identical to SEQ ID NO: 7940
  Clone ID: LIB3039-032-Q1-E1-C5

SEQ ID NO: 9446 - DNA, 398 bp, Glycine max; identical to SEQ ID NO: 8994
  Clone ID: LIB3039-032-Q1-E1-C6

SEQ ID NO: 9447 - DNA, 398 bp, Glycine max; identical to SEQ ID NO: 8994
  Clone ID: LIB3039-032-Q1-E1-C7

SEQ ID NO: 9448 - DNA, 399 bp, Glycine max
  Clone ID: LIB3039-032-Q1-E1-C8
ggttcaaagcacgccgtgtttcgctgtctctcccatcctttcgcattctcaatacccttttgatttgtgaaaggaaagcaaacatggttgatcaggtccaacaccctacaatcatggacaaggttgctggtcagctccatctccgttctggtctttcatctggtattagaagttatgatggagcctaccgccacccagctatgtaccaaagaccctcttttgggaattactcgaatgctgcattgcagtttcctgtgatgcccacatgcaaagctaccatggatttgtctgctactgcaacatctgcctcacccgtctttgttgctgctccagcagagaaaggccattttcttttagactttctcatgggacgtgtttcagcagctgtctccaaaactg

SEQ ID NO: 9449 - DNA, 365 bp, Glycine max; identical to SEQ ID NO: 9382
  Clone ID: LIB3039-032-Q1-E1-C9

SEQ ID NO: 9450 - DNA, 311 bp, Glycine max
  Clone ID: LIB3039-032-Q1-E1-D1
gacgaatactaccaagtgaaaaagcaattaactgagcatatatagcgtgtaagaaagtgagaaaaaaaatcttctgtacaaagaaaagggcaagtggggcaaccttgggggtcctggccctgtccttgttaccacttccagaaaaatgccccaataagcaagttttgagggacacaaaaactttctccagtcaagggtccctggaatttggaaccaaagggcttcctttggaagaattggttctgggttttaatggcatatcagttgggccttttggacccgtggaatttgatgaatccgatgggccaacc

SEQ ID NO: 9451 - DNA, 361 bp, Glycine max
  Clone ID: LIB3039-032-Q1-E1-D10
gacacttcaaaatcctctggtaacccttattttatctattctctctctttcttttgtgttctaagcagctagaagcaatggagaggaaaagaagccatgcctctttcaccatgtttgcaatgcttgttggagtgatctctcagagccttgtcattcctgtagtatccaccactgttgaagatcagaagaactactacaccccagatccacatgctggaagtcccccctcaggctcacacagtagtactcctccatctcatggccatgggagctctccaccctcacatcatcacagtagtccaagtactccatcaacaccctcaggtggaaactgtggatcatcacctccacaacatcatga

SEQ ID NO: 9452 - DNA, 361 bp, Glycine max
  Clone ID: LIB3039-032-Q1-E1-D11
ggcacaagtttgtcgagatagctagaagcaataagatgaaaatgaaagtgcttgttttgtttgttgctacagttttggtagcatatgaatgccatggctcagactaccagaagttccctctccaaatgaaaactgggtttggtgggcaatacagcaatgaggtggcatgtgccagttggaggcttggcgtggaagcaaacaacgtagtcaagtggcaaactgttcctgcagcttgcggagagtacatagctgactacgttctaggagaccaatatagatcagattccaaaacagttaaccagcaagcttatttctatgctaaatccctcaaactcaccaacaaagatgtcttcgtcttgga

SEQ ID NO: 9453 - DNA, 362 bp, Glycine max
  Clone ID: LIB3039-032-Q1-E1-D12
gcctgagcaaaaccctaatccctatttttcttcctcagtagtgtcatttacgcttctcttctctgcagcaactatgcctaaccctaaggtcttcttcgacatgaccatcggcggtcaatctgctggccgcatcgtgatggagctctacgccgacgtcactccccgcaccgccgagaacttccgcgcgctttgcaccggcgagaatggcgtagggcggagcggcaagcccctccactacaagggctcgtccttccaccgcgtgatcccgagtttcatgtgtcagggtggcgacttcaccgccgaaaacggaaccggcggcgagtcgatttatggcgccaagttcgccgacgagaacttcgtga

SEQ ID NO: 9454 - DNA, 403 bp, Glycine max
  Clone ID: LIB3039-032-Q1-E1-D2
ggaacctttgcattctattcattcaagattcagcaagtgcgttttggaagcagagaccgaaatacttcgagatggcccgtacaaagcaaactactcgtaagtcaactggaggaaaagctcccaggaagcagcttgcaaccaaggctgcacgtaagtctgcaccaacaactggtggtgtgaagaagcctcatcgttatcgccctggaactgttgctcttcgtgagattaggaaataccagaagagcactgagctcctaatcaggaagcttcctttccagaggttggttcgtgaaattgcccaggatttcaagactgatctgcgtttccagagccatgctgtgcttgcattgcaagaggctgctgaggcataccttgttgggctctttgaggacactaacttgtg

SEQ ID NO: 9455 - DNA, 236 bp, Glycine max
  Clone ID: LIB3039-032-Q1-E1-D3
ggaacctttggattctagtcattccacattcagcagctgcgttttggaaccagagaccgaaatacttcgacatggcccgtagaaagcagactactcgtaagtcaactggaggaaaagctcccacgaagcagcttgcaatcaacgctgcacgtaagtctgcagcatcaactggtggtgtcaacaacgctcatcgttatcgccctgtaatctgttgctcttcgtgagattatgaaata

SEQ ID NO: 9456 - DNA, 398 bp, Glycine max
  Clone ID: LIB3039-032-Q1-E1-D4
gaccacaccaccctactacattcccacctttagtcttgttcttagagatggcttgtgaaaccaagtcatggttggttatgtttcttgttttcttggttgctaattgcatgcaacattgtgtccacggggtgtctcaagtgccttgcctttttatctttggggactctatgtctgatagtggaaacaacaatgaacttccaaccacttcaaaatctaatttcagaccatatgggatcgactttccattaggaccaactgggagatataccaatggccgaacagaaattgacataatcactcaatttctgggatttgagaaatttatcccaccctttgcaaacactagtggttcagacatacttaaaggtgttaactatgcatcaggtggatctggtata

SEQ ID NO: 9457 - DNA, 393 bp, Glycine max
  Clone ID: LIB3039-032-Q1-E1-D5
gactcaccacttcaaaacactcataacacaaagcacaaagcaaagctcatccttgagttaaaaaatggcagcagcttcttccatggctctctcatccccatccttggctggcaaggccgtgaagctgggcccatcagccccagaagtgggaagggtgagcatgaggaagaccgtcaccaagcaggtctcctcaggaagcccatggtacggcccagaccgagtcaagtacttgggcccattctctggcgagcccccgtcctacctaaccggtgagttcccaggcgactacggctgggacactgctgggctttccgcagacccagaaaccttcgccaagaaccgtgaactcgaagtgatccactccaggtgggccatgctcggagccttgggctg

SEQ ID NO: 9458 - DNA, 226 bp, Glycine max
  Clone ID: LIB3039-032-Q1-E1-D6
ggtcatagtattatcattcattctcatctttctctcttctctctccacccaaaccctaactcccgaccctgttcccctctcgtatccgtcatgaaaggaggaaagtccaagaccgaatctaagagagccgattccaaacttgctgtgaataacaagggagccgccaccagagctaggaaacccgccggcaaggggaacgcaccgaaagaccctaacaagccaaaga

SEQ ID NO: 9459 - DNA, 396 bp, Glycine max; identical to SEQ ID NO: 8695
  Clone ID: LIB3039-032-Q1-E1-D7

SEQ ID NO: 9460 - DNA, 400 bp, Glycine max
  Clone ID: LIB3039-032-Q1-E1-D8
ggcacaagtgagtttgttgatcgagataactagaaacagtgtgatgaaaatgaaggtccttgttttcttcgttgctacaattttggtagcatggcaatgccatgcgtacgatatgttccctctccgaatgaacactggctatggtgcccgtactccggaggtgaaatgcgcaagttggaggcttgctgtggaagcacacaacatctttggctttgagaccattcctgaagagtgcgttgaagcaacaaaggaatacatccatggcgaacaatatagatcagactccaaaacagttaaccaacaagcttacttttatgccagagacctcgaagtccatcccaaggacacatttgtgttcagtatagatggcaccgtactctctaatattccatactacaaa

SEQ ID NO: 9461 - DNA, 364 bp, Glycine max
  Clone ID: LIB3039-032-Q1-E1-D9
ggctctggcagtaaagaatccatgccatcttaacatggcagcctgtttgattaagctgaaccgctacgaagaagccataggacaatgcagcattgtactgggtgaggatgagaacaatgtgaaggcattatttaggcgaggtaaggctagagcagcacttgggcaaacggatactgccagggaagattttctaaaggcaagtaaatatgcccctcaagacaaagcaattgctaaagaattgagattgcttgctgaacatgacaaggctgtttaccaaaagcagaaagagatatataaaggaatatttggaccaaggcctcaaccagttcctaagccaagaaattggctcatacttatttggcag

SEQ ID NO: 9462 - DNA, 390 bp, Glycine max
  Clone ID: LIB3039-032-Q1-E1-E1
ggcacaagtgagtttgttgatcgagataactagaaacagtgtgatgaaaatgaaggtccttgttttcttcgttgctacaattttggtagcatggcaatgccatgcgtacgatatgttccctctccgaatgaacactggctatggtgcccgtactccggaggtgaaatgcgcaagttggaggcttgctgtggaagcacacaacatctttggctttgagaccattcctgaagagtgcgttgaagcaacaaaggaatacatccatggcgaacaatatagatcagactccaaaacagttaaccaacaagcttacttttatgccagagacctcgaagtccatcccaaggacacatttgtgttcagtatagatggcaccgtactctctaatattcc

SEQ ID NO: 9463 - DNA, 345 bp, Glycine max
  Clone ID: LIB3039-032-Q1-E1-E10
gatccataaccatggcgtctaactctgcttccgctctttacttccttttatgcctatcgcccatcactttgcttctttctgcgtttcgtgctcaagctcaatctcatgctccagctcccactttcaagtactgtgaaaagaatgcagactatgctgtgaaggtgagtggagtggaaatattgcctgaccccgtggagagaggagtgccattcacctttaagatcccagcttatactcctgaaccaattcaaagcggggacttgttatatgaaatttcttatgctggaatagaagcacaacctgctacatttctccatgatctctgtgaggaagcaccatgcccag

SEQ ID NO: 9464 - DNA, 356 bp, Glycine max; identical to SEQ ID NO: 7609
  Clone ID: LIB3039-032-Q1-E1-E11

SEQ ID NO: 9465 - DNA, 364 bp, Glycine max
  Clone ID: LIB3039-032-Q1-E1-E12
ggcggctgcagtagagaagcactcttcgttcttcgactgtctacgatctgctttctctgaattgtgaaaatgtcgctcggagaaactgcttgttcatacgcagctctcatccttcatgaagatggaattagtgtaactgctgacaagatcagcaccttgttgaaaactgcaaaggttccagtagactcttattggccaaccttgtttgctaaacttgctgagaagaaaaatcttggcgatttgatagcaaatgcggcaggcggtggtgcaccagttgctgttgcagctgccccagttgctgctgctgctggtggtgctgctgccgcagctccagctgctgaggagaaaaagaatgaagaaccgg

SEQ ID NO: 9466 - DNA, 370 bp, Glycine max
  Clone ID: LIB3039-032-Q1-E1-E2
ggcacaagtttgttgagatatctataagcagttagatgaaaatgaaagtgcttgttttgtttgttgcgacagttttggcagcataggaatgccatggctcacactaccataagttccctctccaaatgacaaccgggtttggtgggcaatacagcaatgacgtggcatgtgccagttggacgcttggcgtggaagcacacaacgtactcacgtggccaactgttcctgcagcatgcggagagtatatatctgactacgttctaggagacccctagacatcagattccaaatcagttcaccaacagtcttacttctatgctacatctctcacactcaccatcaaatatgtccttgtcatggacgttgatga

SEQ ID NO: 9467 - DNA, 385 bp, Glycine max
  Clone ID: LIB3039-032-Q1-E1-E3
ggaacttctcacgttcatttctacacatccctagctctgtcgttccgtcgttgacgatggcgtttcgggtgcgaagccctgacctccgctctctctttcttctctctctcttgtccatcgcttccgccaatgtcttcttcgaagagcgtttcgatgacgggtgggaaaatcgatgggttaaatcagattggaaaaaagatgagaacgtggctggggagtggaaccacacctctggtcaatggaatggagacgctaatgacaaaggtattcaaaccagtgaggattacagattccatgctatttcagctgagtaccctgaattcagcaacaagggtaagacactagtctttcaattttctgttaagcacgaacagaagcttgactg

SEQ ID NO: 9468 - DNA, 403 bp, Glycine max
  Clone ID: LIB3039-032-Q1-E1-E4
ggtgcacaagtgagtttgttgatcgagataactagaaacagtgtgatgaaaatgaaggtccttgttttcttcgttgctacaattttggtagcatggcaatgccatgcgtacgatatgttccctctccgaatgaacactggctatggtgcccgtactccggaggtgaaatgcgcaagttggaggcttgctgtggaagcacacaacatctttggctttgagaccattcctgaagagtgcgttgaagcaacaaaggaatacatccatggcgaacaatatagatcagactccataacagttaaccaacaagcttacttttatgccagagacctcgaagtccatcccaaggacacatttgtgttcagtatagatggcaccgtactctctaatattccatactacaaaa

SEQ ID NO: 9469 - DNA, 361 bp, Glycine max; identical to SEQ ID NO: 9193
  Clone ID: LIB3039-032-Q1-E1-E5

SEQ ID NO: 9470 - DNA, 385 bp, Glycine max; identical to SEQ ID NO: 8834
  Clone ID: LIB3039-032-Q1-E1-E6

SEQ ID NO: 9471 - DNA, 401 bp, Glycine max
  Clone ID: LIB3039-032-Q1-E1-E7
gaaaacaatgacaacacttcccgaaacccccaccgtttcccccatggaaaacgaaaacaccatcctccgaaacggcaccgccaagaaacccaagctcacgcacgccatttccgaggctgagatccgcgaagaattctcccaccaccagcgcggcgtcgcaagaatcaacaacggtagcttcggcagctgcccgcgctccgtcctcaacgcacagtccatctggcagctccgcttcctccagcatcccgacgacttctacttcaactcgctccgccccggcatcctcgcctcacgcgccgccatcaaagatatcatcaatgccgaacacgtggacgacgtctcgctcgtcgacaacgccaccaccgccgccgccgtcgtcctccagcagatcggccgccact

SEQ ID NO: 9472 - DNA, 401 bp, Glycine max
  Clone ID: LIB3039-032-Q1-E1-E8
ggcacaagtgagtttgttgatcgagataactagaaacagtgtgatgaaaatgaaggtccttgttttcttcgttgctacaattttggtagcatggcaatgccgtgcgtacgatatgttccctctccgaatgaacactggctatggtgcccgtactccggaggtgaaatgcgcaagttggaggcttgctgtggaaacacacaacatctttggctttgagaccattcctgaagagtgcgttgaagcaacaaaggaatacatccatggcgaacaatatagatcagactccaaaacagttaaccaacaagcttacttttatgccagagacctcgaagtccatcccaaggacacatttgtgttcagtatagatggcaccgtactctctaatattccatactacaaaa

SEQ ID NO: 9473 - DNA, 371 bp, Glycine max
  Clone ID: LIB3039-032-Q1-E1-E9
ggcacaaggggggtgcaagagtttgttgtgagctataagctagtttaccgtgaggagaatatgaagttgtttgttttcattgttgctgcagtagttttggtatcatggccatgccatggcgcaggctaacaaaggttccctcaccgaatgataactggctatggtgagcgttcttcggatgtaagatgctcaagttttaggcttgctgtggaagcacacaacatccgagccattaaaaccattcctgaagagtgcgttgaatcaacaaaggactacattaaaggtgaacaatttagatcagactctaggacagttaaccaacaagctttcatttatgctagtgaacgcgaagtcaatcacaacgacatatt

SEQ ID NO: 9474 - DNA, 390 bp, Glycine max
  Clone ID: LIB3039-032-Q1-E1-F1
gactacacagagccacagtccaaagaatataagaagaggaaagcgaattcccaagcatccattcatcagagaaaccgcaaaatggcttcagtagcgactaagcagcaagagggtgagaaaccggccaagagaaaaccggttttcaccaaagtggatcagctgaaaccgggaaccaacggtcacactctggttgcaaaggtgttgtcctccaacactgtgttgcagaagggacgaccctcttcttcgcacaacattcgccccactctcatcgccgagtgcctcatcggcgacgacaccggcaccatcatcttcaccgcgcgcaacgaacaagttgacataatgaaaaccgacaacactgtgattcttcgtaatgcaaagattgacatgttt

SEQ ID NO: 9475 - DNA, 365 bp, Glycine max; identical to SEQ ID NO: 9382
  Clone ID: LIB3039-032-Q1-E1-F10

SEQ ID NO: 9476 - DNA, 363 bp, Glycine max
  Clone ID: LIB3039-032-Q1-E1-F11
ggcacaagtttgttgagatagctagaagcaataagatgaaaatgaaagtgcttgttttgtttgttgctacagttttggtagcatatgaatgccatggctcagactaccagaagttccctctccaaatgaaaactgggtttggtgggcaatacagcaatgaggtggcatgtgccagttggaggcttggcgtggaagcaaacaacgtagtcaagtggcaaactgttcctgcagcttgcggagagtacatagctgactacgttctaggagaccaatatagatcagattccaaaacagttaaccaacaagcttatttctatgctaaatccctcaaactcaccaacaaagatgtctttgtcttggacg

SEQ ID NO: 9477 - DNA, 355 bp, Glycine max
  Clone ID: LIB3039-032-Q1-E1-F12
gatgcagaatcaaagtacctagcaggccttggagtttctcgtcagcgccaagccatagttgatgggctaagagacagtgttctagcattttctggtaatgtgcctggaacatcatcaaaggatatcatggacatggttctcatgactcaatattttgacacaatgaaggagattggtgcatcctccaaatccaatgctgttttcattccacatggacctggtgctgtgagtgatgttgcttcacaagtaaggaatggtcttctccaaggaaatgcaacaacagagtcttgaagacatacacatatatcatcataccatgatttcctcctccaggcacttgtactttagctttgca

SEQ ID NO: 9478 - DNA, 400 bp, Glycine max
  Clone ID: LIB3039-032-Q1-E1-F2
gacaacaaaccaccacccaccacccaccgccgccacattcacaccacgcgccgccgcttccaatttccccggagacccaccctttgcatggcagtgagctttctggcgcgcgatgtatcggacctctgccttgggaagccgccgctgaggtcgctctccgccgccgccaccgtcgccgacgccttggccgcgctcaagagctccgaccacgagacccacgtcagcttgtggagcttctgcgagaacaagaacgaggttcgttgcgttgggaaactgtgcatggtcgatgttatttgctacctttgcagagaggacaatctcttgtctccttctaaagctctcaaagaaccactttcttcaattctccctaaggatcaatctctcgttgtgcatcttcaac

SEQ ID NO: 9479 - DNA, 397 bp, Glycine max
  Clone ID: LIB3039-032-Q1-E1-F3
ggcacaagtgagtttgttgatcgagataactagaaacagtgtgatgaaaatgaaggtccttgttttcttcgttgctacaattttggtagcatggcaatgccatgcgtacgatatgttccctctccgaatgaacactggctatggtgcccgtactccggaggtgaaatgcgcaagttggaggcttgctgtggaagcacacaacatctttggctttgagaccattcctgaagagtgcgttgaagcaacaaaggaatacatccatggcgaacaatatagatcagactccaaaacagttaaccaacaggcttacttttatgccagagacctcgaagtccatcccaaggacacatttgtgttcagtatagatggcaccgtactctctaatattccatactac

SEQ ID NO: 9480 - DNA, 385 bp, Glycine max
  Clone ID: LIB3039-032-Q1-E1-F4
ggagtacaacttcacattttagaagaataccccctcttttgctgcatcagaggagttgtaaattaagagcatggctgcacaagctcttgtatcatcatcttctcttaccttctcagcggaggctgcaagacaaagtcttggaccaagatcactccaatctccatttggcttctccagaaaagcctcctttcttgttaaggcagctgctaccccccctgtcaagcaaggatcagacagacctttgtggtttgcatcaaagcaaagtctttcttacttggatggcagccttccgggtgactatggatttgactctctgggactttcagaccctgaaggaacaggagggttcattgagccgaaatggctagcatatggtgagataatc

SEQ ID NO: 9481 - DNA, 397 bp, Glycine max; identical to SEQ ID NO: 7408
  Clone ID: LIB3039-032-Q1-E1-F5

SEQ ID NO: 9482 - DNA, 397 bp, Glycine max
  Clone ID: LIB3039-032-Q1-E1-F6
gaaggtgcaagagtttgttgtgagctataagctagtttatcgtgaggagaatatgaagttgtttgttttctttgttgctgcagtagttttggtagcatggccatgccatggcgcaggctaccaaaggttccctctccgaatgaaaactggctatggtgagcgttcttcggaggtaaaatgcgcaagttttaggcttgctgtggaagcacacaacatccgagcctttaaaaccattcctgaagagtgcgttgaaccaacaaaggactacattaatggcgaacaatttagatcagactctaaaacagttaaccaacaagctttcttttatgctagtgaacgcgaagtccatcacaacgacatatttatattcggcatagataacaccgtactctctaat

SEQ ID NO: 9483 - DNA, 370 bp, Glycine max
  Clone ID: LIB3039-032-Q1-E1-F7
ggcagagctgaatttggtgatcaacataactagaatcaatgtgatgaagatgaaggtccttgttgtcttcgttgcgggaattgtggtagcatggcaatgccaagcgtacgagatgttccctctccgattcaacactggatatggtgcccgtactccggaggtgacatgcgcaggttggaggcttgctgtggaaccacacatcatctttggctttgacaccattcctgaagactgcgttgaagcatcacatgaatacatccatgacgaacaatatagataagactccatatcagttaagcaagaagcttagttttatgcgagagacctcgaaattcatcccaaggatccatttgtgtacagtatagatggc

SEQ ID NO: 9484 - DNA, 395 bp, Glycine max
  Clone ID: LIB3039-032-Q1-E1-F8
gagagatcattgtccattatcacagaaatgggtgaaaacaaggaagaagaaaagaaagaagagaccacagaggaaaagaaggaaaaagagcctccagagatagtgctcaaggttgatatgcactgtgaagcttgtgcaaggaaagttgcaaaagcattgaaaggatttgaaggagtggaggaggtgactgcagatagcaaggcaagcaaagtggtagtgaaaggaaaggcagcagaccccataaaggtgtgtgagagactacaaaagaaaagtggcaagaaagtagagctcatttcacctttgcctaaacctccagaggagaaaaaagaagaagaaatcaaagaagaaccgcagccagaggagaaaaaggaggagcttcctcctgtggtaacagt

SEQ ID NO: 9485 - DNA, 364 bp, Glycine max
  Clone ID: LIB3039-032-Q1-E1-F9
ggaggaagccacatagagacacaatacagagtgagttgttgctccttcgccacaactctctgccaacatgggtatctccagagattctatgcacaagaggcgtgccactggtggcaagaagaaggcctggaggaaaaagagaaagtatgagcttggtcgccagcctgctaacactaagctgtcaagcaacaagacagtcaggaggatccgtgttagaggtggaaatgtgaaatggagggcattgagattggatactggaaattactcctggggaagtgaagctgtaactcgcaagactcgtgtactagatgtggtttacaatgcctcaaacaatgagcttgtgcgtactcagactcttgtcaaa

SEQ ID NO: 9486 - DNA, 397 bp, Glycine max; identical to SEQ ID NO: 7408
  Clone ID: LIB3039-032-Q1-E1-G1

SEQ ID NO: 9487 - DNA, 367 bp, Glycine max
  Clone ID: LIB3039-032-Q1-E1-G10
gatatacgtctaggggattggaaggctgctgatattgaaattttgaattcctttcagttgctgactgccaagcctgttgtatacttggttaatatgacagaaaaagattaccaaagaaaaaagaacaagtttctgcccaaaattcatgcatggtgtaaatgatgggatggaagaatgtctctatgtctggtctacgattatggcttgatgcacataggatatgccaattttcactcctaacattccattcctggtcttgactcatatcagcaatagggtccaagagcacggtggtgagactattattcctttcagctgtgccttggaaaggaatcttgcagatatgccaccagatgaagctgctaag

SEQ ID NO: 9488 - DNA, 363 bp, Glycine max; identical to SEQ ID NO: 7427
  Clone ID: LIB3039-032-Q1-E1-G11

SEQ ID NO: 9489 - DNA, 366 bp, Glycine max
  Clone ID: LIB3039-032-Q1-E1-G12
gattatatttgagttcaaacatatcaaagccatggccacctccaacttctctattgttctctccgtctccctagccttctttttggtgctacttaccaaggcacactcgaccgataccgtttctttcaccttcaacaagttcaacccagtccaaccaaacattatgctccaaaaagatgctagtatttcatcctctggggtgttacaactcaccaaagttggcagcaacggcgtgcccacctcgggatctctcggtcgtgccctttacgctgccccaatccagatttgggacagcgaaaccggcaaggtagccagctgggctacatcctttaaattcaacattttcgcacccaacatatcaaactc

SEQ ID NO: 9490 - DNA, 375 bp, Glycine max
  Clone ID: LIB3039-032-Q1-E1-G2
ggctgtgaagtgtgaattaaaatatattcaattttgcgtttctctgcctaaaaggattgaaagatgggtcaagcattcggttgctaccaagtcgatcagtcaaatgtggctatcaaggagcattttggaaaatttgatgatgtcctagagcctggatgtcactgcctgccttggtgtcttgggtaccagattgctggtagtctgtcgctgcgagtgcagcaacttgatgttcgatgtgagacgaaaaccaaggacaatgtctttgtcaatgtggttgcatctgtgcaataccgagctgtgtctgagaaagcatctgatgcattctataggcttaccaacacaagggagcagatccaatcatatgtttttgatgtc

SEQ ID NO: 9491 - DNA, 397 bp, Glycine max; identical to SEQ ID NO: 7408
  Clone ID: LIB3039-032-Q1-E1-G3

SEQ ID NO: 9492 - DNA, 402 bp, Glycine max
  Clone ID: LIB3039-032-Q1-E1-G4
gatgcacaagtttgttgagatagctagaagcaataagatgaaaatgaaagtgcttgttttgtttgttgccacagttttggtagcatatgaatgccatggctcagactaccagaagttccctctccaaatgaaaactgggtttggtgggcaatacagcaatgaggtggcatgtgccagttggaggcttggcgtggaagcaaacaacgtagtcaagtggcaaactgttcctgcagcttgcggagagtacatagctgactacgttctaggagaccaatatagatcagattccaaaacagttaaccaacaagcttatttctatgctaaatccctcaaactcaccaacaaagatgtctttgtcttggacgttgacgacactactctctctaatctccagtattttgc

SEQ ID NO: 9493 - DNA, 397 bp, Glycine max
  unsure (1)..(397): unsure at all n locations
  Clone ID: LIB3039-032-Q1-E1-G5
gacattgtgagtatcaacaagaatactcataatataggtagcatatagagctatagttatattgatattgctatttgttaagctcttatttcctcggccatggctaataatgaacgtgatctcttctcggcggagattgtgaatcgtggaattgaaccgtcgggacccaacgctggctcgttgacattctctgtgagggtgaggaggcgcttaccggattttctgcaatcggtgaaccttaagtacgtgaaatggggttaccattatctcataaaccatggcatatacttgttcaccatacccgttcttctcgtggtgtttagtgctgaggttgggagcctcagcanagaggacctatggaagaagctttgggaagacgcgcgttacgaccttgcta

SEQ ID NO: 9494 - DNA, 398 bp, Glycine max
  Clone ID: LIB3039-032-Q1-E1-G6
ggaaaaagggagtgcctgataacccataaccgaccgcaccaccgttttcctttgctttgcgttctacaatgtcgaaaacctcagagattattacatgcaaagctgctatttgctggggaataggaaaacctgtgactgtggaagagatacaagtagaccctcccaaagccaccgaagttcgagttaagatgctttgtgccagtatatgctccacagacatctctagcacaaaaggattcccacataccaattttcctatagcacttggacacgaaggagttggtattatagagagtgtcggtgatcaagtaacgaatctgaaagaaggggatgtggtaattccaacatacataggcgagtgccaagaatgtgagaattgtgtttcagaaaaaaccaat

SEQ ID NO: 9495 - DNA, 399 bp, Glycine max
  Clone ID: LIB3039-032-Q1-E1-G7
ggcacaagtgagtttgttgatcgagataactagaaacagtgtgatgaaaatgaaggtccttgttttcttcgttgctacaattttggtagcatggcaatgccatgcgtacgatatgttccctctccgaatgaacactggctatggtgcccgtactccggaggtgaaatgcgcaagttggaggcttgctgtggaagcacacaacatctttggctttgagaccattcctgaagagtgcgttgaagcaacaaaggaatacatccatggcgaacaatatagattagactccaaaacagttaaccaacaagcttacttttatgccagagacctcgaagtccatcccaaggacacatttgtgttcagtatagatggcaccgtactctctaatattccatactacaa

SEQ ID NO: 9496 - DNA, 365 bp, Glycine max
  Clone ID: LIB3039-031-Q1-E1-A12
ggagcttgcggggaacgctgcgagggacaacaagaagacgaggatcgttccgaggcacattcaactggcggttaggaacgacgaggagttgagcaagctgatgggatctgtgaccattgccaacggtggtgttctgcctaacattcaccagaatttgttgcccaagaaggtcgctggcaaggggaagaccgagattggatctgctagtcaggagttttagatttaaggctcttgttttcgtatgtagttggttgccttatatagtaagattaggattgacattggatgatgtatagtcctttaacatttgaaaataattagttgttttctaacatggttcctgcatacttttcatttatttgagt

SEQ ID NO: 9497 - DNA, 363 bp, Glycine max
  unsure (1)..(363): unsure at all n locations
  Clone ID: LIB3039-029-Q1-E1-B7
gattggtaccgcgaaacgcacatttcactattcattctcgtttccctttcgactgtgattgtttgttaactgaacttttcgagcaaaatgtctggacgtggaaaggggggcaagggtttgggaaagggaggagcgaaacgacaccgtaaggtgttgcgcgataacattcagggaatcaccaagcctgcgattcggcgtttggctcgcaggggtggtgtgaagcgtatcagtggtctcatctacgaggagacacgtggcgtgctcaagatctttctggagaacgtgattcgtgacgccgttacctacactgagcacgctangagaaagaccgttacggcaatggataaggtttatgctctcaag

SEQ ID NO: 9498 - DNA, 375 bp, Glycine max
  Clone ID: LIB3039-029-Q1-E1-B8
gatcaattcaaaatatatcatcaattataagcatgggtttgtggaacacaacgaatgcagtgtcttgccgctttcacaagtttggtgatgaccaaaagaatctggtcttccaaggtgatgccacgtcttcttccaggggcatagaactcacaaagttagacggtggaggaaaaccagtgggtggcagtgtggggagagtgttatactcttctccagtgcacctttgggaaagctctacagtggtcgcaagctttgaaaccgacttcaccttttccatctcatcagactctactactccaggtgatggccttgccttcttcattgcaccatttgacactaaaatccctccaaactctggtgggagcaaccttggac

SEQ ID NO: 9499 - DNA, 421 bp, Glycine max
  Clone ID: LIB3039-029-Q1-E1-B9
gaccacgcgtcccatacgggctgcgaagaaaaacgacaagaaagggaagacagacacacactcggttctgccttcacaaaaaaattatcgagatcccctttttctcctaagaaaagccatggctaagggtcccggtctctactctgacatcggcaagaaagccagggatctgctgttcaaggactaccacagtgaccagaagttcaccatcaccacctactcacccactggagttgctataacagcatcaggaaccaggaaaagtgaactgtttgtggctgatgtcaacacccagttgaagaacaaaaacatcactactgatatcaaagttgatacagattctaatctcttcacaactatcactgttaataaacctgctcctggtctgaaggctatttttagcttcaaagttcctgaccaa

SEQ ID NO: 9500 - DNA, 354 bp, Glycine max
  Clone ID: LIB3039-029-Q1-E1-C1
aagaaggaagctgaagtcatagaagagaagaaggaagtggaagtgacggaagagaagaaggaaattgaagtaacagaagagaagaaggaagctgaagtcatagaagagaagaaggaagtggaagtgacggaagagaagaaggaaattgaagtaacagaagagaagaaggaagcagaagtgaaagaagagaagaaggaaggggaagtgacggaagagaagaaggaagttgaagtgacggaagagaagaaggaagcggaagtgatagtagaagagaagaaggaagttgaagtgacggaagagaagaaggaagtggaagtgaccgaaggaaagaaagaagtggaagtgatcgaagag

SEQ ID NO: 9501 - DNA, 383 bp, Glycine max
  Clone ID: LIB3039-029-Q1-E1-C10
gaccacattccaaaacacagacacatacattgtagtatcacttttgtctcggaatttgttcttttgagttatggcaagcttaaaggttgcatgtgtggttttgatgtgcatggctgtgatgagtgcaccaatgatggtgcaagccgtgtcatgcaatgatgtttctgtgaacctagcaccgtgcctatcttacctgatgcagggtggagatgttccagaatcgtgctgtagcggagtgaggaacattctgggttctgccagcaccacctttgacaaacaaaccgtgtgcaaatgtcttcagcaagctgctaataactatggcatcaacgacgaatacgctcaggcactccccgcccgctgcaatgtcagcgtcccttacaaga

SEQ ID NO: 9502 - DNA, 341 bp, Glycine max
  Clone ID: LIB3039-029-Q1-E1-C11
ggaattctccaaaatagaacaacttacactgaagtaacacatttgactcggaaattgatccatgtagtaatggcaagcttaggtgtagcatgtgtggtcatcgaagtgcatcggctgtgatcaggtgcatcattgatgatgcaagtcgtgtcatgcaatcatgtttctgtgaccctatcaccgtgcctatcctacctgacgcagggtgcagatgttccagaatcatgatgtaccagagtgatgaccattcagggttctgtcaccatcagctttgacaatcacagcgtgtgcaaatgtcttcagcaagctgtgaataactatggcatcacagacgattacac

SEQ ID NO: 9503 - DNA, 379 bp, Glycine max
  Clone ID: LIB3039-029-Q1-E1-C12
gacaagtgagtttgttgatcgagataactagaaacagtgtgttgaaaatgaaggtccttgttttcttcgttgccacaattttggtagcatggcaatgccatgcgtacgatatgttccctctccgaatgaacactggctatggtgcccgtactccggaggtgaaatgcgcaagttggaggcttgctgtggaagcacacagcatctttggctttgagaccattcctgaagagtgcgttgaagcaacaaaggaatacatccatggcgaacaatatagatcagactccaaaacagttaaccaacaagcttacttttatgccagagacctcgaagtccatcccaaggacacatttgtgttcagtatagatggcaccgtactctc

SEQ ID NO: 9504 - DNA, 380 bp, Glycine max; identical to SEQ ID NO: 7921
  Clone ID: LIB3039-029-Q1-E1-C2

SEQ ID NO: 9505 - DNA, 361 bp, Glycine max
  Clone ID: LIB3039-029-Q1-E1-C3
gaaggtgcaagagtttgttgtgagctagaagctagtttatcgtgaggagaatatgaagttgtttgttttctttgttgctgcaatagttttggtagcatggccatgccatggcgcatgctaccaaaggttccctctccgaatgaaaactggctatggtgaacgttcttcggaggtaaaatgcgcaagttttacgcttgctgtggaagcacacaacatccgagcctttaaaaccattcctgaagagtgcgttgaaccaacaaaggactacattaatggcgaacaatttagatcagactctaatacagttaaccaacaagctttcatttatgcgagttaacgcgaattccatcacaacgacata

SEQ ID NO: 9506 - DNA, 223 bp, Glycine max
  Clone ID: LIB3039-029-Q1-E1-C4
gaccgatatgagggtgtcggagtcgttgcagagctgcgcgttcatctatacgaatggcgaagataaaggtgtactagttgaggaataacaccaatgctgatctactgaaccagctcacggatctcaaggcagaactagccctgccccgcatcgccaacgttaccggcggcaccccacacaagctctccaatactcaagtggtgaggctatcgatagcgcacgt

SEQ ID NO: 9507 - DNA, 369 bp, Glycine max
  Clone ID: LIB3039-029-Q1-E1-C5
ggcacatgtgagtttgttgatcgagataactagaaacagtgtgatgaaaatgagtgtccgtgttttcctcggtgctacaattttggtaacatggcaatgccatgcgtacgatatgttccctctccgaatgaacactggctatggtgcccgtactccggatgtgaaatgcgcatgttggacgcttgctgtggaagcacacaacatctttggctttgagaccattcctgaagagtgcgttgacgcaacaagggaatacatccatggcgaacaatatatatcagactccaaaacagttaaccaacaagcttacttttatgccagagacctcgatgtccatcccaaggacacatttgtgtacagtatagatgg

SEQ ID NO: 9508 - DNA, 371 bp, Glycine max
  Clone ID: LIB3039-029-Q1-E1-C6
gaccacattccaaaacacaaacacatacattgtagtatcacttttgtctcggaatttgttcgtttgagttatggcaagcttaaaggttgcatgtgtggttttgatgtgcatggctgtgatgagtgcaccaatgatggtgcaagccgtgtcatgcaatgatgtttctgtgaacctagcaccgtgcctatcttacctgatgcagggtggagatgttccagaatcgtgctgtaacggagtgaggaacattctgggttctgccagcaccacctttgacaaacaaaccgtgtgcaaatgtcttcagcaagctgctaataactatggcgtcaacgacgaatacgctcaggcactcttcgcccgctgcaatgtcagcg

SEQ ID NO: 9509 - DNA, 360 bp, Glycine max
  Clone ID: LIB3039-029-Q1-E1-C7
gaaggtgcaagagtttgttgtgagctataagctagtttatcgtgaggagaatatgaagttgtttgttttctttgttgctgcagtagttttggtagcatggccatgccatggcgcaggctaccaaaggttccctctccgaatgaaaactggctatggtgagcgttcttcggaggtaaaatgcgcaggttttaggcttgctgtggaagcacacaacatccgagcctttaaaaccattcctgaagagtgcgttgaaccaacaaaggactacattaatggcgaacaatttagatcagactctaaaacagttaaccaacaagctttcttttatgctagtgaacgcgaagtccatcacaacgacat

SEQ ID NO: 9510 - DNA, 367 bp, Glycine max
  Clone ID: LIB3039-029-Q1-E1-C8
gaaggtgcaagagtttgttgtgagctacaagctactttatcgtgaggagaatatgaagttgtttgttgtctttgttgctgcagtagttttggtagcatggccatgccatggcgcaggctaccaaaggttccctctccgaatgaaaactggctatggtgagcgttcttcggaggtagaatgcgcaagttttaggctcgctgtggaagcacacaacatccgagcctttaaaaccattcctgaagagtgcgttgaaccaacaaaggactacattaatggcgaacaatttagatcatactctacaacagttaaccaacaagctttcttctatgctactgaacgcgaagtccatcacaacgacatatttata

SEQ ID NO: 9511 - DNA, 367 bp, Glycine max; identical to SEQ ID NO: 7958
  Clone ID: LIB3039-029-Q1-E1-C9

SEQ ID NO: 9512 - DNA, 359 bp, Glycine max
  Clone ID: LIB3039-029-Q1-E1-D1
ggggcgaggtagccagagagtgatacaatacagagtgcgttgttgctccttcgccacaactccctgccaacatgggtatctccagagattctatgcacaagaggcgtgccactggtggcaagaagcaggcatggaggaagaagagaaagtatgagcttggtcgccagcctgctaacactaagctgtcaagcaacaagacagtcaggaggatccgggttagaggtggaaatgtgaagtggagggcactgagattggatactggaaattactcctggggaagtgaagctgtaactcgcaagactcgtatactagatgtggtttacaatgcctcaaacaacgagcttgtgcgtactcagact

SEQ ID NO: 9513 - DNA, 388 bp, Glycine max
  Clone ID: LIB3039-029-Q1-E1-D10
taccctctcccgagcgattaaaacccaaaaagagatctaagaatgaatgcaagaataaaagaaaagaaatagaacaaaaaaaaacctggaataaattcctttgcattgataactcctgaagctcattgtacatcgttgactttttaggcctgtcaggccctagctaggggtttagccactcatggccattgagggcttacaactggggatgaaagaaaggctagactaacaaaacaaagaatgtagagagggaagaaaactcaggcttgaagtactgagagtgatgctctgagatgggatgaaatttccttgggactgcctctctatttatagtggctggagtgggcttacgggccttcgtagtcgcgctcagcgccacacctcgcgc

SEQ ID NO: 9514 - DNA, 383 bp, Glycine max
  Clone ID: LIB3039-029-Q1-E1-D11
gagggtttacactgaggaggcacaccttcaggagcattcatggttctcaaaaccgagctgtgccgattcagcggtgccaagatctacccagggaaacgcatcagatttgttcgtggtgattctcatgttttcctgtttgctaactcaaaatgtaagacgtatttccacaacaagttgaacccgtcaaagctcacgtggactgcaatgtaccgaaagcagcataagaaggatattgctcaagaagctgtgaagaagagaagacgtgctaccataaaaccttactctacgtctaatgttggtgctactttagaagttatccacaaaaagagaaccgagaagccataagttcgagatgcagctaaggaagcacaacttcgtgaaat

SEQ ID NO: 9515 - DNA, 381 bp, Glycine max
  Clone ID: LIB3039-029-Q1-E1-D12
ttgtcttcaaatccatctgaaaaggaaatcaaagaagtaaaaaggaagaaggcgagagccaaagaacttgagggtattgatctaagcaatattgtgtcaagttcacgtagaagatcaacaagtagttatacatctccacctccaaagccaaaggttccagttgaaaccagtggcaatggggctgaaggtagtgataatgacgatgaagataatgataatgaagaggatgaagaagatgaggaagaggatagcggtgacgacgatggaagtcagagtgaagaatttaacgatgatgaagaggacagcgattgaactcggacagatttcacaataattaaggcgatttttttcacaattaattaggaggtgatggtgtataat

SEQ ID NO: 9516 - DNA, 375 bp, Glycine max
  Clone ID: LIB3039-029-Q1-E1-D2
gaagtaaagtgcaagctttatgtgaagtcaagtgatccagcagataaagatgtatggaaagataaaggaatgggccaactgtccattaaatgcaaagagggtgtcagcaaggctaccaaagagtccaaacctacaattgttgttcgaaatgaggtaggaaaaattcttctcaatgccctgttgtatccaggaatcaagacaaatctgcagaaaaactctcttgtcacaatattccatacttcgggtaatattgacggaagtggtggagataacgatagtgttgttgcacgtacattcttgatccggatgaaaacagaagatgatcgaaataaactggcttcaaccatccaagaatatgctccggtgtcttgagag

SEQ ID NO: 9517 - DNA, 366 bp, Glycine max
  Clone ID: LIB3039-029-Q1-E1-D4
ggcacaagtgagtttgttgatcgagataactagaaacagtgtgatgaaaatgaaggtccttgttttcttcgttgctacaattttggtagcatggcaatgccatgcgtacgatatgttccctctccgaatgaacactggctatggtgcccgtactccggaggtgaaatgcgcaagttggaggcttgctgtggaagcacacaacatctttggctttgagaccattcctgaagagtgcgttgaagcaacaaaggaatacatccatggcgaacaatatagatcagactccaaaacagttaaccaacaagcttacttttatgccagagacctctaagtccatcccaaggacacatttgtgttcagtataga

SEQ ID NO: 9518 - DNA, 338 bp, Glycine max
  Clone ID: LIB3039-029-Q1-E1-D5
ggtatcttcaagtccgtctatagaggtaatcaaaaacattgtgatgaagaaggcgagacccatagaacttcatggtactgatctaagcaatattgtgtcaagttcacttagaaaatcaacatctactaatacatctcgacctccagtgccagtacgttccaatgttaaaacactcacattggagcttaacgtagtagacataacgatcaatataatgataaacaagacgatgataatgattaggaacatgatagcagtgaccacgatgcaagtcagagtgatgagtttaacgatgatttagacgacagcgattgatctctgccagatttcacaatatc

SEQ ID NO: 9519 - DNA, 370 bp, Glycine max
  Clone ID: LIB3039-029-Q1-E1-D6
gagccacgtacgcaactgaaaaggaaaaccctaagagatgaagagaactcctatcttgttccctctcttctttcttctttgtgccttcacctcatatctaccttcagccaccgctgatgatgatcatgtgtacgacactgacggcgataagcttcaatacggtgtcaattatttcgtgttgccagtgataagaggaaatggcggtggaatacaagtagcaaaagcaggaaacgaaacttgccctctgactgtggtgcaatctggcaacgagctctctgaggggttaccgataaagattgcatctcgatcagcaggagtcgctttcatcacccaaggccagctttttaagagcattcagttcggtgtgttt

SEQ ID NO: 9520 - DNA, 356 bp, Glycine max
  Clone ID: LIB3039-029-Q1-E1-D7
gaccaacacaaacaatagtgcatagcgtttttcattgtgcattattcaatggccaccacagcagctctatccggaaccatggtgagcacctccttcatgaggaagcaacctatgacgaccaagagcctaaagacattccccaacgctctttttggtctgaaaggtggacgaggtggtcgtgtaacttgcatggcctcgtacaaggtgaagctcataaccccagaaggagaagtggagtttgaatgcccagatgatgttttcattgttgacaaggctgaggaagaaggcattgaacttccctactcgtgcagggctggttcttgcgtttcatgtgttgggaaaattgtgaaaggtga

SEQ ID NO: 9521 - DNA, 372 bp, Glycine max
  Clone ID: LIB3039-029-Q1-E1-D8
gacacaccatccgttctagtctcaacttctgcccttccaactcctacaacgcttttcactgcactcatgggcaaggtcaagatcggcatcaccggctttgggagaattggtcgtttggttgccagagtcgctctgcacagagacgatgttgaactcgttgccgttaacgaccctttcattaccaccgattacatgacatacatgtttaaatacgacagtgttcacggacactggaagtatcacgatgtcaccgttaaggacgagaagacccttctcttcggtgacagagcagtcactgtttttggacacagaaagcctgaagagatcccatgggggtcaactggagctgacagcattgttgagtccaccgga

SEQ ID NO: 9522 - DNA, 237 bp, Glycine max
  Clone ID: LIB3039-029-Q1-E1-D9
gaagacgaagaggaaatgaaatgagcaatacctaaaccaagttatcaataatttcataggcataaacgagaaattgagagagaatgtctcgtatctctacactctatcttctcgcttacaactcctttcaggccattggatggacgatttccttaactaagattttgtacaatcttctcgtcactgcatccatcaaaggaacctatgcttccgccgccagcttaatctgttttctgc

SEQ ID NO: 9523 - DNA, 356 bp, Glycine max
  Clone ID: LIB3039-029-Q1-E1-E1
ggcacaagtgagtttgttgatcgagataactagaaacagtgtgatgaaaatgaaggtccttgttttcttcgttgctacaattttggtagcatggcaatgccatgcgtacgatatgttccctctccgaatgaacactggctatggtgcccgtactccggaggtgaaatgcgcaagttggaggcttgctgtggaagcacacaacatctttggctttgagaccattcctgaagagtgcgttgaagcaacaaaggaatacatccatggcgaacaatatagatcagactccaaaacagttaaccaacaagcttacttttatgccagagacctcgaagtccgtcccaaggacacatttgtgt

SEQ ID NO: 9524 - DNA, 385 bp, Glycine max; identical to SEQ ID NO: 8834
  Clone ID: LIB3039-029-Q1-E1-E10

SEQ ID NO: 9525 - DNA, 372 bp, Glycine max
  Clone ID: LIB3039-029-Q1-E1-E11
gaattaagaaccacattcacattagtcctccgaagatgacagtgacgagtggagaagaagaaggcgccgttggaggagttcagatccaacacaggagcagaatggtgctcccagattttctccagagcgtgaatctcaggtacgtgaaattaggttaccacgacttgatctccaacctcgtaaccttagtccttgtccctcttatcctcgtcacgctcattcaggtttttcagaccatcgacatcgaccacctccgccacctctggctccacctccagtacaacctcctcaccatcctcacctgctccgccgtcctcgtcttcggcctcactctctacgccgtcactcgcccccgcgccgtctacctcctcg

SEQ ID NO: 9526 - DNA, 381 bp, Glycine max
  unsure (1)..(381): unsure at all n locations
  Clone ID: LIB3039-029-Q1-E1-E12
ggcacangtgagtttgttgatcgagataactagaaacagtgtgatgaaaatgaaggtccttgttttcttcgttgctacaattttggtagcatggcaatgccatgcgtacgatatgttccctctccgaatgaacactggctatggtgcccgtactccggaggtgaaatgcgcaagttggaggcttgctgtggaagcacacaacatctttggctttgagaccattcctgaagagtgcgttgaagcaacaaaggaatacatccatggcgaacaatatagatcagactccaaaacagttaaccaacaagcttacttttatgccagagacctcgaagtccatcccaaggacacatttgtgttcagtatagatggcaccgtactctc

SEQ ID NO: 9527 - DNA, 359 bp, Glycine max
  Clone ID: LIB3039-029-Q1-E1-E2
gaaatatataacttcttctatgtgtccggaaatcgttcctatcatcacttctcaggtctcggatcccctcgttcgtgccgatcactaagtcacacttcatcaatggcgggcagaggcaaaaccctaagatccaacgccgctaagaacgccacctcaaggagcagcaaagccggcctccaattccccgtcggtcgtatcgccaggttcctcaaggccggaaagtacgccgagcgcgtctgcgccggagcccccgtctacgtcaccgccgttctcgaatatctcgctgctgaggttttggaattggctggaaactctgcgagagataacacgaagactctaattgttccacaccacatcca

SEQ ID NO: 9528 - DNA, 364 bp, Glycine max
  Clone ID: LIB3039-029-Q1-E1-E3
gacactaaacaagttaaaagaagagcatcactgaactaacaaagcaaccctatgtcgaatgtggtttgtgtcaccggagccagcggcgccatcggatcatgggtggtcctactcctcctccagcgtggttacaccgtccatgccaccgtccaagatatcaaggatgaaaatgagacgaaacatttggaggaaatggaaggagcaaagagtcatctccatttttttgaaatggatcttcttgacatcgactccattgccgctgccataaagggttgttccggcgtaatccaccttgcatgtcctaacatcattggtcaagtcgaagatcccgagaaacagatattggaaccggcgataaaaagaa

SEQ ID NO: 9529 - DNA, 370 bp, Glycine max
  Clone ID: LIB3039-029-Q1-E1-E4
gagcatagcgaaacagagagtggtttcagtgagtgatcggtgttcacttgatccttcataagtcgtcatcatcatcatcatcatcaccgttgattgaagaagatgccgatcagaaacatcgccatcggaaggcctgaagaggctactcaccccgacacgttgaaggcggggttggctgagttcatctccaccttgatcttcgtgttcgccggttcaggttccggcatcgcctacaacaagctcatcgacaacggcgccgccactcccgccggcctcatctccgcttccatcgcccatgctttcgccctcttcgtcgccgtctccgtcggcgccaacatctccggcggccacgtcaaccccgccgtcacct

SEQ ID NO: 9530 - DNA, 376 bp, Glycine max
  Clone ID: LIB3039-029-Q1-E1-E5
gacaaccaattccattattaatcggataagcctcaaccttgcaacccaacacaaccagacattcgctacttgttaacggctgcactataccacaatgtctcacggaagaggcagtgcatctttgcctattgtggtcactgtggtttcactactgtgccttttggaacgtgctaccgcatgcaacttactccgttggaggacctgcgggattgaccttcaacactaacgcttggcccaatggaaaacgattcagagctggtgatatcctaatcttcaactatgactcaccgacccacaatgtggttgctgtggacagaagtcgatacaacacctgctcgacaccagggggtgctaaagtgttcagttcaaggaaaga

SEQ ID NO: 9531 - DNA, 361 bp, Glycine max
  Clone ID: LIB3039-029-Q1-E1-E6
gaaggtgcaagagtttgttgtgagctataagctagtttatcgtgaggagaatatgaagttgtttgttttctttgttgctgcagtagttttggtagcatggccatgccatggcgcaggctaccaaaggttccctctccgaatgaaaactggctatggtgagcgttcttcggaggtaaaatgcgcaagttttaggcttgctgtggaagcacacaacatccgagcctttaaaaccattcctgaagagtgcgttgaaccaacataggactacattaatggcgaacaatttagatcagactctaaaacagttaaccaacaagctttcttttatgctagtgaacgcgaagtccatcacaacgacata

SEQ ID NO: 9532 - DNA, 336 bp, Glycine max
  Clone ID: LIB3039-029-Q1-E1-E7
gaaagtcgagaagattattatggacatgtatcaactttggagcaagaaaataacgttgtgatcgttcgcctttgttccgcttttcctatcggcctcatcagacgacgtcgttgtgcgctctgaagataacttctcagaaagaaattggtcacgactgatgagctctcgttgagttctatgctccttgttgtagacactgcgaaaagcttgctccagaatatgcattgcttggtagcagcttcaagaaagccacatctgtattagtccgcacagttgactgtcaccatcacatcaattcgtgcaccatatatggactctctgggtatcgaacaattc

SEQ ID NO: 9533 - DNA, 389 bp, Glycine max
  Clone ID: LIB3039-029-Q1-E1-E8
agaaggggacctacaaaaatccattctcaattgagaaagcgaaacgcatagaatcgaaagaggggaaaagaaaaagaaaagttagggttagggattttgagagatggcatcgactaagaagatcaccctgaagagttcggacggtgaggccttcgaggtggaggaggcggtggcgctggagtcgcagacgatcaagcacatgatcgaggacgactgcgccgacagtggaatccctctccccaatgtcaccagcaagattctggcgaaggttatcgagtactgcaagaagcacgttgaggcgaacagtgctgatgagaagcccagtgaggatgtgctcaaggcttgggacgtggatttcgtcaacgttgatcaggccactctcttcgatt

SEQ ID NO: 9534 - DNA, 391 bp, Glycine max
  Clone ID: LIB3039-029-Q1-E1-E9
caaaaagggggacaagtgaatttggtgattgataaaactagaaacagtgtgataaaatgaaggtcctgttttcttcgttgctacaattttggtagcatggcaatgccatgcgtacgatatgttccctctccgaatgaacactggctatggtgcccgtactccggaggtgaaatgcgcaagttggaggcttgctgtggaagcacacaacatctttggctttgagaccattcctgaagagtgcgttgaagcaacaaaggaatacatccatggcgaacaatatagatcagactccaaaacagttaaccaacaagcttacttttatgccagagacctcgaagtccatcccaaggacacatttgtgttcagtatagatggcaccgtactctccaat

SEQ ID NO: 9535 - DNA, 367 bp, Glycine max
  Clone ID: LIB3039-029-Q1-E1-F1
gactttcacacagtttcctttcttctctctctggagctagggcgagtgaccggagcggcgaagatagagtcagatcggaagcggaagaaggcgtcgacctcggcggcggagaaggagaaccggaataagaataagaagttgaagatgtcgtcgtcgtcgtcgaaggctggtggcggtggtgaggttagggcttcgcacatattgataaagtacgaaggttctagaaggaaggcctcgtggaaggatccagaaggccgcatcatcaagagcacaaccagagaaaacgcggtttctcagctcaaggccctccgcgacgacatcgtttcgggcaaggccacttttgaggacatcgcctctcgcttctccg

SEQ ID NO: 9536 - DNA, 365 bp, Glycine max; identical to SEQ ID NO: 9382
  Clone ID: LIB3039-029-Q1-E1-F10

SEQ ID NO: 9537 - DNA, 369 bp, Glycine max
  Clone ID: LIB3039-029-Q1-E1-F12
ggcacttcaattgcaatcaaattagttcaattccctttgcgcagttccctagctctcctttcaagatgcagatcgtcgtcaagaccctcaccggaaagaccatcacccttgaggtggaaagctctgacaccatcgacaacgtcaaggccaagatccaggacaaggaatgaattcccccggatcagcaacgtctcatcttcgccggaaagcagctcgaggacggccgtaccctcgccgactacaacatccagaaggagtcaacccttcaccttgtccttcgtctccgtggtggcatgcagatcttcgtcaagactctcactggcaaaaccataaccctagaggtcgaaagctctgacaccattgacaacg

SEQ ID NO: 9538 - DNA, 384 bp, Glycine max
  unsure (1)..(384): unsure at all n locations
  Clone ID: LIB3039-029-Q1-E1-F2
ggcacagcacagcactctttgcaacacaacanaaaaagacaacacagagagaagcgtcttaataaacgctcttctctgaaaaacctgatttcttctcttcttctcttctctttcgtttcgatcttcgatctctgaaaatgagagagtgcatttcaatccacatcggtcaggccggtattcaggtcggaaacgcctgctgggagctctactgcctcgaacacggcattcagcctgatgggcagatgccaagtgataagactgttggtggaggtgatgatgctttcaacaccttcttcagtgaaactggggctggaaagcacgtgcctcgtgcgatttttgtagatctcgagcctactgtgattgatgaagttaggactgggacat

SEQ ID NO: 9539 - DNA, 355 bp, Glycine max
  Clone ID: LIB3039-029-Q1-E1-F3
ggcacaagtttgttgagatagctagaagcaataagatgaaaatgaaagtgcttgttttgtttgttgctacagttttggtagcatatgaatgccatggctcagactaccagaagttccctctccaaatgaaaactgggtttggtgggcaatacagcaatgacgtggcatgtgccagttggaggcttggcgtggaagcaaacaacgtagtcaagtggcaaactgttcctgcagcttgcggagagtacataactgactacgttctaggagaccaatatagatcagattccaaatcagttaaccaagaggcttatttctatgccaaatccctcaaactcaccaataaagatgtcattgt

SEQ ID NO: 9540 - DNA, 358 bp, Glycine max; identical to SEQ ID NO: 7611
  Clone ID: LIB3039-029-Q1-E1-F4

SEQ ID NO: 9541 - DNA, 371 bp, Glycine max
  Clone ID: LIB3039-029-Q1-E1-F5
ggcaaaagtgagtttgttgatcgagattcatacacacagtgtgatgaaaatgaacgcccttgatttcttcgatgctacacttttggtaccatggcaatgccatgcgtattataggttccctctctgaatgaacactggctatggtgcccgtactcaggacgtgaaatgcacacgttggaagcatgctgtggacacatacaacatctttgactttgagaacagtcgtgaacactgcgttgaagcaatccaggaagacatccatggtcaacatgtatagatgacactctagtagagttaacctacacgcttacattcaagcgagagacctcaaagtccatcacgtcgacacatttgtgttcagtataaatggc

SEQ ID NO: 9542 - DNA, 378 bp, Glycine max; identical to SEQ ID NO: 7910
  Clone ID: LIB3039-029-Q1-E1-F6

SEQ ID NO: 9543 - DNA, 374 bp, Glycine max; identical to SEQ ID NO: 7696
  Clone ID: LIB3039-029-Q1-E1-F7

SEQ ID NO: 9544 - DNA, 374 bp, Glycine max
  Clone ID: LIB3039-029-Q1-E1-F8
gatcacatcacatcgcatagagagagagatccatcgatcaattaatttccaatgggcgatcagctcaccgacgaacagatctctgagttcaaggaagcctttagcctcttcgacaaggacggcgatggttgtattaccaccaaggaacttgggactgtgatgcggtcgcttgggcagaacccaactgaggctgagctgcaggacatgataaatgaggttgatgctgatgggaatggtaccattgatttcccagaattcctcaatctcatggcgcgcaagatgaacgacactgattcagaggaagagctgaatgaggctttccgtgtgtttgacaaggatcagaatggtttcatctctgccgcaaagctccgcca

SEQ ID NO: 9545 - DNA, 382 bp, Glycine max
  Clone ID: LIB3039-029-Q1-E1-F9
ggcatcaattcagaatatagcatcaattatgagcatgggtttgtggaacacaacgaatgcagtgtcttgccgctttcacaagtttggtgatgaccaaacgaatctggtcttccacggtgatgctacatcctcgtccagtggcacagaactcaccctgttagacagtggaggaaaaccagtgggtggcagtgtggggagagtgtcatactcttctccagtgcagctttgggaaaactctacagtggacgcaagctttgacaccgacttcagcctttccatctcatcagactctactatgccaagtgatggacttgccttcctcattgcaccatttaacactaaaatccctccagactctggtgggagcaatcttggactcttc

SEQ ID NO: 9546 - DNA, 361 bp, Glycine max
  Clone ID: LIB3039-029-Q1-E1-G1
ggcacaagtgagtttgttgatcgagataactagaaacagtgtgatgaaaatgaaggtccttgttttcttcgttgctacaattttggtagcatggcaatgccatgcgtacgatatgttccctctccgaatgaacactggctatggtgcccgtactccggaggtgaaatgcgcaagttggaggcttgctgtggaagcacacaacatctttggctttgagaccattcctgaagagtgcgttgaagcaacaaaggaatacatccatggcgaacaatatagatcagactccaaaacagttaaccagcaagcttacttttatgccagagacctcgaagtccatcccaaggacacatttgtgttcagt

SEQ ID NO: 9547 - DNA, 238 bp, Glycine max
  Clone ID: LIB3039-029-Q1-E1-G10
gtacggtctagaattacggccaccacgctcataggctgcaaaacacaaagggaaaataacaataaagtggttagtttaccgcccacttggaatccctcccgtccaataaaacaaactgcccaaacaacacaatatcacaaactcaatttcccaattttcggcccctaaaaatgaaccttcaattcaatcccctcctcctaaggccccaacaattctggaacaagccaatcctttcccc

SEQ ID NO: 9548 - DNA, 385 bp, Glycine max
  Clone ID: LIB3039-029-Q1-E1-G11
ggcacaagtgagtttgttgatcgagataactagaaacagtgtgatgaaaatgaatgtccttgttttcttcgttgctacaattttggtagcatggcaatgccatgcgtacgatatgttccctctccgaatgatcactgggtatggtgcccgtactccggaggtgaaatgcgcaagttggaggcttgctgtggaagcacacaacatctttggctttgagaccattcctgaagagtgcgttgaagcaacaaaggaatacatccatggcgaacaatatggatcagactccaaaacagttaaccaacaagcttacttttatgccagagacctcgaagtccatcccaaggacacatttgtgttcagtatagatggcaccgtactctctaat

SEQ ID NO: 9549 - DNA, 377 bp, Glycine max
  Clone ID: LIB3039-029-Q1-E1-G12
aactctcacgccttcggattaatccccctcccaattcaagggttccaaaatggacgctggcggaaagatcaagaagggcgccggaggaagaaagggcggcggccctaagaagaagccggtttcaaggtccgtcaaggccggtctccaattccccgtcggaagaattggccgttatttgaagaaaggaaggtacgcccagcgtgtcggtaccggtgctcccgtttacttggccgcagttctcgagtacctagctgctgaggtgcttgagttggctgggaatgctgcacgtgacaacaagaagaacaggattattccgagacatgtgctgttggctgtaaggaacgatgacgagttggggaaattgcttgctggtgtca

SEQ ID NO: 9550 - DNA, 363 bp, Glycine max; identical to SEQ ID NO: 7753
  Clone ID: LIB3039-029-Q1-E1-G2

SEQ ID NO: 9551 - DNA, 374 bp, Glycine max
  unsure (1)..(374): unsure at all n locations
  Clone ID: LIB3039-029-Q1-E1-G3
ggagagagagagagaaatggagaagacaggagtgttatcggcgaaggatgcattcgagaagcttgaaaaggtgggagaagggacatatgggaaggtgtacagagcaagagagaaggcaactgggaagatcgtggctctgaagaagactcgtctccacgaggacgaagaaggtgtccctcccaccactctccgtgaggtttccattctgcgaatgctctctcgcgatccccatgtcgttaggttaatggatgtcaaacaaggtcagaacaaggaagggaatacagtgctctacttggtatttgagtacatggacaccgatctcaagaaattcatacgctccttccgtcaatctggggaaaccattcctcnccata

SEQ ID NO: 9552 - DNA, 365 bp, Glycine max; identical to SEQ ID NO: 9382
  Clone ID: LIB3039-029-Q1-E1-G4

SEQ ID NO: 9553 - DNA, 375 bp, Glycine max
  Clone ID: LIB3039-029-Q1-E1-G5
ggttgccgttcagtgacagcgagtgacagaatagaagagaagagaacataaccgaaagagaagaagaagaagaaagctagggtttttgcaattgcaacgatggcgcatcaaggagaaccggcgaagttgcgatggggagagctggaggaggacgacggagaggatttggacttcctcctgccgccgcggcaggtgatagggcccgacgagaacgggataaagaacgtgatcgagtacaagttcgacgaggacgggaacaaggtaaagatcaccaccaccacacgcacgcgcaaactcgccaacgcgcgtctcagcaaacgcgccatcgagcgccgctcctggcccaagttcggcgacgcccttcacgaagacgtc

SEQ ID NO: 9554 - DNA, 356 bp, Glycine max
  Clone ID: LIB3039-029-Q1-E1-G6
ggtgcacaggcgaaaaccctaatcctgaggcactgaaagtgtgatatggcaagagtcatttcctcttcctgcgcacgcctcgcaatgcgcctcttctccaccaccaccacagccaccgcgttcgccgtcactttacccaaaccctcgtcactctccctctcatcgcgtcgattcctcttccctctctcccatgccatcgtccctccctccacccgcgtcgccggaatccggtgccgcgttaaccgcgccggagactcggcgtactcaccgctgaactcggggtcgtcgtcttcgtcgttcagcgaccgcccccccacggagatggcgccgctcttccccggctgcgactacaacca

SEQ ID NO: 9555 - DNA, 356 bp, Glycine max
  Clone ID: LIB3039-029-Q1-E1-G7
gattctcccaaactaacaaacacatcccagggagccaccaaccatggcttccaagctctgcgactcatgcaaatcagccactgctaccttgtactgccgccccgacgcggccttcctctgcggcgcctgtgactctaaggttcatgccgccaacaagctcgcatcgcgccacccgcgcgtcgtgctctgcgaggtgtgcgagcaggcgcccgcgcatgtgacctgtaaagccgacgccgccgcgctctgccttgcctgcgatcgcgatatccactccgccaaccccctcgccagccgccacgagcgcatccccgtcacgccgttcttcgagtccgtacattcagtcaaggcctcct

SEQ ID NO: 9556 - DNA, 374 bp, Glycine max
  Clone ID: LIB3039-029-Q1-E1-G9
gggttttagagtggtggagtgtgcagaagagcgtcgcagtcgcaaccctaatcagaagaagcgcagcttcaagcgagtgacagccaccagccatgggtcgtatgcacagccgcggtaagggtatatcctcttctgctttgccctacaaaaggacacctcctagctggctcaagatctcttcgcaagatgtcgaagaaaatatctgcaagtttgcgaagaaaggtttgaccccgtctcagattggtgtcattctcagagattctcacggtattgctcaggtcaatagcgtcactggcagcaaaatccttcgcatcctcaaagctcacggacttgcgcctgaaattccagaggacctgtaccatttgattaagaag

SEQ ID NO: 9557 - DNA, 374 bp, Glycine max
  unsure (1)..(374): unsure at all n locations
  Clone ID: LIB3039-029-Q1-E1-H1
ggtgcacaagtgagtttgttgatcgagataactagaaacagtgtgatgaaaatgaaggtccttgttttcttcgttgctacaattttggtagcatggcaatgccatgcgtacgatatgttccctctccgaatgaacactggctatggtgcccgtactccggaggtgaaatgcgcaagttggaggcttgctgtggaagcacacaacatctttggctttgagaccattcctgaagagtgcgttgaagcaacaaaggaatacatccatggcgaacaatatagatcagactccaaaacagttaaccaacaagcttacttttatgccagagacctcgaagttcatcncaaggacacatttgtgttcagtatagatggcac

SEQ ID NO: 9558 - DNA, 380 bp, Glycine max
  Clone ID: LIB3039-029-Q1-E1-H10
ggcacaagtgagtttgttgatcgagataactagaaacagtgtgatgaaaatgaaggtccttgttttcttcgttgctacaattttggtagcatggcaatgccatgcgtacgatatgttccctctccgaatgaacactggctatggtgcccgtactccggaggtgaaatgcgcaagttggaggcttgctgtggaagcacacaacatctttggctttgagaccattcctgaagagtgcgttgaagcaacaaaggaatacatccatggcgaacaatatagattagactccaaaacagttaaccaacaagcttacttttatgccagagacctcgaagtccatcccaaggacacatttgtgttcagtatagatggcaccgtactct

SEQ ID NO: 9559 - DNA, 364 bp, Glycine max
  Clone ID: LIB3039-029-Q1-E1-H11
ggcacaagtgagtttgttgatcgagataactagaaacagtgtgatgaaaatgaaggtccttgttttcttcgttgctacaattttggtagcatggcaatgccatgcgtacgatatgttccctctccgaatgaacactggctatggtgcccgtactccggaggtgaaatgcgcaagttggaggcttgctgtggaagcacacaacatctttggctttgagaccattcctgaagagtgcgttgaagcaacaaaggaatacatccatggcgaacaatatagatcagactccaaaacagttaaccaacaagcttacttttatgccagagacctcgaagtccatcccaaggacacatttgtgttcagtata

SEQ ID NO: 9560 - DNA, 329 bp, Glycine max
  Clone ID: LIB3039-029-Q1-E1-H2
ggtgcacaagtgagtttgatgatcgagataactagaaacagtgtgatgaagatgaaggtcgttgttttcttcgttgctacaagtttggtagcatggcaatgcgatgcgtatgatatgttccctcgccgaatgaacactggctatggtgcccgtactcgggatgtgaaatgcgcaagttggaggcttgctgtggaagcacacaacatcgttggctttgagaccattcctgaatagtgcgttgaagcaacataggaatacatccatggcgaacaatatagatgagactcgaaaagagttaaccaacaggcttacttttatgccagggacgt

SEQ ID NO: 9561 - DNA, 363 bp, Glycine max
  Clone ID: LIB3039-029-Q1-E1-H4
gaccacattccaaaacacaaacacatacattgtagtatcacttttgtctcggaatttgttcttttgagttatggcaagcttaaaggttgcatgtgtggttttgatgtgcatggctgtgatgagtgcaccaatgatggtgcaagccgtgtcatgcaatgatgtttctgtgaacctagcaccgtgcctatcttacctgatgcagggtggagatgttccagaatcgtgctgtaacggagtgaggaacattctgggttctgccagcaccacctttgacaaataaaccgtgtgcaaatgtcttcagcaagctgctaataactatggcatcaacgacgaatacgctcagggactccccgcccgctgcaa

SEQ ID NO: 9562 - DNA, 349 bp, Glycine max; identical to SEQ ID NO: 9016
  Clone ID: LIB3039-029-Q1-E1-H5

SEQ ID NO: 9563 - DNA, 361 bp, Glycine max
  Clone ID: LIB3039-029-Q1-E1-H6
gagtgcacaagtgagtttgttgatcgagataactagaaacagtgtgatgaaaatgaaggtccttgttttcttcgttgctacaattttggtagcatggcaatgccatgcgtacgatatgttccctctccgaatgaacactggctatggtgcccgtactccggaggtgaaatgcgcaagttggaggcttgctgtggaagcacacaacatctttggctttgagaccattcctgaagagtgcgttgaagcaacaaaggaatacatccatggcgaacaatatagatcagactccaaaacagttaaccaacaagcttacttttatgccagagacctcgaagtccatcccaaggacacatttgtgttc

SEQ ID NO: 9564 - DNA, 378 bp, Glycine max
  Clone ID: LIB3039-029-Q1-E1-H7
gaaccacatcactctttctttcaaatctagggtttcctccttctgcaaccatcaatgtcggcaatcgcggctccccaacacagatcctcgaagacagagtcctacgtggacaataagcgcaaggaggatatccgccatgccaacatcgtggccgcacgctcagtcgccaacgcggttcgcaccagtctgggccctaagggcatggacaagatgatctccacctcctcctcctttcccacggcatccaccccaccgtcgtctccgacgccctccacaaggctgccgtcaaggccgtcgacgttctcaccgccatggccgtccgtcgtcgaactctccgaccgcgactccctcgtgaagtccggcagcacttccctcaaa

SEQ ID NO: 9565 - DNA, 361 bp, Glycine max
  Clone ID: LIB3039-029-Q1-E1-H8
gagtgcacaagtgagtttgttgatcgagataactagaaacagtgtgatgaaaatgaaggtccttgttttcttcgttgctacaattttggtagcatggcaatgccatgcgtacgatatgttccctctccgaatgaacactggctatggtgcccgtactccggaggtgaaatgcgcaagttggaggcttgctgtggaagcacacaacatctttggctttgagaacattcctgaagagtgcgttgaagcaacaaaggaatacatccatggcgaacaatatagatcagactccaaaacagttaaccaacaagcttacttttatgccagagacctcgaaatccatcccaaggaaacatttgtgttc

SEQ ID NO: 9566 - DNA, 394 bp, Glycine max; identical to SEQ ID NO: 7948
  Clone ID: LIB3039-029-Q1-E1-H9

SEQ ID NO: 9567 - DNA, 367 bp, Glycine max
  Clone ID: LIB3039-030-Q1-E1-A1
gatgagcattagagtgtaccttagtgtaactagtagtgaaatatgaaaatggaagtgggttcattttcacaatcaacacatacccaaaagtaacagagagtgacaatagcagagcgacccaatccaaacacagaacagacttagtagtaaaagaaaaacatgacgacgggtatcgtacgcggccagaatctggagaaacatattcacaagcagatggggtgcatggctggtttccttcagatcttcgaccgccaccagatgctcaccggaaaacgcatctactcccccaaacgcctccctccggcctcgcctgagccggagaatctcgcagtctcaccggcgcgttcaacgccgtcgccagcgagag

SEQ ID NO: 9568 - DNA, 371 bp, Glycine max
  Clone ID: LIB3039-030-Q1-E1-A10
gcaaggaatgagtgacacaaggtttttggagggtggaaagtacttttatgacgttggcgcggagaagtacaatccaacaaactatggtgactcgtctagggaagtgaacactaacaattggtacaacaacagaggtgtcaactacaatggataccagaaccaggaggagtttgaagatgagcataagaactttgagccatgagcttggatcactggcaaagtgaagaattcaccatacttaattttgagtatccactatgggtgtttaatgtttttattgtgctttagattcaagaaaacacaaagttaaaggatatgttaactatgaaaggcttttattttattttttacttagtagtacttctattaag

SEQ ID NO: 9569 - DNA, 379 bp, Glycine max
  Clone ID: LIB3039-030-Q1-E1-A11
ggcacaagtttgttgagatagctagaagcagtaagatgataatgaaagtgcttgttttgtttgttgctacagttttggtagcatatgaatgccatggctcaaactaccagaagttccctctccaaatgaaaactgggtttggtgggcaatacagcaatgaggtggcatgtgccagttggaagcttggcgtggaagcatacaacgtagtcaagtggcaaactgtccctgcagcttgcggagagtacatatctgactacgttctatgagaccaatatagatcagattccattacagttaaccaacaagcttatgtctatgctaaatccctcagactcaccaacaaagatgtctttgtcttggaccttgacgatactactct

SEQ ID NO: 9570 - DNA, 385 bp, Glycine max
  Clone ID: LIB3039-030-Q1-E1-A12
gaaaaacatggtggcgagtgagcgagcgatggaagaagaagattttgatttcgagaagaatgtttcgataaaggaatcgatgtcgatgtcgatgtcgacagagcttgatacagccaaagttcttcttttgcttcgtggtttcctccaaattcagcaacgcagggccgaagcatattctaagctcaaaagtgggttttctgactacatggcctctggaggggaattggcttacaatcagctctgcagtgaaatcacaatagagtttaacaattgctcgaaataacacaggtccttgaaatggagtcactgtttagaaaccctgattactgccgagttgatctagcgcagctccttagagctgttcaagatcaggaaaagcacaaac

SEQ ID NO: 9571 - DNA, 385 bp, Glycine max
  unsure (1)..(385): unsure at all n locations
  Clone ID: LIB3039-030-Q1-E1-A2
ggtccttttgccacgcttaagatcacccaagagagaacctaagacacacaacacaacacaaacacacagagttagaggagaaatcatcatggcatcagcagcatctgggtttgtgttgtcacttaatgttgcagctgccaccacaaactcaagggtggtcatgttcaacacaaagaacaacgcttctaggcttgttgtaagggcttcagatgagcctgcagcggcggcacccgccaccgccacacccccagctgaagctgaagctaaaccaaagccaccacctattggccccaagagaggtgctaaggtgaagattcttacgaaggaatcttactggtacaaatgcactggttcagtggttgctgttgatcanggacccaacact

SEQ ID NO: 9572 - DNA, 371 bp, Glycine max
  Clone ID: LIB3039-030-Q1-E1-A3
agggatcgcatttgagatcactcatcctcagtaccatcacgaaagcataaccgaaaccttttttcgaaatcgctgacattcccacaggcaccggctaacgcagagtagaagccagtggagatgacaccaccagcggatcaagcaacagcggagaagaagccgaaggcggagaacatgatcacgaatgacggacgcagcgagaagctgaagaagcgcacgaacaagaacgtggagagctaggctatctacatctacatcgtctcacgcaagtacatgctcacattggtacgtccagcaacgccatgggcatcatcaccagcctcatctgcgacatcttcgagaagcttctcaacgaagcgtcgcgtttggtc

SEQ ID NO: 9573 - DNA, 387 bp, Glycine max
  Clone ID: LIB3039-030-Q1-E1-A4
gataacacagacacaaattacatagcctcagtaatctgagagagaaacaaaaacaatgaaggtttccattgccaagttccactcccttcccctatgttttttccttctcttggccttcaacacaaaacccctcctagcagcagaaccagagccagtggttgataagcaagggaaccctttggagccaggagtacggtactacgtgtggccactttgggctgatgaaggaggcctcacactatgccaaacaatgaacaagacatgccctctttatgttatccgtgacccttcattcattggcaccccagtttcattcttagcaccaggccttgaccatgttccaacactcactgatctaaccattgatttccctgtggtgacagtgtg

SEQ ID NO: 9574 - DNA, 372 bp, Glycine max
  Clone ID: LIB3039-030-Q1-E1-A5
ggcgagagaagttagtagggtttttgagtgcggcggtccaaacactcttctctggagcttttgcccacaactcccttcaccatggctgaacaaaccgagaaagcttttctgaagcaaccacaagtgtttctcagcacaaagaagactgggaagggaaagagacctgtaaaaggtgggaaccgcttttggaagtccattgggcttggatttaagactcacaaggaagccatcgaacgaacctatattgacaagaagtgccccttcactggcaatgtttccatccgtggccgtatcttggctggaacatgtcacagtgctaagatgaacaggactattactgttagaacgaattatctccattttatcaagaag

SEQ ID NO: 9575 - DNA, 330 bp, Glycine max
  Clone ID: LIB3039-030-Q1-E1-A6
ccagttgtcagacagcagcgaaagggggacagataagttagttgggtttttgagtgagacggtctatgaacacttcgctggtccttgtgctcatacgtcccatcactatggttgaacagcactacaaagcgtatcagaagtaaccactcctgtttctcaccacatataatactgggaacgcaaagagacctgtaacaggtttgaacggcttttgtgagtccattgggcatggatttaatactcacaaggaatccatcgtgcgtacctacattgacaggatatatcccttcactggcaatgttatcatccgtgaacatatcttggctggaa

SEQ ID NO: 9576 - DNA, 358 bp, Glycine max
  Clone ID: LIB3039-030-Q1-E1-A7
gattatatttgagttcaaacaaatcaaagccatggccacctccaacttctctattgttctctccgtctccctagccttctttttggtgctacttaccaaggcacactcgaccgataccgtttctttcaccttcaacaagttcaacccagtccaaccaaacattatgctccaaaaagatgctagtatttcatcctctggggtgttacaactcaccaaagttggcagcaacggcgtgcccacctcgggatctctcggtcgtgcccttaacgctgcccaaatcaagatttgggacagcaaaaccggcaaggtacccagctgggcaacatcctttaaattcacaattttgccacccagaaaa

SEQ ID NO: 9577 - DNA, 381 bp, Glycine max
  Clone ID: LIB3039-030-Q1-E1-A8
ggcacaagtttgttgagatagctagaagcaataagatgaaaatgaaagtgcttgttttgtttgttgctacagttttggtagcatatgaatgccatggctcagactaccagaagttccctctccaaatgaaaactgggtttggtgggcaatacagcaatgaggtggcatgtgccagttggaggcttggcgtggaagcaaacaacgtagtcaagtggcaaactgttcctgcagcttgcggagagtacatagctgactacgttctaggagaccaatatagatcagattccaaaacagttaaccaacaagcttatttctatgctaaatccctcaacctcaccaacaaagatgtccttgtcctggacgttgacgacactactctct

SEQ ID NO: 9578 - DNA, 391 bp, Glycine max
  Clone ID: LIB3039-030-Q1-E1-A9
ggcacaagtgagtttgttgatcgagataactagaaacagtgtgatgaaaatgaagggccttgttttcttcgttgcgacaattttggtagcatgggaatgccatgcgtacgatatgttccctctccgaatgaacactggctatggtgcccgtactccggaggtgaaatgcgcaagttggaggcttgctgtggaagcacacaacatctttggctttgagagcattcctgaagagtgcgttgaagcaacacaggaatacatccatggcgaacaatatagatcagactccaaaacagttaaccaacaagcttacttttatgccagagacctcgaagtccatcccaaggacacatttgtgttcagtatacatggcaccgtactctccaatattcca

SEQ ID NO: 9579 - DNA, 346 bp, Glycine max
  unsure (1)..(346): unsure at all n locations
  Clone ID: LIB3039-030-Q1-E1-B1
gattgttgatcacttacacttgacttctatctgccttcacataagacatggacagattcattggtggacacatgtganatgaatatagctgcctcactacaccaatcaggtatgattcggtgactccaacacagatggcacatcatcacgtacacacacttctacagcatgctctacatcagcattggtcttatcacctgatgtcgctatcctcacatactccctacattctgatctcaaatgatctgcacatccatatgtcaaagctatcatcattgtaggatctcttcgatgctagctcttgctccattcttgtccggacaatcttacaatgtatgccacaaac

SEQ ID NO: 9580 - DNA, 386 bp, Glycine max
  unsure (1)..(386): unsure at all n locations
  Clone ID: LIB3039-030-Q1-E1-B10
ggcacaagtgagtttgttgatcgagataactagaaacagtgtgatgaaaatgaacgtccttgttttcttcgttgctacaattttggtaacatggcaatgccatgcgtacgatatgttccctctccgaatgaacactggctatggtgcccgtactccggaggtgaaatgcgcatgttggaggcttgctgtggaagcacacaacatctttggctttgagaccattcctgaagagtgcgttgaagcaacaaaggaatacatccatggcgaacaatatatatcagactccaaaacagttaaccaacaagcttacttttatgccagagacctcgaagtccatcncaaggacacatttgtgttcagtatagatggcaccgtactctctaata

SEQ ID NO: 9581 - DNA, 364 bp, Glycine max
  Clone ID: LIB3039-030-Q1-E1-B11
gaaggtgcaagagtttgttgtgagctagaagctagtttatcgtgaggagaatacgacgttgtttgttttctttgttgctgcagtagttttggtagcatggccatgccacggcgcatgctaccaaaggttccctctccgaatgaaaactggctatggtgagcgttctccggaggtaaaatgcgcaagttttacgcttgctgtggaagcacacaacatccgagcctttaaaaccattcctgaagagtgcgttgaaccaacaaaggattacattaatggcgaacaatttagatcagactctaatacagttaaccaataagctttcatttatgcgagtgaacgcgaagtccatcacaacgacatattt

SEQ ID NO: 9582 - DNA, 319 bp, Glycine max
  Clone ID: LIB3039-030-Q1-E1-B12
ggagagtcagattcacaggcattgcttcgcctcacaacaacagctgcatcaacaatggctcccaaacgacgtggaaaggctccggctcttgccgctaagaagaagcctgaaaaggtcacgaatccgttgttcgagaagcgtctgaagcacttcggaatcagaggggcgttgcctcctacgagagacgtgactaggttcgtgaagtggccagctaatgttcacattcagatgaagaacatgattctgaatcataagttgatcgttcccccagctttgagacagtttgccaaaactcttgacaaaatcctagcatcaagtc

SEQ ID NO: 9583 - DNA, 404 bp, Glycine max
  Clone ID: LIB3039-030-Q1-E1-B2
gatccataaccatggcgtctaactctgcttccgctctttacttccttttatgcctatcgcccatcactttgcttctttctgcgtttcgtgctcaagctcaatctcatgctccagctcccactttcaagtactgtgaaaagaatgcagactatgctgtgaaggtgagtggagtggaaatattgcctgaccccgtggagagaggagtgccattcacctttaagattccagcttatactcctgaaccaattcaaagcggggacttgttatatgaaatttcttatgctggaatagaagcacaacctgctacatttctccatgatctctgtgaggaagcaccatgcccagtacctgcaggcaactttgtgctcgttcacaccgaattattgcctccgggtttacccaca

SEQ ID NO: 9584 - DNA, 391 bp, Glycine max
  Clone ID: LIB3039-030-Q1-E1-B3
ggcacaagtttgttgagatagctagaagcaataagatgaaaatgaaagtgcttgttttgtttgttgctacagttttggtagcatatgaatgccatggctcagactaccagaagttccctctccaaatgaaaactgggtttggtgggcaatacagcaatgaggtggcatgtgccagttggaggcttggcgtggaagcaaacaacgtagtcaagtggcaaactgttcctgcagcttgcggagagtacatagctgactacgttctaggagaccaatatagatcagattccaaaacagttaaccaacaagcttatttctatgctaaatccctcaaactcaccaacaaagatgtctttgtcttggacgttgacgacactactctctccaatcccca

SEQ ID NO: 9585 - DNA, 366 bp, Glycine max
  Clone ID: LIB3039-030-Q1-E1-B4
ggtcagcttcttctgtgtgccaccccctctttaattttttttttctttagcttttggagtttggagtctcttgaaccatggctaagaatagaggagagttgaggattcatgagagtgtggatgagctaaggactgatttggcagactatgttgctgagttatcagaggcatctgtgaaagagcgaggagtctttgccattgctttatctggtggttctctcattggcttaatgggaaaactctgtgaagctccttataacaagacagtggactggtccaagtggtatatcttctgggctgacgagcacgttgtggcgaaaaaccatgccgatagcaattataagcttgctaaagatggccttttgt

SEQ ID NO: 9586 - DNA, 376 bp, Glycine max
  Clone ID: LIB3039-030-Q1-E1-B5
ggagcgaagaagatattagggtttttgagtgcggtgcggcgatcctagcactctcttctgcagctttcgccgacagcttcattcaccatggctgagcaaaccgagaaggcttttttgaaacaaccaaaagtgtttctcagctcgaagaaaactgggaagggaaagagacccggaaagggtgggaaccgcttttggaaatccattgggcttggatttaagactcccagggaagccatcgaaggaacctacattgacaagaagtgccccttcactggcaatgtttccatccgtggccgtatcttggctggaacgtgtcacagtgctaagatgaacaggactattattgttaggaggaattatctccattttatcaaga

SEQ ID NO: 9587 - DNA, 385 bp, Glycine max
  Clone ID: LIB3039-030-Q1-E1-B6
gagagcactgcactcttcgcaacacaacaaagcaagacaacccagagagcgcgtcttaataaacgctcttctctgaaaacccccatttcttttcttctttcttcttctctttcgcgtcttcgatcttcgtcgctgaaaatgagagagtgcatttcaatccacatcggccaggccgggattcaggttggaaacgcctgctgggagctttactgcctcgaacacggcattcagcctgatgggcagatgccaagtgacaagaccgttggtggaggtgatgatgctttcaacaccttcttcagtgaaactggggcaggaaagcacgtgccccgtgcgatttttgtagatcttgagcccactgtgattgatgacgttaagactgggacat

SEQ ID NO: 9588 - DNA, 379 bp, Glycine max
  Clone ID: LIB3039-030-Q1-E1-B7
ggttttgatatggagtgcagttatgcgattgtacagagagccaagcagcagttattgtacaaactttgtacatttgagaaactggcggagttggatccactagaacttgagaaaagaatgcaggaccaagaagaggacgaggatgaaacatttatggaagaggaacatggtgatgatgagaacaaccaagcatcatacaaagaaaatgacttcatagaactaattttccaagctctgtgccaatcaagggtccatgacagacagcaaatcccagaggactttaggaagctggtatctgatctcattatggaagaagagagagcacttgattccttagaagatatggacatggtgataagaaggatatgcaagaggctgg

SEQ ID NO: 9589 - DNA, 366 bp, Glycine max
  Clone ID: LIB3039-030-Q1-E1-B8
gacagctattcctcttaagcttgctactgagtttccacactgcataccttaggtcttccgaattcgaagttaatttgcaagatggctaaggaaaaggctcagatcaacattgtggtggttggtcatgtggaccctgaggaggcaaccaccattaacgagctgaagaagcctgttgtggagaaagaagctccagggcatgccatatgatggcatgcacgtacggcctcggaggggaaccagaaaattatgttaacaaaataatctggaaccctaatgtatcagtgtcatcatcagtgtgtagtttaagctagctttgctatggttacgttctttgagatgagagtcttgatgaacagtaccattctg

SEQ ID NO: 9590 - DNA, 393 bp, Glycine max
  Clone ID: LIB3039-030-Q1-E1-B9
ggcacaagtgagtttgttgatcgagataactagaaacagtgtgatgaaaatgaaggtccttgttttcttcgttgctacacttttggtagcatggcaatgccatgcttacgatatgttccctctccgaatgaacactggctatggtgcccgtactccggaagtgaaatgcgcaagttggaggcatgctgtggaagcacacaacatctttggctttgagaccattcctgaagagtgcgttgaagcaacaaaggaatacatccatggcgaacaatatatatcagactccaaaacagttaaccaacaagcttacttttatgccaaagacctcgaagtctatcccaaggacacatttgtgttcagtaaagatggcatcgtactctccaatattccata

SEQ ID NO: 9591 - DNA, 366 bp, Glycine max
  Clone ID: LIB3039-030-Q1-E1-C1
gacactcaagcccctcactccaaaacaaaacctaaacattttactcttttcggttttttttttttgtttcacacatgccgtcgtcgaattccggcgagagtcgccgagcgagcaagccgcagagctcgggcggagcggcgccgccgccgccggagcaggaaaacccgccgtgcccgcgatgcgactccaccaacaccaagttctgctactacaacaactacaactactcccagccacgccacttctgcaagtcctgccgccgctactggacccacggcggcactctccgcgacattcccgtcggcggcggcagccgcaagaacgccaagcgctcccgcacccaccacgtcgccgccacatcatcct

SEQ ID NO: 9592 - DNA, 370 bp, Glycine max
  Clone ID: LIB3039-030-Q1-E1-C10
atcagtggtgccccccaggataacaacataatgctgtggaatgctgtcatatttggtcctgatgatactccatgggatggaggcacgttcaggttgacactccaatttactgatgactatccaaataaaccaccgactgtacgatttgtgtctcgcatgtttcatccaaatatttatgctgatggaagtatttgtttggatatattacaaaatcagtggagtcctatttatgatgtggctgctatactcacatctatccagtcattgctttgtgatcccaacccaaattctcctgcaaactctgaagcagctcgaatgtttagtgagaacaagcgtgagtacaatcgaatagtgagggacattgtggatc

SEQ ID NO: 9593 - DNA, 391 bp, Glycine max
  Clone ID: LIB3039-030-Q1-E1-C11
ggaggaaagaagagagagaacaaagcacttagtgctattcaataattacgaaaaaccaacagcgagtgttgtttttgtttggtccaggctggaccagggaatgaatagagatgagaggctttcggttgaagagaactgagttaagcggcgaagccaaacgcagaatcggcggcagaaattgccaccggaagcacgtcgaagacgggtgaaccaaacacagaattccatccaccacttctcttttcaatccccaactcaaatctgtgaagaaaatctcaatttctaaattgtaattcttagcactactgctagtagtagtaaaaaatgacaattagaaagtagtacagtgtttttttttctatttttcgtttgttttacttttaagatgggt

SEQ ID NO: 9594 - DNA, 391 bp, Glycine max
  Clone ID: LIB3039-030-Q1-E1-C12
ggcacaagtttgttgagatagctagaagcaataagatgaaaatgaaagtgcttgttttgtttgttgctacagttttggtagcatatgaatgccatggctcagactaccagaagttccctctccaaatgaaaactgggtttggtgggcaatacagcaatgaggtggcatgtgccagttggaggcttggcgtggaagcaaacaacgtagtcaagtggcaaactgttcctgcagcttgcggagagtacatagctgactacgttctaggagaccaatatagatcagatcccaaaacagttaaccaacaagcttatttctatgctaaatccctcaaactcaccaacaaagatgtctttgtcttggacgttgacgacactactctctctaatctcca

SEQ ID NO: 9595 - DNA, 413 bp, Glycine max
  Clone ID: LIB3039-030-Q1-E1-C2
gaggcagtcctgggacgtcatttagaataccagatgcagagatattcttgtacactggcattgagaattcatcagataccaccaattatgatcaagcaagtgtggaatcatattcctgctcaaacgaactaagcaattctgactcagccaattccccacataacaaggagtctacttctgtcaatgtaaggcgctcaaagtttcgtctccactggcctaggagaagagagacaaaagcagctgcctcagaattggcagatgatgattctcttgaccctttcagttcaagtagaaacttggaagagtttccaatcccgttgcggcaaagatactcacaaccatgctcccatccaaacaacaaaagaacacaatctatgaggacttctcttccaagttcatcctcgaatgtgaaa

SEQ ID NO: 9596 - DNA, 335 bp, Glycine max
  Clone ID: LIB3039-030-Q1-E1-C3
gccacacttctgggacatcacttaaggggacgcctccaaatattttcctgtttaccgttgatgagaatgcaccagatgttgtcattcacaatgagacaggtgtcgactcagcatcgtgcacattggagcttctgagttctcatgcatgcacttgccaccttcaattgtgtccatttcggtcaggctacagctgacatttcatggactccactgagcactgatagaaaagttttaaataactgacttacaattgctaaacgataatgccattgtcacttacacttcatttacagacttagtccaatttcaaatcccatagcggaacctattctcac

SEQ ID NO: 9597 - DNA, 344 bp, Glycine max
  Clone ID: LIB3039-030-Q1-E1-C4
ggaaaccgagaagaagaagatggagatgtatcagatctggagcacgagaagagcgttgggagcgttcgcgtgtgttctgcttttcctagcggcctcagcagacgacgtcgttgtgcgctctgaagatgacttcgagaatgaagttggtcatgatagaggagctctcgttgagttctaggctccatggtgtggagactgcaaagagcttgctccagaatatgaaaagcttggtcgcagctgcaataaagccaaatctgtgttaatcggcattgttgactgtgatgagcacatagagtttgtgcagcacatatggagtctctgggtacccacctattcagtggttt

SEQ ID NO: 9598 - DNA, 392 bp, Glycine max
  Clone ID: LIB3039-030-Q1-E1-C5
ggcttcaagatgcctatcattggattgggcgtgtggcgcatggaaggaaacgaaatcagggacctaattctcaattccatcaaaattggttatcgccattttgattgtgctgctgactacaaaaacgaagcagaagttggagatgcgcttaaggaggcttttgatagtggccttgtgaagagagaggatctcttcattaccaccaagctttggaattctgatcaaggccacgttcttgaggcgtgtaaagacagtctcaagaagcttcagttaacgtatctagatttatatcttgttcactttcctgttgccgtaaggcatactggggttggtaatacttctagtcctttgggtgatgatggggtcctggacatagataccaacatatccct

SEQ ID NO: 9599 - DNA, 397 bp, Glycine max
  Clone ID: LIB3039-030-Q1-E1-C6
ggcacaagtgagtttgttgatcgagataactagaaacagtgtgatgaaaatgaaggtccttgttttcctcgttgctacaattttggtagcatggcaatgccatgcgtacgatatgttccctctccgaatgaacactggctatggtgcccgtactccggaggtgaaatgcgcaagttggaggcttgctgtggaagcacacaacatctttggctttgagaccattcctgaagagtgcgttgaagcaacaaaggaatacatccatggcgaacaatatagatcagactccataacagttaaccaacaagcttacttttatgccagagacctcgaagtccatcccaatgacacatttgtgttcagtatagatggcaccgtactctctaatattccatactac

SEQ ID NO: 9600 - DNA, 382 bp, Glycine max
  Clone ID: LIB3039-030-Q1-E1-C7
ggcacaagtttgttgagatagctagaagcaataagatgaaaatgaaagtgcttgttttgtttgttgctacagttttggtagcatatgaatgccatggctcagactaccagaagttccctctccaaatgaaaactgggtttggtgggcaatacagcaatgaggtggcatgtgccagttggaggcttggcgtggaagcaaacaacgtagtcaagtggcaaactgttcctgcagcttgcggagagtacatagctgactacgttctaggagaccaatatagatcagattccaaaacagttaaccaacaagcttatttctatgctaaatccctcaaactcaccaacaaagatgtctttgtcttggacgttgacgacactactctctc

SEQ ID NO: 9601 - DNA, 375 bp, Glycine max
  unsure (1)..(375): unsure at all n locations
  Clone ID: LIB3039-030-Q1-E1-C8
gagacttcataagcctctagtaccccttcctttctcacgctctctctcgtgttcggagcggctatagccactgtttaggaaacatatccatgcttcgttcaacatgtttgcaatgtctgtctgcgatgctctctcagagtcttgtcagtcctgtaatatccacgactgatgtacatcataanagctacgagtccccacatccacattctgcaagtcgccccatatgcttacaccttactgatcctccatctcatggtcattgcaacgctacaacctcacatcacaatcgtccacatactccatcaacactcacatgtagacactgtcgctcatcatcaccacaacatcagtctctatcatgctcatctccatcac

SEQ ID NO: 9602 - DNA, 390 bp, Glycine max
  Clone ID: LIB3039-030-Q1-E1-C9
ggagagaagagagatggatccagacgcgttggcaaaggcattcgtggagcactactacagcaccttcgacaccaaccggaacggtttagcgaatctgtatcaggagggttccatgctgaccttcgaagggcagaagatccatggcgcttccagcatcgtcgctaagctcacttccctccctttccagcagtgccaccactccatctccaccgtcgactgccagccctccggtgtcaacgctggtatgcttgtctttgtcagcggcaacctccagctcgctggcgaacagcacactctcaagttcagccagatgttccatttgataccatcgcctcagggaagctattatgtgttgaatgacatattccgtctgaactatgcatgaagata

SEQ ID NO: 9603 - DNA, 385 bp, Glycine max
  Clone ID: LIB3039-030-Q1-E1-D1
ggacaagccaatcctttgtgtaggtgctcaaccctagtaagccgcaatggtgaagtactcaagggagcctgacaatccaactaagtcttgcaaggctagaggcgccgaccttagggttcattttaagaacacaagggaaactgcctttgcaatcaggaagttgcccttggtcaaggctaaaaggtacttggaagatgttcttgcccacaagcaggcaattccattcagacgtttttgtcgaggtgttggaaggacagcccaggctaagaatagacactctaatggccaaggacggtggcctgtcaagtcagcaaaattcattcttgatttgctcaaaaatgctgagagcaatgctgaagtgaaaagtttggatgttgatgcactg

SEQ ID NO: 9604 - DNA, 390 bp, Glycine max
  Clone ID: LIB3039-030-Q1-E1-D10
ggcacaagtgagtttgttgatcgagataactagaaacagtgtgatgaaaatgaaggtccttgttttcttcgttgctacaattttggtagcatggcaatgccatgcgtacgatatgttccctctccgaatgaacactggctatggtgcccgtactccggaggtgaaatgcgcaagttggaggcttgctgtggaagcacacaacatctttggctttgagaccattcctgaagagtgcgttgaagcaacaaaggaatacatccatggcgaacaatatagattagactccaaaacagttaaccaacaagcttacttttatgccagagacctcgaagtccatcccaaggacacatttgtgttcagtatagatggcaccgtactctctaatattca

SEQ ID NO: 9605 - DNA, 353 bp, Glycine max
  Clone ID: LIB3039-030-Q1-E1-D11
gtaagtccgccgtgtcttcatcatggtcaactgtgacgatttgatgcctgaatatctcatcgttgtcaacggtactgtggattctgaagatcttcctcgcaacatttctaaagaaatgccgcaccagaacaagatcctgaaagtcatcaggaataacttggtcaagaactgcatttagatgttcgctgaaattgctgacaacatcgaagactataacaagttttatgaagccttctctaagaacctgaaacttggtattcatgacgattctcagaactcgacatcgctagctgaattgcacaagtatcactccactaagagtgatgatgagatgaccagcctcaacgactatg

SEQ ID NO: 9606 - DNA, 392 bp, Glycine max
  Clone ID: LIB3039-030-Q1-E1-D12
gcacaagtgagtttgttgatcgagataactagaaacagtgtgatgaaaatgaaggtccttgttttcttcgttgctacaattttggtagcatggcaatgccatgcgtacgatatgttccctctccgaatgaacactggctatggtgcccgtactccggaggtgaaatgcgcaagttggaggcttgctgtggaagcacacaacatctttggctttgagaccattcctgaagagtgcgttgaagcaacaaaggaatacatccatggcgaacaatatagatcagactccaaaacagttaaccaacaagcttacatttatgccaagagacctcgaagtccatcccaaggacacatttgtgttcagtatagatggcaccgtactctctaatattccaa

SEQ ID NO: 9607 - DNA, 341 bp, Glycine max
  Clone ID: LIB3039-030-Q1-E1-D2
cggggcacaagtgagtttgttgatcgagataactagaaacagtgtgatgaacatgaaagtccgtgttttcatcgttgccatactttgggtaacatggcaatgctatgcgtcagatatgtaccctctcggaatgagcactggctatcagtgcccgtaccccggacgtgagatgcgcagtgtttgaggcatgctgttgaagcacacaacatctttggctttgagactattcgtgaagagtgcgttgaagcaacacaggaatacatctatggcgaacaagatcgatgacactcgactagacttatccaacaagctcacctttatgctacacacctcgaagtcca

SEQ ID NO: 9608 - DNA, 393 bp, Glycine max
  Clone ID: LIB3039-030-Q1-E1-D3
gcacaagtgagtttgttgatcgagataactagaaacagtgtgatgaaaatgaaggtccttgttttcttcgttgctacaattttggtagcatggcaatgccatgcgtacgatatgttccctctccgaatgaacactggctatggtgcccgtactccggaggtgaaatgcgcaagttggaggcttgctgtggaagcacacaacatctttggctttgagaccattcctgaagagtgcgttgaagcaacaaaggaatacatccatggcgaacaatatagattagactccaaaacagttaaccaacaagcttacttttatgccagagacctcgaagtccatcccaaggacacatttgtgttcagtatagatggcaacgtactctctaatattccatac

SEQ ID NO: 9609 - DNA, 71 bp, Glycine max
  Clone ID: LIB3039-030-Q1-E1-D4
gaacgtgtaagattgtgtattgagatatctacaagtagtgtgttaagagtaaatgaccttgtttgcttcct

SEQ ID NO: 9610 - DNA, 393 bp, Glycine max
  Clone ID: LIB3039-030-Q1-E1-D5
gacacaccgtttgttctattcttaactcaacttctgctacccactctcttcttccaagtcgaaccacgcttttctctacagtcatgggcaaggtcaagatcggaatcaacggatttggaagaattggccgtttggttgccagagtcgctctgcaaagagacgatgtggagctcgttgccgttaacgaccctttcattaccaccgattacatgacatacatgtttaaatacgacagtgttcacggacactggaagcatcacgatgtcaccgttaaggacgagaagacccttctcttcggtgacaagccagtcactgtttttggacataggaaccctgaagagatcccatgggggtcaactggagctgatatcattgttgagtccaccggagttt

SEQ ID NO: 9611 - DNA, 397 bp, Glycine max
  Clone ID: LIB3039-030-Q1-E1-D6
gaaggtgcaagagtttgttgtgagctataagctactttatcgtgaggagaatatgaagttgtttgttttctttgttgctgcagtagttttggtagcatggccatgccatggcgcaggctaccaaaggttccctctccgaatgaaaactggctatggtgagcgttcttcggaggtaaaatgcgcaagttttaggttgctgtggaagcacacaacatccgagcctttaaaaccattcctgaagagtgcgttgaaccaacaaaggactacattaatggcgaacaatttagatcagactctaaaacagttaaccaacaagctttcttttatgctagtgaacgcgaagtccatcactacgacatatttatattcggcatagattacaccgtactctctaata

SEQ ID NO: 9612 - DNA, 383 bp, Glycine max
  Clone ID: LIB3039-030-Q1-E1-D7
ggcagaactttgttgagatatctacaagcaataagatgaacatgaaagtgcttgttttgtttgttgctacagttttggtaccatatgaatgccatggctcagactaccagaagttccctctccaaatgaaaactgggtttggtgggcaatacagcaatgacgtggcatgtgccagttggaggcttggcgtggaagcaaacaacgtactcaagtggcaaactgttcctgcagcttgcggagagtacatatctgactacgttctacgagaccaatatagatcagattccaatacagttaaccaacaagcttatttctatgctaaatcactcaaactcaccaccaaatatgtcattgtcatggacgttgaccacactactctctct

SEQ ID NO: 9613 - DNA, 392 bp, Glycine max
  Clone ID: LIB3039-030-Q1-E1-D8
ggcacaagtgagtttgtagatcgagatacctagagataatgtgatgaatgatgagtgtcgttggtttcttcattgctagaattttggtaacatggcaatgcaaagcataagatatgttctctctccgaatgaacactgtctagtgtgcccgtaatccggaggttaaatgctgcaagttggaagcttgctgttgaaacacacaacatctttggctttgagaccattcctgaagagtgcgtgaaagtaacaaacgaatacatttataggaaacaataaagatcagactccaaaacagttaaccaacaagcttacttttatgccagagacctcgaagtccatcccaaggacatactttgtgttagtatagatggacacgtactctccaatactcc

SEQ ID NO: 9614 - DNA, 377 bp, Glycine max
  Clone ID: LIB3039-030-Q1-E1-D9
ggaatttttgattcttttcccctagattcagccacagtttcggaggagaagaaaatactcgttcgagatggcccgtacgaagcaaactgctcgtaagtccacaggaggaaaggctcctaggaagcagcttgcaaccaaggctgcacgtaagtctgcaccaactactggtggtgtgaagaagccacatcgttaccgtcctggtaccgttgctcttcgtgagattaggaaataccagaagagtaccgagcttttgatcaggaagctccccttccagaggctggttcgtgaaattgctcaggacttcaagactgatctgcgtttccagagccacgccgtgcttgcattgcaagaagctgctgaggcataccttgttgggc

SEQ ID NO: 9615 - DNA, 360 bp, Glycine max
  Clone ID: LIB3039-030-Q1-E1-E1
ggtgcacaagtgagtttgttgatcgagataactagaaacagtgtgatgaaaatgaaggtccttgttttcttcgttgctacaattttggtagcatggcaatgccatgcgtacgatatgttccctctccgaatgaacactggctatggtgcccgtactccggaggtgaaatgcgcaagttggaggcttgctgtggaagcacacaacatctttggctttgagaccattcctgaagagtgcgttgaagcaacaaaggaatacatccatggcgaacaatatagatcagaccccaaaacagttaaccaacaagcttacttttatgccagagacctcgaagttcatcccaaggacacatttgtgttc

SEQ ID NO: 9616 - DNA, 381 bp, Glycine max
  Clone ID: LIB3039-030-Q1-E1-E10
gagcgaaacagagagtgatttcagtgagtgatcggtgttcacttgatctcatcataatcgtcagcgtcaattgaagaagatgccgatcagaaacatcgccgtcggaaggcctgaagaggcgactcaccccgacacgttgaaggcggctttggctgagttcatctcaaccttcatcttcgtgttcgccggctcaggctccggcatcgcctacaacaagctcaccgacaacggcgctgccacccctgccggcctcatctccgcctccatcgcccatgcattcgccctcttcgtcgccgtctccgtcggcgccaacatctccggcggccacgtcaaccccgccgtcaccttcggcgccttcgtcggcggcaacatcaccttcct

SEQ ID NO: 9617 - DNA, 391 bp, Glycine max
  Clone ID: LIB3039-030-Q1-E1-E11
ggcacaagtgagtttgttgatcgagataactagaaacagtgtgatgaaaatgaaggtccttgttttcttcgttgctacaattttggtagcatggcaatgccatgcgtacgatatgttccctctccgaatgaacactggctatggtgcccgtactccggaggtgaaatgcgcaagttggaggcttgctgtggaagcacacaacatctttggctttgagaccattcctgaagagtgcgttgaagcaacaaaggaatacatccatggcgaacaatatagatcagactccaaaacagttaaccaacaagcttacttttatgccagagacctcgaagtccatcccaaggacacatttgtgttcagtatagatggcaccgtactctctaataatcca

SEQ ID NO: 9618 - DNA, 384 bp, Glycine max
  Clone ID: LIB3039-030-Q1-E1-E12
ggcgtacgcagcttcatccctaacgcgtgcatagcggagtcagagacagagacgcagccatggggcggagacctgcgaggtgttataggcaaattaagaacaagccataccccaagtcacgtttctgccgtggtgttcctgatcccaagatcaggatttatgatgttggtatgaagaagaagggtgttgatgagtttcctttctgtgtccatctggttagttgggagaaggaaaatgtttcaagtgaggccctggaagctgctcgcattgcttgcaacaagtacatggccaaatttgctggaaaggatgctttccacttgagagtcagggtgcacccattccatgttcttaggatcaacaagatgctttcgtgtgctggtgctg

SEQ ID NO: 9619 - DNA, 348 bp, Glycine max
  Clone ID: LIB3039-030-Q1-E1-E2
caatgggatgtttgattaaggttttctcattaacgcatcttctctcttcacactgcgaaagtgcaacctgatagcctccaaatccaatggcttcagacaacaaactttcgaacccaatgagggagataaaagtgcacatgctcgtcctcaatacccctgttggcgacagtggagatcgtctcaccacagccgccaaggtgttggaataacttactggccataccccactgttttccacatcacggtacactgtacgttcctttgggattagaagaaatgagaagattgcatgctatgtcactgtcagaggtgacaacgcaatgcatcttttggagagtggattgaaag

SEQ ID NO: 9620 - DNA, 151 bp, Glycine max
  Clone ID: LIB3039-030-Q1-E1-E3
ccaaatccaagtcgcttcatatcaatcaaatgcttcgaattttggtagggtagatatgctatacatacgagacgttcacacccctgttgacgacagtcgatatcgtccctacacagcaggtaaagtgttcaaataacttacttgctatacc

SEQ ID NO: 9621 - DNA, 360 bp, Glycine max
  Clone ID: LIB3039-030-Q1-E1-E4
gggggtgccattgttgctgtcatcatccgcagctgctgttattcgcaccgcaaacaaacagtgagccatggccgtcggaaagaacaagcgcatctccaaagggaaaaagggtggcaagaagaaggcagctgatccctttgccaagaaggattggtatgacattaaggccccttctctttttcaagtgaaaaatgttggcaaaaccctcgtctctcgtacgcagggtaccaagattgcttctgaaggacttaaacatagagtgtttgaggtctccttggctgatcttcaaggggatgaggatcatgcattcaagaagattacgttgagagctgaagatgtgcaacggaagaatgtcctgac

SEQ ID NO: 9622 - DNA, 379 bp, Glycine max
  Clone ID: LIB3039-030-Q1-E1-E5
ggcgtgcagttcaaagcgaagaaagattcgaaacgaagaaagaaagcgttgtgaagaatggcggaagagggacaagtgatcggtgtccacagcgtagaggagtggaaggaacatctcaagaagggagaagagtccaagaaattgattgtggtggattttactgcttcttggtgcggtccatgccgtttcattgccccaattcatgcagagtttgctaaaaagttgccgaatgtcaccttcctcaaggtggatgtggatgaattggagactgtttccaaggagtggggaattgaggctatgccaaccttcctgttcttgaaagaatgcaagctggtggacaacgttgtgggtgccaagaaagatgagctgcaattgacaa

SEQ ID NO: 9623 - DNA, 384 bp, Glycine max
  Clone ID: LIB3039-030-Q1-E1-E6
gacacacagctattcctcttaagcttgctactgagtttccacactgcataccttaggtcttccgaattcgaagttaatttgcaagatggctaaggaaaaggctcagatcaacattgtggtggttggtcatgtggaccctgaggaggcaaccaccattaacgagctgaagaagcctgttgtggagaaagaagctccagggcatgccatatgagggcatgcacgtacggcctcggaggggaaccagaaaattatgttaacaaaataatctggaaccctaatgtatcagtgtcatcatcagtgtgtagtttaagctagctttgctatggttacgttctttgagatgagagtcttgatgaacagtagcattctgatgtattgccttcc

SEQ ID NO: 9624 - DNA, 382 bp, Glycine max
  Clone ID: LIB3039-030-Q1-E1-E7
gaagttgttcatgttcatttttgcattctcaaaccaaggaaaagtccaagagtttctccctttggttctgtgttttgaatgatgcatgcaacatagtgtaggaaagagggacctgagtgaagcaagtggtgtgattctctcacaaacatggaagagaatgttaagcagccattgttggagaggaaatactacgaggactgcccaggttgtaaagtggatcaagccaaagagttgagtgagggacaaggtgtacctgttagaaatcttttcatcatatggatggtggtgttgtgtgctgcgttgcccatatcgtctctcttccccttcctttatttcatggtaagggattttaatattgcaaaaacagaagctgacattagtt

SEQ ID NO: 9625 - DNA, 405 bp, Glycine max
  Clone ID: LIB3039-030-Q1-E1-E8
ggcacaagtgagtttgttgatcgagataactagaaacagtgtgatgaaaatgaaggtccttgttttcttcgttgctacaattttggtagcatggcaatgccatgcgtacgatatgttccctctccgaatgaacactggctatggtgcccgtactccggaggtgaaatgcgcaagttggaggcttgctgtggaagcacacaacatctttggctttgagaccattcctgaagagtgcgttgaagcaacaaaggaatacatccatggcgaacaatatagatcagactccaaaacagttaaccaacaagcttacttttatgccagagacctcgaagtccatcccaaggacacatttgtgttcagtatagatggcaccgtactctctaatattccatactacaaaaaaca

SEQ ID NO: 9626 - DNA, 391 bp, Glycine max
  Clone ID: LIB3039-030-Q1-E1-E9
gaaaagaaggttaagtgaaaagtgaaaagtgaaaatggacttggaagcagtgaagaggtacttagagaaaggaggagaaacagcatcggcggtggatgggttgcctccgaggtttctggaaccgttaataatgaacgctcttaaggtcgatctcatcgaaactggtcgcgttgtctgctccatgaagatacctccgcgtttactcaatgctgggaattcgttacacggtggcgccatcgctgctctggtcgacgtggtggggtccgctgcgattcccaccgttggatattcggctcccaatactggggtttctgttgagattaatgtttcgtatttggatgctgcctatgccgatgaggagattgagatcgaggccagcgctttgcgtgta

SEQ ID NO: 9627 - DNA, 363 bp, Glycine max
  Clone ID: LIB3039-030-Q1-E1-F10
ggaacttctcatgtgcagttctacacatccctagctctgtcgttccgtcggtgaggatggggtttcgggtgcgaagccctgatctccgcactctctttcttctctctctcttgtccatcgcttccgccaatgtcttcttctaatagcgtttcgatgacgggtgggaaaatcgatgggttaaatcatattggaaaaaagatgagaacgtggctggggagtggcaccacacctctggtcaatggaatggagacgctaatgacaaaggtaatcaaaccattgaggattacagattctatgctatttcagctgagtactctgaattcagcaacaatggtaagacacgaatctttcaattttctgtta

SEQ ID NO: 9628 - DNA, 367 bp, Glycine max
  Clone ID: LIB3039-030-Q1-E1-F11
ggaactctcgcaagcttgttttcttgccttctttttctcttattctctactacaacattttttttgtgtgaaatttctctacaactaaatttccatataggctgcaagaccctcatcaacctacaattagtttgttacatatatagctaggttgaacaatatgggaaggtcaccatgctgtgagaagacagggctaaagaaagggccatggacaccagaggaagaccaaaagctcattgctttcatcgaaaagcatggccatggaagctggcgtgcattgcctgcaaaagctaggcttagaagatgtggaaagagttgcagacttagatggtcgaattatctccgacctgatataaaacgatgaaag

SEQ ID NO: 9629 - DNA, 383 bp, Glycine max
  Clone ID: LIB3039-030-Q1-E1-F12
gaaagtgcaagagtttggtgtgagcgataacctagtttatcgtgcggagaatatgaagttgtttggtgtctttgttgccgcagtagttttggcaacatgggcatgccatggcgcaggctaccacaggttccctctccgaatgaaaactgggtatggtgagcgttcatcggcggtaaaatgcgcaagttttaggcttgctgtgggagcacacaacatccgagcctttaaaaccattcctgaagagtgcgttgaaccaggacaggactacattaatggcgaacaatttagatcagactctaaaacagttaaccaacaagctttcttttatgcgagtgaatgcgaagtccatcacaacgacatatgtatattcagcatacatgaca

SEQ ID NO: 9630 - DNA, 411 bp, Glycine max
  unsure (1)..(411): unsure at all n locations
  Clone ID: LIB3039-030-Q1-E1-F2
gaggaacgttatttttggacatttacctttacatactaactagaacctccctcgcgcttttcttcgtttccaaacccgaaaggcccaaccacagagtctccattgcccctcgctctctctattggttcacgcgcggcaattggagattcacgcgccaccatggcctcaccaccgacactccctatctcctcccaatccagcgcctccggcggctccgcctcgcagtcccagcctccgatcgcaacgccggcgttccgcgccttcatctcccgcatctcctcgtccctccgtcacgcctttgcgcagcgccgcccgtgggcggagctcatcgaccggagctccatgtcncgacctgacaccctcgccgaagcatactctcggattcgcangaacttcggctacttccgcgtc

SEQ ID NO: 9631 - DNA, 364 bp, Glycine max
  Clone ID: LIB3039-030-Q1-E1-F3
ggctggaatatgcagggcatagaaatggaaaggttgtcgtcttcatcggtgatcgcgcacaacacatgggaactcgagaagaacatcatcccgatggacactccgggcggcgccgctaactccgccaccgctacgaccatgaccaatgccgacgactcgatcttccactacgacgaggcggggcagaacgagttccaacgcgacaagccctgtgccaatgaccctcactacttcaagtgcgtgaagatctccgcactcgcgctcctcaagatggtcgtccacgcgcgctccggcggcatgatcgacgtcatgggtctcatgcacggcaagaccgacgccgaagccatcatcgtcatggacgcct

SEQ ID NO: 9632 - DNA, 405 bp, Glycine max
  Clone ID: LIB3039-030-Q1-E1-F4
gaaggtgcaagagtttgttgtgagctataagctagtttaccgtgacgagaataataagttgtttgttttctttgttgctgcagtaattttggtaacatggacatgccatggcgcaggctaccaaacgttccctctccgaatgaaaactggctatggtgagcgttcttcggaggtaaaatgcgcaagttttaggcttgctgtggaagcacacaacatccgagcctttaaaaccattcctgaatagtgcgttgaaccaacacacgactacattaatggcgaacaatttacatcagactctaaacagttaaccaacaagctttcttttatgctagtgaacgcgaagtccatcacaacgacatatttatattcggcatagactacagcgtactctctaatatcccatac

SEQ ID NO: 9633 - DNA, 381 bp, Glycine max
  Clone ID: LIB3039-030-Q1-E1-F5
gaaggtgcaagagtttgttgtgagctataagctagtttatcgtgaggagaatatgaagttgtttgttttctttgttgctgcagtagttttggtagcatggccatgccatggcgcaggctaccaaaggttccctctccgaatgaaaactggctatggtgagcgttcttcggaggtaaaatgcgcaagttttaggcttgctgtggaagcacacaacatccgagcctttaaaaccattcctgaagagtgcgttgaaccaacaaaggactacattaatggcgaacaatttagatcagactctaaaacagttaaccaacaagctttcttttatgctagtgaacgcgaagtccatcacaacgacatatttatattcggcatagatta

SEQ ID NO: 9634 - DNA, 405 bp, Glycine max
  Clone ID: LIB3039-030-Q1-E1-F6
gagtgagagagagagaaggcaagatgtcgaacagaggacgcggtggttcggcggggaacaagttccggatgtcgctgggtctgccggtggcggcgacggtgaactgcgccgacaatacgggggcgaagaacctctacatcatatcggtgaaagggatcaaagggcgtttgaaccgtctcccctcggcttgcgttggcgacatggtgatggccaccgtgaagaacgggaaacccgatctgaggaagaaggttttgccagctgtcattgttcgccagcgcaagccatggcgccgaaaggacggcgtctacatgtatttcgaagataatgctggtgttattgtcaatcccaaaggagaaatgaaaggttctgctatcactggtcccattggaaaagagtgtgctgatc

SEQ ID NO: 9635 - DNA, 335 bp, Glycine max
  Clone ID: LIB3039-030-Q1-E1-F7
gactcaccacttcagaacactcataatacaaagcacaaagcagagctcatccttgaattaaattatggcatgcagcttcttccatggctctctcatccccatccttggctggcaaggccgtgaagctgggcccatcagccccagaagtgggaagggttagcatgacgaataccgtcaccaagcacgtctcttcatgaagcacatggtactgcccagactgagtcaagtaattgggcctattctctggcgagctttcgtactacttaatcggtgagttcccaagcgactacggctgggagactgctgcgctttctgcatacccaaaaatcttcgcc

SEQ ID NO: 9636 - DNA, 350 bp, Glycine max
  unsure (1)..(350): unsure at all n locations
  Clone ID: LIB3039-030-Q1-E1-F8
gaaatagagagtttcgttcgtcaccatgactttcaagcgcaggaatggaggtcgcaacaaacacggccgcggccacgtcaagttcattcgatgctccaactgcggcaaatgctgccctaaggacaaggctatcaagaggtttctggtgaggaacattgttgaacaggctgcagtcagagatgtgcaggaggcttgtgtctacgaacaatacacgcttccgaagctgtatgtgaagatgcagtattgtgtttcctgtgctatccactctcatgttgtgagggttcgatcccgcactgatangagaaagcgtgagcctccacagcgattcatcaggcgcaaggatgatgcac

SEQ ID NO: 9637 - DNA, 380 bp, Glycine max
  Clone ID: LIB3039-030-Q1-E1-F9
gcacaagtgagtttgttgatcgagataactagaaacagtgtgatgaaaatgaaggtccttgttttcttcgttgctacaattttggtagcatggcaatgccatgcgtacgatatgttccctctccgaatgaacactggctatggtgcccgtactccggaggtgaaatgcgcaagttggaggcttgctgtggaagcacacaacatctttggctttgagaccattcctgaagagtgcgttgaagcaacaaaggaatacatccatggcgaacaatatagatcagactccaaaacagttaaccaacaagcttacttttatgccagagacctcgaagtccatcccaaagacacatttgtgttcagtatagatggcaccgtactctc

SEQ ID NO: 9638 - DNA, 384 bp, Glycine max
  Clone ID: LIB3039-030-Q1-E1-G1
ggatgcacaagtttgttgagatagctagaagcaataagatgaaaatgaaagtgcgtgttttgtttgttgctacagttttggtagcatatgaatgccatggctcagactaccagaagttccctctccaaatgaaaactgggtttggtgggcaatacagcagtgaggtggcatgtgccagttggaggcttggcgtggaagcaaacaacgtagtcaagtggcaaactgttcctgcagcttgcggagagtacatagctgactacgttctaggagaccaatatagatcagattccaaaacagttaaccaacaagcttatttctatgctaaatcactcaaactcaccagcaaagatgtctttgtcttggacgttgaccacactactctct

SEQ ID NO: 9639 - DNA, 260 bp, Glycine max
  Clone ID: LIB3039-030-Q1-E1-G10
ggcacaagtttgttgagatagctagaagcaataagatgaagatgaaagtgcttgttttgtttgttgctacagttttggtagcatatgaatgccatggctcagactaccagaagttccctctccaaatgaaaactgggtttggtgggcaatacagcaatgaggtggcatgtgccactttgatgcttggcgtggaagcaaacaacgtagtcaagtggcaaactgttcctgcagctttcagagagtacatagctgactacgtt

SEQ ID NO: 9640 - DNA, 376 bp, Glycine max
  unsure (1)..(376): unsure at all n locations
  Clone ID: LIB3039-030-Q1-E1-G11
gagaatagagagctcctccaattagggtttttgtgatctgcagctacgatgggtaagggaacggggagtttcggtaagaggaggaacaagacccacaccctctgtgtgaggtgtggccgccgcagcttccacctccagaagagtcgttgctctgcgtgcgcttaccccgctgcgcgcaccaggaaatataactggagcgtgaaggccattacgagaaagaccaccggaactggaaggatgaggtacttgcgtaacgtgcctcgcagattcaagagcggcttcagagagggtaccgaagctgcacccaggaagagaggagctgctgcctctgcctaagctttgaatgaatgacagcaatttntgctgggtcagtgaa

SEQ ID NO: 9641 - DNA, 350 bp, Glycine max
  Clone ID: LIB3039-030-Q1-E1-G12
ggaacaaaaaaatgaaggcacctctctctttcaattattgtctcttctcttgtactctgtttattcacagccacatttgaagcacgtctctcttctcttctcttctcttatctataaaagaagaaacaaaggcacctcatccaccaaaacagagctagtttagttatctactcttttctgcatgtttgttctctcaacgactcctccgcgaaagagtattattcaatattttggttgggttgaatcccggggttgaagcgttgcagacatcacggctattctaagagtgtctcgctccctcattcatgtccgatctgtacgacggaagacgggtagttgcgtaactgccg

SEQ ID NO: 9642 - DNA, 296 bp, Glycine max
  Clone ID: LIB3039-030-Q1-E1-G2
ggagcaaaaccctaatccctatttttcttcctcagtagtgtcatttacgcttctcttcgctgcagcaactatgcctaaccctaaggtcttcttcgacatgaccatcggcggtcaatctgctggtcgcatcgtgatggagctctatgccgacgtcactccccgcaccgtcgagaatttccgcgcgctttgcaccggcgagaaaggcgtagggcggagctgcaagcctctccactacaatggctcgtccttccaacgcgtgatcccgagtttcatgtgtcatggttgcgacttcaccg

SEQ ID NO: 9643 - DNA, 406 bp, Glycine max
  Clone ID: LIB3039-030-Q1-E1-G3
gaaggtgcaagagtttgttgtgagctataagctagtttatcgtgaggagaatatgaagttgtttgttttctttgttgctgcagtagttttggtagcatggccatgccatggcgcaggctaccaaaggttccctctccgaatgaaaactggctatggtgagcgttcttcggaggtaaaatgcgcaagttttaggcttgctgtggaagcacacaacatccgagcctttaaaaccattcctgaagagtgcgttgaaccaacaaaggactacattaatggcgaacaatttagatcagactctaaaacagttaaccaacaagctttcttttatgctagtgaacgcgaagtccatcacaacgacatatttatattcggcatagataacaccgtactctctaatatcccatac

SEQ ID NO: 9644 - DNA, 252 bp, Glycine max
  Clone ID: LIB3039-030-Q1-E1-G4
gaccacattccaattcacagacacatacattgtagtatcacttttgtctcggaatttgttctttggagtcatggcaaccgtaaaagttgcatgtgtggttttgatctacatggcagtcaagaatgcactaacgctcgtgcaagccgtgtcatacaatgatctttctgtgaacgtaacatcctcccgatctaagctgactcagggtgcacatgttctacaatccttcagtaccagactgaggaacattctggg

SEQ ID NO: 9645 - DNA, 403 bp, Glycine max
  Clone ID: LIB3039-030-Q1-E1-G5
ggcacaagtgagtttgttgatcgagataactagaaacagtgtgatgaaaatgaaggtccttgttttcttcgttgctacaattttggtagcatggcaatgccatgcgtacgatatgttccctctccgaatgaacactggctatggtgcccgtactccggaggtgaaatgcgcaagttggaggcttgctgtggaagcacacaacatctttggctttgagaccattcctgaagagtgcgttgaagcaacaaaggaatacatccatggcgaacaatatagatcagactccaaaacagttaaccaacaagcttacttttatgccagagacctcgaagtccatcccaaggacacatttgtgttcagtatagatggcaccgtactctctaataatccaaaactacaaaaa

SEQ ID NO: 9646 - DNA, 400 bp, Glycine max
  Clone ID: LIB3039-030-Q1-E1-G6
ggtgcacaagtgagtttgttgatcgagataactagaaacagtgtgatgaaaatgaaggtccttgttttcttcgttgctacaattttggtagcatggcaatgccatgcgtacgatatgttccctctccgaatgaacactggctatggtgcccgtactccggaggtgaaatgcgcaagttggaggcttgctgtggaagcacacaacatctttggctttgagaccattcctgaagagtgcgttgaagcaacacaggaatacatccatggcgaacaatatagatcagactccaaaacagttaaccaacacgcttacttttatgccagagacctcgaagtccatcacaaggacacatttgtgctcagtatagatggcaccgtactctctaatattccatactaca

SEQ ID NO: 9647 - DNA, 270 bp, Glycine max
  Clone ID: LIB3039-030-Q1-E1-G7
gatacactgtacctttcactcatagacagatatctgagcgcttcgcaaaataaccatgtctctcttttgtccctctcaatttcaactcgtcataatgccgccggcgaatcgcatagcggagggaactgctgcagctgccgcttcgtctgcggcagctccgatgagagtcactcatgctgcagcgaaacgcgccgccgcgagctccgatcctccgccggtgccagtggttaataatgccgcgaagaatgccaaagtatgctgctgctgcta

SEQ ID NO: 9648 - DNA, 405 bp, Glycine max
  Clone ID: LIB3039-030-Q1-E1-G8
gattgttggcttgtgctctgctcgtgcctctagggttatcatatctccatttccatttcctctctctcagtttccaagaatcttaagctatgggaaagtcttacccaaccgtgagcgctgattaccagaaggccgttgagaaggcgaagaagaagctcagaggcttcatcgctgagaagagatgcgctcctctaatgctccgtttggcatggcactctgctggaacttacgacgtgagctcgaagaccggtggtcccttcggaaccataaagcacccctccgaactcgctcacggcgctaacaacggtcttgacatcgctgttaggcttttggagccactcaaagcggagtttcctattttgagctacgccgattttctacagttggctggcgttgttgccgttg

SEQ ID NO: 9649 - DNA, 362 bp, Glycine max
  Clone ID: LIB3039-030-Q1-E1-G9
ggatgaggagtatgaaggaaatgttgaggctactggagaggattattccgtggaacctgctgagagcaggaggccattccgtgctctccttgatgttggtcttattaggactacaaccggtaaccgtgtgtttggtgcccttaagggagctctggatggggggttggatattcctcacagtgacaagaggtttgctgggtttgataaggagaagaaggagcttgatgcagaggttcatcggaaatatgtttttggtggacatgttgctgcctatatgaggatcttggcggaagatgaaccagagaaataccagtcacacttcagtgaatacatcaagcgtgggatagaagctgatggtattg

SEQ ID NO: 9650 - DNA, 408 bp, Glycine max
  Clone ID: LIB3039-030-Q1-E1-H1
ggcacaagtgagtttgttgatcgagataactagaaacagtgtgatgaaaatgaaggtccttgttttcttcgttgctacaattttggtagcatggcaatgccatgcgtacgatatgttccctctccgaatgaacactggctatggtgcccgtactccggaggtgaaatgcgcaagttggaggcttgctgtggaagcacacaacatctttggctttgagaccattcctgaagagtgcgttgaagcaacaaaggaatacatccatggcgaacaatatagatcagactccaaaacagttaaccaacaagcttacttttatgccagagacctcgaagtccatcgcaaggacacatttgtgttcagtatagatggcaccgtactctctaatattccatactacaaaaacatgga

SEQ ID NO: 9651 - DNA, 383 bp, Glycine max
  Clone ID: LIB3039-030-Q1-E1-H11
gcacttcaattgcaatcaaattagttcattctctttgcgcagttccctacctctcctttcaagatgcagatcttcgtcaagaccctcaccggaaagaccatcacccttgaggtggaaagctctgacaccatcgacaacgtcaaggccaagatccaggacaaggaaggaattcccccggatcagcagcgtctcatcttcgccggaaagcagctcgaggacggccgtaccctcgccgactacaacatccagaaggagtcaacccttcaccttgtccttcgtctccgtggtggcatgcagatcttcgtcaagactctcactggcaaaaccataaccctagatgtcgaaagctctgacaccattgacaacgtcaatgccaagattca

SEQ ID NO: 9652 - DNA, 388 bp, Glycine max
  Clone ID: LIB3039-030-Q1-E1-H12
gttcatgaaacaagggatgattgacaaggcaggaaatgggagaacattcttaacctcactttctaaggggatagggagaattgcaatttttagcggtcaaggcgggggaaagcaccagaaatcaggtaggaagtctcgcggtttggaggggaaaactggtaggagtaggagacattctgtctcatagattagctaagcttttacagcattctctattcacaacatgtaaatgagttgatcaaaagtttctcttcatccttggccacactagtttagcagttgaacttgagtgtctcacattctcttctttttccctgctgtatatgatttcagctgctgagctaaggtcgaatactacacagtgacactgcttgttgcagtgacacca

SEQ ID NO: 9653 - DNA, 383 bp, Glycine max
  Clone ID: LIB3039-030-Q1-E1-H2
agaagacgacagaagggggggaactcctccagcactacaaaacattcaagggagacatttcagtgactccaattggcgatggatgcgaggtgaagtggagtgctgtgtacgaaaaggttagccatgatatttctgatccaacccttgtcaaagattttgcagtcaagaatttcctagaggtcgatgcctatgttcaagccaacgcatagagaggttctattctatgcatgcctcttaattaataatggctaatgttttaatctgtgcatgtattatggactattattaaataatatggttgtacttgtaccataccttatctaatataatgttgcagtatcaggtgtcattcgtccttgcttgttgttggactaatttaagag

SEQ ID NO: 9654 - DNA, 358 bp, Glycine max
  Clone ID: LIB3039-030-Q1-E1-H3
gacagctattcctcttaagcttgctactgagtttccacactgcataccttaggtcttccgaattcgaagttaatttgcaagatggctaaggaaaaggctcagatcaacattgtggtggttggtcatgtggaccctgaggaggcaaccaccattaacgagctgaagaagcctgttgtggagaaagaagctccagggcatgccatatgagggcatgcacgtacggcctcggaggggaaccagaaaattatgttaacaaaataatctggaaccctaatgtatcagtgtcatcatcagtgtgtagtttaagctagctttgctatggttacgttctttgagatgagagtcttgatgaacagta

SEQ ID NO: 9655 - DNA, 350 bp, Glycine max
  unsure (1)..(350): unsure at all n locations
  Clone ID: LIB3039-030-Q1-E1-H4
gattcaaaatggagacgtaatcaatgttgacatcaagaataggagaattgatgttttggtatcagatgaggagatggaagcacgcaggaaaaagtggactgctcctccatacaaagctaaccgaggagctctgtacaagtatattaaaaatgtgacacctgcttctagtggatgcgtaacagacgagtagaaagacatacctgcagagcaaaagctgatagtatgccttggtgaaattttgtcttgtgtttccagaacaagttggtaaaaattcanaaacaaacctcatttcagagaatttacaacaatgggaatgaattgctactattgattagtgactatttaatatt

SEQ ID NO: 9656 - DNA, 384 bp, Glycine max
  Clone ID: LIB3039-030-Q1-E1-H5
gacccagttgcagaaagaaaagaccatcaaagtttcacttcagccttatccggtttagggtttcggtttttgacccaacctttgacgtatcgaaaccttaagtttcggatcaggtctgagcaatctggttggtagaacctttggtcttagagagtcaagttttatgtctgaattagacgatcaaattcctactgccttcgatccttttgctgatgcaaatgctgatgactcgggtgctgggtcaaaggagtatgtgcatattcgcgtacagcagcgaaatggaaggaaaagcctgacaaccgttcaaggattgaaaaaagaattcagctacaacaagatacttaaagatgttaagaaagagttctgttgcaatggaacagttgt

SEQ ID NO: 9657 - DNA, 397 bp, Glycine max
  Clone ID: LIB3039-030-Q1-E1-H6
gcacaagtgagtttgttgatcgagataactagaaacagtgtgatgaaaatgaaggtccttgttttcttcgttgctacaattttggtagcatggcaatgccatgcgtacgatatgttccctctccgaatgaacactggctatggtgcccgtactccggaggtgaaatgcgcaagttggaggcttgctgtggaagcacacaacatctttggctttgagaccattcctgaagagtgcgttgaagcaacaaaggaatacatccatggcgaacaatatagatcagactccaaaacagttaaccaacaagcttacttttatgccagagacctcgaagtccatcccaaggacacatttgtgttcagtatagatggcaccgtactctctaatattccatactaca

SEQ ID NO: 9658 - DNA, 395 bp, Glycine max
  unsure (1)..(395): unsure at all n locations
  Clone ID: LIB3039-030-Q1-E1-H7
ggcagcatcagctttgaacgccgaagaaggttcatccaatccccgaagcccttcaccgcattgcaaccatgtcgaggagaaaggtcagagagccaaaggaagaaaacgtgactctgggcccagctgttagggatggtgaacatgtctttggcgtcgctcgcatctttgcctccttcaatgataccttcattcatgtcactgatttgtctgggagggaaacgcttgtccgcatcactggtggaatgaaggttaaggctgacagagatgaatcgtctccttatgctgctatgcttgcagctcaagatgttgctgccagatgcaaggaacttggcataactgctcttcatatcaagctccgttgcactggtggaaacaagacanagacacctggccct

SEQ ID NO: 9659 - DNA, 316 bp, Glycine max
  unsure (1)..(316): unsure at all n locations
  Clone ID: LIB3039-030-Q1-E1-H8
ggagcaaaaccctaatccctatttttcttcctcagtagtgtcatttacgcttctcttctctgcagcaactatgcctaaccctaaggtcttcttcgacatgaccatcggcggtcaatctgctggccgcatcgtgatggagctctacgccgacgtcactccccgcaccgccgagaacttccgcgcgctttgcaccggcgagaagggcgtanggcggagcggcaagcccctccactacaagggctcgtccttccaccgcgtgatcccgagtttcatgtgtcagggtggcgacttcaccgccggaaacggaaccggcggc

SEQ ID NO: 9660 - DNA, 380 bp, Glycine max
  Clone ID: LIB3039-030-Q1-E1-H9
gatctggcagcagaagaacaagtagttgagaactaagaaggagaagcaaatggcttcctcaatgatctcttccccagctgttaccactgtcaaccgtgccggtgccggcatggttgctccattcactggcctcaagtccatggctggcttccccaccagaaagaccaacaatgacattacctccattgctagcaacggtggaagagtgcaatgcatgcaggtgtggccaccagttggcaagaagaagtttgagactctttcctacctgccagaccttgatgatgcacaattggcaaaggaagtagaataccttcttaggaagggatggattccttgcttggaattcgagttggagcacggtttcgtgtaccgtgagcaca

SEQ ID NO: 9661 - DNA, 358 bp, Glycine max; identical to SEQ ID NO: 7611
  Clone ID: LIB3039-031-Q1-E1-A1

SEQ ID NO: 9662 - DNA, 368 bp, Glycine max
  Clone ID: LIB3039-031-Q1-E1-A10
ggtggaaagaacgaagacacgggaaagaaaaatggtgctagaacaagcagtatcatcatcaagcaccttgaggaacgttttcacgaatcccaaaaccctaatttcaaaaccccaattccaagtcgccgcttccccttcatggaaaccacagcagccgcgctgggaatggtggctggggataaacttgaagtgctccatgacaacaacaacaacgccatcaacataccctaagccctcggagattccgtgggagaaggaactctgcaactccgtcaacctcatcggcaacgtcgccgcccccgtcgaaatcaaatacctcacctccggcaaggtcgtcgcctggacccgcctcgacgtcaataaaagcg

SEQ ID NO: 9663 - DNA, 369 bp, Glycine max
  Clone ID: LIB3039-031-Q1-E1-A11
ggttctagtgtgtgattgtttgttgttgtaactcgttcttcttcttttgttgttctgtgtttgtgtttgttttttctctcacctgaaaatgtcttgctgcggtggtaactgtggttgcggaagctcctgcaagtgcggcaacggctgcggaggctgcaagatgtacccagacttgagctacactgagtcaaccaccaccgagaccttggtcatgggagtggcacctgttaaggctcaatttgagggtgctgaaatgggtgtgcccgctgagaacgatggctgcaaatgtggaccaaactgctcctgcaacccctgcacttgcaagtgaggtgttgggagagcaagcttcaagcagagatagcccttaat

SEQ ID NO: 9664 - DNA, 352 bp, Glycine max
  Clone ID: LIB3039-029-Q1-E1-B6
ggcagcgcttgataccaagccccactcaaccaccataccactctctctgctcttcctctacctttcacgtttttagagtatgaagatggaagagacattcctatgtaacacagagtcggtgtacgacggacacactgacaggctctgcgtccaaatctccgatgctgtcctcgacgcttgcctcgaacaggactcagacagtagagttgcctgcgatacatgcacgacttccaagcttggtcatggtcttcggagatctcacgactaacgctaatgttgactacagataagatactgcatgacacctgcacgaacatctgcgtcgtctcaaatggtgtgggatcggctcacg

SEQ ID NO: 9665 - DNA, 384 bp, Glycine max
  unsure (1)..(384): unsure at all n locations
  Clone ID: LIB3039-027-Q1-E1-C9
gacgcagcttcatccctaacgcgtgcatagcagagtcagagacagagacgcagccatggggcggagacctgcgaggtgttataggcaaattaagaacaagccataccccaagtcacgtttctgccgtggtgttcctgatcccaagatcaggatttatgatgttggtatgaagaagaagggtgttgatgagtttcctttctgtgtccatctggttagttgggagaaggaaaatgtttcaagtgaggccctggaagctgctcgcattgcttgcaacaagtacatggccaaatttgctggaaaggatgctttccacttgagagtcagggtgcacccattccatgttcttaggattcacangatgctttcgtgtgctggtgctgatag

SEQ ID NO: 9666 - DNA, 347 bp, Glycine max
  Clone ID: LIB3039-027-Q1-E1-D1
ggaacctttgcattcgattcattcaagattcagcagctgcgttttggaagcagagaccgaaatacttcgagatggcccgtacaaagcaaactgctcgtaagtcaactggaggaaaagctcccaggaagcagcttgcaaccaaggctgcacgtaagtctgcaccaacaactggtggtgtgaagaagcctcatcgttatcgccctggaactgttgctcttcgtgagattaggaaataccagaagagcactgagctcctaatcaggaagcttcctttccagatgttggctcgtgaaattgcccaggatttcaagactgatctgcgtttccagaaccatgctgtgcttgca

SEQ ID NO: 9667 - DNA, 396 bp, Glycine max
  unsure (1)..(396): unsure at all n locations
  Clone ID: LIB3039-027-Q1-E1-D10
ggcacaagtgagtttgttgatcgagataactagaaacagtgtgatgaaaatgaacgtccttgttttcttcgttgctacaattttggtagcatggcaatgccatgcgtacgatatgttccctctccgaatgaacactggctatggtgcccgtactccggaagtgaaatgcgcaagttggaggcttgctgtggaagcacacaacatctttggctttgagaccattcctgaagagtgcgttgaagcaacaaatgaatacatccatggcgaacaatatagatcagactccaaaacagttaaccaacaagcttacttttatgccagagacctcgaagtccatccncaagacacatttgtgttcagtatagatggcaccgtactctctaataatccacacta

SEQ ID NO: 9668 - DNA, 393 bp, Glycine max
  unsure (1)..(393): unsure at all n locations
  Clone ID: LIB3039-027-Q1-E1-D11
gacacttcaaaatcctctaataacccttcttttctctctctctctctcgtgttctgagctgctagaagcaatggagaggaaaagaagccatgcttctttcaccatgtttgcaatgcttgttggattgctctctcagagccttgtcattcctgtaatatccaccactgttgcagatcagaagaactactacaccccagatccacatgctggaagttcccccacaggctcacacaatagtagtcctccatctcatggccatgggagctctncaccctcacatcacaatagtccaagtactccatcaacaccctcaggtggaaactgtggatcatcacccccacaacatcatgatccaacaccctcaactccatcancaccatcaaaccctccctc

SEQ ID NO: 9669 - DNA, 398 bp, Glycine max
  Clone ID: LIB3039-027-Q1-E1-D12
ggaaggtaaaatgtcttggaggccctgaacgtacaggtagcgtaactattgttggtgctgtttcgccacctggaggagatttctcagatcctgtgacatctgcaaccctgagcatagttcatgttttctggggtttggacaaaaagcttgctcagaggaagcactttccttctgtaaactggcttatttcttattcaaaatactcaacggcacttgaaaccttttatgagcaatttgatccagattttatcaacattacgacaaaggctcgtgaagttctgcaaagggaagatgacctgaatgaaattgttcagcttgtgggcaacgatgctttagctgaaggagataagatcaccttagaaactgcaaagcttttgacagaggattatcttgctcaa

SEQ ID NO: 9670 - DNA, 350 bp, Glycine max
  Clone ID: LIB3039-027-Q1-E1-D2
atcagtggtgccccccaggataacaacataatgctgtggaatgctgtcatatttggtcccgatgatactccatgggatggaggcacgttcaagttgacactccaatttactgaggactatccaaataaaccaccgactgtacgatttgtgtctcgcatgtttcatccaaatatttatgctgatggaagtatttgtttggatatattacaaaatcagtggagtcctatttatgatgtggctgctatactcacatctatccagtcattgctttgtgatcccaacccaaattctcctgcaaactctgaagcagctcgaatgtttagtgagaacaagcgtgagtacaatcgaag

SEQ ID NO: 9671 - DNA, 375 bp, Glycine max
  Clone ID: LIB3039-027-Q1-E1-D3
gagggttgatgttgggcagtgagacgatgggggagagcgagaaaggagagcgatggagcggagcgatgacgaatctgacggagatggcctccaatctcgactctctccagaagcttctcctcaccaaagccgtcttcgtcgacgacgacaccttctccaaagcctccctcgccgccgaccaagcccgctccatcaagctcctccaccaacgagtccaaaccttggagagagaggtcgacgctgccatcaccgccgccgcccgcgctcgctccgagaagcgccaggccgaggccgctcagaaatccgccgaatcgcgcgctcaacaactcaccgccgaactcgagaacaccacaagtatcatcatcatcatcatca

SEQ ID NO: 9672 - DNA, 364 bp, Glycine max
  Clone ID: LIB3039-027-Q1-E1-D4
gactcacaactccataacacaaggcagaaagcaagctcatcctagagttttaaaaatggcagcagcctcctccatggctctctcttccccatccttggctggcaaggccgtgaagctgggcccatcagcccccgaagtcgggagggtcagcatgaggaagaccgtcaccaagcaggcctcctccggaagcccatggtacggcccagaccgcgtcaagtacttgggcccattctctggcgagcccccgtcctacctcactggcgagttcccaggtgactaccgctgggacactgctgggctttcggccgacccagaaaccttcgccagaaaccgtgagctcgaagtgatccactccaggtggggc

SEQ ID NO: 9673 - DNA, 194 bp, Glycine max
  Clone ID: LIB3039-027-Q1-E1-D5
tacagatgtgagtttactactcaagggggaacttcacagtcagataaagttgtgcggtgctgcctcctccgtatgcaacaacattggtctcatgtcacagccatttgtactctgtggacgtactcatgcagaacactgtgtatgattgccggattcataacgttgtaaacgtatattatatcacatgcattttt

SEQ ID NO: 9674 - DNA, 358 bp, Glycine max; identical to SEQ ID NO: 7611
  Clone ID: LIB3039-027-Q1-E1-D6

SEQ ID NO: 9675 - DNA, 367 bp, Glycine max
  Clone ID: LIB3039-027-Q1-E1-D7
gatccataaccatggcgtctaactctgcttccgctctttacttccttttatgcctatcgcccatcactttgcttctttctgcgtttcgtgctcaagctcaatctcatgctccagctcccactttcaagtactgtgaaaagaatgcagactatgctgtgaaggtgagtggagtggaaatattgcctgaccccgtggagagaggagtgccattcacctttaagatcccagcttatactcctgaaccaattcaaagcggggacttgttatatgaaatttcttatgctggaatagaagcacaacctgctacatttctccatgatctctgtgaggaagcaccatgcccagtacctgcaggcaactttgtgct

SEQ ID NO: 9676 - DNA, 361 bp, Glycine max
  Clone ID: LIB3039-027-Q1-E1-D8
ggctgtgagtgagacaccgatagatagagagcgcggcataacctaaacctatctttcttctctctctgtgtgtgcgcttcaacggcaaccagaagcagccatggccactgcgaggactgtgaaggatgtttcacctcatgagttcgttaaggcgtactcctctcacctcaagcgatccggcaagatggagctgccagagtggactgatattgtgaaaactgcaagatttaaggagttggctccttatgatcctgactggtactatgtcagagctgcttccatggcaagaaagatctacttgagaagaggacttggtgttggtgcctttcagaggatttatggtgggagcaagaggaatggt

SEQ ID NO: 9677 - DNA, 393 bp, Glycine max
  Clone ID: LIB3039-027-Q1-E1-D9
gaggactgaagaagtgagggcaagaactttgcagcataccagcatgagcatgaagctcttccagctcttctccctactcccattcttcctctacttctacacaatagaagcagccgttggcccattgcaactgacacacccactggaccccttaactcagcaagaaatcaccctcgtcaaaaccatagtcctaaaaaagtaccccaagccagccaaccgcgtcttcttccactacgtcggcctcgacgatcctgacaaggccgccgtcctcaaatggctctcctccggcgcccggacgccgcgcaacgccttttccatcgccctcatcaatggccaaatccacgagctcaccgtcaaccttctctccccgcgaaacgttgtcttggacaaaat

SEQ ID NO: 9678 - DNA, 364 bp, Glycine max
  Clone ID: LIB3039-027-Q1-E1-E1
ggcacaagtgagtttgttgatcgagataactagaaacagtgtgatgaaaatgaaggtccttgttttcttcgttgctacaattttggtagcatggcaatgccatgcgtacgatatgttccctctccgaatgaacactggctatggtgcccgtactccggaggtgaaatgcgcaagttggaggcttgctgtggaagcacacaacatctttggctttgagaccattcctgaagagtgcgttgaagcaacaaaggaatacatccatggcgaacaatatagatcagactccaaaacagttaaccaacaagcttaattttatgccagagacctcgaagtccatcccaaggacacatttgtgttcagtata

SEQ ID NO: 9679 - DNA, 397 bp, Glycine max
  Clone ID: LIB3039-027-Q1-E1-E10
ggcacaagtgagtttgttgatcgagataactagaaacagtgtgatgaaaatgaaggtccttgttttcttcgttgctacaagtttggtagcatggcaatgccatgcgtacgatatgttccctctccgaatgaacactggctatggtgcccgtactccggaggtgaaatgcgcaagttggaggcttgctgtggaagcacacaacatctttggctttgagaccattcctgaagagtgcgttgaagcaacaaaggaatacatccatggcgaacaatatagatcagactccaaaacagttaaccaacaagcttacttttatgccagagacctcgaagtcgatcccaacgacacatttgtgttcagtatagatggcaccgtactctctaatattccatactac

SEQ ID NO: 9680 - DNA, 385 bp, Glycine max
  unsure (1)..(385): unsure at all n locations
  Clone ID: LIB3039-027-Q1-E1-E11
agggggtaaattcccttcccttttttaaactcctgaattctgaatatcatcatcttcatcctcgtggagtagtattttcgattaatcaatcttctctgtttccaaaacattccaattatttcccttcattcacacatcatggactctttgtctttgcactcaaacctccattccgttaacaataagcgccgccaaatcacacaccaaaactccttcgctctcactccctcctggacttccctaaccgaacagcgcctctactcctccaagctcctcaactcgctccgccgcaacagcaaccctaccgccgccctcgaagtccgcgcctccgctgaacgcgtcctcgccngcactgccaaaggccgaactcgctggagccgcgcca

SEQ ID NO: 9681 - DNA, 429 bp, Glycine max
  unsure (1)..(429): unsure at all n locations
  Clone ID: LIB3039-027-Q1-E1-E12
agagtgccaaaagaccgacagaagggaaccaaaccaaaaagtgatttcagtgattgatcggtgttcacttgatctcatcataatcgtcagcgtcaattgaagaagatgccgatcagaaacatcgccgtcggaaggcctgaagaggcgactcaccccgacacgttgaaggcggctttggctgagttcatctcaaccttcatcttcgtgttcgccggctcaagctccggcatcgcctacaacaagctcaccgacaacggcgctgccacccctgccggcctcatctccgcctccatcgcccatgcattcgccctcttcgtcgccgtctccgtcggcgccaacatctccggcggccacgtcanacccgccgtcaccttcggcgccttcgtcggcggcaacatcaccttcctccgcggcatcgtctacgtcatc

SEQ ID NO: 9682 - DNA, 305 bp, Glycine max
  Clone ID: LIB3039-027-Q1-E1-E2
ggcacaagtgagtttgttgatcgagataactagaaacagtgtgatgaaaatgaaggtccttgttttcttcgttgctacaattttggtagcatggcaatgccatgcgtacgatatgttccctctccgaatgaacactggctatggtgcccgtactccggaggtgaaatgcgcaagttggaggcttgctgtggaagcacacaacatctttggctttgagaccattcctgaagagtgcgttgaagcaacaaaggaatacatccatggcgaacaatatagattagactccaaaacagttaaacaacaag

SEQ ID NO: 9683 - DNA, 256 bp, Glycine max
  Clone ID: LIB3039-027-Q1-E1-E3
ggcacaagtgagtttgttgatcgagataactagaaacagtgtgatgaaaatgaaggtccttgttttcttcgttgctacaattttggtagcatggcaatgccatgcgtacgatatgttccctctccgaatgaacactggctatggtgcccgtactccggaggtgaaatgcgcaagttggaggcttgctgtggaagcacacaacatctttggctttgagaccattcctgaagagtgcgttgaagcaacaaaggaatac

SEQ ID NO: 9684 - DNA, 367 bp, Glycine max
  unsure (1)..(367): unsure at all n locations
  Clone ID: LIB3039-027-Q1-E1-E4
gattgttggcttgtgctctgctcgtgcctctagggttatcatatctccatttccatttcctctctctcagtttccaagaatcttaagctatgggaaagtcttacccaaccgtgagcgctgattaccagaaggccgttgagaaggcgaagaagaagctcagaggcttcatcgctgagaagagatgcgctcctctaatgctccgtttggcatggcactctgctggaacttacgacgtgagctcgaagaccggtggtcncttcggaaccataaagcacccctccgaactcgctcacggcgctaacaacggtcttgacatcgctgttaggcttttggagccactcaaagcggagtttcctattttgagcta

SEQ ID NO: 9685 - DNA, 371 bp, Glycine max
  Clone ID: LIB3039-027-Q1-E1-E5
tgcatcaacactggtgaaggttgtcactttcaaaattccaacttcactcaaaattggtctcagccagatgcagaaagtgctggcttttgcctttggcccttctaaagttgtggctccagggattgcaacttcaggagcaaaaacgtctggcatcatgaaggcagcagtatctactgaaaagattcgagcagttgctcacagtgttatagcctctgccggaaaaaacagtatttcagtcatgagaagagctttctatgaaataatggggaagcgaaaggtgcagcctgttgggttcttgccttgggctacattggcaggctgcattggaacttcttcaggcttgcttttgtatggtgatgggattgagtgtg

SEQ ID NO: 9686 - DNA, 209 bp, Glycine max
  Clone ID: LIB3039-027-Q1-E1-E6
gatacagaagtggtgttgatgatcgcgttaaatatgcaaactgtaacaaaaattacggaccttgatttcatcgatagccacaatttaggcagtcatggcaacaccactgcgtacgaggaagttcactcctccgacattgacactagaatatgatacctcttatctggatgagaatcgcttaacatgatggcttgctgtgcacacacaca

SEQ ID NO: 9687 - DNA, 340 bp, Glycine max
  Clone ID: LIB3039-027-Q1-E1-E7
gacagcacaacgcaacacaacgcgcactctctcttttctctcttaacacaaaaaccctatcgttcttcgcggtttcgccgattctcgccatgccgaaagccagatccgacgccaaagccgccgatagccggttgaagcgcaagggcgctggtgctggaaggaagcaatcgaagaaagctgctaaggatcctaacaagccaaagagacctccaagcgctttcttcgttttcatgtccgagttcagagagcagtttaagaaggagcatcctaacaacaaatccgtcgctgttgtcggtaaagctggtggtgacaaatggaaatcgctgtctgatgctgaaaa

SEQ ID NO: 9688 - DNA, 367 bp, Glycine max
  Clone ID: LIB3039-027-Q1-E1-E8
gactcaccacttcaaaacactcataacacaaagcacaaagcaaagctcatccttgagttaaaaaatggcagcagcttcttccatggctctctcatccccatccttggctggcaaggccgtgaagctgggcccatcagccccagaagtgggaagggtgagcatgaggaagaccgtcaccaagcaggtctcctcaggaagcccatggtacggcccataccgagtcaagtacttgggcccattctctggcgagcccccgtcctacctaaccggtgagttcccaggcgactacggctgggacactgctgggctttccgcagacccagaaaccttcgccaagaaccgtgaactcgaagtgatccactccagg

SEQ ID NO: 9689 - DNA, 400 bp, Glycine max
  unsure (1)..(400): unsure at all n locations
  Clone ID: LIB3039-027-Q1-E1-E9
ggcacaagtgagtttgttgatcgagataactagaaacagtgtgatgaaaatgaaggtccttgttttcttcgttgctacaattttggtagcatggcaatgccatgcgtacgatatgttccctctccgaatgaacactggctatggtgcccgtactccggaggtgaaatgcgcaagttggaggcttgctgtggaagcacacaacatctttggctttgagaccattcctgaagagtgcgttgaagcaacaaaggaatacatccatggcgaacaatatagatcagactccaaaacagtttaacaaacaagcttacttttatgccagagacctcgaagtccatcncaaggacacatttgtgttcagtatagatggcaccgtactctctaatattccatactacaa

SEQ ID NO: 9690 - DNA, 373 bp, Glycine max
  Clone ID: LIB3039-027-Q1-E1-F1
gacaccaacaccaaaacaaacccactaagatggcttcctttgtatccttcctagtgctgcttcttgcagcccttatcctcatgcctcaagggcttgctacttactacaaaccaattaagaagccaccagtgtacaagcctccagtgtacaagccaccagtgtacaaaccaccggtttataagccaaaaccaccggtttacaagccgaaaccaccggtttacaagccaccatataagaggccaccatacaagaaaccaccttatggaaagtaccctccagtagaggacaacacccatgcctaaagcaagcaatgaggtctattatctacttaataaataagaggaactgctttgtgttttctagcattgtgatt

SEQ ID NO: 9691 - DNA, 459 bp, Glycine max
  unsure (1)..(459): unsure at all n locations
  Clone ID: LIB3039-027-Q1-E1-F10
gtacggtctatnattccgggctcaccacgcgtcagagcgagaagacaacagaagggggcacaagtgagtttgttgatcgagataactagaaacagtgtgatgaaaatgaacgtccttgttttcttcgttgctacaattttggtagcatggcaatgccatgcgtacgatatgttccctctccgaatgaacactggctatggtgcccgtactccggaggtgaaatgcgcaagttggaagcttgccgtggaagcacacaacatctttggctttgagaccattcctgaagagtgcgttgaagcaacaaaggaatacatccatggcgaacaatatagatcagactccaaaacagttaaccaacaagcttacttttatgccagagacctcgaagtccatcncaaggacacatttgtgttcagtatagatggcaccgtactctctaatattccatactacanaaaa

SEQ ID NO: 9692 - DNA, 403 bp, Glycine max
  Clone ID: LIB3039-027-Q1-E1-F12
cacgcgtcagaacgggtgcaaaaaaaacacaggcaggggaaaataagttgaacggcctttccaaaaacataccccttcaacacaacagtacgtcatctacaaggatctcgaagacccaggaacgcacgaaagccgggatctttcagaaaatggattcctaatcgaacggtgcataaccgcatggataagctcacactaaaccgtcaatttgggatgcaattcggttccttaagaagtatcgggaacgaattttggaatgtaataatatcgattcatacagatacagaataaatggttctctattgattcaaacgctctacctacgagataaggatagagaatgaggaaaaaaccgaggatttcacatagtacttttggtcgaaaaatcgatcagaattttttc

SEQ ID NO: 9693 - DNA, 351 bp, Glycine max; identical to SEQ ID NO: 8418
  Clone ID: LIB3039-027-Q1-E1-F3

SEQ ID NO: 9694 - DNA, 365 bp, Glycine max
  Clone ID: LIB3039-027-Q1-E1-F4
gacacttcaaaatcctctagtaacccttcttttctctctctctctctcgtgttctgagctgctagaagcaatggagaggaaaagaagccatgcttctttcaccatgtttgcaatgcttgttggattgctctctcaaagccttgtcattcctgtaatatccaacactgttgcagatcagaagaactactaaaccccaaattcacatgctgggaattcccccaaaagctcacacaataatagtcctccatctcatggcaatgggagctctcaaccctcaaatcacaaatagtccaagtactccatcaacaccctcaggtggaaactgtggattatcacccccacaacatcatgatccaacaccctca

SEQ ID NO: 9695 - DNA, 355 bp, Glycine max
  Clone ID: LIB3039-027-Q1-E1-F5
aggcaagagacaagctcaagatgaaattgagaagcaattgagtgccaaaaaacagaagataaatgaggttgctcagaaacaaaaggaggcaaaggtgcaaaagaaggaaagtagttcagatgattcttcttcagaatctgaagatgagaaacctgcacccaaatctgctgttctttcaaaaaagatacctgctaagaatggtgctgcccctccaaagaaaggcaagctcgcctccagttcttctgaagatgactcctctgatgaggatggtgtgcgtgcaaagaagccacagaaaatggttgctgagaaacggaagaatggagcaactgtacaaaagaaaacagaagcggggggc

SEQ ID NO: 9696 - DNA, 355 bp, Glycine max
  Clone ID: LIB3039-027-Q1-E1-F6
cagaacggggaatagggttgttggattaggaaaaagggtttttacgtacttgatccgtgggacccaccgagggttttggattttgtaaggcaaaagcactgataccaatggggagcaccgctgtggacaacacggatgaacaactccgcaacgagatcgatgagcttcttcgccaacagcgcgagattacggagaggcttcgagatcctcgacgtcttctcacaggttccttggcgggtcctgctctcccctctaacggtgctcgccagcgaccctttattcgtcctgttactggagacaggaatgattctgaatatcaacctcctgctaaacgtcgactttcatctgctgtcct

SEQ ID NO: 9697 - DNA, 398 bp, Glycine max
  Clone ID: LIB3039-027-Q1-E1-F7
agcacttcaaaatcctctagtaacccttcttttctctctctctctctcgtgttctgagctgctagaagcaatggagaggaaaagaagccatgcttctttcaccatgtttgcaatgcttgttggattgctctctcagagccttgtcattcctgtaatatccaccactgttgcagatcagaagaactactacaccccagatccacatgctggaagtccccccacaggtttctccgattctctgtgctcacacaatagtagtcctccatctcatggccatgggagctctccaccctcacatcacaatagtccaagtactccatcaacaccctcaggtggaaactgtggatcatcacccccacaacatcatgatccaacaccctcaactccatcaacaccat

SEQ ID NO: 9698 - DNA, 356 bp, Glycine max
  Clone ID: LIB3039-027-Q1-E1-F8
ggttgcggcacaaagcattcactgtgtcggaaaaagaagaagagaaaaaagatgagcgacggaggaaaacgacaaggtggaagagcgttgccgccgccgccaagaggccctccgcctcctcccccctctcgccctcgcctcgaacccgtcgatcgcgaaaagacatgtccgttactgctgcgagtgttcactaagattgggagtcaccattccatggaagactttgccgtcagaggcaaagagcccaaagacgaggttcagatttacacctggaaggacgctactctccgagaactcaccgatcttgtcaaagaagttgctccggctgcaaagaaaagaaacgccaaactctcctt

SEQ ID NO: 9699 - DNA, 316 bp, Glycine max
  Clone ID: LIB3039-027-Q1-E1-F9
ggagagaagttattagggtttttgagtgcggcggtccaaacactcttctctgcagcttttgcctacaactcccttcaccatggctgaacaaaccgagaaagcttttctgaagcaaccaaaagtgtttctcagcacaaagaagactgggaagggaaagagacctggaaaaggtgggaaccgcttttggaagtccattgggcttggatttaagactcccagggaagccatcgaaggaacctatattgacaagaagtgccccttcactggcaatgtttccatccgtggccgtatcttggctggaacatgtcacagtgct

SEQ ID NO: 9700 - DNA, 376 bp, Glycine max
  Clone ID: LIB3039-027-Q1-E1-G1
gaagctataggtttaataaacgttgaaactattcctcctgcgccatctccattgctgttttctctctgcttgctattacaatccaattcaagaagttcgttcaactttgatgctcaagtctaacaacatatataaccattgacagatattcaaattcagcataattgtgattaaaattttggtccttccctggaatgaaaatactgtttgtcaataaatttgggagtgatttttgcggttatatttaatgggctgctactgttcaacttcaaagaaaaccgaagcacaaggttatgaggaacccactgttcttgcatctgtgacaccttttactgttagtgaagtacaggccttgcatgaactctacaagaagttg

SEQ ID NO: 9701 - DNA, 398 bp, Glycine max
  Clone ID: LIB3039-027-Q1-E1-G11
ggaacctttgcattctattcattcaagattcagcaagtgcgttttggaagcagagaccgaaatacttcgagatggcccgtacaaagcaaactgctcgtaagtcaactggaggaaaagctcccaggaagcagcttgcaaccaaggctgcacgtaagtctgcaccaacaactggtggtgtgaagaagcctcatcgttatcgccctggaactgttgctcttcgtgagattaggaaataccagaagagcactgagctcctaatcaggaagcttcctttccagaggttggttcgtgaaattgcccaggatttcaagactgatctgcgtttccagagccatgctgtgcttgcattgcaagaggctgctgaggcataccttgttgggctctttgaggacactaac

SEQ ID NO: 9702 - DNA, 389 bp, Glycine max
  Clone ID: LIB3039-027-Q1-E1-G12
ggcacaagtgagtttgttgatcgagataactagaaacagtgtgatgaaaatgaatgtccttgttttcttcgttgctacaattttggtagcatggcaatgccatgcgtacgatatgttccctctccgaatgaacactggctatggtgcccgtactccggaggtgaaatgcgcaagttggaggcttgctgtggaagcacacaacatctttggctttgagaccattcctgaagagtgcgttgaagcaacaaaggaatacatccatggcgaacaatatagatcagactccaaaacagttaaccaacaagcttacttttatgccagagaactcgaagtcaatcccaaggacacatttgtgttcagtatagatggcaccgtactctctaatattc

SEQ ID NO: 9703 - DNA, 358 bp, Glycine max; identical to SEQ ID NO: 7611
  Clone ID: LIB3039-027-Q1-E1-G2

SEQ ID NO: 9704 - DNA, 327 bp, Glycine max
  Clone ID: LIB3039-027-Q1-E1-G3
ggcacaagtgagtttgttgatcgagataactagaaacagtgtgatgaaaatgaaggtccttgttttcttcgttgctacaattttggtagcatggcaatgccatgcgtacgatatgttccctctccgaatgaacactggctatggtgcccgtactccggaggtgaaatgcgcaagttggaggcttgctgtggaagcacacaacatctttggctttgagaccattcctgaagagtgcgttgaagcaacaaaggaatacatccatggcgaacaatatagatcagactccaaaacagttaaccaacaagcttactcttatgccagagacct

SEQ ID NO: 9705 - DNA, 339 bp, Glycine max
  Clone ID: LIB3039-027-Q1-E1-G4
agactttcgtttccacagcacgtggtaggaaatatcccgtgactgtcaacctatggcaaccagagaaaaatgcttttgaatgggctacatctttgaaagcccctcacacagaggatgcaattcgggttactcagtccacagcaaactttttcataagtgaagctaggaaatccacaaacacacctgatgctcaaaaagtgcgagataatctcgtctacaattacaaacctacttttggtggaacggctgggaaaggatatgatcaagtgtatctcttcgaataattctatctgtaggaggtgtccttgaatttgattttatgcacaataaattatgaac

SEQ ID NO: 9706 - DNA, 364 bp, Glycine max
  Clone ID: LIB3039-027-Q1-E1-G5
gactcaccacttcaaaacactcataacacaaagcacaaagcaaagctcatccttgagttaaaaaatggcagcagcttcttccatggctctctcatccccatccttggctggcaaggccgtgaagctgggcccatcagccccagaagtgggaagggtgagcatgaggaagaccgtcaccaagcaggtctcctcaggaagcccatggtacggcccagaccgagtcaagtacttgggcccattctctggcgagcccccgtcctacctaaccggtgagttcccaggcgactacggctgggacactgctgggctttccgcagacccagaaaccttcgccaagaaccgtgaactcgaagtgatccactcc

SEQ ID NO: 9707 - DNA, 360 bp, Glycine max
  Clone ID: LIB3039-027-Q1-E1-G6
atcccttcgaagtattgttcatatatgggtcatgagcaagaagggccctctctatgttgcaatgtttaagccaattggaatcatctttgcggtcatcatgggaattgcctttcttggtgactctatctatcttggaagtgtgcttggagcatccatagtgggtattggtttttatgctgttatttgggggaaaagccaagagcaagcaaaggaagagtgtgaagtttatgatgactcggaatcatactcacgcgttgtccctcttttgaagaacaagagaatggaggaatagaatcataacaatcatttaatttctctagctttaatataaatgtctcatgtagtattttgaaaacacat

SEQ ID NO: 9708 - DNA, 388 bp, Glycine max
  Clone ID: LIB3039-027-Q1-E1-G7
agacggcagacgacagaagggggaactgaaaccgctgcttccgatctgaggccatggcggggtctgggagttccatgctatattcctttcttctcttcacagtcattctctcacttcaagaaatgtaccgagggaaactagcatcatcagaattatacactatacttggagggttcgttagctctctcctatttcttgtgctcctaactttcattggaaattttcaggaaacaattggtgcaagaactggttggggagctgtcattgttgcagaagctgttgctctgattgctgcaagcactgtccaccgagtttgcatcactacatgtttcctgttctcggctgcattgctgtatgaggttaacaagatctctgggtcagcgctttc

SEQ ID NO: 9709 - DNA, 352 bp, Glycine max
  Clone ID: LIB3039-027-Q1-E1-G8
gatccataaccatggcgtctaactctgcttccgctctttacttccttttatgcctatcgcccatcactttgcttctttctgcgtttcgtgctcaagctcaatctcatgctccagctcccactttcaagtactgtgaaaagaatgcagactatgctgtgaaggtgagtggagtggaaatattgcctgaccccgtggagagaggagtgccattcacctttaagatcccagcttatactcctgaaccaattcaaagcggggacttgttatatgaaatttcttatgctggaatagaagcacaacctgctacatttctccatgatctctgtgaggaagcaccatgcccagtacctgc

SEQ ID NO: 9710 - DNA, 396 bp, Glycine max
  unsure (1)..(396): unsure at all n locations
  Clone ID: LIB3039-027-Q1-E1-G9
gacattgactgaagccagcgagtgagcgagcgagcgaggtagggttttcgttgttcccccgtctttgaattcagttcgcgacgatggggtccatccccgatccaggcgagttgagcgagttgactcagccgagcttcgacgagttccagcgccaaacttccctcatgaccagctgcaccctcctctggaaggagctctccgaccacttctcctccctcgagcaagacctcaaccacaaatccgaagccctcaaacgcaagattcgcaccctcgacaacactacttccgactcnctccgcctcctcgatcgccgcgaaacctccctcgacgccacgctccagatcgccctccgcacgctcgacacgcgccgcaccgctgccctctccgccctcctca

SEQ ID NO: 9711 - DNA, 363 bp, Glycine max
  Clone ID: LIB3039-027-Q1-E1-H1
gataacaaaaacatacattacatcacctcactgatctagaagagaaacaaatgcaaggttcgattgcaatgttacattccattcccctatgctatgtccttcccttggcctggactacaacacacctcccatcataacaacaagaccaaatggattggatgcaaagcaacggattgctttgaagacaagggtacgatatgaggtgaggttactttgagcagagaagcgacgcatcacgctaagcaaggcacagaacatgacatcctcacgttatgtgagccgtgacactcaatgcaatggcactttaattccaatcataacaccatgcccaggttatattacacaatgaactgatcaaagaat

SEQ ID NO: 9712 - DNA, 402 bp, Glycine max
  Clone ID: LIB3039-027-Q1-E1-H11
gaaggtgcaagagtttgttgtgagctataagctagtttatcgtgaggagaatatgaagttgtttgttttctttgttgctgcagtagttttggtagcatggccatgccatggcgcatgctaccaaaggttccctctccgaatgaaaactggctatggtgagcgttcttcggaggtaaaatgcgcaagttttaggcttgctgtggaagcacacaacatccgagcctttaaaaccattcctgaagagtgcgttgaaccaacaaaggactacattaatagcgaacaatttagatcagactctaaaacagttaaccaacaagctttcttttatgctagtgaacgcgaagtccatcacaacgacatatttatattcggcatagataacaccgtactctctaatatcca

SEQ ID NO: 9713 - DNA, 432 bp, Glycine max
  Clone ID: LIB3039-027-Q1-E1-H12
cgaaccacgccataatggtggcaaaaagacaacggaaggggactttcaattctcttcaaacctaaggcagcatcgctattcgcttcattcaagggcgtttgcccaaccaagaaaccgtggattacccaattttcaaacccgttaacgtcggaaatgggggcacaggaaagaaaacctttgtgaaaaggcatctcaccggataattcgagaggaaatatgagccatacatcggttgtggatgttcacccattggattttttcacaaactgtggaaagattcgattttactgctgggatactgctggacatgagaaatttggtggcctcagagatggatactatatccatggacaatgtgctattaacatgtttgatgttactgccgggctacatacataaatgttcccactggcaacgtgatctttgcacggt

SEQ ID NO: 9714 - DNA, 348 bp, Glycine max
  unsure (1)..(348): unsure at all n locations
  Clone ID: LIB3039-027-Q1-E1-H2
catgggatggctgcgcgtggagaccactcanaggaacaagccatggctgcccaacctaaacctcagaaccgacccatttctaacatcgtcatcgtcgttgctatgcacacggatgcacttcccagtgctaacagattccagctcactgaggaccctgacaccccgtttccgcaacgggttccttgggtccgttatcatgggacatacaaagatcttaatataagcttgatttggccgggaaaagatccaactttgggggttgatagtgtatggacgatatcatctgctcttgcaacgtatgctgctattcaagcagttacaaccagacttgatcatcaatgcaggcac

SEQ ID NO: 9715 - DNA, 371 bp, Glycine max
  Clone ID: LIB3039-027-Q1-E1-H3
gaccacaagcaagagcacttgttcaccaattacgagttctgaagaaattgagtatatatctatccatttgttttgaaaatggcttccaagagtattgcatgcattgttcttctctccctcaacctccttttctttaccatggtcagccccaacaccattgccccttcccctgcgatacaaccaccaccaccgccacgtgagtgtcccgagttgggtctttgcctcgatattttgggtttgggtcaagggtctccatcaaaagattgctgccccatcctccgtggacttattgaggttggtgccattgtatgcatttgcgacaaactcaggtccgctacattaggaatcaacatagatgttaatcttgccct

SEQ ID NO: 9716 - DNA, 363 bp, Glycine max
  Clone ID: LIB3039-027-Q1-E1-H5
ggaacctttgcattctattcattcaagattcagcaagtgcgttttggaagcagagaccgaaatacttcgagatggcccgtacaaagcaaactgctcgtaagtcaactggaggaaaagctcccaggaagcagcttgcaaccaaggctgcacgtaagtctgcaccaacaactggtggtgtgaagaagcctcatcgttatcgccctggaactgttgctcttcgtgagattaggaaataccagaagagcactgagctcctaatcaggaagcttcctttccagaggttggttcgtgaaattgcccaggatttcaagactgatctgcgtttccagagccatgctgtgcttgcattgcaagaagctgctg

SEQ ID NO: 9717 - DNA, 358 bp, Glycine max; identical to SEQ ID NO: 7611
  Clone ID: LIB3039-027-Q1-E1-H6

SEQ ID NO: 9718 - DNA, 363 bp, Glycine max; identical to SEQ ID NO: 7427
  Clone ID: LIB3039-027-Q1-E1-H7

SEQ ID NO: 9719 - DNA, 381 bp, Glycine max
  Clone ID: LIB3039-027-Q1-E1-H9
gggctgtgtcaaaccccaagagaccatttgctgctattgtcggtggatcgaaggtgtcttccaagattggagttattgaatccttgttggagaaagttaatgttctcttgcttggtggaggaatgatctttaccttttacaaggctcagggttattcagttgggtcatctcttgtggaggaagacaagcttagccttgcaactacacttcttgaaaaggccaaggctaaaggggtttctttgttgcttccaactgatgttgtcatagcagacaagtttgctgctgatgctaacagcaagactgtgccggcatcaagcatcccagatgggtggatggggttggatattggtcctgaattcatcaagacatttggtgaagcat

SEQ ID NO: 9720 - DNA, 327 bp, Glycine max; identical to SEQ ID NO: 8269
  Clone ID: LIB3039-028-Q1-E1-A1

SEQ ID NO: 9721 - DNA, 393 bp, Glycine max
  Clone ID: LIB3039-028-Q1-E1-A10
gacagcatatatatcaataatctattttatactatacctacattttgataattttcttggtagttgatagccatggctacccgtggaaagcttgaggttgacattgatctcaagtccaacgcagacaagtactggcaaacccttacgaattctactgaaatattccctaaggacttcccacatgattacaaaagcattgaggttcttgagggtgatggcaagtctcctggttctatccgccacataagttatggtgaatgttcaccacttgtgaaatcatcctttgagaacattgaagctgttgatgaagatcagaacgtagtgtcgtacactatcattgatggggaactcctccatcactacagaacattcaacggagacatttcactgact

SEQ ID NO: 9722 - DNA, 317 bp, Glycine max
  Clone ID: LIB3039-028-Q1-E1-A11
ggaaaacagtttccgattggatcgattcgtgttcgaaagagcaattgaagacttaccaggactggttcaacttagccgactcagacggagatggccgcatcactggaaatgatgcaaccaaattctttgctctctccaacttatctcgctctcaactcaagcaggtttgggctattgctgatgccaaaagacaaggatatttgggttttcaagagtttgttatggcaatgcagctcgttgccctggcacaggtgggacacgatatcaactcagatatccttaaaactgaaattgacaaggaaaatattaaatctccc

SEQ ID NO: 9723 - DNA, 279 bp, Glycine max
  Clone ID: LIB3039-028-Q1-E1-A12
ggaaaacagtttccgattggatcgattcgtgttcgaaagagcatttgaatacttaccatgactggttcaacttatccgactcagacggagatggccgcatcactggaaatgatgcatccaaattctttgctctctccaacttatctcgctctcaactcaagcaggtttgggctattgctgatgccaaaagacaaggatatttgggttttcaagagtttgttatggcaatgcagctcgttgccctgacacatgtgggacacgatatcaactcagatatcc

SEQ ID NO: 9724 - DNA, 402 bp, Glycine max
  Clone ID: LIB3039-028-Q1-E1-A2
gactcgtaagaagaagacattggggagtggtgcaccgtgcactgctctaaggtcctataaatttgcctagggtttatattaatcttttcactgttcctcctactttccaagcttcctggcacactttgataagttttttgtgcagctccaatggcaacctctcaaatcacttcatcattgaggaacttgcctgcatttgaaaggtttcaaccttcaacgcttcgatttccttctgctgggcacgtcagaattgggacactgacacaaacctcgtttccctctttcgttgtcaaagccgccactgttgtcgcccccaagcacaccactgttaagcctctgggtgataaagtactggggaaaatttagggttcctagggaaaaaactgcaggtgggattttact

SEQ ID NO: 9725 - DNA, 347 bp, Glycine max
  Clone ID: LIB3039-028-Q1-E1-A3
gattggcattagatggcatgccacaatggttgtccctcttaggcactttcttgttttctctctcaccctcatatccatcatcttccacacccatggagcgttctctgagcaatcaataatcaagttacccacagaccaaccaagggtagagaaactgacccacttgcattttttctaccacgacatcttagagggcaagaacatcacggtggtgaaaatcatcgagccatcagcgagcgaggttcgtgaagcaactgggtttggaaccactttcatgatggacaatgttttgaccgagggtccagagctgagctcgaagcacgttgggagggctcaagggctgtttg

SEQ ID NO: 9726 - DNA, 365 bp, Glycine max
  Clone ID: LIB3039-028-Q1-E1-A4
cccttttgctctccctaaaaagcctgtagttcagaagagcaaaagggaacaggaagatgagattagacagaagatggaagaattgcggaacgaacgtcagaggagaattgctgaaagaactgcatcctctggtgttggtcgtgccgcgacaaagaaagaccaaattgaaggtaaaacagcaaggatttctgccaagagtgacaagaataagggaatcagttctgtcaaggtcaggggaatttagcaagccacacagtaaagtgtgtttaaataaccgttgattaaaatgaaatgaatagttttgttttctatataatctcaaaatattttgttttgtttcacggttgtatatcaatagattcctt

SEQ ID NO: 9727 - DNA, 401 bp, Glycine max
  Clone ID: LIB3039-028-Q1-E1-A5
ggacaagtgagtttgttgatcgagataactagaaacagtgtgatgaaaatgaaggtccttgttttcttcgttgctacaattttggtagcatggcaatgccatgcgtacgatatgttccctctccgaatgaacactggctatggtgcccgtactccggaggtgaaatgcgcaagttggaggcttgctgtggaagcacacaacatctttggctttgagaccattcctgaagagtgcgttgaagcaacaaaggaatacatccatggcgaacaatatagatcagactccaaaacagttaaccaacaagcttacttttatgccagagacctcgaagtccatcccaaggacacatttgtgttcagtatagatggcaccgtactctccaataatccatactacaaaaa

SEQ ID NO: 9728 - DNA, 357 bp, Glycine max
  Clone ID: LIB3039-028-Q1-E1-A6
tacgacagaaggggaaggtgcaagagtttgttgtgagctataagctagtttatcgtgaggagaatatgaagttgtttgttttctttgttgctgcagtaattttggtagcatggccatgccatggcgcaagctaccaaatgttccctctccgaatgaaaactggctatggtgagcgttcttcggaggtaaaatgcgcaagttttaggcttgctgtggaaacacacaacatccgagcctttaaaaccattcctgaagagtgcgttgatgcaacacaggaatacatccatggcgaacaatatagatcagactccaaaacagttaaccaacaagcgtacttttatgccacagacctcgaag

SEQ ID NO: 9729 - DNA, 370 bp, Glycine max
  Clone ID: LIB3039-028-Q1-E1-A7
gacacttcaaaatcctctggtaacccttattttatctattctctctctttcttttgtgttctaagcagctagaagcaatggagaggaaaagaagccatgcctctttcaccatgtttgcaatgcttgttggagtgatctctcagagccttgtcattcctgtagtatccaccactgttgaagatcagaagaactactacaccccagatccacatgctggaagtcccccctcaggctcacacagtagtactcctccatctcatggccatggaagctctccaccctcacatcatcacagtagtccaagtactccatcaacaccctcaggtggaaactgtggatcatcacctccacaacatcatgattcaacaac

SEQ ID NO: 9730 - DNA, 347 bp, Glycine max
  unsure (1)..(347): unsure at all n locations
  Clone ID: LIB3039-028-Q1-E1-A8
gcacaagtttgttgagatagctagaagcaataagatgaaaatgaaagtgcttgttttgtttgttgctacagttttggtagcatatgaatgccatggctcagactaccagaagttccctctccaaatgaaaactgggtttggtgggcaatacagcaatgaggtggcatgtgccagttggaggcttggcgtggaagcaaacaacgtagtcaagtggcaaactgttcctgcagcttgcggagagtacatagctgactacgttctangagaccaatatagatcagattccaaaacagttaaccaacaagcttatttctatgctaaatccctcaaactcaccaacaaagatg

SEQ ID NO: 9731 - DNA, 301 bp, Glycine max
  Clone ID: LIB3039-028-Q1-E1-A9
ggaagaaaacataagatatggcaatgttcacgtaccacgttgaaacggttcaatcatggttggcactgagcagacttcacatactgatccacttagtggcagtgttgtcgctgtgttactaccgcataactcacttgttactggaacctccaacagcgccatggcttctgatgaccgtagcggagcttcttctctcggtgctctggttcttcaaccaagccttccggtggcggccggtgtcgcggagcgtcatgacggagaagctgccgaaggatgagaagctgccggggcttgacatcct

SEQ ID NO: 9732 - DNA, 290 bp, Glycine max
  Clone ID: LIB3039-028-Q1-E1-B1
gacactttccactttcaaacatcacaaacactttttaacatttgtttggtgttggtttaatcttcacttcaccacttcctcgtacttctccgaatcatcatcaaaaaccgcaaactcataatgacgatgatgaataataagtttcttccactctttgtattcgcattgttcttcacatctttgtgttcggttcgcgcagacaatgctcctgccccttcacccaagtcatccccctctccgccgaccgccaaaccaccctctccggcgacccatccggcgcctcctgcaaa

SEQ ID NO: 9733 - DNA, 394 bp, Glycine max
  Clone ID: LIB3039-028-Q1-E1-B10
gagggtttcagatccttaatcggccaggaccaaacagcatccgcggcagcgacggtaaccctccaacaacaacacttccgctgcgaaaaatgtctctggtggcgaacgaggatttccagcacattctgcgtgtgctgaacaccaacgtggatgggaagcagaagataatgttcgcaatgacctccatcaagggtattggaaggagattcgccaacatcgcttgcaagaaggctgatgttgacatgaacaaaagggctggtgagttgactgctgctgagttggatagtgtgatgactgtggtggcgaaccctaagcagttcaagattccagactggtttttgaacagaaagaaggattacaaggatggcaaatactctcaagttgtgtctaatgc

SEQ ID NO: 9734 - DNA, 396 bp, Glycine max
  Clone ID: LIB3039-028-Q1-E1-B11
gagaagaaagcataagatatggcaatgttcacgtaccacgttgaaacggttcaatcatggttggcactgagcagacttcacatactgatccacttagtggcagtgttgtcgctgtgttactaccgcataactcacttgttactggaacctccaacagcgccatggcttctgatgaccgtagcggagcttcttctctcggtgctctggttcttcaaccaagccttccggtggcggacggtgtcgcggagcgtcatgacggataagctgccgacggatgagaagctgccggggcttgacatcttcgtgtgcacgctggattccgaaaaacgagcccaccgtggacgtcatggaacagatcatctccgcagtggccatggattacccctccgacaagct

SEQ ID NO: 9735 - DNA, 293 bp, Glycine max
  Clone ID: LIB3039-028-Q1-E1-B12
ggcacaagtttgttgagatagctagaagcactaagatgaaaatgaaagtgcttgttttgtttgttgctacagttttggtagcatatgaatgccatggctcagactaccataagttccctctccaaatgaaaactgggtttggtgggcaatacagcaatgaggtggcatgtgccagttggaggcttggcgtggaagcaaacaacgtagtcaagtggcaaactgttcctgcagcttgcggatagtacatagctgactacgttctaagagaccaatatagatcagatttccaaaca

SEQ ID NO: 9736 - DNA, 358 bp, Glycine max
  Clone ID: LIB3039-028-Q1-E1-B3
ggcacaagtgagtttgttgatcgagataactagaaacagtgtgatgaaaatgaaggtccttgttttcttcgttgctacaattttggtagcatggcaatgccatgcgtacgatatgttccctctccgaatgaacactggctatggtgcccgtactccggaggtgaaatgcgcaagttggaggcttgctgtggaagcacacaacatctttggctttgagaccattcctgaagagtgcgttgaagcaacataggaatacatccatggcgaacaatatagattagactccaaaacagttaaccaacaagcttacttttatgccagagacctcgaagtccatcccaaggacacatttgtgttc

SEQ ID NO: 9737 - DNA, 359 bp, Glycine max
  Clone ID: LIB3039-028-Q1-E1-B4
gaggaacaagaagcgaaaatataacaaataatttgtactttcatcaaaacaaaatcccgttgtatttttctcagatggctcgaacgaagcaaacggcccgcaagtccaccggcggcaaggcgccgcggaagcagctggcgactaaggcggctcgcaagtcggctccggcgaccggcggcgtgaagaagccgcacagattcaggccgggaaccgtggcgctgcgcgagatccggaagtatcagaagagcacggagctactcatccggaagcttccgttccagcgcttggtccgcgagatcgcgcaggacttcaagaccgacctccggttccagagctccgccgtctccgcgctccaagaa

SEQ ID NO: 9738 - DNA, 254 bp, Glycine max
  Clone ID: LIB3039-028-Q1-E1-B5
agggagtttcgcctcctttctcaaactaaaacccaatcaatctccacaactcaacgaagaggtgttagagacagcaacactttgttgtctgccttgatcgagcacagcttcttcttggggctcgattttgcgctaaagtactctcactcacaacagacaccgtcgtcgtcgtcgtcgtcatcaatggcaccgaagcagaacaaggctgagaagaagatcacttactatgcgaagctgtgcgacctaatggagga

SEQ ID NO: 9739 - DNA, 352 bp, Glycine max
  Clone ID: LIB3039-028-Q1-E1-B6
gaaactacttgttcttcgactccatactcgttgggtagttgctgcaggtggcttcttaacacattcagtgcccttatatgcaacaggtgttgaagtgtcaccactctgttcgtatgctggtgaaaacctggaaccaatatgtcgaggaagaacatttcatgcaccttgtgagatctcgttctagttccaccctgtttgtgcggcttttttgtgacttacactacaatgagggagttctcagtcccatacatgttgcaagattactttgcgtatgccactcatcattcacagttatcaatgtatattatcttctccaatctgtttctgattggtttgtggttttttccttttt

SEQ ID NO: 9740 - DNA, 329 bp, Glycine max
  Clone ID: LIB3039-028-Q1-E1-B7
ggccattgttgttgccattatcatccgcagctgcttttattcgcaccgcaaacagtgagccatggccgtcggaaagaacaagcgcatctccaaggggaagaagggtggcaagaagaaggcagctgatccctttgccaagaaggattggtatgacattaatgctccttctgtttttcaagtgaaaaatgttggcaaaaccctcgtctctcgtactcagggtaccaagattgcttctgaaggactcaagcatagagtgtttgatgtctccttggctgatcttcaaggggatgatgatcatgcattcaagaagattacgttgagagctgaac

SEQ ID NO: 9741 - DNA, 349 bp, Glycine max; identical to SEQ ID NO: 9016
  Clone ID: LIB3039-028-Q1-E1-B8

SEQ ID NO: 9742 - DNA, 339 bp, Glycine max
  Clone ID: LIB3039-028-Q1-E1-B9
ggttcaaagcacgccgtgtttcgctgtctctcccatcctttcgcattctcaatacccttttgatttgtgaaaggaaagcaaacatggttgatcaggtccaacaccctacaatcatggacaaggttgctggtcagctccatctccgttctggtctttcatctggtattagaagttatgatggagcctaccgccacccagctatgtaccaaagaccctcttttgggaattactcgaatgctgcattgcagtttcctgtgatgcccacatgcaaagctaccatggatttgtctgctactgcaacatctgcctcaaccgtccttgttgctgctccagcagaga

SEQ ID NO: 9743 - DNA, 395 bp, Glycine max
  Clone ID: LIB3039-028-Q1-E1-C10
gataatagaaggttgtggggttagggctttagagtgtcttttcttctttttcttcgtcttcttcttcgttgaatcgcgattgttctgttgtgcgactgaaagaagagagatcgaaaatggcgttggctttcgacgagttcggaaggcctttcataatcctgaaggaacaggagcagaagagcagacttcgaggtttggacgctcagaaagccaacatctccgccggcaaagccgtcgctcgcatcctccgaacctccctcggccccaaaggcatggacaagatgctccagagccccgacggcgacgtcactatcacgaacgaacggtgcacgatccttgaccaggtggacgtggacaaccaaatcgcgaagctgatggtggagctctcgcggagt

SEQ ID NO: 9744 - DNA, 319 bp, Glycine max
  Clone ID: LIB3039-028-Q1-E1-C11
gatctaacaaattattcatttcattgttcatactcactcgcacctaactccgccatggcttctcttcccaccactttcgctataaccaaatctgcatcctccataaacaaagtggaccactctctggtcaagatcaaaccatacaacttctctctcaatctaaatcgtcaagggaccatgcaaacatctttaaccataaggcctctaacaattcaagctacgtatagtgatggtggaaggcccatcagtgctagtgtatttgttggtgggtttctcttgggatgattaatagttggtactcttggttgcgtgtatgcac

SEQ ID NO: 9745 - DNA, 312 bp, Glycine max
  Clone ID: LIB3039-028-Q1-E1-C12
agttccgcagcgtaatttttcctttcagcgatatttctacattttcacctctttggacaaatcaaaagaggggaacccatgattccgcctctatcttcctttctcttccagttcctcctcctctttcctctcatactctcgcattccgattccgattccggatcaccccgtgctcccgcgcccgctgatcgtggcgtaaccggagttcgacgcggtgctgcggtgcggcgcgtggcgcgtggcaggggacgtgaacaacctatgcgcgtgggcgataagtcactatgaatgctcggagtacgtgaatgacta

SEQ ID NO: 9746 - DNA, 341 bp, Glycine max
  Clone ID: LIB3039-028-Q1-E1-C2
gacaacacagaacaaaaacatagaaaaaaaaaaacccttagccaacacaaccatcatggccacctctgctattcagcaatcagcatccactggtcaaactgctctgaagcagctcaatgagttcgtccgcaagaccggtggcgccggcaaaggtcgcactaacatgcgccgcaccgtcaagagtgctcctcagagcatttggtatggccctgaccgtcccaagtacttgggtccattctcggagcagattccatcatacttgaccggagaattccctggtgactacggatgggacactgctggattatcagctgacccggaaaccttcgccaggaaccggg

SEQ ID NO: 9747 - DNA, 353 bp, Glycine max
  unsure (1)..(353): unsure at all n locations
  Clone ID: LIB3039-028-Q1-E1-C3
ggcacaagtttgttgagatagctagaagcaataagatgaaaatgaaagtgcttgttttgtttgttgctacagttttggtagcatatgaatgccatggctcagactaccagaagttccctctccaaatgaaaactgggtttggtgggcaatacagcaatgaggtggcatgtgccagttggaggcttggcgtggaagcaaacaacgtagtcaagtggcaaactgttcctgcagcttgcggagagtacatagctgactacgttctangagaccaatatagatcagattccaaaacagttaaccaacaagcttatttctatgctaaatccctcaaactcaccaacaaagatgtcctt

SEQ ID NO: 9748 - DNA, 359 bp, Glycine max
  Clone ID: LIB3039-028-Q1-E1-C4
gaaaaagaaaaatacttataaaaagaatcaaacagctacaacttgaactgttcataacccacaccaaaagttccaaaccccaacccgaaaaatcacacacaccccctttggaattgggatccatcgccatatctctgattaggttagataagattccctatgggcacttccattctcgacgccctgaacgtccgcgtggaaggttccggcgataagtaccttttcctggcccacggcttcggcacagaccaatccgcgtggcagcgcgtgctcccttacttcacccgcaactacagcgtcattctctacgacctcgtctgcgccggcagcgtcaaccccgagcaatttcaataacggcg

SEQ ID NO: 9749 - DNA, 348 bp, Glycine max
  Clone ID: LIB3039-028-Q1-E1-C6
ggacacactcatcttcttcctcttctttttggttctctctctcacagtgagtcagcaccagtgggctccatttctgcagtagctcaagataatcataacactacagagaaggccatcatgaccagatgcgatccagcgaacgcatgcacgacatacgttcgtccaagctgagacatcctcgttcaggcaagtagtccacatgctgtccggctcctcggacacagcgagatatgcagccgacgcgcgctcttcgagaccttcgaactcgatcccaaccatgagatccatacgcattattcagcacttttctaagctctaccagcgcatatcaaagtcactgaatctcaa

SEQ ID NO: 9750 - DNA, 356 bp, Glycine max
  Clone ID: LIB3039-028-Q1-E1-C7
gacaagtgagtttgttgatcgagataactagaaacagtgtgatgaaaatgaaggtccttgttttcttcgttgctacaattttggtagcatggcaatgccatgcgtacgatatgttccctctccgaatgaacactggctatggtgcccgtactccggaggtgaaatgcgcaagttggaggcttgctgtggaagcacacaacatctttggctttgagaccattcctgaagagtgcgttgaagcaacaaaggaatacatccatggcgaacaatatagatcagactccaaaacagttaaccaacaagcttacttttatgccagagacctcgaagtccatcccaaggacacatttgtgttc

SEQ ID NO: 9751 - DNA, 365 bp, Glycine max
  Clone ID: LIB3039-028-Q1-E1-C8
ggctgttgtggctattatcattactgctggatgggttggattcctttataccgtgtggctggtaactagcaagagccttggattggcaaagcaatctttgagtgtgactggctctgcaattactacttactcagctgcttggggtacccgtaaccttgcagacaaaaattcaatttaggtgccggtcacataaagaaggttgtgcacaaatcttacacaaacatgttttttggatggcaaaagcttcttctgttgactggtagagtctcatatccttcatcttgctcatggtttggtttcagtggctttcaatagcatgcttgtattatgttaataaaatgccacagtttggtttcaagtgtttt

SEQ ID NO: 9752 - DNA, 397 bp, Glycine max
  Clone ID: LIB3039-028-Q1-E1-C9
gacacttcaaaatcctctggtaacccttattttatctattctctctctttcttttgtgttctaagcagctagaagcaatggagaggaaaagaagccatgcctctttcaccatgtttgcaatgcttgttggagtgatctctcagagccttgtcattcctgtagtatccaccactgttgaagatcagaagaactactacaccccagatccacatgctggaagtcccccctcatgtttctccgattctctgtgctcacatagtagtactcctccatctcatggccatggaagctctccaacctcacatcatcacagtagtccaagtactccatcaacaccctcaggtggaaactgtggatcatcacctccacaacatcatgattcaaccacaccctcaac

SEQ ID NO: 9753 - DNA, 339 bp, Glycine max; identical to SEQ ID NO: 7892
  Clone ID: LIB3039-028-Q1-E1-D1

SEQ ID NO: 9754 - DNA, 368 bp, Glycine max
  Clone ID: LIB3039-028-Q1-E1-D10
ggcagtgatagatataagaaaatgtggcttgtgcagctctcaaccccatttctgaacggacatggtcactccaccacccttctctccaagcacagttcggcggtgactcagacccactgggccccagcgagtttcctgcctcaaatcaatgcgatgaagacaatgcacgggagagtggtgtgctccaccagcgacaagactgtggcagtggaggtggtgcggctggcccctcacccaaagtacatgaggcgcgtgaggaagaagaagaagtaccaggcccacgactccgataaccaactcaaagtctgcgacatcgtccagctccagaagaccatgcccatcagcacgaacaatgcctttctcgcact

SEQ ID NO: 9755 - DNA, 351 bp, Glycine max; identical to SEQ ID NO: 9334
  Clone ID: LIB3039-028-Q1-E1-D11

SEQ ID NO: 9756 - DNA, 358 bp, Glycine max
  Clone ID: LIB3039-028-Q1-E1-D12
ggcacaagtgagtttgttgatcgagataactagaaacagtgtgatgaaaatgaagggccttggtttcctcgttgctacaattttggtagcatggcaatgccatgcgtacgatatgttccctctccgaatgaacactggctatggtgcccgtactccggaagtgaaatgcgcaagttggaagcttgctgtggaagcacacaacatctttggctttgagaacattcctgaagagtgcgttgaagcaacaaaggaatacatccatggcgaacaatatagatcagactccaaaacagttaaccaacaagcttacttttatgccagagacctcgaagtccatcccaaggacacatttgtgttc

SEQ ID NO: 9757 - DNA, 349 bp, Glycine max
  Clone ID: LIB3039-028-Q1-E1-D2
ggcacaagtgagtttgttgatcgagataactagaaacagtgtgatgaaaatgaaggtccttgttttcttcgttgctacaattttggtagcgtggcaatgccatgcgtacgatatgttccctctccgaatgaacactggctatggtgcccgtactccggaggtgaaatgcgcaagttggaggcttgctgtggaagcacacaacatctttggctttgagaccattcctgaagagtgcgttgaagcaacaaaggaatacatccatggcgaacaatatagatcagactccaaaacagttaaccaacaagcttacttttatgccagagacctcgaagtccatcccaaggacaca

SEQ ID NO: 9758 - DNA, 370 bp, Glycine max
  Clone ID: LIB3039-028-Q1-E1-D3
gacacacagctattcctcttaagcttgctactgagtttccacactgcataccttaggtcttccgaattcgaagttaatttgcaagatggctaaggaaaaggctcagatcaacattgtggtggttggtcatgtggaccctgaggaggcaaccaccattaacgagctgaagaagcctgttgtggagaaagaagctccagggcatgccgtatgagggcatgcacgtacggcctcggaggggaaccagaaaattatgttaacaaaataatctggaaccctaatgtatcagtgtcatcatcagtgtgtagtttaagctagctttgctatggttacgttctttgagatgagagtcctgatgaacaattccaatccg

SEQ ID NO: 9759 - DNA, 360 bp, Glycine max
  Clone ID: LIB3039-028-Q1-E1-D4
catccccagttcgagaaggatctgatgaagactcatcacctcgtgcatctgtatctgagaatggacattcaagtgctgcggaatttacaggggcttcaaaagctttcaatgagcgggctgaacatcaggatgcttcttttgaggcaagagctcatatttctaaggtaactgaggagaggaattctgttgttgagcaaaacagaagacttcagcaagaactggagcttttgaggcgtgatgccagcagaagccacggcggtgtaccattcatgtacgtagttcttgttggcatcattggactcatcttgggtttcctattgaagaggacgtgacctgagtgatggccaagttctctccaaa

SEQ ID NO: 9760 - DNA, 367 bp, Glycine max
  Clone ID: LIB3039-028-Q1-E1-D5
gactctcacttctcttcacacactgagacacacagagagagaaaaataaagggtgtgatgggtgtcttactgagtgttttctttttataatgaacaaagaactgcacaccctcttcttcaccgaagaagaagatggcaattcagcaccacaatgaccaactagagcataatgaaaatgtctcatctgtccttgatgccctttactgtgacgaaggaaagtgggaagaggaagaggaggagaaagaagaagaagaagatgaaggtgaaaatgaaagtgaagtgacaacaaacactgcaacttgtcttttccctctgctcttgttggagcaagacttgttctgggaagatgaggaactaaactccaacc

SEQ ID NO: 9761 - DNA, 351 bp, Glycine max
  Clone ID: LIB3039-028-Q1-E1-D6
gacacaccgtttgttctattcttaactcaacttctgctacccactctcttcttccaagtccaaccacgcttttctctacagtcatgggcaaggtcaagatcggaatcaacggatttggaagaattggccgtttggttgccagagtcgctctgcaaagagacgatgtggagctcgttgccgttaacgaccctttcattaccaccgattacatgacatacatgtttaaatacgacagtgttcacggacactggaagcatcacgatgtcaccgttaaggacgagaagacccttctcttcggtgacaagccagtcactgtttttggacacaggaatcctgaagagatccatgggg

SEQ ID NO: 9762 - DNA, 345 bp, Glycine max
  Clone ID: LIB3039-028-Q1-E1-D7
ggcacagagagagagagagagagagtgagggagagagagtgaggcttcttctacccagatttgtttcattttaaccaaagaagaatctctcagaaatggcgtcaagagcaattgttcaacaacaacaagccagaggtgaagcagtagtaaggggaggaaaacagcagaagaagaacggtgttgcggatggaaggaaccgcaaggcattgggtgacattgggaatttggccaatataagaagtgccgttgaagtcaagccaaatcgcgctatcacaaggagttttggtgcgcaattacttgccaatgcacaagcggcaacagctgctgggaataaccagaagcaag

SEQ ID NO: 9763 - DNA, 339 bp, Glycine max
  Clone ID: LIB3039-028-Q1-E1-D8
gaaggtgcaagagtttgttgtgagctataagctagtttatcgtgaggagaatatgaagttgtttgttttctttgttgctgcagtagttttggtagcatggccatgccatggcgcaggctaccaaaggttccctctccgaatgaaaactggctatggtgagcgttcttcggaggtaaaatgcgcaagttttaggcttgctgtggaagcacacaacatccgagcctttaaaaccattcctgaagagtgcgttgaaccaacaaaggactacattaatggcgaacaatttagattagactctaaaacagttaaccaacaagctttcttttatgctagtgaacg

SEQ ID NO: 9764 - DNA, 383 bp, Glycine max
  Clone ID: LIB3039-028-Q1-E1-D9
gaaggtgcaagagtttgttgtgagctataagctagtttatcgtgaggagaatatgaagttgtttgttttctttgttgctgcagtaattttggtagcatggccatgccatggcgcaggctaccaaaggttccctctccgaatgaaaactggctatggtgagcgttcttcggacgtaaaatgcgcaagttttaggcttgctgtggaagcacacaacatccgagcctttaaaaccattcctgaaaagttcgttgaaccaacaaaggactacattaatggccatcaatttagatcagactctaaaacagttaaacaacaatgctttcttttatgctagtgaacgcgaagtccatcactacgacatatttatattccgcattagatac

SEQ ID NO: 9765 - DNA, 341 bp, Glycine max
  Clone ID: LIB3039-028-Q1-E1-E1
gagcgaaacagagagtgatttcagtgagtgatcggtgttcacttgatctcatcataatcgtcagcgtcaattgaagaagatgccgatcagaaacatcgccgtcggaaggcctgaagaggcgactcaccccgacacgttgaaggcggctttggctgagttcatctcaaccttcatcttcgtgttcgccggctcaggctccggcatcgcctacaacaagctcaccgacaacggcgctgccacccctgccggcctcatctccgcctccatcgcccatgcattcgccctcttcgtcgccgtctccgtcggcgccaacatctccggcggccacgtcaaccccgccg

SEQ ID NO: 9766 - DNA, 373 bp, Glycine max
  unsure (1)..(373): unsure at all n locations
  Clone ID: LIB3039-028-Q1-E1-E10
ggcagccaaagaaaagaaaatcctcaattttctgagcagccaaacactctctctctgtctctcgaaaattctcagtttgcagagaaaatctgaatcatgtcgtggcaagcgtatgtcgacgatcaccttctgtgtgacatcgaaggtaagcacctcactcacgctgctatcatcggccaagacggcagcgtttgggctcagagtaccgacttccctcagttcaaatctgaggagataactgccatcatgaatgactttaatgagcctggattacttgctccaactggattgtatctcgggtggcacaaatatatggtcatccaaggtgaacccggtgctgtcattcgagggaagaangggtctggtggtgtta

SEQ ID NO: 9767 - DNA, 344 bp, Glycine max
  unsure (1)..(344): unsure at all n locations
  Clone ID: LIB3039-028-Q1-E1-E11
tgggaccacattccaaaacacaaacacatacattgtagtatcacttttgtctcggaatttgttcttttgagttacggcaagcttaaaggttgcatgtgtggttttgatgtgcatggctgtgatgattgcaccaatcatggtgcaagccgtgtcatgcaatgatgtttctgtgaacctagcaccgtgcctatcttatctgatgcanggtggacatgttccagaatcgtgctgtaacggagtgaggaacattctgggttctgccagcaccatctttgacaaacataccgtgtgcaaatgtcttcagcaagctggcaatatatatggcatcaacgactaatacgctc

SEQ ID NO: 9768 - DNA, 401 bp, Glycine max
  unsure (1)..(401): unsure at all n locations
  Clone ID: LIB3039-028-Q1-E1-E12
agtggtaacccttattttatctattctctctctttcttttgtgttctaagcagctagaagcaatggagaggaaaagaagccatgcctctttcaccatgtttgcaatgcttgttggagtgatctctcagagccttgtcattcctgtagtatccaccactgttgaagatcagaagaactactacaccccagatccacatgctggaagtcccccctcaggctcacacagtagtactcctccatctcatggccatggaagctctccaccctcacatcatcacagtagtccaagtactccatcaacaccctcaggtggaaactgtggatcatcacctccacaacatcatgattcaacancacctcaactccatcaaacacatcaaacctccctcaggtggatacta

SEQ ID NO: 9769 - DNA, 403 bp, Glycine max
  Clone ID: LIB3039-028-Q1-E1-E2
ggcacaagtgagtttgttgatcgagataactagaaacagtgtgatgaaaatgaaggtccttgttttcttcgttgctacaattttggtagcatggcaatgccatgcgtacgatatgttccctctccgaatgaacactggctatggtgcccgtactccggaggtgaaatgcgcaagttggaggcttgctgtggaagcacacaacatctttggctttgagaccattcctgaagagtgcgttgaagcaacaaaggaatacatccatggcgaacaatatagatcagactccaaaacagttaaccaacaagcttacttttatgccagagacctcgaagtcccatccaaggacacatttggtgtcaattaaaaatggaacggtactctctaatattccatactacaaaaa

SEQ ID NO: 9770 - DNA, 346 bp, Glycine max
  Clone ID: LIB3039-028-Q1-E1-E3
aggggaatttcccaaggggcttaataccccccccaacttgtgccaacccttaggtcaaagtataaccatccattccaaccttccccccttccccctcaacccaaacccaaacccccaacccggttccccccccgtaccgttcataaaaggaggaaatccaaaaaccgaatctagaaaacccgttccaaaacttgcggtaattaaaaaggaagccgcaacaaaggctaggaaacccgccggaaagggaaaggcaccgaaggaccctataagcccaaaaaggctccaaattgcttcctccgttttcatggaggatttcaggaaggtattcacaaaagagaatcctgaa

SEQ ID NO: 9771 - DNA, 409 bp, Glycine max
  Clone ID: LIB3039-028-Q1-E1-E4
gatcattctcatatcctcaatcaccccccctcgcactcgctcttcccttcctctggtggcgacaatgtcgactcctgctaggaagaggctgatgagagacttcaagaggctgcaacaagacccgcctgcagggatcagtggtgccccccaggataacaacataatgctgtggaatgctgtcatatttggtcctgatgatactccatgggatggaggcacgttcaagttgacactccaatttactgaggactatccaaataaaccaccgactgtacgatttgtgtctcgcatgtttcatccaaatatttatgctgatggaagtatttgtttggatatattacaaaatcagtggaatcctaattatgaagttgctggcaaaatccacatctatccagtcattgctttgtga

SEQ ID NO: 9772 - DNA, 345 bp, Glycine max
  Clone ID: LIB3039-028-Q1-E1-E5
ggtacgcagcttcatccccaacgcgtgcatagcagagtcagagacagagacgcagccatggggcggagacctgcgaggtgttataggcaaattaagaacaagccataccccaagtcacgtttctgccgtggtgttcctgatcccaagatcaggatttatgatgttggtatgaagaagaagggtgttgatgagtttcctttctgtgtccatctggttagttgggagaaggaaaatgtttcaagtgaggccctggaagctgctcgcattgcttgcaacaagtacatggccaaatttgctggaaaggatgctttccacttgagagtcagggtgcacccattccatgtt

SEQ ID NO: 9773 - DNA, 360 bp, Glycine max
  Clone ID: LIB3039-028-Q1-E1-E6
gacagcatatatatcaataatctattttatactatacctacattttgataattttctttgtagttgatagccatggctacccgtggaaagcttgaggttgacattgatctcaagtccaacgcagacaagtactggcaaacccttaggaattctactgaaatattccctaaggccttcccacatgattacaaaagcattgaggttcttgagggtgatggcaagtctcctggttctatccgccacataagttatggtgaaggttcaccacttgtgaaatcatcctttgagaagattgaggctgttgatgaggaaaagaaggtagtgtcgtacactatcattgatggggaactcctccaacaa

SEQ ID NO: 9774 - DNA, 349 bp, Glycine max
  Clone ID: LIB3039-028-Q1-E1-E7
gatataagatcgattatactcacaagttttgttctttcctagcaattcggcgcaatcgtcttctgcttcaaggaaggagagcttgttattctctatcaacaaggaaaatgtcagggtatgattgtttttctctctgaagaggttgttgttgcagctgagccagctgctgccatcccatgcgagcctatggacatcatgactgccttgcaacttgtgcgcagaaaatctctggcttatggtggtcttgcacgatgccttcacgaacgggcaaaagtgattgataagcatgctgcacaactctgtgttctagcagaagactgtgaccagcctgactatgttaaactggtta

SEQ ID NO: 9775 - DNA, 356 bp, Glycine max
  Clone ID: LIB3039-028-Q1-E1-E8
gacgattactaccaagtgaaaaagcaattaactaagcatatatagcgtgtaagacagtgagaaaaaaagtgttgtgtagagagaaatggctaggtggtgcatcttggtggttcttgcccttgtcgtggttgcaagtgccagaaacatgcccaatgacgcaggtttggaggaccagaagaacttcctcgggtatgggttctctggagttggcaacaatgggcttccctttggaggagtgggttctgggtttgatggtaatatgggtgggccttctgggctcggtggatttggaggattcggtgggcctagcgggctcggaggtcttggtaacggtgaagggcccaaccttcctctcc

SEQ ID NO: 9776 - DNA, 396 bp, Glycine max
  unsure (1)..(396): unsure at all n locations
  Clone ID: LIB3039-028-Q1-E1-E9
gataggaatgccctcttgttctctatttcaccacacaaattcccaattctaacttggcttttttttgtctctcacacactcctttcaatctccaattaattacttttcttcaatttgaagcgtgtctgaagttggttgaagcattgtgttattgttctggttttggtctccgaggtttgtgtcggattccgatgtattatgtaaaagaagctgcgcatgtcgaccccatgttcgtagctgataacaccaaacccaggattattacaaagtgctggacgttgaatatgatgcaatcgatgaaaatatcaaattaaattaccgaagactcgcgctgaaatggcatcctgacaatcacggangagatagtgctgttactgcaaaatttcaagagataaa

SEQ ID NO: 9777 - DNA, 165 bp, Glycine max
  Clone ID: LIB3039-028-Q1-E1-F1
gtcggatccaatgctttctagtcacggccacgcccctgtcgcactccattatgaagctctggcattctctaaacccatgcaatcaattcacaattttggtaacctctttcgtcatacgcactatagaataccgatgcacaattcatgactgaaattcgaagaatg

SEQ ID NO: 9778 - DNA, 397 bp, Glycine max
  Clone ID: LIB3039-028-Q1-E1-F10
gaaggtgcaagagtttgttgtgagctataagctagtttatcgtgaggagaatatgaagttgtttgttttctttgttgctgcagtagttttggtagcatggccatgccatggcgcaggctaccaaaggttccctctccgaatgaaaactggctatggtgagcgttcttcggaggtaaaatgcgcaagttttaggcttgctgtggaagcacacaacatccgagcctttaaaaccattcctgaagagtgcgttgaaccaacaaaggactacattaatggcgaacaatttagatcagactctaaaacagttaaccaacaagctttcttttatgccagttgacgcgaagtccaacacagcgacatatttaaattcggcatagataacaccgtactctctaat

SEQ ID NO: 9779 - DNA, 384 bp, Glycine max
  Clone ID: LIB3039-028-Q1-E1-F11
gacacttcgctagatccagccccatcatggcttcagagaagcaagcggctcttgccgtcactccctctgatgctgatgctcctaccatatttgacaagatcatcaataaggagattccttctactgtggtttatgaggatgacaaggtgcttgccttcagggacataactcctcaagctcctacacatattcttatcattcctaaattcaaagacgggttaagtggtctatccaaggctgaggagaggcactttgagattcttggccgccttctgtacactgccaagctggttgcgaagcaagaaggactcgacgacggcttcaggattgtaattaacgatgggccgaaaggatgccaatcagtttaccacattcatgttgcac

SEQ ID NO: 9780 - DNA, 382 bp, Glycine max
  Clone ID: LIB3039-028-Q1-E1-F12
gagtgagaagaagatggggtcagagtgagaaagagaaagagagaattcgtaaaccctaatttcggaaagatcggcgatgactgcctccaaggatcgcgagaacttcgtctacatcgccaaactcgccgagcaagccgagcgttacgaagagatggtggaatcaatgaagaacgttgcgaatctcgacgttgaactgacggtggaggagcggaatttgctttctgttgggtacaagaatgtgattggtgctcgcagagcgtcctggaggatcctgtcttccattgagcacaaggaagaaacaaaagggaacgagttgaatgcgaagcggattaaggagtacagacagaaggttgaattggagctatcgaacatctgtaatgat

SEQ ID NO: 9781 - DNA, 350 bp, Glycine max
  Clone ID: LIB3039-028-Q1-E1-F2
ggaagcgcagacctaggatttcggccgtttgctccccaaggaaagaagcagagtgtttcttttgaaatcagctagaaaagatgtcaggtgaagaggtagctgttgcagctgaggcacctgctgcttcaattccaggtgagccaatggacatcatgactgctctacagcttgtgctgagaaaatctctggcctatggtggtcttgcacgaggtcttcatgaaggtgctaaggtgatcgagaagcatgctgcacagctctgcgttctagcagaagattgtgaccaacctgattatgtgaaactggtgaaggctctttgtgcagagcacaatgttagccttttgacagttcca

SEQ ID NO: 9782 - DNA, 358 bp, Glycine max
  Clone ID: LIB3039-028-Q1-E1-F3
ggcacaagtgagtttgttgatcgagataactacaaacagtgtgatgaaaatgaatgtccttgttttcttcgttgctacaattttggtagcatggcaatgccatgcgtacgatatgttccctctccgaatgaacactggctatggtgcccgtactccggacgtgaaatgcgcaagttggaagcttgctgtggaagcacacaacatctttggctttgagaccattcctgaatagtgcgttgaagcaacaaaggaatacatccatggcgaacaatatatatcagactccaaaacagttaaccaacaagcttacctttatgccagagacctcgaagtccatcccaaagacacatttgtgttc

SEQ ID NO: 9783 - DNA, 405 bp, Glycine max
  Clone ID: LIB3039-028-Q1-E1-F4
gactcaccacttcaaaacactcataacacaaagcacaaagcaaagctcatccttgagttaaaaaatggcagcagcttcttccatggctctctcatccccatccttggctggcaaggccgtgaagctgggcccatcagccccagaagtgggaagggtgagcatgaggaagaccgtcaccaagcaggtctcctcaggaagcccatggtacggcccagaccgagtcaagtacttgggcccattctctggcgagcccccgtcctacctaaccggtgagttcccaggcgactacggctgggacactgctgggctttccgcagacccagaaaccttcgccaagaaccgtgaaatccaagttattcaatccaagttgggccatgctcggagccttgggctgcgtcttcccgg

SEQ ID NO: 9784 - DNA, 342 bp, Glycine max
  Clone ID: LIB3039-028-Q1-E1-F5
gacaggcaaaaaccctagccttcgaaaaccctaatcctgaggcactgtgatatggcaagagccgtttcctcttcctgcgcgcgcctcacaatgcgcctcttctccaccaccaccaccaccaccaccaccaccgctgcgttcgccgttacattacccaaaccctcgtcactctcagtctcaacgcgtcgattcctcttccctctctcccatgccatcgtccctccctccacccgcgtcgccggaatccggtgccgtgtcaaccgcgccggcgactcagcgtactcgccgctgaactcagcttcgtcatcgtcgtcgtcgttcagcgaccggcctcccacggag

SEQ ID NO: 9785 - DNA, 368 bp, Glycine max
  Clone ID: LIB3039-028-Q1-E1-F6
aggggaacttcaagggcaaaaaaagttgtgctgtgccgcctcttccgtaggcagcagcaatggcctcaaatcccaaaactttgacctttgaggaggtagctaagcacaacaacaaaaaggattgctggattattatcaatggaaaggtgtatgatatcacaccatttttggatgagcatccacgaggtgatgaagttttgctgacgtcaacagggaaggatgccaccattgattttgaagatgtgggccacagtgattctgctatagaaatgatggaaaaatacttcattgggaaggttgacacttccactcttccacccaaagttagccatagtctgccacaacctacacaaacacatggcgccaac

SEQ ID NO: 9786 - DNA, 354 bp, Glycine max
  Clone ID: LIB3039-028-Q1-E1-F7
gcctcttctctcgcgtcgctccgcaccagtttcaccgcacgaatatcttgttgtttggagcgatccgagaaaaactctgtaaacatgttggtttaccaggacctccttacaggtgatgagcttctctctgactccttccgttacaaggaaattgagaatggaatgctgtgggaagttgaggggaagtgggttgttaaaggagcagttgatgtagacattggtgcaaacccttctgctgagggtggaggagaagatgagggagttgatgatgcagctgttaaggttgttgacattgttgacacattcagacttcaggagcaacccgcattcgataagaagcagtttgttaccttc

SEQ ID NO: 9787 - DNA, 368 bp, Glycine max
  Clone ID: LIB3039-028-Q1-E1-F8
gattgcatcgttgttgttcccttcttttttctttctccgccccttttttgttgttccttcttctcgttcgtcgctttgtgatctctctctgcaaccatgtccgtcgagaaagagagagagacccaggtttacttggccaagcttgccgagcaggccgagagatacgaagaaatggttgagtgtatgaagaaagtagcaaaacttgatcttgatctgactgtggaagaaaggaaccttctctcagtgggatacaaaaatgtgattggtgcacgaagggcctcttggcgcataatgtcctcaattgagcagaaggaagagtctaagggaaatgagcacaatgttaaactgatcaagagttactggcaaaa

SEQ ID NO: 9788 - DNA, 337 bp, Glycine max
  Clone ID: LIB3039-028-Q1-E1-F9
gattattctaaaaaaatacaggatttgaaatttcatttttgaatcttcttactttcattttaatataatatctctattagttaatctattaatatctattagttaatctattaatagaatataagtaatatagaatctaagtaattcacggttaggatagatctaaaccagctcattatatatatattacaacttactatgccaactatgaaacaacttattagaaacacaagacagccaatccgaaacgtcacaaaatccccagctcttcggggatgccctcagcgccgaggaacgtgtaccaaggtgtatgtgcgactcgttcagatttatatac

SEQ ID NO: 9789 - DNA, 351 bp, Glycine max
  Clone ID: LIB3039-028-Q1-E1-G1
agcagggaatttttctccacagccttttatagattaattcttattgcaattggtgctggcatatgtttgtttgtaaatattttcatataccccatctggtctggggaggatctgcataaattggtggtgaaaaatttcaatggagttgctgcatctttagaaggtttgcttgaatttcctcatgttctgaatcctcgcaaagattttttggtgttttttatgcctagttcctgtatttaattttctgttgttgtcactctgagttggttcctttgtaactttgtttaggctgtgttaatggttacctgcaatgtgttgcatatgagagggtcccttcaaaaattcctgttt

SEQ ID NO: 9790 - DNA, 428 bp, Glycine max
  unsure (1)..(428): unsure at all n locations
  Clone ID: LIB3039-028-Q1-E1-G10
agacgggaagacgacagaaggggaaaagagcactgaccaaaccattttattttatttttgaatcaagggtgagggccttccatggcttccgcttgtgcttcctctgcaattacagctgttgccatctctacgccgagttccgggcagaagaatggatcaggaggttgttttcttagtggaaggaaattgagggtgaaaaaggagagagcagcaattggaggacgatcgatgggcactacagtgtgcgcagttgctgagcctgacagacctctatggttcccaggcagcacccctcctccatggcttgatggcactctacctggagacttcggctttgaccctcttggtcttggatctgacccggagagtctgagatggaatgttcaagcanagctagtgcactgcanatgggcaatgttgggtgctgc

SEQ ID NO: 9791 - DNA, 309 bp, Glycine max
  Clone ID: LIB3039-028-Q1-E1-G11
ggcacaagtgagtttgttgatctagataacgataaacagtgttatgaaaatgaaggtccttgttttcgtcgctgctacaattttggcagcatggaactgccatacgtactatatgttccctcaccgattaagcagtggctatcgtgctcgtactccggaggtgaaatgcgcagattgatcgcttgctgtgggaccatacatcatcattggctttgacaccattcctgaagagtgcgttgaaccatcagttgaatacatcaatggtcatcaatatatatcagactctagaacagtttaccaacaagctta

SEQ ID NO: 9792 - DNA, 306 bp, Glycine max
  Clone ID: LIB3039-028-Q1-E1-G12
gatcaacaagaatactcataataatatagtggctagcatagagctagtaataatattaatattgttaagctagctctaagccatggctaatgaacgtgatctgttctcggcggagattgtgaaccgtggaattgaatcgtcaggaccaaacgctgggtcgttgacgttttcggtgatggtgagaaggcgcttaccggattttcttcaatcggtgaaccttaagtacgtgaaattgggttaccattatctgagaaaccatggcatatacttgttcaccataccggttcttctcgtggtgtttagtgc

SEQ ID NO: 9793 - DNA, 341 bp, Glycine max
  Clone ID: LIB3039-028-Q1-E1-G2
gatacattctcttgtcacagttttctgtgtcaccggaactcgtttctttcaaaacacttcaaacatctcgaacgctctctttccggcaactaggttaaagttcatcaatggcaggtcgcggcaaaaccctaggatctagcgccgccaagaaggctacctcaaggagcagcaaagccggcctccaattccccgtcggccgtatcgcccgtttcctcaaggccggaaaatacgctgagcgtgtcggcgccggcgcccctgtctacctcgccgccgtactcgaatatctcgcggctgaggttttggaattggctggaaacgctgcgagagacaacaagaagact

SEQ ID NO: 9794 - DNA, 350 bp, Glycine max
  Clone ID: LIB3039-028-Q1-E1-G3
gaaaacaattagagagaaggcaagcttattgtcggagtcccaagacatactatccaccattgaaattgagacacaggatattccagatgctcggacctatcttctgactttgaaggaaataagagtcaagagaggtcttacagatgatcttggtgcggaggctctgatgatagatgcattggacaaagttgaaaaggatttaaaaaaacctttactgagaaatgataagaaaggaatggaccttctcttggctgagtttgataagattaataagaaacttggaattcgaaaggaagatctaccgaagtatgaagaggagctagaacttaaagtagccaaagcacaactgg

SEQ ID NO: 9795 - DNA, 358 bp, Glycine max
  Clone ID: LIB3039-028-Q1-E1-G5
ggcacaagtgagtttgttgatcgagataactagaaacagtgtgatgaaaatgaaggtccttgttttcttcgttgctacaattttggtagcatggcaatgccatgcgtacgatatgttccctctccgaatgaacactggctatggtgcccgtactccggaggtgaaatgcgcaagttggaggcttgctgtggaagcacacaacatctttggctttgagaccattcctgaagagtgcgttgaagcaacaaaggaatacatccacggcgaacaatatagattagactccaaaacagttaaccaacaagcttacttttatgccagagacctcgaagtccatcccaaggacacatttgtgttc

SEQ ID NO: 9796 - DNA, 324 bp, Glycine max
  Clone ID: LIB3039-028-Q1-E1-G6
gaccgctttcattttaatctcatccttctccgtttccttcaaaacccaaacttgaacttcttgtttcctgctcgtggaagcatatgacaaccacgccctgtgtaactggtgccttgtcaaacgcggtcggattccgtgactggaaaaagcatgtccctttagcagcttctctctgtaaactaagcttcaattcaaatatagttgacatgaagatattatctcgatgtggttgtcacaaagttggaaatgaccaaagatgtttccgattatatgccctatttggaggaaaaaaggacaatagtgggaaaagtgatgatgctcctt

SEQ ID NO: 9797 - DNA, 357 bp, Glycine max
  Clone ID: LIB3039-028-Q1-E1-G7
ggtgcacaagtgagtttgttgatcgagataactagaaacagtgtgatgaaaatgaaggtccgtgttttcttcgttgctacaattttggtagcatggcaatgccatgcgtacgatatgttccctctccgaatgaacactggctatggtgcccgtactccggaggtgaaatgcgcaagttggaggcttgctgtggaagcacacaacatctttggctttgagaccattcctgaagagtgcgttgaagcaacaaaggagtacatccatggcgaacaatatagatcagactccaaaacagttaaccaacaagcttacttttatgccagagacctcgaagtccatcccaaggacacatttgtg

SEQ ID NO: 9798 - DNA, 323 bp, Glycine max
  unsure (1)..(323): unsure at all n locations
  Clone ID: LIB3039-028-Q1-E1-G8
ggagaagggttttacattttattcgttctccggtgaaacagaaacagagagagagagtgagaaaaaacgaaacgatggagggaggagtctcctacgcgcgcatgcctcgtgtcaaaatccgcgagctgaaggacgactacgccaagttcgagctccgcgacaccgacgcgagtatagccaacgcgctgcggcgcgtgatgatcgcggaggtgccgacggtcgccatcgacctcgtggagatcgaggtcaactcgtcggtgctcaacgacgagttcatcgcgcacaggctcggcctcattcncctcacgagcgagcgcgccatg

SEQ ID NO: 9799 - DNA, 230 bp, Glycine max
  Clone ID: LIB3039-028-Q1-E1-G9
ggcacaagtgagtttgttgatcgagataactataaacagtgtgatgaaaatgaaggtccttgttttcgtcgttgctacaattttggtagcatggcaatgccatacgtacgatatgttccctctccgaatgaacactggctatggtgcccgtactccggaggtgaaatgcgcaagttggaggcttgctgtggaagcacacaacatctttggctttgagaccattcctgaaa

SEQ ID NO: 9800 - DNA, 350 bp, Glycine max
  Clone ID: LIB3039-028-Q1-E1-H1
gacaacacaacgcaacacaacgcgcactctctcttttctctcttaacacaaaaaccctatcgttcttcgcggtttcgccgattctcgccatgccgaaagccaaatccgacgccaaagccgccgatagccggttgaagcgcaagggcgctggtgctggaaggaagcaatcgaagaaagctgctaaggatcctaacaagccaaagagacctccaagcgctttcttcgttttcatgtccgagttcagagagcagtttaagaaggagcatcctaacaacaaatccgtcgctgttgtcggtaaagctggtggtgacaaatggaaatcgctgtctgatgctgaaaagggccccttc

SEQ ID NO: 9801 - DNA, 386 bp, Glycine max
  unsure (1)..(386): unsure at all n locations
  Clone ID: LIB3039-028-Q1-E1-H10
gaagggacgaaaacgaaacgcgaacggataacagtagagtaagagtagcaggagcagaaagaaagaaagaacgaaaatggcgagcggcgcctcaccgcaactgcaaatgaggttgaagtcctctttcatcggagatcgtctcttacgctgttcaacttcaaggcaccaacctcttcctcaactattccgttacaaccctggaaccaagcatgtttcgatgcagttatctagaacactttctggcttgaccaatctcttttttaatagaagaaatttggatgaattgcctaacagcaagcgtaaacgtctgagacctgngaaagtttctccgcggcgacaggtgccgaagaatataccgaggcctccgtatgtgaattctatgattc

SEQ ID NO: 9802 - DNA, 387 bp, Glycine max
  Clone ID: LIB3039-028-Q1-E1-H11
gaatcagagaaattctctgtatccacaagtaatcgattctaaccccgatgctccctcacctctccttatcaccaatcactcgtcctcttcgcaaccctgcctctacccttccgttgactacaacgacctcgtcgagaacctattctctgaggatgccaccgccgcctgttccccctctgcgccgccggaggccaccgaggaagtcctcttccggatccccggcgcgatcctcaacctcgtcgacaaggactacagcgtcgagctcgcatgcggcgacttctccgtgattcgtctccggcagggcgacaacgccgtcgccgtgtacgcgcgcgtcgccgacgagatccaatggccgctcgcgaaggacgccgccgccgtgaaactcga

SEQ ID NO: 9803 - DNA, 195 bp, Glycine max
  Clone ID: LIB3039-028-Q1-E1-H12
ggtgcgaagtgagggacatgcagtacaatagtaatagtggtaacaaaaggcaacagagaacagaacagaaaggaaaagagagggtttggtgagttacccaagagaaaggatgaagagagagcgccagcagcttggttccaacgcaagaacctcaaactgcggttattcaagcggaaaatcgaatccttgggaaga

SEQ ID NO: 9804 - DNA, 403 bp, Glycine max
  Clone ID: LIB3039-028-Q1-E1-H2
gggtgcaagagtttgttgtgagctataagctagtttatcgtgaggagaatatgaagttgtttgttttctttgttgctgcagtagttttggtagcatggccatgccatggcgcaggctaccaaaggttccctctccgaatgaaaactggctatggtgagcgttcttcggaggtaaaatgcgcaagttttaggcttgctgtggaagcacacaacatccgagcctttaaaaccattcctgaagagtgcgttgaaccaacaaaggactacattaatggcgaacaatttagatcagactctaaaacagttaaccaacaagctttcttttatgctagtgaacgcgaagtccatcacaaccacattattaaaatccggactagataacacggtactctctaataccccat

SEQ ID NO: 9805 - DNA, 331 bp, Glycine max
  Clone ID: LIB3039-028-Q1-E1-H3
gacagcagcagagcaaaagaaagaaagaaagaaagtgcaacttcctctgttttgctcccctgtttaagccttatcataagcttagaatggcacacaaggaattttccattgccctagtgactctcattgttctctttgtcaacacgaacctccaaggtgccacggctgactatggtggtggttggcagagtgctcatgccactttctatggtgggggtgatgcttctggcacaatgggtggagcatgtgggtatggaaatttgtatagccagggatatggaactgacactgtggctctaagcactgctttgttcaacaatggcttaagctg

SEQ ID NO: 9806 - DNA, 330 bp, Glycine max
  Clone ID: LIB3039-028-Q1-E1-H4
ggtctcgtggaagtgtaagcaagcaaaaccctagcggcgcctgctttctttgttcgtgttttgcatcaggatggagtctcaggtgaagcacgcacttgttgtcaaagttatgggtcgtactggatccagaggacaagtgacccaggttagagtgaagtttttggatgatcagaaccgtcacatcatgaggaatgtgaaaggacctgtgagagaaggagacattctcaccctacccgagtctgaaagggaagcaagaagattgcgctagatggtctcttttttttggcttgcctccaaattcgaacaaaagcaatatttttcttgatattt

SEQ ID NO: 9807 - DNA, 348 bp, Glycine max
  Clone ID: LIB3039-028-Q1-E1-H5
gacagagtgagatatagaatcactgaagagcttccttcaatggcggtttcttctctctctgttactcctctttcgctctcaaattcttccccctctctatcttccaagccaaagtttccatctttgtgttttctctctggcaacaacaccacattgagggtaacatgcccaaaacctctgcactcatccactgttgttcatgttgctaccgaagcgttggattcatcccctgatcccttggacccacctccagaaacccttgatgatgactctgacgccaccacctttgaggttggtgacttggggactcctagcacttcagcaattagcattggtggcgatgcagat

SEQ ID NO: 9808 - DNA, 355 bp, Glycine max
  Clone ID: LIB3039-028-Q1-E1-H6
ggcacaagtttgttgagatagctagaagcaataagatgaaaatgaaagtgcttgttttgtttgttgctacagttttggtagcatatgaatgccatggctcagactaccagaagttccctctccaaatgaaaactgggtttggtgggcaatacagcaatgaggtggcatgtgccagttggaggcttggcgtggaagcaaacaacgtagtcaagtggcaaactgttcctgcagcttgcggagagtacatagctgactacgttctaggagaccaatatagatcagattccaaaacagttaaccaacaagcttatttctatgctaaatccctcaaactcaccaacaaagatgtccttgg

SEQ ID NO: 9809 - DNA, 349 bp, Glycine max; identical to SEQ ID NO: 9081
  Clone ID: LIB3039-028-Q1-E1-H7

SEQ ID NO: 9810 - DNA, 352 bp, Glycine max
  Clone ID: LIB3039-028-Q1-E1-H8
ggcacaagtttgttgagatagctagaagcaataagatgaaaatgaaagtgcttgttttgtttgttgctacagttttggtagcatatgaatgccatggctcagactaccagaagttccctctccaaatgaaaactgggtttggtgggcaatacagcaatgaggtggcatgtgccagttggaggcttggcgtggaagcaaacaacgtagtcaagtggcaaactgttcctgcagcttgcggagagtacatagctgactacgttctaggagaccaatatagatcagattccaaaacagttaaccaacaagcttatttctatgctaaatccctcaaactcaccaacaaagatgtcct

SEQ ID NO: 9811 - DNA, 350 bp, Glycine max
  Clone ID: LIB3039-028-Q1-E1-H9
gacagcactgcactcttcgcaacacaacaaaaaaagacaacccagagagcgcgtcttaataaacgctcttctctgaaaacccccatttcttttcttctttcttcttctctttcgcttcttcgatcttcgatcttcgtcgctgaaaatgagagagtgcatttcaatccacatcggccaggccgggattcaggttggaaacgcctgctgggagctttactgcctcgaacacggcattcagcctgatgggcagatgccaagtgacaagaccgttggtggaggtgatgatgctttcaacaccttcttcagtgaaactggggcaggaaagcacgtgccccgtgcgatttttgtag

SEQ ID NO: 9812 - DNA, 336 bp, Glycine max
  Clone ID: LIB3039-029-Q1-E1-A1
gagagtggtggagtgtgcaaaagagcgtcgtagtcgcaaccctaatcagaagaagcgcagcttcaagcgagtgacagccaccagccatgggtcgtatgcacagccgcggtaagggtatatcctcttctgctttgccctacaaaaggacacctcctagctggctcaagatctcttcgcaagatgtcgaagaaaatatctgcaagtttgcgaagaaaggtttgaccccgtctcagattggtgtcattctcagagattctcacggtattgctcaggtcaatagcgtcactggcagcaaaatccttcgcatcctcaaagctcacggacttgcgcctgaaa

SEQ ID NO: 9813 - DNA, 366 bp, Glycine max
  Clone ID: LIB3039-029-Q1-E1-A10
tggggcacaagtgagtttgttgatcgagataactagaaacagtgtgatgaaaatgaaggtccttgttttcttcgttgctacaattttggtagcatggcaatgccatgcgtacgatatgttccctctccgaatgaacactggctatggtgcccgtactccggaggtgaaatgcgcaagttggaggcttgctgtggaagcacacaacatctttggctttgagaccattcctgaagagtgcgttgaagcaacaaaggaatacatccatggcgaacaatatagatcagactccaaaacagttaaccaacaagcttacttttatgccagagacctcgaagtccatcccaaggacacatttgtgttcagtat

SEQ ID NO: 9814 - DNA, 397 bp, Glycine max
  Clone ID: LIB3039-029-Q1-E1-A11
gcacaagtgagtttgttgatcgaaataactagaaacagtgtgatgaaaatgaaggtccttgttttcttcgttgctacaattttggtagcatggcaatgccatgcgtacgatatgttccctctccgaatgaacactggctatggtgcccgtactccggaggtgaaatgcgcaagttggaggcttgctgtggaagcacacaacatctttggctttgagaccattcctgaagagtgcgttgaagcaacaaaggaatacatccatggcgaacaatatagatcagactccaaaacagttaaccaataagcttacttttatgccagagacctcgaagtccatcccaaggacacatttgtgttcagtataaatggcaccgtactctctaatattccatactaca

SEQ ID NO: 9815 - DNA, 384 bp, Glycine max
  Clone ID: LIB3039-029-Q1-E1-A2
gaaagagagaagagaagtcaaagacaatgtcagggatcattcacaagattgaggagacccttcatgtgggaggccacaagaaggaggaggagcacaagggtgagcagcaccatggtggagaatacaaaggggagcatcatggtgaacacagtactgaatacaaaggagagcatcatgttggtgagcacaagccggagcaccatggaggagaagagcacaaagaggggttcctagacaagatcaaggacaagatccacggcgaggagggtggcgccaccgccgagggcgagaagaagaagaagaagaagaagcatgaacatggccatgacagcagcagcagcagtgacagtgattagattatctcccactgctgcatcacctgta

SEQ ID NO: 9816 - DNA, 352 bp, Glycine max
  unsure (1)..(352): unsure at all n locations
  Clone ID: LIB3039-029-Q1-E1-A3
gggacaacatcaacctaatccagtttcgttattcgcccgacacattttttctccgatcccctattcctctccattctccgttgtgtcgatttttgttactcaaaagggaaattgatttgatagatagacagatagatcgtttctatgggttaaagtgaaatccgaatccgaatctgaatctgaatctgatccaatcattttcatgttagggcgtgcgatctccaatcaagcgcggttgtgtttaggtttcattttgttgggcgtgtgagtcgtanggggtttcgaagagcatagaataatgccttcggtgcccgttgatctccgtctagttccttctttgaccgtttttcat

SEQ ID NO: 9817 - DNA, 367 bp, Glycine max
  Clone ID: LIB3039-029-Q1-E1-A4
ggttctagtgtgtgattgtttgttgttgtaactcgttcttcttcttttgttgttctgtgtttgtgtttgttttttctctcacctgaaaatgtcttgctgcggtggtaactgtggttgcggaagctcctggaagtgcggcaacggctgcggaggctgcaagatgtacccagacttgagctacactgagtcaatcaccaccgagaccttggacatgggagtggcacctgttaaggttcaatttgagggtgctgaaatgggtgtgcccgctgagaacgatggctgcaaatgtggaccaaactgctcctgcaacccctgcacttgcaagtgatgtgttgggagagcaatcttctaacagagatagccctta

SEQ ID NO: 9818 - DNA, 352 bp, Glycine max
  Clone ID: LIB3039-029-Q1-E1-A5
ggagagtgtgcgatcgagaaagcagaaagcagaaagatggggttggaatcggtgggagatttagcgattaacgtgattctgaaaaaattacgagcccaagacattgcgagagtggcgtgtgtgagcaaaaagttcagttcttccgcttccgatgacactctttggatcaatctctgcttcaatgaactcgctttgacacaacccctcgatcatctcggaaaccctctctcttccttcaaggaatgctatctagcatggagaggagcttttgttatgtacccttggtctcttgttaagcgtgtaaaaaggtgctgggatagaatacaaacctggttgaccaataattttcccg

SEQ ID NO: 9819 - DNA, 364 bp, Glycine max
  Clone ID: LIB3039-029-Q1-E1-A6
gacttgttcactttcttccaacctctcaagtccaacctacccctttttcttctcccaccaacttcaccgtcttcttcctcgatcatgtctcacttcaagggcaagtaccatgatgagcttattgccaatgctgcttacattggcactcctggaaagggtattcttgctgctgatgagtcaacagggacaattggcaagcgtttggccagcatcagtgtagagaatgttgaatccaacaggcgtgctcttagggagctgcttttcaccgctcccggtgctcttaaatatctcagtggtgtcatcctctttgaggaaactctctaccagagcacagctgcaggcaagccctttgtggaagtcttga

SEQ ID NO: 9820 - DNA, 345 bp, Glycine max
  Clone ID: LIB3039-029-Q1-E1-A7
ggtcttgcaggcgaagagatggccaccgttccagggcagctcgtgtgggagatcgtcaagaaaaacaattccttcttggtcaagcagtttggaaggggcacccagagcgtcgaattcagcagagagagcaacaatctctacaacctcaattcgttcaagtactctggtttggcaaacaagaaaactgttactgttcagcctgagggcaaagatcaggctgtgttgttggctacaaccaagacaaagaagcgaaacaagcccgctgcattgctccacaaatctgtgatgaagaaggagttcaagaggatggcaaaagctgttgaaaaccaggtggccaaaaattac

SEQ ID NO: 9821 - DNA, 358 bp, Glycine max; identical to SEQ ID NO: 7611
  Clone ID: LIB3039-029-Q1-E1-A8

SEQ ID NO: 9822 - DNA, 382 bp, Glycine max
  Clone ID: LIB3039-029-Q1-E1-A9
gactcaagcacaacatctcgatcgagtaaattaactatgaagcctaccctactattatccctttccttcctgcctctctttgctttcctggctctttcagaagatgttgaacaagttgtggacataagtggcaaccccattttcccaggtggcacatattacattatgccatcaacttggggcgctgccggtggtggattgaaactaggccggacaggaaactcaaactgcccagttactgttttgcaagattactcagaaatcttccgtggcacaccagtcaaattcagcatacctgggataagccctggaatcatctttacaggtactccacttgaaatcgagttcgcagagaaaccttattgtgctgaatcctccaaat

SEQ ID NO: 9823 - DNA, 345 bp, Glycine max
  Clone ID: LIB3039-029-Q1-E1-B1
gctgttagtgttgaaggaaccttggcagggattttagcatccatagttctagcatttgtcagttttctcatcggtgaggttggttcacatgaagcaattatatgtgtactagctgctcagattgctaatcttggtgagagcataattggtgctgcacttcaagagaaggaaggatttaaatggcttaacaatgatgcagtcaatgtcatcaacatatcaatgggcagtatcatagcagtcttcatgcagcaagcactccagatctggggttcctaaacttgatgcagggttttcgaggagctcaatcatattaacatagtgaccatcttgataagtgcttatcta

SEQ ID NO: 9824 - DNA, 317 bp, Glycine max
  Clone ID: LIB3039-029-Q1-E1-B10
ggcacaagtgagtttgttgatcgagataactagaaacagtgtgatgaaaatgaaggtccttgttttcttcgttgctacaattttggtagcatggcaatgccatgcgtacgatatgttccctctccgaatgaacactggctatggtgcccgtactccggaggtgaaatgcacaagttggaggcttgctgtggaagcacacaacatctttggctttgagaccattcctgaagagtgcgttgaagcaacaaaggaatacatccatggcgaacaatatagatcagactccaaaacagttaaccaacaagcttacttttatg

SEQ ID NO: 9825 - DNA, 362 bp, Glycine max
  Clone ID: LIB3039-029-Q1-E1-B11
gaaggcggaaacaaaaaattgaagagaagagaagagaagggatttggatctgaaaagagaagatgggggggggaatggaagcaaacaagaacaagttcatagaggattggggcactgccagagagaatctggagttcaatttccgttggactcgccgcaaccttgctcttgttggcatcttcggcatcgctattcccgtcctcgtctacaagggcatcgtccgtgaattccatatgcaagatgaagataatggtcggccgtacaggaagttcatgtgagagagtatggagagtcttttgtaataattcgtcaagttagaccttgatattatgaggctacaaaccatgtttttttttccctaa

SEQ ID NO: 9826 - DNA, 372 bp, Glycine max
  Clone ID: LIB3039-029-Q1-E1-B12
gaattaaacaccgcgcccaacccttttcctctcccttctcccacctcaaacgccgtcgtttcgaccaccttcttcggtcgcggcacaaccaataaccatgtcgctgccagattgtcccgccgtccaacttgcccaactcctgggcccaaataccacaaacgctgccgccgccgcctccttcatctgcgaccggttcaccgccgtggacaacaagttcgtcgacacggccttcgcggtcgacaacacttacctcctcttctccgcctacctcgtcttctcgatgcagctcggcttcgccatgctctgcgccggctccgtccgcgccaagaacaccatgaacatcatgctcaccaacgtcctcgacgccgccgc

SEQ ID NO: 9827 - DNA, 375 bp, Glycine max
  Clone ID: LIB3039-029-Q1-E1-B2
gaaggtgcaagagtttgttgtgagctataagctagtttatcgtgaggagaatatgaagttgtttgttttctttgttgctgcagtagttttggtagcatggccatgccatggcgcaggctaccaaaggttccctctccgaatgaaaactggctatggtgagcgttcttcggaggtaaaatgcgcaagttttaggcttgctgtggaagcacacaacatccgagcctttaaaaccattcctgaagagtgcgttgaaccaacaaaggactacattaatggcgaacaatttagatcagactctaaaacagttaaccaacaagctttcttttatgctagtgaacgcgaagtccatcacaacgacatatttatattcggcat

SEQ ID NO: 9828 - DNA, 363 bp, Glycine max; identical to SEQ ID NO: 7427
  Clone ID: LIB3039-029-Q1-E1-B3

SEQ ID NO: 9829 - DNA, 370 bp, Glycine max
  Clone ID: LIB3039-029-Q1-E1-B4
gaccacattccaaaacacaaacacatacattgtagtatcacttttgtctcggaatttgttcttttgagttatggcaagcttaaaggttgcatgtgtggttttgatgtgcatggctgtgatgagtgcaccaatgatggtgcaagccgtgtcatgcaatgatgtttctgtgaacctagcaccgtgcctatcttacctgatgcagggtggagatgttccagaatcgtgctgtagcggagtgaggaacattctgggttctgccagcaccacctttgacaaacataccgtgtgcaaatgtcttcagcaagctgctaataactatggcatcaacgacgaatacgctcaggcactccccgcccgctgcaatgtcagc

SEQ ID NO: 9830 - DNA, 364 bp, Glycine max
  Clone ID: LIB3039-029-Q1-E1-B5
ggtcctcctcctctgacgccgaacagagtctgcactcacacagagccagaacgcgcaagagagagaaaccacaacaacagacgaagcaaaaaaaaaaagaagcgagcgaatagagacaaagcgtaagaacaacaacacaacaaccctaacgttacttctcatggaaagcgtggcgcattctcggcaacctccagacaagaaaatcaccgccggcaccggcggtttcccagccgaaactctatacgaccacgtctacggcggagcggcgaagttcaccgccggcggccaccaccactccctctcgccgtgcttcgaggactacggcgagattttcgccagcttccacgagccgcgcgcctccgcc

SEQ ID NO: 9831 - DNA, 356 bp, Glycine max
  unsure (1)..(356): unsure at all n locations
  Clone ID: LIB3039-027-Q1-E1-C8
ggcacaagtgagtttgttgatcgagataactagaaacagtgtgatgaaaatgaaggtccttgttttcttcgttgctacaattttggtagcatggcaatgccatgcgtacgatatgttccctctccgaatgaacactggctatggtgcccgtactccggaggtgaaatgcgcaagttggaggcttgctgtggaagcacacaacatctttggctttgagaccattcctgaagagtgcgttgaagcaacaaaggaatacatccatggcgaacaatatagatcagactccanaacagttaaccaacaagcttacttttatgccagagacctcgaagtcaatcncaaggacacatttgtgt

SEQ ID NO: 9832 - DNA, 430 bp, Glycine max
  Clone ID: LIB3039-024-Q1-E1-H2
cgatcaagcagcaagagaaaagaaaatcctcaattttctgagcagccaaacactctctctctgtctctcgaaaattctcagtttgcagagaaaatctgaatcatgtcgtggcaagcgtatgtcgacgatcaccttctgtgtgacatcgaaggtaaccacctcactcacgctgctatcatcggccaagacggcagcgtttgggctcagagtaccgacttccctcagttcaaacctgaggagataactgccatcatgaatgactttaatgagcctggatcacttgctccaactggattgtatctcggtggcaccaaatatatggtcatccagggtgaacccggtgctgtcattcgagggaagaaaggtcctggtggtgttactgtgaagaagaccggtgcggccttgatcattggcatttatgatgaaccaa

SEQ ID NO: 9833 - DNA, 181 bp, Glycine max
  Clone ID: LIB3039-024-Q1-E1-H3
cgtcagacggaagcgaacgacagaagggggcatcaattcaaaatatatcatcacttataagcatgggtttgtggaacacaacgaatgcagtgtcttgccgctttcacaagtttggtgatgaccaaaagaatctggtcttcaaaggtgatgcaacgtcttcttccaggggcatagaactcac

SEQ ID NO: 9834 - DNA, 206 bp, Glycine max
  Clone ID: LIB3039-024-Q1-E1-H4
gactacgacggtcggggaaggtgcatgagtttgttccgacctttaagcttgtttatcgtgaggagaatatcaggttgtttgtcttctttgctgctgcactagatttggtagcatggccatgccatggcgcaggctaccaaaggttccctctccgaatgaacactggctattggtgagcgttcttcccacgtagaatgcccacgttt

SEQ ID NO: 9835 - DNA, 380 bp, Glycine max
  Clone ID: LIB3039-024-Q1-E1-H5
gcttactctcgttgtgattgataacgagaaattgagaattgttacagaaacgatcgtgttttttttttattccatcgtaaaccaaaatttagttctccagttgagcgttcttcccacaaaccctaatgtcgtttcttgaagaatttcatgccaatttggattcactacccgttattcttcggaagaagtatacactgttgcgtgacctagataagagcttacaggatattaaaaggcaaaatgaacagcgttgtgaacaagaaattgaagatattaatcgaggtgttaggtctggaaacatcacgcctgatacttcggcaattagattctctgatgaagcgcttgatgagcaaaagcatagcatcagggttgctgatgaa

SEQ ID NO: 9836 - DNA, 386 bp, Glycine max
  Clone ID: LIB3039-024-Q1-E1-H6
ggttttgatgtgcatggctgtgatgagtgcaccaatgatggtgcaagccgtgtcatgcaatgatgtttctgtgaacctagcaccgtgcctatcttacctgatgcagggtggagatgttccagaatcgtgctgtagcggagtgaggaacattctgggttctgccagcaccacctttgacaaacaaaccgtgtgcaaatgtcttcagcaagctgctaataactatggcatcaacgacgaatacgctcaggcactccccgcccgctgcaatgtcagcgtcccttacaagatcagccgatccaccaactgcgactccatcaagttctaaaggagcgggtagctttgccaatttcttccgcgggataatgaggcaacgtatgctgtaacac

SEQ ID NO: 9837 - DNA, 379 bp, Glycine max
  Clone ID: LIB3039-024-Q1-E1-H7
gccatggaaaatacatggcttgctgtctcatgtaccggggtgatgttatgcctaaagatgttaatgcagctgtgggaattatcaagaccaagcgcactattcaatttgttgactggtgccccactggtttcaagtgtggaatcaattaccagcctccaactgttgttcctggcggtgatcttgccaaggttcagagggctgtgtgcatgatctccaattccaccagtgttgttgaggtcttctctcgcatcgaccacaaatttgacctcatgtatgccaagagggcttttgttcattggtatgttggtgagggtatggaagagggagagttctctgaggctcgtgaagatcttgctgccctggagaaagattatgagga

SEQ ID NO: 9838 - DNA, 315 bp, Glycine max
  Clone ID: LIB3039-024-Q1-E1-H8
acccacgcgtcagaccgctcctacatgctgatgcgaggggacaacaaaagggggtgcactgctgactttgttgatcgagatatctaccgactgtgtgattaaaatgaacgtccgtaattacctcgatgctacacatttggcaacatgttgataggatccctacgagttttacctgcggcaactgatcactgcctcctgtgcccgtaccccgcaggtgtaatgcccaagttgaaagggtcctgtgcaagctcacaacatccatggcttttatagcagtcctgacgagtatcttgcagcaaccttggattacatcca

SEQ ID NO: 9839 - DNA, 367 bp, Glycine max; identical to SEQ ID NO: 7990
  Clone ID: LIB3039-024-Q1-E1-H9

SEQ ID NO: 9840 - DNA, 314 bp, Glycine max
  Clone ID: LIB3039-025-Q1-E1-A1
aacgacagaaggggagagtggtggagtgtgcaaaagagcgtcgtagtcgcaaccctaatcagaagaagcgcagcttcaagcgagtgacagccaccagccatgggtcgtatgcacagccgcggtaagggtatatcctcttctgctttgccctacaaaaggacacctcctagctggctcaagatctcttcgcaagatgtcgaagaaaatatctgcaagtttgcgaagaaaggtttgaccccgtctcagattggtgtcattctcagagattctcacggtattgctcaggtcaataacgtcactgggagcaaaatcct

SEQ ID NO: 9841 - DNA, 271 bp, Glycine max
  Clone ID: LIB3039-025-Q1-E1-A12
cgtcagacgggtacgagaaacgacacaagggggcacaagtgagtttgttgatcgagataactagaaacagtgtgatgaaaatgcaggtccttgttttcgtcggtgctacagttttgggggcatggcaatgccatgcctacgatatgttccctctccaaatgaacactggctatggtgcccgtactccggaggtgacatgcgcaagttggaggcttgctgtggtagcagacgacagcgttggctttgacgaccattcctgaaggagtgcctt

SEQ ID NO: 9842 - DNA, 294 bp, Glycine max
  Clone ID: LIB3039-025-Q1-E1-A2
ggctgacaagccaatcctttgtgtaggtgctcaaccctagtaagccgcaatggtgaagtactcaagggagcctgacaacccaactaagtcttgcaaggctagaggcgccgaccttagggttcattttaagaacacaagggaaactgcctttgcaatcaggaagttgcccttggtcaaggctaataggtacttggaagatgttcttgcccacaagcaggcacttccattcagacgtttttgtcgaggtgttggaaggacagcccaggctaagaatagacactctaatgggcaagg

SEQ ID NO: 9843 - DNA, 265 bp, Glycine max
  Clone ID: LIB3039-025-Q1-E1-A3
acccgggtctatgtgagccataaggagtggaggtcgatctgtggtcatgttgggtctctgactcgcttgataatagtgaagcctcatatagagttttcctatttttgtgatgcattatcactgatagtccatatcgccacaatgtattatctaagatgatgatatctctagaagccagtaaagttacatggaaccacccttgggagttgtcaatagaaggggacttttggatcctttccattaggggggcacataacaaactcac

SEQ ID NO: 9844 - DNA, 373 bp, Glycine max
  Clone ID: LIB3039-025-Q1-E1-A4
gaaggtgcaagagtttgttgtgagctataagctagtttatcgtgaggagaatatgaagttgtttgttttctttgttgctgcagtagttttggtagcatggccatgccatggcgcaggctaccaaaggttccctctccgaatgaaaactggctatggtgagcgttcttcggaggtaaaatgcgcaagttttaggcttgctgtggaagcacacaacatccgagcctttaaaaccattcctgaagagtgcgttgaaccaacagaggactacattaatggggaacaatttagatcagactctaaaacagttaaccaacaagctttcttttatgctagtgaacccgaagtccatcacaacgacatatttatattccgg

SEQ ID NO: 9845 - DNA, 330 bp, Glycine max
  Clone ID: LIB3039-025-Q1-E1-B1
ggttctagtgtatgtgattgttgtgactcgttcttcttcgtcgttatcttcttcttttgttgtttgtgtgtttgttttttctctcacctgaaaatgtcttgctgcggtggtaactgtggttgcggaagcgcctgcaagtgcggcaacggctgcggaggctgcaagatgtacccagacttgagctacaccgagtcaaccaccaccgagaccttggtcatgggagtggcaccagttaaggctcaattcgagagtgctgaaatgggtgttccccctgagaacgatggctgcaaatgtggagctaactgcacctgcaacccctggacttgcaag

SEQ ID NO: 9846 - DNA, 245 bp, Glycine max
  Clone ID: LIB3039-025-Q1-E1-B10
ggctgtggggggctctcgtgggtttgttcgtcgggtggctggggcggtgtggtgggtgtgggtgtcgttgttttcttcgttgctggggttttggtggcctggcggtgcggtgcgtggggtctgttccctctccgtggtggctctggctgtggtgctcgtgctccgggcgtggggtgcgccggttggcggcttgctgtgggcgcccgcggcgtctttggctttgggtcctttcctgggggcgtgcg

SEQ ID NO: 9847 - DNA, 359 bp, Glycine max
  Clone ID: LIB3039-025-Q1-E1-B12
tggtctttgtctgagtgcttggttgcttccttggtgattggtcgggtctttatgcgtcggcgtccgtctttggggtgtgtttttgcttcgtctcttgggctgcgagagacttcaggtatgccagactttttatccaactaaccaggggacgagattacgtggatacacatatgcccaatgctaatcatgtttcggatcagatcttcaattacttgctttgtgtcttcagattatggtagaagatggcctgatgttatctcttgtttcgcatcactccttacttctgccacattactatcttaagatgtgtatgaatttagtatataactttgaacttagttcctcgttattattagctc

SEQ ID NO: 9848 - DNA, 110 bp, Glycine max
  Clone ID: LIB3039-025-Q1-E1-B2
ggttctagtgtgtgactgtgtgctgttgcaatccgctcctcctctttcgtcgtcctgtgttggtggttggtttgtctcgggcctggggttatcgtgtcgtggtggtgtgg

SEQ ID NO: 9849 - DNA, 84 bp, Glycine max
  Clone ID: LIB3039-025-Q1-E1-B5
ggcaccagtttcttttttgttctatactccttctctctctccgtcgtcagctgtcgtctttgctttcttcggggtctcgggttt

SEQ ID NO: 9850 - DNA, 68 bp, Glycine max
  Clone ID: LIB3039-025-Q1-E1-B6
ggcacaagtgtgtttgttgatccagatcgcttcaaatcgtctttgtgagagcttctcgttgttgtttt

SEQ ID NO: 9851 - DNA, 260 bp, Glycine max
  Clone ID: LIB3039-025-Q1-E1-B9
ggggggtcgcggtttgtagatggcacacaagttttatcatggggttgtgggacacaacgaatgcaatgtcctgccggtttcagaaatttggtgatgaccaaaagaatctggtcttccaaggtgatgccacgtcttcttccaggggcatagaactcacaaagttatacggtggaggaaaaccagtgggtggcaatgtggggagagtgttatactcttctccaatgcacctttgggaaagctctacagtgggcggcaagctt

SEQ ID NO: 9852 - DNA, 113 bp, Glycine max
  Clone ID: LIB3039-025-Q1-E1-C11
cataccgtccgcaacacggttttcctttgctttgcgttctacgatgtccataagctctgggattattacatgcagaactgctatttcctggggaattcgaaaacctgtgactg

SEQ ID NO: 9853 - DNA, 64 bp, Glycine max
  Clone ID: LIB3039-025-Q1-E1-D1
gcccaggctaagaacagacactccaatgggcaaggacgctggcccgtcaaatcagctaagttca

SEQ ID NO: 9854 - DNA, 234 bp, Glycine max
  Clone ID: LIB3039-025-Q1-E1-D10
gacgacagaagggggtggcccggggtcttttgctggctccggttggccggggtcctcgggaagctcatctgccagcatgacggtgcgacgctcggccgcagcagattccatctccgaggctcctcctaagaataaggttgtcctgaaggatgtgttccaggtttttgctgagaaggttacatctcataacgaattggtttcatcgttggctgttcgtacacgttacgcgtgttg

SEQ ID NO: 9855 - DNA, 150 bp, Glycine max
  Clone ID: LIB3039-025-Q1-E1-D12
gggggctttctggttgcgttcgggcgcttctcgtccgtggccgcctcctccttctctgttgttctctccgtctccctggtcgttctttggtggtgctcttgtcttggctctgtcgaccggttcccgtttctttctccttctgttggttct

SEQ ID NO: 9856 - DNA, 73 bp, Glycine max
  unsure (1)..(73): unsure at all n locations
  Clone ID: LIB3039-025-Q1-E1-F1
ggccgggtgtggtgcccggactttcatggccantcacttctgccgccactcttgcggcgggtgtggcttgacc

SEQ ID NO: 9857 - DNA, 367 bp, Glycine max
  Clone ID: LIB3039-025-Q1-E1-F10
attggtggagaaagcaaaagcttgggtggttggtgatccttttgatcctaaagttcaacaagggcctcaggttgacaagaagcaatttgaaaagattctttcctatatcgagcaaggaaagaaagaaggggcaactcttttgacagggggcaaaagagtgggcaacaagggttactacattgagcctacaattttctctaatgttaaggaggacatgctcatagtacaagatgaaatatttggccctgtgatggctttgatgaagtttaagactattgaggatgcaattaagattgccaacaatacaagatatggcctagcatcaggcattgtgacaaagagtttggacacagccaacactgtgtca

SEQ ID NO: 9858 - DNA, 368 bp, Glycine max
  Clone ID: LIB3039-025-Q1-E1-F12
ggcacaagtgagtttgttgatcgagataactagaaacagtgtgatgaaaatgaaggtccttgttttcttcgttgctacaattttggtagcatggcaatgccatgcgtacgatatgttccctctccgaatgaacactggctatggtgcccgtactccggaggtgaaatgcgcaagttggaggcttgctgtggaagcacacaacatctttggctttgagaccattcctgaagagtgcgttgaagcaacaaaggaatacatccatggcgaacaatatagatcagactccaaaacagttaaacaacaagcttacttttatgccagagacctcgaagtccatcccaaggacacatttgtgttcagtatagatg

SEQ ID NO: 9859 - DNA, 312 bp, Glycine max
  Clone ID: LIB3039-025-Q1-E1-G1
ggccattgttgctgtcatcatccgcagctgctgttattcgcaccgcaaacaaacagtgagccatggccgtcggaaagaacaagcgcatctccaaagggaaaaagggtggcaagaagaaggcagctgatccctttgccaagaaggattggtatgacattaaggccccttctctttttcaagtgaaaaatgttggcaaaaccctcgtctctcgtacgcagggtaccaagattgcttctgaaggacttaaacatagagtgtttgaggtctccttggctgatcttcaaggggatgaagatcatgcattcaagaaga

SEQ ID NO: 9860 - DNA, 367 bp, Glycine max
  Clone ID: LIB3039-025-Q1-E1-G10
gaagtgccttcattcgggactttcactagccgcagcagcctcaggaggagaataaggatgtctcacaggaagttcgagcacccaaggcacgggtcactgggatttctccccaggaagcgtgctgctcgtcacaggggaaaagtgaaggcattccccaaggatgacccatccaaggcacccaagctcactgcattcttgggttacaaggctggtatgactcacattgttagagaggtcgagaagccaggatcaaagcttcacaagaaggaaacatgtgagcctgttacaattattgagacccctccaatggttattgttggtgttgtgggttatgtgaaaactccccgtggtctccgaacattgaaca

SEQ ID NO: 9861 - DNA, 364 bp, Glycine max
  Clone ID: LIB3039-025-Q1-E1-G12
gctagtggcagtgaccaaactccatttctcactcgccgtcgtctcttccgtctagggtttctcctcttcacaaaaatggttgccgcaaaaaaaactaagaagacccatgagagcatcaacaacaggctcgctctcgtcatgaagagtggcaaattcaccctcggttacaagaccgttctcaaatctcttaggagctccaaagggaaattgattatcattgctaacaactgcccccctttgaggaagtcagagattgaatactatgctatgttggcaaaggttggggttcatcattacaatgggaacaatgtggatttgggcactgcatgtggcaaatattacagagtgtgctgccttagcatta

SEQ ID NO: 9862 - DNA, 287 bp, Glycine max
  Clone ID: LIB3039-025-Q1-E1-G2
ggcacaagtgagtttgttgatcgagataactagaaacagtgtgatgaaaatgaaggtccttgttttcttcgttgctacaattttggtaccatgggaatgccatgcgtacgatatgttccctctccgaatgaacactggctatggtgcccgtactccggaggtgaaatgcgcaagttggatgcttgctgtggaagcacacaacatctttggctttgacaccattcctgaagagtgccttgaaagaacaccggaatacatccatggggaacactatacatcagactcca

SEQ ID NO: 9863 - DNA, 133 bp, Glycine max
  Clone ID: LIB3039-025-Q1-E1-G5
acgacagaaggggagaaaagagatcaacgccacgaatagtgaagagtgaagagcaccgagtgaggattatagatatgcgttagatcagtgtgaggtatcttcagggtctgagtctcagatgggctattcagac

SEQ ID NO: 9864 - DNA, 163 bp, Glycine max
  Clone ID: LIB3039-025-Q1-E1-G8
gacacttcagaatcctctggtaacccttattttatctattctctctctttcttttgtgttctaagcagctagagcgaggggagatgacgtatagtgcattcctctttcatcaggtttgcaatgcttgttggagtgatcgtctcagaggcttgtcattcgtgtg

SEQ ID NO: 9865 - DNA, 77 bp, Glycine max
  Clone ID: LIB3039-025-Q1-E1-G9
ctttctttcatcatacctcattctcgcaaactaatatacatatcccaaggagccattatacatggcttccaagctct

SEQ ID NO: 9866 - DNA, 388 bp, Glycine max
  Clone ID: LIB3039-025-Q1-E1-H1
gacacttcaaaatcctctagtaacccttcttttctctctctctctctcgtgttctgagctgctagaagcaatggagaggaaaagaagccatgcttctttcaccatgtttgcaatgcttgttggattgctctctcagagccttgtcattcctgtaatatccaccactgttgcagatcagaagaactactacaccccagatccacatgctggaagtccccccacaggctcacacaatagtagtcctccatctcatggccatgggagctctccaccctcacatcacaatagtccaagtactccatcaacaccctcaggtggaaactgtggattaatcaccccacaacatcatgatccaaacacctcaactccatcaacaccatcaaaccct

SEQ ID NO: 9867 - DNA, 363 bp, Glycine max
  Clone ID: LIB3039-025-Q1-E1-H10
ggttgcctatttaaagaagctaaccctccacaaggaattaaggtgcaagagtttgttgtgagctataagctagtttatcgtgaggagaatatgaagttgtttgttttctttgttgctgcagtagttttggtagcatggccatgccatggcgcaggctaccaaaggttccctctccgaatgaaaactggctatggtgagcgttcttcggaggtaaaatgcgcaagttttaggcttgctgtggaagcacacaacatccgagcctttaaaaccattcctgaagagtgcgttgaaccaacaaaggactacattaatggcgaacaatttagattagactctaaaacagttaaccaacaagctttcttt

SEQ ID NO: 9868 - DNA, 379 bp, Glycine max; identical to SEQ ID NO: 8837
  Clone ID: LIB3039-025-Q1-E1-H11

SEQ ID NO: 9869 - DNA, 382 bp, Glycine max
  Clone ID: LIB3039-025-Q1-E1-H2
gaggactgaagaagtgagggcaagaactttgcagcataccagcatgagcatgaagctcttccagctcttctccctactcccattcttcctctacttctacacaatagaagcagccgttggcccattgcaactgacacacccactggaccccttaactcagcaagaaatcaccctcgtcaaaaccatagtcctaaaaaagtaccccaagccagccaaccgcgtcttcttccactacgtcggcctcgacgatcctgacaaggccgccgtcctcaaatggctctcctccggcgcccggacgccgcgcaacgccttttccatcgccctcatcaatggccaaatccacgagctcaccgtcaaccttctctccccgcgaaacgttgtc

SEQ ID NO: 9870 - DNA, 370 bp, Glycine max
  Clone ID: LIB3039-025-Q1-E1-H3
gacaacactcatagtagagtaaccaaaaggagagtgcaataactcgttgtacattcctagtgtgtgggagagacatggctaagatgtgtgttttggtgttggttcttgctctggctgtggccacaagtgccagaaacgttcccaaccccaaggatgctggtcttaaggaccagaagaacttcatcagctatggtggagttggtggttattccgggattgggaacaatggactgccttttggaggagctggtgccggaataggtggtggttttggcggaggtggtggacttggtggtggcctcggcggtcctaccggtgggatcggaaggtttgggcgtaccggtaacggtgtcggtggcggtattggtgg

SEQ ID NO: 9871 - DNA, 390 bp, Glycine max
  Clone ID: LIB3039-025-Q1-E1-H4
ggttcaaagcacgccgtgtttcgctatctctcccattctctcgcatctcaatacccttttgatttgtgaaaggaaagcaaacatgcttgatcaggtccaacaccctacaatcatggacaaggttgctggccagctccatctccgttctggtgtttctggtattaggagttatgaaggagcctactgccaccccacaatgtaccaaagaccctcttttgggaattactcgaatgctgcattgcagtatcctgtgatgccctcatgcaaagctactatggatttgtctgctgctgcaacaactgcctcccccgtctttgttgctgctccagcagagaaaggccattttcttatagactttctcatgggaggtgtttcagcagctgtctcaaa

SEQ ID NO: 9872 - DNA, 383 bp, Glycine max
  Clone ID: LIB3039-025-Q1-E1-H5
gataacacaaacacaaattacatagcctcagtaatctgagagagaaacaaaaacaatgaaggtttccattgccaagttccactcccttcccctatgttttttccttctcttggccttcaacacaaaacccctcctagcagcagaaccagagccagtggttgataagcaagggaaccctttggagccaggagtagggtactacgtgtggccactttgggctgatgaaggaggcctcacactaggccaaacaaggaacaagacatgccctctttatgttatccgtgacccttcattcattggcaccccagtttcattcttagcaccaggccttgaccatgttccaacactcactgatctaaccattgatttccctgtggtgacag

SEQ ID NO: 9873 - DNA, 379 bp, Glycine max
  Clone ID: LIB3039-025-Q1-E1-H6
ggcacaagtgagtttgttgatcgagataactagaaacagtgtgatgaaaatgaaggtccttgttttcttcgttgctacaattttggtagcatggcaatgccatgcgtacgatatgttccctctccgaatgaacactggctatggtgcccgtactccggaggtgaaatgcgcaagttggaggcttgctgtggaagcacacaacatctttggctttgagaccattcctgaagagtgcgttgaagcaacacaggaatacatccatggcgaacaatatagatcagactccaaaacagttaaccaacaagcttacttttatgccagagacctcgaagtccatcccaaggacacatttgtgttcagtatagatggcaccgtactc

SEQ ID NO: 9874 - DNA, 378 bp, Glycine max
  Clone ID: LIB3039-025-Q1-E1-H7
ggcacaagtgagtttgttgatcgagataactagaaacagtgtgatgaaaatgaaggtccttgttttcttcgttgctacaattttggtagcatggcaatgccatgcgtacgatatgttccctctccgaatgaacactggctatggtgcccgtactccggaggtgaaatgcgcaagttggaggcttgctgtggaagcacacaacatctttggctttgagaccattcctgaagagtgcgttgaagcaacaaaggaatacatccatggcgaacaatatagatcagactccaaaacagttaaccaacaagcttacttttatgccagagacctcgaagtccatcccaaggacacatttgtgttcagtataaaaggcaccgttct

SEQ ID NO: 9875 - DNA, 384 bp, Glycine max
  unsure (1)..(384): unsure at all n locations
  Clone ID: LIB3039-025-Q1-E1-H8
cttctttttggtgctacttaccaaggcacactcgaccgataccgtttctttcaccttcaacaagttcaacccagtccaaccaaacattatgctccaaaaagatgctagtatttcatcctctggggtgttacaactcaccaaagttggcagcaacggcgtgcccacctcgggatctctcggtcgtgccctttacgctgccccaatccagatttgggacagcgaaaccggcaaggtagccagctgggctacatcctttaaattcaacattttcgcacccaacaaatcaaactcagctgacgggcttgccttcttcttggcacccgtcgggtctcagccccaatccgacgatggatttcttggtcttttcaacagtcncctaaagga

SEQ ID NO: 9876 - DNA, 374 bp, Glycine max
  Clone ID: LIB3039-025-Q1-E1-H9
ggaacttctcacgttcatttctacacatccctagctctgtcgttccgtcgttgacgatggcgtttcgggtgcgaagccctgacctccgctctctctttcttctctctctcttgtccatcgcttccgccaatgtcttcttcgaagagcgtttcgatgacgggtgggaaaatcgatgggttaaatcagattggaaaaaagatgagaacgtggctggggagtggaaccacacctctggtcaatggaatggagacgctaatgacaaaggtattcaaaccagtgaggattacagattctatgctatttcagctgagtaccctgaactcagcaacaagggtaagacactagtctttcaattttctgctaagcacgaacag

SEQ ID NO: 9877 - DNA, 414 bp, Glycine max
  unsure (1)..(414): unsure at all n locations
  Clone ID: LIB3039-026-Q1-E1-A1
ggagctccttacgtaaattctccacgaagcaaccctgagcagtgaccataaccacactctctcaagtctctagagagaagctaccaaactccacaacacatacccaattagctaacccctctcacacttacagaccatgccaaacgcaaacatgcttctccttttcctcttccttctggcgctcttctcagccatgacaacaccgtcaacctccgcgatcgacaccttcatctttgccggctgctcccagcccaagttcacgccgggttccgcctacgaaaataccgtcaactcgctcctcacctctctcgtcaactccgccgccttcgccaactacaacaacttcaccgtcnccgcctcctccgacgccgtctacggcctcttccagtgccgcggcgacctcaccaacgacca

SEQ ID NO: 9878 - DNA, 372 bp, Glycine max
  Clone ID: LIB3039-026-Q1-E1-A10
ggcacaagtttgttgagatagctagaagcaataagatgaaaatgaaagtgcttgttttgtttgttgctacagttttggtagcatatgaatgccatggctcagactaccagaagttccctctccaaatgaaaactgggtttggtgggcaatacagcaatgaggtggcatgtgccagttggaggcttggcgtggaagcaaacaacgtagtcaagtggcaaactgttcctgcagcttgcggagagtacatagctgactacgttctaggagaccaatatagatcagattccaaaacagttaaccaacaagcttatttctatgctaaatccctcaaactcaccaacaaagatgtctttgtcttggacgttgacgaca

SEQ ID NO: 9879 - DNA, 375 bp, Glycine max
  Clone ID: LIB3039-026-Q1-E1-A11
gaaggtgcaagagtttgttgtgagctataagctagtttatcgtgaggagaatatgaagttgtttgttttctttgttgctgcagtagttttggtagcatggccatgccatggcgcaggctaccaaaggttccctctccgaatgaaaactggctatggtgagcgttcttcggaggtaaaatgcgcaagttttaggcttgctgtggaagcacacaacatccgagcctttaaaaccattcctgaagagtgcgttgaaccaacaaaggactacattaatggcgatcaatttagatcagactctaaaacagttaaccaacaagctttcttttatgctagtgaacgcgaagtccatcacaacgacatatttatattcggcat

SEQ ID NO: 9880 - DNA, 368 bp, Glycine max
  Clone ID: LIB3039-026-Q1-E1-A12
ggaacttggtttcggtgttccaagttagttagaggcattgttgcttgcatagatctctgatctgaaaatgagtgcgtcgaggttcattaagtgcgtcaccgtcggcgacggtgctgtcggcaaaacctgcttgttgatttcctacaccagcaacacttttcccacggactatgtgcccaccgtttttgacaatttcagtgctaatgtggtggtggatggaagcaccgtaaacctaggattgtgggatacagctggtcaggaggattacaatagattaagacccttgagctatcgaggagctgatgtcttcatacttgccttttctctcataagcaaggctagctatgaaaatattgcaaagaagtgga

SEQ ID NO: 9881 - DNA, 348 bp, Glycine max
  unsure (1)..(348): unsure at all n locations
  Clone ID: LIB3039-026-Q1-E1-A2
gggggatgttgctgatggtgtgccttgttaaggtttcgtctgatcaaagagagaagaagaaatactggaagaagaactacattttcccgataacgagccacttattgtgagagacgggaacagaaggctaatgcaagacatagattgtggtgggttgtgcaagacgaagtgcagtgcacattcgagacccaacttgtgcactaaggcgtgtggcacgtgctgtgtgaggtgtaagtgtgtcccacctggcacatctggaaatanggaactatgtggaacttgctacactgatatgactacccaatggaacaagaccaagtgcccttagagaaaaaacccattgggaaa

SEQ ID NO: 9882 - DNA, 357 bp, Glycine max
  unsure (1)..(357): unsure at all n locations
  Clone ID: LIB3039-026-Q1-E1-A3
agnctgtacagacgactacaaaaaggggcacaagtgtgattacgaaacttaaatcaatgatatgaaaaataaagtgcatggtttgtatgatgctagacttttggtaccacatgactgccattgtgcaaactagcaaaagttacgtctccaaaagataactgcgtttggtgggcactagagcaatgacgtgtgatgtgccagttagatgcttagcttggaagcatacaatgtaatcaaatggcatactgtgcctgtagattactgataatacatacctgacaacgttctaggagaccaatctagatcagattccaaaatagttaaccaacaaacttaattctatgccaaatctctaaa

SEQ ID NO: 9883 - DNA, 433 bp, Glycine max
  Clone ID: LIB3039-026-Q1-E1-A4
agtccaggcgtcagacggctacgaaaaggggacagaaggggaattcacaactgagtttggtgatttaaatgactagaaacaatgtgattaaaatgaacggccttggtatcctcggtgctacgaatttgggaacattgcaattgcatgcgtacgatatgttccctctccaaaatgacactagctaaggagcccgtactccgaatgtgaaatgcgcaagttggacgcatgctgtgtaagcacataatatcattggctttgagaccattcctgaagagtgcgtagacgcatcagaggaatacatccattgtgaacactagatatcagactccaaaacagttatccaacacgcttacctttatgtcagagacctcgatctccatctcaaagatacatttgtgttcactatagatggcagcgtactctctaatattcc

SEQ ID NO: 9884 - DNA, 107 bp, Glycine max
  Clone ID: LIB3039-026-Q1-E1-A5
ggcacaactctcttcacacagcgagagtccaacctatcatcctccaaatgcatgggttgctggttgctacagttctagcaccatgagagagacatagctccaaccac

SEQ ID NO: 9885 - DNA, 379 bp, Glycine max
  Clone ID: LIB3039-026-Q1-E1-A6
gattgttggcttttgcgccgcccgtggctccagggttaacagaactcgatgtccaattgcgctctctcagtttcgaagaatcgtatgccatgggaaagtcggacccaaccgttcgcgctgatcaacatactgacgtagagaaagctaatacgatgctcagaggactcatcactgagaagagattcactcctctaacgctccgtttggtatgacactctgctcgaacatagtgacgtgagctcgaagacctgtagtaccttcggaaccatataccagccctcagacctcgactacggtactaactacggtcataacatcgctgcaaggccactagagccactcgaagcggacttgactatcttgagctactccgatttca

SEQ ID NO: 9886 - DNA, 330 bp, Glycine max
  Clone ID: LIB3039-026-Q1-E1-A7
gggacaactgagtttgttgatcgagatgacgataaacagtgtgatgaaaatgaaggtccatgttttcgtcgttgccacaattttggtagcatggcactgccatgcggtacgatatgttccctctccgaatgaacactggctatggtgcccgtactccggatgtgaaatgcgcaagttagaggcttgctgtggaagcacacaacatctttggctttgagaccattcctgaagagttcgttgaagctacaatggaatacatccatggcgatacatatacatcagactccataacagttaaccaatcagcttacttttatgcgatagatctcg

SEQ ID NO: 9887 - DNA, 402 bp, Glycine max
  Clone ID: LIB3039-026-Q1-E1-A8
gacagcgaaacagagagtgatttcagtgagtgatcggtgttcacttgatctcatcataatcgtcagcgtcaattgaagaagatgccgatcagaaacatcgccgtcggaaggcctgaagaggcgactcaccccgacacgttgaaggcggctttggctgagttcatctcaaccttcatcttcgtgttcgccggctcaggctccggcatcgcctacaacaagctcaccgacaacggcgctgccacccctgccggcctcatctccgcctccatcgcccatgcattcgccctcttcgtcgccgtctccgtcggcgccaacatctccggcggccacgtcaaccccgccgtcaccttcggcgccttcgtcggcggcaacatcaccttcctccgcggcatcgtctacgtc

SEQ ID NO: 9888 - DNA, 371 bp, Glycine max
  Clone ID: LIB3039-026-Q1-E1-A9
gagactatagagatcacgccgatggaagatgaagtgatgagtgaagtggctgctccacctcgtcgtgttcttcttgtatcggctggtgccagccacagtgtggcacttctgagtggaaatgttgtttgttcgtggggacgaggagaggatggacagttaggccatggtgacactgatgatcgactatttcctacaaaactgagtgcattggatggccaagacataatatgtgttacttgtggagctgatcatactatggcacgttctgagtctggcagggatgtatatagttggggaatggggtgactttggaaggttgggtcatggtgatcatagtgacttgctcattcctcatcccataaaagcattac

SEQ ID NO: 9889 - DNA, 391 bp, Glycine max
  Clone ID: LIB3039-026-Q1-E1-B1
gatagcaaattccagtgcaagaaaaaatgaccaagatcttctttgtattgctgttatgtctgatcatagcagcttcttctgggttcgtgaattgctttgatgttgaaaagaaggaaaagattggaatatttgagctcaataaaggtgacctttctttgaaggtcaccaactggggtgcttcaattttgtccctggtgattcctgataagaatggaaagttgagtgatgttgttcttggatatgattctgttaaggattacactaatgatacaacatattttggagcaactgttggccgggttgctaacagaattggaggagctcagtttactctaaatggaatccattacaaattagttgctaatgaaggaaacaatacacttcatggtgg

SEQ ID NO: 9890 - DNA, 369 bp, Glycine max
  Clone ID: LIB3039-026-Q1-E1-B10
ggcacaagtttgttgagatagctagaagcaataagatgaaaatgaaagtgcttgttttgtttgttgctacagttttggtagcatatgaatgccatggctcagactaccagaagttccctctccaaatgaaaactgggtttggtgggcaatacagcaatgaggtggcatgtgccagttggaggcttggcgtggaagcaaacaacgtagtcaagtggcaaactgttcctgcagcttgcggagagtacatagctgactacgttctaggagaccaatatagatcagattccaaaacagttaaccaacaagcttatttctatgctaaatcgctcaaactcaccaacaaagatgtctttgtcttggacgttgacg

SEQ ID NO: 9891 - DNA, 367 bp, Glycine max
  Clone ID: LIB3039-026-Q1-E1-B11
gagttcaattccaatatattccattctctctgtgtatttccctacctctcccttcaagatgcagatcttcgtcaagaccctcaccggcaagaccatcacccttgaggtggaaagctctgacaccatcgacaacgtcaaggccaagatccaggacaaggaaggaatccccccggaccagcaacgtctcattttcgccggaaagcaacttgaggacggccgtacccttgctgactacaacattcagaaggagagtactcttcacctcgtcctccgtctccgtggtggcatgcagatcttcgttaagacactcaccggcaagaccataaccctagaggttgaaagctccgacaccatcgataacgtcaag

SEQ ID NO: 9892 - DNA, 420 bp, Glycine max
  Clone ID: LIB3039-026-Q1-E1-B2
aaacaaaaaaagggggaaaagttaatttgtttattcaaaatactaaaaacaattttaataaaaagaagggccttgttttcctcgttgccacaattttggtagcattgcaatgccatgcgtacgatatgttccctctccgaatgaacactggctatggtgcccgtactccggaagtgaaatgcgcaagttggaggcttgctgtggaagcacacaacatctttggctttgagaccattcctgaagagtgcgttgaagcaacaaaggaatacatccatggcgaacaatatagatcagactccaaaacagttaaccaacaagcttacttttatgccagagacctcgaagttcatcccaaggacacatttgtgttcagtatagatggcaccgtactctctaatattccatactacaaaaaacatg

SEQ ID NO: 9893 - DNA, 406 bp, Glycine max
  Clone ID: LIB3039-026-Q1-E1-B3
ggcacaagtgagtttgttgatcgagataactagaaacagtgtgatgaaaatgaaaggccctggtttcctccttgccacaattttgggaacaaggcaatgccaagcgtacgatatgttccctccccgaatgaacactggctatggtgcccgtactccggaggtgaaatgcgcaagttggaggcttgctgtggaagcacacaacatctttggctttgagaccattcctgaagagtgcgttgaagcaacaaaggaatacatccatggcgaacaatatagatcagactccaaaacagttaaccaacaagcttacttttatgccagagacctcgaagttcatcccaaggacacatttgtgttcagtatagatggcaccgtactctctaatattccatactacaaaaaacat

SEQ ID NO: 9894 - DNA, 402 bp, Glycine max
  Clone ID: LIB3039-026-Q1-E1-B4
agggggacaagtttgttgagaaaaccagaagcaataagatgaaaatgaaagtgcctggtttggttggtgccacaattttgggaacaaaagaatggcaagggtcaaactaacagaagtttcctctccaaatgaaaactgggtttggtgggcaatacagcaatgaggtggcatgtgccagttggaggcttggcgtggaagcaaacaacgtagtcaagtggcaaactgttcctgcagcttgcggagagtacatagctgactacgttctaggagaccaatatagatcagattccaaaacagttaaccaacaagcttatttctatgctaaatccctcaaactcaccaacaaagatgtctttgtcttggacgttgacgacactactctctctaatctccagtattttg

SEQ ID NO: 9895 - DNA, 306 bp, Glycine max
  Clone ID: LIB3039-026-Q1-E1-B5
gatcgagttcgtttgtgcagtcagcaattacttcgttttatgagcgtcacgaccgccctagtatactccgtttctaaaaaacctgtacccgcgaaaacacgaaattcacaggccaagctcatgactgagacaacagagatgggcgtcacgaaagaagaagttgaatcatcatgaaggacacactcaatccatcccaacttcatctggatgatacatctgatacggtaagagcacgttttgtgaaggcgattataccacaacggattacaggcaagatgacacattagaatcatcgacctagtgaac

SEQ ID NO: 9896 - DNA, 400 bp, Glycine max
  Clone ID: LIB3039-026-Q1-E1-B6
gaagaagaactagtctaagcagaaatggcctcttcagtgatggcatctgtggccctcaaacctgcccctttcactgttgagaggtcctcagttagaggccttccctccctctcaaggaactcctcttcattcagagttgtggccagtggtggcaagaagatcaagactgacaagccttatggaattaatggtggcatggctttgagggaaggagttgatgcatctggcatgaaaggaaagggaaagggcgtttaccagtttgtagacaaatacggtgctaatgtcgatggttacagtcctatctacgacaccaaggactggtctccaaccggtgatgtctacgctggcggtacgactggcttggctatctgggctgtgactctacttggtcttcttgctg

SEQ ID NO: 9897 - DNA, 400 bp, Glycine max
  Clone ID: LIB3039-026-Q1-E1-B7
ggcgtgcacaggcgaaaaccctaatcctgaggcactgaaagtgtgatatggcaagagtcatttcctcttcctgcgcacgcctcgcaatgcgcctcttctccaccaccaccacagccaccgcgttcgccgtcactttacccaaaccctcatcactctccctctcatcgcgtcgattcctcttccctctctcccatgccatcgtccctccctccacccgcgtcgccggaatccggtgccgcgttaaccgcgccggagactcggcgtactcaccgctgaactcggggtcgtcgtcttcgtcgttcagcgaccgcccccccacggagatggcgccgctcttccccggctgcgactacaaccactggctcatcgtcatggagaatcccggtggtgagggcgccaa

SEQ ID NO: 9898 - DNA, 400 bp, Glycine max
  Clone ID: LIB3039-026-Q1-E1-B8
ggcagtgatagatataagaaaatgtggcttgtgcagctctcaaccccatttctgaacggacatggtcattccaccacccttctctccaagcacagttcggcggtgactcagatccactgggccccaccgagtttcctgcctcaaatcaatgcgatgaagacactgcatgggagagtggtgtgctccaccagcgacaagacggtggcagtggatgtggtgcagctggcccctcacccatagtacaacaagcgcgtgaggaagaataagaagtaccaggcccacgatcccgataaccaattcaaagtcggcgacatcgtccagctccagaagatcaggcccatcagcacgatcaacgcctttctcgcacttcccgtgcccaaaatgccctccagcatgcccg

SEQ ID NO: 9899 - DNA, 372 bp, Glycine max
  Clone ID: LIB3039-026-Q1-E1-B9
ggcatcaattcaaaatatatcatcaattataagcatgggtttgtggaacacaacgaatgcagtgtcttgccgctttcacaagtttggtgatgaccaaaagaatctggtcttccaaggtgatgccacgtcttcttccaggggcatagaactcacaaagttagacggtggaggaaaaccagtgggtggcagtgtggggagagtgttatactcttctccagtgcacctttgggaaagctctacagtggtcgcaagctttgaaaccgacttcaccttttccatctcatcagactctactactccaggtgatggccttgccttcttcattgcaccatttgacactaaaatccctccaaactctggtgggagcaacct

SEQ ID NO: 9900 - DNA, 397 bp, Glycine max; identical to SEQ ID NO: 7408
  Clone ID: LIB3039-026-Q1-E1-C1

SEQ ID NO: 9901 - DNA, 368 bp, Glycine max
  Clone ID: LIB3039-026-Q1-E1-C10
ggttcaaagcacgccgtgtttcgctgtctctcccatcctttcgcattctcaatacccttttgatttgtgaaaggaaagcaaacatggttgatcaggtccaacaccctacaatcatggacaaggttgctggtcagctccatctccgttctggtctttcatctggtattagaagttatgatggagcctaccgccacccagctatgtaccaaagaccctcttttgggaattactcgaatgctgcattgcagtttcctgtgatgcccacatgcaaagctaccatggatttgtctgctactgcaacatctgcctcacccgtctttgttgctgctccagcagagaaaggccattttcttttagactttctcatg

SEQ ID NO: 9902 - DNA, 372 bp, Glycine max
  Clone ID: LIB3039-026-Q1-E1-C11
gacctcaccgagtcgcagcgatcgaagtttcacatcagccttatccagtttagggtttcggttccttaccctacctttgacgtatcgaaaccttaaatttgggattaggtctgagcaatctggttggtagaacctttggtcttagagagtcaagttttatgtctggattagacgatcaaattcctactgccttcgatccttttgctgatgcaaatgctgatgactcgggtgctgggtcaaaggagtatgtgcatattcgcgttcagcagcgaaatggtaggaaaagcctgacaaccgttcagggattgaaaaaagaattcagctataacaagatacttaaagacgttaagaaagagttctgttgcaatggaa

SEQ ID NO: 9903 - DNA, 370 bp, Glycine max
  Clone ID: LIB3039-026-Q1-E1-C12
aggcaagagtttgttgtgagctataagctagtttatcgtgaggagaatatgaagttgtttgttttctttgttgctgcagtagttttggtagcatggccatgccatggcgcaggctaccaaaggttccctctccgaatgaaaactggctatggtgagcgttcttcggaggtaaaatgcgcaagttttaggcttgctgtggaagcacacaacatccgagcctttaaaaccattcctgaagagtgcgttgaaccaacaaaggactacattaatggcgaacaatttagatcagactctaaaacagttaaccaacaagctttcttttatgctagtgaacgcgaagtccatcacaacgacatatttatattcggca

SEQ ID NO: 9904 - DNA, 224 bp, Glycine max
  Clone ID: LIB3039-026-Q1-E1-C2
gggacaagtgagtttgttgatcgagataactagaaacagtgtgatgaaaatgaaaggccctggtttcctcggtgccacaaatttgggaacacgggaatgccatgcgtacgaaaagttccctctccgaatgaacactggctaaggtgcccgtactccggaagtgaaatgcgcaagtttgaagcttgctgtggaaacacacaacaaccttggctttgagaacaatc

SEQ ID NO: 9905 - DNA, 401 bp, Glycine max
  unsure (1)..(401): unsure at all n locations
  Clone ID: LIB3039-026-Q1-E1-C3
gataccatagaagaagcacaaagagaagcattagcactaagagcagcaacaactagtcccagctgaaatggcctcttcagtgatggcatctgtgggcctcaaacctgcccctttcactgttgagaagtcctcagtgagaggccttccctctctctcaaggaactcttcttcattcagagttgtggccagtggcaagaagatcaagactgacaaaccttatggaattaatggtggcatggctttgagggatggaactgatgcatctggcangaaaggaaagggaaagggtgtttaccagtttgtagacaaatacggtgctaatgtcgatggttacagtcctatctacgacaccaaggactggtctccaaccggtgatgtctacgctggcggtacgactggct

SEQ ID NO: 9906 - DNA, 405 bp, Glycine max
  Clone ID: LIB3039-026-Q1-E1-C4
aaaagggaatccaatcacaactgaaaccaaaactgaaaaaaaaacaaacaataccaaaacaagggttcctccaacaacaactcctcctttccaacaacaacccccttaacccccctcaacaaaacaacaatccccttccttcaaggcaacccctactcctccgccccctcgcgccacgcgcctccatgtccgcctcagcgccgccctacgacttcggatcgttccggttcgatccgattagagagtcgattgtgtcgcgcgagatgacccgcaggtacatgatcgacatggtcacccacgccgacaccgacgtcgtcatcgttggcgcgggctccgcgggtctctcgtgcgcctacgagctctccaaaaacccctccatcaacatcgccattgttgagcagtccg

SEQ ID NO: 9907 - DNA, 400 bp, Glycine max
  Clone ID: LIB3039-026-Q1-E1-C5
ggcacaagtgagtttgttgatcgagataactagaaacagtgtgatgaaaatgaaggtccttgttttcttcgttgctacaattttggtagcatggcaatgccatgcgtacgatatgttccctctccgaatgaacactggctatggtgcccgtactccggaagtgaaatgcgcaagttggaggcttgctgtggaagcacacaacatctttggctttgagaccattcctgaagagtgcgttgaagcaacacaggaatacatccatggcgaacaatatagatcagactccaaaatagttaaccaacaagcttacttttatgccagagacctcgaactccatcccaaggacacatttgtgttcagtatagatggcaccgtactctctaatattccatactacaaa

SEQ ID NO: 9908 - DNA, 403 bp, Glycine max
  Clone ID: LIB3039-026-Q1-E1-C6
ggaaacggcctgtgcatcagtccatggtgccaataggcttggtgcaaattcacttctggatatcgttgtttttggtagagcttgtgctaatagagttgcagaaatccgtagaccaggagagaagcaaaagcctctagagaaggatgctggtcagagaacaattgcatggctggacaaattgagaaattcaaatggttcattgccaacttcgcaaattcggttgaatatgcaacgagtaatgcaaaccaatgctgctgtgttccgtacacaagaaacattagaagaaggttgtcaattaattgataaaacatgggagagcttccatgatgtccaggtgaaggaccgcagtttaatctggaactctgacttgattgagactattgaattggaaaatcttttgata

SEQ ID NO: 9909 - DNA, 400 bp, Glycine max
  Clone ID: LIB3039-026-Q1-E1-C7
gacggctcagttgtgtattctcgttctgcacgaaggaaaaaccctagcttccgttcgatcaacaatgacaggagagacagtgaaccccaaagcttaccctttggccgatgcccaactctcaataaccatactagatcttgttcaacaagctgccaactacaagcagctcaaaaaaggtgctaatgaagccactaaaaccctgaacagaggtatctctgaatttgttgtcatggctgctgatactgaaccccttgaaattcttctccatcttcctctactcgccgaggataagaatgtgccctacgtgtttgtcccttcaaaacaagcacttgggcgtgcatgtggggtcaccaggccagtgattgcttgttctgtgacaactaatgaagggagtcaattg

SEQ ID NO: 9910 - DNA, 401 bp, Glycine max
  Clone ID: LIB3039-026-Q1-E1-C8
gatccatcccttgtggaagaagtattttttgggaatgttcttagtgctaatttggggcaagctcctgcaagacaagctgctcttggagcaggaatatccaattcagttatctgcactaccgttaacaaagtttgtgcatcaggaatgaaagctgcaatgcttgctgcacagagtattcaattaggcacaaatgatgttgttgtggctggtggtatggaaagcatgtctaatgtacccaagtacctggctgaagcaaggaaaggatcacgccttggacatgattcacttgttgatgggatgttgaaagatggtttgtgggatgtctataaggatgttggcatgggagtgtgtgctgagctatgtgcagataaccatgcattaacaagagacgaccaggataa

SEQ ID NO: 9911 - DNA, 428 bp, Glycine max
  Clone ID: LIB3039-026-Q1-E1-D1
gaagacgacagaaggggacttgtaataattcttataacacaacacaacccatggccaccacctccgcattcctcccccttccctcctcctgctgctccacctcgccatcgccgctcacggcatcggcatcaactacggcacgctcggcgacaaccttccaccgcccgcggccgtggcgaacttcctgaagacgaagacgaccatcgaccgcgtgaagatctacgacgtgaacccggacatcctgcgggccttcgccggcagcggcatctccgtgacggtgaccgcccccaacggcgacatcgccgccttaaccaaaatcgactcggcgaggcagtgggtggcgacgcacatcaaaccctttcaccctcagaccaaaattaattacatcctcgtcggcagcgaggttctccactggggcgacaccaaca

SEQ ID NO: 9912 - DNA, 367 bp, Glycine max
  Clone ID: LIB3039-026-Q1-E1-D10
ggtgcacaagtgagtttgttgatcgagataactagaaacagtgtgatgaaaatgaaggtccttgttttcttcgttgctacaattttggtagcatggcaatgccatgcgtacgatatgttccctctccgaatgaacactggctatggtgcccgtactccggaggtgaaatgcgcaagttggaggcttgctgtggaagcacacaacatctttggctttgagaccattcctgaagagtgcgttgaagcaacaaaggaatacatccatggcgaacaatatagatcagactccaaaacagttaaccaacaagcttacttttatgccagagacctcgaagtccatcccaaggacacatttgtgttcagtatag

SEQ ID NO: 9913 - DNA, 373 bp, Glycine max
  Clone ID: LIB3039-026-Q1-E1-D11
gactattccttgcggtggcatatgcctataacttcatcattcaattgactcagctctcctttctcaagtagaattgttgattcgtagatcttctctcgcagtcccatccgaagcaagcaatacaccaaaacccaaataaaacagaaaatttatttatttattcgtttttagaaaaaaaaaaaaaaagtggtgagcgatatggaatttgacgagcacgaggaccaagaggaagaggaggaagaggaaatgggattctcagtggcggctgcgagttacgactcgctgggaaacgcggcggtgaggtctaaaatgagcggcggcgagggagttgcggtcaccgggaattctggtcggaaagggacgctgagataca

SEQ ID NO: 9914 - DNA, 366 bp, Glycine max
  Clone ID: LIB3039-026-Q1-E1-D12
gactcctttccgtcacttttggggaagaggtcgagtttcacagcagcaatggtgtacgtcaaggctcagaaatcaaaagcctacttcaagagatatcaagtcaagttcaagagaagaagagagggaaaaaccgattaccgtgccaggattcggttgattaatcaggacaagaacaaatataacactccgaaataccgatttgttgttcgctttagcaacaaggacattgttgcacaaataatatctgctagcattgctggcgatattgttcttgctgcagcatatgcacatgagctgccacaatatggtcttgaagtagggcttacaaattatgctgcagcttattgcactggtctcctgttggcc

SEQ ID NO: 9915 - DNA, 416 bp, Glycine max
  Clone ID: LIB3039-026-Q1-E1-D2
taaaggggtccgaattcgatgattgaagtggtaaacatggattacattaacaaagcctttgaaacgttggagaagaacgatgtgagatacacgtttgtagtggatgtcaaaggcagcaaacttgttgattactaaaagaaagtataccagcacgacacccgcaacatccatccatcatcatcaagagtctggaaaagtttttcattgaactaaagctgtgtttgtttattaaaaagagtgctctgtattctctgttttggttacacgccgttcattaaaatatttgatatcaaattctcgtggaaagcaaaagataccaaacttcctgtttgaccatagctttgctgtgtaaaaaaaatgttgtattgttccgccattaaaagaaagacaaaagaagttggatactaaaaataaaa

SEQ ID NO: 9916 - DNA, 435 bp, Glycine max
  Clone ID: LIB3039-026-Q1-E1-D3
agccacgcgtccgaaaggggttcaatttcaataaattccattccctctgtgtaatttccctacctctcccttcaagatgcagatcttcgtcaagaccctcaccggcaagaccatcacccttgaggtggaaagctctgacaccatcgacaacgtcaaggccaagatccaggacaaggaaggaatccccccggaccagcaacgtctcattttcgccggaaagcaacttgaggacggccgtacccttgctgactacaacattcagaaggagagtactcttcacctcgtcctccgtctccgtggtggcatgcagatcttcgttaagacactcaccggcaagaccataaccctagaggttgaaagctccgacaccatcgataacgtcaaggccaagatccaggacaaggagggtatccccccggaccagcaacgtctcat

SEQ ID NO: 9917 - DNA, 395 bp, Glycine max
  Clone ID: LIB3039-026-Q1-E1-D5
gaaggtgcaagagtttgttgtgagctataagctagtttatcgtgaggagaatatgaagttgtttgttttctttgttgctgcagtagttttggtagcatggccatgccatggcgcaggctaccaaaggttccctctccgaatgaaaactggctatggtgagcgttcttcggaggtaaaatgcgcaagttttaggcttgctgtggaagcacacaacatccgagcctttaaaaccattcctgaagagtgcgttgaaccaacaaaggactacattaatggcgaacaatttagatcagactctaaaacagttaaccaacaagctttcttttatgctagtgaacgcgaagtcgatcacaacgacatatttatattcggcatagataacaccgtactctcta

SEQ ID NO: 9918 - DNA, 380 bp, Glycine max
  Clone ID: LIB3039-026-Q1-E1-D6
ggttgtgtgagtgaagaagcagagggagtagcggcattaaaaatgcagatcttcgtgaaaactctgacagggaagactataaccctcgaggtcgagagcagcgacaccatcgacaatgtcaaggccaagattcaagacaaggaaggcattcctccggatcagcagcgtttgattttcgccggaaagcagcttgaagatggaaggaccctggccgattacaacatccagaaggaatcaacccttcatctcgtcctcaggcttcgtggtggcatcattgagccttccctcatggctttggctcgcaaatacaaccaggacaagatgatttgccgcaagtgctatgcccgtctgcatcctaaggctgtgaactgccgcaagaa

SEQ ID NO: 9919 - DNA, 388 bp, Glycine max
  Clone ID: LIB3039-026-Q1-E1-D7
gggaggttgatagttaatctatctgcaacagcaacattgtgacagtgacagtgtcgtaggatggagaaggtggtatgtgtgaccggcggcagcggctgcattggttcatggctcgtccatctcctcttggatcgcggctacaccgttcacgccaccgtccaaaacctcaacgatgaagccgagacgaagcatcttcaatccctcgacggagcgtccacgcgcctccgcctcttccagatggatctcctccgccacgacaccgtcctcgccgccgtgcgtggctgcgccggcgtcttccacctcgcctctccctgcattgtcgaccaagtccacgacccccagaaggagcttctggacccggcgattaagggaaccatgaacgtgctca

SEQ ID NO: 9920 - DNA, 407 bp, Glycine max
  Clone ID: LIB3039-026-Q1-E1-D8
ggcacaagtttgttgagatagctagaagcaataagatgaaaatgaaagtgcttgttttgtttgttgctacagttttggtagcatatgaatgccatggctcagactaccagaagttccctctccaaatgaaaactgggtttggtgggcaatacagcaatgaggtggcatgtgccagttggaggcttggcgtggaagcaaacaacgtagtcaagtggcaaactgttcctgcagcttgcggagagtacatagctgactacgttctaggagaccaatatagatcagattccaaaacagttaaccaacaagcttatttctatgctaaatccctcaaactcaccaacaaagatgtctttgtcttggacgttgacgacactactctctctaatctccagtattttgctaaccat

SEQ ID NO: 9921 - DNA, 372 bp, Glycine max
  Clone ID: LIB3039-026-Q1-E1-D9
ggcgagatagaagagaaagccgtcgctatcctagtctcttcttcccctctacccatttcagtttcaggatggaatctcaggtgaagcacgcccttgttgtcaaagttatgggtcgtactgggtctagggggcaggtgactcaggttagagtgaagtttttggatgatcaaaaccgacacatcatgaggaacgtgaagggacccgtgagagaaggagacattctcaccctacttgagtctgaaagagaagcaagaaggttgcgctagaggatctcttcatggtttggctcaggacttaaacaaaacatcgttgttttgttgtagttaaaggatgtcaaatgttaattgtcatggacctgaattatgcacctac

SEQ ID NO: 9922 - DNA, 408 bp, Glycine max
  unsure (1)..(408): unsure at all n locations
  Clone ID: LIB3039-026-Q1-E1-E1
aggggtgaagcaataaaaggcaatagagaaacaactatgggaagggaaaatgggaagaagctgaaaatactgggcctccaacggttcaaaacaagtgggagttttcctaaaaagcaaatcaacaaatgggattcttctctantcattcaatttgatatgggtaatatatgccatttactttgttaatgttcaagtgtttgcatgaagcatttttaaccttaagcccttgttcttagacatttcaaattcatattttattagtgttagtgctgattagcccttgttcataataattgctgatgttgtttagcttaatatagtatagtttatactgctacgtataatgtagtcttaatttttcccgagtacaaaaatatacagatgaaagcaatagaaccaaaaaagtta

SEQ ID NO: 9923 - DNA, 367 bp, Glycine max
  Clone ID: LIB3039-026-Q1-E1-E10
ggcacaagtgagtttgttgatcgagataactagatacagtgtgatgaaaatgaaggtccttgttttcttcgttgctataattttggtagcatggcaatgccatccgtacgatatgtcccctctccgaatgaacactggctatattgcccgtactccggaggtgaaatgcgcacgttggaggcttgctgttgaagcacacaacatctttggctttgagagcattcctgaatcagtgcgttgaagcaacacacgaataaatccatggcgaacaatatagatgagactccagatcagtgaatcaacaaccttacatatatgccagagacctcgaactccaactcacggacacatttgtgttcagtataga

SEQ ID NO: 9924 - DNA, 372 bp, Glycine max
  Clone ID: LIB3039-026-Q1-E1-E11
gaaagatcttttctggtataccagggataaaaagtcccaaaatgcagaaatggaggctgcaaaagaagagataaaaagaattaaggaagaagaggagcaggcaatgagggaagctcttggcttagctcccaagcgttctaaccatcctcaaggtaaccgtcttgataaacatgagttttcagaactggtaaagcgggggtctacagcagaggacttaggtgcaggtcatgctgaagctgcaagggttcaaggtcttggttttgcaagagaaccacgcccttgggaagaatccggttcttctaagctttcacttagtgacacaccagctgaggtggaaaatgtatctatgccaaatcaaccagcaccaaagac

SEQ ID NO: 9925 - DNA, 135 bp, Glycine max
  Clone ID: LIB3039-026-Q1-E1-E12
aaatatttggccctggtgatggctttgatgaagtttaagactattgaggatgcaattaagattgccaacaatacaagatatggcctagcatcaggcattgtgacaaagagtttggacacagccaacactgtgtca

SEQ ID NO: 9926 - DNA, 405 bp, Glycine max
  Clone ID: LIB3039-026-Q1-E1-E3
ggcacaagtgagtttgttgatcgagataactagaaacagtgtgatgaaaatgaacgtccttgttttcttcgttgctacaattttggtagcatggcaatgccatgcgtacgatatgttccctctccgaatgaacaccggctatggtgcccgtactccggaggtgaaatgcgcaagttggaggcttgctgtggaagcacacaacatctttggctttgagaccattcctgaagagtgcgttgaagcaacaaaggaatacatccatggcgaacaatatagatcagactccaaaacagttaaccaacaagcttacttttatgccagagacctcgaagtccatcccaaggacacatttgtgttcagtatagatggcaccgtactctctaatatttcatactacaaaaaaca

SEQ ID NO: 9927 - DNA, 406 bp, Glycine max
  Clone ID: LIB3039-026-Q1-E1-E4
ggcaaaagtgaatttgttgattgagaaaactaaaaacagtgtgatgaaaatgaaggtccttgttttcttcgttgctacaattttggtagcatggcaatgccatgcgtacgatatgttccctctccgaatgaacactggctatggtgcccgtactccggaggtgaaatgcgcaagttggaggcttgctgtggaagcacacaacatctttggctttgagaccattcctgaagagtgcgttgaagcaacaaaggaatacatccatggcgaacaatatagatcagactccaaaacagttaaccaacaagcttacttttatgccagagacctcgaagtccatcccaaggacacatttgtgttcagtatagatggcaccgtactctctaatattccatactacaaaaaacat

SEQ ID NO: 9928 - DNA, 390 bp, Glycine max
  Clone ID: LIB3039-026-Q1-E1-E5
ggcctgcaagtgtgagtgatatttgagcttaaaccctagccgctcttctcttcattcttcactttggaaacaatcataatggcgttctgtaataaggttggaaatgtcttgaggcagggtgctgctcgcagcacacatgcccctgttgcgtccatgcttaattacatccgctgcatgtcttcaagcaagcttttcattggaggcctttcatatggagttgatgaccagtctcttaaggatgcattttctggctttggagatgtggttgatgcaaaagttataactgatagagacagtggaagatcaaggggatttggatttgtcaacttctccaatgatgagtctgcaagttcggcactctctgcaatggacgggaaggatctaaatggg

SEQ ID NO: 9929 - DNA, 312 bp, Glycine max
  Clone ID: LIB3039-026-Q1-E1-E6
acgcgagacgacaacacaacggggagagaaacagagaaattgataatacaggagtgttatcggcgaacgatgcattcggcaatcctgagttcgccgtagaacggacctacgcgaacgtgtccagagcactacagacggtaactgggaagatcgtggcgctgaagatgactcttctccacgatgactaacaacgtgtctctcacaccacgcaccgtgaggtttccattctgcgactgcgctctcgcaatacccatgtccttacgttaatcgatgtcacagaatgtcacgacgatgaacggaatacagtactct

SEQ ID NO: 9930 - DNA, 393 bp, Glycine max
  Clone ID: LIB3039-026-Q1-E1-E7
ggcacatcagcacaacacaacaattcactaagctaaaatcacttcatcatggcttcctcgtgtgcttcctctgccattgcagctgttgccatctccacaccaagttcccagaagaatggatcactcttgggaagcacaaaagcttcttttcttagtgggaggaaactgaaggtgaacaactttacagcaccagttggagcacgatccagcactacagtttgcgcagttgctgagcctgataggcccctgtggttcccaggcagcacccctcctccatggctagatggcagtttgccaggagattttggctttgatcctctaggtcttgcatctgatcctgagagcctgagatggaatgtccaagcagagcttgtgcactgcagatgggccatg

SEQ ID NO: 9931 - DNA, 402 bp, Glycine max
  Clone ID: LIB3039-026-Q1-E1-E8
gacgttcacattcaggaatcgttttcttcagaaatttgccatcgttgagagaagcgtgagagccttagtcgttcaagatgagagctaagtggaagaagaagcgcatgaggaggttgaagaggaagcgccgaaagatgagacaaagatctaagtaggtgcttgagcaggagttgagatgagctttccatctgctaccagcctcatgacattttaggctgttatggctcttatgatcttgaggtctagtcgctaggggagcttcactcttgacttagtttgctttactggtcctggtcctggtccaagactattgagtgtgggttaagttgtgatgtttagtgttttgtggtatctaattatgtactggtttttatactttttggttgaatagctatatattag

SEQ ID NO: 9932 - DNA, 370 bp, Glycine max
  Clone ID: LIB3039-026-Q1-E1-E9
gaattcaaaatatatcatcaattatgagcatgggtttgtggaacacaacgaatgcagtgtcttgccgctttcacaagtttggtgataaccaaaataatcaggtcttccaaggtgatgccacgtcttcttccagaggcatacaactcacaaagttatacggtggacgaaaaccagttggtggcactgtggggagagtgttatactcttctccagtgcacctttgggaaagctctacagtggtcgcaacctttgacatcgacctcaccttttccatctcatcacactctactactccaggtgatggccttgccgtcttcattgcaccatttgacactaaaatcgctccaaactctggtgggagcaaccttgg

SEQ ID NO: 9933 - DNA, 403 bp, Glycine max
  Clone ID: LIB3039-026-Q1-E1-F1
aagggaaagtgcaagaatttgttgtgagccaaaaaccaatttaaccttaagaagatatgaagttggttggtttccttggtgccgcaataattttggtaacatggccatgccatggcgcaaggcaacaaaagttccctctccgaatgaaaactggctatggtgagcgttcttcggaggtaaaatgcgcaagttttaggcttgctgtggaagcacacaacatccgagcctttaaaaccattcctgaagagtgcgttgaaccaacaaaggactacattaatggcgaacaatttagatcagactctaaaacagttaaccaacaagctttcttttatgctagtgaacgcgaagtccatcacaacgacatatttatattcggcatagataacaccgtactctctaatat

SEQ ID NO: 9934 - DNA, 133 bp, Glycine max
  Clone ID: LIB3039-026-Q1-E1-F12
ggggcacacgtgagtttgttgatcgagattgctagaagcagtgtgatgaacatgaaggtccttgttttcctcgttgctacagttttgggaccatggccatgcccttgccttcatatgcttccctctcccactc

SEQ ID NO: 9935 - DNA, 406 bp, Glycine max
  Clone ID: LIB3039-026-Q1-E1-F2
ggcacaagtgagtttgttgatcgagataactagaaacagtgtgatgaaaatgaaggtccttgttttcctcgttgctacaattttgggagcatggcaatgccatgcgtacgatatgttccctctccgaatgaacactggctatggtgcccgtactccggaggtgaaatgcgcaagttggaggcttgctgtggaagcacacaacatctttggctttgagaccattcctgaagagtgcgttggagcaacaaaggaatacatccatggcgaacaatatagatcagactccaaaacagttaaccaacaagcttacttttatgccagatacctcgaagtccatcccaaggacacatttgtgttcagtatagatggcaccgtactctctaatattccatactacaaaaaacat

SEQ ID NO: 9936 - DNA, 376 bp, Glycine max
  unsure (1)..(376): unsure at all n locations
  Clone ID: LIB3039-026-Q1-E1-F3
gctctctccaatctctttcaacgaaacccttcttccattaacggcgaacgaaatcggtgacagaaaagcaacaagcaatctcgattcccaaatcgtgaaatccgatgacgaccgctgcaagacccacatgggcacctgctaaaggtggcaacgaacaaagtggtactcgaattttcggtccctcacaaaagtactcttctanggacatcgcatcgcacaccactctcaagcccaggaaggaagggcaggacacacaggatgaattaaagagaagaaacctacgtgatgaactggaagatcgtgaaaggaggcatttctcatcaaaaaataaatcttatgatgacagggatcatggaaagggtagccatctgttttt

SEQ ID NO: 9937 - DNA, 411 bp, Glycine max
  Clone ID: LIB3039-026-Q1-E1-F4
ggagctccttacgtaaattctccacgaagcaaccctgagcagtgaccataaccacactctctcaagtctctagagagaagctaccaaactccacaacacatacccaattagctaacccctctcacacttacagaccatgccaaacgcaaacatgcttctccttttcctcttccttctggcgctcttctcagccatgacaacaccgtcaacctccgcgatcgacaccttcatctttgccggctgctcccagcccaagttcacgccgggttccgcctacgaaaataccgtcaactcgctcctcacctctctcgtcaactccgccgccttcgccaactacaacaacttcaccgtccccgcctcctccgacgccgtctacggcctcttccagtgccgcggcgacctcaccaacga

SEQ ID NO: 9938 - DNA, 400 bp, Glycine max
  Clone ID: LIB3039-026-Q1-E1-F5
gagaactgatgagttgaataatcaaaggcaaaaagaagaagcaaaaccaaaggcagtactgtgttcaccgtggaactgttcttctctctcataacatgccctctgcccaggatccattttacgttgtcgaggccgagattcaagattctattgataagctgcaatctacttttcaccaatgggaaagcaagtccggtgctgcggaacaaggacatcttacaaaggaggttcttgctggatgcgaaagcatagagtggcaggtggatgaattggataaggcaattgctatagcatctagagatccttcttggtatgggatagatgaagctgaggtcgaaagccgaaggagatggacaagtaacactcgttctcaggttggcacaatgaagaaagcagtgga

SEQ ID NO: 9939 - DNA, 310 bp, Glycine max
  Clone ID: LIB3039-026-Q1-E1-F6
aggctggtagaaaaagaccgaagggggggaacatttgttgttggttaattcatccgcagatggcagtggaaaatatcaaggtcgacgagtattccaacgttgcccctccatcactatcatcacaatcactatgcctaccatacactttgtgttatacttggttccacacgttctcctacagtgacgggatagtcttccattcactaaaggcacagcaagtacagtcttcctgcatctagacatctgacaatcgatgatctagatggacacgcactcacagactcgaacattaacgacctctcgctggcaa

SEQ ID NO: 9940 - DNA, 384 bp, Glycine max
  Clone ID: LIB3039-026-Q1-E1-F7
gacagcactgcactcttcgcaacacaacaaaaaaagacaacccagagagcgcgtcttaataaacgctcttctctgaaaacccccagttcttttcttctttcttcttctctttcgcttcttcgatcttcgatcttcgtcgctgaaaatgagagggtgcatttcaatccacatcggccaggccgggattcaggttggaaacgcctgctgggagctttactgcctcgaacacggcattcagcctgatgggcagatgccaagtgacaagaccgttggtggaggtgatgatgctttcaacaccttcttcagtgaaactggggcaggaaagcacgtgccccgtgcgatttttgtagatcttgagcccactgtgattgatgaggttaggac

SEQ ID NO: 9941 - DNA, 380 bp, Glycine max
  Clone ID: LIB3039-026-Q1-E1-F8
ggagcgaagaagatattagggtttttgagtgcggtgcggcgatcctagcactctcttctgcagctttcgccgacagcttcattcaccatggctgagcaaaccgagaaggcttttttgaaacaaccaaaagtgtttctcagctcgaagaaaactgggaagggaaagagacccggaaagggtgggaaccgcttttggaaatccattgggcttggatttaagactcccagggaagccatcgaaggaacctacattgacaagaagtgccccttcactggcaatgtttccatccgtggccgtatcttggctggaacatgtcacagtgctaagatgaacaggactattattgttaggaggaattatctccattttatcaagaagta

SEQ ID NO: 9942 - DNA, 360 bp, Glycine max
  Clone ID: LIB3039-026-Q1-E1-F9
gggcgcagtgagatggaagaagaaggtgttccggtggaaggttcttcaggtacggtgagtcgggcacggaagcttctgtttcggcgaatgctggtggggatcaaagacggaaggttcttcttgggctccttctactgcatcgacaagcaaggcaacatcattctccaggacgccgtcgaatatcgcagcacgcgccaatcttcgccttctcccatggaacagaggtgcctcggccttattctcattccttcctcttgccgcacctcttgtcacgtcgattgcgctatccacgaacagttatctctcctttcgctgaatcaaacaccaccgcactagccagggttttactgtgccccttca

SEQ ID NO: 9943 - DNA, 405 bp, Glycine max
  Clone ID: LIB3039-026-Q1-E1-G1
agggagaacaagcaaacacaactctgctaacctcctctctctctccccgaattcctgccccggttaacaagggggaaaatcaataatccttttcccccaacaaaattaacccttccggaaaacctggtcaaaatgaacaagctttgaacgctgtccggtccggaaaaaactcctttggaaataaaacttgcaattgaattttcaattccaccgaaaaaaaattgcatctatatgggttgatgaagcatcagtccagaaaattcagttattaacaccaaatataggtgtcgtatatagtggcatgggtcctgattttcgagttttggttcggaaaagcaagaaacaagccgagcagtatcaccgtttatataaagaaccaattcctgtcactcaacttgtcaggga

SEQ ID NO: 9944 - DNA, 97 bp, Glycine max
  Clone ID: LIB3039-026-Q1-E1-G10
ggtttgtgcctgatagtgattgttactctttcgccttcttctgctgttgtctgtctgtgtttctggggactgggacccgcaactgtcattctcctgt

SEQ ID NO: 9945 - DNA, 80 bp, Glycine max
  Clone ID: LIB3039-026-Q1-E1-G12
gggggcatgagcgattgcactgatctagctctcacgtttgtgcttgcacttgcacctctccagcgattgcagcgaccagc

SEQ ID NO: 9946 - DNA, 399 bp, Glycine max
  Clone ID: LIB3039-026-Q1-E1-G5
gcacaagtgagtttgttgatcgagataactagaaacagtgtgatgaaaatgaaggtccttgttttcttcgttgctacaattttggtagcatggcaatgccatgcgtacgatatgttccctctccgaatgaacactggctatggtgcccgtactccggaggtgaaatgcgcaagttggaggcttgctgtggaagcacacaacatctttggctttgagaccattcctgaagagtgcgttgaagcaacaaaggaatacatccatggcgaacaatatagatcagactccaaaacagttaaccaacaagcttacttttatgccagagacctcgaagtccatcccaaggacacatttgtgttcagtatagatggcaccgtactctctaatattccatactacaaa

SEQ ID NO: 9947 - DNA, 352 bp, Glycine max
  Clone ID: LIB3039-026-Q1-E1-G6
ggcacaagtgagtttgttgatcgagataactagaaacactgtgatgaaaatgaaggtccatgttttcctccttgcaacaattttggtagcatggcaatgccatgcgtacgatatgttccctctccgaatgaacactggctatggtgcccgtactccggacgtgaaaagcacaccttagaagcttgctgtggaagcacacgacatctttggctttgagaccattcctgaagagtgcgttgaatcaacaaatgaatacatccatggcgaacaatatacatcagactccacaacagttaaccagcaagcttacatttatgccacagtactccaagtccatcccaacgacacattt

SEQ ID NO: 9948 - DNA, 374 bp, Glycine max
  Clone ID: LIB3039-026-Q1-E1-G7
gacaagtgagtgtgatgatcgagatcactacaaacagtgtgatgaaaatgaaggtccttgttctcttcgtagctacaattttggtagcatggcaatgccacgcgtacgagatcttccctctccgaatgaacactgtctatggtgctcgtactccggaggtgaaaggcgcatgttggaggcttgctgtggaagcagacaacatctttggctttgagaccattcctgaagagtgcgttgacgcagcatacgaatacatccatggcgaacaatatagatcagactccaaaacagttaaccatcaagcttacatttacgccagagacctcgaagtccatctcaaggacacatttgtgttcagtatagatggcaacgta

SEQ ID NO: 9949 - DNA, 400 bp, Glycine max
  Clone ID: LIB3039-026-Q1-E1-G8
gagtgcacaagtgagtttgttgatcgagataactagaaacagtgtgatgaaaatgaaggtccttgttttcttcgttgctacaattttggtagcatggcaatgccatgcgtacgatatgttccctctccgaatgaacactggctatggtgcccgtactccggaggtgaaatgcgcaagttggacgcttgctgtggaagcacacaacatctttggctttgagaccattcctgaagagtgcgttgaagcaacaaaggaatacatccatggcgaacaatatagatcagactccaaaacagttaaccaacaagcttacttttatgccagagacctcgaagtccatcccaaggacacatttgtgttcagtatagatggcaccgtactctctaatattccatactac

SEQ ID NO: 9950 - DNA, 375 bp, Glycine max
  Clone ID: LIB3039-026-Q1-E1-G9
ggaacttctcacgttcatttctacacatccctagctctgtcgttccgtcgttgacgatggcgtttcgggtgcgaagccctgacctccgctctctctttcttctctctctcttgtccatcgcttccgccaatgtcttcttcgaagagcgtttcgatgacgggtgggaaaatcgatgggttaaatcagattggaaaaaagatgagaacgtggctggggagtggaaccacacctctggtcaatggaatggagacgctaatgacaaaggtattcaaaccagtgaggattacagattctatgctatttcagctgagtaccctgaattcagcaacaagggtaagacactagtctttcaattttctgttaagcacgaacaga

SEQ ID NO: 9951 - DNA, 383 bp, Glycine max
  unsure (1)..(383): unsure at all n locations
  Clone ID: LIB3039-026-Q1-E1-H1
agggattcataccaaaactttcactttcccaaagaaaattgggacctggctccggtgttaaagtttggaattttttttgaatgggtggattgagaaaactgggcaagctttggaacttcttcaaaagtctggtacttcaatggctactgaagaggttaatanacttcaatcacttcctccttaccctgagatgatagtgaaagcacttgaagccctgaatgaggctgatggatcgagtaaatcagcgatatcaaagtacatagaaaccacctacggtgagttgccagatgaaactgttttggggagtcacctgaacaagatgaaagagagtggagagcttgcgttcaaacagaacaattacatgaaagctgatccaaatgccc

SEQ ID NO: 9952 - DNA, 124 bp, Glycine max
  Clone ID: LIB3039-026-Q1-E1-H10
tatgtgccaaatcgtcctcccttaatgagaagattaatcccatttccagaggatgaggcagaatatgccaatttcttagcagatccccaaaagtatttcctaaatgcgttgcccagcgtgttac

SEQ ID NO: 9953 - DNA, 370 bp, Glycine max
  Clone ID: LIB3039-026-Q1-E1-H11
gatagaaggttgtggggttagggctttagagtgtcttttcttctttttcttcttcttcttcttcgttgaatcgcgattgttctgttgtgcgactgaaagaagagagatcgaaaatggcgttggctttcgacgagttcggaaggcctttcataatcctgaaggaacaggagcagaagagcagacttcgaggtttggacgctcagaaagccaacatctccgccggcaaagccgtcgctcgcatcctccgaacctccctcggccccaaaggcatggacaagatgctccagagccccgacggcgacgtcactatcacgaacgacggtgccacgatccttgaccagatggacgtggacaaccaaatcgcgaagct

SEQ ID NO: 9954 - DNA, 154 bp, Glycine max
  Clone ID: LIB3039-026-Q1-E1-H12
agagacttccgactggggcacatgtgagtctgctgctcctgataactagatgcagtgtgattacaatgaatgtccttgttttcttcgttgccacaggttttggagcatggcaatcccatgcgtgcaatatatgccctctccgagtaaggtactg

SEQ ID NO: 9955 - DNA, 420 bp, Glycine max
  Clone ID: LIB3039-026-Q1-E1-H2
gctttttgatttaattcaatgcaaccatgtttggctatgcagcagcaataattgcagcaatcctcttcttccaatacttcttccataggagacgatgttgcaaacaccccattttgacagaataccctatcattggcatgctaacacaattactcttcaatttatggcgtgcccatgactattcaactcaggtgttgcaacgacatggtggcactggtgagttcattggaccatggtttaccaacatggactatttggtcacttgcgaccccatcaacgtccaccacatgctgagcaagaatttccacaactacgtcaagggacccgagtttcgtcacatttttcatgccttcggagacgggattttcgccgctgattctgaagcatggaactacagcacggatctcttacattctctct

SEQ ID NO: 9956 - DNA, 391 bp, Glycine max
  unsure (1)..(391): unsure at all n locations
  Clone ID: LIB3039-026-Q1-E1-H3
gaaccccacttccctcaccgctccgaattanggttttccaattcgcagagcaactcaacacaacgaaccaaaccaacaatgtcgcagccgcagcctcagtcgcagccgcaacacgggcaagcggcgctggagcaggtgcagtgcttcggtcgcaagaagacggcggtggccgtgacctactgcaagcgcgggcgcggcctcatcaagatcaacggctgccccatcgagctcgtcgagccggagatcctccgctttaaggccttcgagcccatcctcctgttgggaaagagccgcttcgccggcgtcgacatgcgcatccgcgtcaagggcggcggccacacctcccagatctacgccattcgccagagcatcgccaaggcgctcgtcgcgt

SEQ ID NO: 9957 - DNA, 441 bp, Glycine max
  Clone ID: LIB3039-026-Q1-E1-H4
gaagacgacagaagggggaagtgacataaccttctatgcttgaagacggtggattagaacctcaacaagagaaagagactcgtcagagaatatgatccttgcggtgctgtttgccaacgctgagggcaatatcctcatcgaacgttttcatggagttcctgcagaggagcgtctgcactggcgttcattcttagtcaaactaggagctgataatcttaagggtgtcaaaaacgaagagctcctagttgcttgccacaaatcggtttatattgtatacacagtgcttggcgatgtcagcatctatgtcgtgggcaaggatgagtatgacgaacttgccttgtccgaagtgatctttgtgataacctcagctgtgaaggatgtatgtgggaagcccccaagtgagcgccttttccttgacaagtatggaagaatttgtctgtg

SEQ ID NO: 9958 - DNA, 397 bp, Glycine max
  Clone ID: LIB3039-026-Q1-E1-H5
ggggttattggacacattcttcagcgactgcgtttttggatcggaacctcttctgcggcgtagcaatgggacactccaacgtttggaactctcacccaaaaaactacggtcctggttctcgcacttgccgtgtgtgtgggaatccacatggactgatcaggaagtatggccttatgtgctgcaggcagtgcttccgtagcaatgccaaggaaattggcttcatcaagtatcgctaaaagagcagttgtcaactacggaccaatattgtgttctggcactaggatgttttgaggatgttatgtttgaagaaacttgagactttcttttttcatctaattaattatcagacgtaatttgtggtactaagaatacttttatataaattgttttgaaccat

SEQ ID NO: 9959 - DNA, 407 bp, Glycine max
  Clone ID: LIB3039-026-Q1-E1-H6
ggcacaagtgagtttgttgatcgagataactagaaacagtgtgatgaaaatgaaggtccttgttttcttcgttgctacaattttggtagcatggcaatgccatgcgtacgatatgttccctctccgaatgaacactggctatggtgcccgtactccggaggtgaaatgcgcaagttggaggcttgctgtggaagcacacaacatctttggctttgagaccattcctgaagagtgcgttgaagcaacaaaggaatacatccatggcgaacaatatagatcagactccaaaacagttaaccaacaagcttacttttatgccagagacctcgaagtccatcccaaggacacatttgtgttcagtatagatggcaccgtactctctaatattccatactacaaaaaacatg

SEQ ID NO: 9960 - DNA, 399 bp, Glycine max
  Clone ID: LIB3039-026-Q1-E1-H7
gaaccacaacacaacacaacacaacacaattacacacacgaatttccttagttaggcattgctttgcgatggaaaaaatggaactggcagagacacctctacctttgctttcactaaaccacgtttcttttgtatgtaagagtgtgagtgagtcagtgaaattctatgaggatgtccttggatttttgctcatcaagaggccatcttctttcaaatttgaaggggcctggttattcaattatggcattggcattcacctgttggagtcagaaaaggttccggtgaaaaaaagagagatcaacccaaaagaaaatcatatatcgtttcaatgctcagacatgaaagttataatgcagaaactggatgcaatgaagattgagtatgtgacagcagttgtgg

SEQ ID NO: 9961 - DNA, 409 bp, Glycine max
  unsure (1)..(409): unsure at all n locations
  Clone ID: LIB3039-026-Q1-E1-H8
gaaggaaactaggcattggtttctctctctagcttggacgagtgaattagattcatcatcaagatgtcgtctctgatagcagaagatgtgaagagcagatcagaggtgtaccacggggacgaaatgtgccaagtgaagtccaaggagcttctcaaggaaatcgccctcccgaacggccttcttcccctcaaggacatggaggagtgcggctacgacagacaaaccggcttcgtctggctcaaacaaaagaagagttacacccacaagttcgacaagatcggaaagcttgtctcctacgcgcccgaggtaactgctcatgtccaacaaggtaaaattaccaaactcaccggggtntaagacaaggagctcttgctctggattacgctcagtgatatctatgttgatgacc

SEQ ID NO: 9962 - DNA, 371 bp, Glycine max
  Clone ID: LIB3039-026-Q1-E1-H9
ggcacaagtgagtttgttgatcgagataactagaaacagtgtgatgaaaatgaaggtccttgttttcttcgttgctacaattttggtagcatggcaatgccatgcgtacgatatgttccctctccgaatgaacactggctatggtgcccgtactccggaggtgaaatgcgcaagttggaggcttgctgtggaagcacacaacatctttggctttgagaccattcctgaagagtgcgttgaagcaacaaaggaatacatccatggcgaacaatatagatcagactccaaaacagttaaccaacaagcttacttttatgccagagacctcgaagtccatcccaaggacacatttgtgttcagtatagatggca

SEQ ID NO: 9963 - DNA, 365 bp, Glycine max
  Clone ID: LIB3039-027-Q1-E1-A1
cgggacacgtacatcatcaaaaaacacacacgacacactctcatacacacacgttgtctcgcacacattccttcattccgcagcagcaaacatctttatcttaaacgacaacaatggccgatgccgaggatattcaacccctcgtttgcgataatggaaccggaatggtcaaggctggttttgccggagatgatgcgccgagggcggtgttccccagcattgtggggcgtccacgtcacacgggagtgatggttgggatggggcagaacgatgcgtatgttggggacgacgctcaatccaagaggggtattttgactctcaaatacccaattgagcatggaattgtgagtaactgggacgacatg

SEQ ID NO: 9964 - DNA, 365 bp, Glycine max
  Clone ID: LIB3039-027-Q1-E1-A10
ggagcgaagaagatattagggtttttgagtgcggtgcggcgatcctagcactctcttctgcagctttcgccgacagcttcattcaccatggctgagcaaaccgagaaggcttttttgaaacaaccaaaagtgtttctcagctcgaagaaaactgggaagggaaagagacccggaaagggtgggaaccgcttttggaaatccattgggcttggatttaagactcccagggaagccatcgaaggaacctacattgacaagaagtgccccttcactggcaatgtttccatccgtggccgtatcttggctggaacatgtcacagtgctaagatgaacacgactattattgttaagaggaattatctcca

SEQ ID NO: 9965 - DNA, 392 bp, Glycine max
  unsure (1)..(392): unsure at all n locations
  Clone ID: LIB3039-027-Q1-E1-A11
gttattgcatgcttttggtctgatcacccattggtgtatgctgtcaagaactttagcattggtagagtagggctagataactgcattgctanggatagagtgtatggttttagtttttattatgctgtgattataatgctatttaaattaggctaagttcaacaagagggatctgcaaacggagtttagtttaaattagtctaaactcgcgagacatcggggtttagtacatgagtcttcggcatagaacacaggaacatctttaattagagaaatatctttaattgcatcaacttgtttagtangaagacccaacgcctttaaataatctatttttcaaactttactgctcacatttattattttcataggatagaacacacttttacttc

SEQ ID NO: 9966 - DNA, 387 bp, Glycine max
  unsure (1)..(387): unsure at all n locations
  Clone ID: LIB3039-027-Q1-E1-A12
ggcacaagtttgttgagatagctagaagcaataagatgaaaatgaaagtgcttgttttgtttgttgctacagttttggtagcatatgaatgccatggctcagactaccagaagttccctctccaaatgaaaactgggtttggtgggcaatacagcaatgaggtggcatgtgccagttggaggcttggcgtggaagcaaacaacgtagtcaagtggcaaactgttcctgcagcttgcggagagtacatagctgactacgttctangagaccaatatagatcagattccaaaacagttaaccaacaagcttatttctatgctaaatccctcaaactcaacaacanagatgtctttggcttggacgttgacgacactactctctctaatc

SEQ ID NO: 9967 - DNA, 355 bp, Glycine max
  Clone ID: LIB3039-027-Q1-E1-A2
ggcacaagtgagtttgttgatcgagataactagaaacagtgtgatgaaaatgaaggtccttgttttcttcgttgctacaattttggtagcatggcaatgccatgcgtacgatatgttccctctccgaatgaacactggctatggtgcccgtactccggaggtgaaatgcgcaagttggaggcttgctgtggaagcacacaacatctttggctttgagaccattcctgaagagtgcgttgaagcaacaaaggaatacatccatggcgaacaatatagatcagactccaaaacagttaaccaacaagcttacttttatgccagagacctcgaagtccatcgcaaggacacatttgtg

SEQ ID NO: 9968 - DNA, 376 bp, Glycine max
  Clone ID: LIB3039-027-Q1-E1-A3
ggcacaagtttgttgagatagctagaagcaataagatgaaaatgaaagtgcttgttttgtttgttgctacagttttggtagcatatgaatgccatggctcagactaccagaagttccctctccaaatgaaaactgggtttggtgggcaatacagcaatgaggtggcatgtgccagttggaggcttggcgtggaagcaaacaacgtagtcaagtggcaaactgttcctgcagcttgcggagagtacatagctgactacgttctaggagaccaatatagatcagattccaaaacagttaaccaacaagcttatttctatgctaaatcgctcaaactcaccaacaaagatgtctttgtcttgggcgttgacgacactac

SEQ ID NO: 9969 - DNA, 316 bp, Glycine max
  Clone ID: LIB3039-027-Q1-E1-A4
gacagcgaaacagagagtgatttcagtgagtgatcggtgttcacttgatctcatcataatcgtcagcgtcaattgaagaagatgccgatcagaaacatcgccgtcggaaggcctgaagaggcgactcaccccgacacgttgaaggcggctttggctgagttcatctcaaccttcatcttcgtgttcgccggctcaggctccggcatcgcctacaacaagctcaccgacaacggcgctgccaaccctgccgggctcatctccgcctccatcgcccatgcattcgccctcttcgtcgccgtctccgtcggcgccaaca

SEQ ID NO: 9970 - DNA, 198 bp, Glycine max
  Clone ID: LIB3039-027-Q1-E1-A5
ggtcacattgtgtacgtagctctgcacaactaagacaacggggtgataatatacgaggcgcttatgtcactcggaccgaatcattcagtgtcaatcggagcgactagtatgtgttatttcatgacgactggtgatatcgctcttgcacgcctcaacttggagcgcgagtcatctaagaagtaccttccacatgttttt

SEQ ID NO: 9971 - DNA, 366 bp, Glycine max
  Clone ID: LIB3039-027-Q1-E1-A6
gaaggtgcaagagtttgttgtgagctataagctagtttatcgtgaggagaatatgaagttgtttgttttctttgttgctgcagtagttttggtagcatggccatgccatggcgcaggctaccaaaggttccctctccgaatgaaaactggctatggtgagcgttcttcggaggtaaaatgcgcaagttttaggcttgctgtggaagcacacaacatccgagcctttaaaaccattcctgaagagtgcgttgaaccaacaaaggactacattaatggcgaacaatttagatcagactctaaaacagttaaccaacaagctttcttttatgctagtgaacgcgaagtccatcacaacgacatatttat

SEQ ID NO: 9972 - DNA, 367 bp, Glycine max
  Clone ID: LIB3039-027-Q1-E1-A7
ggtgttccacattcagatgttccttgcgtttccctttcattttccctcactttctcgctcgctaaacgcccctctctcgcctccaatggccgaccagctcaccgacgaccagatcgccgagttcagggaggccttcagcctcttcgacaaggacggcgatggttgtattactactaaggaacttgggactgtgatgcggtcactacggcaaaacccagctgaggcagaactgcacgatatgattaatgaggttgatgctgatggcaatggaaccatcgactcgccagagttcctcaacctgatggctcgcaagatgatagacaccgactccgaggaggagcttaacgacgctttccgtgtgttcgac

SEQ ID NO: 9973 - DNA, 348 bp, Glycine max
  Clone ID: LIB3039-027-Q1-E1-A8
gaaagttgttatccacaagacaacgtcatcaacattacacaatgcgcaaggtggtctctgtgatggcaacctctttctctccgacagcctctgtcagctccatcatcttccaaaaccctcccaaaggccttcttcttctctcccagcagcagcaacaacgctccttcgcctcttctgcaagctatgcaactctcaagctccctcgcgccttcgcactttctccaagacccctcctttccaaagggagaacagcacttgtgaaggctgctactatcgaagaaattgaagccgaaaaagccgcaattgaaaaagatgctaaaaccaggatggataggactattgataatg

SEQ ID NO: 9974 - DNA, 389 bp, Glycine max
  Clone ID: LIB3039-027-Q1-E1-A9
gagcgccttatctcctctcccaataatgcctatttccgcgtcccccacagaggagagagccacactctcgtggcgcaaaattccccacttcaaatacgacgccgttcagccccgcctccgtcgcaacaccaccaccaccctcactttcgccaccgccaccggcggctctaaattcgcctccgtctccgtggcggagcccaaactgcaccacgatttcatgcccacgccgtcccagctcttcaagaaccccctcgccgccttcgccatcgtgccccgtgacgccgctctcttctccgccggagccaacgccggcgccgccgccaaaaccgtcaacgcgccgctcgaccgcatcaagctcctcatgcagactcatggtgtgcgtcttgggc

SEQ ID NO: 9975 - DNA, 370 bp, Glycine max
  Clone ID: LIB3039-027-Q1-E1-B1
gacccgcccgtcaggtaccttgtgcaagtgtgagaagaccaacaagtgtgagatatatggggtgaatcccatgaagaaggtgatggaaggagatggcacaagcagattctccacagttcatgggaaacccattttccatttcttgaacacttcgactttctcggagtacacggtggtggattcggcctgtgtggtgaagtttgtgagcacagaccacagtctcagcatcaagaacctcaccttgctcagttgtggtgtctccacaggggttggagctgcttggaatacagctaatgtgcattcgggttcaactgtagctgttttcggcttaggagctgttgggctcgctgttgctgaaggggcacgagct

SEQ ID NO: 9976 - DNA, 460 bp, Glycine max
  unsure (1)..(460): unsure at all n locations
  Clone ID: LIB3039-027-Q1-E1-B10
taccggtctatgattcncgggcgcaaccacgcgtccatatacggtggcaaaaaacaacaaaaggggaagcaaagcagtgaccacggagagagagagagaggttttgacgcaacacactttcactgagaaaggatctctatctaccaaggagcagaataaaacccttctctctggtaagtgaataagagaatggcttcagatcggaaacttcacactttcgaggaggtggcaaagcacgaccagaccaaggattgctggctcatcatttctggcaaggtgtatgatgtcacccctttcatggaggatcatcccggaggtgatgaggttttgttatctgcaacagggaaagatgcaaccaatgattttgaagatgttggacacagtgattctgctagaggtatgatggaaaaatactacattggtgagattgattcatcaactgtaccactaaaacgtacct

SEQ ID NO: 9977 - DNA, 398 bp, Glycine max
  unsure (1)..(398): unsure at all n locations
  Clone ID: LIB3039-027-Q1-E1-B11
ggaacttctcacgttcatttctacacatccctagctctgtcgttccgtcgttgacgatggcgtttcgggtgcgaagccctgacctccgctttctctttcttctctctctcttgtccatcgcttccgccaatgtcttcttcgaagagcgtttcgatgacgggtgggaaaatcgatgggttaaatcagattggaaaaaagatgagaacgtggctggggagtggaaccacacctctggtcaatggaatggagacgctaatgacaaaggtattcaaaccagtgaggattacagattctatgctatttcagctgagtaccctgaattcagcaacaagggtaagacactagtcttttcaatttcctgttaagcacgancagaagcttgactgtggtggtggcta

SEQ ID NO: 9978 - DNA, 465 bp, Glycine max
  unsure (1)..(465): unsure at all n locations
  Clone ID: LIB3039-027-Q1-E1-B12
taccggtctgaggattcccgggcccaaccaagccttcagacaagccttcgttacggtggcaaaaaaacaacaaaagggggaaaaaaccccggaaccaaaccaacaattgggaaataaaaaaaaaaaaagaaaaaaaaaaaaaaaaaaacccttacccttcccaaacgcccgctttcctttgacgcttctgacccttgctttgtctgcgtcttccttccttccttccttctttctccgtgtgtcctaatggctctcccagaatcctcctcccgtcgcaactccctgatcccctccttcaactactcctcttcctccaaaacgctcnctctccaccacatgctcaacaccgcctccgctgccgccgccgccgctccctccccggccgccgggcaatctcgacgcccgatcgcgtggcctcatgattccctctcccagcgagtcacgcaagatcgagttgtactcccc

SEQ ID NO: 9979 - DNA, 291 bp, Glycine max
  Clone ID: LIB3039-027-Q1-E1-B2
ggcacaagtgagtttgttgatcgagataactagaaacagtgtgatgaaaatgaaggtccttgttttcttcgttgctacaattttggtagcatggcaatgccatgcgtacgatatgttccctctccgaatgaacactggctatggtgcccgtactccggaggtgaaatgcgcaagttggaggcttgctgtggaagcacacaacatctttggctttgagaccattcctgaagagtgcgtttaagcaacaaaggaatacatccatggcgaacaatatagatcagactccaaaac

SEQ ID NO: 9980 - DNA, 368 bp, Glycine max
  Clone ID: LIB3039-027-Q1-E1-B3
ggatataacactgtcactcttacaatctcagctcatagcattcttcttccaacgagaatcagtctttgtgttccaaatggctcgtacgaagcaaacagcaagaaagtccaccggaggaaaagctccaaggaagcagctcgccaccaaggcagtacgtaagtccgctccggcgacgggcggcgtgaagaagccccaccgtttcaggccggggacagtggctctgagggagattcggaagtaccagaagagcacggagcttctcataaggaagcttcctttccagaggctcgtaagggaaatcgctcaagacttcaagaccgatctacgcttccagagcagtgctgtctccgctcttcaggaagccgctg

SEQ ID NO: 9981 - DNA, 354 bp, Glycine max
  unsure (1)..(354): unsure at all n locations
  Clone ID: LIB3039-027-Q1-E1-B4
gattccaaccattctccaccattcacaatctaagcatcccaaaactaactattgtgctagctacttagttgtgtaagatggcttccaagggaaatgttgcatccacttatgttgcactactcatgtgtctctatttgctttcattcaccatggtgagctctcaaatctcaaccccaccaccaatgccttctcaaaacggtacatgtcctataaatgtacttcgattgggtgtgtgtgccaatgtgttgaacctggtcaatgttacactaggatcaccaccaaccctcccctgttgcaccctcattcanggtttggctgatgttgatgttggtgtttgcctttgcactgccctca

SEQ ID NO: 9982 - DNA, 367 bp, Glycine max
  Clone ID: LIB3039-027-Q1-E1-B5
gggcacaagtttgttgagatagctagaagcaataagatgaaaatgaaagtgcttgttttgtttgttgctacagttttggtagcatatgaatgccatggctcagactaccagaagttccctctccaaatgaaaactgggtttggtgggcaatacagcaatgaggtggcatgtgccagttggaggcttggcgtggaagcaaacaacgtagtcaagtggcaaactgttcctgcagcttgcggagagtacatagctgactacgttctaggagaccaatatagatcagattccaaaacagttaaccaacaagcttatttctatgctaaatccctcaaactcaccaacaaagatgtctttgtctttgacgttg

SEQ ID NO: 9983 - DNA, 347 bp, Glycine max
  Clone ID: LIB3039-027-Q1-E1-B6
gactccgcagctgcagagctcaaaaccctatagaggaggaagagagagcgtgcaagttccggccaccaccgaccatgacattcaagcgcaggaatggaggtcgcaacacacacggccgcggccacgtcaaattcatccggtgctccaactgtggcaaatgctgtcccaaggacaaggccatcaagaggtttctggtgacgaacattgttgaacacgctgcagtcagagatgtgcatgaagcttgtgtctatgaacaatatactcttccgaaactctatgtgaagatgcagtactgtgtttcttgtgccatccactctcatgttgtgagggttcgatcccgcactgac

SEQ ID NO: 9984 - DNA, 358 bp, Glycine max
  Clone ID: LIB3039-027-Q1-E1-B8
ggcacaagtgagtttgttgatcgagataactagaaacagtgtgatgaaaatgaacgtccttgttttcttcgttgctacaattttggtagcatggcaatgccatgcgtacgatatgttccctctccgaatgaacactggctatggtgcccgtactccggaggtgaaatgcgcaagttggaggcttgctgtggaagcacacaacatctttggctttgagaccattcctgaagagtgcgttgaagcaacaaaggaatgcatccatggcgaacaatatagatcagactccaaaacagttaaccaacaagcttacttttatgccagagacctcgaagtccatcccaaggacacatttgtgttc

SEQ ID NO: 9985 - DNA, 392 bp, Glycine max
  unsure (1)..(392): unsure at all n locations
  Clone ID: LIB3039-027-Q1-E1-B9
aataacanaacaacatttggaacctaacttgggtgggctcactgttgagcaggctatccagagcaagaagctgttcatcttagatcaccatgactatctcattccatatttgaggaaaataaatgcaactaccacaaagacttatgctaccagaaccatatttttcttgaaaagtgatggaactttgacgccattggccattgagttaagtaagccgcatcctcaaggtgaagaatatggtcctgttagcgaagtctacgtgccttcgagcgaaggagttgaagcttatatttggttattggcaaaggcttatgttgttgtaaatgactcgtgctaccatcaactcgttagccattggctaaacactcatgcngttgttgagccatcgtcat

SEQ ID NO: 9986 - DNA, 344 bp, Glycine max
  Clone ID: LIB3039-027-Q1-E1-C1
ggaaacagagagtgatttcagtgagtgatctgtgttcagttgatctcatcacaatcgtcaccgtcaattgaagaagatgccgatcagatacatcgccgtcggaacgcctggagaggcgacgcaacccgacacgttgaatgcggcgttggctgagttcatctcaaccttcatcttcgcgttcgccggctcaggctccggtatcgcctagaacaagctcagcgaaaacggcgctgcgatccctgccgggctcatctcagcctccatcgcacatgcaatcgccctcttcgtcgccgtctccgtctggtccaacatctccggtggccacgtcaaacccgccgtcacct

SEQ ID NO: 9987 - DNA, 396 bp, Glycine max
  Clone ID: LIB3039-027-Q1-E1-C10
gctttaaagagacttttggatttactccatcatggcttttgtggcttagatatagcagcttcttagttttgtatccaacaggcataagcagtgaagttggtttaatatacattgccttaccattcattaaggcgtctgggaagtattgcataaggatgccaaacaaatggaactcatcatttgattacttctatgctgcgattgttgcaatgggaatctacgttccaggtagccctcacttgtacacatacatgcttgctcagaggaagaaagctctctccaaatcgaagagagagtaatgcaacatcagtaattttcattgattttgggtcaaacgtaggatatatacacatgtcatatcttggtttggattccaatataggtatcagggaaacg

SEQ ID NO: 9988 - DNA, 397 bp, Glycine max
  Clone ID: LIB3039-027-Q1-E1-C11
ggcacaagtgagtttgttgatcgagataactagaaacagtgtgatgaaaatgaaggtccttgttttcttcgttgctacaattttggtagcatggcaatgccatgcgtacgatatgttccctctccgaatgaacactggctatggtgcccgtactccggaggtgaaatgcgcaagttggaggcttgctgtggaagcacacaacatctttggctttgagaccattcctgaagagtgcgttgaagcaacaaaggaatacatccatggcgaacaatatagatcagactccaaaacagttaaccaacaagcttacttttatgccagagacctcgaagttcatcccaaggacacatttgtgttcagtatagatggcaccgtactctctaatattccatactac

SEQ ID NO: 9989 - DNA, 320 bp, Glycine max
  Clone ID: LIB3039-027-Q1-E1-C2
gacacaccgtttgttctattcttaactcaacttctgctacccactctcttcttccaagtccaaccacgcttttctctacagtcatgggcaaggtcaagatcggaatcaacggatttggaagaattggccgtttggttgccagagtcgctctgcaaagagacgatgtggagctcgttgccgttaacgaccctttcattaccaccgattacatgacatacatgtttaaatacgacagtgttcacggacactggaagcatcacgatgtcaccgttaaggacgagaagacccttctcttcggtgacaagccagtcactgttttt

SEQ ID NO: 9990 - DNA, 370 bp, Glycine max
  Clone ID: LIB3039-027-Q1-E1-C3
ggcacaagtgagtttgttgatcgagataactagaaacagtgtgatgaaaatgaaggtccttgttttcttcgttgctacaattttggtagcatggcaatgccatgcgtacgatatgttccctctccgaatgaacactggctatggtgcccgtactccggaggtgaaatgcgcaagttggaggcttgctgtggaagcacacaacatctttggctttgagaccattcctgaagagtgcgttgaagcaacaaaggaatacatccatggcgaacaatatagatcagactccaaaacagttaaccaacaagcttacttttatgccagagacctcgaagtccatcccaaggacacatttgtgttcagtatagatggc

SEQ ID NO: 9991 - DNA, 354 bp, Glycine max
  Clone ID: LIB3039-027-Q1-E1-C4
ggcacaagtgagtttgttgatcgagataactagaaacagtgtgatgaaaatgaaggtccttgttttcttcgttgctacaattttggtagcatggcaatgccatgcgtacgatatgttccctctccgaatgaacactggctatggtgcccgtactccggaggtgaaatgcgcaagttggaggcttgctgtggaagcacacaacatctttggctttgagaacattcctgaagagtgcctttgagcaacaaaggattaatccaatggcgaacaatataaataagactccaaaacatttaacaaacaagcttacttttatccagagacctcgaagtccatcccaaggacacatttgtg

SEQ ID NO: 9992 - DNA, 372 bp, Glycine max
  Clone ID: LIB3039-027-Q1-E1-C5
ggggatgccgggataccctgcacaacagaagtcaagacgattataaggtttctgctggaagagagactaagtgaagatagatttggggtcaatacttcagtacctgaactcatgcaggacatttctggacagtgtttgccttcaatacttgcaagcctcactttattgcaatcaaagattgggtgcattcttctctggaattttgatgctaaaatgccaaatgtatgctggaacaccaatgaagccataaaagggaataaacgtatgaaagggttaagctactgtaagcacatgtatatcatgattataacaatgcaattctattgtatttcttagcttttgggcaagatcaatgtcagtaaaccaaatgtt

SEQ ID NO: 9993 - DNA, 362 bp, Glycine max
  Clone ID: LIB3039-027-Q1-E1-C6
gacccaaacacttctctttttctctctctacactctattcaacccttcacattttctctcttctttatcttaaattacttttccatggaggaaagcaagaaacgagtccgggacgagtccagctactcacccgagtcccaaactcagctggtcgactctcccgagtctgaaagtcagcgggtcgactcacctgagtctaagattcgtcgagttgactcgtccgagtctcaactcgactcggtccttgactcggaggtgcgtctacaagacgacatttttaacatacttgacgacgccgataatgtgcctgagcgtgactcggtgcagggtcttgactcagtgatcaaaagcttcgaagatga

SEQ ID NO: 9994 - DNA, 372 bp, Glycine max
  Clone ID: LIB3039-027-Q1-E1-C7
gacaaatctttcgctaacactcattaattgcaagaatggcacttcgttgcttggtgatgtccctttctgttctcttcactcttggtcttgcgagagaaagccatgccagagacgaagatttttggcatgctgtttggccaaacactcccattccaagttcattgcgagatcttctaaagcctggccctgcaagtgttgaaatcgatgatcaccctatgcaaattgaagaaacacagtacccgaaaaccttcttctataaagaagaccttcatccaggcaaaacaatgaaagtataattcagcaagcctccctttcaacaaccatggggtgttggtacatggttaaaggaaattaaagacactactaaagaag

SEQ ID NO: 9995 - DNA, 384 bp, Glycine max
  Clone ID: LIB3039-024-Q1-E1-H12
ggttctagtgtgtgattgtttgttgttgtaactcgttcttcttcttttgttgttctgtgtttgtgtttgttttttctctcacctgaaaatgtcttgctgcggtggtaactgtggttgcggaagctcctgcaagtgcggcaacggctgcggaggctgcaagatgtacccagacttgagctacactgagtcaaccaccaccgagaccttggtcatgggagtggcacctgttaaggctcaatttgagggtgctgaaatgggtgtgcccgctgagaacgatggctgcaaatgtggaccaaactgctcctgcaacccctgcacttgcaagtgaggtgttgggagagcaagcttcaagcagagatagcccttaattaggaataatgatag

SEQ ID NO: 9996 - DNA, 98 bp, Glycine max
  Clone ID: LIB3039-022-Q1-E1-F6
ggggggggggggggggggggggggggggcggggggggggggaggggggggggggaggtagcgcagttggtagaatcgggcaagcagcgtagagggggg

SEQ ID NO: 9997 - DNA, 274 bp, Glycine max
  Clone ID: LIB3039-022-Q1-E1-F7
ggcgcattgaacgaaaattagggtttgtagtgtagcaggaacaagcagcaatggcgccgaaggtaacacgcaaggttagcagaaaccccgaattgataaggggaattgggaagtactcgaggtcgcagatgtaccacaagaggggcatttgggctatcaaggccaaaaatggtggcgttttacctcgccacgaccctaaacccaaacctgaaacacccgctgaaaaaccacccaaattttaccctgctgatgatatcaagaaaccccttgtcaa

SEQ ID NO: 9998 - DNA, 343 bp, Glycine max
  Clone ID: LIB3039-022-Q1-E1-F9
gagtgcacaagtgagtttgttgatcgagataactagaaacagtgtgatgaaaatgaatgtccttgttttcttcgttgctacaattttggtagcatggcaatgccatgcgtacgatatgttccctctccgaatgaacactggctatggtgcccgtactccggaggtgaaatgcgcaagttggaggcttgctgtggaagcacacaacatctttggctttgagaccattcctgaagagtgcgttgaagcaacaaatgaatacatccatggcgaacaatatagattagactccaaaacacttaaacaacaagcttacttttatgccaaagacctcgaagttcaatcc

SEQ ID NO: 9999 - DNA, 360 bp, Glycine max
  unsure (1)..(360): unsure at all n locations
  Clone ID: LIB3039-022-Q1-E1-G10
gcctcaacaaaaaacagcacaacgaaccactctgaagccgctcacgttatccacaacactctcaaccctccttaaaccctaaccaatccaaccatggcttcttcttccaccttcactgcaatgtccgcctgcaagctctcctcctccgccgccatctcctccttcccctcgcgccgccgctccaacgccgtcgttctgtcgaggcgcagccgcgccgccagggtctccgccatggccaaggagttgcacttcaacaaagacggcaccgcaattaagaagctccagagcggtgtgaacaagctcgcggatctggttggggtcacgcttggtcncaaaggaagaaatgttgttctcgagagc

SEQ ID NO: 10000 - DNA, 305 bp, Glycine max
  Clone ID: LIB3039-022-Q1-E1-G11
gacagatatcttgctaaggttttaggaaaagacactgtccccccagttaacacaggttacagcaatggctttctttggtagaattgggaatttattaagacagacagcaagcacgcaggttagttcaaaagtgcgatcatccccttcgttttttcaggctatatgcaatatgtcatctgctccaagcacaaagctgtttatcggaggtgtttcatattctactgacgagcaaagtttgagggaagctttttcaaaatatggtgaagttgttgatgctacgataattacggatcgtgaaactggta

SEQ ID NO: 10001 - DNA, 338 bp, Glycine max
  Clone ID: LIB3039-022-Q1-E1-G12
gatagcgaagcagagagtggtttcagtgagtgatcggtgttcacttgatccttcaaaagtcgtcatcatcatcatcatcatcaccgttgattgaagaagatgccgatcagaaacatcgccatcggaaggcctgaagaggctactcaccccgacacgttgaaggcggggttggctgagttcatctccaccttgatcttcgtgttcgccggttcaggttccggcatcgcctacaacaagctcaccgataacggcgccgccactcccgccggcctcatctccgcttccatcgcccatgctttcgccctcttcgtcgccgtcaccgtcagcgccaacatctc

SEQ ID NO: 10002 - DNA, 327 bp, Glycine max
  Clone ID: LIB3039-022-Q1-E1-G2
gatagcgaaacagagagtggtttcagtgagtgatcggtgttcacttgatccttcataagtcgtcatcatcatcatcatcatcaccgttgattgaagaagatgccgatcagaaacatcgccatcggaaggcctgaagaggctactcagcccgacacgttgaaggcggggttggctgagttcatctccaccttgatcttcgtgttcgccggttcaggttccggcatcgcctacaacaagctcaccgacaacggcgccgccactcccgccggcctcatctccgcttccatcgcccatgctttcgccctcttcgtcgccgtctccgtcggc

SEQ ID NO: 10003 - DNA, 387 bp, Glycine max
  Clone ID: LIB3039-022-Q1-E1-G3
ggttcccaaccatccacctttccctttccgaacccaatcaagcttagcaagagcagcacccaataacgtgccaccacctgtcacccaaacggcacggcactagtcgttttttcactttaacactcctccaaaaatcaagtctaaaccaaaaagcgttggttaagtatcacttaaactcacataatcaaacatacaaacaagctacatttgaaattgaaagagcaacaacaaatttacaactaagaagaagaagaagaagattgcattggagaacaatggctagtggaagaagctacggagacgcgaaccagaaagtaaaatacgtgttcaacgtggtgccaattgggtattccgcggtggggaagtcgcagatacgtgcacgcttcg

SEQ ID NO: 10004 - DNA, 304 bp, Glycine max
  Clone ID: LIB3039-022-Q1-E1-G4
ggcacaagtgagtttgttgatcgagataactagaaacagtgtgatgaaaatgaaggtccttgttttcttcgttgctacaattttggtagcatggcaatgccatgcgtacgatatgttccctctccgaatgaacactggctatggtgcccgtactccggaggtgaaatgcgcaagttggaggcttgctgtggaagcacacaacatctttggctttgagaccattcctgaagagtgcgttgaagcaacaaaggaatacatccatggcgaacaatatagatcagactccaaaacagttaaccaacaa

SEQ ID NO: 10005 - DNA, 321 bp, Glycine max
  Clone ID: LIB3039-022-Q1-E1-G5
ggattgtatatcatttacaatttcaatctctctcgctctctgtctctctctctctagacttagattttgtgaatggctgaagtggaagagggacaggtcatcggcgtccacaccgttgatgagtggaagctgcaactccagaatgcagaagactccaaagaactgattgtggtggattttactgcttcctggtgtggtccatgccgttttatggccccagttcttgcagagattgcaaagaagactcctgaattgatcatcctcagagtggatgtggatgaagtgaggcctgttgctgaggaatattccattgaggccatg

SEQ ID NO: 10006 - DNA, 319 bp, Glycine max
  Clone ID: LIB3039-022-Q1-E1-G6
ggggtgccattgttgctgtcatcatccgcagctgctgttattcgcaccgcgagcagacagtgagccatggccgtcggaaagaacaagcgcagctccaaggggaaaaagggtggcaagaagaaggcagctgatccctttgccaagaaggattggtatgagggtagggccccttctctttttcaagtgaaaaatgttggcaaaaccctcgtctctcgtacgcagggtagcaagattgcttctgaaggacttaggcatagagtgtttgaggtctcctgtgctgatggtcaaggggatgaggatcatgcattcaagaagatta

SEQ ID NO: 10007 - DNA, 377 bp, Glycine max
  Clone ID: LIB3039-022-Q1-E1-G7
gacagcatatcaataatctattttatactatacccacattttgataattatttttctagttgataagccatggctactcgaggaaagcttgaggttgacgttgatctcaagtctaacgcagacaagtactggcaaacccttaggaactccactgaaatattccccaaggccttccccaatgattacaaaagcattgaggttcttgagggtgatggcaaatcacctggttctatccgccacataagttatggtgaaggttcaccacttgtgaagtcatcctttgagaagattgaggctgttgatgaagaaaagaaggtactgtcgtacactatcatgtatggagaactcctccagcactacgaaacattcaagggaga

SEQ ID NO: 10008 - DNA, 328 bp, Glycine max
  Clone ID: LIB3039-022-Q1-E1-G8
agtacgggtagaacatccgtcctgtaggacgcgtaaaaactactacaagaggctgcaagggacagataacatgaggtacattccgttatcataaggactagttctcctagctttacaggaacatgccatgagccaaccctaggtgtatgagtatggccttacttttgctcacaacgagcttgaagaagaagacataacatacttcaaccatgaatttctcatgagcatgggaatctccatagacaaacacaggctagagattctcaagcttgcaaggaaagtgaagggaaagagggcggcattaccacgtcctgtggcaaggatcatg

SEQ ID NO: 10009 - DNA, 352 bp, Glycine max
  Clone ID: LIB3039-022-Q1-E1-G9
ggcacaagtgagtttgttgatcgagataactagaaacagtgtgatgaaaatgaaggtccttgttttcttcgttgctacaattttggtagcatggcaatgccatgcgtacgatatgttccctctccgaatgaacactggctatggtgcccgtactccggaggtgaaatgcgcaagttggaggcttgctgtggaagcacacaacatctttggctttgagaccattcctgaagagtgcgttgaagcaacaaaggaatacatccatggcgaacaatatagatcagactccaaaacagttaaccaacaagcttacttttatgccagagacctcgaagtccatcccaaggacacattt

SEQ ID NO: 10010 - DNA, 334 bp, Glycine max
  Clone ID: LIB3039-022-Q1-E1-H1
ggaagagaaaattagcaaaggaaaaaaagaaaaaagagaaagaaggagagagcgagcagaataaggtgtctctcttggactgattcgcttcaatcgcatctctattctcgagtactcattcatttttatatacctctcttccttctctctcgcagcctcaacacagagaaaaaagtggacatagttatttaatttatttttgttcatggccgttcaagctcaatatccatccaatgtcctttttctaaacagcagaaacgggcaagaagggcatgagtattcttcagtgcaaccacaagcaggaggagttgtactcttgaatcagcctcacatg

SEQ ID NO: 10011 - DNA, 354 bp, Glycine max
  Clone ID: LIB3039-022-Q1-E1-H10
ggccactcgcaccaatcactacgtgtttgcattcccacactctcctcatattccaacgcctccactccgcgatccgctatggattctcgtgaacagcctcagccataaccgccaaacatgatggtgggacccaccgtgtacccttcgatgttggcccccgccatcgctagattcccttacagcaacaacaacaacatcaacagcaatcctcctcctccttcttcggagcctctcaacagcgacgccaacatcaaccataataacagcacgttcgaggcgttgaagccttgtgcgctggccgcctcggaatcgtcgatgaagaatcggggccggcccagaaaatactcgcccgat

SEQ ID NO: 10012 - DNA, 353 bp, Glycine max
  Clone ID: LIB3039-022-Q1-E1-H11
gctacagttttggtaacatatgaatgccatggctcaaactaccaaaagttccctccccaaatgaaaactgggtttggtgggcaatacaacaatgaagtgtgcaagtgccaatttgaggcgtttggtgtaaacacacaccgtatataaatgtcacactgtgcccgcacatttcgcagagtatatatctcactacattctctgtgaccccaatagatcatcattccacaacacattccaccaaacttattatctactactcaacccccaacctcatcaccaacaatgtcgtcgtcgtcgtcgttgtcgacaatactctccccaatcaccactattttgctaaccatccaattttt

SEQ ID NO: 10013 - DNA, 352 bp, Glycine max
  Clone ID: LIB3039-022-Q1-E1-H12
gaaggcagcagcagagcgaaggaagtagaaatgcactctcactcacacccacataccttgccacgcccacattcactactcccttcttcttttcttcttcttcttcctccttcctctctccgcatctccaacactaagaggctgcaatcctcaactttcgccctctcccaaaatgaaaccaaattcccaacgcagccttacaagaattccaacaattcgcctcaatcacttgctcacatctccaattgcaaattccccttggctcggccccttgtttcttcttctcatccccctagtactaattcatccaccaagcttctcaactctatgctgctcttcgccttcctcacac

SEQ ID NO: 10014 - DNA, 380 bp, Glycine max
  Clone ID: LIB3039-022-Q1-E1-H2
gacacataacacaacgcaacattcctttaaaatatggattggttctcctggctttccaaaacaggccttgagccaaccctagtgtatgagtatggccttacttttgctcacaacgagcttgaagaagaagacataacatacttcaaccatgagtttctcatgagcatgggaatctccatagccaaacacaggctagagattctcaagcttgcaaggaaagtgaagggaaagagggcggcaccaccacgccctgtggcaaggctcatggtggcgatcaagaggacagagaggtgcttagccaattacattcgctcgttcatcagcacttggtaagaagagtcatcagcacttgtggtgtggccatcatcatcatcaaggtc

SEQ ID NO: 10015 - DNA, 323 bp, Glycine max
  Clone ID: LIB3039-022-Q1-E1-H3
ggggaacatcatcacattacattagattggtggtaatggcagcgtcactacaagcagcagctagtttcatgcaacccagcaagttgaacaggagcaacactttgcagcaaaagtctagccagtccatttccaaggcttttggtttggaaacagttggagctaagaatgtcacatgcccccttcaggctgatcttaacgatctggctcacaagtgtgttgatgctaccaaaattgcatgattcgcccttgccacctctgccctcgtagtctctgaggcaagtgctgaaggtgttccacagaggctaaccgtcgacgaaatccag

SEQ ID NO: 10016 - DNA, 273 bp, Glycine max
  Clone ID: LIB3039-022-Q1-E1-H4
agggaacatatacacaaattacatagcctcagtacacacagacatactcattcagaatgactgtttccattgccaagttcgacgcccttgctctatgtttgttccttcacttggccttcaacacaaaacccctcctaacaccagaaccaaagctagtggatgataagcatcggaatccttatcagccaagagtaagatactacgtgtagctacattgggctgatgacagaggcctcacactaggccaaacaaagaacaatacatgccctcatt

SEQ ID NO: 10017 - DNA, 351 bp, Glycine max
  Clone ID: LIB3039-022-Q1-E1-H5
ggttcactttcttccaacctctaacctacctctttttcttctctctcaacaacttcaccttcttcctcctcgatcatgtctcacttcaagggcaagtaccatgatgagcttatcgccaatgctgcgtacattggcactcctggaaagggtattcttgctgctgatgagtcaacagggacaattggcaagcgtttggccagcatcagtgtagagaacattgaatccaacaggcgagctcttagggagctgcttttcactgctcctggtgttcttcaatatctcagtggtatcatcctctttgaggaaaccctctaccagagcacagctgcaggcaagccctttgtgaatgtc

SEQ ID NO: 10018 - DNA, 315 bp, Glycine max
  Clone ID: LIB3039-022-Q1-E1-H6
ccataagtccagatgcggggaaattccgcaccagcaaaaacactcttcgttatcttttctcatactccgcggcgtacatgcgatgagttcgggaaaccttaacgcatcataggaactcaagtcatggctggacctgcacctgacggatcacagttcgatactcgtcaatattattctaagatgattgacttactttcatctgatggacaggacttcttcacatcctatgacgaggtttatgatggttttgacgctataggtttgcacgaaaatcttctcaggggaatttacgcagatggttttgagaagccaact

SEQ ID NO: 10019 - DNA, 351 bp, Glycine max
  unsure (1)..(351): unsure at all n locations
  Clone ID: LIB3039-022-Q1-E1-H7
gaacctacgccgagtgaaaccccaatcccaatacacccccaactcacaaagccatgtctccaggtcctgttgtcgacgcgtcccctgaggttgaagcagagcaacaacttccctccgtcgatgacgcaacccagttgaagaaatcccagccgcaggaggatgatgctcccgttgtcgaggacgtgagggatgatgacaaggacgacgacgatgaggacgacgacgacgatgatgaagatgacaaggaagacgatgctctangtggtgctgagggttcaaagcagagcacaagtgagaagaagagtcgaaaagcaatgttgaagctgggactaaaacctgtcaccggtgtta

SEQ ID NO: 10020 - DNA, 306 bp, Glycine max
  Clone ID: LIB3039-022-Q1-E1-H8
gaacgcaagtttacgctaagccctatgcctcacagcacacagacttacgctttcggtgagttctctccgccgtcacagtagcactcacgtctccgataagttgaatggcaatgtcagttaatgatgatacactggttgcggctgaaactgacgatcagacagaagaaatgtcatcatctgaatcagaacaggatcaagatgtgaaattaactgaaccatctatcaatgcactgtacaacacagatgctctaccagagaaacttggagacatcagttgtccacagaatgtgcaatggatacatcgac

SEQ ID NO: 10021 - DNA, 359 bp, Glycine max
  Clone ID: LIB3039-022-Q1-E1-H9
ggttctagtgtgtgattgtttgttgttgtaactcgttcttcttcttttgttgttctgtgtttgtgtttgttttttctctcacctgaaaatgtcttgctgcggtggtaactgtggttgcggaagctcctgcaagtgcggcaacggctgcggaggctgcaagatgtacccagacttgagctacactgagtcaaccaccaccgagaccttggtcatgggagtggcacctgttaaggctcaatttgagggtgctgaaatgggtgtgcccgctgagaacgatggctgcaaatgtggaccaaactgctcctgcaacccctgcacttgcaagtgaagtgttgggaaagcaagcttcaagcagagat

SEQ ID NO: 10022 - DNA, 340 bp, Glycine max
  Clone ID: LIB3039-023-Q1-E1-A1
ggcacaagtgagtttgttgatcgagataactagaaacagtgtgatgaaaatgaaggtccttgttttcttcgttgctacaattttggtagcatggcaatgccatgcgtacgatatgttccctctccgaatgaacactggctatggtgcccgtactccggaggtgaaatgcgcaagttggaggcttgctgtggaagcacacaacatctttggctttgagaccattcctgaagagtgcgttgaagcaacaaaggaatacatccatggcgaacaatatagatcagactccaaaacagttaaccaacaagcttacttttatgccagagacctcgaagtccatcca

SEQ ID NO: 10023 - DNA, 385 bp, Glycine max
  Clone ID: LIB3039-023-Q1-E1-A10
ggtgcacaagtgagtttgttgatcgagataactagaaacagtgtgatgaaaatgaaggtccttgttttcttcgttgctacaattttggtagcatgggaatgccatgcgtacgatatgttccctctccgaatgaacactggctatggtgcccgtactccggaggtgaaatgcgcaagttggaagcttgctgtggaagcacacaacatctttggctttgagaccattcctgaagagtgcgttgaagcaacaaaggagtacatccatggcgaacaatatagatcagactccaaaacagttaaccaacaagcttacttttatgccagagacctcgaagtccatcgcaaggacacatttgtgttcagtatagatggcaccgtactctcta

SEQ ID NO: 10024 - DNA, 377 bp, Glycine max
  Clone ID: LIB3039-023-Q1-E1-A12
gaaggtgcaagagtttgttgtgagctataagctagtttatcgtgaggagaatatgaagttgtttgttttctttgttgctgcagtagttttggtagcatggccatgccatggagcatgctaccaaaggttccctctccgaatgaaaactggctatggtgagcgttcttcggaggtaaaatgcgcaagttttaggcttgctgtggaagcacacaatatccgagcctttaaaaccattcctgaagagtgcgttgaaccaacagaggactacattaatggcgaacaatttagatcagactctaaaacagttaaccaacatgctttcttttatgctagtgaacgcgaagtccatcacaacgacatatttatattcggcatag

SEQ ID NO: 10025 - DNA, 395 bp, Glycine max
  Clone ID: LIB3039-023-Q1-E1-A2
ggcacaagtgagtttgttgatcgagataactataaacagtgtgatgaaaatgaaggtccttgttttcttcgttgctacaattttggtagcatggcaatgccatgcgtacgatatgttccctctccgaatgaacactggctatggtgcccgtactccggaggtgaaatgcgcaagttggaggcttgctgtggaagcacacaacatctttggctttgagaccattcctgaagagtgcgttgaagcaacaaaggaatacatccatggcgaacaatatagatcagactccaaatcagttaaccaacaagcttacttttatgccagagacctcgaagtccatcccaaggacacatttgtgttcagtatagatggcaccgtactctctaatattccatact

SEQ ID NO: 10026 - DNA, 290 bp, Glycine max
  Clone ID: LIB3039-023-Q1-E1-A4
gactgcgaaccagtagggactcccattccgactcttagccgccgatctctcagggcttgcatcttctcacgtaagctgtgaagatgtacacatcatggaagaaaatccacaaggataacgatgctgaaccaactgaatttgaagagtcagttggacatgcattgtttgatctggaaaataccaatcaggagcttaaaagtgatctgaaggatttatacataaactcagccgtgcaagttgatgtttctggaaaccgcaaggctgttgttattcatgtcccttacagatta

SEQ ID NO: 10027 - DNA, 362 bp, Glycine max
  Clone ID: LIB3039-023-Q1-E1-A5
gggccattggaacaggaaaggttgcaactcctgctcaggctcaagaggttcatgctgatttaaggaaatgggttcatgacaatgtgagtgctgaagttgctgcatctgtaagaattatctatggaggctctgtaaatggaggaaactgcaaagaattggcagcacagcccgatgttgatggatttttggttggtggtgcatccctcaaggcggaatttgtggacatcataaacgctgctactgtgaagaagaattgaaattcgtagttaggaactgataatgctgcctttcaagctgcttcggaaattgctgtttttgggttctgggttctgtgctttgtgggcaatgtattgaactcggtt

SEQ ID NO: 10028 - DNA, 340 bp, Glycine max
  Clone ID: LIB3039-023-Q1-E1-A7
gagattcgtcctttcgttttctctttctttctttcgggcaacggagagcacactactttcactgcagcagcatcaatggcggcgaccgagatcgagaacataacgacaatagacccagagacggagtttctggcgtcgaggatacggaactggaacgactgggagaccttcaaggataacgtgaggccgctcaacagaggccgcaacgtcaacctcttgaaccactccctcaactcccacaccgattacgaactcaagatatccctcatggaacaacgaatgaagctgattgaagccatccaagaataccaaggtgatgacgctcttcttccctggatac

SEQ ID NO: 10029 - DNA, 395 bp, Glycine max; identical to SEQ ID NO: 7929
  Clone ID: LIB3039-023-Q1-E1-A8

SEQ ID NO: 10030 - DNA, 393 bp, Glycine max
  Clone ID: LIB3039-023-Q1-E1-A9
gacagcatatatatcaataatctattttatactatacctacattttgataattttctttgtagttgatagccatggctacccgtggaaagcttgaggttgacattgatctcaagtccaacgcagacaagtactggcaaacccttaggaattctactgaaatattccctaaggccttcccacatgattacaaaagcattgaggttcttgagggtgatggcaagtctcctggttctatccgccacataagttatggtgaaggttcaccacttgtgaaatcatcctttgagaagattgaggctgttgatgaggaaaagaaggtagtgtcgtacactatcattgatggggaactcctccagcactacaaaacattcaagggagacatttcagtgact

SEQ ID NO: 10031 - DNA, 328 bp, Glycine max
  unsure (1)..(328): unsure at all n locations
  Clone ID: LIB3039-023-Q1-E1-B1
agggcagttcaattccaatatattccattctctctgtgtatttccctacctctcncttcaagatgcagatcttcgtcaagaccctcaccggcaagaccatcacccttgaggtggaaagctctgacaccatcgacaacgtcaaggccaagatccaggacaaggaaggaatccccccggaccagcaacgtctcattttcgccggaaagcaacttgaggacggccgtacccttgctgactacaacattcagaaggagagtactcttcacctcgtcctccgtctccgtggtggcatgcagatcttcgttaagacactcaccgggaagaccat

SEQ ID NO: 10032 - DNA, 370 bp, Glycine max
  Clone ID: LIB3039-023-Q1-E1-B10
ggcacacgtttgttgagatagctagaagcactatcatgaaaatgaaagtgcttgttttgtttgttgccacagttttggtaacatatgaatgccatggctcagactaccagaagttccctctccaaatgaaaactgggtttggtgggcactacaccaatgacgtggcatgtgacagttggaggcttgacgtggaagcacatcacgtactcaactgtcacactgttccagctgcttgcgtacagtacaaaactgactactttctacgagaccactctatactaaagtccatcacagttaatcactcaagcttacttctaagctaaatccctcaaactcaccaacagtatatgtccttgacgtggacgttgac

SEQ ID NO: 10033 - DNA, 374 bp, Glycine max
  Clone ID: LIB3039-023-Q1-E1-B11
atctgttgagtaggtacccgagtgaggggcttgtggaggagcagattgaggctaaggacatgctcaacattcagcgttaggttggtgggtgggttggtttgttcttgccaaggtttttgaaatgcagtcacaaggtttttgaaatacagtcacaattgcagtcacaatttgtattcttctttatctaatgggtgttgtgccagtcagttatttttcttttgtcactgattttcttttttattttgggttggcttggtttcttaatcagaatggcataatttgtgagctttaagtctctacaattataatatgatgccaatgccattgtttaatgactataaattgacataatatatattttagttgatgaaaaa

SEQ ID NO: 10034 - DNA, 384 bp, Glycine max
  Clone ID: LIB3039-023-Q1-E1-B12
gaaggtgcaagagtttgttgtgagctataagctagtttatcgtgaggagaatatgaagttgtttgttttctttgttgctgcagtagttttggtagcatggccatgccatggcgcaggctaccaaaggttccctctccgaatgaaaactggctatggtgagcgttcttcggaggtaaaatgcgcaagttttaggcttgctgtggaagcacacaacatccgagcctttaaaaccattcctgaagagtgcgttgaaccaacaaaggactacattaatggcgaacaatttagattagactctaaaacagttaaccaacaagctttcttttatgctagtgaacgcgaagtccatcacaacgacatatttatattcggcatagataacac

SEQ ID NO: 10035 - DNA, 74 bp, Glycine max
  Clone ID: LIB3039-023-Q1-E1-B3
agggaggcaaaaagacaacaaaggggaattcaatcatacaatagaaacaactttttgcttctttgtgaaatgga

SEQ ID NO: 10036 - DNA, 319 bp, Glycine max
  unsure (1)..(319): unsure at all n locations
  Clone ID: LIB3039-023-Q1-E1-B4
ggaagcttganactttcatttcccacacattcccgagcgagagatagagattttcgctctcgacataacatacacacgtctagatggctcgtacaaagcaaatcgcgcgtacgtctaccggtggaatcgcgccacgtaagcagatcgccaccaacgcagcgatgaagtcagcgccagagaccgtgagaatgaacacgcctcaacggttcaggacggaacgggtgccgctgacggataatctcgaggaccacaagttcatcgagcttgacatcaggactcatctatttcagaagcacgttagagacatcacgcaggattt

SEQ ID NO: 10037 - DNA, 287 bp, Glycine max
  Clone ID: LIB3039-023-Q1-E1-B5
gactgccgcgaatacagaacagggactcactctggcaacggcactctcggtggctataatctttctgtggtgagttgtcaagatgtacacatcaaggaagaaaatccacaaggataaggatgctgagccaactgaatttgaggaatcagtcggacaggcattgtttgatctggaaaataccaacaatgatctgaaaagtgatctgaaagatttatacataaactcagctgtccaaattgatgtttctgggaaccgcaaggctgtggttatccatgtcccctacagat

SEQ ID NO: 10038 - DNA, 372 bp, Glycine max
  Clone ID: LIB3039-023-Q1-E1-B6
gacaccattctcacaaaacaactttcaaactctgagaaagaatggctgccaacacattgatgagtactgctatctcagccttcccatctctcctttcttcctcaaaatccagatttgccaccgcagttcctctttctagctttggtgtcaccaatgcctcttcttctcgcttttctatgagtgctgactggatgccaggccagcctagacctccttaccttgatggttcagcacctggtgactttggattcgaccctcttcgtcttggtgaagtaccagagaatcttgataggttcaaagagtcagaactcattcactgcagatgggccatgcttgctgttccatcgattttggttccagaagcattgggct

SEQ ID NO: 10039 - DNA, 357 bp, Glycine max
  unsure (1)..(357): unsure at all n locations
  Clone ID: LIB3039-023-Q1-E1-B7
ggaacttctcacgttcatttctacacatccctagctctgtcgttccgtcgttgacgatggcgtttcgggtgcgaagccctgacctccgctctctctttcttctctctctcttgtccatcgcttccgccaatgtcttcttcgaagagcgtttcgatgacgggtgggaaaatcgatgggttaaatcagattggaaaaaagatgagaacgtggctggggagtggaaccacacctctggtcaatggaatggagacgctaatgacaaaggtattcanaccagtgaggattacagattctatgctatttcagctgagtaccctgaattcagcaacaagggtaagacactagtccttcaatttt

SEQ ID NO: 10040 - DNA, 398 bp, Glycine max
  Clone ID: LIB3039-023-Q1-E1-B8
agagacgacagaagggggatgcagatgcagcctatcatggcagcctactaccccaacaacgtcaccactgatcacattcaacagtacctggatgagaacaagtccttgatcctgaagattgttgaaagccagaattctggcaagctgagcgagtgtgcagagaaccaatcaaggctgcagagaaatctcatgtacctagctgcaatagctgattctcaaccccaaccatctccaatgcctggtcagtatccttctagtggacttatgcagcagggagcacactacatgcaggctcagcaggctcagcagatgtcacaacaacagctaatggcttcgcgctcctcactcttgtactcccaacagcctttctcagtgcttcaacagcagcaaggcatgca

SEQ ID NO: 10041 - DNA, 386 bp, Glycine max
  unsure (1)..(386): unsure at all n locations
  Clone ID: LIB3039-023-Q1-E1-B9
gacagcanaacaattttcaaactcaattaccattccataacctaaatctcctctttgtttccgagtcagagagcaatggcacgtaccaagcaaaccgctcgcaagtccaccggcggaaaggcgccgaggaagcaattggcgactaaagccgctcgcaagtcagctccggccaccggcggagtgaagaagccccaccgcttcaggcccggaacggtggctctgagggagatcagaaagtaccagaagagcactgaacttctgatccgaaaactcccattccagaggctcgtcagagaaatcgctcaggatttcaaaacagatcttcgtttccagagcagcgctgtttctgcgcttcaggaagccgcagaagcttatctcgttggact

SEQ ID NO: 10042 - DNA, 296 bp, Glycine max
  unsure (1)..(296): unsure at all n locations
  Clone ID: LIB3039-023-Q1-E1-C1
naggggcacaagtgagtttgttgatcgagataactagaaacagtgtgatgaaaatgaaggtccttgttttcttcgttgctacaattttggtagcatggcaatgccatgcgtacgatatgttccctctccgaatgaacactggctatggtgcccgtactccggaggtgaaatgcgcaagttggaggcttgctgtggaagcacacaacatctttggctttgagaccattcctgaagagtgcgttgaagcaacaaaggaatacatccatggcgaacaatatagatcagactccaaaaca

SEQ ID NO: 10043 - DNA, 387 bp, Glycine max
  Clone ID: LIB3039-023-Q1-E1-C10
gaaggtgcaagagtttgttgtgagctataagctagtttatcgtgaggagaatatgaagttgtttgttttccttggtgctgcagtagttttggtagcatggccatgccatggcgcaagctaccaaaggttccctctccgaatgaaaactggctatggtgaacgttcttcggaggtaaaatgcgcaagttttaagcttgctgtggaagcacacaacatccgagcctttaaaaccattcctgaagagtgcgttgaaccaacaaaggactacattaatggcgaacaatttagatcagactctaaaacagttaaccaacaagctttcttttatgctagtgaacgcgaagtccatcacaacgacatatttatattcggcatagataacaccgt

SEQ ID NO: 10044 - DNA, 382 bp, Glycine max
  Clone ID: LIB3039-023-Q1-E1-C11
gacgaaagcaaattcgtcaatttaaacacagaaacataatcaccaccttcaaagtcatctctctcgagaatcatcgaataaaactagggtttccgatcgtcgtcgaggagaatgccgaagaacaagggaaagggaggaaagaaccggaagcgcgggaagaacgatgcggacgacgagaagcgggagcttgtgttcaaggaggacggccaggagtacgcgcaggtgctccggatgctggggaacggtcgctgcgaggcgatgtgcatcgacggcaccaagcgcctctgccatatccgcggcaagatgcacaagaaggtctggatcgccgccggcgacatcatcctcgtcggcctccgcgactaccaagacgacaaagccgacg

SEQ ID NO: 10045 - DNA, 385 bp, Glycine max
  Clone ID: LIB3039-023-Q1-E1-C12
aaagtgtattgttttcactcagacaaaacgtgatgctgatcgattatcgtatgccatggcaagaagtgttaaatgtgaggctttgtatggagacatatcacaagctcaaagggagaaaactcttgctggcttcagaaatggccattttaatgttttagtggcaactgatgttgcctcacgtgggcttgatatacctaatgttgatcttgtaatacattatgatcttcccaacaattcagagatatttgttcatcgttctggacgaacaggtcgtgctggtaagaaaggaactgcaattcttgtgtatacagaagatcaatcgagggctgttaagcttatagagcgtgatgtaggcactagattttcagagctgccacggattgct

SEQ ID NO: 10046 - DNA, 347 bp, Glycine max
  Clone ID: LIB3039-023-Q1-E1-C2
ggcatcaattcaaaatatatcatcagttataatcatgggtttgtggaacacaacgaatgcaatgtcttgccgctttcacaactttggtgacgaccatgagaatctggtcgtccaatgtgatgccacgtcttcttccatgggcatacaactcacaaagttagactgtggaggaaatccactgggtggcagtgtggggagagtgttacacgcttctccagtgcacctttgcgaaagctctacaatggtcccaagctttgaaatcgacttcaccttttccatctcatcagactctactactccatgtgatggccttgccttcatcaatgcaccatatgtcactaccatcc

SEQ ID NO: 10047 - DNA, 357 bp, Glycine max
  Clone ID: LIB3039-023-Q1-E1-C3
ggcacaagtgagtttgttgatcgagataactagaaacagtgtgatgaaaatgaacgtccttgttttcttcgttgctacaattttggtagcatggcaatgccatgcgtacgatatgttccctctccgaatgaacactggctatggtgcccgtactccggaggtgaaatgtgcaagttggatgcttgctgtggaagcacacaacatctttggctttgagaccattcctgaagagtgcgttgaagcaacaaaggaatacatccatggcgaacaatatagatcagactccaaaacagttaaccaacaagcttacttttatgccagagacctcgaagtccatcccaaggacacatttgtgtt

SEQ ID NO: 10048 - DNA, 299 bp, Glycine max
  Clone ID: LIB3039-023-Q1-E1-C4
ggcacaagtttgttgagatatcgagaagcaataagatggtgtggaaagtgcatgggccgttggttcctacattcttggaattatggaacagtgacagtgcaaaccatcaaaaatttcccctcccaaataaaactgggttaggggggccgtacaccagtaatgtaacatgtaacatttgggggttccgtgtgaacgcaaaaaatgtattgaattggcacaatgcccctacaatttgctgaaactacatagggaattatctactgcgaaaccaatatatttcagacccaaacacatttacc

SEQ ID NO: 10049 - DNA, 372 bp, Glycine max
  Clone ID: LIB3039-023-Q1-E1-C5
ggcccttctagctttttcccagtccaagcagcctccaattcgtgccactctcttcaaaatggccgttaccttctcaaatctccacacagaatcaggtctcaagtccctcgacgacttcctctctgggaaggtctacgtttctggggatcagttcacaaaggacgacatcaaagtgtatggtgctgttttggagaagccaggtgactcttttcccaatgctgccaagtggtacgaggttgtctcatctcagcttgctgcaagcttccccggcaatgctcaaggggtgagattcagtggcaaagcttctgctccagcggaggctgctcctgcgaaaccggatgcttctgctgctgaagatgatgatgaccttga

SEQ ID NO: 10050 - DNA, 392 bp, Glycine max
  Clone ID: LIB3039-023-Q1-E1-C6
ggcacaagtgagtttgttgatcgagataactagatccagtgtgatgaaaatgaatgtccttgttttcttcgttgctacaattttggtagcatggcaatgccatgcgtacgatatgttccctctcagaatgaacactggctatggtgcccgtactccggaggtgaaatgcgcaagttggacgcttgctgtggaagcacacaacatctttggcgttgagaccattcctgaacagtgcgttgaagcaacataggaatacatccatggcgaacaatatacatcagactccaaaacagttaaccaacaagcttacttttatgccagagacctcgaagtcgatcccaaggacacatttgtgttcagtatagatggcaccgtactctctaatattccat

SEQ ID NO: 10051 - DNA, 366 bp, Glycine max
  Clone ID: LIB3039-023-Q1-E1-C7
gacgccgtttaaatttgaggtaaagctttgatacgattgtgctgttccaagtcccagaccatcgatgggaatcgatcttaaggctgggggtaagagcataacgaccaaaagaacagcaccaaaatccaatgacatctacctcaaattacttgtcaagctttatcggttccttgttcgaatgactggcagcaatttcaatgctgttatactcacgcgcttgttcatgagcaaggttaacaagcctccagtttctttgtcaacgttaattaagtatacagatgggaatgaggataaaattgctgtaatactggcgactgtaactgatgatatcagattatatgaagttccagcattgataattacagc

SEQ ID NO: 10052 - DNA, 388 bp, Glycine max
  Clone ID: LIB3039-023-Q1-E1-C8
ggcacaagtttgttgagatagctagaagcaataagatgaaaatgaaagtgcttgttttgtttgttgctacagttttggtagcatatgaatgccatggctcagactaccagaagttccctctccaaatgaaaactgggtttggtgggcaatacagcaatgaggtggcatgtgccagttggaggcttggcgtggaagcaaacaacgtagtcaagtggcaaactgttcctgcagcttgcggagagtacatagctgactacgttctaggagaccaatatagatcagattccaaaacagttaaccaacaagcttatttctatgctaaatccctcaaactcaccaacaaagatgtctttgtcttggacgttgacgacactactctctctaatct

SEQ ID NO: 10053 - DNA, 386 bp, Glycine max
  Clone ID: LIB3039-023-Q1-E1-C9
gaaggtgcaagagtttgttgtgagctataagctagtttatcgtgaggagaatatgaagttgtttgttttctttgttgctgcagtagttttggtagcatggccatgccatggcgcaggctaccaaaggttccctctccgaatgaaaactggctatggtgagcgttcttcggaggtaaaatgcgcaagttttaggcttgctgtggaagcacacaacatccgagcctttaaaaccattcctgaagagtgcgttgaaccaacaaaggactacattaatggcgaacaatttagatcagactctaaaacagttaaccaacaagctttcttttatgctagtgaacgcgaagtccatcacaacgacatatttatattcggcatagataacaccg

SEQ ID NO: 10054 - DNA, 367 bp, Glycine max
  unsure (1)..(367): unsure at all n locations
  Clone ID: LIB3039-023-Q1-E1-D1
ggagcaaaaccctaatccctatttttcttcctcagtagtgtcatttacgcttctcttctctgcagcaactatgcctaaccctaaggtcttcttcgacatgaccatcggcggtcaatctgctggccgcatcgtgatggagctctacgccgacgtcactccccgcaccgccgagaacttccgcgcgctttgcaccggcgagaagggcgtanggcggagcggcaagcccctccactacaagggctcgtccttccaccgcgtgatcccgagtttcatgtgtcagggtggcgacttcaccgccggaaacggaaccggcggcgagtcgatttatggcgccaagttcgccgacgaaaacttcgtgaagaagcac

SEQ ID NO: 10055 - DNA, 386 bp, Glycine max
  Clone ID: LIB3039-023-Q1-E1-D10
ggcacaagtgagtttgttgatcgagataactagaaacagtgtgatgaaaatgaaggtccttgttttcttcgtcgctacaattttggtagcatggcaatgccatgcgtacgatatgttccctctccgaatgaacactggctatggtgcccgtactccggaggtgaaatgcgcaagttggaggcttgctgtggaagcacacaacatctttggctttgagaccattcctgaagagtgcgttgaagcaacaaaggaatacatccatggcgaacaatatagatcagactccaagacagttaaccaacaagcttacttttatgccagagacctcgaagtccatcccaaggacacatttgtgttcagtatagatggcaccgtactctctaata

SEQ ID NO: 10056 - DNA, 387 bp, Glycine max
  Clone ID: LIB3039-023-Q1-E1-D11
gaataaaattagaactgtcttttcatatagatatcccttcaacacaacataggtcagccaaaggattcctaagacccaccaatgcacgaaaaccgggatctttcacaaaatggattcctattcgaagggtgcataaccgcatggataacctcacaccaacccgtcaatttgggatccaattcggttccttaggaagtatccggaacgaattttggaatgatcaaacatcgattcatacagatacagaagaaagggttcactattgattcaaacgctctatctacgacatagggatatagaaagaggacaaaaccgaagatttcacatactacttttggtcgaaaaatccatctgattttattcgtacatttcgctcaatgatgaaat

SEQ ID NO: 10057 - DNA, 382 bp, Glycine max
  Clone ID: LIB3039-023-Q1-E1-D12
ggttctagtgtgtgattgtttgttgttgtaactcgttcttcttcttttgttgttctgtgtttgtgtttgttttttctctcacctgaaaatgtcttgctgcggtggtaactgtggttgcggaagctcctgcaagtgcggcaacggctgcggaggctgcaagatgtacccagacttgagctacactgagtcaaccaccaccgagaccttggtcatgggagtggcacctgttaaggctcaatttgagggtgctgaaatgggtgtgcccgctgagaacgatggctgcaaatgtggaccaaactgctcctgcaacccctgcacttgcaagtgaggtgttgggagagcaagcttcaagcagagatagcccttaattaggaataatgat

SEQ ID NO: 10058 - DNA, 387 bp, Glycine max
  Clone ID: LIB3039-023-Q1-E1-D2
ggcacaagtttgttgagatagctagaagcaataagatgacaatgaaagtgcttgttttgtttgttgctacagttttggtagcatatgaatgccatggcgcagactaccagaagttccctctccaaatgaaaactgggtttggtgggcaatacagcaatgaggtggcatgtgccagttggaggcttggcgtggaagcaaacaacgtagtcaagtggcaaactgttcctgcagcttgcggagagtacatagctgactacgttctacgagaccaatatagatcagattccaatacagttaaccaacaagcttatttctatgctagatccctcaaactcaccaacaaagatgtctttgtcttggacgttgacgacactactctctccaatc

SEQ ID NO: 10059 - DNA, 397 bp, Glycine max
  Clone ID: LIB3039-023-Q1-E1-D4
ggtgcacaagtgagtttgttgatcgagataactagaaacagtgtgatgaaaatgaaggtccttgttttcttcgttgctacaattttggtagcatggcaatgccatgcgtacgatatgttccctctccgaatgagcactggctatggtgcccgtactccggaggtgaaatgcgcaagttggaggcttgctgtggaagcacacaacatctttggctttgagaccattcctgaagagtgcgttgaagcaacaaaggaatacatccatggcgaacaatatagatcagactccaaaacagttaaccaacaagcttacttttatgccatagacctcgaagtccatcccaaggacacatttgtgttcagtatagatggcaccgtactctctaaaaatccatact

SEQ ID NO: 10060 - DNA, 367 bp, Glycine max
  Clone ID: LIB3039-023-Q1-E1-D5
ggcacaagtttgttgagatatctagaagcaatacgatgaacatgaaagtgcttgttttgtttgttgctacagttttggtaccatatgaatgccatggctcagactaccagaagttccctctccaaatgaaaactgggtttggtgggcaatacagcaatgaggtggcatgtgccagttggaggcttggcgtggaagcaaacaacgtactcaagtggcaaactgttcctgcagcttgcggagagtacatatctgactacgttctaggagaccaatatagatcagattccaaaacagttaaccaacaagcttatttccatgctaaatccctcaaactcaccaacaaagatgtccttgtcctggacgttga

SEQ ID NO: 10061 - DNA, 349 bp, Glycine max
  Clone ID: LIB3039-023-Q1-E1-D6
ggcacaagtgagtttgttgatcgagataactagaaacagtgtgatgaaaatgaacgtccttgttttcatcgttgctacaattttggtaacatggcaatgccatgcgtacgaaatgttccctcgccgaatgaacactggctatggtgcccgtactccggacgtgaaatgcgcaagttggaggcttgctgtggaagcacacatcatctttggctttgagaccattcctgaagagtgcgttgaagcaacatcggagtacatccatggcgtaaaatacagatcagactccacaacagttaaccaacaagcttacttttatgacagacacctcgaagtccatcccaatgacaca

SEQ ID NO: 10062 - DNA, 348 bp, Glycine max
  Clone ID: LIB3039-023-Q1-E1-D7
ggaacatcaagggcaacaaatgttgtgctgtgccgccacttccgtaagcagtatcaatggcctcaacgcccatgactttgacctttgaagacgtagctaagcacagcaacaaaaaggattgcaggattattatcaatggaaaggtgtctgataacacaccatttttggatgaacatccatgaggtgatgaaattttgctgacgtcaacagggaaggatgccagcattgattttgaacatgtgggctacattgattctgctatagaaatcatggaaagatacttcattgggaaagttgacacttcaactcttccacacacatttatccataatctgcaacaccctatac

SEQ ID NO: 10063 - DNA, 278 bp, Glycine max
  Clone ID: LIB3039-023-Q1-E1-D8
ggcagaggaagggttagaaatatagaaagatgaagatactacagcgtcgcatatttcctcttctctgcttcggaagaatgacacatgaaacacgtcactggcgttcgcatcattcctgggtagagtcgtcttcgcttctgtcatcatactcgcagcctaccagttatttaatgaatttggaattgatgtgggacctgctacaagggcactcagatcgaaatttgatgccattacacatctggtgcattctctgatgggctttcagattccatagatta

SEQ ID NO: 10064 - DNA, 358 bp, Glycine max
  Clone ID: LIB3039-023-Q1-E1-D9
gatagcagtatctttgctcatctatattcaccaatgtacactgcatttcacttcggcgtttgcgatcatcagagcaatggcacgtgtcaccatgacgctcacacgtctaacagatgaaatgctccgaagaagcaattggcatccaaagcctctcccaaatgagccccggcgaccttcggagtgtacaatcgacacagcttcaggccattaacggtggcactaacggagattctacagtagcagcatagcacgaatcctctgatgacgaaactcccatatcagacgctcgtcaaataaatcgctcaggatatcaaaacgcatcacagctttcagtccaacgccatgtcggatcttcatg

SEQ ID NO: 10065 - DNA, 382 bp, Glycine max
  Clone ID: LIB3039-023-Q1-E1-E1
ggcacaagtttgttgagatagctagaagcaataagatgaaaatgaaagtgcttgttttgtttgttgctacagttttggtagcatatgaatgccatggctcagactaccagaagttccctctccaaatgaaaactgggtttggtgggcaatacagcaatgaggtggcatgtgccagttggaggcttggcgtggaagcaaacaacgtagtcaagtggcaaactgttcctgcagcttgcggagagtacatagctgactacattctaggagaccaatatagatcagattccaaaacagttaaccaacaagcttatttctatgctaaatccctcaaactcaccaacaaagatgtctttgtcttggacgttgacgacactactctctc

SEQ ID NO: 10066 - DNA, 382 bp, Glycine max; identical to SEQ ID NO: 7731
  Clone ID: LIB3039-023-Q1-E1-E10

SEQ ID NO: 10067 - DNA, 370 bp, Glycine max
  Clone ID: LIB3039-023-Q1-E1-E11
gatactcaattcattttcgtcttctgcttcaccttctcttctcttctctcataaggttagggtttttttctcttcattgctctctctgtcgttttatttccatggctcaacaagatgctcagaatggtgggtccgagaatgccgctgctgcggtgtcatttgtcgctttgaagctgcaggtcttcatcgaaactcccaaagctaattacgccgttctgttctacaaagccgcgtttgccgctgacgaagttggccgtacactcaaacctaaacgtataacggaccacgagcttcctctcatactctcagcataactcaaaatcgctggctctaccattctcgttgctgacctcgttgatgactctgcttc

SEQ ID NO: 10068 - DNA, 371 bp, Glycine max
  Clone ID: LIB3039-023-Q1-E1-E12
ggaagcacaccacccacgcatacgttcgttgattcatgttctgttctgttccttttctaaacccaacacaacatcgtgtccttttctcctcttcgatccactacgtgcctgttcctctgcttcaggcacatactcctgcaggttaaatggcaaggatcaaacctcaagctctgctacagcaaagcaaaaggaagaagggtccttcaaggataagcgccgcgactgttatattttatttcttgattcttgccttgcttgggtttttcctgtttgcatcgtacagacattggtccagcaggtcaagattgcaatcagaagatcacttgtcagtctccgagggtgaaaatacttttgtggactccaagaaatct

SEQ ID NO: 10069 - DNA, 361 bp, Glycine max
  Clone ID: LIB3039-023-Q1-E1-E3
gaaagtgcaagagtttgttgtgagctataagctaatttatcgtgaggagaatatgaagttgtttgttttctttgttgctgcagtagttttggtagcatggccatgccatggcgcaggctaccacaggttccctctccgaattaaaactggctatggtgagctttcttcggaggtaaaatgcgcaagttttaagcttgctgtggaagcacacatcatccgagcctttaaaaccattcatgaagagtgcgttgaaccaacagaggactacattaatggctaagaatttagatcatactctaaaacagttaaccaacaagctttcttttatgctagtgaacgcgaagtccatcacaacgacata

SEQ ID NO: 10070 - DNA, 388 bp, Glycine max
  Clone ID: LIB3039-023-Q1-E1-E4
ggaatcctgattctttcattttccatagattagcgagcgagagagagagagaatggttcgggaagtatcagagagttgcgttgatagcttgttgacggagatggtggcgtgctattgcaatcgattctatgccaacaagcctgaactcgccgcacgcaagatcgaggccattggatatcaggtcggtcaccagctctctgaaaggtataccatggagcggcctcggttcacggatcatctcgaggccatcaagttcatctgcaaggatttttggtctgagctcttcaagaagcagattgacaacttgtagacataccatatgggcacatttgtattgcaagataataaatttcgctggcttgcacggatgtcaattgattcaaccaac

SEQ ID NO: 10071 - DNA, 302 bp, Glycine max
  Clone ID: LIB3039-023-Q1-E1-E5
aaaaaggaagctgaagtcatagaagagaacaaagaagtggaagtgacggaacagaacaatgaaattgaagtaacagaagagaagaaggaagctgaagtcatacaagagaagaaggaattggaagtgaccgaagacaagaacgaaattgaagtagcagaagagaagaaggtagcagaagtgacacaacagaagaaggaaggggaagtgacggaacagacgaaggaagttgaagtgacggaagagaagaaggaaccggaagtgatactagaatagaagaatgaagttgaactgacggaagagaa

SEQ ID NO: 10072 - DNA, 385 bp, Glycine max
  Clone ID: LIB3039-023-Q1-E1-E6
gattttcgcggcgcacagcagaactctgcttcttcggattccgatcgcacgcgccgtcaccatggtgaacgttccgaaaacaaagaagacatactgcaagagtaaggagtgcatgaagcacacgctgcacaaggttacccaatacaagaagggtaaggatagcattgctgcccaaggaaaacgccgttatgatcgcaaacaatccggttatggtggacaaactaagcccgtcttccacaagaaggctaaaaccaccaagaagattgttctgaggttgcaatgccagggttgcaagcatgtctcccaacacgctattaagaggtgcaagcactttgagattggtggtgacaagaatggcaagggaacatcactcttctagtttgag

SEQ ID NO: 10073 - DNA, 361 bp, Glycine max; identical to SEQ ID NO: 8010
  Clone ID: LIB3039-023-Q1-E1-E7

SEQ ID NO: 10074 - DNA, 392 bp, Glycine max
  Clone ID: LIB3039-023-Q1-E1-E8
gaaggtgcaagagtttgttgtgagctatatgctagtttatcgtgaggagaatatgaagttgtttgttttctttgttgctgcagtagttttggtagcatggccatgccatggcgcaggctaccaaaggttccctctccgaatgaaaactggctatggtgagcgttcttctgaggtaaaatgcgcaagttttaggcttgctgtggaagcacacaacatccgagcctttaaaaccattcctgaagagtgcgttgaaccaacacaggactacattaatggctaacaatttagatcagactctaaaacagttaaccatcaagctttcttttatgctagtgaacgcgaagtccatcacaacgacatatttatattcggcatacataacaccgtactct

SEQ ID NO: 10075 - DNA, 94 bp, Glycine max
  Clone ID: LIB3039-023-Q1-E1-E9
gacagcagaaagtttgttaatcgatattaatcaatatagacagattgagaatttggtccgtgtttgcttcgtagcgataacattggaacacttg

SEQ ID NO: 10076 - DNA, 310 bp, Glycine max
  Clone ID: LIB3039-023-Q1-E1-F1
ggaaaagtttgttttgttaaccaaaataactaaaaccattgtgataaaaattaaggtccttgtttccaccgttgcggcaattttggaacaagggcaatcccatgattacaaaatgtccctcccccaaataactatgggcaatggtgcccgtaatcccgaggtgaaatgtgcaaattggaggcttgccgtgaaagcaaacaacatctttggctttaaaaccattcctgaaaattgcgttaaggcaacaaaggaatacatccaaggagaccattatcgatcagattccaaaacatttaaccaacaagcttac

SEQ ID NO: 10077 - DNA, 385 bp, Glycine max
  Clone ID: LIB3039-023-Q1-E1-F10
ggaagttatgagtgatgacgatattgacgggaaaacatgtcctgtcttgtgtttttctctccctttgagttgagaattcccttttgatcacacactcactccgtcacacccatctcttggcttcttcccaacatcatggacttggacttcatgagggcttcatctattcattccatcagtcatcagttctcttctcacaaaccatctcgccttcactcagatgacgatgatgatgcgcaatcccttcttcgatgtccttcctgtgaatttgagattgatttatcctctctgcgtatccatttggaagagattcaatgctatgaaccacaaaatatgctatgtcatgtgtgtgatgacacattaagggacgatgtaatcacggttg

SEQ ID NO: 10078 - DNA, 381 bp, Glycine max
  Clone ID: LIB3039-023-Q1-E1-F11
ggcacaagtgagtttgttgatcgagataactagaaacagtgtgatgaaaatgaatgtccttgttttcgtcgttgctacaattttggtagcatggcaatgccatgcgtacgatatgttccctctccgaatgaacactggctatggtgcccgtactccggaggtgaaatgcgcaagttggaggcttgctgtggaagcacacaacatctttggctttgagaccattcctgaagagtgcgttgaagcaacaaaggaatacatccatggcgaacaatatagatcagactccaagacagttaaccaagaggcttacttttatgccagagacctcgaagtccatcccaaggacacatttgtgttcagtagagatggcaccgtactctc

SEQ ID NO: 10079 - DNA, 350 bp, Glycine max
  Clone ID: LIB3039-023-Q1-E1-F12
gtggaacacttgcttagagatgtgaaagatacaaccattatcacccttgccacagaggtaagtgcaacactcacagccttgaatggtttggatgcaagacctaaacagatcaggggttaccttgaccttgttattgatggaaagcttccactaaaccatgagatcctgtaccatctgcaggacctgtttaacctgccaccaaatctcaatgttgctgatcttatcaatgcttttgcagtgaaaacaaatgatatgatgctggtaatatacctctcatctctcattagaagtgtaattgcactccacaacttgattaacaacaagatgcttaacacggaacatgagcgggc

SEQ ID NO: 10080 - DNA, 379 bp, Glycine max
  Clone ID: LIB3039-023-Q1-E1-F2
ggcatcaattcataatatatcatcaattataagcatgggtttgtggaacacaacgaatgcagtgtcctgccgctttcacaagtttggtgatgaccaaaagaatctggtcttccaaggtgatgccacgtcttcttccaggggcatagaactcacaaagttagacggtggaggaaaaccagtgggtggcagtgtggggagagtgttatactattctccagtgcacctttgggaaagctctacagtggtcgcaagctttgaaaccgacttcaccttttccatctcatcagactctactactccaggtgatggccttgccttcttcattgcaccatttgacactaaaatccctccaaactctggtgggaacaaccctggactc

SEQ ID NO: 10081 - DNA, 321 bp, Glycine max
  Clone ID: LIB3039-023-Q1-E1-F3
ggcacaagtttgttgagatagctagaagcaataacatgaatatgaaagtgcttgttttgtttgttgctacagttttggaaacatatgaatgccatggctcaaactaccacaagtcccctctccaaatgaaaactgcgtttggtgggcaatacagcaatgaggtggcatgtgccagttggaggcttggcgtggaagcaaacaacgtagtcaagtcgcaaactgttcctgcagcttgcggagagtacatagctgactacgttctaggagaccaatatagatcacattccaaaacagttaatcaacatgcttatttctatgcca

SEQ ID NO: 10082 - DNA, 180 bp, Glycine max
  Clone ID: LIB3039-023-Q1-E1-F4
gaattagatactcgcttacgccatttgtactaagctacgttcgtcagatcactgtgcatggcactgcaccacctcttcgggatctatggtttctatgactcagaggtcgcacagtaacatcggtaaaggttttcttggtgtcatattgaatctgataatctagatagggattgcaaggtt

SEQ ID NO: 10083 - DNA, 358 bp, Glycine max; identical to SEQ ID NO: 7611
  Clone ID: LIB3039-023-Q1-E1-F5

SEQ ID NO: 10084 - DNA, 388 bp, Glycine max
  Clone ID: LIB3039-023-Q1-E1-F6
ggcacaagtgagtttgttgatcgagataactagaaacagtgtgatgaaaatgaaggtccttgttttcttcgttgctacaattttggtagcatggcaatgccatgcgtatgatatgttccctctccgaatgaacactggctatggtgcccgtactccggaggtgaaatgcgcacgttggaagcttgctgtggaagcacacaacatctttggctttgataccattcctgaatagtgcgttgaagcaacaaaggaatacatccatggcgaacactatagatcagactccaaatcagttaaccaacaagcttacttttatgccagagacctctaagtccatcccaaggacacatttgtgttcagtataaattgcaacgtactctctaatatt

SEQ ID NO: 10085 - DNA, 394 bp, Glycine max
  Clone ID: LIB3039-023-Q1-E1-F7
ggtctatttaaagaagcaaatcctcgatgaggaaagtgcacaagtgagtttgttgatcgagataactagaaacagtgtgatgaaaatgaaggtccttgttttcttcgttgctacaattttggtagcatggcaatgccatgcgtacgatatgttccctctccgaatgaacactggctatggtgcccgtactccggaggtgaaatgcgcaagttggaggcttgctgtggaagcacacaacatctttggctttgagaccattcctgaagagtgcgttgaagcaacaaaggaatacatccatggcgaacaatatagatcagactccaaaacagttaaccaacaagcttacttttatgccagagacctcgaagtctacccaaggacacatttgtgttca

SEQ ID NO: 10086 - DNA, 392 bp, Glycine max
  Clone ID: LIB3039-023-Q1-E1-F8
gcacaagtgagtttgttgatcgagataactagaaacagtgtgatgaaaatgaaggtccttgttttcttcgttgctacaattttggtagcatggcaatgccatgcgtacgatatgttccctctccgaatgaacactggctatggtgcccgtactccggaggtgaaatgcgcaagttggaggcttgctgtggaagcacacaacatctttggctttgagaccattcctgaagagtgcgttgaagcaacaaaggaatacatccatggcgaacaatatagatcagactccaaaacagttaaccaacaagcttacttttatgccagagacctcgaagtccatcccaaggacacatttgtgttcagtatagatggcaccgtactctctaatattccata

SEQ ID NO: 10087 - DNA, 385 bp, Glycine max
  Clone ID: LIB3039-023-Q1-E1-F9
ggcacaagtgagtttgttgatcgagataactagaaacagtgtgatgaaaatgaaggtccttgttttcttcgttgctacaattttggtagcatggcaatgccatgcgtacgatatgttccctctccgaatgaacactggctatggtgcccgtactccggaggtgaaatgcgcaagttggaggcttgctgtggaagcacacaacatctttggctttgagaccattcctgaagagtgcgttgaagcaacaaaggaatacatccatggcgaacaatatagattagactccaaaacagttaaccaacaagcttacttttatgccagagacctcgaagtccatcccaaggacacatttgtgttcagtatagatggcaccgtactctctaat

SEQ ID NO: 10088 - DNA, 378 bp, Glycine max
  Clone ID: LIB3039-023-Q1-E1-G1
agggtgtcaaccatgaaaacttcttcaatgagtgtaagaaacctgcttggtattttgtggcaaaggattatggccactctgacatgctagatgatgacaccaagggaattagggggaaagctaccaactgtctatgcaaaaatggagagtcaaggaaacctatgagaaggtttgttggaggagtcattgttgcattcttgaaagcttacttgcatgatgataatgaggacttgttgaccataagagacaggcatgtgagtctaccagtggagatcaaatttgattcttttctgtgaaaatcagagaagatggtggggagcatatatttctgttattatcatgacacatatgactgaacttttcagttacacatacaca

SEQ ID NO: 10089 - DNA, 329 bp, Glycine max
  Clone ID: LIB3039-023-Q1-E1-G10
ggaatgtgtgagataggagttcctgatctttcgcgaaagtgtgactaacatgagggtccgtgattccaacagtgaacgcacttctcagtcaccgcgatcgtccacatcgtgtcaggagtactttctgcaaagaaaactggtgatgtgacggatctgcaaagtggtgtgaggcatagaccagtcgcatgctgagttcaggcatacaagggtgacatattcaatcaatactgcagggtaaatttcagtgacagaacagtgatcgattctagctttgatagaatcaatccaattgaagttgagcttggaactgagttagtgatcacaggttg

SEQ ID NO: 10090 - DNA, 386 bp, Glycine max
  Clone ID: LIB3039-023-Q1-E1-G11
ggcacaagtgagtttgttgatcgagataactagaaacagtgtgatgaaaatgaaggtccttgttttcttcgttgctacaattttggtagcatggcaatgccatgcgtacgatatgttccctctccgaatgaacactggctatggtgcccgtactccggaggtgaaatgcgcaagttggaggcttgctgtggaagcacacaacatctttggctttgagaccattcctgaagagtgcgttgaagcaacaaaggaatacatccatggcgaacaatatagattagactccaaaacagttaaccaacaagcttacttttatgccagagacctcgaagtccatcccaaggacacatttgtgttcagtatagatggcaccgtactctctaata

SEQ ID NO: 10091 - DNA, 380 bp, Glycine max
  Clone ID: LIB3039-023-Q1-E1-G12
ggctgcgagcgaatccctctctctctttctctttctctctcatccagatcttgcagaaaaaaaaaaacacaatggcagcgagcgctcccactccacgcgaagagttcgtgtacatggcgaagctggcggagcaggccgagcgctacgaggagatggtggagttcatggagaaggtctccgcctccgccgagagcgaggagctgaccgtggaggagcgcaacctcctctccgtcgcctacaagaacgtaatcggcgctcgccgcgcctcctggcgcatcatctcctccattgagcagaaggaggagagccgcggcaacgaggaccacgtcgccgtcatccgtgactaccgctccaagatcgaggccgagctctccaacatc

SEQ ID NO: 10092 - DNA, 399 bp, Glycine max
  Clone ID: LIB3039-023-Q1-E1-G2
ggcacaagtgagtttgttgatcgagataactagaaacagtgtgatgaaaatgaaggtccttgttttcttcgttgctacaattttggtagcatggcaatgccatgcgtacgatatgttccctctccgaatgaacactggctatggtgcccgtactccggaggtgaaatgcgcaagttggaagcttgctgtggaagcacacaacatctttggctttgagaccattcctgaagagtgcgttgaagcaacacaggaatacatccatggcgaacaatatagatcagactccacaacagttaaccaacaaacttacttttatgccagagacctcgaagtccatcccaaggacacatttgtgttcagtatagatggcaccgtactctctaatattccatactacaa

SEQ ID NO: 10093 - DNA, 351 bp, Glycine max
  Clone ID: LIB3039-023-Q1-E1-G3
ggttgtgagctataagctagtttatcgtgaggagaatatgaagttgtttgttttctttgttgctgcagtagttttggtagcatggccatgccatggcgcaggctaccaaaggttccctctccgaatgaaaactggctatggtgagcgttcttcggaggtaaaatgcgcaagttttaggcttgctgtggaagcacacaacatccgagcctttaaaaccattcctgaagagtgcgttgaaccaacaaaggactacattaatggcgaacaatttagatcagactctaaaacagttaaccaacgagctttcttttatgctagtgaacgcgaagtccatcccaacgacatatttat

SEQ ID NO: 10094 - DNA, 396 bp, Glycine max
  Clone ID: LIB3039-023-Q1-E1-G4
gacagcatatatatcaataatctattttatactatacctacattttgataattttctttgtagttgatagccatggttacccgtggaaagcttgaggttgacattgatctcaagtccaacgcagacaagtactggcaaacccttaggaattctactgaaatattccctaaggccttcccacatgattacaaaagcattgaggttcttgagggtgatggcaagtctcctggttctatccgccacataagttatggtgaaggttcaccacttgtgaaatcatcctttgagaagattgaggctgttgatgaggaaaagaaggtagtgtcgtacactatcattgatggggaactcctccagcactacaaaacattcaaggggagacatttcagtgactcc

SEQ ID NO: 10095 - DNA, 338 bp, Glycine max
  Clone ID: LIB3039-023-Q1-E1-G5
ggggttggttcaattgatccgcgagtggacaagataaccctgatgggaagatgacacggtcacggcaccacctacaaaggaattaccgttcatcaaccaaagcgctggcacactatcaccggcaagggtttgtacgccgtcatgtagttttgggtattctacatggcaaagcaagactgtcctgttgtaatgggctggaagcatccttgggagggtcatcacgatgatcattgcaatggccattaatcattccttatgcatgagctccatgaacaagaataacatacattgaactgtctgttgctatgcgtgtgctgttagttgaaatgtctaccttg

SEQ ID NO: 10096 - DNA, 294 bp, Glycine max
  Clone ID: LIB3039-023-Q1-E1-G6
cgggactgcaactatgctccccgtgaggcttcaattaccaattacggtttcgcttatactaaccaattaccattgcagtccatccccttgtcgattgcaaatccagcaccgaatggagctccaagcaacattccggcaacaccaacgtctacgccgactcgaactacgatctccaaaggaagctcgtgcaatccgctctcgacgttgatacctccggtcgagtccagtcctccttctctcccgtgtctcctacgtccactgtgttcaaggtgattctatgtagtactgtattca

SEQ ID NO: 10097 - DNA, 290 bp, Glycine max
  Clone ID: LIB3039-023-Q1-E1-G7
ggcgaagggttttatactttagtcgttctgcggttaaatacaaatagagagagagagtgagatatgacggtcctatggatggacgagtctcctagtcgcgcatgcctcgtgtcaaaatccgcgagctgagtgactactacgccagtttcgagctcagcgacaccgtcgccagtatgtccaatgcgctgctgcgcgtgatgatctcggaggtgccgacagtcgccatctacctagtagacatcgaggtctactcgtcggtgctcaacgacgagttcatcgcgcacaggctc

SEQ ID NO: 10098 - DNA, 379 bp, Glycine max
  Clone ID: LIB3039-023-Q1-E1-G8
ggttcaaagcacgccgtgtttcgctgtctctcccatcctttcgcattctcaatacccttttgatttgtgaaaggaaagcaaacatggttgatcaggtccaacaccctacaatcatggacaaggttgctggtcagctccatctccgttctggtctttcatctggtattagaagttatgatggagcctaccgccacccagctatgtaccaaagaccctcttttgggaattactcgaatgctgcattgcagtttcctgtgatgcccacatgcaaagctaccatggatttgtctgctactgcaacatctgcctcacccgtctttgttgctgctccagcagagaaaggccattttcttttagactttcccatgggaagtgtttc

SEQ ID NO: 10099 - DNA, 383 bp, Glycine max; identical to SEQ ID NO: 9098
  Clone ID: LIB3039-023-Q1-E1-G9

SEQ ID NO: 10100 - DNA, 334 bp, Glycine max
  Clone ID: LIB3039-023-Q1-E1-H1
ggggggggttttgagaagggttttacattttattcgttctccggtgaaacagaaacagagagagagagtgagaaaaaacgaaacgatggagggaggagtctcctacgcgcgcatgcctcgtgtcaaaatccgcgagctgaaggacgactacgccaagttcgagctccgcgacaccgacgcgagtatagccaacgcgctgcggcgcgtgatgatcgcggaggtgccgacggtcgccatcgacctcgtggagatcgaggtcaactcgtcggtgctcaacgacgagttcatcgcgcacaggctcggcctcattcacctcacgagcgagcgccccatg

SEQ ID NO: 10101 - DNA, 383 bp, Glycine max
  unsure (1)..(383): unsure at all n locations
  Clone ID: LIB3039-023-Q1-E1-H10
ggaaaggaaaggaaaggaaaagaagaaaacaagaagggtttggtagtttgtttgattatctacgggttgttatcatttccatccatttaattccccacaaccacgctcacctaagtttcaatttcaatcccttttctttttccgttacaaaataattcaaaattccctccctcatttacccttgtttgtgtaaagtagtagcagagtgagactaggtatcatcgatagcagggtacaagggcgatgacgaatacgattacctcttcaagctggttctcatcggcgattccggtgtcggcaagtccaacctgctttcgcgcttcacgaggaacgagttcaatttggagtccaagtccaccatangggttgagttcgccaccaag

SEQ ID NO: 10102 - DNA, 385 bp, Glycine max
  Clone ID: LIB3039-023-Q1-E1-H11
tccatttctccgagaatacgactcgaacgcaacgtgtgcttgtcacggagaagccccagggcgttccattgagcattgtagggctctgaagcgtaaggtgcaaggtctaattgatgctggctgaaatttgaggagaatcgtgtgtaaatcttgacgttgacaagagatgccacacatggggcaattttgaaagctgttgttagatgtctctaaatgactcatcaggattttcaagtttgtaccattattgtaaaccacagttacaatgttaaatgaaatggataaagttgatatctttgtccctcatcctctcacaaacgcatctttgcttattcaactttcaccggaatgtgggtgcaagccattggtctgtttgctcaagcga

SEQ ID NO: 10103 - DNA, 375 bp, Glycine max
  Clone ID: LIB3039-023-Q1-E1-H12
gactcgcagttgtattgttgaacaagggtttctctgtctgcttcttcactttctctcgtttcaatcgaaaccaaaacaaaaacatgggcagaaaattcttcgtcggtggcaactggaaatgcaatgggaccactgaggaggtaaagaagattgttactactttgaatgaggctaaagtccctggagaagatgtcgtagaagttgttgtgagccctccttttgtgttccttcctgttgtaaaaagtttgctgcgccctgatttccatgtttcggcacaaaactgttgggttcgcaaaggtggtgcttataccggtgaggttagtgctgaaatgcttgttaatttgggaattccttgggttattattggtcactctg

SEQ ID NO: 10104 - DNA, 385 bp, Glycine max
  unsure (1)..(385): unsure at all n locations
  Clone ID: LIB3039-023-Q1-E1-H3
gagcgaaacagagagtgatttcagtgagtgatcggtgttcacttgatctcatcataatcgtcagcgtcaattgaagaagatgccgatcagaaacatcgccgtcggaaggcctgaagaggcgactcaccccgacacgttgaaggcggctttggctgagttcatctcaaccttcatcttcgtgttcgccggctcaggctccggcatcgcctacaacaagctcaccgacaacggcgctgccacccctgccggcctcatctccgcctccatcgcccatgcattcgccctcttcgtcgccgtctccgtcggcgccaacatctccggcggccacgtcaaccccgccgtcaccttcggcgccttcgtcngcggcaacatcaccttcctccgc

SEQ ID NO: 10105 - DNA, 385 bp, Glycine max
  unsure (1)..(385): unsure at all n locations
  Clone ID: LIB3039-023-Q1-E1-H4
gacttcaaaatcctctagtaacccttcttttctctctctctctctcgtgttctgagctgctagaagcaatggagaggaaaagaagccatgcttctttcaccatgtttgcaatgcttgttggattgctctctcagagccttgtcattcctgtaatatccaccactgttgcagatcagaagaactactacaccccagatccacatgctggaagtccccccacaggctcacacaatagtagtcctccatctcatggccatgggagctctccaccctcacatcacaatagtccaagtactccatcaacaccctcaagtggaaactgtggatcatcacccccacaacatcatgattcaacaccctcaactccatcaacnacatcaaaccc

SEQ ID NO: 10106 - DNA, 262 bp, Glycine max
  Clone ID: LIB3039-023-Q1-E1-H5
cgggtccaaccaagccttcaaacggttgcaaaaaaacaacagaaggggaatgaacttaacttggcctttccaactttggtggttggggctattctgaatttcactctcatgtatctattggcacctaccatgacatcatcagcatcaaacctgccagccctatttgccccatgccccaagagtcacatgtttgagcctggtgcattttcccttttgggtaggttaggaaccttggtgtacaaagggaacattttttccggtg

SEQ ID NO: 10107 - DNA, 387 bp, Glycine max; identical to SEQ ID NO: 7721
  Clone ID: LIB3039-023-Q1-E1-H6

SEQ ID NO: 10108 - DNA, 388 bp, Glycine max
  Clone ID: LIB3039-023-Q1-E1-H7
ggcacaagtttgttgagatatctagaagcaataagatgataatgaaagtgcttgtgttgtttgttgctacagttttggtagcatatgaatgccatggctcagactaccagaagttccctctccaaatgaaaactgggtttggtgggcaatacagcaatgaggtggcatgtgccagttggaggcttggcgtggaagcaaacaacgtagtcaagtggcaaactgttcctgcagcttgctgagagtacatagctgactacgttctaggagaccaatatagatcagattccaaaacagttaaccaacaagcttatttctatgctaaatccctcaaactcatcaacaaagatgtctttgtcttggacgttgacgacactactctctctaatct

SEQ ID NO: 10109 - DNA, 395 bp, Glycine max
  Clone ID: LIB3039-023-Q1-E1-H8
ggcacaagtgagtttgttgatcgagataactagaaacagtgtgatgaaaatgaaggtccttgttttcttcgttgctacaattttggtagcatggcaatgccatgcgtacgatatgttccctctccgaatgaacactggctatggtgcccgtactccggaggtgaaatgcgcaagttggaggcttgctgtggaagcacacaacatctttggctttgagaccattcctgaagagtgcgttgaagcaacaaaggaatacatccatggcgaacaatatagatcagactccaaaacagttaaccaacaagcttacttttatgccagagacctcgaagtcgatcccaaggacacatttgtgttcagtatagatggcaccgtactctctaatattccatact

SEQ ID NO: 10110 - DNA, 388 bp, Glycine max
  Clone ID: LIB3039-023-Q1-E1-H9
ggtgcacaagtgagtttgttgatcgagataactagaaacagtgtgatgaaaatgaaggtccttgttttcttcgttgctacaattttggtagcatggcaatgccatgcgtacgatatgttccctctccgaatgaacactggctatggtgcccgtactccggaggtgaaatgcgcaagttggaggcttgctgtggaagcacacaacatctttggctttgagaccattcctgaagagtgcgttgaagcaacaaaggaatacatccatggcgaacaatatagatcagactccaaaacagttaaccaacaagcttacttttatgccagagacctcgaagtccatcccaaggacacatttgtgttcagtatagatggcaccgtactctctaata

SEQ ID NO: 10111 - DNA, 358 bp, Glycine max
  unsure (1)..(358): unsure at all n locations
  Clone ID: LIB3039-024-Q1-E1-A10
gatagtagagtgaccaaaaggagagtgcaataactcgttgtacattcctagtgtgtgggagagacatggctaagatgtgtgttttggtgttggttcttgctctggctgtggccacaagtgccagaaacgttcccaaccccaaggatgctggtcttaaggaccagaagaacttcatcagctatggtggagttggtggttattccgggattgggaacaatggactgccttttggaggagctggtgccggaatangtggtggttttggcggaggtggtggacttggtggtggcctcggcggtcctaccggtgggatcggacggtttggcagtaccggtagcggtgtcggtggcggtattgg

SEQ ID NO: 10112 - DNA, 387 bp, Glycine max
  Clone ID: LIB3039-024-Q1-E1-A11
gaaggtgcaagagtttgttgtgagctataagctagtttatcgtgaggagaatatgaagttgtttgttttctttgttgctgcagtagttttgggagcattgccatgccatggcgcaggctaccaaaagttccctctccgaatgaaaactggctatggtgagcgttcttcggatgtaaaatgcgcaagttttatgcttgctgtggaagcacacagcatccgagcctttaaaaccattcctgaagagtgcgttgaaccaacagaggactacattaatggcgaacaatttagattagactctaaaacagttaatcaacaagctttcttttatgctagtgaacgcgaagtccatcacaacgacatatttatattcggcatagataacaccgt

SEQ ID NO: 10113 - DNA, 376 bp, Glycine max
  Clone ID: LIB3039-024-Q1-E1-A12
gaaggtgcaagagtttgttgtgagctataagctagtttatcgtgaggagaatatgaagttgtttgttttctttgttgctgcagtagttttggtagcatggccatgccatggcgcaggctaccaaaggttccctctccgaatgaaaactggctatggtgagcgttcttcggaggtaaaatgcgcaagttttaggcttgctgtggaagcacacaacatccgagcctttaaaaccattcctgaagagtgcgttgaaccaacaaaggactacattaatggcgaacaatttagatcagactctaaaacagttaaccaacaagctttcttttatgctagtgaacgcgaagtccatcacagcgacatatttatattcggcata

SEQ ID NO: 10114 - DNA, 332 bp, Glycine max
  Clone ID: LIB3039-024-Q1-E1-A2
cgtcagagacgacagaagggggagggaggggagaagagacagagggacggagacatttatgggaagctcattcccatcccctaaatcccgcacactcattccatgttttacctttcgctcgtcgctcgcaaacgtcaacttcttaagaacaaggttttagccatggcatcgacgcggatcttgaaggaactcaaggatgtccagaaggatgctcttaattcatgcagtgctggtcctgttgctgaagacatgtttcactggctagcaatagttgtgggtcttccatagattccttatgctggaggtgtgttcttagtaactatgcatttgtg

SEQ ID NO: 10115 - DNA, 404 bp, Glycine max
  Clone ID: LIB3039-024-Q1-E1-A3
agtcagaatgcgacagaaggggaaggtgcaagagtttgttgtgagttataagctagtttatcgtgaggagaatatgaagttgtttgttttctttgttgctgcagtagttttggtagcatggccatgccatggcgcaggctaccaaaggttccctctccgaatgaaaactggctatggtgagcgttcttcggaggtaaaatgcgcaagttttaggcttgctgtggaagcacacaacatccgagcctttaaaaccattcctgaagagtgcgttgaaccaacaaaggactacattaatggcgaacaatttagatcagactctaaaacagttaaccaacaagctttcttttatgctagtgaacgcgaagtccatcacaacgacatatttatattcggcatagataaca

SEQ ID NO: 10116 - DNA, 392 bp, Glycine max; identical to SEQ ID NO: 7713
  Clone ID: LIB3039-024-Q1-E1-A4

SEQ ID NO: 10117 - DNA, 224 bp, Glycine max
  Clone ID: LIB3039-024-Q1-E1-A5
ccggtcgcgaagacaacacagggggaggcatcagtcattttgttgctcgaaactgctacgaacagtatcacgactctgcaagtcattcttatcatcgctgcaacacgtttagtcccatgtccttcccatgctttgaatgtgtgcacacgccgatgtcagactcaacatggtccacgttgaccagatgcaatgtccttctcttgacagcatgtctatcatccaca

SEQ ID NO: 10118 - DNA, 292 bp, Glycine max
  Clone ID: LIB3039-024-Q1-E1-A7
gaacacacacaaaatatctcttccaatttcaatttctcgtcgtccctcatcatggctcgtctcgcgatcgctgtcgccgccgtgctcctcgtggccctctccgcctccaccgcgacggcgcgtccctgcaggaccttcataatctcctcctactcgttccgcaaccctaactccaacaccttcgccaccatgaccgagattcgattcgtcaaccctctctacatcaccgagaaacccaccggggaaacctcctcctcctaagaactcttctttccccacgcgaattaactcc

SEQ ID NO: 10119 - DNA, 333 bp, Glycine max
  Clone ID: LIB3039-024-Q1-E1-A8
gaggttttcttagtcagacttaccccttgctaccaacactgagcttaaccgagcttcgcaaagatgaatcgggaaaagttaatgaagatggccggttcggttagaactggaggaaagggtactgtgagaagaaagaagaaggctgtccacaagacaacacccacagatgacaaaaggcttcagagcaccctgaagagaataggggtgactgccatccctgctattgaagaggtcaatatctttaaggatgacgtagttatccagtttctaaatcccaaacttcaagcatccattgctgctaatacttgggttgtcagtgggtcaccgcaaaca

SEQ ID NO: 10120 - DNA, 397 bp, Glycine max
  Clone ID: LIB3039-024-Q1-E1-A9
gagaaaattaggatggggatgcacaagtttgttgagatagctagaagcaataagatgaaaatgaaagtgcttgttttgtttgttgctacagttttggtagcatatgaatgccatggctcagactaccagaagttccctctccaaatgaaaactgggtttggtgggcaatacagcaatgaggtggcatgtgccagttggaggcttggcgtggaagcaaacaacgtagtcaagtggcaaactgttcctgcagcttgcggagagtacatagctgactacgttctaggagaccaatatagatcagattccaaaacagttaaccaacaagcttatttctatgctaaatccctcaaactcaccaacaaagatgtctttgtcttggacgttgacgacactactc

SEQ ID NO: 10121 - DNA, 384 bp, Glycine max
  Clone ID: LIB3039-024-Q1-E1-B11
ggcacaagtgagtttgttgatcgagataactagaaacagtgtgatgaaaatgaaggtccttgttttcttcgttgctacaattttggtagcatggcaatgccatgcgtacgatatgttccctctccgaatgaacactggctatggtgcccgtactccggaggtgaaatgcgcaagttggaggcttgctgtggaagcacacaacatctttggctttgagaccattcctgaagagtgcgttgatgcaacacaggaatacatccatggcgaacaatatagatcagattccaaaccagttaaccaacaagcttacttttatgctagagacctcgaagtccatcccaaggacacatttgtgttcagtatagatggcaccgtactctctaa

SEQ ID NO: 10122 - DNA, 372 bp, Glycine max
  Clone ID: LIB3039-024-Q1-E1-B12
ggtgctctgctcgtgcctctagggttatcatatctccatttccatttcctctctctcagtttccaagaatcttaagctatgggaaagtcttacccaaccgtgagcgctgattaccagaaggccgttgagaaggcgaagaagaagctcagaggcttcatcgctgagaagagatgcgctcctccaatgctccgtttggcatgggactctgctggaacttacgacgtgagctcgaagaccggtggtcccttcggaaccattaagcacccctccgaactcgctcacggcgctaacaacggtcttgacatcgctgttaggcttttggagccactcaaagcggagtttcctattttgagctacgccgatttctaccag

SEQ ID NO: 10123 - DNA, 177 bp, Glycine max
  Clone ID: LIB3039-024-Q1-E1-B2
ccttatgcttctgatgggctagagatatgggatgccatcaagtcctgggtgcatgaatatgtctcattctactataactcggatgcggcaattcaacaagatctcgagcgggtccttggtggacagcacttgtcgacgtgggtcgtggtgatttcgttcatctgtcatggtggcatg

SEQ ID NO: 10124 - DNA, 346 bp, Glycine max
  Clone ID: LIB3039-024-Q1-E1-B3
gaaggggacttcaactcccacacattccaatctctctctgcattgcgctaactctcccttcgacatgcagatcctcctcaataccgtcaccggcacgatgatcagccttgcagtggagagctctgacacgatcgacaacttcatggctaagatccacaacagtgcaagaatccccccggaccagcaccgtctcattttcgccgcaacacaacttgaggacggccgtgcccttgctgactacagcattcacaacgacagtattcttcaactcgtcctccgtctccctgctggcatgcagctcttccttaagatactcaccggcaagaccatgtccctagatgttcca

SEQ ID NO: 10125 - DNA, 418 bp, Glycine max
  Clone ID: LIB3039-024-Q1-E1-B5
gaccaacgcgtaagagacgacagaagggggatgcagatgcagcctatcatggcagcctactaccccaacaacgtcaccactgatcacattcaacagtacctggatgagaacaagtccttgatcctgaagattgttgaaagccagaattctggcaagctgagcgagtgtgcagagaaccaatcaaggctgcagagaaatctcatgtacctagctgcaatagctgattctcaaccccaaccatctccaatgcctggtcagtatccttctagtggacttatgcagcacggagcacactacatgcaggctcagcaggctcagcagatgtcacaacaacagctaatggcttcgcgctcctcactcctgtactcccaacaacctttctcagtgcgtcaacagcagcaaggcaagcacagccaac

SEQ ID NO: 10126 - DNA, 387 bp, Glycine max
  Clone ID: LIB3039-024-Q1-E1-B6
agagacgacagaagggggatgcagatgcagcctatcatggcagcctactaccccaacaacgtcaccactgatcacattcaacagtacctggatgagaacaagtccttgatcctgaagattgttgaaagccacgaattctggcaagctgagcgagtgtgcagagaaccaatcaaggctgcagagaaatctcatgtacctagctgcaatagctgattctcaaccccaaccatctccaatgcctggtcagtatccttctagtggacttatgcagcatggagcacactacatgcacgctcagcaggctcagcagatgtcacaacaacagctaatggcttcgcgctcctcactcctgtactcccaacagcctttctcaagtgcttcaacagc

SEQ ID NO: 10127 - DNA, 322 bp, Glycine max
  Clone ID: LIB3039-024-Q1-E1-B8
cgcgtaagacacgacataagggggatgcagatgcagcctagcatgggagcctactaccccaacaacgtcaccactgatcacactcaacagtacctggatgagaacaagtccctgatgctgaagattgttgaaagccagaattctggcaagctgagcgagtgtgcagagaaccaatcagggctgcagagaaatctcatgtaccgacctgcaatagctgagtctcaaccccaaccatctccaatgcctggtcagtatccttctagtggacttacgcagcagggagcacactacatgcaggctcagcaggctcagcagatctcac

SEQ ID NO: 10128 - DNA, 306 bp, Glycine max
  Clone ID: LIB3039-024-Q1-E1-C1
gacgattactaccaagtgaaaaagcaattcactaagcatatatagcgtgtaagacagtgataaaaacagtgttgtgtagagagaaatggctaggtggtgcaacttggtggttcttgcccttgtcctggttgcaagtgccagaaacatgcccaatgacgcaggtttggaggaccagaagaacgtcctcgggtatgggttctctggagttggcaactatgggcttccctttggaggagtgggttctgggtttgatggtaatatgggtgggccatctgggttcggtggctttggaggtttccgaggggc

SEQ ID NO: 10129 - DNA, 152 bp, Glycine max
  Clone ID: LIB3039-024-Q1-E1-C10
cgggacctcacccacttgcagacagaacagacgatcggcgtttcacttcagccttatccggtttagggtttcggtttttgacgcaacctttgacgtatccagaccttacgtttccgatcaggtctgatcgtctctggttggtagaacctttg

SEQ ID NO: 10130 - DNA, 386 bp, Glycine max
  Clone ID: LIB3039-024-Q1-E1-C11
gagtgcacaagtgagtttgttgatcgagataactagaaacagtgtgatgaaaatgaaggtccttgttttcttcgttgctacaattttggtagcatggcaatgccatgcgtacgatatgttccctctccgaatgaacactggctatggtgcccgtactccggaggtgaaatgcgcaagttggaggcttgctgtggaagcacacaacatctttggctttgagaccattcctgaagagtgcgttgacgcaacaaaggaatacatccatggcgaacaatatagatcagactccaaaacagttaaccaacaagcttacttttatgccagagacctcgaagtccatcccaaggacacatttgtgttcagtatagatggcaccgtactctcta

SEQ ID NO: 10131 - DNA, 237 bp, Glycine max
  Clone ID: LIB3039-024-Q1-E1-C12
gagtgcacaagtgagtttgttgatcgagataactagaaacagtgtgatgaaaatgaaggtccttgttttcttcgttgctacaggtttggtagcatgggaatgccatgccgtacgatatgtgccctctccgaatgaagactggctatggtgcccgtactccggaggtgagatgcgcaagttggaggcttgctgttgaagcagacagcatctttggccttgagagcattcctgaagagt

SEQ ID NO: 10132 - DNA, 122 bp, Glycine max
  Clone ID: LIB3039-024-Q1-E1-C2
cagaagaccacagatggggaccattattaccttgtgaaacatcaattcactaagcatatatatcgtgtacgacggtcataaattccgtgttgtgtcgagataaatggctaggtggtgcatct

SEQ ID NO: 10133 - DNA, 361 bp, Glycine max
  Clone ID: LIB3039-024-Q1-E1-C5
ggcacaagtttgttgagatagctagaagcaataagatgaaaatgaaagtgcttgttttgtttgttgctacagttttggtagcatatgaatgccatggctcagactaccagaagttccctctccaaatgaaaactgggtttggtgggcaatacagcaatgaggtggcatgtgccacttggaggcttggcgtggaagcacacaacgtagtcaagtggcaaactgttcctgcagcttgcggagagtacatatctgactacgttctatgagaccaatatagatcagattcgaggacagttaaccaacaagcttatttctatgctaaatccctcaaactcaccaacacagatgtccttgtcctgga

SEQ ID NO: 10134 - DNA, 119 bp, Glycine max
  Clone ID: LIB3039-024-Q1-E1-C6
ggcacaagtttgttgacatggctagatgcgatatgatgggcatgatggtgcttgttttgtttgttgctacagttttggtagcgtatcactgccgtcgctccacagggcaggagttccct

SEQ ID NO: 10135 - DNA, 389 bp, Glycine max
  Clone ID: LIB3039-024-Q1-E1-D1
ggtgcacaagtgagtttgttgatcgagataactagagacagtgtgatgaaaatgaatgtccgtgatttcttcgttgctacaattttggtagcatggcaatgacatgcgtacgatatgttccctctccgaatgagcactggctatggtgctcgtactccggatgtgaaatgcgcactttgggggcatgctgtggaagcacacaacatctttggctttgagaccattcctgaagagtggcttgaagcaacagaggaatatatcaatggccaacaatagatattatactccaacacagttaaccaacacgcttacttttatgccatagacctcgaagtccatcccaaggacacatttgtgtgcagtagacatggcaccgtactctctaataa

SEQ ID NO: 10136 - DNA, 226 bp, Glycine max
  Clone ID: LIB3039-024-Q1-E1-D11
ggcacaagtgagtttgttgatcgagataactagaaacagtgtgatgaaaatgaaggtccttgttttcttcgttgctacagttttggtagcatggcaatgccatgcgtaggatatgttccctctccgaatgaacactggctatggtgcccgtactccggacgtgaaatgcgcaagttggacgcttgctgtggaagcacacaacatcgttggctttgataccattccc

SEQ ID NO: 10137 - DNA, 355 bp, Glycine max
  Clone ID: LIB3039-024-Q1-E1-D5
ggcagaggaagggttggaaatatataactatgacgatactacagcgtcgtacatttcctcttctctgcttcggaggattgagattgaaacacgtcactggcgttcgcttcgttcctcggtagagtcgtcttcgcttctgtcatcagactcgttgcttaccagttatttaatgactttggacttgatgtgggacctgctagaagtgcactcgaaacgaagtttgatgcctttacacatctggtgcattctctgatcggctttcacattccatagattaatctgaagtttttaagtgctggggctattgctctgaaaggtcttggacgggttccttacacaccaggcggctcttttg

SEQ ID NO: 10138 - DNA, 146 bp, Glycine max
  Clone ID: LIB3039-024-Q1-E1-D6
ggcagaggtagggttgcaaatctagtgccatgacgccactacagcgtcctactatcttcgtcttctctgcttcggagcaatggacacttgcaacacgttacctggcgttcgcctcattcctccgtcagagtcgtcttcgcgtcggt

SEQ ID NO: 10139 - DNA, 287 bp, Glycine max
  Clone ID: LIB3039-024-Q1-E1-E1
ggagtcctgagtctttcagtttccatagattatcgttcgtgagagagagagaatggttcgggaagtatccgtgagttgcgttgatagcttgttgacagggatggtcgcgtgctagtgctatcgattctatcctatcagacctgaactcgccgcacgcaagatcgacgccactggttatcaggtcagtcttaagctctctgatgagtatcccatcgatcggcctcgtgttcacggttcatcacgaggccatttagttaatctgcgacgatttttggtccgagctcttc

SEQ ID NO: 10140 - DNA, 355 bp, Glycine max
  Clone ID: LIB3039-024-Q1-E1-E11
ggcacaagtgagtttgttgatcgagataactagaaacagtgtgatgaaaatgaaggtccttgttttcttcgttgctacaattttggtagcatggcaatgccatgcgtacgatatgttccctctccgaatgaacactggctatggtgcccgtactccggaggtgaaatgcgcaagttggaggcttgctgtggaagcacacaacatctttggctttgagaccattcctgaagagtgcgttgaagcaacaaaggaatacatccatggcgaacaatagagattagactccagaacagttaaccaacaagcttacgtttatgccagagacctcgaagtccatcccaaggacacatttgtg

SEQ ID NO: 10141 - DNA, 379 bp, Glycine max
  Clone ID: LIB3039-024-Q1-E1-E12
gatcgaagcaaaaaatgaaaacccaaagtgcttctctcctctgtctttttctctctcttgctatccttttggctagtggcactgctgcaagtgcaactccaagaagcgcagtgccaagccaccatgtttcaacattcaacagaagcctttttccttccacttttctctttggaattggttcttctgcttaccaggcagaaggagcagcaagtgtagatgggagaggaccaagcatatgggacacctacactagacagcatactgaaaagatttgggatcatagcaccggtgacatgggagctgatttttatcatcgatacaagggtgacataaaaatagcgaaagaaattgggctggactctttcagattctctatctc

SEQ ID NO: 10142 - DNA, 150 bp, Glycine max
  Clone ID: LIB3039-024-Q1-E1-E2
gcactcgtttgttccgattgctcgttgtcactctgatgagcttgacagtgcttgttttgtttgttgctacagttttggtcgcatatgacttccatggctcagtctcccagtggttccctctccaactgtatcctgggtttggtgggctct

SEQ ID NO: 10143 - DNA, 379 bp, Glycine max
  Clone ID: LIB3039-024-Q1-E1-E5
gaaggtgcaagagtttgttgtgagctatatgctagtttatcgtgaggagaatatgaagttgtttgttttctttgttgctgcagtagttttggtagcatggccatgccatggcgcaggctaccaaaggttccctctccgaatgaaaactggctatggtgagcgttcttcggaggtaaaatgcgcaagttttaggcttgctgtggtagcacacaacatccgagcctttaaaaccattcctgaatagtgcgttgaaccaacataggactacattaatggcgaacaatttagatcagactctaaaacagttaaccaacaagctttcttttatgctagtgaacgcgaagtccatcacaacgacatatttatattcggcatagat

SEQ ID NO: 10144 - DNA, 202 bp, Glycine max
  Clone ID: LIB3039-024-Q1-E1-E6
gaaggtgcaagagtttgttgtgagctatatgctagtttatcgtgaggagaatatgatgttgtttgttttctttgttgctgcagtagttttggtagcatggccatgccatggcgcaggctaccagaggttccctctccgggtgagagctggctatggtgagcgttcttcggacgtaaaatgctcaggttttaggcttgctgtg

SEQ ID NO: 10145 - DNA, 109 bp, Glycine max
  Clone ID: LIB3039-024-Q1-E1-E8
acccacgcgtgaggccggctgcgacgagtcgacggggggggtgcgtgcaggggtttgttgtgagctatctgctgctttatcctgtggacaggctgtagttgtttgtttt

SEQ ID NO: 10146 - DNA, 114 bp, Glycine max
  Clone ID: LIB3039-024-Q1-E1-F1
gaattagatactcgcttacaccagttgtactcagatacgttcgtcaatcactgtgcatggcacggcaccacctctgcgggatctatggttcctatgacacagaggtcgctcagt

SEQ ID NO: 10147 - DNA, 173 bp, Glycine max
  Clone ID: LIB3039-024-Q1-E1-F10
gagatgcacatgcaacagtcgcagcagcagctgcacgccacggcgggaccattctcgacctctactcctcgtcctcggcctccttcctccggcagctccgcgtccgatgcaccgtcgaagcacgtggctcactcaatggacaatctcagtcaagccgcgcgatgtcatcggcg

SEQ ID NO: 10148 - DNA, 247 bp, Glycine max
  Clone ID: LIB3039-024-Q1-E1-F11
ggcacaagtgagtttgttgatcgagatacctagagacagtgtgatgaatctgaatgtccttgttttcttcgttgctagaattttggtagcatcagactgacatatgtttcacgcgttgaatctacgaatgaaaactgtgctattgtgcccgtagtcaggaggtgaagttcgcaagttggaggcttgctatagaatatcattggatttttgaccattacagaatacttcattaatgcattgaaggaat

SEQ ID NO: 10149 - DNA, 386 bp, Glycine max
  Clone ID: LIB3039-024-Q1-E1-F5
gcacaagtgagtttgttgatcgagataactagaaacagtgtgatgaaaatgaaggtccttgttttcttcgttgctacaattttggtagcatggcaatgccatgcgtacgatatgttccctctccgaatgaacactggctatggtgcccgtactccggaggtgaaatgcgcaagttggaggcttgctgtggaagcacacaacatctttggctttgagaccattcctgaagagtgcgttgaagcaacaaaggaatacatccatggcgaacaatatagatcagactccaaaacagttaaccaacaagcttacttttatgccagagacctcgaagtccatcccaaggacacatttgtgttcagtatagatggcaccgtactctctaatat

SEQ ID NO: 10150 - DNA, 361 bp, Glycine max
  Clone ID: LIB3039-024-Q1-E1-F6
gcacaagtgagtttgttgatcgagataactagaaacagtgtgatgaaaatgaaggtccttgttttcttcgttgctacaattttggtagcatggcaatgccatgcgtacgatatgttccctctccgaatgaacactggctatggtgcccgtactccggaggtgaaatgcgcaagttggaggcttgctgtggaagcacacaacatctttggctttgagaccattcctgaagagtgcgttgaagcaacaaaggaatacatccatggcgaacaatatagatcagactccaagacagttaaacaacaagcttacttttatgccagagacctcgaagtccatcccaatgacacatttgtgttcagta

SEQ ID NO: 10151 - DNA, 83 bp, Glycine max
  Clone ID: LIB3039-024-Q1-E1-F9
ggctgctaagactatagagtgggaatcaatttaacagtgccgaatagctagtactaattcttgaaccttcttcgtacctgttt

SEQ ID NO: 10152 - DNA, 277 bp, Glycine max
  Clone ID: LIB3039-024-Q1-E1-G1
ggttcagatctatctgttatttaatctatctagtaacaatgtgttgatagtgtacgtcgttgctgtcatccttgcgacaactttggtatcatggagttcacagttgtatgagatcttccctcacctaatgaccactgtactagtgatgcctgttctccggatgtgatctcaggtttttggctgcctgttgtggcaccacacagcatctctgggtttgagattattccagaatactatgttccagcaacagactagttcaagcacggcgaatattatt

SEQ ID NO: 10153 - DNA, 315 bp, Glycine max
  Clone ID: LIB3039-024-Q1-E1-G10
ggtcttaatactaactaactagctagtctcagttcagttagcacaccatcaccacatccataggttcatttcaatatggcaatcttgtcaagttttgctcctttgaccattcttagtttagtcttgttagtggttggtatcattgtgtctggggttgaagctaagccaatagcattctttgtgtttggtgattcacttgttgacaatggaatgtgcacttacttgggcaccacgggacgtgccgatgctccaccttatgggatggcataaactccaattcatggcccaactggtcgattctccagtggctacaac

SEQ ID NO: 10154 - DNA, 382 bp, Glycine max; identical to SEQ ID NO: 7731
  Clone ID: LIB3039-024-Q1-E1-G11

SEQ ID NO: 10155 - DNA, 359 bp, Glycine max
  Clone ID: LIB3039-024-Q1-E1-G12
ggcacaagtgagtttgttgatcgagataactagaaacagtgtgatgaaaatgaaggtccttgttttcttcgttgctacaattttggtagcatggcaatgccatgcgtacgatatgttccctctccgaatgaacactggctatggtgcccgtactccggaagtgaaatgcgcaagttggaggcttgctgtggaagcacacaacatctttggctttgagaccattcctgaagagtgccttgaagcaacaaaggaatacatccatggcgaacaatatagatcagactccaaaacagttaaccaacaagcttacttttatgccagagacctcgaagtccatcccaaggacacatttgtgttca

SEQ ID NO: 10156 - DNA, 109 bp, Glycine max
  Clone ID: LIB3039-024-Q1-E1-G2
gacaccgagtcgcccacaagcagaacagcgatcatagtttcacttcggccttatccagtttcgggtttcggttctctaggggatctgtcacgtgtcgaagccttaaatt

SEQ ID NO: 10157 - DNA, 350 bp, Glycine max
  Clone ID: LIB3039-024-Q1-E1-G5
agcccacgcgtccgacaggagcgaaagggacacagaacggggttcaaagcacgccgtgtttcgctgtctctctcatccttacgcattcacactacccttttgatttgggagacgaaagcaaagatagttgatcaagtccaacaccctacaagcatggacaaggttgctggtcaactccatctccgttcaggtctttcagctggtattacaagttatgattgagcctaacgccacccacctatgtatcaaagaccctcttttgggaattactcgaatgctgcattgcagtatcctgtaatgcccacatgcaaagcgaccatggatttgtctgacactgcaccatctgcctc

SEQ ID NO: 10158 - DNA, 235 bp, Glycine max
  Clone ID: LIB3039-024-Q1-E1-G6
cacggggttcaaatcatgccgtgtttcgctgtctctctgatcctttcgcattctcactacccttttgatttgtgtcaggaaatcatggatgattgatcaagtccaacaccctacattcatggataaggttgctggtcaactccatctcggttctggtcgttcatctcgtattacaacgttatgatggagcctagcgccacccatctatgtagcagataccctcttttgggaatta

SEQ ID NO: 10159 - DNA, 164 bp, Glycine max
  Clone ID: LIB3039-024-Q1-E1-G8
cggcgcgagaaacgtcatattggggggcatgtcatgtactctgtgttgggtctcaaatttgattgtctcaaagacctttctttcaattgctgatggtagagggagtggttcactttttctgattactggtgtcatggcggtggatgcatttgcatttgtgcttg

SEQ ID NO: 10160 - DNA, 335 bp, Glycine max
  Clone ID: LIB3039-024-Q1-E1-G9
ggcacaagtttgttgagatagctagaagcaataagatgaaaatgaaagtgcttgttttgtttgttgctacagttttggtagcatatgaatgccatggctcagactaccagaagttccctctccaaatgaaaactgggtttggtgggcaatacagcaatgaggtggcatgtgccagttggaggcttggcgtggaagcaaacaacgtagtcaagtggcaaactgttcctgcagcttgcggagagtacatagctgactacgttctaagagaccaatatagatcagattccaaaacagttaaccaacaagcttagttctatggcaaatccctcaaactc

SEQ ID NO: 10161 - DNA, 388 bp, Glycine max
  Clone ID: LIB3039-024-Q1-E1-H1
ggcacttcaattgcactcaaattagttcattctctttgcgcagttccctacctctcctttcaagatgcagatcttcgtcaagaccctcaccggaaagaccatcacccttgaggtggaaagctctgacaccatcgacaacgtcaaggccaagatccaggacaaggaaggaattcccccggatcagcaacgtctcatcttcgccggaaagcagctcgaggacggccgtaccctcgccgactacaacatccagaaggagtcaacccttcaccttgtccttcgtctccgtggtggcatgcagatcttcgtcaagactctcactgggaaaaccattaccctagaggtcgaaagctctgacaccattgacaacgtccaggccaagatcaggaca

SEQ ID NO: 10162 - DNA, 354 bp, Glycine max
  Clone ID: LIB3039-024-Q1-E1-H10
ggcacaagtgagtttgttgatctagataactagatacagtgtgatgaaaatgatggtccttgttttcttcgttgcgacaactttggtaccatggcaatgccatgcgtacgatatgttccctctccgaatgaacactggctatggtgcccgtactccggaggtgatatgcgcaagttggaggcttgctgtggaagcacacaacatctttggctttgagaccattcctgaagagtgcgttgagacaactgcggaatacctccatggggaacaatctagatcagactccataactgttaacccacaagcttacttttatgccagagacctcgaggtacatcccacggacacatttgt

SEQ ID NO: 10163 - DNA, 255 bp, Glycine max
  Clone ID: LIB3039-022-Q1-E1-F5
ggagtttgttgatcgagataagtacaaacagtgtgatgaaaatgaatgtccctgttttcttcgttgctacaatgttaggagcaaggcaatgccatgcgtaccatatgttccctctccgaatgaacaatggctatggtgcccgtaagcgggaggtgaaatgcgcaaattggaggcttgctgtggaagcacagaacatcattggctttgagacgattcctgaataatgcgttgaagcaacagcagaatacatccatg

SEQ ID NO: 10164 - DNA, 366 bp, Glycine max
  Clone ID: LIB3039-020-Q1-E1-G11
ggtgcacaagtgagtttgttgatcgagataactagaaacagtgtgatgaaaatgaaggtccttgttttcttcgttgctacaattttggtagcatggcaatgccatgcgtacgatatgttccctctccgaatgaacactggctatggtgcccgtactccggaggtgaaatgcgcaagttggaggcttgctgtggaagcacacaacatctttggctttgagaccattcctgaagagtgcgttgaagcaacaaaggaatacatccatggcgaacaatatagatcagactccaaaacagttaaccaacaagcttacttttatgccagagacctcgaagtccatcccaaggacacatttgtgttcagtata

SEQ ID NO: 10165 - DNA, 394 bp, Glycine max
  Clone ID: LIB3039-020-Q1-E1-G12
gcaagtgcaagagtttgttgtgagctataagctagtttatcgtgaggagaatatgaagttgtttgttttctttgttgctgcagtagttttggtagcatggccatgccatggcgcatgctaccaaaggttccctctccgaatgaaaactggctatggtgagcgttcttcggaggtaaaatgcgcaagttttaggcttgctgtggaagcacacaacatccgagcctttataaccattcttgaagagtgcgttgaaccaacacaggactacattaatggcgaacaatttagatctgactctaaaacaatttatccacacgctttcctttatgctagtgaaacctgaatctatcacaccgacatatttatatttggcatagataacaccgtattctct

SEQ ID NO: 10166 - DNA, 378 bp, Glycine max
  unsure (1)..(378): unsure at all n locations
  Clone ID: LIB3039-020-Q1-E1-G2
ggcacaagtgagtttgttgatcgagataactagaaacagtgtgatgaaaatgaaggtccttgttttcttcgttgctacaattttggtagcatggcaatgccatgcgtacgatatgttccctctccgaatgaacactggctatggtgcccgtactccggaggtgaaatgcgcaagttggaggcttgctgtggaagcacacaacatctttggctttgagaccattcctgaagagtgcgttgaagcaacanaggaatacatccatggcgaacaatatagatcagactccaaaacagtttaacaacaagcttacttttatgccagagacctcgaagtccatcncaaggacacatttgtgttcagtatagatggcaccgtact

SEQ ID NO: 10167 - DNA, 377 bp, Glycine max
  unsure (1)..(377): unsure at all n locations
  Clone ID: LIB3039-020-Q1-E1-G3
gacagccacaacactttccacttgtctccgaattagttatcttgagaaacattattcccattgctatatattatggctagcatgaaggttacatgggtggttgtgatcatgtgcatggccgtggtgggtgcaccgatgatggcgcaagccatgacatgcaatgatgtgacggtgaacatggcacagtgcctatcctacctgatgcagggaggaacaccttcaacactttgctgcagcggagtcaagaacattcttggctctgctgtcaccaccgttgacaaacaaactgtgtgcaactgtctcaaggcggatgctgctaggtacaacatcaatgaccagtatgctcaggcactccctgnttttctgcaagtcaatgt

SEQ ID NO: 10168 - DNA, 378 bp, Glycine max
  Clone ID: LIB3039-020-Q1-E1-G4
ggcgtacgcagcttcatccctaacgcgtgcatagcagagtcagagacagagacgcagccatggggcggagacctgcgaggtgttataggcaaattaagaacaagccaataccccaagtcacgtttctgccgtggtgttcctgatcccaagatcaggatttatgatgttggtatgaagaagaagggtgttgatgagtttcctttctgtgtccatctggttagttgggagaaggaaaatgtttcaagtgaggccctggaagctgctcgcattgcttgcaacaagtacatggccaaatttgctggaaaggatgctttccacttgagagtcagggtgcacccattccatgttcttaggatcaacaagatgctttcgtgtgct

SEQ ID NO: 10169 - DNA, 344 bp, Glycine max
  unsure (1)..(344): unsure at all n locations
  Clone ID: LIB3039-020-Q1-E1-G5
gacaacactcatagtagagtaaccaaaaggagagtgcaataactcgttgtacattcctagtgtgtgggagagacatggctaagatgtgtgttttggtgttggttcttgctctggctgtggccacaagtgccagaaacgttcccaaccccaaggatgctggtcttaaggaccagaagaacttcatcagctatggtggagttggtggttattccgggattgggaacaatggactgccttttggaggagctggtgccggaataggtggtggttttggcggaggtggtggacttggtggtggcctcggcggtcctaccggtgggatcgganggtttggcggtaccggt

SEQ ID NO: 10170 - DNA, 374 bp, Glycine max
  unsure (1)..(374): unsure at all n locations
  Clone ID: LIB3039-020-Q1-E1-G6
ggtgctctatgattcccagaccttattttttctgtcatttgcttcaaatttcagggagattaattatggctcaacccacaacaagaataggccttgctggattggctgttatgggccaaaatctggcactcaatattgctgagaaaggctttcccatttctgtttacaaccgaaccacttccaaggttgatgagacagtagaacgagcaaaacaagaaggaaatcttccagtttatggctaccatgaccctgaagcttttgttcattccattcaaaagcctaaggtgataataatgcttgttaaggctggggcacctgttgaccagaccattaagaacctatctgcgtacatggaanaaagtgactgtataatt

SEQ ID NO: 10171 - DNA, 327 bp, Glycine max
  unsure (1)..(327): unsure at all n locations
  Clone ID: LIB3039-020-Q1-E1-G7
ggcacaagtgagtttgttgatcgagataactagaaacagtgtgatgaaaatgaaggtccttgttttcttcgttgctacaattttggtagcatggcaatgccatgcgtacgatatgttccctctccgaatgaacactggctatggtgcccgtactccggaggtgaaatgcgcaagttggaggcttgctgtggaagcacacaacatctttggctttgagaccattcctgaagagtgcgttgaagcaacaaaggaatacatccatggcgaacaatatagatcagactccaaaacagttaaccagcaagcttacttgntatgccagagact

SEQ ID NO: 10172 - DNA, 375 bp, Glycine max
  unsure (1)..(375): unsure at all n locations
  Clone ID: LIB3039-020-Q1-E1-G8
gacactcgtttggtttcatctctttctctctctctctctctatctatctatcttatttttctctctctaaaatcctctgtgagaacgtgcacagcaatggctacagaggtaagctctctgattagggtgatgggtggcggctacaaggaggagcagcatcggactgtggggaatgagtcacacggtgagaaatcaacggctctcattactcgggacttgctcggtgggtcctcgattgaatcacaggaattggacctcgatttgcaggttcctagtggctgggagaagagactcgaccttcagtcaggaaaagtctatctccaaaagtgcaaacacacaataggctttcnatcaatctctgaacacaacaagctg

SEQ ID NO: 10173 - DNA, 382 bp, Glycine max
  Clone ID: LIB3039-020-Q1-E1-G9
gaaggaaaagagggtgcaaggtgcatcttctttttgttgttctctcaaactttaataatctcataaattagcagaacgaagaggaacaaaaacaagaagaagaattggattcgaaaatcgtagcgtagcgttggtgcgattgaacgatacgatgggaagaggaaaattcaagagcaagcccactggtcgccgccagttctccaccccggaagatatgcttgctggaacctctaaccgtcctcgaacttttagacagaaagaagctgagcatgaagaggaagaacccgaggaagtatctggagatgaatctggagaagaatctgaagaagaaacttctaagaaaaaaggaacacaaggggttattgagattgaaaatcccaac

SEQ ID NO: 10174 - DNA, 358 bp, Glycine max
  Clone ID: LIB3039-020-Q1-E1-H1
ggtgcacaagtgagtttgttgatcgagataactagaaacagtgtgatgaaaatgaaggtccttgttttcttcgttgctacaattttggtagcatggcaatgccatgcgtacggtatgttccctctccgaatgaacactggctatggtgcccgtactccggaggtgaaatgcgcaagttggaggcttgctgtggaagcacacaacatctttggctttgagaccattcctgaagagtgcgttgaagcaacaaaggaatacatccatggcgaacaatatagatcagactccaaaacagttaaccaacaagcttacttttatgccagagacctcgaagtccatcccaaaggacacatttgtg

SEQ ID NO: 10175 - DNA, 379 bp, Glycine max
  unsure (1)..(379): unsure at all n locations
  Clone ID: LIB3039-020-Q1-E1-H10
gacaaacagcgcgagacagangcacagagagaaaatggtttcggggacatggatctatgataatcgggaacgtcaagtgaagaagatgccgatcagaaacatcgccgtcggaatgcctgaagaggcgactcaccccgacacgttgaaggcggctttggctgagttcatctcaaccttcatcttcgtgttcgccggctcaggctccggcatcgcctacaacaagctcaccgacaacggcgctgccacccctgccggccgcatctccgcctccatcgcccatgcattcgccctcttcgtcgccgtctccgtcggcgccaacatctccggcggccacgtcaaccccgccgtcaacttcggcgccttcgtcggcggcaacatc

SEQ ID NO: 10176 - DNA, 385 bp, Glycine max
  Clone ID: LIB3039-020-Q1-E1-H11
gagcgcgaacatacactcccccaatcctttctctcccgaaaccgtacggttacgtaaccgtaggcgatatcagaattcacggcacacacacagtccccactctctacgatgaccggtcaacgcatctcctacggcaaacgctcccactcgcactccgattccgacgccggctccaaaaacaagcgccgcaaccccgcagctgatgactcctcctcctccctcatcaccgccgacgacaccgtcttccgctacctctgccccgtccgcaagattggcagcgtcatcggccgcggcggcgacatcgtcaagcagctccgcgccgacaccaaggccaagatccgcatcggcgacgcgctccccggctgcgacgagcgtgttgtcacca

SEQ ID NO: 10177 - DNA, 385 bp, Glycine max
  Clone ID: LIB3039-020-Q1-E1-H12
gcacaagtgagtttgttgatcgagataactagaaacagtgtgatgaaaatgaaggtccttgttttcttcgttgctacaattttggtagcatggcaatgccatgcgtacgatatgttccctctccgaatgaacactggctatggtgcccgtactccggaggtgaaatgcgcaagttggaggcttgctgtggaagcacacaacatctttggctttgagaccattcctgaagagtgcgttgaagcaacaaaggaatacatccatggcgaacaatatagatcagactccaaaacagttaaccaacaagcttacttttatgccagagacctcgaagtccatcccaaggacacatttgtgttcagtatagatggcaccgtactctctaata

SEQ ID NO: 10178 - DNA, 263 bp, Glycine max
  Clone ID: LIB3039-020-Q1-E1-H2
gggcaaacatagagtgcgtttctaagctacacttcacagttgggaagcaatggattcgttctcaaatccatccagtggttcgtcgcaccaattatctgcgcacgatctcaaaaatcagttgaagaatcaacttgccattgagtatgctcaacaatttcttgagactgtgggaagaaagtgttttgagaagtgtgttacaaaaccaggttcaagcctcggtgggagtgaaagcagttgcatctctagacgcgttgatcgatata

SEQ ID NO: 10179 - DNA, 368 bp, Glycine max
  Clone ID: LIB3039-020-Q1-E1-H3
gagaacaggtgatatgcacttgctagaaaattaaataaagctaaggagaaatattgagaagcaggaagaagcaagttatggcgacgaagcagcttccgcagatcgccattctgggagctggtatctttgtgaagactcagtaccttccgaaactctccgagatctctcatcttttcattctgaaatccatttggagccgcactcaggaatcagctacggtggcgttaacaaaactccgtagccatttccccaagttaaaaactaattgggaaaataccggtttggatgacatcattcacgatggttcaaccgatgctgttgccgtggccttggctggacaaaatcaggttgacatctcactcaggttg

SEQ ID NO: 10180 - DNA, 380 bp, Glycine max
  Clone ID: LIB3039-020-Q1-E1-H4
ggcacaagtgagtttgttgatcgagataactagaaacagtgttatgaaaatgaaggtccttgttttcttcgttgctacaattttggtagcatggcaatgccatgcgtacgatatgttccctctccgaatgaacactggctatggtgcccgtactccggaggtgaaatgcgcaagttggaggcttgctgtggaagcacacaacatctttggctttgagaccattcctgaagagtgcgttgaagcaacaaaggaatacatccatggcgaacaatatagatcagactccaaaacagttaaccaacaagcttacttttatgccagagacctcgaagtccatcccaaggacacatttgtgttcagtatagatggcaccgtactct

SEQ ID NO: 10181 - DNA, 378 bp, Glycine max
  Clone ID: LIB3039-020-Q1-E1-H5
ggcatcaattcaaaatatatcatcaattataagcatgggtttgtggaacacaacgaatgcagtgtcttgccgctttcacaagtttggtgatgaccaaaagaatctggtcttccaaggtgatgccacgtcttcttccaggggcatagaactcacaaagttagacggtggaggaaaaccagtgggtggcagtgtggggagagtgttatactcttctccagtgcacctttgggaaagctctacagtggtcgcaagctttgaaaccgacttcaccttttccatctcatcagactctactactccaggtgatggccttgccttcttcattgcaccatttgacactaaaatccctccaaactctggtgggagcaaccttggact

SEQ ID NO: 10182 - DNA, 322 bp, Glycine max
  Clone ID: LIB3039-020-Q1-E1-H6
ggttcaattgtgtgattgtttgttgttgtaacccgtccttctcctttggtggtccggtgtcggcgttggtttttcccctcaccggaaaatgtcttgctgcggtggtaacggtggttgcggaacctcctgcaattgcggaaacggttgcggaggctgcaaaatttacccaaacttgacctacactgattcaaccacaaccgaaatcttggccatggaattggaaccggttaaggctcaatttgagggtgctgaaatgggtgtgcccgctgaaaacgatggctgcaaatgtggaccaaactgttcctgcaacccctgcacttgc

SEQ ID NO: 10183 - DNA, 376 bp, Glycine max
  unsure (1)..(376): unsure at all n locations
  Clone ID: LIB3039-020-Q1-E1-H7
ggcttcgtctcagatcattctgcgcaggtaagacagagagaaagaactgacctcagcggcggcggcggcggcaacagaagaacaaccaccaccacacacaatgggtcgcgtgagaacaaaaacggtgaagaaatcctcccgccaggtgattgagcgttactactcgcgcatgaccctcgacttccacacaaacaaaaagcttctcgaagaagtggccatcatcccttccaagaggctgcggaacaagatcgcgggtttctccacgcatctcatgaagcgcatccagaagggtcccgttcgcggcatctcnctcaagctccaagangangagcgcgagcgccgcatggacttcgtcnccgacgtctcccgcatcaac

SEQ ID NO: 10184 - DNA, 368 bp, Glycine max
  Clone ID: LIB3039-020-Q1-E1-H8
gagccacaaacgcaatccctccatcctttgaatgctcttgcgttttcctttcactacctcattcctaactcacacacacacaacgggtgatatcaatgtcgactcctgctatgaagaggctcatgagagatttcaagaggctgcaacaagacccgcctgcaagaatcagcggggcatctcaggataacaacataatgctgtggaacgctgtcatatttggtcctgatgatactccatgggatggaggcacgtttaagttgactctccaatttactgaggattatccaagcaagccatcaactgtacgatttgtctctcgaatgtttcatccaaacatttatgcggatggaagtatttgtttggatata

SEQ ID NO: 10185 - DNA, 370 bp, Glycine max
  Clone ID: LIB3039-020-Q1-E1-H9
aggggattatatttgagttcaaacaaatcaaagccatggccacctccaacttctctattgttctctccgtctccctagccttctttttggtgctacttaccaaggcacactcgaccgataccgtttctttcaccttcaacaagttcaacccagtccaaccaaacattatgctccaaaaagatgctagtatttcatcctctggggtgttacaactcaccaaagttggcagcaacggcgtgcccacctcgggatctctcggtcgtgccctttacgctgccccaatccagatttgggacagcgaaaccggcaaggtagccagctgggctacatcctttaaattcaacattttcgcacccaacaaatcaaactc

SEQ ID NO: 10186 - DNA, 399 bp, Glycine max
  Clone ID: LIB3039-021-Q1-E1-A1
gagggttttgcgctgttgttgctgctcatcctccgtaacctccgagctctgcaccgaagaacgaagccatggggaagacacatggaatgggatctgctcgcaagctcaagtcccaccgcaggaggcaaaggtgggctgacaagtcatacaagaaatcacatcttggaaatgaatggaagaaaccttttgctggttcatcccatgccaagggaattgtccttgaaaagataggtattgaggctaagcagcccaactctgccatccgtaagtgtgccagggttcaacttatcaagaatgggaagaagattgccgcttttgtccctaatgacggttgccttgaactacattgaagagaatgacgaagtcttgattgctggatttggacgaaaaggtcatgct

SEQ ID NO: 10187 - DNA, 361 bp, Glycine max
  Clone ID: LIB3039-021-Q1-E1-A10
gagagtggtggagtgtgcaaaagagcgtcgtagtcgcaaccctaatcagaagaagcgcagcttcaagcgagtgacagccaccagccatgggtcgtatgcacagccgcggtaagggtatatcctcttctgctttgccctacaaaaggacacctcctagctggctcaagatctcttcgcaagatgtcgaagaaaatatctgcaagtttgcgaagaaaggtttgaccccgtctcagattggtgtcattctcagagattctcacggtattgctcaggtcaatagcgtcactggcagcaaaatccttcgcatcctcaaagctcacggacttgcgcctgaaattccagaggacctgtaccatttgat

SEQ ID NO: 10188 - DNA, 406 bp, Glycine max
  Clone ID: LIB3039-021-Q1-E1-A11
cgggtcaggccatgccgtgcgtacggatgcgtacagaagacagaaaggggcacaagtgagtttgttgatcgagataactagaaacagtgtgatgaaaatgaaggtccttgttttcttcgttgctacaattttggtagcatggcaatgccatgcgtacgatatgttccctctccgaatgaacactggctatggtgcccgtactccggaggtgaaatgcgcaagttggaggcttgctgtggaagcacacaacatctttggctttgagaccattcctgaagagtgcgttgaagcaacaaaggaatacatccatggcgaacaatatagatcagactccaaaacagttaaccaacaagcttacttttatgccagagacctcgaagtccatcccaaggacacaattgtgttc

SEQ ID NO: 10189 - DNA, 362 bp, Glycine max
  unsure (1)..(362): unsure at all n locations
  Clone ID: LIB3039-021-Q1-E1-A12
ggcaagcgaaagagaagatggccaccgttccagggcagctcgtgtgggagatcgtgaagaaaaacaactcctttttggtcaagcagttcggaagggggacccagagcgtcgaattcagcagagagagcagcaatctctacaacctcaattcgttcaggtactctggtttggcaaacaagaaaactgttacggtacagcctgagggtaaagatcaggctgtgttgttggctacaacaaagacaaagaagcaaaacaagcctgctgcattgcttcacaaatctgtgatgaagaaggagttcaagangatggcaaaggctgttgaaaatcaagtggcagaaaattactacaggcccgatctcaag

SEQ ID NO: 10190 - DNA, 391 bp, Glycine max
  unsure (1)..(391): unsure at all n locations
  Clone ID: LIB3039-021-Q1-E1-A2
gacacacagagcggttctcatattttggagaatccgaaaaacacgttaaagaaagtcccattcccactaccgaagcaaattaagaagatgaagcagcagagagtggagtttatgggcatgggcatgggcatgggcatgggcctgggccttttggtggtgatgatggcatgtgggtcggcgagtggtgcggatgatttggcaaccaagtgttcagcggtgattcagaaggtaataccgtgtttggatttcgcgaaggggaaggaagaaacgccgaaaaagcaatgttgcgacgcagcaacgtccataaaggagagcaacccagagtgcctctgcaaaatcattganaaaacccacaagggaagcccacaggttaaaagcttgggcattcaag

SEQ ID NO: 10191 - DNA, 400 bp, Glycine max
  unsure (1)..(400): unsure at all n locations
  Clone ID: LIB3039-021-Q1-E1-A4
gacagcagcagagcaaaagaaagaaagaaagaaagtgcaacttcctctgttttgctcccctgtttaagccttatcataagcttagaatggcacacaaggaattttccattgccctagtgactctcattgttctctttgtcaacacgaacctccaaggtgccacggctgactatggtggtggttggcagagtgctcatgccactttctatggtgggggtgatgcttctggcacaatgggtggagcatgtgggtatggaaatttgtatagccagggatatggaactgacactgtggctctaagcactgttttgttcaacaatggcttaagctgtggattntggctatgaaataaaatgtgatgatgacccaagatggtgcaaacctggctctattaccgtca

SEQ ID NO: 10192 - DNA, 389 bp, Glycine max
  Clone ID: LIB3039-021-Q1-E1-A5
gatactcaattcattttcttcttctgcttcaccttctcttctcttctctcatagggttagggtttttttctcttcattgctctctctgtcgttttatttccatggctcagcaagatgctcagaatggtgggtcggagaatgccgctgctgcggtgtcgtttgtcgctttgaagccgcagctcctcatcgaagctcccaaagcgaacgacgccgttctgttctacaaggccgcgtttgccgctgaggaggttggccgtacgctcaaccctaagcgtaaagcggagcacgagcttcctctcatactctccgcagagctcaaaatcgctggctctaccattctcgttgctgaactcctttgatgactctgcttcaacagcgaaggccggagg

SEQ ID NO: 10193 - DNA, 329 bp, Glycine max
  Clone ID: LIB3039-021-Q1-E1-A6
gaattgctgcataactgaggaaacggaggaagagaccgcactgccatcgatacgatatacgtcgattaagtatactgtggatcttgggagatgctgatggcaacaatgacctcaaaaagcctgttcatggccgcagcaaagaatatccataaccaagacggtgtcgttctgggcgatcatactcagaaccatgtcatctaaatgtctcacctttgacgttttttacttcaccaatatcctatactttttccttatgttcactgatgatctaaaacgactacttttgtttgcttccgatttacgttttgaaattctcaaacagacccttc

SEQ ID NO: 10194 - DNA, 327 bp, Glycine max
  Clone ID: LIB3039-021-Q1-E1-A8
ggcacaagtgagtttgttgatcgagataactagaaacagtgtgatgaaaatgaaggtccttgttttcttcgttgctacaattttggtagcatggcaatgccatgcgtacgatatgttccctctccgaatgaacactggctatggtgcccgtactccggaggtgaaatgcgcaagttggaggcttgctgtggaagcacacaacatctttggctttgagaccattcctgaagagtgcgttgaagcaacaaaggaatacatccatggcgaacaatatagattagactccaaaacagttaaccaacaagcttacttttatgccagagacct

SEQ ID NO: 10195 - DNA, 388 bp, Glycine max
  Clone ID: LIB3039-021-Q1-E1-A9
ggagtctctgtccgaagccacttgagagaaaatggcggtgcctctgctctcaaagaagatcgtgaagaagagggtaaagaagttcaagaggcctcagagtgacaggaaaatttccgtcaagactaactggcgcagaccaaagggtatcgattctcgtgttaggggaaagttcaagggatgcactttgatgccaaacattggttatggttcagacaagaagacccgccactatctccctaatggtttcaagaaatttgttgttcacatgtgaaggatttggaactgctcatgatgcacaacaggacttactgtgctgagattgcccacaatatatccacaagaaagagaaaagatatagtcgagagagccgcgcagcttgatgttgttg

SEQ ID NO: 10196 - DNA, 325 bp, Glycine max
  Clone ID: LIB3039-021-Q1-E1-B1
gcacaagtgagtttgttgatcgagataactagaaacagtgtgatgaaaatgaaggtccttgttttcttcgttgctacaattttggtagcatggcaatgccatgcgtacgatatgttccctctccgaatgaacactggctatggtgcccgtactccggaggtgaaatgcgcaagttggaggcttgctgtggaagcacacaacatctttggctttgagaccattcctgaagagtgcgttgaagcaacaaaggaatacatccatggcgaacaatatagatcagactccaaaacagttaaccaacaagcttacttttatgccagagacc

SEQ ID NO: 10197 - DNA, 391 bp, Glycine max
  Clone ID: LIB3039-021-Q1-E1-B10
gaggggtgatcagaaccaaaatggccaatcttagtagtcctggatttaacctctttttggtgtctctcttggttacattggtccaaatccaaaccaaggtgcaatgctaccagtacaaagttggagatctagattcctgggggatccccatttcaccaagttcacacctctacgacaaatggtccaaatatcacaaccccaggatcggtgattcgcttctgtttctatacccaccaagtcaagattcagtgattcaagtaacagcagaatcctacaagagctgcaaccttaaagatccgattttgtacatgaacaatggcaactccttgttcaacattacatcagagggggacttctacttcacaagtggagaagctggtcattgccaaaa

SEQ ID NO: 10198 - DNA, 393 bp, Glycine max; identical to SEQ ID NO: 8734
  Clone ID: LIB3039-021-Q1-E1-B11

SEQ ID NO: 10199 - DNA, 382 bp, Glycine max
  Clone ID: LIB3039-021-Q1-E1-B12
gacaatacagagtgagttgttgctccttcgccacaactctctgccaacatgggtatctccagagattctatgcacaagaggcgtgccactggtggcaagaagaaggcctggaggaaaaagagaaagtatgagcttggtcgccagcctgctaacactaagctgtcaagcaacaagacagtcaggaggatccgtgttagaggtggaaatgtgaagtggagggcactgagattggatactggaaattactcctggggaagtgaagctgtaactcgcaagactcgtatactagatgtggtttacaatgcctcaaacaacgagcttgtgcgtactcagactcttgtaaaaagtgctattgttcaagttgatgctgctccattcaaac

SEQ ID NO: 10200 - DNA, 401 bp, Glycine max
  Clone ID: LIB3039-021-Q1-E1-B2
ggcacaagtgagtttgttgatcgagataactagaaacagtgtgatgaaaatgaaggtccttgttttcttcgttgctacaattttggtagcatggcaatgccatgcgtacgatatgttccctctccgaatgaacactggctatggtgcccgtactccggaggtgaaatgcgcaagttggaggcttgctgtggaagcacacaacatctttggctttgagaccattcctgaagagtgcgttgaagcaacaaaggaatacatccatggcgaacaatatagatcagactccaaaacagttaaccaacaagcttacttttatgccagagacctcgaagtccatccaaaggacacatttgtgttcagtatagatggcaccgtactctctaatattccatactacaaaa

SEQ ID NO: 10201 - DNA, 394 bp, Glycine max
  Clone ID: LIB3039-021-Q1-E1-B3
gcacaacaaaaagtggtgtcctaaagaaagaccatctttctcttttctgtatcaccgttggaagagactgagatgggttcaaaaaccaagacttttacctttgaagaggtggctaaacacaatcacaggaaggattgttggattatagtcaaagggaaggtgtatgatgtcaccccatttttggatgatcatccaggaggtgatgaagttttagtgactgcaacagagaaggatgccaccactgattttgaagatattggccacagtgattcagcaacacagatgatggaaaaatactttgttggggaagttgacaccaacactcttccagcacaagttaacagcaacaccagtgtacgccaaacaacacaagcaccacctgcctataacaatc

SEQ ID NO: 10202 - DNA, 401 bp, Glycine max
  Clone ID: LIB3039-021-Q1-E1-B4
ggcacaagtgagtttgttgatcgagataactagaaacagtgtgatgaaaatgaaggtccttgttttcttcgttgctacaattttggtagcatggcaatgccatgcgtacgatatgttccctctccgaatgaacactggctatggtgcccgtactccggaggtgaaatgcgcaagttggaggcttgctgtggaagcacacaacatctttggctttgagaccattcctgaagagtgcgttgaagcaacaaaggaatacatccatggcgaacaatatagatcagactccaaaacagttaaccaacaagcttacttttatgccagagacctcgaaatccatccccaaggacacatttgtgttcagtatagatggcaccgtactctctaatattccatactacaaa

SEQ ID NO: 10203 - DNA, 333 bp, Glycine max
  Clone ID: LIB3039-021-Q1-E1-B5
ctcattccttttaagcacaatagaagaagaagaacaacaacaacaacagcagcatatctcagatatcatcatggccgttgaagcgcgccatctcaatctcttcccttctcaactcatcaccaaccggcaagtgatggattctggtgaggcgaatatgatgaacatgtacaacaacagcactccgattggtggttactcttcgtttctgccgttatccggcgccgtcacggagacggcgcttccgtcctcggttttcaaccattctctcgccaacgccgtcaaatccgaaagccgcgttacctacaacaacaacaacaacaacaacaacgtttc

SEQ ID NO: 10204 - DNA, 387 bp, Glycine max
  Clone ID: LIB3039-021-Q1-E1-B6
ggaacctttgcattctattcattcaagattcagcaagtgcgttttggaagcagagaccgaaatacttcgagatggcccgtacaaagcaaactgctcgtaagtcaactggaggaaaagctcccaggaagcagcttgcaaccaaggctgcacgtaagtctgcaccaacaactggtggtgtgaagaagcctcatcgttatcgccctggaactgttgctcttcgtgagattaggaaataccagaagagcactgagctcctaatcaggaagcttcctttccagaggttggttcgtgaaattgcccaggatttcaagactgatctgcgtttccagagccatgccgtgcttgcattgcaagaggctgctgaggcataccttgttgggctctttg

SEQ ID NO: 10205 - DNA, 378 bp, Glycine max
  Clone ID: LIB3039-021-Q1-E1-B7
cccacgcgtccgggcacgtgtccttctcctacgccagagctctccaaaacacctgcttgaagacatggggtggactccctgagaacgtgaaggctgctcaagatgcactccttttccgtgccaagtccaactcactcgctcagcttggaaagtacactgccgagggtgaatctgaggaagccactcggggaatgttcgtcaaaggttactcctactaagatcatcttgccacacatgctacagtaacccaaggatccaacattaatttgtctaaattgtgtttgtggtttatatagtcttggacactatttttaatgatgattattacttgtaccttttctacttaatgaacttctagccaatcaattacgaatcctg

SEQ ID NO: 10206 - DNA, 270 bp, Glycine max
  Clone ID: LIB3039-021-Q1-E1-B8
ggcacttgcagattttcatttccttcactttcccgaaaaatggctaacacttttgactttcttcacgacgttctcacatcaagatagctcgtacgaagcacatcgatcacatttacatcgatgggaatgggtcacgtaagcagtccggcgacatcgacgcacggaagtccgcacaggtgaactgctgactcaagtagcccgatcgattcaggccgggaaacgtagcccatagggataataaaaaatcctagcagagcaacgagcttctca

SEQ ID NO: 10207 - DNA, 394 bp, Glycine max
  unsure (1)..(394): unsure at all n locations
  Clone ID: LIB3039-021-Q1-E1-B9
ggcacaagtgagtttgttgatcgagataactagaaacagtgtgatgaaaatgaaggtccttgttttcttcgttgctacaattttggtagcatggcaatgccatgcgtacgatatgttccctctccgaatgaacactggctatggtgcccgtactccggaggtgaaatgcgcaagttggaggcttgctgtggaagcacacaacatctttggctttgagaccattcctgaagagtgcgttgaagcaacaaaggaatacatccatggcgaacaatatagatcagactccaaaacagttaaccaacaagcttacttttatgccagagacctcgaagtccatcccaaggacacatttgtgttcagtatanatggcaccgtactctctaatattccatac

SEQ ID NO: 10208 - DNA, 319 bp, Glycine max
  Clone ID: LIB3039-021-Q1-E1-C1
gatccaaattcaagttcgcaccaaattttcctcccaaaatgtcaggccgtggaaaaggtgggaagggtttgggaaagggaggagctaagaggcacagaaaggttcttcgtgacaacattcaaggaatcacgaaacctgcgattcgtaggttagcgagaagaggtggcgtgaagaggatcagtggtttgatttacgaggaaaccagaggagttctgaagatattcttggagaacgtgattcgcgatgctgtaacctacactgagcacgctaggaggaaaactgttactgctatggatgtcgtttatgctctcaagagaca

SEQ ID NO: 10209 - DNA, 393 bp, Glycine max
  Clone ID: LIB3039-021-Q1-E1-C10
ggcacaagtgagtttgttgatcgagataactagaaacagtgtgatgaaaatgaaggtccttgttttcttcgttgctacaattttggtagcatggcaatgccatgcgtacgatatgttccctctccgaatgaacactggctatggtgcccgtactccggaggtgaaatgcgcaagttggaggcttgctgtggaagcacacaacatctttggctttgagaccattcctgaagagtgcgttgaagcaacaaaggaatacatccatggcgaacaatatagatcagactccaaaacagttaaccaacaagcttacttttatgccagagacctcgaagtccatcccaaggacacatttgtgttcagtatagatggcaccgtactctccaatattccata

SEQ ID NO: 10210 - DNA, 390 bp, Glycine max
  Clone ID: LIB3039-021-Q1-E1-C11
gaaggtgcaagagtttgttgtgagctataagctagtttatcgtgaggagaatatgaagttgtttgttttctttgttgctgcagtagttttggtagcatggccatgccatggcgcaggctaccaaaggttccctctccgaatgaaaactggctatggtgagcgttcttcggaggtaaaatgcgcaagttttaggcttgctgtggaagcacacaacatccgagcctttaaaaccattcctgaagagtgcgttgaaccaacaaaggactacattaatggcgaacaatttagatcagactctaaaacagttaaccaacaagctttcttttatgctagtgaacgcgaagtccatcacaacgacatatttatattcggcataaataacaccgtact

SEQ ID NO: 10211 - DNA, 385 bp, Glycine max; identical to SEQ ID NO: 8834
  Clone ID: LIB3039-021-Q1-E1-C12

SEQ ID NO: 10212 - DNA, 399 bp, Glycine max
  Clone ID: LIB3039-021-Q1-E1-C2
ggagaaagagagtgaagagagaagaagatggcgtcgagcggagcggtgccgttttggagggcagcggggatgacatacatcacatactcaaacatatgcgcgaatctggtcaggaattgcctcaaggaaccctacaaggctgaagccatctctcgtgagaaggtccattttgctctctccaaatgggtcgacgccaagcctgaaaaacctactattcgttcagacaccccagagcagtgatccggaatagttggaagctataaatgcataaatctttgagatctggaagttcattgtcattttgaacctttctgtgatgtttaattcccttgcttctttttttttcattccatgaaatggaacatacactggattttgatttgcatgattaatcttgta

SEQ ID NO: 10213 - DNA, 397 bp, Glycine max
  Clone ID: LIB3039-021-Q1-E1-C3
gactcactcatacaatagagaccagcttttgcttctttgtgaacatggagatgaggaaatcatgtggcttcttcttcttgctcctcctccttgtctttgcttcccaggtggtggtgcagacggagggaagagtgtgtgagtcacaaagccacgggttccatggtttgtgtaatagagaccacaactgtgctttggtctgcaggaacgaaggtttctccggtggcaggtgcaaaggcttccgccgccgctgcttttgcaccaggatttgttgagatctcatcaaacactactcttgccatgcaaattaataaatcatagctaggccaaataaattgcatctactccttaaccaatttggaagctagctaccacaaccaactcatacttggtcattgga

SEQ ID NO: 10214 - DNA, 398 bp, Glycine max
  unsure (1)..(398): unsure at all n locations
  Clone ID: LIB3039-021-Q1-E1-C4
ggcacaagtttgttgagatagctagaagcaataagatgaaaatgaaagtgcttgttttgtttgttgctacagttttggtagcatatgaatgccatggctcagactaccagaagttccctctccaaatgaaaactgggtttggtgggcaatacagcaatgaggtggcatgtgccagttggaggcttggcgtggaagcaaacaacgtagtcaagtggcaaactgttcctgcagcttgcggagagtacatagctgactacgttctaggagaccaatatagatcagattccaaaacagttaaccaacaagcttatttctatgctaaatccctcaaactcaacaancaaagatgtctttgtcttggacgttgacgacactactctctctaatctccagtattt

SEQ ID NO: 10215 - DNA, 385 bp, Glycine max
  Clone ID: LIB3039-021-Q1-E1-C5
gacaacaatctaagagtgagttttgtttatttgaaattaacaagtagcaaagatgtttggaatcatcggaggaaacaagggtcacaagataaaggggaacttggtgattatgcgaaagaatgtgttggatatcaacagcattaccagtgttaagggtgtcatcggaaccggcattaacatcattggaggagtcgtcgacaccgttactgctttggcgtcccacatctccatccagctcattagtgccaccaaggctgatggacatgggaaaggaaaagttggaaaggctacaaatttaagaggacaagtgtcgttaccaaccttgggagctggcgaagatgcatacgaagttcaattttgattgggacagtgacttcggaattcc

SEQ ID NO: 10216 - DNA, 388 bp, Glycine max
  Clone ID: LIB3039-021-Q1-E1-C6
ggttctagtgtgtgattgtttgttgttgtaactcgttcttcttcttttgttgttctgtgtttgtgtttgttttttctctcacctgaaaatgtcttgctgcggtggtaactgtggttgcggaagctcctgcaagtgcggcaacggctgcggaggctgcaagatgtacccagacttgagctacactgagtcaaccaccaccgagaccttggtcatgggagtggcacctgttaaggctcaatttgagggtgctgaaatgggtgtgcccgctgagaacgatggctgcaaatgtggaccaaactgctcctgcaacccctgcacttgcaagtgaggtgtttgggagagcaagctttaaagcagagatagcccttaattaggaataatgataaac

SEQ ID NO: 10217 - DNA, 350 bp, Glycine max
  Clone ID: LIB3039-021-Q1-E1-C7
gaacatagttactgacagtgccagagagagaaagacgtgtgaagtgtgagtgaagaagctcttgatgttttctcttgcaacctctgaatctgtaggcttcagttgtgctatttaacagtgtagggcactgcgtgtttacgaaataataagtttgtataattactgtaattaatatcagtatgggtgaggaagaaccagcgaatgaagtttccaagactgattcaaatggaaagagcttgcaggagaaaactttggatgaaactactgagaaaaaggacttggaaactgatggaggaaaagtcttggagaacaatggaatcaaagagaatattgtaaagaaattgaaagat

SEQ ID NO: 10218 - DNA, 323 bp, Glycine max
  Clone ID: LIB3039-021-Q1-E1-C8
tggggagtttggttatcgagatgagtagaaacagtgtgacgataatgaacgtccttgttttcttcgctgccaaaattttggaagcatggcaatgccatgcttaccatatgttcccactccgaatgaacactggctatggtgcccgtactccggtggtgaaatgcgcaagttggatgcttgctgtggtagcacacaacatcgttggctttgggaccattcctgaaaagtgcgttgaatcaacagatgcatacatccatggcgaagactatcgatcagactccaaaccagttaagcaacatacttacttttatgccagagacctc

SEQ ID NO: 10219 - DNA, 369 bp, Glycine max
  Clone ID: LIB3039-021-Q1-E1-C9
ggtggataaaaagggtgggaatcggattaggttctgcgtgcacaggcgaaaaccctaatcctgaggcactgaaagtgtgatatggcaagagtcatttcctcttcctgcgcacgcctcgcaatgcgcctcttctccaccaccaccacagccaccgcgttcgccgtcactttacccaaaccctcatcactctccctctcatcgcgtcgattcctcttccctctctcccatgccatcgtccctccctccacccgcgtcgccggaatccggtgccgcgttaaccgcgccggagactcggcgtactcaccgctgaactcggggtcgtcgtcttcgtcgttcagcgaccgcccccccaaggagatggcgccgctc

SEQ ID NO: 10220 - DNA, 393 bp, Glycine max
  Clone ID: LIB3039-021-Q1-E1-D1
ggaacagtttgattggaggagatgactttaagagtggtcagaccaaaatgaaatctgtgttggtggatttccttgtgggggccggcatcaagccaacatctatagtgagttacaaccatctgggcaacaatgatggcatgaatctctcagcccctcaaaccttccgctctaaggaaatctccaagagcaatgttgttgacgatatggtcaacagcaacgccatcctctatgagcccggtgaacatccagaccatgcggttgtcattaagtacgtgccttatgtaggggacagcaagatggccatggatgagtacacttctgagatattcatgggttgaaaagaaaacaattgtgttgcacaacacatgtgaggattcactgttagctgctcct

SEQ ID NO: 10221 - DNA, 379 bp, Glycine max
  Clone ID: LIB3039-021-Q1-E1-D10
gagggcgaggaagccacatagagacacaatacagagtgagttgttgctccttcgccacaactctctgccaacatgggtatctccagagattctatgcacaagaggcgtgccactggtggcaagaagaaggcctggaggaaaaagagaaagtatgagcttggtcgccagcctgctaacactaagctgtcaagcaacaagacagtcaggaggatccgtgttagaggtggaaatgtgaaatggagggcattgagattggatactggaaattactcctggggaagtgaagctgtaactcgcaagactcgtgtactagatgtggtttacaatgcctcaaacaatgagcttgtgcgtactcagactcttgtcaaaagtgctatcg

SEQ ID NO: 10222 - DNA, 360 bp, Glycine max
  Clone ID: LIB3039-021-Q1-E1-D11
ggcacaagtgagtttgttgatcgagataactagaaacagtgtgatgaaaatgaaggtccttgttttcttcgttgctacaattttggtagcatggcaatgccatgcgtacgatatgttccctctccgaatgaacactggctatggtgcccgtactccggaggtgaaatgcgcaagttggaggcttgctgtggaagcacacaacatctttggctttgagaccattcctgaagagtgcgttgaagcaacaaaggaatacatccatggcgaacaatatagatcagactccaaaacagttaaccaacaagcttacttttatgccagagacctcgaagtccatcccaaggacacatttgtgttcag

SEQ ID NO: 10223 - DNA, 358 bp, Glycine max
  Clone ID: LIB3039-021-Q1-E1-D12
gatccatttctcgcaacaacgcttaacctctctcattccccatttcctcacctccttcaaccgctgctaaattctagggttccgaaatgggcgctggcggaaagatcaagaagggcgccggaggtagaaagggcggcggcccaaagaagaagccggtttcaaggtccgtcaaagccggtctccaattccccgtcggaagaattggccgttatttgaagaaaggaaggtacgctcagcgtgtcggtaccggtgctcccgtatacttggctgcagttctcgaatacctagctgccgaggtgcttgagttggctgggaatgccgcacgtgacaacaagaagaacaggattattccaagaca

SEQ ID NO: 10224 - DNA, 397 bp, Glycine max
  Clone ID: LIB3039-021-Q1-E1-D2
gagtgcagaggtgtaataaattggtggcaagtggcaaccggaaagccagagtgtgtggttccgtttgctgacctgacctcggaaatccaaagagggaaactcacggtgtttcgttgcgttgtgctctgctctgctcctttgggcctgggctgggctgggctgggctgggctgggcatggctattgcagcagcggccgtggtggtaccattgggcctgctcttcttcgcctccggcctccttgttaatctcattcaggcaatatgctatgtcgtcgtaaggccggtgtcgaaaagtttgtacagaaggattaaccgggtagtagcagagctcctgttggctggaaccttgtatggcttattgattggtgggcaggagttaaggtccaaatattcacag

SEQ ID NO: 10225 - DNA, 302 bp, Glycine max
  unsure (1)..(302): unsure at all n locations
  Clone ID: LIB3039-021-Q1-E1-D3
ggcacaagtgagtttgttgatcgagataactagaaacagtgtgatgaaaatgaaggtccttgttttcttcgttgctacaattttggtagcatggcaatgccatgcgtacgatatgttccctctccgaatgaacactggctatggtgcccgtactccggaggtgaaatgcgcaagttggaggcttgctgtggaagcacacaacatctttggctttgagaccattcctgaagagtgcgttgaagcancaaaggaatacatccatggcgaacattatagtatagactccaaaacagttaaccaac

SEQ ID NO: 10226 - DNA, 386 bp, Glycine max
  Clone ID: LIB3039-021-Q1-E1-D4
ggcacaagtgagtttgttgatcgagataactagaaacagtgtgatgaaaatgaaggtccttgttttcttcgttgctacaattttggtagcatggcaatgccatgcgtacgatatgttccctctccgaatgaacactggctatggtgcccgtactccggaggtgaaatgcgcaagttggaggcttgctgtggaagcacacaacatctttggctttgagaccattcctgaagagtgcgttgaagcaacaaaggaatacatccatggcgaacaatatagatcagactccaaaacagttaaccaacaagcttacttttatgccagagaactccaagttcaatcccaaggacacatttgtgttcagtatagatggcaccgtactctctaat

SEQ ID NO: 10227 - DNA, 355 bp, Glycine max
  Clone ID: LIB3039-021-Q1-E1-D5
ggtgcacaagtgagtttgttgatcgagataactagaaacagtgtgatgaaaatgaaggtccttgttttcttcgttgctacaattttggtagcatggcaatgccatgcgtacgatatgttccctctccgaatgaacactggctaatggtgcccttatcccggaggtgaaatgcccaatttggaggcttgctgtggaaccacacaacatctttggctttgagaccattcctgaagagtgcgttgaagcaacaaaggaatacatccatggcgaacaatatagatcagactccaaaacagttaaccaacaagcttacttttatgccagagacctcgaagtccatcccaaggacacattt

SEQ ID NO: 10228 - DNA, 327 bp, Glycine max
  Clone ID: LIB3039-021-Q1-E1-D6
ggcacaagtgcgtttgttgatcgagataactagaaacagtgtgatgaaaatgaaggtccttgttttcttcgttgctacaattttggtagcatggcaatgccatgcgtacgatatgttccctctccgaatgaacactggctatggtgcccgtactccggaggtgaaatgcgcaagttggaggcttgctgtggaagcacacaacatctttggctttgagaccattcctgaagagtgcgttgaagcaacaaaggaatacatccatggcgaacaatatagatcagactccaaaacagttaaccgacaagcttacttttatgccagagacct

SEQ ID NO: 10229 - DNA, 324 bp, Glycine max
  Clone ID: LIB3039-021-Q1-E1-D7
ggaagcaaagcaaagcggtaaggatggggaacacggagaagctgatgaaccagatcatggaattgaaattcacttcgaaatcgctgcagcgtcaatcgcgtaagtgcgagaaggaggagaaatcggagaagctgaaggtgaagaaggcgatcgagaaaggcaacatggacggcgctcgaatctacgcggagaacgcgatccgtaagcgcacggagcagatgaactacctccgcctggcctcgcgcctcgacgccgtggtcgcccgcctcgacacgcaggcgaagatgacgacgatcagcaagtcgatgggcaacatcgtgaaat

SEQ ID NO: 10230 - DNA, 391 bp, Glycine max
  Clone ID: LIB3039-021-Q1-E1-D8
ggtgagttgagaggatcgtgagaggggcagtagccgagattccgtgagttgcaaaaatgaagacgattctttccaccgagaccatgaacatcccggacggcgtgagcatcaaagttcatgccaaggtcatcgaagttgagggcccccgcggaaaattggtgcgagacttcaagcatttgaatctcgattttcagctcattactgacgaaaacggtaaaagaaagctgaaaatcgacgcgtggtttggttctcggaaaacatccgccgccattcgcaccgccttgagccacgtggagaatcttatcaccggcgtcaccaagggctaccgctacaaaattgaggtccgttaatgcccattttcccatcaacgcaagcatcggcaacagcaaca

SEQ ID NO: 10231 - DNA, 363 bp, Glycine max; identical to SEQ ID NO: 7753
  Clone ID: LIB3039-021-Q1-E1-D9

SEQ ID NO: 10232 - DNA, 396 bp, Glycine max
  unsure (1)..(396): unsure at all n locations
  Clone ID: LIB3039-021-Q1-E1-E1
gcacaagtgagtttgttgatcgagataactagaaacagtgtgatgaaaatgaaaggccttgttttcctcgttgccacaattttggtaacatggcaatgccatgcgtacgatatgttccctccccgaatgaacactggctatggtgcccgtactccggaggtgaaatgcgcaagttggaggcttgctgtggaagcacacaacatctttggctttgagaccattcctgaagagtgcgttgaagcaacaaaggaatacatccatggcgaacaatatagatcagactccaaaacagttaaccaacaagcttacttttatgccagagacctcgaagtccatcccaanggacacatttgtgttcatgtatanatggcaccgtactctctaatattccatact

SEQ ID NO: 10233 - DNA, 393 bp, Glycine max
  Clone ID: LIB3039-021-Q1-E1-E10
gacaagtgagtttgttgatcgagataactagaaacagtgtgatgaaaatgaaggtccttgttttcttcgttgctacaattttggtagcatggcaatgccatgcgtacgatatgttccctctccgaatgaacactggctatggtgcccgtactccggaggtgaaatgcgcaagttggaggcttgctgtggaagcacacaacatctttggctttgagaccattcctgaagagtgcgttgaagcaacaaaggaatacatccatggcgaacaatatagatcagactccaaaacagttaaccaacaagcttacttttatgccagagacctcgaagtccatcccaaggacacatttgtgttcagtatagatggcaccgtactctctaatattccatact

SEQ ID NO: 10234 - DNA, 381 bp, Glycine max
  Clone ID: LIB3039-021-Q1-E1-E11
ggcacaagtgagtttgttgatcgagataactagaaacagtgtgatgaaaatgaaggtccttgttttcttcgttgctacaattttggtagcatggcaatgccatgcgtacgatatgttccctctccgaatgaacactggctatggtgcccgtactccggaggtgaaatgcgcaagttggaggcttgctgtggaagcacacaacatctttggctttgagaccattcctgaagagtgcgttgaagcaacaaaggaatacatccatggggaacaatatagatcagactccaaaacagtttaacaacaagcttacttttatgccagagacctcgaagtccatcccaaggacacatttgtgttcagtatagatggcaccgtactctc

SEQ ID NO: 10235 - DNA, 397 bp, Glycine max
  Clone ID: LIB3039-021-Q1-E1-E12
ggacaagtgagtttgttgatcgagataactagaaacagtgtgatgaaaatgaaggtccttgttttcttcgttgctacaattttggtagcatggcaatgccatgcgtacgatatgttccctctccgaatgaacactggctatggtgcccgtactccggaggtgaaatgcgcaagttggaggcttgctgtggaagcacacaacatctttggctttgagaccattcctgaagagtgcgttgaagcaacaaaggaatacatccatggcgaacaatatagatcagactccaaaacagttaaccaacaagcttacttttatgccagagacctcgaagtccatcccaaggacacatttgtgttcagtatagatggcaccgtactctctaatattccatactaca

SEQ ID NO: 10236 - DNA, 374 bp, Glycine max
  unsure (1)..(374): unsure at all n locations
  Clone ID: LIB3039-021-Q1-E1-E2
gaaggttcggtcatctgtgaagaagatgtgtgaattttgtcagatagttaagcgccggggacgaatctatgtgatttgctctgggaaccctaagcacaagcaacgacagggcatggcaacatttgcaagtgaaggcccatctcaaccagtgtcctcggagacaagtagctgcaagattatgattaagcctgctcaaattgcgcgaccaggtcggatttgtacttccccctcaaaggcaaagtttgtctatgttgtatggatggagggtgggattggcctctattctgtctataaagtagcaaaaataattagtaaccttgancattacaagtaataagtgtgaagagattgataatcaacggttctggattaaa

SEQ ID NO: 10237 - DNA, 396 bp, Glycine max
  unsure (1)..(396): unsure at all n locations
  Clone ID: LIB3039-021-Q1-E1-E3
gacagaacacaacacaaacacagagaaagggagtgaataaatccagcattgttctgttctctgcaacattctccactctcaaccatggcttcaaagcttttactcatcactgtcttcgtttttgatttgattgcttttggacttgccgtggctgctgagcagagaagaagcaccgctagtgttgtgacggacaatgaaaagaattataattactgtgtctataactctgatatagcaactggctatggtgttggagcatttttgtttctcttggttagtcaagtcctgataatggtggcaagtcgatgcttctgttgcgggaagcctcttaaccctgnaggcccaagggcctgtgcagttgttcttttcataatctgctgggtgtttttcatcata

SEQ ID NO: 10238 - DNA, 319 bp, Glycine max
  Clone ID: LIB3039-021-Q1-E1-E5
gacactaaacaagttaaaagaagagcatcactgaactaacaaagcaaccctatgtcgaaggtggtttgtgtcaccggagccagcggcgccatcggatcatgggtggtcctactcctcctccagcgtggttacaccgtccatgccaccgtccaagatatcaaggatgaaaatgagacgaaacatttggaggaaatggaaggagcaaagagtcatctccatttttttgaaatggatcttcttgacatcgactccattgccgctgccataaagggttgttccggcgtaatccaccttgcatgtcctaacatcattggtcaag

SEQ ID NO: 10239 - DNA, 389 bp, Glycine max
  Clone ID: LIB3039-021-Q1-E1-E6
gacacttcaaaatcctctggtaacccttattttatctattctctctctttcttttgtgttctaagcagctagaagcaatggagaggaaaagaagccatgcctctttcaccatgtttgcaatgcttgttggagtgatctctcagagccttgtcattcctgtagtatccaccactgttgaagatcagaagaactactacaccccagatccacatgctggaagtcccccctcaggctcacacagtagtactcctccatctcatggccatggaagctctccaccctcacatcatcacagtagtccaagtactccatcaacaccctcagggtggaaactgtggattatcacctccaaaacatcatgattcagcaacaccctcaactccatcaac

SEQ ID NO: 10240 - DNA, 388 bp, Glycine max
  unsure (1)..(388): unsure at all n locations
  Clone ID: LIB3039-021-Q1-E1-E7
ggttgagtgtagaacgctgctgccgaaacccttccggaaccctaaggtaagtgagtaatcagtggttgagaatggtggagaaggcgaagggtagaaaggaggaggtggttacacgtgagtacaccattaacctccacaagcgcctccatggctgcacatttaagaagaaagctcctaaagctattaaggagataaggaaatttgcccaaaaggccatggggaccaatgatgtgagggtggatgtgaagttgaacaagtttgtctggagccagggaatcaggagtgttccaaggaggattagagtaagaattgctcgcaagagaaattgatatganaatgccaaggaagagctgtactctcttgttaccgttgttgagatccctaagga

SEQ ID NO: 10241 - DNA, 352 bp, Glycine max
  Clone ID: LIB3039-021-Q1-E1-E8
ggcacaagtgagtttgctgatcgagataactagaaacagtgtgatgaaaatgaaggtccttgttttcttcgttgctacaattttggtagcatggcaatgccatgcgtacgatatgttccctctccgaatgaacactggctatggtgcccgtactccggaggtgaaatgcgcaagttggaggcttgctgtggaagcacacaacatctttggctttgagaccattcctgaagagtgcgttgaagcaacaaaggaatacatccatggcgaacaatatagattagactccaaaacagttaaccaacaagcttacttttatgccagagacctcgaagtccatcccaaggacacattt

SEQ ID NO: 10242 - DNA, 368 bp, Glycine max
  Clone ID: LIB3039-021-Q1-E1-E9
gaagctcacatttcctttgtgtttgtgagtaatttgcaaacacaccaaaaccatctctctctctctctctctctccaattcagatgaaggtcacagtggtttctcggagtggaagagaagtggttaaaggtggcattgagctcagtgattctgctactatagcagatctgcaggaggcaattcataagcgaaccaagaagtacccatcaaggcagcgcttgacacttccagtccaacctggattaaaggaaaggcctgttgtccttaattacaaaaagagtctgaaagactatacaagtggaaattcagaaaccttaactgttgtattcaaggattttgggccacaagtttcttaccggacacttttc

SEQ ID NO: 10243 - DNA, 398 bp, Glycine max
  Clone ID: LIB3039-021-Q1-E1-F1
caggagaacggaattgaaagaaaaaataaagttctgtcacgggtacatgcagcattgaaagaaatagctgatttggtgcctcttgcacccttgcgactatctccaatagttatccagaaaatgccgagtgtcttcagtaaggaaactgagattgtcatgtatgtcgagaatatgttgaggctggagagtggtgcacttggagaagctgttggttctaccatgctgcctgctcttgtggataggttgctagagttggatgtggaaattggatgggatggaatcctgcaagaagatgctaaaggcatatttgaaatggagttagaagatgttactgaatttactggaagaggatgagaattgtgatagtatgctttcgtcagagttgttaaataggaaaa

SEQ ID NO: 10244 - DNA, 375 bp, Glycine max
  unsure (1)..(375): unsure at all n locations
  Clone ID: LIB3039-021-Q1-E1-F10
gggaaaatggaaaggaaaggaagccaaagcgaaaacctaaacctaaacgagagatggcggagcacttggcatcgatattcgggacggataaggacanggtgaactgtccgttctacttcaagatcggcgcgtgcaggcacggcgaccggtgctcccggcttcacacgaagcccacaattagcccaacgttggttctgtcgaacatgtaccagaggcccgacatgaacatgaacatcatcaccaaccccgatcagccccagccccaatctctcgaccccgataaggtccaggatcacttcgacgacttctacgaagatctctttgaggagcttagcaagtacggcccattcagagcttgaatatttgcgacaacct

SEQ ID NO: 10245 - DNA, 361 bp, Glycine max
  Clone ID: LIB3039-021-Q1-E1-F11
gacaaacaacttctttcaaggaaaatggctcttcttggatttcttctgggacttttctacatgatctcacatgtcaaggggtatggttttggaggttggaccaatgcacatgccaccttctatggagggggtgatgcttctgggacaatgggtggggcttgtggttatggaaatctgtataaccaaggttatggaactgatacaacagcactgagcactgcactgttcaacaatggcttaagctgtggtgcatgctttcaaattaaatgtgcgaatgacccacaatggtgccttcctggctccatcatagtcactgccacaaatttctgtccacctggtggttggtgtgaccctcccaatc

SEQ ID NO: 10246 - DNA, 382 bp, Glycine max
  Clone ID: LIB3039-021-Q1-E1-F12
ggcagcgcttgatttgagggcaggcaagccccactcaaacaccacacctctcctcgttcacgctaccctttctgctcttcttctacctttcaagttttaaaagtataaagatggcagagacattcctatttacctcagagtcggtgaacgagggacaccctgacaagctctgcgaccaaatctccgatgctgtcctcgacgcttgcctcgagcaggacccagacagcaaagttgcctgcgaaacatgcaccaaaaccaacttggtcatggtcttcggagaaatcacgaccaaggccaacgttgactacgagaagatagtgcgtgacacctgcaggaacatcggcttcgtctcaaatgatgtgggactggatgccgacaactg

SEQ ID NO: 10247 - DNA, 397 bp, Glycine max
  unsure (1)..(397): unsure at all n locations
  Clone ID: LIB3039-021-Q1-E1-F2
gcttgcactttagctgttctgttacaaagaaagaacaccaaataatgcagtccatgttaaccatccgtgccacccatggccttcctctgtgtctctcagggatgattcaccctcttgctctctctcacgatgtgtgtaggatagcggatcacgaccgtaggagacgcaccatgaggaagtaaaggcaaagatcactcaccagagagggtgtagtgcatgatgcggttcgagaaattcactttgtggaggtcaaaggtgagaccgatttgcatgatctctcccacactcatcacctgnggttgtcagcaagagctgcttaaaatttagctgccttctccaaaattgattaatctcgctagctcctaccactttgttatgcattttatttaatttcact

SEQ ID NO: 10248 - DNA, 286 bp, Glycine max
  Clone ID: LIB3039-021-Q1-E1-F3
gaacaccgatacagagagtgatttcagtgagtgatcggtgatgacatgatcccatcacaagcatcagcgtcaactgaggcacacgcggatcagacacacccccgtccgcacgcctgaagaggcgacgcaacccgatacgtagaatgcggcattcgccgagttcatctcaacgttcatcttactcttcgcaggcgcaggctcccgcaacgccgatcacgagctcaccgatgtgcgcgctgccagtcatgccggcctgacctcatcctccaacgcccatgcactcggg

SEQ ID NO: 10249 - DNA, 394 bp, Glycine max
  Clone ID: LIB3039-021-Q1-E1-F4
gaaagtgcaagagtttgttgtgagctataagctagtttatcgtgaggagaatatgaagttgtttgttttctttgttgctgcagtagttttggtagcatggccatgccatggcgcaggctaccaaaggttccctctccgaatgaaaactggctatggtgagcgttcttcggaggtaaaatgcgcaagttttaggcttgctgtggaagcacacaacatccgagcctttaaaaccattcctgaagagtgcgttgaaccaacaaaggactacattaatggcgaacaatttagatcagactctaaaacagttaaccaacaagctttcttttatgctaatgaacgcgaaatccaatcacacgacatatttatattcggcatagataacaccgtactctct

SEQ ID NO: 10250 - DNA, 386 bp, Glycine max
  Clone ID: LIB3039-021-Q1-E1-F5
ggcacaagtgagtttgttgatcgagataactagaaacagtgtgatgaaaatgaaggtccttgttttcttcgttgctacaattttggtagcatggcaatgccatgcgtacgatatgttccctctccgaatgaacactggctatggtgcccgtactccggaggtgaaatgcgcaagttggaggcttgctgtggaagcacacaacatctttggctttgagaccattcctgaagagtgcgttgaagcaacaaaggaatacatccatggcgaacaatatagatcagactccaaaacagttaaccaacaagcttacttttatgccagagacctcgaagtccatcccaaggacacatttgtgttcagtatagatggcaccgtactctctaata

SEQ ID NO: 10251 - DNA, 386 bp, Glycine max
  Clone ID: LIB3039-021-Q1-E1-F6
gacacttcaaaatcctctggtaacccctattttatctattctctctctttcttttgtgttctaagcagctagaagcaatggagaggaaaagaagccatgcctctttcaccatgtttgcaatgcttgttggagtgatctctcagagccttgtcattcctgtagtatccaccactgttgaagatcagaagaactactacaccccagatccacatgctggaagtcccccctcaggctcacacagtagtactcctccatctcatggccatggaagctctccatcctcacatcatcacagtagtccaagtactccatcaacaccctcaagtggaaactgtggattaacaactcaacaccatcatgatccaacaacaccctcaactccatca

SEQ ID NO: 10252 - DNA, 374 bp, Glycine max
  Clone ID: LIB3039-021-Q1-E1-F8
ggtatgaggtgagagctagaaactgaggacttagctagtagttagagatgcctgagttttgcgtgacaggtggtactgggttcatcgcatcttacctggtcaaggccttactagagaagggtcacacagtgaggaccaccgtgagaaacccaggggatgtggagaaggttggttttctgactgaactaagtggagccaaagagagactgaagattttgaaagcagatctattagtggaaggaagctttgatgaggcagtgagaggagttgatggtgtctttcatatggcgtcccctgtgcttattccttatgatgagaacgttcagcaaaatttgattgatccctgtataaaaggaactttgaatgtgcttaac

SEQ ID NO: 10253 - DNA, 359 bp, Glycine max
  Clone ID: LIB3039-021-Q1-E1-F9
aaagagacctggaaaaggtgggaaccgcttttggaagtccattgggcttggatttaagactcccagggaagccatcgaaggaacctatattgacaagaagtgccccttcactggcaatgtttccatccgtggccgtatcttggctggaacatgtcacagtgctaagatgaacaggactattattgttagaaggaattatctccattttatcaagaagtaccagaggtacgagaagaggcactcaaatattcctgctcatatatcacctgccttccgtgtgaaggaaggggatcacgttattattggtcaatgcaggcctctctctaagacagtgaggttcaatgtcttgaaagtgatcc

SEQ ID NO: 10254 - DNA, 383 bp, Glycine max
  Clone ID: LIB3039-021-Q1-E1-G10
ggcacaagtttgttgagatagctagaagcaataagatgaaaatgaaagtgcttgttttgtttgttgctgcagttttggtagcatatgaatgccatggctcagactaccagaagttccctctccaaatgaaaactgggtttggtgggcaatacagcaatgaggtggcatgtgccagttggaggcttggcgtggaagcaaacaacgtagtcaagtggcaaaccgttcctgcagcttgcggagagtacatagctgactacgttctaggagaccaatatagatcagattccaaaacagttaaccaacaagcttatttctatgctaaatccctcaaactcaccaacaaagatgtctttgtcttggacgttgacgacactactctctct

SEQ ID NO: 10255 - DNA, 398 bp, Glycine max
  Clone ID: LIB3039-021-Q1-E1-G12
gacacagctattcctcttaagcttgctactgagtttccacactgcataccttaggtcttccgaattcgaagttaatttgcaagatggctaaggaaaaggctcagatcaacattgtggtggttggtcatgtggaccctgaggaggcaaccaccattaacgagctgaagaagcctgttgtggagaaagaagctccagggcatgccatatgagggcatgcacgtacggcctcggaggggaaccagaaaattatgttaacaaaataatctggaaccctaatgtatcagtgtcatcatcagtgtgtagtttaagctagctttgctatggttacgttctttgagatgagagtcttgatgaacagtaccattctgatgtattgctttccttgaaagttaatgcat

SEQ ID NO: 10256 - DNA, 394 bp, Glycine max
  unsure (1)..(394): unsure at all n locations
  Clone ID: LIB3039-021-Q1-E1-G2
gacagcatatcaataatctattttatactatacccacattttgataattatttttctagttgataagccatggctactcgaggaaagcttggggttgacgttgatctcaagtctaacgcagacaagtactggcaaacccttaagaactccactgaaatattccccaaggccttccccaatgattacaaaggcattgaggttcttganggtgatggcaaatcacctggttctatccgccacataagttatggtgaaggttcaccacttgtgaagtcatcctttgagaagattgaggctgttgatgaagaaaagaaggtantgtcgtacactatcattgatggagaactcctcnagcactacannacattcaagggagacatttctgtgactccag

SEQ ID NO: 10257 - DNA, 388 bp, Glycine max
  Clone ID: LIB3039-021-Q1-E1-G3
gacaataaaccacctccgcgcgagccaccttacccagtgaaccctaccgcaccgaaacaaaaccctcgcaaaccctaaccctaatctcataggaacatggacggcgacgacgagacctcgggtccgatgatcgacgaaatctacgccaacggcggtggcgtcggcgacgacggagacaagcggagccgccgcgcaatcatgagcggcgaccagctcgacatcgaggcgtacgcggcgctatactcggggcgcacgaagatcatgaggctcctcttcttcgccgacaagatgaacaacgcggcgacgcagctcgaggcgctgcgcatggcctacgacgagattaagaagggagagaacacgcagctgttcagggaggtcgtgcagaaga

SEQ ID NO: 10258 - DNA, 401 bp, Glycine max
  Clone ID: LIB3039-021-Q1-E1-G4
ggcacaagtgagtttgttgatcgagataactagaaacagtgtgatgaaaatgaaggtccttgttttcttcgttgctacaattttggtagcatggcaatgccatgcgtacgatatgttccctctccgaatgaacactggctatggtgcctgtactccggaggtgaaatgcgcaagttggaggcttgctgtggaagcacacaacatctttggctttgagaccattcctgaagagtgcgttgaagcaacaaaggaatacatccatggcgaacaatatagatcagactccaaaacagttaaccaacaagcttacttttatgccagagacctcgaaatccatcgcaaagacacatttgtgttcagtatagatggcaccgtactctctaatattccatactacaaaa

SEQ ID NO: 10259 - DNA, 384 bp, Glycine max
  unsure (1)..(384): unsure at all n locations
  Clone ID: LIB3039-021-Q1-E1-G5
ggaagaaggcaaatcgcgaagactagatctgatctgagagaatggctcctcggtctagcagcaaggacgcccaagaccttttccgcgctctttggtctgcttatgctgcaacccccactaatctcaagatcattgatctctatgtcatctatgccgtattcaccgctttcatccaggttgtttacatggctttggttggatcatttccatttaactccttcctatcaggagtactttcttgtgtangaactgctgttcttgctgtttgtctcaggatccaagtgaataaagagaataaggaattcaaggatcttgcacctgagcgcgcttttgcggattttggtccccggtaatttggggcttcatttggtgatcatgaacttc

SEQ ID NO: 10260 - DNA, 358 bp, Glycine max; identical to SEQ ID NO: 9027
  Clone ID: LIB3039-021-Q1-E1-G6

SEQ ID NO: 10261 - DNA, 338 bp, Glycine max
  Clone ID: LIB3039-021-Q1-E1-G7
gaggaaaaaaatttagatccgcccagtgacattcccgttttcggctctctccgaaatttcttagattgcttctgtgtcagagaaatcagtgcaacaaaaatggacgacaccgaaaccaaaggaagaatcgaagagactgtgcgtaggattttgcaagaatcggacatggacgaggttactgagtctaagattcgaaaacaggcctccgaacaccttggcctcgacctgtctcagccttatttcaaagcctttgtcaaacaggtcgtgaaggcttttctccaagaagaagaacaacgacagaaacaacaacaacaagatgaagatgaagaagaagaact

SEQ ID NO: 10262 - DNA, 359 bp, Glycine max
  unsure (1)..(359): unsure at all n locations
  Clone ID: LIB3039-021-Q1-E1-G8
ggcacaagtgagtttgttgatcgagataactagaaacagtgtgatgaaaatgaaggtccttgttttcttcgttgctacaattttggtagcatggcaatgccatgcgtacgatatgttccctctccgaatgaacactggctatggtgcccgtactccggaggtgaaatgcgcaagttggaggcttgctgtggaagcacacaacatctttggctttgagaccattcctgaagagtgcgttgaagcaacaaaggaatacatccattggcgaacaatatagatcagactccaaaacagttaaccaacaagcttacttttatgccagagacctcgaagtccatcncaaggacacatttgtgttc

SEQ ID NO: 10263 - DNA, 349 bp, Glycine max
  unsure (1)..(349): unsure at all n locations
  Clone ID: LIB3039-021-Q1-E1-G9
gaggcacaacaaaaccacaatctaagtaagtgttgagagaagagtgcgtttgtttgtttgaaattaagtagtaaagatgtttggaatcatcggaggaaacaagggtcacaagataaaggggaacttggtgattatgcgaaagaatgtgttggatatcaacagcatcaccagtgttaagggtgtcattggaaccggcattaacatcattggaggtgtcgtcgacaccgttactgctttggcgtcncacatctccatccagctcatcagtgccaccaaggctgatggacatgggaaaggtaaagttggaaaggctacaaatttaagaggacaagtgtcgttgccaaccttg

SEQ ID NO: 10264 - DNA, 384 bp, Glycine max
  Clone ID: LIB3039-021-Q1-E1-H1
ggaagtagtttgttttctgcatgttaggaataggatggagggggttgagagcaaagaaagagaagtgatggtggcaaaaccagttgcagtgggtgtcagtgatttgcttctgaggctgttggccttcgcagtcactcttgtcgctgctatagtcattgcggtcgataagcagaccaaggttgttcccattcagctttcagattccttaccacctttggatgttcctctcactgctaagtggcatcaaatgtctgccattgtgtactttctggtgaccaatgcaatagcatgcacgtatgcagtcctgtctctactccttgccctcgtgaatagaagtaaaagcaaaggcttgtggacattgatcgctgtcctcgacgcattcat

SEQ ID NO: 10265 - DNA, 343 bp, Glycine max
  Clone ID: LIB3039-021-Q1-E1-H10
gatcttcgcccggaaaagaaaggggggaagaagaaagaaccgttcctttatgatcgaaaaggtgcctttggtcatcatcgcggtgttaatcttggtggtgcaatcctctgcagcgttccacggtataaacagaatcatgaaggtccaccctgttcctcgaaaacgcaacatctcaatccaatttggcggcgacgggggcaacccgatgtcggaggctcaagcgctgttggggatcgccgggaagaagctccggcgactaccgcacgtgttcagctgcgtgctggagctgcccttccgctccgacgccgacgttgcggtggaggaagcccccgactgcttccgc

SEQ ID NO: 10266 - DNA, 370 bp, Glycine max
  Clone ID: LIB3039-021-Q1-E1-H11
ggcacttcaattgcaatcaaattagttcattctctttgcgcagttccctacctctcctttcaagatgcagatcttcgtcaagaccctcaccggaaagaccatcacccttgaggtggaaagctctgacaccatcgacaacgtcaaggccaagatccaggacaaggaaggaattcccccggatcagcaacgtctcatcttcgccggaaagcagctcgaggacggccgtaccctcgccgactacaacatccagaaggagtcaacccttcaccttgtccttcgtctccgtggtggcatgcagatcttcgtcaagactctcactggcaaaaccataaccctagaggtcgaaagctctgacaccattgacaacgtc

SEQ ID NO: 10267 - DNA, 393 bp, Glycine max
  Clone ID: LIB3039-021-Q1-E1-H12
ggcacaagtgagtttgttgatcgagataactagaaacagtgtgatgaaaatgaaggtccttgttttcttcgttgctacaattttggtagcatggcaatgccatgcgtacgatatgttccctctccgaatgaacactggctatggtgcccgtactccggaggtgaaatgcgcaagttggaggcttgctgtggaagcacacaacatctttggctttgagaccattcctgaagagtgcgttgaagcaacaaaggaatacatccatggcgaacaatatagatcagactccaaaacagttaaccaacaagcttacttttatgccagagacctcgaagttcatcccaaggacacatttgtgttcagtatagatggcaccgtactctctaatattccata

SEQ ID NO: 10268 - DNA, 405 bp, Glycine max
  Clone ID: LIB3039-021-Q1-E1-H2
ggaactacactacatattctctgaccaccctagctagctaattagatttctgagagaaaggaaagggtgtgagaagagaatggagagtaaagaggaagatgttaacgttggagcaaacaagttctcagaaaggcaaccaattggtacagcagctcagggtggtggtgacaaggactacaaggaggcacccccagctcctttgtttgaacctggtgagctcaaatcatggtccttctacagagctggaattgctgagtttgtggcaactttcttgttcctctacattaccatcttaactgtcatgggtgtcaacaggtcaccctccaagtgtgcctctgttggcattcaaagcaatgcttgggcctttggtggcatgatctttgcccttgtctactgcactgctgg

SEQ ID NO: 10269 - DNA, 397 bp, Glycine max
  Clone ID: LIB3039-021-Q1-E1-H3
gtagttgagaggggcatgtttcgtaccactcatccaaacaagtcacagtgttctctctctctctctctctctgaaaaacattccccgtataagctctctccgaatgtcacaatgccttagcgacgcctcgctctgctttcttcctccacgcgtctgtcactgttatcattccctgctctcatttcggtccctgacaatgagatcaaacttctagtagtgttctactactaactatttttctttcaaaaaagaaaaaagagagggacattattattattattactatataaatatatatttgttctctgttggtgagattagaagcgaaaatggcaccaacgttgttcaaattggggggtgaaggacactcacaggggaacccctgtggtggtgaaaa

SEQ ID NO: 10270 - DNA, 399 bp, Glycine max
  unsure (1)..(399): unsure at all n locations
  Clone ID: LIB3039-021-Q1-E1-H4
agggcacaagtgagtttgttgattgagataactagaaacaatgtgatgaaaatgaaggtccctggtttcctcgttgccacaattttggtagcaaggcaatgccaagggttacatatgttccctccccgaatgaacactggctatggtgcccgtactccggaagtgaaatgcgcaagttggaggcttgctgtggaagcacacaacatctttggctttgagaccattcctgaagagtgcgttgaagcaacanaggaatacatccatggcgaacaatatagatcagactccaaaacagttaaccaacaagcttacttttatgccagagacctcgaagtccatcccaaggacacnattgtgttcagtatagatggcaccgtactctctaatattccatactac

SEQ ID NO: 10271 - DNA, 378 bp, Glycine max
  Clone ID: LIB3039-021-Q1-E1-H6
ggaagagtacttagcgatctccgtgaatacatagtaacacaataaaccacctccgcgcgagccaccttacccagtgaaccctaccgcaccgaaacaaaaccctcgcaaaccctaaccctaatctcataggaacatggacggcgacgacgagacctcgggtccgatgatcgacgaaatctacgccaacggcggtggcgtcggcgacgacggagacaagcggagccgccgcgcaatcatgagcggcgaccagctcgacatcgaggcgtacgcggcgctatactcggggcgcacgaagatcatgaggctcctcttcttcgccgacaagatgaacaacgcggcgacgcagctcgaggcgctgcgcatgggctacgacgagat

SEQ ID NO: 10272 - DNA, 339 bp, Glycine max
  Clone ID: LIB3039-021-Q1-E1-H7
gagagcgaaagagatgtcgttggtttcaagcatgttcgggtgtggagtggtgatggcggcgtcgcaagcaatgggaattggaaggagaagcgatggtggattgacgatagtgtgttcgtctaggccgcagaagaaagcgacggcgcatcacatgaagactcggcctcggaagacgcaggcatgggatagaaaccgcaagcccaccgtctacgatccactccctcctcttcctcctgattggaccctcgttattcccgctgacgcttcttctgctcccgttacgcctccgcctccaactccctctgcctagtcactctctcggtactctctctcgttttc

SEQ ID NO: 10273 - DNA, 274 bp, Glycine max
  Clone ID: LIB3039-021-Q1-E1-H8
gggcgtaggacttgaattttgctggccaaaaaaaaccaggaaaatgagaaaacaaaatacaaagaaagatttggaaagagaaaaaatgggaacaaatattctctcaacctcaaaacccttcctactaactaattcattctcatcatcatcatttgtaacaccaacatatgtttactacaatcccataatgaaatgcacagtgaagagggaattaactctttgcaaagcagcaaaccaaccagcccctccacactcgccaattgttgtgacaaag

SEQ ID NO: 10274 - DNA, 358 bp, Glycine max
  Clone ID: LIB3039-021-Q1-E1-H9
ggcacaagtgagtttgttgatcgagataactagaaacagtgtgatgaaaatgaaggtccttgttttcttcgttgctacaattttggtagcatggcaatgccatgcgtacgatatgttccctctccgaatgaacactggctatggtgcccgtactccggaggtgaaatgcgcaagttggaggcttgctgtggaagcacacaacatctttggctttgagaccattcctgaagagtgcgttgaagcaacaaaggaatacatccatggcgaacaatatagatcggactccaaaacagttaaccaacaagcttacttttatgccagagacctcgaagtccatcccaaggacacatttgtgttc

SEQ ID NO: 10275 - DNA, 319 bp, Glycine max
  Clone ID: LIB3039-022-Q1-E1-A10
tggatgcacacaaccactctttcatcttcatcgcttaaaagagcctttgctttttctttaggcctttccgaattaagtacttgtttcaatttctctcgaagcaagaaaaatgttcatcgagagtttcaaggttgagagtcctaacgtgaagtacacagagactgagattcagtccgtgtacaactatgaaaccactgaacttgttcacgagaacacgaatggcacttatcagtgggttgtcaagcccaaaactgtcaaatatgaatttaaaaccaacacccatgtccctaaactaggggtaatgcttgtggggtggggt

SEQ ID NO: 10276 - DNA, 357 bp, Glycine max
  Clone ID: LIB3039-022-Q1-E1-A11
agggttttgtgctgttgtcgctgctcatcctccataacctccgagctctacaccgaagaacgaagccatggggaagacacatggattgggagctgctcgcaagctcaagtctcaccgcaggaggcaaaggtgggctgataagtcatacaagaaatcccatcttgggaatgaatggaagaaaccttttgccggttcatcccatgccaagggaattgtccttgaaaagataggtattgaagctaagcagcccaactctgctattcgtaagtgtgccagagttcaacttatcaagattgggaagaaaattgcagcttttgtccctaatgatggttgcttgaactacattgacgagaatga

SEQ ID NO: 10277 - DNA, 356 bp, Glycine max
  Clone ID: LIB3039-022-Q1-E1-A12
ggagaagcattagcaaaagcaagaagaactagtctaagcagaaatggcctcttcagtgatggcatctgtggccctcaaacctgcccctttcactgttgagaagtcctcagttagaggccttccctccctctcaaggaactcctcttcattcagagttgtggccagtggtggcaagaagatcaagactgacaagccttatggaattaatggtggcatggctttgagggaaggagttgatgcatctggcaggaaaggaaagggaaagggcgtttaccagtttgtagacaaatacggtgctaatgtcgatggttacagtcctatctacgacaccaacgactggtctccaaccggtgatg

SEQ ID NO: 10278 - DNA, 311 bp, Glycine max
  Clone ID: LIB3039-022-Q1-E1-A4
gatcgtagatctggagtgagtcgcggcggcggctggcaagtagtagtattaaaaaagttgatgggataattggcattggttgagtttggttcaaattgagaaaatcagtactccattaaccattcattcaccaatcctccatggcttcctcgtcgctgggtcagtctctccctttctctctccaaacctctaaaccctacgcgcctcccaaacccgccgcccacttcgttgtccgcgcccaatcccccctcactcagaacaacaactccgcctccaagcatcgccgctccgccgacaagaacatccggcga

SEQ ID NO: 10279 - DNA, 337 bp, Glycine max
  unsure (1)..(337): unsure at all n locations
  Clone ID: LIB3039-022-Q1-E1-A5
ggatcttatcaagagaggaatggcagtggaggatccatcctctccctatggccttcgccttgtgatagatgactacccttatgctgttgatggactagagatatggagtgctatccagacatgggttaaggactacgtctccttgtacgaggccacngatgatgcagttaagaaagactcagaactccaagcttggtggaaggaagctgttgagaagggtcacggtgacttgaaagacaagccatggtggcctaagttgaacactcttcaagatctgattcacatttgctggagtagtatatggactgcgtcagcactccatgcagctgtgaatttc

SEQ ID NO: 10280 - DNA, 378 bp, Glycine max
  Clone ID: LIB3039-022-Q1-E1-A6
aggaggatgtgaatgttatgggtggagcacatgtactgcaaaattctggaacccttaactctaacctcactcctcccaatgcctttagaagagacaactgggtcaacatgcactctatgccagactctagaaaatcagctacagatattaacatatctttgcctgatagttaggttggcgatcgaggggcgcactctctatcctcaagaactcttgctgacaacattcatgactcagctgttttattaatgtttagtgttctctctctttctctcactctcattaaaaggtatcatcacatttcatttattttcaatgagtaattcatgtgaattttgtccaaggcactcaagatagttggggtagagacatacgaca

SEQ ID NO: 10281 - DNA, 278 bp, Glycine max
  unsure (1)..(278): unsure at all n locations
  Clone ID: LIB3039-022-Q1-E1-A7
ggagcaaaaccctaatccctatttttcttcctcagtagtgtcatttacgcttctcttctctgcagcaactatgcctaaccctaaggtcttcttcgacatgaccatcggcggtcaatctgctggccgcatcgtgatggagctctacgccgacgtcactccccgcaccgccgagaacttccgcgcgctttgcaccggcgagaagggcgtanggcggagcggcaagcccctccactacaagggctcgtccttccaccgcgtgatcccgagtttcatgtgtc

SEQ ID NO: 10282 - DNA, 226 bp, Glycine max
  Clone ID: LIB3039-022-Q1-E1-A8
ggcacaagtttgttgagatagctagaagcaataagatgaaaatgaaagtgcttgttttgtttgttgctacagttttggtagcatatgaatgccatggctcagactaccagaagttccctctccaaatgaaaactgggtttggtggggaatacagcaatgaggtggcatgtgccaattggaagcttggcgtggaagcaaacaacgtagtcaggtggcaaactgttcc

SEQ ID NO: 10283 - DNA, 370 bp, Glycine max
  Clone ID: LIB3039-022-Q1-E1-A9
ggcacaagtgagtttgttgatcgagataactagaaacagtgtgatgaaaatgaaggtccttgttttcttcgttgctacaattttggtagcatggcaatgccatgcgtacgatatgttccctctccgaatgaacactggctatggtgcccgtactccggatgtgaaatgcgcaagttggaggcttgctgtggaagcacacaacatctttggctttgagaccattcctgaagagtgcgttgaagcaacataggaatacatccatggcgaacaatatagatcagactccaaaacagttaaccaacaagcttacttttatgccagagacctcgaagtccatcccaaggacacatttgtgttcagtatagatggc

SEQ ID NO: 10284 - DNA, 379 bp, Glycine max
  Clone ID: LIB3039-022-Q1-E1-B1
ggcacaagtgaatttgttgatcgagataactagaaacaatgtgatgaaaatgaaaggccctggtttcctccgtgccaaaaatttggtaacactggaatgccaagcgtacgaaaagttccctctccgaatgaacaactggcaaggtgcccctaacccggaaggtaaaatcccaagttggaagcttgctgtggaagcacacaacatctttggccttgagaccattcctgaagagtgcgttgaagcaacaaaggaatacatccatggcgaacaatatagatcagactccaaaacagttaaccaacaagcttacttttatgccagagacctcgaagtccatcccaaggacacatttgtgttcagtatagatggcaccgtactc

SEQ ID NO: 10285 - DNA, 156 bp, Glycine max
  Clone ID: LIB3039-022-Q1-E1-B10
gggacaagtgagtttggtgatcgacataactagaaacagtgtgatcaaaatgaaagtccttggtttcctcgatgctacaattttggtaacatggccatgccaggcgtacgatatgttccctcgccgaatgaacagtggccatggtgcccgtacacc

SEQ ID NO: 10286 - DNA, 370 bp, Glycine max
  Clone ID: LIB3039-022-Q1-E1-B11
aacaccgaaagggggacaagtgagtttgttgatcgagatgactaaaaacagtgtgatgaaaatgaaagtccttgttttcttcgttgcaacaattttggtagcatggcaatgccatgcgtacgatatgttccctctccgaatgaacactggctatggtgcccgtacaccggaggttaaatgcgcaagttggaggcttgctgtggacgcatacaacatccttggctttgagaccattcctgaagagtgcgtttaaacacacatggaatacatccatggcgaacaatagagatcagactccacaacagtgaaccaacaagcgtacttttatgccatagacctcgaagtccatcccaaggacacatttgtgttc

SEQ ID NO: 10287 - DNA, 325 bp, Glycine max
  unsure (1)..(325): unsure at all n locations
  Clone ID: LIB3039-022-Q1-E1-B12
ggtgtgagtgagattacccatagatagagagcgcggcataacctaaacttacccttcttctctctgtgtgtgtgcgcatcaaacgcaaccagaagcagccatggccactgcaagaactgtgaaggacgtttctcctcatgagttcgtcaaagcttactcttctcacctcaagcgatctggcaagatggagctgccagagtggactgatattgtgaaaactgcaagatttaaggagttggctccttatgatcctgactggtactatgtcagagctgcttccatggcaagaaagatctacttgagaggangacttggtgttggtgcc

SEQ ID NO: 10288 - DNA, 386 bp, Glycine max
  unsure (1)..(386): unsure at all n locations
  Clone ID: LIB3039-022-Q1-E1-B2
gacagcactgcactcgtcgcaacacaacanaagaagacaacccagagagcgcgtcgtaataaacgctcttctctgaaaacccccatttcgtttcgtcgttcgtcgtctcgttcgcgtcgtcgatcttcgatcttcgtcgctgaaaatgagagagtgcagttcagtccacatcggccaggccgggattcatgttggaaacgcctgctgggagctttactgcctcgaacacggcattcagcctgatgggcagatgccaagtgacaagaccgttggtggatgtgatgatgctttcaacaccttcttcagtgaaactggggcaggaaagcacgtgccccgtgcgaggtctgtagatcttgagcccacgtgattgatgacgttaggactgg

SEQ ID NO: 10289 - DNA, 281 bp, Glycine max
  Clone ID: LIB3039-022-Q1-E1-B4
ggggcagttgaatatgattattcagtggagaaaaaacagtgtgatgaacatgtacgactatggattcttaaaagcgatgaatttgatgacgcagcaaagaaagcgattatcacacgatttaatctcaggcaagaaaacttgttaatgcggacgtacacgagacgtgaaatttcaacattcgatacattgattagaatgcgagtacatctaaagctcagatagaaatcgtaaaaaatgttttgaagccctacacgaatgaagttatgcgtatttatgggaat

SEQ ID NO: 10290 - DNA, 309 bp, Glycine max
  Clone ID: LIB3039-022-Q1-E1-B5
ggtgctctgctcgtgcctctagggttatcatttctccatttccagtttctctctcacttttcaagaatcgtaagctatgggaaagtcttacccaactgtgagtgctgattaccagaaggccgttgagaaggcgaagaagaagctcagaggcttcatcgctgagaagagatgcgctcctctaatgctccgtttggcatggcactctgctggaacctttgacaagggcacgaagaccggtggacccttcggaaccatcaggcagcctggcgaactggctcacagcgctgacaacggtcttgacatcgctgt

SEQ ID NO: 10291 - DNA, 442 bp, Glycine max
  unsure (1)..(442): unsure at all n locations
  Clone ID: LIB3039-022-Q1-E1-B6
gggggggggggggggaggggggggggggggggggggggggggggggggggggggggggtggggggcaaggttagggacangtatggggagagggggggaagagggggggaagggggggggagggggggaggggggggggggggggggagaggggggggggggggggggggggggggggggagggggggggggggggggggggggggggggggggggggggggggggggggggggggggggggggggggggagggggagagggggggggggggggggggggggggggggggggggggggggtggggggggaggggggggggggggggggggggggggggggggggggggggggggagggggggggggggggggggggagggggggggggggggggggggggggggggggtgggggaagggggggggggggggggggggggggg

SEQ ID NO: 10292 - DNA, 306 bp, Glycine max
  Clone ID: LIB3039-022-Q1-E1-B7
gagatcttccatagtaagctgttgagtggaaccatatcgagcacctgagttgacttgttttgtcccttgtccatctccatggccactccacagtcccacttccgttttctcgctttctcactctctatcatccatatctctctcttcctctccagaagcgcaacccaacaaccgctcctcgaagaacaagacactcccatcacgcacttccagcgctacctccgcattaacacaggccagccaacccctgactacacctccgcggtctccttcctcaaagcgcaggcccaaagcctgggcctcaaa

SEQ ID NO: 10293 - DNA, 72 bp, Glycine max
  Clone ID: LIB3039-022-Q1-E1-B8
gatttcagttatttttttgatgaagtactgtagcagcagtcttatgaatataaaagtcataggcttcatcat

SEQ ID NO: 10294 - DNA, 365 bp, Glycine max
  Clone ID: LIB3039-022-Q1-E1-B9
ggtgtgcaaaagagcgtcgtagtcgcaaccctaatcagaagaagcgcagcttcaagcgagtgacagccaccagccatgggtcgtatgcacagccgcggtaagggtatatcctcttctgctttgccctacaaaaggacacctcctagctggctcaagatctcttcgcaagatgtcgaagaaaatatctgcaagtttgcgaagaaaggtttgaccccgtctcagattggtgtcattctcagagattctcacggtattgctcaggtcaatagcgtcactggcagcaaaatccttcgcatcctcaaagctcacggacttgcgcctgaaattccagaggacctgtaccatttgattaagaaggcagtttc

SEQ ID NO: 10295 - DNA, 358 bp, Glycine max; identical to SEQ ID NO: 7967
  Clone ID: LIB3039-022-Q1-E1-C10

SEQ ID NO: 10296 - DNA, 355 bp, Glycine max
  Clone ID: LIB3039-022-Q1-E1-C11
ggcacaagtgagtttgttgatcgagataactagaaacagtgtgatgaaaatgaaggtccttgttttcttcgttgctacaattttggtagcatggcaatgccatgcgtacgatatgttccctctccgaatgaacactggctatggtgcccgtactccggaggtgaaatgcgcaagttggaggcttgctgtggaagcacacaacatctttggctttgagaccattcctgaagagtgcgttgaagcaacaaaggaatacatccatggcgaacaatatagatcggactccaaaacagttaaccaacaagcttacttttatgccatagacctcgaagtccatcccaaggacacatttgtg

SEQ ID NO: 10297 - DNA, 296 bp, Glycine max
  Clone ID: LIB3039-022-Q1-E1-C12
taaaggggcataagttactctgttgatcgagattacaaacaaagtgttatcaacattaaggtccttgtcttcttcgttgctacaattttggtagcatggctatgccatacgtacgatatgtaccctcgccgaatgaacactggccatagtgcctctactcctgaggtaaaattcccaagttgtacgcttgctctagaagcacacaacatctttggctttgagaccaatcctaacgagtgcgttgaagcaacaaacgaatatatccatggcgaaccatatagatcatactccagaac

SEQ ID NO: 10298 - DNA, 325 bp, Glycine max
  Clone ID: LIB3039-022-Q1-E1-C2
gagtgcacaagtgagtttgttgatcgagataactagaaacagtgtgatgaaaatgaaggtccttgttttcttcgttgctacaattttggtagcatggcaatgccgtgcgtacgatatgttccctctccgaatgaacactggctatggggcccgtactccggaagtgaaatgcccaagttggaagcttgctgtgggagcacacaacatctttgggggttggacgattcctgaagagtgcgttgaagcaacaaaggaatagatccatggcgaacaatatagatcagactccagagcagttaaccaacaagcttacttttatgccaga

SEQ ID NO: 10299 - DNA, 258 bp, Glycine max
  Clone ID: LIB3039-022-Q1-E1-C4
ggcacaagtgagtttgccgatctagataactagaaacagtgtgattaaaatgaaggtccttgttttcttcgttgctacgattttggtagcatggcaatgccatgcgtacgaaatgttccctctccgaatgaacactggttatggtggccgtagtccggaggtgaaatgcccaagttggaggcttgctgtggaagcacacaacatctttggctttgagaccattcctgaaaaattcgttgaagcaacaaaggaatacat

SEQ ID NO: 10300 - DNA, 329 bp, Glycine max
  Clone ID: LIB3039-022-Q1-E1-C5
ggcacaagtgagtttgttgatcgagataactagaaacagtgtgatgaaaatgaaggtccttgttttcttcgttgctacaagtttggtagcatggcaatgccatgcgtacgatatgttccctctccgaatgaacactggctatggggcccgtactccggaggtgaaatgcgcaagttggaggcttgctgtggaagcacacaacatctttggctttgagaccattcctgaagagtgcgttgaagcaacaaaggaatacatccatggcgaacaatatagattagactccaagacagttagacaacaagcttacttttatgccagagacctcg

SEQ ID NO: 10301 - DNA, 361 bp, Glycine max
  Clone ID: LIB3039-022-Q1-E1-C6
ggcacaagtgagtttgttgatcgagataactagaaacagtgtgatgaaaatgaaggtccttgttttcttcgttgctacaattttggtagcatggcaatgccatgcgtacgatatgttccctctccgaatgaacactggctatggtgcccgtactccggaggtgaaatgcgcaagttggaggcttgctgtggaagcacacaacatctttggctttgagaccattcctgaagagtgcgttgaagcaacagaggaatacatccatggcgaacaatatagatcagactccaaaacagttaaccaacaagcttacttttatgccagagacctcgaagtccatcgcaaggacacatttgtgttcagt

SEQ ID NO: 10302 - DNA, 209 bp, Glycine max
  Clone ID: LIB3039-022-Q1-E1-C7
ggcacaagtgagtttgttgatcgagataactagaaacaatgtgatgaaaatgaaggtccctgttttcctcggtgccacaattttggtaacatggcaatgccatgcgtacgaaatgttccctccccgaatgaacactggctaaggtgcccgttctccggaagtgaaatgcccaagttggaagcttgctgttgaagcccacaacatccttg

SEQ ID NO: 10303 - DNA, 328 bp, Glycine max
  Clone ID: LIB3039-022-Q1-E1-C8
ggcacaagtgagtttgttgatcgagataactagaaacagtgtgatgaaaatgaaggtccttgttttcgtcgttgctacaattttggtagcatggcaatgccatgcgtacgataggttccctctccgaatgaacactggctatggtgcccgtactccggaggtgaaatgcgcaagttggaggcttgctgtggaagcacacaacatctttggctttgagaccattcctgaagagtgcgttgaagcaacatatgaatacatccatggcgaagaagatagatcagactcgaaaacagtcaaccaacaagcttacttttatgccagagacctc

SEQ ID NO: 10304 - DNA, 348 bp, Glycine max
  Clone ID: LIB3039-022-Q1-E1-C9
ggcacaagtgagtttgttgatcgagataactagaaacagtgtgatgaaaatgaaggtccttgttttcttcgttgctacaattttggtagcatggcaatgccatgcgtacgatatgttccctctccgaatgaacactggctatggtgcccgtactccggaggcgaaatgcgcaagttggaggcttgctgtggaagcacacaacatctttggctttgagaccattcctgaagagtgcgttgaagcaacaaaggaatacatccatggcgaacaatatagatcagactccaaaacagttaaccaacaagcttacttttatgccagagacctcgaagtccatcccaaggacac

SEQ ID NO: 10305 - DNA, 368 bp, Glycine max
  Clone ID: LIB3039-022-Q1-E1-D10
ggtaaacaaagaccatcaccaaaaaagaaaatgatgctcggagagcaccatcgcgcgaatccaacggttcacgtgccaccgtggccaacccacgacgattcaacggccgagatgtactccgcgtttttaacaaacgacgtcaatgctggtgagtactccccgtactatcttcaagaagcactaacggctctgcagcgttttctgccgtctaacgaaacggacgctgactcggacacggaggctcaacccgacgcggcggtggacgcgtactcgtgcgaccatttccgcatgtacgagttcaaggtccgtcgatgcgcacgtggcaggtcacacgactggacggagtgtccgtacgcgcatcccggcga

SEQ ID NO: 10306 - DNA, 368 bp, Glycine max
  unsure (1)..(368): unsure at all n locations
  Clone ID: LIB3039-022-Q1-E1-D11
ccagatgacaaaagacggggacaggggagaatctgctggtatcccttantttgactatgcgctctgttacctatgtgttcgtaactgctatgttcacttgacaagatttactagcatggctcattcatcaggtttgcaatactcgtcgtagtgatcacacagatccttgtcagtctagtcgtaacgtacaatgttcaagatcgacgcatggactagacccgtgatccaccttctggagatcaagactcaggctcaaatacgtatgctcatccatcgcatggctatgtaagcatctccgtctcatcatatccacatattcgaattaatcgaccatcacatccaagttgaaacggtggattaatacctcg

SEQ ID NO: 10307 - DNA, 351 bp, Glycine max
  Clone ID: LIB3039-022-Q1-E1-D12
gacacattgtgagtatcaacaagaatactcataatataggtagcatatagagctatagttatattgatattgcgatttgttaagctcttatttcctcggccatggctaagaatgaacgtgatctcttctcggcggagattgtgaatcgtggaattgaaccgtcgggacccaacgttggctcgttgacattctctgtgatggtgaggaggcgcttaccggattttctgcaatcggtgaaccttaagtacgtgaaattgggttaccattatctcataaaccatggcatatacttgttcaccatacccgttcttctcgtggtgtttagtgctgaggttgggagcctcagcaaag

SEQ ID NO: 10308 - DNA, 165 bp, Glycine max
  Clone ID: LIB3039-022-Q1-E1-D2
gaaaacattcatattataattaccaaaacgagaatgcaataactcaatgtacatgcccattgtgtgggagagacaatggtaataggtgtgttttggtgttggttcttgcacaggctgtggccacaaatgccaaaaaccttcccaaccccaaagatgcaggtcata

SEQ ID NO: 10309 - DNA, 370 bp, Glycine max
  unsure (1)..(370): unsure at all n locations
  Clone ID: LIB3039-022-Q1-E1-D4
acaacaaacactacacaaaccttcaaaagccacacacaacacaagacacacttccgatggaagagacaccgcgacaattaagctactgacttctgagtaatgcggggaccgcagagatacggattgttttggctgtcagattactttcgtttgacgtttatgatcgtgttgggttttcactatgagtggtgttcctaagagatctcatgaggatgctgttcatcagtcgtcaaagcatccacatcaagattcaggtgcatattccaagttgatgccttcagtttcaaatgaccaccagattccttatgatatgagtcaggattcacgggtggcanagacagtccgtactgaacctcgtgatgcagataga

SEQ ID NO: 10310 - DNA, 252 bp, Glycine max
  Clone ID: LIB3039-022-Q1-E1-D5
ggcagttgtattgttgaacaagggtttcgctgtctgcttcttcactttctctcgtttcaatcgaaacgaaaacaaaaacatgggcagaaaattcttcgtcggtggcaactggaaatgcaatgggaccactgaggaggtaaagaagattgttacgactttgaatgaggcgaaagtccctggagaagatatcgtacaagttgttgtgagccctccttttgtgttccttcctgtgggtaaaagtttgctgcgccc

SEQ ID NO: 10311 - DNA, 258 bp, Glycine max
  Clone ID: LIB3039-022-Q1-E1-D6
ggttctgggtgtttttcttatctgtgttttgtttcaattgcgcgaggtgggtttttccatggtttggacgctatgccgaaagcgggttgaataagctcaggaatttgagattttgtgggtggtacttgacatggattgaggaatgaagcggactttggcatgttatttggttggctattgtgttgttgctaggaaattttcgaaaatgtgtttctcagtgtccccaaatcctgatgagtctttccccccaggtgtttg

SEQ ID NO: 10312 - DNA, 140 bp, Glycine max
  Clone ID: LIB3039-022-Q1-E1-D7
ggttgttcccctttctctcgttttttcccaaaaccttctgaggttaaagcaaaaaacaaagagagagagaaaaagaaaatgatgaagccatcgatgctcaaatttctccaatccgccgccacccgcggggcctctcatct

SEQ ID NO: 10313 - DNA, 77 bp, Glycine max
  Clone ID: LIB3039-022-Q1-E1-D8
tcgtaaaaaagacaacgaaagggggtgcaaagggggtagaacttacattgccaatcgagatagctaataactctggg

SEQ ID NO: 10314 - DNA, 305 bp, Glycine max
  Clone ID: LIB3039-022-Q1-E1-D9
agggtggcaaaaaaccaacaaaggggggcacaagtgagtatgatcatcgataacaactatgcacagtgtaactaaaactgagtgaccgtattgtccacgttgctacgtttttgatccaatcgcattgacatgcctaaaattagtccgctctcctaaagaacaacgtctatggtgccaatactcccgatgtgaactgcacaatttagaagcttgctgtcaacgtacacaacatctttggcattgagaccattcctcaaaaatgcgtgcacaaaccaactgaatatatccatgcgtaacaatatata

SEQ ID NO: 10315 - DNA, 335 bp, Glycine max
  Clone ID: LIB3039-022-Q1-E1-E11
ggaaagcggcttctattccctcaactcaccataatataactttccattttttctctagacacttctctctctctctctctctctctccagctttagcaaatacgcaaggcaaaacattcacagcgatagctagcaaacaccctcaagataacaactttctccaatggcagcatcaaagctggttccttgattgttattactaaccataataacaagaacgaggaatgtgttgggtcaaggaggaacagcgagctggtgtgtagcgaggagtgacgcgagaagcgatgcactgcaaacagcgttggactatgcttgtggggccggtggggattgtc

SEQ ID NO: 10316 - DNA, 346 bp, Glycine max
  Clone ID: LIB3039-022-Q1-E1-E12
gactcacaactccataacacaaggcagaaagcaagctcatcctagagttttaaaaatggcagcagcctcctccatggctctctcttccccatccttggctggcaaggccgtgaagctgggcccatcagcccccgaagtcgggagggtcagcatgaggaagaccgtcaccaagcaggcctcctccggaagcccatggtacggcccagaccgcgtcaagtacttgggcccattctctggcgagcccccgtcctacctcactggcgagttcccaggtgactacggctgggacactgctgggctttcggccgacccagaaaccttcgccagaaaccgtgagctcgaagtg

SEQ ID NO: 10317 - DNA, 345 bp, Glycine max
  Clone ID: LIB3039-022-Q1-E1-E4
gacacacaccatttaaccatttttcccgcacaaacaacacagacactgactctctcactacacgcgcgcgcgcgcgagagagaaagacctcagtgtctgagacgcacgcagcgtgcattttcccataagacggacagcatcacgccgttttcgcctccccgtcgtttccggatccgtcgtcgtcgttttcgtcttcgtcaattagtttagttgagaatcaatcccaggacaccgagctggagcctccgcccggcggctcctccaacggtcagatccgctaacggtcgccgtcctccgctgagctcttcgacgggccagccagcagcaactctccgccgtcgcacg

SEQ ID NO: 10318 - DNA, 173 bp, Glycine max
  Clone ID: LIB3039-022-Q1-E1-E5
agatgggagaaaaaaacagaagggaagggggggaatgacggagaaatcatggacgaccggacgagcgtaggcgtgtggatggcgttctacgatgtcgacaaggttagagagtaggacaagcgaagcagggaattgcggaggaataggaaaacctgtaagagtggaagagaggg

SEQ ID NO: 10319 - DNA, 378 bp, Glycine max
  Clone ID: LIB3039-022-Q1-E1-E6
ggcacaagtgagtttgttgatcgagataactagaaacagtgtgatgaaaatgaacgtccttgttttcttcgttgctacaattttggtagcatggcaatgccatgcgtacgatatgttccctctccgaatgaacactggctatggtgcccgtactccggaggtgaaatgcgcaagttggaggcttgctgtggaagcacacaacatctttggctttgagaccattcctgaagagtgcgttgaagcaacaaaggaatacatccatggcgaacaatatagatcagactccaaaacagttaaccaacaagcttacttttatgccagagacctcgaagtcgatcccagggacacatttgtgttcagtatagatggcaccgtact

SEQ ID NO: 10320 - DNA, 349 bp, Glycine max
  Clone ID: LIB3039-022-Q1-E1-E7
ggcacaagtgagtttgttgatcgagataactagaaacagtgtgatgaaaatgaaggtccttgttttcttcggtgctacaattttggtagcatggcaatgccatgcgtacgatatgttccctctccgaatgaacactggctatggtgcccgtactccggaggtgaaatgcgcaagttggaagcttgctgtggaagcacacaacatctttggcgttgagaccattcctgaagagtgcgttgaagcaacaaaggaatacatccatgggcgaacaatatagatcagactccaaaacagttaaccaacaagcttacttttatgccagagacctcgaagtcaagcccaaggacac

SEQ ID NO: 10321 - DNA, 355 bp, Glycine max
  Clone ID: LIB3039-022-Q1-E1-E9
gggagaagaatttgcatagagcaagcaaagcgggggagaatgagaggcagcatacacgaacaatggctacgtctctctctgtttcgccatctctctctctctcaagactctcttcatcgccaaagcgcttccactatctcgcccctcctttctctctctccctctcaccaactccctactctctctctccacgcgccgccgcaccttcatcgtccgcgccaaatctcatcacggctccgagcccgttcccgcccactacgacttcgatctcttcaccatctgcgcaggcagcggcggtgtccgatccgctcacttcgacgctaactacggcacttctgtcgccatctgcgatctt

SEQ ID NO: 10322 - DNA, 271 bp, Glycine max
  Clone ID: LIB3039-022-Q1-E1-F1
ggcacaagtgactttgttcatcgagaaaactagaaacagtgtgatgaaaatgaaggtccctggtttcttcgttgctacaattttggtaggatggcaatgccatgcgtacgatatgttccctctccgaatgaacactgggctatggtgcccgtactcccgaggtgaaatgcgcaagttggacgcttgctgtggaagcacacaacatctttggctttgagaccattcctgaagagtgcgttgaagcaacagaggaatacatccatggcgaaca

SEQ ID NO: 10323 - DNA, 360 bp, Glycine max
  Clone ID: LIB3039-022-Q1-E1-F10
gattatatttgagttcaaacatatcaaagccatggccaactccaacttctctattgttctctccgtctccctatccttccttttggtgcaacttaccaaggcacactcaaccgataccgtatctttcatcttcaataagttcaacccattccaaccaaacattatgctccaaagtgatgctagtatttcatcctctggggtgttacaactcaccaaagttggcaccatcggcgtgcccagctcgggatctctcagtcgtgccctttacgctgcaccaatccagatttgggacagcgacaccggcaatgtaaccagctgggctacatcctttaaattcaacattttcgcatccaacagatc

SEQ ID NO: 10324 - DNA, 354 bp, Glycine max
  Clone ID: LIB3039-022-Q1-E1-F11
ggcacaagtgagtttgttgatcgagataactagatgcagtgtgatgaatatgaaggtccctgttttcttcgttgctacaattttggtagcatggcaatgccatacgtacgatatgttccctctccgactgaatactggctatggtgcccgtactccggaggtgaaatgcgcaagttggacgcttgctgtggaagcacacaacatctttggctttgagaccattcctgaagagtgcgttgaatcaacaatggaatagatccatggcgaacaatatagatcagactccacagcagttagacaacaagcttacatttatgccagagacctcgaagtcatcccaaggacacatttgtg

SEQ ID NO: 10325 - DNA, 153 bp, Glycine max
  Clone ID: LIB3039-022-Q1-E1-F12
accggtcgtacgacggctgcgagagggggacagattgggatggttttgcacagttgtagctgcacagccaccgttaccaccgaccttggtatcgtccaaggaacccctttggaagacacatcgaatcggatttgctcgcaagctcaactccca

SEQ ID NO: 10326 - DNA, 390 bp, Glycine max
  unsure (1)..(390): unsure at all n locations
  Clone ID: LIB3039-022-Q1-E1-F3
gatcgaagcgaagccagatgaaatgtaaaacggtgggattgagcctccaatcctcaaaagttggagttgcagggattggtgtttgctcaagttaatgagagatggcatgaaatcccgtatattgctggacgctgcaaaaagttgcatattgggttcgtctcctgttttcagaaggcaacaattcttgataaagtgtgtgggacgctccactgatcaaagagacatgcaagccctaaggtctcttgaagttgactctcagagtagtattcgagcaattactcctgcccttgattctaccagacataaaggccaggcangaaatatagctgttattggaagttgccggtaatacacaggtgctccatagttttctgcaatttcggccttaaa

SEQ ID NO: 10327 - DNA, 346 bp, Glycine max
  Clone ID: LIB3039-022-Q1-E1-F4
ggcagcatcgtagagaaataagggaaaaatggtgtcgctgaaactgcagaagcgcctctccgcaagcgtgctcaagtgcggcagaggaaaggtttggcttgaccccaatgaagtcaacgaaatctccatggccaattctcgggaaaacatcaggaagttggttaaggatgggtttatcatcaggaagccaaccaagattcactcccgctcacgtgctcgtaggatgaaggaggcaaagaggaagggccgccactccggttatggtaaacgtaaggggtacaagggaggcaaggcttcccaccaagatactctggatgagaaggatgcgtgtgctcagacggttgct

SEQ ID NO: 10328 - DNA, 379 bp, Glycine max
  Clone ID: LIB3039-020-Q1-E1-G10
gacacaaccactctttcttcttcttctcttaaaagagcctttgctttttctttaggcctttccgaattaagtacttgtttcattttctctcgaagcaagaaaaatgttcatcgagagtttcaaggttgagagtcctaacgtgaagtacacagagactgagattcagtccgtgtacaactatgaaaccactgaacttgttcacgagaacaagaatggcacttatcagtgggttgtcaagcccaaaactgtcaaatatgaatttaaaaccaacaaccatgtccctaaactaggggtaatgcttgtggggtggggtggaaacaatggctcaaccctcaccggtggtgttattgctaaccgagagggtatttcatgggcaaca

SEQ ID NO: 10329 - DNA, 69 bp, Glycine max
  Clone ID: LIB3039-018-Q1-E1-H7
acccaagcgtccaacgtgatacttcacactcctctattcgaccttcttgtctctctctcagtctcgcgt

SEQ ID NO: 10330 - DNA, 335 bp, Glycine max
  Clone ID: LIB3039-018-Q1-E1-H8
gtgaagagttgattgaagcctcggctaccctcgtatggatcgcttcagcccttcatgcagctgttaactttggacagtatccatatggaggtttaatcctaaacaggccaaccattagcaggagattcatgcctgagaaagggtctgctgagtatgcagctttggctaagaaccctgagaaggagtttttgaagactattactggcaagaaggagaccctcattgaccttacaattatcgaaatcttgtcaaggcacacatctgatgagttctaccttggggagagagatggtggtgactattggacttctgatgctggtccactataggccttc

SEQ ID NO: 10331 - DNA, 218 bp, Glycine max
  Clone ID: LIB3039-018-Q1-E1-H9
gaaacacacttgtgtctgaaattgagcagtgcagaaactcctgaacgtcaacggctatggcagcttcttcctttacaacatcttccattcggcgtgggattcacaactagttctaaatcccctccttctcaactattcccctcttttccttgcaaacatcataccctccgtctcagacccgtctcaatctcaggcgcttcaaccccaaccccctccat

SEQ ID NO: 10332 - DNA, 379 bp, Glycine max
  Clone ID: LIB3039-019-Q1-E1-A1
ggtgattccattgtttcattgaactaaaatttgaaaaacaaaacaaaagagaatttcaatggcggatgatagtaaccgcctcgtgaggctgctatgccgcccgaagccactcaacaccaaaggatccgacccgggaatccatttctggcttatcggatccccattcttcccgccactcaccgtcgcctccttcctccgccgcatccacgccctcccctccgctgcttcccccgatttgcccaaggaatcggaggaccttcgcactctcatcccgagaggcttcgaagtcgtcggtgccctagcttccggcgatgacgcccacgctcgcgcggccgttgacgccgcgcgtacgttgaggaaccttctctacggcgaggga

SEQ ID NO: 10333 - DNA, 360 bp, Glycine max
  Clone ID: LIB3039-019-Q1-E1-A10
ggaacggaaaagcactggcgcagctaccctgaggcttctcttctcttctcttctctgtcgtgagtcaccatggtgagggttagtgtgctgaacgatgctctgaagagcatgtacagtgctgagaaaaggggaaagcgccaagtcatgattaggccatcctccaaagtcattatcaaattccttttggtgatgcaaaagcacggatacatcggagagtttgagtatgttgatgaccacagggctggtaaaatcgtggttgaattgaacggtagactgaacaagtgtggggttattagtccccgttttgatgtgggcgtcaaagagattgaaggttggactgctaggctttctccctcaaga

SEQ ID NO: 10334 - DNA, 355 bp, Glycine max
  unsure (1)..(355): unsure at all n locations
  Clone ID: LIB3039-019-Q1-E1-A12
gtctgattaagggtcaactattaatctgttatacagggcgttgagctctcattttgccatcattgacaactttagcacagcatctaggctgccttctgtgaaagcattgggtagccctggtttattgcaggcatttactggtccatgtatcaatcttaattcgtttctcttaggtccagcaatttaagtgataaatttgtaatgtgatctataaaaaaggaatagtgaaagtttctataggacaaacaatgtaacttaataggcattacctttgtatttatgattttatacgccagagtttcgaaatttattagcgcgtcgaagtaacatgaacctttatcaatttagcanaana

SEQ ID NO: 10335 - DNA, 376 bp, Glycine max
  Clone ID: LIB3039-019-Q1-E1-A2
gtctacactgtcttctctgccactgaccccaagaggaatgccagagattcccatgtgccggttttggctccacttcccattggatttgctgtgttcatggttcacttggccaccatcccagtcactggtactggtatcaaccctgctaggagtcttggagctgctgttatctacaaccaagataagccatgggatgaccattggatcttttgggtaggaccatttattggggcagccattgcagccttctaccatcagttcatcttaagagcaggtgcagctaaggctcttggatcattcaggagtaacccccataattgagttgtctttctcttccttatgatggctctagtggaaagaagataattggagagat

SEQ ID NO: 10336 - DNA, 372 bp, Glycine max
  unsure (1)..(372): unsure at all n locations
  Clone ID: LIB3039-019-Q1-E1-A3
ggttcctttgcctctttcgcttttgcttcctaggtttttttttttttgtgtcgatggcgggaaaaggagggaaggggcttgtggccggaaaaaccacggcagcgaacaaggacaaagacaaggataagaagaggcccgtctctcgttcatcccgtgctgggatccagtttcctgtgggacgtatccacaggcagttgaagcaaagggtgcaagcaaatggacgtgtgggggcgactgctgctgtgtacttggcctccattctggaatatctgactgctgaggtgctggagctggcagggaatgctagcaaagatcttaaggtgaagaggatcacaccaaggcacttgcaacttgctatcangggagatgaag

SEQ ID NO: 10337 - DNA, 383 bp, Glycine max
  Clone ID: LIB3039-019-Q1-E1-A4
gactccgaagtcaccctacaacaacacatacactcacacaataatggaaaaagggcaaagaaaaacaacaccactactactatgctctcacattgtggttctccatttgctctccctagtggccgagactagtgccaaggtttccgcggtgatcgtcttcggtgactcctccgtcgacgccggcaacaacaacttcatccccaccattgcacggagcaatttccagccatatgggcgtgactttgaaggtggaaaagccactgggaggttctgcaatgggagaatacctacggattttatatcagagtcttttgggctgaaaccttatgtgccagcatacttggatcctaagtataatatttcagattttgcaagtggggtca

SEQ ID NO: 10338 - DNA, 384 bp, Glycine max
  Clone ID: LIB3039-019-Q1-E1-A5
gagtgcagtgatagagataagaaaatgtggcttgtgcagctctcaaccccatttctgaacggacatggtcattccaccacccttctctccaagcacagttcggcggtgactcagacccactgggccccaccgagtttcctgcctcaaatcaatgcgatgaagacaatgcaggggagagtggtgtgctccaccagcgacaagacggtggcagtggaggtggtgcggctggcccctcacccaaagtacaagaggcgcgtgaggaagaagaagaagtaccaggcccacgaccccgataaccaattcaaagtcggcgacatcgtccagctccagaagaccaggcccatcagcaagaccaaggcctttctcgcactccccgttcccaaa

SEQ ID NO: 10339 - DNA, 362 bp, Glycine max
  Clone ID: LIB3039-019-Q1-E1-A6
gaacaaattgaaaattacaataagccatttcttgatgctctggcccaatatgatgatgggagggacctatctgattatgacttcaaccaagatgaattaggttccccacatgaggatgatgccaacaatagaaaacttgcatataggcatcgagtcattgcccaaaaatacttacagggtttacgtaatattttagatcatgagacaataaaactctgggatgaattgtatgataaaactgatgaatacactgacaggtggctttcatcagcacggacgtttttgaaggagtgttcgggtgaagataaagatgcagtttcctctgttgcttttgctaacactagctcaaactcaactaattc

SEQ ID NO: 10340 - DNA, 383 bp, Glycine max
  Clone ID: LIB3039-019-Q1-E1-A7
ggcacaagtgagtttgttgatcgagataactagaaacagtgtgatgaaaatgaaggtccttgttttcttcgttgctacaattttggtagcatggcaatgccatgcgtacgatatgttccctctccgaatgaacactggctatggtgcccgtactccggaggtgaaatgcgcaagttggaggcttgctgtggaagcacacaacatctttggctttgagaccattcctgaagagtgcgttgaagcaacaaaggaatacatccatggcgaacaatatagatcagactccagaacagttaaccaacaagcttacttttatgccagagacctcgaagtccatcccaaggacacatttgtgttcagtatagatggcaccgtactctcta

SEQ ID NO: 10341 - DNA, 322 bp, Glycine max
  Clone ID: LIB3039-019-Q1-E1-A8
gattgttggcttgtgctctgctcgtgcctctagggttatcatatctccatttccatttcctctctctcagtttccaagaatcttaagctatgggaaagtcttacccaaccgtgagcgctgattaccagaaggccgttgagaaggcgaagaagaagctcagaggcttcatcgctgagaagagatgcgctcctctaatgctccgtttggcatggcactctgctggaacttacgacgtgagctcgaagaccggtggtcccttcggaaccataaagcacccctccgaactcgctcacggcgctaacaacggtcttgacatcgctgt

SEQ ID NO: 10342 - DNA, 348 bp, Glycine max
  Clone ID: LIB3039-019-Q1-E1-A9
gaagacgacagaagggggcccgggactcatcgctcatagctgaagaacctgattatcagggcatcaatgcgtgtcatgctcatcctcatgcggttttatattgggcaaagcaagtcaattcgaggcgctaatgttgtgtatcgaataattgtttctcaaattgataaatctcccatttatgaagtgtttaacttggagaaatgctgcagaacaacattctctttacgtgtacgtcataagtcgttatgtttgcgtcgcttgaagcaagaaggaaatgatggtgttgaatttggataatacccttatgagatttacaatcatgatgtggtgcaaacagtctctatcgct

SEQ ID NO: 10343 - DNA, 367 bp, Glycine max; identical to SEQ ID NO: 7990
  Clone ID: LIB3039-019-Q1-E1-B1

SEQ ID NO: 10344 - DNA, 386 bp, Glycine max
  Clone ID: LIB3039-019-Q1-E1-B10
gacttgtaataattcttataacacaacacaacccatggccaccacctccgcattcctcctccttcccctcctcctgctgctccacctcgccatcgccgctcacggcatcggcatcaactacggcacgctcggcgacaaccttccaccgcccgcggcggtggcgaacttcctgaagacgaagacgaccatcgaccgcgtgaagatctacgacgtgaacccggacatcctgcgggccttcgccggcagcggcatctccgtgacggtgaccgcccccaacggcgacatcgccgccttaaccaaaatcgactcggcgaggcagtgggtggcgacgcacatcaaaccctttcaccctcagaccaaaattaattacatcctcgtcggcagcg

SEQ ID NO: 10345 - DNA, 383 bp, Glycine max
  Clone ID: LIB3039-019-Q1-E1-B11
ggaacctttgcattctattcattcaagattcagcaagtgcgttttggaagcagagaccgaaatacttcgagatggcccgtacaaagcaaactgctcgtaagtcaactggaggaaaagctcccaggaagcagcttgcaaccaaggctgcacgtaagtctgcaccaacaactggtggtgtgaagaagcctcatcgttatcgccctggaactgttgctcttcgtgagattaggaaataccagaagagcactgagctcctaatcaggaagcttcctttccagaggttggttcgtgaaattgcccaggatttcaagactgatctgcgtttccagagccatgctgtgcttgcattgcaagaggctgctgaggcataccttgttgggctc

SEQ ID NO: 10346 - DNA, 368 bp, Glycine max
  Clone ID: LIB3039-019-Q1-E1-B12
gacaacactcatagtagagtaaccaaaaggagagtgcaataactcgttgtacattcctagtgtgtgggagagacatggctaagatgtgtgttttggtgttggttcttgctctggctgtggccacaagtgccagaaacgttcccaaccccaaggatgctggtcttaaggaccagaagaacttcatcagctatggtggagttggtggttattccgggattgggaacaatggactgccttttggaggagctggtgccggaataggtggtggttttggcagaggtggtggacttggtggtggcctcggcggtcctaccggtgggatcggagggtttggcggtaccggtagcggtgtcggtggcggtattggt

SEQ ID NO: 10347 - DNA, 376 bp, Glycine max
  Clone ID: LIB3039-019-Q1-E1-B2
gggtgtgggcatatatccaacataaaaggacaattttccgggaattggtaatgtttgacaaagaaaaccaccaatttcaaacacagagagaagggttttggaatggatggaatgactccgcgtcccctcctcatccccttcaattcaaccctcattcctaagcctccaatccaaccatctcagcctcacactcacatgtacacatatctgaacgcgtatcgtccctcctatggcttcaaagcgcatcctcaaggagctcaaagacttgcacaaagacccaccaacttcttgcagcgctggtccagtagctgaggacatgttccattggcaagcaacaataatgggtcctgctgatagtccttatgctggaggtgta

SEQ ID NO: 10348 - DNA, 381 bp, Glycine max
  Clone ID: LIB3039-019-Q1-E1-B3
gacacttcaaaatcctctagtaacccttcttttctctctctctctctcgtgttctgagctgctagaagcaatggagaggaaaagaagccatgcttctttcaccatgtttgcaatgcttgttggattgctctctcagagccttgtcattcctgtaatatccaccactgttgcagatcagaagaactactacaccccagatccacatgctggaagtccccccacaggtttctccgattctctgtgctcacacaatagtagtcctccatctcatggccatgggagctctccaccctcacatcacaatagtccaagtactccatcaacaccctcaggtggaaactgtggattatcacccccacaacatcatgattcaacaccctc

SEQ ID NO: 10349 - DNA, 386 bp, Glycine max; identical to SEQ ID NO: 10250
  Clone ID: LIB3039-019-Q1-E1-B4

SEQ ID NO: 10350 - DNA, 370 bp, Glycine max
  Clone ID: LIB3039-019-Q1-E1-B5
ggagttacagccgcagcttgaaacagagcagagcgaccttgaagagctatggctgtcggaaagaataagaggatttccaagggaaagaagggtggcaagaagaaagccgctgatccctttgccaagaaagactggtacgatatcaaggccccttccctcttccaggtcaagaatattggcaaaaccctcgtctctcgtacccagggaaccaagattgcatccgaaggactcaaacatcgggtttttgaggtctcattggctgatctccaaggggatgaagaccactccttcaagaagattcgtttgagagctgaggacgttcaagggaagaatgttctgacaaacttctggggaatggatttcacaactg

SEQ ID NO: 10351 - DNA, 300 bp, Glycine max
  Clone ID: LIB3039-019-Q1-E1-B7
gactctggttcttctgaggcacaacctcgttccaacagccatggcggttcctgcaacatcctcagcccctgtccttcgacccatccccaccaaccgttccttctcttccccattccgttcactccccactcccaccacccgaaaacccctaaccgtcttcgccatggcccctaagaagaaggtgaacaagtacaacggatactggaaaaaggagtggtttggcgcggggatattctacgaggggagcgaggaagtggaggtggacgtgttcaagaatctggagaaaaggaaagttttgag

SEQ ID NO: 10352 - DNA, 382 bp, Glycine max
  Clone ID: LIB3039-019-Q1-E1-B8
ggttctagtgtgtgattgtttgttgtcgtaacccgttcttcttcttttgttgttcggtgtttgtgtttgttttttctctcacctgaaaatgtcttgctgcggtggtaactgtggttgcggaagctcctgcaattgcggcaacggctgcggaggctgcaagatgtacccagacttgagctacactgattcaaccaccaccgagaccttggtcatggaattggcacctgttaaggctcaatttgagggtgctgaaatgggtgtgcccgctgagaacgatggctgcaaatgtggaccaaactgctcctgcaacccctgcacttgcaattgaggtgttggaagagcaagcttcaagcagagatagcccttaattaggaataatgat

SEQ ID NO: 10353 - DNA, 370 bp, Glycine max
  Clone ID: LIB3039-019-Q1-E1-B9
gaaggtgcaagagtttgttgtgagctataagctagtttatcgtgaggagaatatgaagttgtttgttttctttgttgctgcagtagttttggtagcatggccatgccatggcgcaggctaccaaaggttccctctccgaatgaaaactggctatggtgagcgttcttcggaggtaaaatgcgcaagttttaggcttgctgtggaagcacacaacatccgagcctttaaaaccattcctgaagagtgcgttgaaccaacaaagggctacattaatggcgaacaatttagattagactctaaaacagttaaccaacaagctttcttttatgctagtgaacgcgaagtccatcacaacgacatatttatattc

SEQ ID NO: 10354 - DNA, 384 bp, Glycine max
  Clone ID: LIB3039-019-Q1-E1-C1
gacacacagagcggttctcatattttggagaatccgaaaaacacgttaaagaaagtcccattcccactaccgaagcaaattaagaagatgaagcagcagagagtggagtttatgggcatgggcatgggcatgggcatgggcctgggccttttggtggtgatgatggcatgtgggtccgcgagtggtgcggatgatttggcaaccaagtgttcagcggtgattcagaaggtaataccgtgtttggatttcgcgaaggagaaggaagaaacgccgaaaaagcaatgttgcgacgtagcaacgtccataaaggagagcaacccagagtgcctctgctacatcattgaagagacccacaagggtagcccacaggttaaaagcttgggc

SEQ ID NO: 10355 - DNA, 389 bp, Glycine max
  Clone ID: LIB3039-019-Q1-E1-C10
ggttctagtgtatgtgattgttgtgactcgttcttcttcgtcgttatcttcttcttttgttgtttgtgtgtttgttttttctctcacctgaaaatgtcttgctgcggtggtaactgtggttgcggaagcgcctgcaagtgcggcaacggctgcggaggctgcaagatgtacccagacttgagctacaccgagtcaaccaccaccgagaccttggtcatgggagtggcaccagttaaggctcaattcgagagtgctgaaatgggtgttcccgctgagaacgatggctgcaaatgtggagctaactgcacctgcaacccctgcacttgcaagtgaggtgttggagagctaaagcttcaagcagaaatggcccttagaaataatgataaaaa

SEQ ID NO: 10356 - DNA, 377 bp, Glycine max
  Clone ID: LIB3039-019-Q1-E1-C11
gagggttttacactgcggcagctacttcggctccatcttcttcgatctctcaaactctatcggcgcagaaccaatcctatatcactatggggaagacacatggaatgggagctgcccgcaagctgaagtctcaccgtaggagacaaaggtgggctgacaagtcatacaaaaagtctcatcttggaaatgaatggaagaagccttttgctggttcatcccatgcaaagggtattgttcttgaaaagataggtattgaggctaagcagcccaactctgccattcgaaaatgtgccagggttcaactcatcaaaaatgggaagaagattgctgcattcgtgccaaatgatggttgcttaaattacattgaagagaatgat

SEQ ID NO: 10357 - DNA, 296 bp, Glycine max
  Clone ID: LIB3039-019-Q1-E1-C12
ggcagaagtaaggttgcagctcacgcatgctgaagacattgttctaaagatgagagtctgtgtatatcctctcatgcatacaatatgtagaagcaaggccatgtcattcctaggaaaggttgcatctcgaaacaccgactgcatactgtacgactcagtaatgccgtgaagcatcccacattagcggcttgccgttgacacatacaacaccgtgtgcttcggcaccgttcgtgtgcactactttcacacactccgcgactacatctacgctcagatactcagaatagactcgctct

SEQ ID NO: 10358 - DNA, 416 bp, Glycine max
  Clone ID: LIB3039-019-Q1-E1-C2
gcacaagtttgttgagatagctagaagcaataagatgaaaatgaaagtgcttgttttgtttgttgctacagttttggtagcatatgaatgccatggctcagactaccagaagttccctctccaaatgaaaactgggtttggtgggcaatacagcaatgaggtggcatgtgccagttggaggcttggcgtggaagcaaacaacgtagtcaagtggcaaactgttcctgcagcttgcggagagtacatagctgactacgttctaggagaccaatatagatcagattccaaaacagttaaccaacaagcttatttctatgctaaatccctcaaactcaccaacaaagatgtctttgtcttggacgttgacgacactactctctctaatctccagtattttgctaaccatggatttggtg

SEQ ID NO: 10359 - DNA, 382 bp, Glycine max
  Clone ID: LIB3039-019-Q1-E1-C3
ggtgcacaagtgagtttgttgatcgagataactagaaacagtgtgatgaaaatgaaggtccttgttttcttcgttgctacaattttggtagcatggcaatgccatgcgtacgatatgttccctctccgaatgaacactggctatggtgcccgtactccggaggtgaaatgcgcaagttggaggcttgctgtggaagcacacaacatctttggctttgagaccattcctgaagagtgcgttgaagcaacaaatgaatacatccatggcgaacaatatagatcagactccaaaacagttaaccaacaagcttacttttatgccagagacctcgaagtccatcccaaggacacatttgtgttcagtatagatggcaccgtactct

SEQ ID NO: 10360 - DNA, 390 bp, Glycine max
  Clone ID: LIB3039-019-Q1-E1-C4
gaagcaaaaccctaatccctctttcttcctcttcctcagtagtgcgattttcgattctcttctctgcaactatgcctaaccctaaggtcttcttcgacatgaccatcggcggtcaacctgccggccgcatcgtgatggagctctacgccgacgtgactccgagcaccgccgagaacttccgcgcgctctgcaccggcgagaagggcgccgggcggagcggcaagcccctccactacaaaggctcgtccttccaccgcgtgatcccgaacttcatgtgccagggcggcgacttcaccgccggaaacggcaccggaggcgagtcgatctacggcgccaagttcgccgacgagaacttcgtgaataagcatactggtcccggcatcctctcca

SEQ ID NO: 10361 - DNA, 380 bp, Glycine max
  unsure (1)..(380): unsure at all n locations
  Clone ID: LIB3039-019-Q1-E1-C5
agaagaaagacgacaggggggggcaaaggagtttgttgatcgagataactctagaaacagtgtgatgaaaagaagtgcttgggttcttccctgctacaaatttggtagcatggcaatgccatgcgtacgatatgttccctctccgaatgaacactggctatggtgcccgtactccggaggtgaaatgcgcaagtttggngcttgctgtggaaacacacaacatctttggctttgagaccattcctgaagagtgcgttgaagcaacaaaggaatacatccatggcgaacaatatagatcagactccaaaacagttaaccaacaagcttacttttatgccagagacctcgaagtccatcccaaggacacatttgtgttcagt

SEQ ID NO: 10362 - DNA, 383 bp, Glycine max
  Clone ID: LIB3039-019-Q1-E1-C6
ggaacatcagtgatgttggtggtgctgttgctgcggggcacgttagagatgaatgcgagagaagttcggctgtgctgcctggcttggattctaaggaatctgcacgcgtttgaataatggaaactggaaaatgaagaagattattattgctgttgtcttgtgggtcatatgattctttgcaaaatgatgttaatgcatgcaagagtagtattataaggtttctttttatgattgatttttagatgtattctggtagttagttttactgttgttgtgcatgcatatgatgttttggtctctgttgaggatttgggtgctgctgctgctggcttgtgtaactgtcttagtattttgtcatatttggttctcttatacatcatttc

SEQ ID NO: 10363 - DNA, 320 bp, Glycine max
  Clone ID: LIB3039-019-Q1-E1-C7
ggacaccaatagtgattgcactgcatgctcggtgttcacctgatcacatcatagtcgtcagcgtccagtgatgaagacggcgatgagggccatcgccgtcggacggcctgaaggagcgaatcaggtcgatacgcgaatggtagcagtggatgggtacagttcttcagaagcctcattgttcgccggctcaggctccggcatcgcctacaacaagctcaccgacaacggcgactccactccagccggcctcagctccgcagccatcgcgcatgcattcgccctcatcgtcgccgtctccgtcggcgcgaacatcgccggcg

SEQ ID NO: 10364 - DNA, 387 bp, Glycine max
  Clone ID: LIB3039-019-Q1-E1-C8
gatcaattcaaaatatatcatcaattataagcatgggtttgtggaacacaacgaatgcagtgtcttgccgctttcacaagtttggtgatgaccaaaagaatctggtcttccaaggtgatgccacgtcttcttccaggggcatagaactcacaaagttagacggtggaggaaaaccagtgggtggcagtgtggggagagtgttatactcttctccagtgcacctttgggaaagctctacagtggtcgcaagctttgaaaccgacttcaccttttccatctcatcagactctactactccaggtgatggccttgccttcttcattgcaccatttgacactaaaatccctccaaactctggtgggagcaaccttggactcttcccatcag

SEQ ID NO: 10365 - DNA, 381 bp, Glycine max
  Clone ID: LIB3039-019-Q1-E1-C9
ggcacaagtttgttgagatagctagaagcaataagatgaaaatgaaagtgcttgttttgtttgttgctacagttttggtatcatatgaatgccatggctcagactaccagaagttccctctccaaatgaaaactgggtttggtgggcaatacagcaatgaggtggcatgtgccagttggaggcttggcgtggaaacaaacaacgtactcaagtggcaaactgttcctgcagcttgcggagagtacatagctgactacgttctaggagaccaatatagatcagattccacaacagttaaccaacaagcttatttctatgctaaatccctcaaactcaccaacaaagatgtctttgtcttggacgttgacgacactactctct

SEQ ID NO: 10366 - DNA, 384 bp, Glycine max; identical to SEQ ID NO: 10034
  Clone ID: LIB3039-019-Q1-E1-D1

SEQ ID NO: 10367 - DNA, 364 bp, Glycine max
  Clone ID: LIB3039-019-Q1-E1-D10
gaaggtgcaagagtttgttgtgagctataagctagtttatcgtgaggagaatatgaagttgtttgttttctttgttgctgcagtagttttggtagcatggccatgccatggcgcaggctaccaaaggttccctctccgaatgaaaactggctatggtgagcgttcttcggaggtaaaatgcgcaagttttaggcttgctgtggaagcacacaacatccgagcctttaaaaccattcctgaagagtgcgttgaaccaacaaaggactacattaatggcgaacaatttagattagactctaaaacagttaaccaacaagctttcttttatgctagtgaacgcgaagtccatcacaacgacatattt

SEQ ID NO: 10368 - DNA, 380 bp, Glycine max
  Clone ID: LIB3039-019-Q1-E1-D11
ggtgtgagtgaagaagcagagggagtatcggcattaaaaatgcaggtcttcgtgaaaactctgacagggaagactagaaccctcgaggtcgagagcagcgacaccatcgacaatgtcaaggccaagattcaagacaaggaaggcattcctccggatcagcagcgtttgattttcgccggaaagcagcttgaagatggaaggaccctggccgattacaacatccagaaggaatcaacccttcatctcgtcctcaggcttcgtggtggcatcattgagccttccctcatggctttggctcgcaaatacaaccaggacaagatgatttgccgcaagtgctatgcccgtctgcatcctaaggctgtgaactgccgcaagaaaaa

SEQ ID NO: 10369 - DNA, 351 bp, Glycine max
  Clone ID: LIB3039-019-Q1-E1-D12
ggtgcacaagtgagtttgttgatcgagataactagaaacagtgtgatgaaaatgaaggtccttgttttcttcgttgctacaattttggtagcatggcaatgccatgcgtacgatatgttccctctccgaatgaacactggctatggtgcccgtactccggaggtgaaatgcgcaagttggaggcttgctgtggaagcacacaacatctttggctttgagaccattcctgaagagtgcgttgaagcaacaaaggaatacatccatggcgaacaatatagattagactccaaaacagttaaccaacaagcttacttttatgccagagacctcgaagtccatcccaaggacaca

SEQ ID NO: 10370 - DNA, 391 bp, Glycine max
  Clone ID: LIB3039-019-Q1-E1-D2
ggcgcattgaacgattattatggtttgtagtgtagcatgaagaagcaacaatggcgccgaatatgacacctaaggttaccacaaaccctgaattgataaggggaatcagaaagtactccaagtcgcagatgtatcacaagatgggcatttgggctatcaaggccacaaacggtggcgttttacctcgccacgagcctaaacccaagcctgaaactcctgctgaaaaaccacccaaattttaccctgctgatgatatcaagaagccccttgtcaacaagcacaaaccgaaactagctaacctcagggctagcattactcccgggacagtgttgattcttcttgccggtagatttaacggaaatagggtagtctttttgaaacagcatccttc

SEQ ID NO: 10371 - DNA, 385 bp, Glycine max
  Clone ID: LIB3039-019-Q1-E1-D3
ggctgacaagccaatcctttgtgtaggtgctcaaccctagtaagccgcaatggtgaagtactcaagggagcctgacaatccaactaagtcttgcaaggctagaggcgccgaccttagggttcattttaagaacacaagggaaactgcctttgcaatcaggaagttgcccttggtcaaggctaaaaggtacttggaagatgttcttgcccacaagcaggcaattccattcagacgtttttgtcgaggtgttggaaggacagcccaggctaagaatagacactctaatggccaaggacggtggcctgtcaagtcagcaaaattcattcttgatttgctcaaaaatgctgagagcaatgctgaagtgaaaggtttggatgttgatgca

SEQ ID NO: 10372 - DNA, 370 bp, Glycine max
  Clone ID: LIB3039-019-Q1-E1-D4
gacacttcaaaatcctctagtaacccttcttttctctctctctctctcgtgttctgagctgctagaagcaatggagaggaaaagaagccatgcttctttcaccatgtttgcaatgcttgttggattgctctctcagagccttgtcattcctgtaatatccaccactgttgcagatcagaagaactactacaccccagatccacatgctggaagtccccccacaggtttatacgattctctgtgttcatataatagtaatcgtagatctcaaggctatgagagctctagaccatgtcatcaaactagtcgatcatgtcgatcatgtggctcatgtggaaactgtggctagctacagcacaacatcatgatc

SEQ ID NO: 10373 - DNA, 381 bp, Glycine max
  Clone ID: LIB3039-019-Q1-E1-D5
ggcacaagtttgttgagatagctagaagcaataagatgaaaatgaaagcgcttgttttgtttgttgctacagttttggtagcatatgaatgccatggctcagactaccagaagttccctctccaaatgaaaactgggtttggtgggcaatacagcaatgaggtggcatgtgccagttggaggcttggcgtggaagcaaacaacgtagtcaagtggcaaactgttcctgcagcttgcggagagtacatagctgactacgttctaggagaccaatatagatcagattccaaaacagttaaccaacaagcttatttctatgctaaatccctcaaactcaccaacaaagatgtctttgtcttggacgttgacgacactactctct

SEQ ID NO: 10374 - DNA, 367 bp, Glycine max
  Clone ID: LIB3039-019-Q1-E1-D6
ggcacaagtgagtttgttgatcgagataactagaaacagtgtgatgaacatgaaggtccttgttttcttcgttgctacaattttggtagcatggcaatgccatgcgtacgatatgttccctctccgaatgaacactggctatggtgcccgtactccggaggtgaaatgcgcaagttggaggcttgctgtggaagcacacaacatctttggctttgagaccattcctgaagagtgcgttgaagcaacaaaggaatacatccatggcgaacaatatagattagactccaaaacagttaaccaacaagcttacttttatgccagagacctcgaagtccatcccaaggacacatttgtgttcagtatagat

SEQ ID NO: 10375 - DNA, 383 bp, Glycine max
  Clone ID: LIB3039-019-Q1-E1-D7
ggtggactcaacggttccttctctctcttctacctcttcgcagttcccagttcccaatctcctaacaaaaacaaaaaaacagcactctctctctctctatgcaatgtaggtcgccggaggatggcaaactaccaccgcaacaacgtcgaaaacgtcgtcctcggccgccaccaccaccacagccaccgttccaagtccgcctccgtcgccggccacaccttccgcctatggaatgccgcctccttccgccgcatcatcttcgacgccgtcagctgcggcgccagctcccgctacgccgcgagatccaacatctccgacgagaaacaacacctccaacaaaaacaacaacatcataagacgacgtcgatgaagaacaatgcgaa

SEQ ID NO: 10376 - DNA, 383 bp, Glycine max
  Clone ID: LIB3039-019-Q1-E1-D8
ggcacaagtgagtttgttgatcgagataactagaaacagtgtgatgaaaatgaaggtccttgttttcttcgttgctacaattttggtagcatggcaatgccatgcgtacgatatgttccctctccgaatgaacactggctatggtgcccgtactccggaggtgaaatgcgcaagttggaggcttgctgtggaagcacacaacatctttggctttgagaccattcctgaagagtgcgttgaagcaacaaaggaatacatccatggcgaacaatatagattagactccaaaacagttaaccaacaagcttacttttatgccagagacctcgaagtccatcccaaggacacatttgtgttcagtatagatggcaccgtactctcta

SEQ ID NO: 10377 - DNA, 381 bp, Glycine max
  Clone ID: LIB3039-019-Q1-E1-D9
ggcacaagtatgttgagatagctagaagcaataagatgaaaatgaaagtgcttgttttgtttgttgctacagttttggtagcatatgaatgccatggctcagactaccagaagttccctctccaaatgaaaactgggtttggtgggcaatacagcaatgaggtggcatgtgccagttggaggcttggcgtggaagcaaacaacgtagtcaagtggcaaactgttcctgcagcttgcggagagtacatagctgactacgttctaggagaccaatatagatcagattccaaaacagttaaccaacaagcttatttctatgctaaatccctcaaactcaccaacaaagatgtctttgtcttggacgttgacgacactactctct

SEQ ID NO: 10378 - DNA, 384 bp, Glycine max
  Clone ID: LIB3039-019-Q1-E1-E1
gaccaagttagtttaatttgagtgtatattcagagagaaaaacgaagaaaacatcgtgaagcatgtctggaagaggaaagggagggaagggtctaggaaagggaggagcgaaacggcaccgtaaggttctgagggataacattcagggaatcacgaagcccgcgattcggcgtctggcgcgacgtggtggcgtgaagcgtatcagtggtctcatctatgaagaaactcgcggtgttctcaagatcttcctcgagaacgtcattcgcgacgctgtcacctatactgagcacgctcgccgcaagaccgtcactgctatggacgttgtttacgctctcaagaggcatggcaagaccctctatggtttcggtggttagagatttgggg

SEQ ID NO: 10379 - DNA, 385 bp, Glycine max
  Clone ID: LIB3039-019-Q1-E1-E10
ggggggactcaaattgattgaaatcaaacctcaccaccgctgctaggtcaagcttctctgtcggtcattgcatctccaatctcgcttcttctctcagattcagataccaattcggtttcttccgaaccaaacttgtttttgagaaattcggcaattgattttccatggccaacaatccgtcacagcttctcccatcagagttgattgaccggtgtataggttcgaaaatttgggtgataatgaagggtgacaaggagcttgttggtactcttagaggctttgatgtttatgtcaacatggtccttgaagatgttactgaatatgagatcactgctgaagggagacggataaccaagcttgatcagaatttactcaatggaaacag

SEQ ID NO: 10380 - DNA, 381 bp, Glycine max
  Clone ID: LIB3039-019-Q1-E1-E11
ggggcgaggtagccagagagtgatacaatacagagtgcgttgttgctccttcgccacaactccctgccaacatgggtatctccagagattctatgcacaagaggcgtgccactggtggcaagaagaaggcatggaggaagaagagaaagtatgagcttggtcgccagcctgctaacactaagctgtcaagcaacaagacagtcaggaggatccgggttagaggtggaaatgtgaagtggagggcactgagattggatactggaaattactcctggggaagtgaagctgtaactcgcaagactcgtatactagatgtggtttacaatgcctcaaacaacgagcttgtgcgtactcagactcttgtaaaaagtgctattgttc

SEQ ID NO: 10381 - DNA, 390 bp, Glycine max
  Clone ID: LIB3039-019-Q1-E1-E12
gaccgtattccttacgctctctcactcacaaacacacactgaactaaaaaacatcaaaagagacatggctgagcaaaccttcatcatgatcaagcctgatggcgtccaaagaggccttattggcgagatcattagcagatttgagaagaaaggtttctacttgaaaggtttgaaacttgttactgtggaccgtccttttgctgagaagcactatgctgatttgtctgccaagcctttctttagtggtttggtggattacattatctctggccctgttgttgccatgatctgggagggcaagaatgttgttacaactggccgaaagattatcggagccacaaacccagctcaatctgagcctggaactatccgtggtgactttgccattga

SEQ ID NO: 10382 - DNA, 390 bp, Glycine max
  Clone ID: LIB3039-019-Q1-E1-E2
ggatctgactcatgtcaacttcatcgtcctcctcgtacgcatgcgctctgcaaccttaacctaagtacactgtgaggtgagttccttgggtacacgcgggaatggctgctgcatctggcatgccataggaggagacagcgatgtttcccgacaaaagtgtccatcccaggttggatgtctacgtgtgggacatggatgagacccttgtactgctcaactccttgctgaaatcatcatacgctgaggctttcaatggtctgaaggatgtgcataagggggtggaaatcgggaggacatgggaaaatctcattctacaaatatgtgatgattatttcttctatgaacaaattgaaaattacaataagccttttcctgattccccgggccaaa

SEQ ID NO: 10383 - DNA, 374 bp, Glycine max
  Clone ID: LIB3039-019-Q1-E1-E3
gacagcatatatatcaataatctattttatactatacctacattttgataattttctttgtagttgatagccatggctacccgtggaaagcttgaggttgacattgatctcaagtccaacgcagacaagtactggcaaacccttaggaattctactgaaatattccctaaggccttcccacatgattacaaaagcattgaggttcttgagggtgatggcaagtctcctggttctatccgccacataagttatggtgaaggttcaccacttgtgaaatcatcctttgagaagattgaggctgttgatgaggaaaagaaggtagtgtcgtacactatcattgatggggaactcctccagcactacaaaacattcaa

SEQ ID NO: 10384 - DNA, 388 bp, Glycine max
  Clone ID: LIB3039-019-Q1-E1-E4
ggttctagtgtgtgattgtttgttgttgtaactcgttcttcttcttttgttgttctgtgtttgtgtttgttttttctctcacctgaaaatgtcttgctgcggtggtaactgtggttgcggaagctcctgcaagtgcggcaacggctgcggaggctgcaagatgtacccagacttgagctacactgagtcaaccaccaccgagaccttggtcatgggagtggcacctgttaaggctcaatttgagggtgctgaaatgggtgtgcccgctgagaacgatggctgcaaatgtggaccaaactgctcctgcaacccctgcacttgcaagtgaggtgttgggagagcaagcttcaagcagagatagcccttaattaggaataatgataaacta

SEQ ID NO: 10385 - DNA, 383 bp, Glycine max
  Clone ID: LIB3039-019-Q1-E1-E5
gaaggtgcaagagtttgttgtgagctataagctagtttatcgtgaggagaatatgaagttgtttgttttctttgttgctgcagtagttttggtagcatggccatgccatggcgcaggctaccaaaggttccctctccgaatgaaaactggctatggtgagcgttcttcggaggtaaaatgcgcaagttttaggcttgctgtggaagcacacaacatccgagcctttaaaaccattcctgaagagtgcgttgaaccaacaaaggactacattaatggcgaacaatttagattagactctaaaacagttaaccaacaagctttcttttatgctagtgaacgcgaagtccatcacaacgacatatttatattcggcatagataaca

SEQ ID NO: 10386 - DNA, 384 bp, Glycine max
  Clone ID: LIB3039-019-Q1-E1-E6
gaaggtgcaagagtttgttgtgagctataagctagtttatcgtgaggagaatatgaagttgtttgttttctttgttgctgcagtagttttggtagcatggccatgccatggcgcaggctaccaaaggttccctctccgaatgaaaactggctatggtgagcgttcttcggaggtaaaatgcgcaagttttaggcttgctgtggaagcacacaacatccgagcctttaaaaccattcctgaagagtgcgttgaaccaacaaaggactacattaatggcgaacaatttagatcagactctaaaacagttaaccaacaagctttcttttatgctagtgaacgcgaagtccatcacaacgacatatttatattcggcatagataacac

SEQ ID NO: 10387 - DNA, 386 bp, Glycine max
  Clone ID: LIB3039-019-Q1-E1-E7
gggagaagagtgttggacggaccttgaatactgcaagcaaaaggggttgtattatcccattgcaaagactctagcagagaaagcgggttgggactttgcgaaggagacaggttttgatgttgtcatgataaaccctggtacagcattgggccctctgcttcctccaagaatcaattcaagcatggctgtgcttgttagtgttctcaaagggggcaaagagacctacgaggacttctttatgggaacggctcacttcaaagacatagcattggcacatattttggtacttgagaacaagaaagcagcaggaaggcacttgtgtgtggaatctattcgtcactttagtgatcttgtggacaaggttgctgagttataccctgaatacg

SEQ ID NO: 10388 - DNA, 375 bp, Glycine max
  Clone ID: LIB3039-019-Q1-E1-E8
ggaacctttgcattctattcattcaagattcagcaagtgcgttttggaagcagagaccgaaatacttcgagatggcccgtacaaagcaaactgctcgtaagtcaactggaggaaaagctcccaggaagcagcttgcaaccaaggctgcacgtaagtctgcaccaacaactggtggtgtgaagaagcctcatcgttatcgccctggaactgttgctcttcgtgagattaggaaataccagaagagcactgagctcctaatcaggaagcttcctttccagaggttggttcgtgaaattgcccaggatttcaagactgatctgcgtttccagagccatgctgtgcttgcattgcaagaggctgctgaggcataccttg

SEQ ID NO: 10389 - DNA, 375 bp, Glycine max
  Clone ID: LIB3039-019-Q1-E1-E9
aggcattatatttgagttcaaacaaatcaaagccatggccacctccaacttctctattgttctctccgtctccctagccttctttttggtgctacttaccaaggcacactcgaccgataccgtttctttcaccttcaacaagttcaacccagtccaaccaaacattatgctccaaaaagatgctagtatttcatcctctggggtgttacaactcaccaaagttggcagcaacggcgtgcccacctcgggatctctcggtcgtgccctttacgctgccccaatccagatttgggacagcgaaaccggcaaggtagccagctgggctacatcctttaaattcaacattttcgcacccaacaaatcaaactcagctga

SEQ ID NO: 10390 - DNA, 375 bp, Glycine max
  Clone ID: LIB3039-019-Q1-E1-F1
ggaacaacaatcaccaatggcagtggcgaatctgcagagactgtcctcgcaagtgcaccgcctcccctccgtctcgttcttctccaaatccctgatctcccgcacctccacctcttcctcctccacgaagaaggtcgcggaccgcatcgtgcggctgtcggcgatcgacttcgcgggtaagaagcacgaggtggtgggcctggccggtcagaccctgctgaaggcgctgataaacacgggcctggtcgacccggagtcccaccgcctggaggagatcgacgcctgcgcggcccactgcgaggtcaacatcgcgcaagagtggctcgacaagctaccccctcgctcctacgacgaagagtacgtcctcgttcgcaa

SEQ ID NO: 10391 - DNA, 384 bp, Glycine max
  Clone ID: LIB3039-019-Q1-E1-F10
ggaagagagatggatccagacgcgttggcaaaggcattcgtggagcactactacagcaccttcgacaccaaccggaacggtttagcgaatctgtatcaggagggttccatgctgaccttcgaagggcagaagatccagggcgcttccagcatcgtcgctaagctcacttccctccctttccagcagtgccaccactccatctccaccgtcgactgccagccctccggtgtcaacgctggcatgcttgtctttgtcagcggcaacctccagctcgctggcgaacagcacactctcaagttcagccagatgttccatttgataccaacgcctcagggaagctattatgtgttgaatgacatattccgtttgaactatgcatgaaga

SEQ ID NO: 10392 - DNA, 386 bp, Glycine max
  Clone ID: LIB3039-019-Q1-E1-F11
gattgttggcttgtgctctgctcgtgcctctagggttatcatatctccatttccatttcctctctctcagtttccaagaatcttaagctatgggaaagtcttacccaaccgtgagcgctgattaccagaaggccgttgagaaggcgaagaagaagctcagaggcttcatcgctgagaagagatgcgctcctctaatgctccgtttggcatggcactctgctggaacttacgacgtgagctcgaagaccggtggtcccttcggaaccataaagcacccctccgaactcgctcacggcgctaacaacggtcttgacatcgctgttaggcttttggagccactcaaagcggagtttcctattttgagctacgccgatttctaccagttg

SEQ ID NO: 10393 - DNA, 378 bp, Glycine max
  Clone ID: LIB3039-019-Q1-E1-F12
ggaacctttgcattctattcattcaagattcagcaagtgcgttttggaagcagagaccgaaatacttcgagatggcccgtacaaagcaaactgctcgtaagtcaactggaggaaaagctcccaggaagcagcttgcaaccaaggctgcacgtaagtctgcaccaacaactggtggtgtgaagaagcctcatcgttatcgccctggaactgttgctcttcgtgagattaggaaataccagaagagcactgagctcctaatcaggaagcttcctttccagaggttggttcgtgaaattgcccaggatttcaagactgatctgcgtttccagagccatgctgttcttgcattgcaagaggctgctgaggcataccttgttg

SEQ ID NO: 10394 - DNA, 378 bp, Glycine max
  Clone ID: LIB3039-019-Q1-E1-F2
gattgatgaactagtgtgacattagagaagaaccaatttaaaagaagagcagcggagctaaagaggggagaggagagaggagaagagaagctaaagaaagaaaggagatgggagtggagaagcagttgttgaggtctggcaccggtccgaagccaattcccggtcagaacgtaaccgttcactgcactggtttcgggaagaacggtgacctttctcagaaattctggagcacaaaggatcctggccagaacccattcactttcaaaatcggccaaggttctgttatcaaaggatgggatgaaggtgtgcttggcatgcaaattggtgaagttgctcgtctccggtgctctccggattatgcttatggtgctggtggct

SEQ ID NO: 10395 - DNA, 385 bp, Glycine max
  Clone ID: LIB3039-019-Q1-E1-F3
gagtccaaaacagtttctcgttttctcatctgaaaaatgaggagcatctttgtccttctccttgttctgggtttgtttaagtatgcatttgctgaagaagggttttgctctgctccttcggaatcgaaatcaaagcctctttattggaaagtggataaccccactctctcacctatccaccttcaagatttgcctggattcacacgcagtgtttataagagtaatcatgctttggtatcaccagaaagtcatgtatatggcccattgcctgattggatcgacacgtcaggcgcatatttaatttcaccagaaatgggttcacactttgtaatgtacctagctaagttgaaagaaaaatcaaaatcaggactacccctgcctggtg

SEQ ID NO: 10396 - DNA, 394 bp, Glycine max
  Clone ID: LIB3039-019-Q1-E1-F4
tgagggtgtaaatataccgattattgctgtgaaaagagatggtggctacaactattcttcaactgatctagcagcactttggaatcgtctaaatgtggaaaatgttgagtggaatatatacgttacagatgttgggcagtggcaacactttgatatggtttttaaggcctttaggcgtgcaggatggctgccaaatcatgaaaatgagttccccaaatgtactcatattggttttggtcttgttcttggggaagatggaaaacgatttcggacacgcagcagtgaaactgttagattggttgagctgcttgatgaagccaaaaggcgttgtaaagcttccctcctcgagcgtgacgctgttaaagattggtctgaggaagagatcgaaaagaca

SEQ ID NO: 10397 - DNA, 382 bp, Glycine max
  Clone ID: LIB3039-019-Q1-E1-F5
ggatcctttgtattctattcttcaagattcaggtactgcgtttcggaagcagacacagatggctcgtacgaagcaaaccgctcgtaagtccacaggaggaaaggctcctaggaagcagcttgcaaccaaggctgcacgtaagtctgcaccaactactggtggtgtgaagaagccccaccgttatcgtcctggtaccgttgctcttcgtgagattaggaaataccagaagagtaccgagcttttgatccggaagctccccttccagaggctggttcgtgaaattgctcaggacttcaagactgatctgcgtttccagagccacgccgtgcttgcattgcaagaagctgctgaggcataccttgttgggctctttgaggacact

SEQ ID NO: 10398 - DNA, 388 bp, Glycine max; identical to SEQ ID NO: 7704
  Clone ID: LIB3039-019-Q1-E1-F6

SEQ ID NO: 10399 - DNA, 411 bp, Glycine max
  Clone ID: LIB3039-019-Q1-E1-F7
cccacgcgtccgacgacagaaggggacccacagggaggcgaacagagaaactcagagacccgaaggcagatttcaagatgaagttcaacattgcgaatcccaccaccggttgtcagaagaagctggagatcgatgatgacctgaagctgcgagcattttgggacaagaggatctcacaagaggttgttggtgatgctctgggtgaggaattcaaaggttatgtcttcaaaattactggaggttgcgacaagcaaggatttccaatgaagcaaggagtgttgacccctggtcgtgttcgcctcttgctgcatagaggaactccttgtttccgtggttacggaaggcgcaatggagagcgtaggaggaagtctgttcgtgggtgcattgtcagccctgacctctctgttctca

SEQ ID NO: 10400 - DNA, 379 bp, Glycine max
  Clone ID: LIB3039-019-Q1-E1-F8
ggaacctttgcattctattcattcaagattcagcaagtgcgttttggaagcagagaccgaaatacttcgagatggcccgtacaaagcaaactgctcgtaagtcaactggaggaaaagctcccaggaagcagcttgcaaccaaggctgcacgtaagtctgcaccaacaactggtggtgtgaagaagcctcatcgttatcgccctggaactgttgctcttcgtgagattaggaaataccagaagagcactgagctcctaatcaggaagcttcctttccagaggttggttcgtgaaattgcccaggatttcaagactgatctgcgtttccagagccatgctgtgcttgcattgcaagaggctgctgaggcataccttgttgg

SEQ ID NO: 10401 - DNA, 393 bp, Glycine max
  Clone ID: LIB3039-019-Q1-E1-F9
gagaaaggttagggagccaaaggaggaaaatgtcactcttggtccagccgttagagacggtgaacatgttttcggcgtggctcgcatctttgcctccttcaacgacaccttcatccatgtcactgatttgtctgggagggaaacccttgttcgcatcactggtgggatgaaagttaaagctgacagagatgaatcatctccatatgctgctatgcttgcagcacaggatgttgctgccagatgtaaggaactgggcataactgctcttcatatcaggctccgtgccactggtggaaacaagaccaaaacacctggtcctggtgctcaatcagctcttcgagcccttgcacgttcaggaatgaaaattggtcgtatagaggatgttactcccat

SEQ ID NO: 10402 - DNA, 371 bp, Glycine max
  Clone ID: LIB3039-019-Q1-E1-G1
gaaggtgcaagagtttgttgtgagctataagctagtttatcgtgaggagaatatgaagttgtttgttttctttgttgctgcagtagttttggtagcatggccatgccatggcgcaggctaccaaaggttccctctccgaatgaaaactggctatggtgagcgttcttcggaggtaaagtgcgcaagttttaggcttgctgtggaagcacacaacatccgagcctttaaaaccattcctgaagagtgcgttgaaccaacaaaggactacattaatggcgaacaatttagatcagactctaaaacagttaaccaacaagctttcttttatgctagtgaacgcgaagtccatcacaacgacatatttatattcg

SEQ ID NO: 10403 - DNA, 380 bp, Glycine max
  Clone ID: LIB3039-019-Q1-E1-G10
ggcacaagtgagtttgttgatcgagataactataaacatcttggacttaactcggaacaagtaaacgtacatggtggagctgttgcactgggtcatcctcatggttgcagtggtgctcgcattctggtgacacttttgggggtactgaaacagaagaatgggaagtacggaattggtggcatttgcaatggaagaggtggtgcatctgcccttgttgttgagcttcagtaagacctatttcatgtacagtagatgtccttttaagagctaacgtttgatgcagagctcagaagatcttgcctccctctttatcaagcgaacatgcaagtttcacatttattactacgacaagaccgaaagagagcgaaatttatctacat

SEQ ID NO: 10404 - DNA, 393 bp, Glycine max
  Clone ID: LIB3039-019-Q1-E1-G11
gcttcaaagaaacacaaaaacggtgcgtttcgatcaggttggttttctccttcctcgctcgcacttcttcgttcagcatcagcatgatctgattgtgtttcgtctcaccccaccgttccgttttcagggaaatgggtctgtggactttacttgaggggtttcttcttcttgcaaatgcgctagcgatattaaatgaggaccgctttcttgcacctagaggatggggcttccaagatttctcgggtggaaggactaagtcgttcaaaggccagcttataggcctcatttatgcaactcagtacctcagagttcctctcatacttctcaattccatctgcatttttgtgaagttggtgtccggatgatgcttgactaggtgtttctgtcagatga

SEQ ID NO: 10405 - DNA, 373 bp, Glycine max
  Clone ID: LIB3039-019-Q1-E1-G12
gagcgaaacagagagtgatttcagtgagtgatcggtgttcacttgatctcatcataatcgtcagcgtcaattgaagaagatgccgatcagaaacatcgccgtcggaaggcctgaagaggcgactcaccccgacacgttgaaggcggctttggctgagttcatctcaaccttcatcttcgtgttcgccggctcaggctccggcatcgcctacaacaagctcaccgacaacggcgctgccacccctgccggccgcatctccgcctccatcgcccatgcattcgccctcttcgtcgccgtctccgtcggcgccaacatctccggcggccacgtcaaccccgccgtcaccttcggcgccttcgtcggcggcaacatc

SEQ ID NO: 10406 - DNA, 402 bp, Glycine max
  Clone ID: LIB3039-019-Q1-E1-G2
gcattctcccaaactaacaaacaaatcccagggagccaccaaccatggcttccaagctctgcgactcatgcaaatcagccactgctaccttgtactgccgccccgacgcggccttcctctgcggcgcctgtgactctaaggttcatgccgccaacaagctcgcatcgcgccacccgcgcgtcgtgctctgcgaggtgtgcgagcaggcgcccgcgcatgtgacctgtaaagccgacgccgccgcgctctgccttgcctgcgatcgcgatatccactccgccaaccccctcgccagccgccacgagcgcatccccgtcacgccgttcttcgagtccgtacattcagtcaaggcctcctcgccgattaacttccaccaccgcttcttctccgacgccgacgctg

SEQ ID NO: 10407 - DNA, 377 bp, Glycine max
  Clone ID: LIB3039-019-Q1-E1-G3
gagaaggaattaaaagaggaacatgaaaagggtctctgaatctaatctatttcttcttctcctttcccctttgtaatcgactttcatgctcagaagcgtttcgtttgtcctctaaaacccacataccatcaaccaaactcctaaagtgatatccagaagagtgagagaatggttactgggtggagaagagcgttctgcacatccatccccaaagacagagaacccaaagtgttaacagagaatcaacatcaacaaccacaacaacagcattgcgagaacaccaccaccaccaccaacaacaacaacaataatcacagttccaagtttggatttttctccaacccatcaagaccccggtgcgagtctcagccttcatc

SEQ ID NO: 10408 - DNA, 379 bp, Glycine max
  Clone ID: LIB3039-019-Q1-E1-G4
ggcacaagtgagtttgttgatcgagataactagaaacagtgtgatgaaaatgaaggtccttgttttcttcgttgctacaattttggtagcatggcaatgccatgcgtacgatatgttccctctccgaatgaacactggctatggtgcccgtactccggaggtgaaatgcgcaatttggaggcttgctgtggaagcacacaacatctttggctttgaaacaattcctgaaaatgtgcgttgaaccaccaaaggaatacatcaatggcaaacaatatagttcagactccaaaacagttacccaacacgctaacttatatgccagagacctcgatctctatcccagggacacatgtgtgtacagtatatatggcactgtact

SEQ ID NO: 10409 - DNA, 383 bp, Glycine max
  Clone ID: LIB3039-019-Q1-E1-G5
ggtggcaagaagttcataactctcttggacttgaagcgtccatttaaaccaatgaaggatttggacatggacaaggtcatctcggacatcattgaggaaatatcaaagactagttgatttcagctgttttgcaagagcctttttatggcttgacttacagtgaagctagatatattttgttcacatggtagaaatcctacaatggaaacttgttcaaaatgtgttatagccatgtatgggagttttagtttgaggtgagacatcattttggatatgttccttgtctcggacaagtaccaattttaatttgcattttgagatcgaattacttgttatcatctccaaaaaaaaaaaaaaaaaaaaaaaaaaaaaagcggccctct

SEQ ID NO: 10410 - DNA, 393 bp, Glycine max; identical to SEQ ID NO: 9457
  Clone ID: LIB3039-019-Q1-E1-G6

SEQ ID NO: 10411 - DNA, 388 bp, Glycine max
  Clone ID: LIB3039-019-Q1-E1-G7
gatagggtttttgtcgttgcgactaagagttgctgcttcttccgccactcagcacttcgctccctctgtgcttcaccaaccatggccgaaatcgaagctaccgttccagatccctctcaaatcgacgtcaaacttttcaaccgctggagcttcgacgacgttgaggttactgatatgtctctggctgattacattggagtgtccccgtcaaagcatgctacatatgttcctcacactgctggtaggtactcagtgaagaggttcaggaaggcgcagtgccccattgttgagagactcaccaactctctcatgatgcacggaaggaacaatggaaagaagctcatggctgtcaggattatcaagcatgcaatggaaattattcacttgc

SEQ ID NO: 10412 - DNA, 385 bp, Glycine max
  Clone ID: LIB3039-019-Q1-E1-G8
gacaagtttgttgagatagctagaagcaataagatgaaaatgaaagtgcttgttttgtttgttgccacagttttgggaccaaaagaatggcaatggcccaaacaacaaaagtttcctccccaaattaaaaccgggttttggtgggcattacaccattaaggtgcaatttgcaatttgaaggcttgccttgaaaccaaccaccttatccaattgcaaaatggtcccggcaccttgcggaaattacataccagactattttctaggacaccaatatatatcagatcccaacacatttacccaacacccatatctctacgcaaaatctctcactctcaccaacagagatctctttgtcgtggacgttgacgacactactctctctaat

SEQ ID NO: 10413 - DNA, 388 bp, Glycine max
  Clone ID: LIB3039-019-Q1-E1-G9
ggaacggaaaagcactggcgcagctaccctgaggcttctcttctcttctcttctctgtcgtgagtcaccatggtgagggttagtgtgctgaacgatgctctgaagagcatgtacaatgctgagaaaaggggaaagcgccaagtcatgattaggccatcctccaaagtcattatcaaattccttttggtgatgcaaaagcacggatacatcggagagtttgagtatgttgatgaccacagggctggtaaaatcgtggttgaattgaacggtagactgaacaagtgtggggttattagtccccgttttgatgtgggcgtcaaagagattgaaggttggactgctaggcttctcccctcaagacagtttgggtatattgtattgactacct

SEQ ID NO: 10414 - DNA, 390 bp, Glycine max
  Clone ID: LIB3039-019-Q1-E1-H1
ggcagcagcacctgatgcagatgcagcccatgatggcagcctactaccccaacaacgtcaccactgatcacattcagcagtatctggatgagaacaagtccttaattctgaagattgttgaaagccagaattctggcaagctgagcgagtgtgccgagaaccaagcaaggcttcagagaaatctcatgtacttagctgcaatagctgattctcaaccccaaccacccaccatgtctggtcagtaccctccgagtgggatgatgcagcagggagcacagtacatgcaggctcaacaacaggcacagcagatgacaccacaacaactaatggcagcacgctcatctcttttgtacgcacagcagccgtactcagcacttcaacagcagcaag

SEQ ID NO: 10415 - DNA, 380 bp, Glycine max
  Clone ID: LIB3039-019-Q1-E1-H10
gcacaagtgagtttgttgatcgagataacgattccgggtcaaggatctgtgccaacagggtaattgtggacgcacgacaccacatgctggggaggctggcatcgatcgtggcgaaagaacttctgaatgggcagaaggtggtggtggtgcgctgcgaggagatttgcatctccggtgggctcgtcaggcagaagatgaagtacttgcgtttcctccgcaagcgcatgaacaccaagccctctcacggccccatccatttccgtgcacccggcaagatcttctggcgcaccgttcgtgggatgataccacacaagacaaagcgcggggaagctgctcttgcgcgattgaaggtgtatgagggcattcctcctccttatgac

SEQ ID NO: 10416 - DNA, 380 bp, Glycine max
  Clone ID: LIB3039-019-Q1-E1-H11
gattgtgcaaaaggtggtcatggagcttacaccagcagtgttgaactgaaaggctatgacaacggcattactcaagcatcgtcattccgtacttatcataccccactcaacaagcaggttgactacgttaattctatgagggctgctcgagagttcagttcaagagtttctgattctttgaagattgagatttttccatattcagtgttttatatgttttttgagcaataccttcatatatggaagactgcactgatcaaccttgctatagctattggtgcagtatttattgtgtgcttgattttcacaagcagtttatggagctcatcaataattttgttggtgttggcaatgattgttgttgatcatatgggtttgat

SEQ ID NO: 10417 - DNA, 394 bp, Glycine max
  unsure (1)..(394): unsure at all n locations
  Clone ID: LIB3039-019-Q1-E1-H12
gatcccttacaacgaaaccctcttcatcttgtccaaccggtgacaagcatcatggcctcaagagcattgttattgttggctatgtgtgtgcttccggcgatggttgtggccattcgcccagcanagaaccctttttgcgtgaagggtcgtgtctactgtgacccttgccgtgctggttttgagaccccagctaccacctacattgctggtgctgagattatgttgcaatgcaagagcagggttagcaacgaggttgtgtacacgaagaaggggtacaccgactcaaccggagcatacacaatgtacgtggatgaggatcacgcagatcagatctgcagtgccaagcttgtaagcagccctcaacctcaatgcaaggaagtcaccccaagccgcg

SEQ ID NO: 10418 - DNA, 392 bp, Glycine max
  Clone ID: LIB3039-019-Q1-E1-H2
ggagagactgaggataccttcattgctgacctttctgttggtttggcaacgggtcaaattaagactggagctccatgcaggtcagagcgtcttgctaaatataaccagctcttgagaattgaggaggagcttggtgcggaagcagtgtatgctggagctaacttccgtacccctgttgagccctactaaagttttcaagtggaaaaaacctggagatccccacgagtttgagcaatgagatttggatgcgcggttttagttgtgatcaataagtcgatagttagaacaatagtcttggtataaggaccttgccaataattttttagttctgattcacagagctaagacagttccgtcttagactttaaaagttttgatatttagctttaata

SEQ ID NO: 10419 - DNA, 390 bp, Glycine max
  Clone ID: LIB3039-019-Q1-E1-H3
ggtgtgagtgaagaagcagagggagtagcggcattaaaaatgcagatcttcgtgaaaactctgacagggaagactataaccctcgaggtcgagagcagcgacaccatcgacaatgtcaaggccaagattcaagacaaggaaggcattcctccggatcagcagcgtttgattttcgccggaaagcagcttgaagatggaaggaccctggccgattacaacatccagaaggaatcaacccttcatctcgtcctcaggcttcgtggtggcattattgagccttccctcatggctttggctcgcaaatacaaccaggacaagatgatttgccgcaagtgctatgcccgtctgcatcctaaggctgtgaactgccgcaagaaaaagtgcggtcat

SEQ ID NO: 10420 - DNA, 388 bp, Glycine max
  Clone ID: LIB3039-019-Q1-E1-H4
gacagctcttggctttagcaaattccaattcccaattcccaattcgaaacccttattcctttcaaagaaccaaattgagtgatcgtgatggcaccaaaggcagagaagaagccagcggagaagaagcccgcggaggagaagaagtcgacggtgggagacaaggctccggcggagaagaagccaaaggccggaaagaagcttccgaaggagggaggcgccggcggagaagggaagaagaagaagagaaacaagaagagcgtggagacatacaagatctacatcttcaaggttctgaagcaggtccaccctgacattggtatctcaagcaaggccatgggaatcatgaacagcttcatcaacgacatcttcgagaagcttgcccaggaat

SEQ ID NO: 10421 - DNA, 353 bp, Glycine max
  Clone ID: LIB3039-019-Q1-E1-H5
acaagcacttgggcgagcatgtggagtcacacggccagcgattgcatgttctgtaacaactaatgaaggaagtcaactcaaatcccaaattcagcaactaaaggatgctattgagaagctgttaatttgaaaatttgatattcggtatgacgggcttcttgagaggctttgactggaccagatgttgtattcaacagacaaaggtgttttatgtgtaaacctacatttatatttacttttgccgcgaaggattgtttgaaagtaattttgaagttagctcgccgttgttattaattacacttctgttataacttataaattgttcaatgctatgcatgtggggtgctgttagg

SEQ ID NO: 10422 - DNA, 344 bp, Glycine max
  Clone ID: LIB3039-019-Q1-E1-H6
ggaggaacagtttgtggaatctactgagagagagcagaggaaaacgggaagaaaaatgttgagtgcgacggcgatcggcgcgttattgggtttgggaacccagatgtactccaatgctctccgcaaactcccctacatgcaccatccgtgggagcacatttccgtactcctgttgggccctacgtaagttttcaagcgtcaaaaacctgaagatcaccacgagtttgaccactaccatatgcactgcgcgggtttagctgtcatcaataaatcttatattaatgcagaatacctggaatacagatcttcccaacacgttgtaattgctgaatcacatcaccaaa

SEQ ID NO: 10423 - DNA, 381 bp, Glycine max; identical to SEQ ID NO: 7852
  Clone ID: LIB3039-019-Q1-E1-H7

SEQ ID NO: 10424 - DNA, 391 bp, Glycine max
  Clone ID: LIB3039-019-Q1-E1-H8
gaggagcaagcttaagctgttttctctgctctttgatcccgtgaaaaaaaaaatggctggagatgaagaaaagcttcgaatagtgtgatgtttccatggctagcctttggtcacatgatcccaaaccttgagctggccaaactcattgctcaaaagggtcaccacgtgagtttcgtatccacccaagaaacatagagcgtcttccaaaaccgtcactaaacacacttgatatcaatttcgtgaaccttccactgcctaaagtccaaaaccttccagaaaacgcagaagccaacactgacatcccctacgacgtctttgaacacctcaaagaagcctacgacgttctccaagaaccgctgaaacgttttctcgaatcttccaaacccgattg

SEQ ID NO: 10425 - DNA, 377 bp, Glycine max
  Clone ID: LIB3039-019-Q1-E1-H9
ggcacaagtgagtttgttgatcgagataactagaaacagtgtgatgaaaatgaaggtccttgttttcttcgttgctacaattttggtagcatggcaatgccatgcgtacgatatgttccctctccgaatgaacactggctatggtgcccgtactccggaggtgaaatgcgcaagttggaggcttgctgtggaagcacacaacatctttggctttgagaccattcctgaagagtgcgttgaagcaacaaaggaatacatccatggcgaacaatatagatcagactccaaaacagttaaccaacaagcttacttttatgccagagacctcgaagtccatcgcaaggacacatttgtgttcagtatagatggaacgtact

SEQ ID NO: 10426 - DNA, 335 bp, Glycine max
  Clone ID: LIB3039-020-Q1-E1-A1
ggcacaagtttgttgagatagctagaagcaataagatgaaaatgaaagtgcttgttttgtttgttgctacagttttggtagcatatgaatgccatggctcagactaccagaagttccctctccaaatgaaaactgggtttggtgggcaatacagcaatgaggtggcatgtgccaattggaggcttggcgtggaagcaaacaacgtagtcaagtggcaaactgttcctgcagcttgcggagagtacatagctgactacgttctaggagaccaatatagatcagattccaaaacagttaaccaacaagcttatttctatgctaaatccctcaaactc

SEQ ID NO: 10427 - DNA, 347 bp, Glycine max
  Clone ID: LIB3039-020-Q1-E1-A10
gggttcaaagcacgccgtgtttcgctgtctctcccatcctttcgcagtctcaatacccttctgatctgtgaaaggaaagcaaacatggttgatcaggtccaacaccctacaatcatggacaaggttgctggtcagctccatctccgttctggtctttcatctggtattagaagttatgatggagcctaccgccacccatctatgtaccaaagaccctcttttgggaattactcgaatgctgcattgcagttacctgtgatgcccacattcaaagctaccatggatttgtctgctactgcaacatcagcctcacacgtccttgttgctgctccaggagacaaaggcca

SEQ ID NO: 10428 - DNA, 387 bp, Glycine max; identical to SEQ ID NO: 7721
  Clone ID: LIB3039-020-Q1-E1-A11

SEQ ID NO: 10429 - DNA, 400 bp, Glycine max
  Clone ID: LIB3039-020-Q1-E1-A12
aagacgacagaagggaaagagacccggaaagggtgggaaccgcttttggaaatccattgggcttggatttaagactcccagggaagccatcgaaggaacctacattgacaagaagtgccccttcactggcaatgtttccatccgtggccgtatcttggctggaacatgtcacagtgctaagatgaacaggactattattgttaggaggaattatctccattttatcaagaagtaccagaggtacgagaaaaggcactccaacattcctgctcatatatcacctgctttccgtgtgaaggaaggagatcacgttattattggtcaatgcaggccactttctaagactgtgaggttcaatgtgttgaaagtgatcccagctggatcttctagcggtgcaaag

SEQ ID NO: 10430 - DNA, 382 bp, Glycine max
  Clone ID: LIB3039-020-Q1-E1-A2
ggagcttccctcacacattctctgtgactgcctctgttccgccgaacccagcattttcccaccgttcgggccaccggcggagttagttttccggcaaggatgggtgctgctctgctgtctgagcttgcgacggagatagttgtgccggcctgcgccgtcatcgggatcgtgttctcgttggtgcagtggttcctcgtgtcgcgcgtcaagctcactcccgaccgaaacggaacgacgtcgtcgccgcgcaacaacaagaacggctacggcgacttcctcattgaggaggaagaaggcatcaacgaccacagcgtcgttgtgaaatgcgctgagatacagaacgctatctccgaaagtgcaacatcctttcttttcactgaat

SEQ ID NO: 10431 - DNA, 336 bp, Glycine max
  Clone ID: LIB3039-020-Q1-E1-A3
attcattcattcagttcagtaactcacctcaccatggccgcatccattacattgtccaggctcgtctcttccaccctcaccactgcctctttcttcccacccataaccctgccttccaaactctcctctctccgactccccacccgccgccaccccaagccactcagattctcctcctccaccatcaccgccaccatctccgtcggcgacaagctcccggaggccaccttctcctacctggactcgtccggcgaggtgcagacgacgacggtgtcggaactgacgaaggggaagaaggcggtgctgttcgcggtccccggcgctttcacccccacg

SEQ ID NO: 10432 - DNA, 380 bp, Glycine max
  unsure (1)..(380): unsure at all n locations
  Clone ID: LIB3039-020-Q1-E1-A4
ggcacaagtgagtttgttgatcgaaataactagaaacagtgtgatgaaaatgaacgtccttgttttcttcgttgctacaattttggtagcatggcaatgccatgcgtacgatatgttccctctccgaatgaacactggctatggtgcccgtactccggaggtgaaatgcgcaagttggaggcttgctgtggaagcacacaacatctttggctttgagaccattcctgaagagtgcgttgaagcaacaaaggaatacatccatggcgaacaatatagatcagactccaaaacagttaaccaacaagcttacttttatgccagagacctcgaagtccatcccanggacacatttgtgttcagtatagatggcaccgtactct

SEQ ID NO: 10433 - DNA, 352 bp, Glycine max
  Clone ID: LIB3039-020-Q1-E1-A5
cccacgcgtccggccgatgtcatcaaggaaatccttggctccgttggagtagaagcagatgaagataggattgaatcgtttttgtctgaagttaagggtaaggatatagttgagcttattgctgccggtagggaaaagttggccacggttccttctggtggtggtggtgccgttgccgtcgccgcagctcctgggggaggtgctgctgctgctgctcctgctgctgaggcaaagaaggaggaaaaggtggaggagaaagaggaatctgatgatgatatgggtttcagtctcttcgattaattggtgtagtctattcagcttttttgttcagaacatattcttaattaacact

SEQ ID NO: 10434 - DNA, 345 bp, Glycine max
  Clone ID: LIB3039-020-Q1-E1-A6
ggcacaagtttgttgagatagctagaagcaataagatgaaaatgaaagtgcttgttttgtttgttgctacagttttggtagcatatgaatgccatggctcagactaccagaagttccctctccaaatgaaaactgggtttggtgggcaatacagcaatgaggtggcatgtgccagttggaggcttggcgtggaagcaaacaacgtagtcaagtggcaaactgttcctgcagcttgcggagagtacatagctgactacgttctaggagaccaatatagatcagattccaaaacagttaaccaacaagcttatttctatgctaaatccctcaaactcaccaacaaag

SEQ ID NO: 10435 - DNA, 327 bp, Glycine max
  Clone ID: LIB3039-020-Q1-E1-A7
gactcaggcacaacatctctatcgagtaaattaactatgaagcctaccctactattatcccattccttcctgcctctctgtgctttcctggctctttcagaagatgttgaacaagttgtggacataagtggcaaccccattttcccaggtggcacatattacattatgccatcaacttggggcgctgccggtggtggattgatactatgccggacaggaaactcagactgcccagttactgttttgcaggattactcagaaatcttccgtggcacactagtcaacttcagcatatctgggataagccctgtaatcatctttacaggt

SEQ ID NO: 10436 - DNA, 378 bp, Glycine max
  unsure (1)..(378): unsure at all n locations
  Clone ID: LIB3039-020-Q1-E1-A8
gattatatttgagttcaaacaaatcaaagccatggccacctccaacttctctattgttctctccgtctccctagccttctttttggtgctacttaccaaggcacactcgaccgataccgtttctttcaccttcaacaagttcaacccagtccaaccaaacattatgctccaaaaagatgctagtatttcatcctctggggtgttacaactcaccaaagttggcagcaacggcgtgcccacctcgggatctctcggtcgtgccctttacgctgccccaatccagatttgggacagcgaaaccggcaaggtagccagctgggctacatcctttaaattcaacattcgcacccaacanatcaaactcagctgacgggcttg

SEQ ID NO: 10437 - DNA, 363 bp, Glycine max
  Clone ID: LIB3039-020-Q1-E1-A9
ggcacaagtgagtttgttgatcgagataactagaaacagtgtgatgaaaatgaaggtccttgttttcttcgttgctacaaatttggtagcatggcactgacatgcgtacgatatgttccctctccaaatgaacactggctatggtgcccgtactccggaagtgaaatgcgcaagttggaggcttgctgtggaagcacacaatatctttggctttgagaccattcctgaataatgcattgaagcaataaatgaatacatccatggcgaacaatatagatcagactccagaacagttatacagcaagcatacctttatgccatagacctcgaagtccatcccaaggacacatttgtgttcagtat

SEQ ID NO: 10438 - DNA, 354 bp, Glycine max
  Clone ID: LIB3039-020-Q1-E1-B1
ggcactgcttattcgttcttctctctgtcgacctaacttgaagaatccaaacaggtgtgttgtggaagatgagtggtgccgttagggctgcattgaaatccaccactagtgtttgtgcacttgtgcagagaagccatggcctcctcccaatgaggtgcttctccactgaggcagaacagccacctctgaattcaacgccccgccctcctccgttctttgagactgaccattcaggtttgacatatggtaatctgctcggcgttcgtgaacatgcactgaaaacagatatcatcaactttcttgaaggttgtaatttgactctggaggatgttaaaatggattaccaccgcagct

SEQ ID NO: 10439 - DNA, 392 bp, Glycine max
  Clone ID: LIB3039-020-Q1-E1-B10
gaccagttagttgctttgtttcactcacactgtgtttggagcagaatcagatcgtgtgttccgtacgttcgttcgttcatttccagtgtcaaacatggcgtctcagatgagcaagaagagaaagtttgttgcggacggagtgttcttcgccgaactgaacgaggttctgacacgtgaattggcggaggacggttactccggcgtggaagttagggttacgccgatgcgcaccgagatcatcatcagagccaccagaacccaggctgttctaggtgagaagggaaggagaattagggaacttacctcagtggtgcagaagaggttcaaattccccgaaaacagtgtcgagctttatgctgagaaggtcaacaacagaggcttgtgtgccattg

SEQ ID NO: 10440 - DNA, 382 bp, Glycine max
  Clone ID: LIB3039-020-Q1-E1-B11
ggaacctttgcattctattcattcaagattcagcaagtgcgttttggaagcagagaccgaaatacttcgagatggcccgtacaaagcaaactgctcgtaagtcaactggaggaaaagctcccaggaagcagcttgcaaccaaggctgcacgtaagtctgcaccaacaactggtggtgtgaagaagcctcatcgttatcgccctggaactgttgctcttcgtgagattaggaaataccagaagagcactgagctcctaatcaggaagcttcctttccagaggttggttcgtgaaattgcccaggatttcaagactgatctgcgtttccagagccatgctgtgcttgcattgcaagaggctgctgaggcataccttgttgggct

SEQ ID NO: 10441 - DNA, 387 bp, Glycine max
  Clone ID: LIB3039-020-Q1-E1-B12
ggagatgctcccacgcaaacgctctcttcagagctctcaaacccaaaccccgcaattcttcactgccactttcttcaatggccatcaacaaaggtaatagtaataaggcatatgatgcattgctgttggatgctgggggcaccctattgcaattggcaaagccagttgaggagatttatgccactattggatccaaatatggtgtgactgtggatccagctatgataaagcagggatttaagagagcatttgctgctccgtggcctgaaaagctgcgctaccagggagatgggaggccattttggaaacttgtagtttctgaagccactggttgtggagatgaagattattttgaggaagtttatgagtactatgcaaaaggtgatg

SEQ ID NO: 10442 - DNA, 380 bp, Glycine max
  unsure (1)..(380): unsure at all n locations
  Clone ID: LIB3039-020-Q1-E1-B2
gacccacaccattctacactcccctctctcactcactcacactctcttctgtcatagctgtaccacgtttttcttctccatctcagcctctgtcccaacaccattctcatggctgctctagctctagcactgcttcttctggctttcactggcacttcaagtgctacatggtgcgtttgcaaggatggaagcgacgcgatcctgcagaaaaccttggactatgcttgtggagctggtgctgactgtaatcctctccaccaaaacgggccttgtttccagcccaacaccgttagggcccactgtaactacgccgtgaacagctacttccaaaggaagggtcaagctcaagggtcctgcgactttgcnggaacagccattgt

SEQ ID NO: 10443 - DNA, 315 bp, Glycine max
  Clone ID: LIB3039-020-Q1-E1-B3
gagatgaatctgcattaaacaattctggcagcaatgttggccgaaatctggagcgtcgggaagttccactaggtcattcacccaatgaagcaatcaagattgacaaggataagttaaaggcactggcagctatgggaaagaagagaaaggaacaacgaggcgaaatggcattaaagaaagatgtaatggatgtggatgatctcattgagagggagctggaagatggaattgaattagcagtcgaggatgagaaaaataagcgtgagagaaggcagaactggtctaagcctgatggtgaagatcaccatggggggg

SEQ ID NO: 10444 - DNA, 379 bp, Glycine max
  Clone ID: LIB3039-020-Q1-E1-B4
gacaacacaacgcaacacaacgcgcactctctcttttctctcttaacacaaaaaccctatcgttcttcgcggtttcgccgattctcgccatgccgaaagccaaatccgacgccaaagccgccgatagccggttgaagcgcaagggcgctggtgctggaaggaagcaatcgaagaaagctgctaaggatcctaacaagccaaagagacctccaagcgctttcttcgttttcatgtccgagttcagagagcagtttaagaaggagcatcctaacaacaaatccgtcgctgttgtcggtaaagctggtggtgacaaatggaaatcgctgtctgatgctgaaaaggcccccttcgttgccacggccgaaaagaagaaacaaga

SEQ ID NO: 10445 - DNA, 341 bp, Glycine max
  Clone ID: LIB3039-020-Q1-E1-B5
gagcgaaacagagagtgatttcagtgagtgatcggtgttcacttgatctcatcataatcgtcagcgtcaattgaagaagatgccgatcagaaacatcaccgtcggaaggcctgaagaggcgactcaccccgacacgttgaaggcggctttggctgagttcatctcaaccttcatcttcgtgttcgccggctcaggctccggcatcgcctacaacaagctcaccgacaacggcgctgccacccctgccggcctcatctccgcctccatcgcccatgcattcgccctcttcgtcgccgtctccgtcggcgccaacatctccggcgggcacgtcaaccccgccg

SEQ ID NO: 10446 - DNA, 381 bp, Glycine max
  Clone ID: LIB3039-020-Q1-E1-B6
ggcacaagtgagtttgttgatcgagataactagaaacagtgtgatgaaaatgaaggtccttgttttcttcgttgctacaattttggtagcatggcaatgccgtgcgtacgatatgttccctctccgaatgaacactggctatggtgcccgtactccggaggtgaaatgcgcaagttggaggcttgctgtggaagcacacaacatctttggctttgagaccattcctgaagagtgcgttgaagcaacaaaggaatacatccatggcgaacaatatagatcagactccaaaacagttaaccaacaagcttacttttatgccagagacctcgaagtccatcccaaggacacatttgtgttcagtatagatggcaccgtactctc

SEQ ID NO: 10447 - DNA, 378 bp, Glycine max
  Clone ID: LIB3039-020-Q1-E1-B7
ggcgtcgctccgcaccagtttcaccgcacgaatatcttgttgtttggagcgatccgagaaaaactctgtaaacatgttggtttaccaggacctccttacaggtgatgagcttctctctgactccttccgttacaaggaaattgagaatggaatgctgtgggaagttgaggggaagtgggttgttaaaggagcagttgatgtagacattggtgcaaacccttctgctgagggtggaggagaagatgagggagttgatgatgcagctgttaaggttgttgacattgttgacacattcagacttcaggagcaacccgcattcgataagaagcagtttgttaccttcatgaagaggtttatcaagaatttgactcccaagct

SEQ ID NO: 10448 - DNA, 360 bp, Glycine max
  Clone ID: LIB3039-020-Q1-E1-B8
gatgactatcaccatgctgtgagacctttttccatctagagttgttgcggctctcttctctgcacactcagaatgcagtccagactcttcaaccccaccaattcccttatcccaacttcacaagactccaacaagttcaaattctggtcatgcttctctctccgttcgcgcctcaatcgccgtggaaacccccacggagacggtgaagctgaacaagtacagctctcgcatcacggagcccaaatcgcagggcgcctcccaggccgtgctctacggcgtcggtctctccgaggacgacatggccaagccccaggtcggcgtctcctcggtctggtacgagggcaacacctgcaacatgca

SEQ ID NO: 10449 - DNA, 388 bp, Glycine max
  Clone ID: LIB3039-020-Q1-E1-B9
gctgtagccatagaatttcacattttatcttttgcattgagcaactaactcactcgcgccatggctgctaccatcatcaccacatgcaagctctcactgcttttgagtcttctctcagtttcacttttgctgggtgtgaggtctgatacccttcagaatgtaggcgcaattccccccacatgcaagcgcatagagtgtcccagctatgatgtcattcacgtaggcaacggctacgaaatccgtcgctataattcacccgtttggatttcaaacagccccattcaggacatttctctcgttgaagccacaagaaccggcttcaggaggttatttgactatattcaaggtaagaataactacaagcagaagattgagatgacagcacctg

SEQ ID NO: 10450 - DNA, 72 bp, Glycine max
  Clone ID: LIB3039-020-Q1-E1-C1
gaccgcacagaattagggttttccaattcacagagcaacacaacgaaccaacaatggcgcagcctcagccgc

SEQ ID NO: 10451 - DNA, 380 bp, Glycine max
  Clone ID: LIB3039-020-Q1-E1-C10
gacaacactcagagtagagtaaccaaaaggagagtgcaataactcgttgtacattcctagtgtgtgggagagacatggctaagatgtgtgttttggtgttggttcttgctctggctgtggccacaagtgccagaaacgttcccaaccccaaggatgctggtcttaaggaccagaagaacttcatcagctatggtggagttggtggttattccgggattgggaacaatggactgccttttggaggagctggtgcctgaataggtagtggttttggtagaagtgatggacttggtggtggactctgacgtccaagcgatagaatccgaagtttagcgcgagacacatttgggttcagtagagatagcaccgtactctctaat

SEQ ID NO: 10452 - DNA, 390 bp, Glycine max; identical to SEQ ID NO: 9462
  Clone ID: LIB3039-020-Q1-E1-C11

SEQ ID NO: 10453 - DNA, 406 bp, Glycine max
  unsure (1)..(406): unsure at all n locations
  Clone ID: LIB3039-020-Q1-E1-C12
ggagcaaaaccctaatccctatttttcttcctcagtagtgtcatttacgcttctcttctctgcagcaactatgcctaaccctaaggtcttcttcgacatgaccatcggcggtcaatctgctggccgcatcgtgatggagctctacgccgacgtcactccccgcaccgccgagaacttccgcgcgctttgcaccggcgagaagggcgtanggcggagcggcaagcccctccactacaagggctcgtccttccaccgcgtgatcccgagtttcatgtgtcagggtggcgacttcaccgccggaaacggaaccggcggcgagtcgatttatggcgccaagttcgccgacgagaacttcgtgaagaagcacaccggtcccggcatcctctccatggcgaacgccggtccc

SEQ ID NO: 10454 - DNA, 224 bp, Glycine max
  Clone ID: LIB3039-020-Q1-E1-C2
gacacatcaccatcctctggtaccttcttaccatcatactagttcgcgcccgttccttcgcggtctacgcagcttgcagtccaggctctgcaacgccacccagtctcttacaccaagttcgccatgctcgatggagtgatttctcggcacgtgtcactccccgttcgagccaccaatgtcgttgatcaccccaacgacaacgtgccactttcaaatttcagctc

SEQ ID NO: 10455 - DNA, 355 bp, Glycine max
  Clone ID: LIB3039-020-Q1-E1-C3
gataatcattacacatcataggctctctctctagggtttgatcagactcaagggtttaagccatgggaaaaaggaaggcaaaggcaaagcctcctccaaagaagcgaatggataagctcgataccgtcttcagctgccctttctgcaatcatggcagcagcgtcgaatgccgccttgacatgaagaacttgataggggaagctatttgcgggatatgccaagagagctttagcactaccatcacagctttatcagagccaatagacatatacagtgagtggattgatgaatgtgaactggtaaaccacccggacgatgatggtgctgagcactgatgctcagattcctgttcttg

SEQ ID NO: 10456 - DNA, 382 bp, Glycine max
  unsure (1)..(382): unsure at all n locations
  Clone ID: LIB3039-020-Q1-E1-C4
gactaaacagagtaactaactaaattaaggagagtccaagtgtgtgggagacanagagagacatggctaagtggtgtatgttggtgttggttcttgctctggctgtggctacaagtgccagagatgttcccaatcccaaaggatgctggtctcaatgaccagaagaacttcatcagctatggtggagttggtggctattctggaattggaagcaatggactaccttttggaggtgtcggaatangtggtggtattggcggtggtggacttggtggcggcctcggcggcaccaccgggataagtgggttgggaggattcggaggtcncattggtggcggtggtgttggtggtggtagcatacctcatcctaccccttgatata

SEQ ID NO: 10457 - DNA, 302 bp, Glycine max
  Clone ID: LIB3039-020-Q1-E1-C5
aaaggtcaacaatttggtgttaactaaaagccaatttaaccttaagaagatatgaaattgtttggtttccttggtgctgcaatatttttggtaacatggccatgccatggcgcacgcgaccaaaagttccctctccgaatgaaaactggctatagtgagcgttcttcggaggtgaaatgcgcaagttttacgcgtgctgtggaagcacacaacatccgagcctttaaaaccattcctgaagagtgcgttgaaccaacaaaagactacattaatggcgaacaatttagattatactccaaaac

SEQ ID NO: 10458 - DNA, 378 bp, Glycine max
  Clone ID: LIB3039-020-Q1-E1-C6
ggtgcacaagtgagtttgttgatcgagataactagaaacagtgtgatgaaaatgaaggtccttgttttcttcgttgctacaattttggtagcatggcaatgccatgcgtacgatatgttccctctccgaatgaacactggctatggtgcccgtactccggaggtgaaatgcgcaagttggaggcttgctgtggaagcacacaacatctttggctttgagaccattcctgaagagtgcgttgaagcaacaaaggaatacatccatggcgaacaatatagatcagactccaaaacagttaaccaacaagcttacttttatgccagagacctcgaagtccatcccaaggacacatttgtgttcagtatagatggcaccgta

SEQ ID NO: 10459 - DNA, 360 bp, Glycine max
  Clone ID: LIB3039-020-Q1-E1-C7
gatccatttctcgcaacaacgcttaacctctctcattccccatttcctcacctccttcaaccgctgctaaattctagggttccgaaatggacgctggcggaaagatcaagaagggcgccggaggtagaaagggcggcggcccaaagaagaagccggtttcaaggtccgtcaaagccggtctccaattccccgtcggaagaattggccgttatttgaagaaaggaaggtacgctcagcgtgtcggtaccggtgctcccgtatacttggctgcagttctcgaatacctagctgccgaggtgcttgagttggctgggaatgccgcacgtgacaacaagaagaacaagattattccaagacacg

SEQ ID NO: 10460 - DNA, 379 bp, Glycine max
  Clone ID: LIB3039-020-Q1-E1-C8
gatccatttctcgcaacaacgcttaacctctctcattccccatttcctcacctccttcaaccgctgctaaattctagggttccggggtggacgctggcggaaagatcaagaagggcgccggaggtagaaagggcagcggcccagagaagaagccggtttcaaggtccgtcaaagccggtctccaattccccgtcggaagaattggccgttatttgaagaaaggaaggtacgctcagcgtgtcggtaccggtgctcgcgtatacttggctgcagttctcgaatacctagctgccgatgtgcttgagttggctgggaatgccgcacgtgacagcaggaagaacaggattattccaagacacgtgcttttggcagtgaggaa

SEQ ID NO: 10461 - DNA, 400 bp, Glycine max
  Clone ID: LIB3039-020-Q1-E1-C9
agaagggggtattctattcttcaagattcaggtactgcgtttcggaagcagacacagatggctcgtacgaagcaaaccgctcgtaagtccacaggaggaaaggctcctaggaagcagcttgcaaccaaggctgcacgtaagtctgcaccaactactggtggtgtgaagaagccccaccgttatcgtcctggtaccgttgctcttcgtgagattaggaaataccagaagagtaccgagcttttgatccggaagctccccttccagaggctggttcgtgaaattgctcaggacttcaagactgatctgcgtttccagagccacgccgtgcttgcattgcaagaagctgctgaggcataccttgttgggctctttgaggacactaacctgtgtgccattcacg

SEQ ID NO: 10462 - DNA, 344 bp, Glycine max
  Clone ID: LIB3039-020-Q1-E1-D1
aaacagaagagagagagagagagagagagagtcctgaaacttgggtgcgattccttcactcacaacaacaacacatcactatggctcttctgagtcgagcctcttcacgcttccctcagctggtttcccctcaaagggtagtttcactccacacaacgctcccatctctgaacgcatccccatccacagccacgcctacaccatatgccccgccaccgcctccgtccgcttcctctcccgccggcgtttcgaaggcggcggagttcgtgatctcgaaggtggacgatctgatgaactgggcccgccgcggctccatctggcccatgaacttcggcctcgcctgc

SEQ ID NO: 10463 - DNA, 388 bp, Glycine max; identical to SEQ ID NO: 10052
  Clone ID: LIB3039-020-Q1-E1-D10

SEQ ID NO: 10464 - DNA, 363 bp, Glycine max
  Clone ID: LIB3039-020-Q1-E1-D11
gagactggttggattatcttgctggtaattacaaggttcctgtggttccagttgggttgcttccaccatccatgcagataagggacgttgaagaggaagacaataaccctgattgggtcagaatcaaggattggttagacacacaagagtcgtcatccgtggtttatattgggtttgggagcgagttgaagctgagtcaggaggacctcactgagttggcacatggcattgagctttcaaatttgcctttcttttgggcattgaagaacctgaaagaaggtgtgcttgagttgccagaagggtttgaagaaagaaccaaggaacgtggcattgtttggaagacttgggcaccccagcttaaga

SEQ ID NO: 10465 - DNA, 388 bp, Glycine max
  Clone ID: LIB3039-020-Q1-E1-D12
gataaccatggcgtctaactctgcttccgctctttacttccttttatgcctatcgcccatcactttgcttctttctgcgtttcgtgctcaagctcaatctcatgctccagctcccactttcaagtactgtgaaaagaatgcagactatgctgtgaaggtgagtggagtggaaatattgcctgaccccgtggagagaggagtgccattcacctttaagatcccagcttatactcctgaaccaattcaaagcggggacttgttatatgaaatttcttatgctggaatagaagcacaacctgctacatttctccatgatctctgtgaggaagcaccatgcccagtacctgcaggcaactttgtgctcgttcacaccgaattattgcctccg

SEQ ID NO: 10466 - DNA, 365 bp, Glycine max
  Clone ID: LIB3039-020-Q1-E1-D2
gaccacattccaaaacacaaacacatacattgtagtatcacttttgtctcggaatttgttcttttgagttatggcaagcttaaaggttgcatgtgtggttttgatgtgcatggctgtgatgagtgcaccaatgatggtgcaagccgtgtcatgcaatgatgtttctgtgaacctagcaccgtgcctatcttacctgatgcagggtggagatgttccagaatcgtgctgtagcggagtgaggaacattctgggttctgccagcaccacctttgacaaacaaaccgtgtgcaaatgtcctcagcaagctgctaatgactatggcatcaacgacgaatacgctcaggcactccccgcccgctgcaatg

SEQ ID NO: 10467 - DNA, 333 bp, Glycine max
  Clone ID: LIB3039-020-Q1-E1-D3
ggctgccagcgcagtcgaacatccagcgacacgcagatcatgtgctcctcccccagatcatctggaacgttcttacccggtggcgatgatcgacactttgatggccattggcatggttgtgcaggtcgagttcaacgtcgtcaacggacagaccggcgccatcgcccgccgtattcatgacaagcttccggctgcatcagacatccatgcgctgcatcacacatgatagctacatcttcgacaaactcagatacgtcagttacacctacttctgtcatgcgaacgagattctctggatgctaatcccgttctcgtacatggaagatatccaga

SEQ ID NO: 10468 - DNA, 379 bp, Glycine max
  Clone ID: LIB3039-020-Q1-E1-D4
gatgcacaagtttgttgagatagctagaagcaataagatgaaaatgaaagtgcttgttttgtttgttgctacagttttggtagcatatgaatgccatggctcagactaccagaagttccctctccaaatgaaaactgggtttggtgggcaatacagcaatgaggtggcatgtgccagttggaggcttggcgtggaagcaaacaacgtagtcaagtggcaaactgttcctgcagcttgcggagagtacatatctgactacgttctatgagaccaatatagatcagattccaaaacagttaaccaacaagcttatttctatgctaaatccctcaaactcaccaacaaagatgtctttgtcttggacgttgacgacactact

SEQ ID NO: 10469 - DNA, 327 bp, Glycine max
  Clone ID: LIB3039-020-Q1-E1-D5
tggggcacaagtgagtttgttgatcgagataactagacacagtgtgatgaaaatcaaggtccttgtgttcatcgttgctacaattttggtagcatggcaatgccatgcgtacgatatgttccctctccgaatgaacactggctatggtgcccgtactccggatgtgaaatgcgcaagttggaagcttgctgtggaagcacacaccatctttggctttgagaccattcctgaagagtgcgttgaagcaacaaaggaatatatccatggcgaacattatacatcagactcaattacagttaaccaacaagcatacttttatgccagaga

SEQ ID NO: 10470 - DNA, 377 bp, Glycine max
  Clone ID: LIB3039-020-Q1-E1-D6
ggcacaagtgagtttgttgatcgagataactagaaacagtgtgatgaaaatgaaggtccttgttttcttcgttgctacaattttggtagcatggcaatgccatgcgtacgatatgttccctctccgaatgaacactggctatggtgcccgtactccggaggtgaaatgcgcaagttggaggcttgctgtggaagcacacaacatctttggctttgagaccattcctgaagagtgcgttgaagcaacaaaggaatacatccatggcgaacaatatagatcagactccaaaacagttaaccaacaagcttacttttatgccagagacctcgaagtccatcccaaggacacatttgtgttcagtatagatggcaccgtac

SEQ ID NO: 10471 - DNA, 356 bp, Glycine max; identical to SEQ ID NO: 7609
  Clone ID: LIB3039-020-Q1-E1-D7

SEQ ID NO: 10472 - DNA, 263 bp, Glycine max
  Clone ID: LIB3039-020-Q1-E1-D8
ggcacaagtttgttgagatagctagaagcaataagatgaaaatgaaagtgcttgttttgtttgttgctacagttttggtagcatatgaatgccatggctcagactaccagaagttccctctccaaatgaaaactgggtttggtgggcaatacagcaatgaggtggcatgtgccagttggaggcttggcgtggaagcaaacaacgtagtcaagtggcaaactgttcctgcagcttgcggagagtacatagctgactacgttcta

SEQ ID NO: 10473 - DNA, 387 bp, Glycine max
  Clone ID: LIB3039-020-Q1-E1-D9
ggttctagtgtgtgattgtttgttgttgtaactcgttcttcttcttttgttgttctgtgtttgtgtttgttttttctctcacctgaaaatgtcttgctgcggtggtaactgtggttgcggaagctcctgcaagtgcggcaacggctgcggaggctgcaagatgtacccagacttgagctacactgagtcaaccaccaccgagaccttggtcatgggagtggcacctgttaaggctcaatttgagggtgctgaaatgggtgtgcccgctgagaacgatggctgcaaatgtggaccaaactgctcctgcaacccctgcacttgcaagtgaggtgttgggagagcaagcttcaagcagagatagcccttaattaagaataatgataaact

SEQ ID NO: 10474 - DNA, 325 bp, Glycine max
  Clone ID: LIB3039-020-Q1-E1-E1
gacacaccgtttgttctattcttaactcaacttctgctacccactctcttcttccaagtccaaccacgcttttctctacagtcatgggcaaggtcaagatcggaatcaacggatttggaagaattggccgtttggttgccagagtcgctctgcaaagagacgatgtggagctcgttgccgttaacgaccctttcattaccaccgattacatgacatacatgtttaaatacgacagtgttcacggacactggaagcatcacgatgtcaccgttaaggacgagaagacccttctcttcggtgacaagccagtcactgtttttggaca

SEQ ID NO: 10475 - DNA, 389 bp, Glycine max
  Clone ID: LIB3039-020-Q1-E1-E10
gaactcaagccttgagatatttcccttttgaggtttgattagtgtggcctagttaatttgttttctcgatgagaatgagaaagcaatccactatgcaatgcgcactttttcgcttctgggttcccttgttactacttgccagcttcagttatgctccttctgttttggccacaactgaaatttcagggaatcaagtgaacatggatgggaaggttgtaaatgaagagttaggaaaacctaatctaaaaggacaagatgaagaagaaaaattcaaaggactttttccaaaaccaattccaattgttaaaccttttccaaagctcattcctataattaaacctattccaaagccaattccggttgttaaaccaattcctattccactttat

SEQ ID NO: 10476 - DNA, 385 bp, Glycine max
  Clone ID: LIB3039-020-Q1-E1-E11
ggcacaagtgagtttgttgatcgagataactagaaacagtgtgatgaaaatgaaggtccttgttttcttcgttgctacaattttggtagcatggcaatgccacgcgtacgatatgttccctctccgaatgaacactggctatggtgcccgtactccggaggtgaaatgcgcaagttggaggcttgctgtggaagcacacaacatctttggctttgagaccactcctgaagagtgcgttgaagcaacaaaggaatacatccatggcgaacaatatagatcagactccaaaacagttaaccaacaagcttacttttatgccagagacctcgaagtccatcccaaggacacatttgtgttcagtatagatggcaccgtactctctaat

SEQ ID NO: 10477 - DNA, 349 bp, Glycine max
  Clone ID: LIB3039-020-Q1-E1-E12
aggggtgattggtcacgcggacccttacgacggaattaccattatggagctgataagtcctgttgtgtcgaaattagctccaaagcatgccataggaagggatgcacttaccgactcggaggggaagcatatgattacgttaagaagcataatctgataccctaatgtatcaatgtcatcatcaatatgtaatttacagcgaactttgctatgggtacgttctttgagatcacagtcgtgatgaacagtatcattctgatgtaatgctttccttgacaattattgcattcttcttatccttctgttaattaagctagctttgctatggttacattccttgcgatctaaa

SEQ ID NO: 10478 - DNA, 379 bp, Glycine max
  Clone ID: LIB3039-020-Q1-E1-E2
gacaatcgaacgggaaaaggcgtcttcataaacgccgcccaaaacttctcatacccttttattcattccattcgtttctagggttttcttttctttgccgagaaaatgagagagtgcatttcgatccacattggccaggccggtatccaggttggaaacgcctgctgggaactctattgccttgaacacggcattcagcccgatggacagatgccgagtgacaagaccgttggcggaggagacgacgccttcaacacatttttcagcgagaccggcgccggaaagcacgtgccccgcgccgtcttcgtggatcttgaacccaccgtgatcgacgaagtccgaaccggtgcgtaccggcagctcttccacccggagcagc

SEQ ID NO: 10479 - DNA, 331 bp, Glycine max
  Clone ID: LIB3039-020-Q1-E1-E3
gccatcggcgcggcacacacagacacacacatttcgtcggaatgggaagggtgattcgcgcacagcgtaagggtgcggggtcggtgttcaagtcccacacccaccaccgcaagggtccggcgaggttccgcagcctcgacttcggcgagcgcaacggctacctcaaaggggtcgtcaccgatatcatccacgaccctggtcgcggtgctcctctagccaaggtggcgttccgccaccccttccgctacaagaagcagatggagctcttcgtcgccgccgagggcctctacaccggccagttcatctactgcggcaagaaggccacctcgtc

SEQ ID NO: 10480 - DNA, 375 bp, Glycine max
  Clone ID: LIB3039-020-Q1-E1-E4
gaaagtgcaagagtttgttgtgagctataagctagtttatcgtgaggagaatatgaagttgtttgttttctttgttgctgcagtagttttggtagcatggccatgccatggcgcaggctaccaaaggttccctctccgaatgaaaactggctatggtgagcgttcttcggaggtaaaatgcgcaagttttaggcttgctgtggaagcacacaacatccgagcctttaaaaccattcctgaagagtgcgttgaaccaacaaaggactacattaatggcgaacaatttagatcagactctaaaacagttaaccaacaagctttcttttatgctagtgaacgcgaagtccatcacaacgacatatttatattcggcat

SEQ ID NO: 10481 - DNA, 376 bp, Glycine max
  Clone ID: LIB3039-020-Q1-E1-E5
gacacttcaaaatcctctagtaacccttcttttctctctctctctctcgtgttctgagctgctagaagcaatggagaggaaaagaagccatgcttctttcaccatgtttgcaatgcttgttggattgctctctcagagccttgtcattcctgtaatatccaccactgttgcagatcagaagaactactacaccccagatccacatgctggaagtccccccacaggctcacacaatagtagtcctccatctcatggccatgggagctctccaccctcacatcacaatagtccaagtactccatcaacaccctcaggtggaaactgtggatcatcacccccacaacatcatgattcaacaccctcaactccatcaaca

SEQ ID NO: 10482 - DNA, 378 bp, Glycine max; identical to SEQ ID NO: 7899
  Clone ID: LIB3039-020-Q1-E1-E6

SEQ ID NO: 10483 - DNA, 358 bp, Glycine max
  Clone ID: LIB3039-020-Q1-E1-E7
gaaggtgcaagagtttgttgtgagctataagctagtttatcgtgaggagaatatgaagttgtttgttttctttgttgctgcagtagttttggtagcatggccatgccatggcgcaggctaccaaaggttccctctccgaatgaaaactggctatggtgagcgttcttcggaggtaaaatgcgcaagttttaggcttgctgtggaagcacacaacatccgagcctttaaaaccattcctgaagagtgcgttgaaccaacaaaggactacattaatggcgaacaatttagatcagactctaaaacagttaaccaacaagctttcttttatgctagtgaacgcgaagtccatcacaacgac

SEQ ID NO: 10484 - DNA, 386 bp, Glycine max
  Clone ID: LIB3039-020-Q1-E1-E8
ggctgagtgagtgagggggcattctgaacaaagttggggctgaaaaacagagtctccgacccagtaaggagaaatggactggtgggtgtcaatgccaaagatagaactgcatgctcacctcaatggatccattagagactctacacttctagaactcgctagagctttgggtgacaaaggtgtcatagatttctcccaagtcgaacatgttatccttaaaaatgatcgttcattaagtgaggtattcaagttgtttgacttaatccacgttgttactactgatcactcaagtattacgagaattaccaaagaagttgttgaagattttgcatttgagaatgttgtgtatctggagctgaggactacaccaaagaaaaatgattccc

SEQ ID NO: 10485 - DNA, 408 bp, Glycine max
  unsure (1)..(408): unsure at all n locations
  Clone ID: LIB3039-020-Q1-E1-E9
gacccacgagtcaatacgggnnnnnnannacaccnnacggggccctagccttgcgttcaaaccaatcaaagccatggccacctccaacttctctattgttctctccgtctccctagccttctttttggtgctacttaccaaggcacactcgaccgataccgtttctttcaccttcaacaagttcaacccagtccaaccaaacattatgctccaaaaagatgctagtatttcatcctctggggtgttacaactcaccaaagttggcagcaacggcgtgcccacctcgggatctctcggtcgtgccctttacgctgccccaatccagatttgggacatcgaaaccggcaaggtagccagctgggctacatcctttaaattcaacattttcgcacccaacaaatcaaactc

SEQ ID NO: 10486 - DNA, 349 bp, Glycine max; identical to SEQ ID NO: 9016
  Clone ID: LIB3039-020-Q1-E1-F1

SEQ ID NO: 10487 - DNA, 380 bp, Glycine max
  Clone ID: LIB3039-020-Q1-E1-F10
gcaccatgaatctcttacagaggcacatcctggtgacaatgtgggattcaatgttaagaatgttgctgttaaggatttgaagcgtggttacgttgcctcaaactcaaaggatgaccctgcaaaggaggctgctaacttcacagcccaagtcatcatcatgaaccaccctggtcagattggaaatggctatgcccctgtcctcgactgccacacttctcacattgctgtcaagtttgctgaactcatgaccaagattgacaggcgatccggcaaagagcttgagaaggagcccaagtttttgaagaacggtgatgctggttttgttaagatgattccaaccaaacccatggttgttgaaactttctccgagtatcctccac

SEQ ID NO: 10488 - DNA, 385 bp, Glycine max
  Clone ID: LIB3039-020-Q1-E1-F11
ggcagtgagaagaagagggggtcagagtgagaaagagaaagagagaattcgtaaaccctaatttcggaaagatcggcgatgactgcctccaaggatcgcgagaacttcgtctacatcgccaaactcgccgagcaggccgagcgttacgaagagatggtggaatcaatgaagaacgttgcgaatctcgacgttgaactgacggtggaggagcggaatttgctttctgttgggtacaagaatgtgattggtgctcgcagagcgtcctggaggatcctgtcttccattgagcagaaggaagaaacaaaagggaacgagttgaatgcgaagcggattaaggagtacagacagaaggttgaattggagctatcgaacatctggtatgatg

SEQ ID NO: 10489 - DNA, 393 bp, Glycine max
  unsure (1)..(393): unsure at all n locations
  Clone ID: LIB3039-020-Q1-E1-F12
aaaagggggaaaaattaatttggttattcaaaatactaaaaacattttaataaaattaaaggccctggtttcctccttggcaaaattttgggaacaagggaatgccatgcgtacgatatgttccctctccgaatgaacactggctatggtgcccgtactccggaggtgaaatgcgcaagttggaggcttgctgtggaagcacacaacatctttggctttgagaccattcctgaagagtgcgttgaagcaacaanaggaatacatccatggcgaacaatatagatcagactccaaaacagttaaccaacaagcttacttttatgccagagacctcgaagtccatcncaaggacacatttgtgttcagtatagatggcaccgtactctctaatat

SEQ ID NO: 10490 - DNA, 303 bp, Glycine max
  Clone ID: LIB3039-020-Q1-E1-F2
ggcacaagtttgttgagatagctagaagcaataagatgaaaatgaaagtgcttgttttgtttgttgctacagttttggtagcatatgaatgccatggctcagactaccagaagttccctctccaaatgaaaactgggtttggtgggcaatacagcaatgaggtggcatgtgccagttggaggcttggcgtggaagcaaacaacgtagtcaagtggcaaactgttcctgcagcttgcggagagtacatagctgactactttctaggagaccattatagatcagattccaaaacagttaaccaac

SEQ ID NO: 10491 - DNA, 347 bp, Glycine max
  Clone ID: LIB3039-020-Q1-E1-F3
gatcagtatagaccaccttccctctcttctgttaccaatggctccctcatcaaactacatttctttccttttcctcaccacccttttgtttgctcttcaaatcagtgcaagagacagccagttcttcagcaaagtcacccattttgacaaaaacagtgtcaaagagacagaacttcccaacaaagaagcaccagaagtgaacaagccagagcaacaaccacctttcattccggagactgaaaacagctatggcctatatggtcatcatgatgagtataaccaagtcccttccaccaccaccaaccccacttcttaccacccctacaagaccgagtttgagaactcca

SEQ ID NO: 10492 - DNA, 355 bp, Glycine max
  Clone ID: LIB3039-020-Q1-E1-F4
ggaacctttgcattctattcattcaagattcagcaagtgcgttttggaagcagagaccgaaatacttcgagatggcccgtacaaagcaaactgctcgtaagtcaactggaggaaaagctcccaggaagcagcttgcaaccaaggctgcacgtaagtctgcaccaacaactggtggtgtgaagaagcctcatcgttatcgccctggaactgttgctcttcgtgagattaggaaataccagaagagcactgagctcctaatcaggaagcttcctttccagaggttggttcgtgaaattgcccaggatttcaagactgatctgcgtttccagagccatgctgtgcttgcattgcaaga

SEQ ID NO: 10493 - DNA, 364 bp, Glycine max
  Clone ID: LIB3039-020-Q1-E1-F5
ggggaaaatttgtcaaataaattcatctaaccccaaacaaaaccctagcacacttttatcgcttagtggcagcagcagtggcggcaagcaactccatccgcaatgggaatcgatttgaaggcaggaggtaagtccaagaagaccaagcgaaccgcccccaaatccgatgatatctacctcaagcttctcgtcaagctgtaccgttttcttgttcggaggactgggagtaacttcaatgctgttgtcctcaagcgccttttcatgagcaaggtcaacaagcccccgctatccctctctagattgatccgttacacgaagggaaaggaggataagatagctgtggttgttggtgccgtgaccgatg

SEQ ID NO: 10494 - DNA, 406 bp, Glycine max
  Clone ID: LIB3039-020-Q1-E1-F6
agacgacagaaggggaatactaaataagttgactccggagaaatttgatctcctgaagggtcagttgatcgattctggcattacatcagccgacatattgaagggagttatttcgctgatatttgataaggcagtgctggaaccaacattttgccccatgtatgctcagctgtgttctgatcttaatgaaaagctgcctccattcccatctgacgagcctggtgggaaagaaatcacttttaagcgagtactcttgaatatctgccaggaggcttttgaaggtgcagataaactgagggaagaactgagacagatgactgcccctgaccaggagatggagcgacgggacaaggaaaggcttgtcaagattcgaacccttggaaatatccgtttaattggtgagctg

SEQ ID NO: 10495 - DNA, 313 bp, Glycine max
  Clone ID: LIB3039-020-Q1-E1-F8
gatatgttctctgtcaacacccttccctcccagttccctccgccatccccatgccgtcgccattgccgtctcaccgtcgtctgctcctccttccgccgccgcagtcgaagccgcagacgtcacaacaaagtatctcttcccaccaccacctccacctcttcatttgaaccgaagctcgaagccgttatcgacctcactcccctaaccgctttccaatctgaacttcgacggttcctatcttccggcaaagacgcttaccgagatttgcaaaccttggtcactctcgaccacaaccggaggcttgtcgtttcgt

SEQ ID NO: 10496 - DNA, 392 bp, Glycine max
  unsure (1)..(392): unsure at all n locations
  Clone ID: LIB3039-020-Q1-E1-F9
gcccaactcttcctctttttacttcccctatggctcgtcactccttgctcttagccctcctcctcttcgccgcctgtggcancgccgcgatggcggtggccgcgtccgacgccgacgacatcctgatccgtcaggtggtgccagatgttggcgaagccgaagaggaggacaacctgctgaacgccgagcaccacttcgcgagcttcaaggccaagttcgccaagacctacgccaccaaggaggagcacgatcatcgcttcggcgtcttcaagtccaacctccgcagagccaggctgcacgccaagctcgacccctccgccgtccacggcgtcaccaaattctccgatctaactccggccgagttccgccgccagttcctcggcctcaagccg

SEQ ID NO: 10497 - DNA, 360 bp, Glycine max
  unsure (1)..(360): unsure at all n locations
  Clone ID: LIB3039-020-Q1-E1-G1
gacaacacagaacanaaacaaagaaaaaaaaaacccttagccaacacaaccatcatggccacctctgctattcagcaatcagcattcacttgtcaaactgctctgaagcagctcaatgagttcgtccgcaagaccggtggcgccggcaaaggtcgcactaacatgcgccgcaccgtcaagagtgctcctcagagcatttggtatggccctgaccgtcccaagtacttgggtccattctcggagcagattccatcatacctgaccggagaattccctggtgactacggatgggacactgctggattatcagctgacccggaaaccttcgccaggaaccgggagctggaggtgattcacagc

SEQ ID NO: 10498 - DNA, 359 bp, Glycine max
  Clone ID: LIB3039-016-Q1-E1-H8
ggcagtttcaaattttcttttccttcactttcccgagaaaaaaataacacttttcactttcttcactacgttctcacttcgatatggctcgtacgaagcaaaccgctcgcaagtccaccggtggcaaggcgccacgtaagcagctcgccaccaaggccgctcggaagtccgctccggcgaccggaggagtgaagaagccccaccgcttcaggccgggaaccgtggcgctgagggaaatcagaaagtaccagaagagcaccgagcttctcatcaggaagcttccatttcagaggctcgtgagagaaatcgcgcaggatttcaagaccgatttgcgtttccagagcagcgctgtttccgcg

SEQ ID NO: 10499 - DNA, 399 bp, Glycine max
  Clone ID: LIB3039-016-Q1-E1-H9
acggaagacgacagaaggggattagatttaggtcttccctcttccgtgcacagcttgaacacaccgcgtttcggagagagacgtcgcaatggggaggaggcctgcaaggtgttatcggcagataaaaaacaagccataccccaaatcacgcttttgccgtggtgttcctgatcctaagatcagaatttatgatgttggtatgaagaagaaaggtgttgatgagtttcccttctgtgttcatctggttagctgggaaaaagaaaatgtttcaagtgaagcattggaagctgctagaattgcatgcaacaaatatatggcgaaatttgctggaaaagatgctttccacttgagagtccgagtacatccattccatgttcttaggatcaacaaaatgctttc

SEQ ID NO: 10500 - DNA, 299 bp, Glycine max
  Clone ID: LIB3039-017-Q1-E1-A1
gaaggttctaatttataatatgggagtggaggagaacacccctaactccatttctaggtcagaatgccacgcggaacaaagcagcaacagaatcaaggcgcatgtgctcttgagtgtctacgatctcacccctgtcaataggtacgtctagtgggttgggtttggcatccttcactctggcattgaagtacatggtaacgagtatgggtttggagcccatgacttccagctagtggagtttttgaagtggagccaaggaaatgccctggattcatatagagatgttccagctctttggg

SEQ ID NO: 10501 - DNA, 176 bp, Glycine max
  Clone ID: LIB3039-017-Q1-E1-A10
gaatttgggaattattgctcccatcactaatggattcattgtcacgtcatcacattagtatgggtggggcctatctctggacgggacggtcaccgctgcgacatttggaccggctgtcatgagatgcacctggacaaatcaatggatgtattgggtcagttcacccaacggttcat

SEQ ID NO: 10502 - DNA, 352 bp, Glycine max
  Clone ID: LIB3039-017-Q1-E1-A11
ggtgcaagagtttgttgtgagctataagctagtttatcgtgaggagaatatgaagttgtttgttttctttgttgctgcagtagttttgggagcatggccatgccatggcgcaggctaccaaaggttccctctccgaatgaaaactggctatggtgagcgttcttcggaggtaaaatgcgcacgttttaggcttgctgtggaagcacacaagatccgagcctttaaaaccattcctgaagagtgcgttgaaccaacaaaggactacattaatggcgaacactttagatcagactctaaaacagttaaccaacaagctttcttttatgccagtgaacgccacatccaacacaac

SEQ ID NO: 10503 - DNA, 387 bp, Glycine max
  Clone ID: LIB3039-017-Q1-E1-A12
gaaggtgcaagagtttgttgtgagctataagctagtttatcgtgaggagaatatgaagttgtttgttttctttgttgctgcagtagttttggtagcatggccatgccatggcgcaggctaccaaaggttccctctccgaatgaaaactggctatggtgagcgttcttcggaggtaaaatgcgcaagttttaggcttgctgtggaagcacacaacatccgagcctttaaaaccattcctgaagagtgcgttgaaccaacaaaggactacattaatggcgaacaatttagatcagactctaaaacagttaaccaacaagctttcttttatgctagtgaacgcgaagtccatcacaacgacatatttatattcggcatagattacaccgt

SEQ ID NO: 10504 - DNA, 324 bp, Glycine max
  unsure (1)..(324): unsure at all n locations
  Clone ID: LIB3039-017-Q1-E1-A2
ggagttgcacaatcagaagaatgggatgtgttttcaggctgcggtgaatgatgggtttaggaacgcttcagtgaagcgtattggnattagcaaggttgattcgtagatattatcatcgaagaatggaacaacacaagtagagatgaggaaaaaaactaagaacctgttttttccctgtttttttttaatcaatgttcttaggcaataattttgattgatgtacagcgagacagaactctcgatccctaaagaggctgaatggaaattgggacgaaagagggagatagatgttacccattagataaaatctgaaatctctgttgc

SEQ ID NO: 10505 - DNA, 289 bp, Glycine max
  Clone ID: LIB3039-017-Q1-E1-A3
ctacagaagggggttactgttacatgtcacagggaagaaagagcgtccagaaggttcagttcagatgtgccgtctccaccatggcaactcccaaagcatcgtcttggtggaccgagaacatttccgcaataacggctcgcatcttcgtcggtctcatcagctttcagaatcctcttttcaaggtgacttgcacatctggcatgtgtagaaccccgttgcatgtaacgtcggcacacttaattgtaagtgagatctttcctgttgttgttgtgaagggccttctgtaccc

SEQ ID NO: 10506 - DNA, 281 bp, Glycine max
  Clone ID: LIB3039-017-Q1-E1-A4
cacatacacatacattgtagtatcacttttgtctcggaatttgttcttttgaggtagggcaagcttaaaggttgcatgtgtgggtttgatgtgcatggctgtgatgagtgcaccaatgatggtgcaagccgtgtcatgcaatgatgtttctgtaaacctagcaccgtgcctatcttacctgatgcacggtggatatgttccagaatcgtgctgtagcggagtgaggaacattctgggttctgccagcaccacctttgacaaacaaaccgtgtgcaaatgtc

SEQ ID NO: 10507 - DNA, 92 bp, Glycine max
  Clone ID: LIB3039-017-Q1-E1-A5
gataggggggttcactttggttcaaattgagagtatcattactccattaatcattgacgtactaatctgcgatggcttcctcttctctgttt

SEQ ID NO: 10508 - DNA, 280 bp, Glycine max
  Clone ID: LIB3039-017-Q1-E1-A7
cgtcaaagataagacgacagaaggggaaccgcgaaccatctgaagattctgaagtctgaaccgaacagctacacaaagttcgcgtaggttggaggcacgggttggttaagccgcgtaacaggtgaacaaacactgagagagcgattaccattacttacaagcgtgtgtgtctttcgttcgttcagtctccatttcctcatcgatcagatctgagtcaatctcacattcctcaatttaatttcagtcggaattcacttatcgtgatttccgaatctgggcg

SEQ ID NO: 10509 - DNA, 298 bp, Glycine max
  Clone ID: LIB3039-017-Q1-E1-A9
ggagcaaaaccctaatccctatttttcttcctcagtagtgtcatttacgcttctcttctctgcagcaactatgcctaaccctaaggtcgtcttcgacatgaccatcggcggtcaatctgctggccgcatcgtgatggagctctacgccgacgtcactccccgcaccgccgagaacttccgcgcgctttgcaccggcgagaagggcgtagggcggagcggcaatcccctccactacaatggctcgtcattccaccgcgtgatcccgagtttcatgtgtcacggtggcgacttcaccgcc

SEQ ID NO: 10510 - DNA, 274 bp, Glycine max
  Clone ID: LIB3039-017-Q1-E1-B1
ggagcgaagaagatattagggtttttgagtgcggtgcggcgatcctagcactctcgtctgcagctttcgccgacagcttcattcaccatggctgagcaaaccgagaaggcttttttgaaacaaccaaaagtgtttctcagctcgaagaaagactgggaagggaaagagacccggaaagggtgggaaccgcttttgggaatccattgggcttggatttaagactcccagggaagccatcgaaggaacctacattgacaagaagtgccccttcact

SEQ ID NO: 10511 - DNA, 336 bp, Glycine max
  Clone ID: LIB3039-017-Q1-E1-B10
gacacttcaaaatcctctggtaacccttattttatctattctctctctttcttttgtgttctaagcagctataagcaatggagaggaggggaagccatgcctctctcaccatgtttgcaatgcttgttggagtgatctctcagagccttgtcattcctgtagtatccatcactgttgaagatcagaagaactactacaccccagatccacatggtggtagtcccccctcatgctcacacagtagtactcctccatctcatgggcatggaagctccccatcctcacatcagcagagtagtccaagttatcaatcaacaccctcaggtggaaactgtg

SEQ ID NO: 10512 - DNA, 385 bp, Glycine max
  Clone ID: LIB3039-017-Q1-E1-B11
ggaggagaatatgaagttgtttgttttctttgttgctgcagtagttttggtagcatggccatgccatggcgcaggctaccaaagggtccctctccgaatgaaaactggctatggtgagcgttcttcggaggtaaaatgcgcaagttttacgcttgctgtggaagcacacaacatccgagcctttaaaaccattcctgaacagtgcgttgaaccaacaaacgactacattaatggcgaccaatttagatcagactctaaaacagttaccaacaagctttcttttatgctagtgaacgccaactccatcacaacgatcatatttatattcggcattaataacaccgttctctctaatatcccaatctatgaaaaacattgatattgg

SEQ ID NO: 10513 - DNA, 385 bp, Glycine max
  Clone ID: LIB3039-017-Q1-E1-B12
ggaaaaagaaaaaaagagaagggggaaatctcttcttcaatggcggcagagtcatctcgcagtagcgctaaacgcccctttatggaagaagacgacaatgaattctccaaaaagccaccagaaaaaagggttaggtttccaaagggaaagaaagtgaagccaggagatgaagtggtggtggacaaagcaaatgttgaggagggtgaagttgacttggtgaatgctaaaactgccaccaatgctgcaaaagagcgggaaaaactcagaaggtttctaaagggaaagaaagtgaagccaggagatgaagtggtggtggacaaagcaaatgttgaggagggtgaagaagttgacttgatgaatcctaaaattgctgctgccaaagaac

SEQ ID NO: 10514 - DNA, 310 bp, Glycine max
  Clone ID: LIB3039-017-Q1-E1-B2
gactcacacctaccttgacacattttaaatgtagccactactaactttatcataccactcactcttacatcattgtccctaaatggcggaaaccctgatccaaatcggcgtggttgggcgcgccgacatagcccggaaggtctcccgcgccatcacgctcgcccccaacgccgccctctgcgccgtggcgagccgctctcacgacaaggcagccgcattcgccgccgccaacggcttccctctctcagccaaagtgtacggctcctacgagtcccttctggaagaccccgacgtgggcgccgtctaaatg

SEQ ID NO: 10515 - DNA, 157 bp, Glycine max
  Clone ID: LIB3039-017-Q1-E1-B3
ggacttcttcagtccctcttttgctttaccaaattccattttccaattcaaaaccctaactccgttcgagacaccaaatcgtgatggcaccaaagagagagaagaagccagcagagaagaagcctgtggaggagaagaaatcgacggtgggagacaa

SEQ ID NO: 10516 - DNA, 83 bp, Glycine max
  Clone ID: LIB3039-017-Q1-E1-B5
gacaacacaacgcatcacaacgcgcactctctcttttctctcttaacatgagaaccctatcaatcttcgctgtttcgacaatt

SEQ ID NO: 10517 - DNA, 84 bp, Glycine max
  Clone ID: LIB3039-017-Q1-E1-B6
gtctgctcaaacagcacactcctgtgtttgtgaaaagaaaactttgaaagctcaatttgttagcaaggttgctctgtgaatccg

SEQ ID NO: 10518 - DNA, 80 bp, Glycine max
  Clone ID: LIB3039-017-Q1-E1-B7
cgcgtcaacggacgcgataagacgacacaaggggctctacctcaagccactctaaggaaaatggcggtgcctctactctc

SEQ ID NO: 10519 - DNA, 358 bp, Glycine max
  Clone ID: LIB3039-017-Q1-E1-B8
ggcacaagtgagtttgttgatcgagataactagaaacagtgtgatgaagatcaaggtccttgttttcttcgttgctacaattttggtagcatggcaatgccatgcgtacgataggttccctctccgaatgaacactggctatggtgcccgtactccggaggtgaaatgcgcaagttggaggcttgctgtggaagcacacaacatctttggctttgagaccattcctgaagagtgcgttgaagcaacaaaggaatacatccatggcgaacaatatagagtagactccaaaacagttaaccaacaagcgtacttttatgccacagacctcgaggtccatcccaaggacacatttgtgttc

SEQ ID NO: 10520 - DNA, 384 bp, Glycine max
  Clone ID: LIB3039-017-Q1-E1-B9
ggcatcaattcaaaatatatcatcaattataagcatgggtttgtggaacacaacgaatgcagtgtcttgccgctttcacaagtttggtgatgaccaaaagaatctggtcttccaaggtgatgccacgtcttcttccaggggcatagaactcacaaagttagacggtggaggaaaaccagtgggtggcagtgtggggagagtgttatactcttctccagtgcacctttgggaaagctctacagtggtcgcaagctttgaaaccgacttcaccttttccatctcatcagactctactactccaggtgatggccttgccttcttcattgcaccatttgacactaaaatccctccaaactctggtgggagcaaccttggactcttccc

SEQ ID NO: 10521 - DNA, 324 bp, Glycine max
  Clone ID: LIB3039-017-Q1-E1-C1
ggttcaagttctaaacagatgatttgagtaaaacgccgtcgttccgtgtttcgttcgctcctctctttcccgctccgcacactcttctctttgttcttccccaatccccaaccacattttggggtttagggttttcctctctcctctgcaatatccaatttctccctttctcccccactctctccgcaatccagtgacaatgatgtacaatgatcctcagcagcagcagcagcagcaccagtaccagcaacaacagcagcagcagcatttccaccagcagccgcctggtccggacttccaccgcgggaccgctgccgccgtcgc

SEQ ID NO: 10522 - DNA, 387 bp, Glycine max
  Clone ID: LIB3039-017-Q1-E1-C10
ggtgcttcgtctcagatcattctgcgcaggtaagacagagagaaagaactgacctcagcggcggcggcggcggcaacagaagaggagccaccaccacacacaatgggtcgcgtgagaacaaaaacggtgaagaaatcctcccgccaggtgattgagcgttactactcgcgcatgaccctcgacttccacacaaacacaaagcttctcgaagaagtggccatcatcccttccacgaggctgcggaacaagatcgcgggtttctccacgcatctcatgaagcgcatccagaagggtcccgttcgcggcatctccctcaagctccagtaggaagagcgcgagccccgcatggacttcgtccccgacgtctccgccatcaacaccgaccaa

SEQ ID NO: 10523 - DNA, 339 bp, Glycine max
  Clone ID: LIB3039-017-Q1-E1-C11
ggaaagttgatctcactaagcaatgggtattatatcacagccccagctggtgccatttccgttattgatgaatgggaggtacacaacatgcaccattccttggacgctcccttccgacgatccaagcattcgcacacccatcgagctatcttggcttaatctcttcatcaacacaatccccaccttcaagaagcatgctgagagtgatacttctgttcctgatgctgtaaacaaaactgaagaatttgctcatacgtttgctaaaagaattgactatttcatgatagatcctgcatttcaatgcgtgcgtcttgacgtccttcttccatgcagacttcg

SEQ ID NO: 10524 - DNA, 368 bp, Glycine max; identical to SEQ ID NO: 9110
  Clone ID: LIB3039-017-Q1-E1-C12

SEQ ID NO: 10525 - DNA, 369 bp, Glycine max
  Clone ID: LIB3039-017-Q1-E1-C2
cggggagacccattttaacgactatcccgagctgtagaagaagatatgaggggggtgtttcttccatggaacccaccttgcttccacgacgcactccatctcccttccgtctcgctcctgccaacgagacccttcttcttcagcctctcagcctcctccacccccttagcgcccgtggagtccgcgtcgcaactcagcgcgcgcgagaggaggcgcgcgaggagcgagaggagggagacgaggagcggcgcgaagaactggagggaggtggtggaggagaggctcatgggaaagcccaaaaagcagaagggctcctggatggacgagctgaacctcgacaatctcgccaagctgggtccacaatggtgg

SEQ ID NO: 10526 - DNA, 327 bp, Glycine max
  Clone ID: LIB3039-017-Q1-E1-C3
gacggttttgcgctgttgttgctgctcatcctccgtaacctccgagctctgcaccgtggaacgaagccatggggaagacacatggaatgggatctgctcgcaagctcaagtcccaccgcaggaggcaaaggtgggctgagaagtcatacaagaaatcacatcttggaaatgaatggaagaaaccttttgttggttcatcccatgccaagggaattgtccttgaaaagataggtattgaggctaagcagcccaactctgccattcgtaagtgtgccagggttcaacttatcacgaatgggaagaagattgccgcttttgtccctaatg

SEQ ID NO: 10527 - DNA, 292 bp, Glycine max
  Clone ID: LIB3039-017-Q1-E1-C4
gatcgcatttcatagcactcaccctcattaccaacacgaaagcatagccaaaagcagttttcgaagtcgctgattttcctaatggctccgggagggggagaaaagaagccggcggagaagaagccaacggcggagaaagcaccggcggagcaagaagccgaaggcggagaggaaaatctccaacgagggatggagctagaagaacaagaagcgcacgaagaagaacgtggagacctacaagatctacatcttcaacgtcctcaagcaggttcaacccgacattgggaagttc

SEQ ID NO: 10528 - DNA, 129 bp, Glycine max
  Clone ID: LIB3039-017-Q1-E1-C8
ggcattatatttgagttcaaacaagtcaaagccatggtcacctccaacttctcgattgttctgaccgtctccctagccttctttttggtgcgacttaccaggggagactccaccgataccgtctctttc

SEQ ID NO: 10529 - DNA, 363 bp, Glycine max
  Clone ID: LIB3039-017-Q1-E1-C9
ggcacaagtgagtttgttgatcgagataactagaatcagtgtgatgaaaatgaaggtccttgttttcttcgttgctacaattttggtagcatggcaatgccatgcgtacgatatgttccctctccgaatgaacactggctatggtgcccgtactccggaggtgaaatgcgcaagttggaggcttgctgtggaagcacacaacatctttggctttgagaccattcctgaagagtgcgttgaagcaacaaaggaatacatccatggcgaacaatatacatcagactccaacacagttaaccaacaagcttacttttatgccacagacctcgatgtccatcccactgacacatttgtgttcagtat

SEQ ID NO: 10530 - DNA, 382 bp, Glycine max
  Clone ID: LIB3039-017-Q1-E1-D1
ggcacaagtttgttgagatagctagaagcaataagatgaaaatgaaagtgcttgttttgtttgttgctacagttttggtagcatatgaatgccatggctcagactaccagaagttccctctccaaatgaaaactgggtttggtgggcaatacagcaatgaggtggcatgtgccagttggaggcttggcgtggaagcaaacaacgtagtcaagtggcaaactgttcctgcagcttgcggagagtacatagctgactacgttctaggagaccaatatagatcagattccaaaacagttaaccaacaagcttatttctatgctaaatccctcaaactcaccaacagagatgtctttgtcttggacgttgacgacaactagtctct

SEQ ID NO: 10531 - DNA, 222 bp, Glycine max
  Clone ID: LIB3039-017-Q1-E1-D10
gacgtttcattccatcgatggttcgttcttatccaatgtaagtcagcgactacgccatcatgacgaccaaggtgcaatccctggggcggtcgggtctctcccgggtcccaccacaatacattcatacccctcaaacccgacgcgtccgccacaccgcacccgtatctgactccattcccgtcatcgacctctcctccttcaaccccacgggaggcggtctcc

SEQ ID NO: 10532 - DNA, 346 bp, Glycine max
  Clone ID: LIB3039-017-Q1-E1-D11
gatacaaaaccctgaagaaagacacagccattgtttgtttactttccattgattgagcgaaagctttgttttttctgcgatcattgtccgttgggtggaagaaagtctcaacctttagtcgaaagagcaaggatctgagtgagtgagcgatcatgtgtggtggtgcgattatctccgacttcattccagcgggtcacgccggcggggcgcagcgcgtgaccgccgacatcctgtggccgaatttgaggaagcggttctcgaagtcgctgctggacgatgatttcgaggcagggttcagagaattcgaggatgactcggaaatcgaggatgtcgatgatgaggacca

SEQ ID NO: 10533 - DNA, 374 bp, Glycine max
  Clone ID: LIB3039-017-Q1-E1-D12
ggcacaagtgagtttgttgatcgagataactagaaacagtgtgatgaaaatgaaggtccttgttttcttcgttgctacaattttggtagcatggcaatgccatgcgtacgatatgttccctctccgaatgaacactggctatggtgcccgtactccggaggtgaaatgcgcaagttggaggcttgctgtggaagcacacaacatctttggctttgagaccattcctgaagagtgcgttgaagcaacagaggaatacatccatggcgaacaatatagatcagactccagaacagttaaccaacaagcttacttttatgccagagacctcgaagtccatcccaaggacacatttgtgttcagtatatatggcaccg

SEQ ID NO: 10534 - DNA, 359 bp, Glycine max
  Clone ID: LIB3039-017-Q1-E1-D3
agacacaaaacttgtgtgcctttctcccaagttaattgtgtggaggagttacaaatctttctaaaccacactgcaatacaccaaaacaatggcagataaagatgctttttgctacccttatcatgttcatgattgcacatcaccacaagagaatttgcccaataaagggccttttcattcagaaatgcttcccaaaaattctaggaaaggagctggttacacatcagagaagccacttgatgcaaagacactgagacgtttagctcaaaacagagaagctgcaaggaaaagccgtctcaggaaaaaggcttatgtgcagcaactagagtcaagtagattaaggctcacacaccttgaac

SEQ ID NO: 10535 - DNA, 328 bp, Glycine max
  Clone ID: LIB3039-017-Q1-E1-D4
gatcacattccaaaacacaaacacatacattgtagtatcagttttgtctcggaatttgatcttttgagttatggcaagcttaaatgttgcatgtgtggttttgatgtgcatggctgtgatgagtgcaccactgatggtgcatgccgtgtcatgcaatgatgtttctgtgaacctagcaccgtgcctatcttacctgatgcagggtggagatgttccagaatcgtgctgtacccgagtgatgaacattctgggttctgccagcaccagctttgacaaacaaaccgtgtgcaaatgtcttcagcaagctgctgataactatggcatcaac

SEQ ID NO: 10536 - DNA, 76 bp, Glycine max
  Clone ID: LIB3039-017-Q1-E1-D5
ggcacaactttgttgagatagctacaatcaataagatcaaaatcaaggtgcttgttttgtctgttgctacactttt

SEQ ID NO: 10537 - DNA, 322 bp, Glycine max
  Clone ID: LIB3039-017-Q1-E1-D7
ggcacaagtgagtttgttgatcgaagtaactagaaacagtgtgatgaaaatgaaggtccttgaattcttcgttgctacaattttggtagcatggcaatgccatgcgtaccatatgttccctctcagaatgaacactggctatggtgcccgtactccggaggtgacatgcgcaagttgagggcttgctgtggaagcagacaacatctttggctttgagaccattcctgaagagtgcgttgatgcaacacatgaatagatccatggctaacaatatagataagggccacaacagttaaccaacaggcgtaggtttatgccagag

SEQ ID NO: 10538 - DNA, 275 bp, Glycine max
  Clone ID: LIB3039-017-Q1-E1-D8
gcacaagtgagtttgttgatcgagataactagaaacagtgtgatgaagagtaaggtccttgttttcttcgttgctacaattttggaaggatggcaatgccatgcgtacgatatgttccctctccgaatgaacactggctatggtggccgtactccggaggtgagatgcgcaagttggacgcttgctgtgcaagcacacaacatctttgggtttgagaccattcctgaagagtgcgttgaagcaacaaatgaagacatccatggcgaacagtatag

SEQ ID NO: 10539 - DNA, 376 bp, Glycine max
  Clone ID: LIB3039-017-Q1-E1-D9
ggcagcgcttgatttgaggccaggcaagccccactcaaccaccacacctctcctcgttcacgctacccctttctgctcttcttcgacctttcaagttttaaaagtataaagatggcagagacattcctatttacctcagagtcggtgaacgagggacaccctgacaagctctgcgaccaaatctccgatgctgtcctcgacgcttgcctcgagcatgacccagacagcaaagttgcctgcgaaacatgcaccagaaccaacttggtcatggtcttcggagaaatcacgaccaaggccaacgttgactacgagaagatagtgcgtgacacctgcatgaacatcggattcgtctcaaatgatgtgggactggatgccg

SEQ ID NO: 10540 - DNA, 323 bp, Glycine max
  Clone ID: LIB3039-017-Q1-E1-E1
tctgttgggtgcagttggtgcaatagcagcgcggattctaggcgtggctgggctgatccctcaggagacggcactcccattggtcagaactggtgtgttcccacctgcagggacctacaagtactgggcagactcctacacactgttcgtgtttgagatggaactgatgggatttgcagagcacagtagattccaagactgggccaaaccaggctctatgggcaaacaatacttcctaggactagacaagggtcctggcggttctggtgaaccagcttatccacggggacctttcttcaacccactaggctttggtaaggatg

SEQ ID NO: 10541 - DNA, 139 bp, Glycine max
  Clone ID: LIB3039-017-Q1-E1-E11
ggaactagtcaactcaacccaacactctttctctcttcctcttcaccccacatgctattttttcaaatctaggggggtggtctgcctctagggtttcttcattctgcaatcatcaatgggcgtaattactcctccccat

SEQ ID NO: 10542 - DNA, 310 bp, Glycine max
  Clone ID: LIB3039-017-Q1-E1-E12
gacactaaacaagttaaaagaagagcatcactgaactaacaaagcaaccctatgtcgaaggtggtttgtgtcaccggagccagcggcgccatcggatcatgggtggtcctactcctcctccagcgtggttacaccgtccatgccaccgtccaagatatcaaggatgaaaatgagacaaaccatttggaggaaatggaaggaccaaggggccaccccaatttttttgaaatggttctccttgacaccaacccaatgccgctggcataaagggttgttcccgcgtaatccaccttgcatgtcctaacatcat

SEQ ID NO: 10543 - DNA, 325 bp, Glycine max
  Clone ID: LIB3039-017-Q1-E1-E2
gagtgcacaagtgagtttgttgatcgagataactagaaacagtgtgatgaaaatgaagggccttgttttcgtcgttgctacaattttggtagcatgggaatgccatgcgtacgatatgttccctctccgaatgaacactgggtatggtgcccgtactccggaggtgaaatgcgcaagttggaggcttgctgtggaagcacacaacatctttggctttgagaccattcctgaagaatgcgttgaagcaacaaaggaatacatccatggcgaacaatatagatcagactccagaacagttagccaacaagcttacttttatgccaga

SEQ ID NO: 10544 - DNA, 282 bp, Glycine max
  Clone ID: LIB3039-017-Q1-E1-E3
gactcatttttccaatattcacacaatacctctatcttgtgccacttatatagtacgtggagcctagtgagacagaccatggtttccgaaacaaaccagtccaagaatgtgtgtgtaattggaactggaccatcacggctagtggcagcgagggggctcccagcacaaggtcagaacgtggttctgttggagcagaaccatgatattggaggtcaatggctagataacccaaatgtacaagacgaggaccctttgggaagagacccttggctaaaggtgcat

SEQ ID NO: 10545 - DNA, 263 bp, Glycine max
  Clone ID: LIB3039-017-Q1-E1-E6
ggcacaagtgagtttgttgatcgagataactagaaagagtgtgatgaacgtgaaggtccttgttttcttcgttgcggcaattttggtggcatggcagtgccatgcgtacgatatgttccgtctccgaatgaacactggcgatggtgcccgtactcgggaggtgaaatgcgcacgttggaggcttgctgtcgcagcacacaacatctttggctttcggaccattcctgaagagtgcattgaagcaacaaaggaatacatccatg

SEQ ID NO: 10546 - DNA, 84 bp, Glycine max
  Clone ID: LIB3039-017-Q1-E1-E7
ggcacaagtgagtttgttgatcgagataactagaaacagtgtgatcgagatgaaggtccgtgttttcttcgttgctacaatttt

SEQ ID NO: 10547 - DNA, 68 bp, Glycine max
  Clone ID: LIB3039-017-Q1-E1-E8
gcatctcgcactacactgagaggaacacggagtgacgcggggtgttcctcagttgccaccttctccca

SEQ ID NO: 10548 - DNA, 244 bp, Glycine max
  Clone ID: LIB3039-017-Q1-E1-E9
gatacattcccaaagcaaagtttctccctaaaaaacgaaagccttctcaattcttgcaagttgcaacccatcaaccatggcctcaggcagacccttcatcactgctttccttcttcctgtgaccttctcaagcatgagtttgagcctagcatcatctcgtcacctcttgcaaacaaccacatctccaaatttgcctggtaatcccactttgggcaacccatcatcactgtcaccttttgccatc

SEQ ID NO: 10549 - DNA, 367 bp, Glycine max
  unsure (1)..(367): unsure at all n locations
  Clone ID: LIB3039-017-Q1-E1-F1
gagagctgcaagggatcaactgaggagagtgagagaaaagagaagagaagatgacaacacgcttcaagagcaacaggaagaagaggggccacgtcagcgctggccacggtcgaatcggaaagcacaggaagcaccctggatgacgcggtaacgccggaggcatgcaccaccacaggatcctcttcgacaaataccaccctgggttcttcggcaaggtaggaatgcgctattttcacaagcttcgcaacaaattctactctccgatcctcaacatcgacaagctgtggtccctggtcacgcaagaagtgaaggacaaggcctccaaggagaacaacgcnccgctcatcgacgtcacgcagttcgggta

SEQ ID NO: 10550 - DNA, 379 bp, Glycine max
  Clone ID: LIB3039-017-Q1-E1-F10
gattggacacattcttcagcgactgcgtttttggatcggaacctcttctgcggcgtatcaatgggacactccaacgtttgggggtcggacccaaaaaactacggtcctggttctcgcacttgccgtgtgtgtgggaatccacatggactgatcaggaactatggccttatgtgctgcatgcagtgcttccgtaccaatgccaacgaaattggcttcatcaagtatcgctaacagagcagttgtcaactacggaccaatattgtgttctggcactatgatgttttgaggatgttatgtttgaagaaacttgagaccttcatttttcatctaactaactatcagacgtaatttgtggtactaagaatacttttagataaat

SEQ ID NO: 10551 - DNA, 385 bp, Glycine max
  Clone ID: LIB3039-017-Q1-E1-F11
ggcagcgtactgaaagttgcaagcacacagaagagaagagaaagatgacgtcatcgcgtccccctccgtcgaaatccgtggatctggacctaacaatcgtgtcggcgaagcacctgaagaacgtgaactggaagaacggcaatctgaaaccctacgtggttttctgggtggacccggagcggcgcctcgccacgaaatccgacgactccggcaacacctcccccgtctggaacgagcgtttcgccctccctctccctctccccctccacgactccttcctcaacctcgagatctttcactccaaaccctccgacacccccaaacccctcgtcgccaccctccgcctccccctcaaagacctccacgacctccacgactcaaagcg

SEQ ID NO: 10552 - DNA, 379 bp, Glycine max
  Clone ID: LIB3039-017-Q1-E1-F12
ggaggaagaataattgtgaggcgagggtaaggtcgcgttgtgttgcgtcgtgtcgtgcgctgttcctctgtttctcgtttttgtgttcagaccgaaccctagctccgcatcgcaaccatgtcgaccaagcagggtggaaaagctaagcctttgaagaaacccaagtctgataaggaggattacgacgagattgatgtggctaacattcagaagaaaaaggaagaggagaaggcgctaaaggagttgaaagccaaggcgcaacagaagggaagctttggaggttctgggctcaagaaaagtggaaagaaataagggctctttatcatgattgtatgcattcaatattgagccctgtaattacagttgctaccatgataac

SEQ ID NO: 10553 - DNA, 337 bp, Glycine max
  Clone ID: LIB3039-017-Q1-E1-F2
gacacaccgtttgttctattcttaactcaacttctgctacccactctcttcttcgagggccaaccacgcgtttctctacagtcatgggcaaggtcaggatcggaatcaacgggtttggcagaattgggcgtttgggtgccagagtcgctctgcggagagacgatgtggagctcgttgccgttaacgagcctttcattaccaccggttacatgacatacatgtttaaatacgacagtgttcacggacactggaagcatcacgatgtcaccgttaacgacgagaagacccttctcttcggtagcaagccagtcaggggggtgtggacacaggaaccctg

SEQ ID NO: 10554 - DNA, 291 bp, Glycine max
  Clone ID: LIB3039-017-Q1-E1-F3
ggcacaagtgagtttgttgatcgagataactagaaacagtgtgatgaaaatgaaggtccgtgtgttcttcggtgctacaattttggtagcatggcaaagccatgcgtacgatatgttccctctccgaatgagcactggctatggtgcccgtacaccggaggtgaaatgcgcacgttggaggcttgctgtggaagcacacaacatctttggctttgagaccattcctgaagagtgtgttgaagcaacaaaggaatacatccatggcgaacaatatagatcagactccaaggc

SEQ ID NO: 10555 - DNA, 284 bp, Glycine max
  Clone ID: LIB3039-017-Q1-E1-F4
ggctcttctctctctctaaaaatctccggcggtccttcagtccattttcctttccagttcgggtctgatacgaatagatttcgtcagtgttgaaatcacgagaaattcatggctgcgccaccgggaagagctcgtgcggattacgattatctcagaaaagttctcttgattggcgatagtggtgtcgggaagagttgccttcgtctacgattctctgatggttctttcacagactaggttcatcacaactataggcattgattttaggataagaaccattgagc

SEQ ID NO: 10556 - DNA, 84 bp, Glycine max
  Clone ID: LIB3039-017-Q1-E1-F5
ggttctcttaagtccttcccattccaatggattctgcgttctccatcaacgcgaccgcgcagctggcgctcttcagagcgctcc

SEQ ID NO: 10557 - DNA, 84 bp, Glycine max
  Clone ID: LIB3039-017-Q1-E1-F7
ggagcacaatcctaatccccatttttcttcctcagtagtgtcatttagaggtctcttctcgtcagcagctatgcctaaccctaa

SEQ ID NO: 10558 - DNA, 79 bp, Glycine max
  Clone ID: LIB3039-017-Q1-E1-F8
taacgggaaagtgcaatagtttgttgtgagctataagctacatgtgcgtgaggagaagatgaagttgtttgttttcttt

SEQ ID NO: 10559 - DNA, 357 bp, Glycine max
  Clone ID: LIB3039-017-Q1-E1-F9
gagagtgatccttctacactaactaaagccgagcagcgagagagagaaaccctagcaaaaatgccggctggtcacggtttgagatgccggggcagagattccttctctcgtcccttcaggaagaagggtaccatcgccctcaccacatacctcagaacctaccacgtcagcgattatgtcgacgtcaaagttaacggcgccgtccacaagggaatgcctcacaagttctaccatgggcgcaccggtcgcgtctggaatgtcaccaaacgtgctgttggggtccaagtcaacaaggaggtcggcaacactatcataaggaatacgattcacgtgcgtgtggagcatgttatgccatca

SEQ ID NO: 10560 - DNA, 357 bp, Glycine max
  Clone ID: LIB3039-017-Q1-E1-G1
gactcgcagttgtattgttgaacaagggtttctctgtctgcttcttcactttctcgcgtttcaatcgagaccaaaacaaaaacatgggcagaaaattcttcgtcggtggcaactggaaatgcaatgggaccactgaggaggtaaagaagattgttactactttgaatgaggctgaagtccctggagaagatgtcgtagaagttgttgtgagccctccttttgtgttccttcctgttgtaaaaagtttgctgcgccctgatttccatgtttcggcacaaaactgttgggttcgcaaaggtggtgcttataccggtgaggttagtgctgaaatgcttgttaatttgggaattccgtggg

SEQ ID NO: 10561 - DNA, 359 bp, Glycine max
  Clone ID: LIB3039-017-Q1-E1-G10
ggcacaagtgagtttgttgatcgagataactagaaacagtgtgatgaaaatgaaggtccttgttttcttcgttgctacaattttggtagcatggcaatgccatgcgtacgatatgttccctctccgaatgaacactggctatggtgcccgtactccggaggtgaaatgcgcaagttggaggcttgctgtggaagcacacaacatctttggctttgagaccattcctgaagagtgcgttgaagcaacaaaggaatacatccatggcgaacaatatagatcagactccaaaacaagttaaccaacaagcttacttttaagccatagacctccaagtccatcccaaggacacatttgtgttc

SEQ ID NO: 10562 - DNA, 435 bp, Glycine max
  Clone ID: LIB3039-017-Q1-E1-G11
aagtcccgggcagacccacacgtcaaagaaaacgacagaagggggagattcatgcctgagaaagggtctgctgagtatgcagctttggctaagaaccctgagaaggagtttttgaagactattactggcaagaaggagacggtcattgaccttacaattatagaaatcttgtcaaggcacacatctgatgagttctaccttggggagagagatggtggtgactattggacttctgatgctggtccactacaggccttcaagaggtttggaaagaagcttcaagagattgaacaaaagcttatacagaagaacaaggacgagacgttgagaaaccgcagtgggccggctaaaatgccttacactttgctctatccttctagtgaggagggattgactttcagaggaattcccaacagtatctccatctacgggctc

SEQ ID NO: 10563 - DNA, 218 bp, Glycine max
  Clone ID: LIB3039-017-Q1-E1-G12
ggcctctgctccgcataactcctcacacacacacacacaacagaacacaacacatacacatacacatgttgttgatgagtggagggaaggggaaacacagatccatcacacacatgaccaactgatctttgtcctttgtatataatctgattccactttttggcactaacagagccactcaacgctctgggatgtactatactccattcggggttctg

SEQ ID NO: 10564 - DNA, 275 bp, Glycine max
  Clone ID: LIB3039-017-Q1-E1-G2
gaaagtgcaagagtttgttgtgagctataagctagtttatcgtgaggagaatatgaaagtgtttgttttcggtggtgctgcagtagttttggtagcatggccatgccatggcgcaggctaccaaatgttccctctccgaatgaaaactggctatggtgagcgttcttcggaggtaaaatgcgcaggttttaggcttgctgtggaagcacacagcatccgagcctttaaaaccattcctgaagaatgcgttgaaccaacagaggactacattaatg

SEQ ID NO: 10565 - DNA, 342 bp, Glycine max
  Clone ID: LIB3039-017-Q1-E1-G4
cgggtgcaacatacatttaaaagtttgaggctatggacatcttgaatagtgtccatctagagtgtagtaattaaggtcattcggaagagttggtggtaaggagacaaaagtctcaatcctccttgtagcaacttatgattatgaatgatatgttctgggaaggagagatctaggataaagtggcacaagaatggcgaccaaaacaggagtttcttccagacgatgacgaagatcaggaagaaaacatagcatatatttcttcttcatgccgagacacgtcccatctctgatacgtcgggcagtaagagtcgtttcctatcggtcgatacagaggagtttgcc

SEQ ID NO: 10566 - DNA, 277 bp, Glycine max
  Clone ID: LIB3039-017-Q1-E1-G7
gaccatcatctacaacgcctcgaatccacacagttctactctacgctctgaagcctctctctctctctctctcgatgtatcatggctgtgcccaatcaggcagagcgtggattagcctagttgcaaactcgtgatcgtcggtggaagcggtacaggaaagacagcgttcgtgagaagggatcttaccggtgaattcgagaagaagtacgaaccgaccattggagtggaggttcacccattggatttcttcacagactgcggaaagattcgcttctac

SEQ ID NO: 10567 - DNA, 334 bp, Glycine max
  Clone ID: LIB3039-017-Q1-E1-G8
ggcatcaattcaaaatatatcatcaattataagcatcggtttgtggaacacagcgaatgcagtgtcttgccgctttgacaagtttggtgatgaccaagagaatcgggtcttccaaggtgagtgcacgtcttcttcgagtggcatagaagtcacaaggttagacggtggaggaaaaccagtgggtggcagtgtggggagagtgttatactcttctccagtgcacctttgggaaagctctacagtgatcgcaagctttgggatcgactttaccttttccatctcagcagactctagtactccaggtgatggccttgccttcgtcattgcaccattt

SEQ ID NO: 10568 - DNA, 374 bp, Glycine max
  Clone ID: LIB3039-017-Q1-E1-G9
cttctttttggtgctacttaccaatgcacactcgaccgataccgtttccttcaccttcaacaagttcaacccagtccaaccagggattgggctccaaaaagatgctagtatttcatcctctggggtgttacaactcaccaaagttggcaccaacggcgtgcccacctcgggatctctcggtcgtgccctttacgctgccccaatccagatgtgggacagcgatacccggcaaggtaaccagctgggctacatcctttaaattcaacattttcgcatccataatctcaaactcaagtgacgcgcttgcactcttcctagtaaccgttccggtcccaagcccaattctgatatggaattcttggtcctttcaacat

SEQ ID NO: 10569 - DNA, 332 bp, Glycine max
  Clone ID: LIB3039-017-Q1-E1-H1
gacacatttctctgtttcaacttgcattattttctattccctccttcaacccttttgacattctctgcgcggacaatgccacagccttttctcagcttaccctcttaaactaaactccattgtcttctcttctccccccccatcatcatcatcacctctcttctcattttcactataataaatagcttcttcttcccattctctcttcccctgtagtagccaacagacaccccaaaaatgcacgagagatcgatgaaagaagctgctggcacgtgcccacagaggagaagaaccccttccttctcctcttcgcttctcgacgccatttaccg

SEQ ID NO: 10570 - DNA, 362 bp, Glycine max
  Clone ID: LIB3039-017-Q1-E1-H10
gaaggtgcaagagtttgttgtgagctataagctagtttatcgtgaggagaatatgaagttgtttgttttctttgttgctgcagtagttgtggtagcatggccatgccatggcgcatgctaccaaaggttccctctccgaatgaaaactggctatggtgagcgttcttcggaggtaaaatgcgcaagttttaggcttgctgtggaagcacacaacatccgagcctttaaaaccattcctgaagagtgcgttgaaccaacacaggactacattaatggcgaacaatttagatcagactctacaacagtttaccaacaacctttcttttatgccagtgaacgcgaagtcaatcacaacgacatat

SEQ ID NO: 10571 - DNA, 357 bp, Glycine max
  Clone ID: LIB3039-017-Q1-E1-H11
acccacgagtcaatacagctgtcagtacagctgagaaaggggcacaaatgggtttattgatcaatatgtcgataaacattgtgataaacattatggtccttgttttcgtcgttgctatcatcgtggcagcattttagtgacaatcgtactacaattcctctcacagattcactctcggattgggtactggtaatcgtgccgttactccggcagtttaatgcgctgctttggagccacatatcatcttaggctttagcattattcttgaaaagagtcttgaagcatgagttgaataaatccatggataccaatatagataagactccatatcagtctccaaacaattttacttttatg

SEQ ID NO: 10572 - DNA, 114 bp, Glycine max
  Clone ID: LIB3039-017-Q1-E1-H2
tccagctgctaaaagacgacatcaggggacacacttgcccatcatcacagtttcttcctttctctgctctttgccttctctgatacaagtagtgccttgtagagcgtgttttgg

SEQ ID NO: 10573 - DNA, 318 bp, Glycine max
  unsure (1)..(318): unsure at all n locations
  Clone ID: LIB3039-017-Q1-E1-H3
aggggcaagtgcagcagcagaaagtgcggtaggctcatccgagaacggaagcagcaatggagatcgatctcaaggccggaggtaaaagcaaaaaaaccaaaagaacagcaaccaagtccaatgatatctatcttaaactcttggtcaagctttatcgcttccttgttcggagaactggcagcaaattcaatgccgttatactcaagagattgttcatgagcaaggttaacaagcccccattgtctttgtcaaggttgattaagtataccaaggggaangaagataagattgctgtggtggtaagcaatataaccgatg

SEQ ID NO: 10574 - DNA, 333 bp, Glycine max
  Clone ID: LIB3039-017-Q1-E1-H4
gatagtagcaaagtgttacaattcaaaagtcacatgtaaacaggaacaaagaggtgtttcgaagaactagagagctagtactcaatcccatctttgtggaatcccagtttcaccgatgtctaggagacgatggattatcagtacattctacgagggattacggcgtgtagttttgcttttttgtatgttgtgtacagttttggagcagcggtcacagattcaagttcaatacatgtaacgagtaatgaatgtccaaagatatcatcagacaatgggatatgctcacatgagggatcaggaaatgctgacatcattagtgtgggtgctggggtt

SEQ ID NO: 10575 - DNA, 249 bp, Glycine max
  Clone ID: LIB3039-017-Q1-E1-H5
gaggctgagcttcttgcagctgctagtcagcccctcgctgacgatgatgaggaatcttttgagtagagggctgtgtgtctgagtgggctggtagttgtatggtactgtatgtgctgttggaggttgtagtgttgacatttttggatgcgaattcgaggatctgaatcaattatcatcgagatttgttgcttaaatttagaacctcagtttaatatatcaacgatgggcgttaaaaacgatgaggatttg

SEQ ID NO: 10576 - DNA, 115 bp, Glycine max
  Clone ID: LIB3039-017-Q1-E1-H6
cgcgtccacccacgcgtccgccggctgcgggtgggcgcctgccgggggcctcagtcccgtcggtcagtcccacctctttggcgggtcgtcttcccggatgatctcactgcatcta

SEQ ID NO: 10577 - DNA, 250 bp, Glycine max
  Clone ID: LIB3039-017-Q1-E1-H7
gacatttgttgtggcttagttaatcctcagatggcagtggaaaatatctgagtccacgaagagtccaacgttgcccctccaccatcatggggacaatcactatcgctcgctttcactttgtacgacactttggtcctcaggttccggtccattgactggatcttcttctattccctcagatgctcaacaatcagagacttctttcgtctatgcgaatgtcattccatagctcaaagcctctctctctcac

SEQ ID NO: 10578 - DNA, 261 bp, Glycine max
  Clone ID: LIB3039-017-Q1-E1-H8
ggcacaagtgagtttgttgatcgagataactagaaacagtgtgatgaaaagagaggtccttgtgttcttcgttgctacaattttggtaacatggcaatgccatgcgtacgatatgttccctctccgaatgaacactggctatggtgcccgtactccggacgtgagatgcgcaagttggaggcttgctgtggaagcacacaacaactttggctttgagaccattcctgaagagtgcgttgaagcaacaaaggaatacatcca

SEQ ID NO: 10579 - DNA, 384 bp, Glycine max
  Clone ID: LIB3039-017-Q1-E1-H9
gacacatttgtttgtatagatagatacaatcagatgaatatgaatgtgcttgctttgtttgttgctagagttttggtagcatagggatgccatggatcacacaaccaaacattccctctctatctgaatactgggtttggttggcaatacatcaatgaagtgggatgtatcagttagttgcttggcttgcgagcaaacaacgtactcaggtggcagactgttcctgcatcttgcttacagtacatagctaactacgttctatgaaaccaatatatatcaatctccatcccagttagtcaacaagcttatttctatccaaacatcctcactctcactaacaaacatatctctgtcttgcacgtagattacactactctctctaat

SEQ ID NO: 10580 - DNA, 354 bp, Glycine max
  Clone ID: LIB3039-018-Q1-E1-A1
gatatcagaagctcagacctagggatttcggccgtttgctccccaaaaaggaaagaagcagattctgtcctttgaaatcaacaagaaaagatgtcaggtgaagaggtagctgttgcagttgaggtacctgctacttcaattccaggtgagccaatggacatcatgactgctctacagcttgtgctgagaaaatctctggcctatggtggtcttgcacgaggtcttcatgaaggtgccaaggtgatcgagaagcatgctgcacagctctgtgttctagcagaagattgtgaccaacctgattatgtgaaactggtgaaggctctttgtgcagaacacaatgttagccttttgaca

SEQ ID NO: 10581 - DNA, 373 bp, Glycine max
  Clone ID: LIB3039-018-Q1-E1-A10
ggaacctttgcattctattcattcaagattcagcaagtgcgttttggaagcagagaccgaaatacttcgagatggcccgtacaaagcaaactgctcgtaagtcaactggaggaaaagctcccaggaagcagcttgcaaccaatgctgcacgtaagtctgcaccaacaactggtggtgtgaagaagcctcatcgttatcgccctggaactgttgctcctcgcgagattaggaaataccacaagagcactgagctcctaatcacgaagcttcccttccaaaagttgggtcctgaaaattgcccaggatttcaagactgatctgcgtttccagagccatgctgtgcctgcattgcaagaagctgcctaggcataac

SEQ ID NO: 10582 - DNA, 352 bp, Glycine max
  Clone ID: LIB3039-018-Q1-E1-A11
gcgtccgtgctactacaagacgacaacaggggacggatgagtttgatgctagacattcctgaatcaactgttacgatatggaaggtccttgctttcttcgtcgctacgacttttgcagcatggaatggccatgcgtcagatgggtgccctccccccagtgaacaaccggttatggtgcgcgtaatctagatgtgcaatacgcactttgggtgcttgcagtcctcaccgacaacatccttggactggtgatcattcctgaattatgagttgacacaacagcagtgtacacccatggaggacacttcctatccaaatgttggatagttaacctgcacacttacttttaagcgat

SEQ ID NO: 10583 - DNA, 378 bp, Glycine max
  Clone ID: LIB3039-018-Q1-E1-A12
ggaataacgctaacctgaagaaaagagtgtaagagtaggaaacgagattgacgaaccctaagctgaaagaagaaaaaatgtctggcgtgaagagagcactgaggcagttcaccttcggaaccggcaagaccgccggtcgcaactcggcggggcgcataacgtccttccaccgcggcggcggagccaagcgcttgcaacgaaccgtcgatcacaaacggaataccgcttcttctctcggcgtcgtcgaaaggatcgagtacgaccctaaccgctcctccaaaatcgccctcgttcgctggatcgaaggcgtccatcaccgtcgccgccgcgctgcctccgccaacgccgcttcgcccaagctcctccatctcgattccg

SEQ ID NO: 10584 - DNA, 132 bp, Glycine max
  Clone ID: LIB3039-018-Q1-E1-A2
gaacgtgcaagagtttgttgtgagctataagctagtttaccgtgaggagaatatgaagttgtttgttttctttgttgctgaagtatttttgggggaatgggcatgcaatggcgcaggttaccaaaggttccc

SEQ ID NO: 10585 - DNA, 396 bp, Glycine max
  unsure (1)..(396): unsure at all n locations
  Clone ID: LIB3039-018-Q1-E1-A3
ggacacactcatcttcttcttcttctttttggttttctctctcacagtgagtcagcagcaatggactccatttccccaagagctcaagagaataataacactacggcgaaggccatgatgacgagatccgaaccagcgaacccatacccgacaacgttcgtccaagctgacacatcctccttcaagcaagtagtccaaatgctaaccggctcctcggagacagcgaaacaagcagccgccggcggctcctcgaaaccttcgaactcgatcccacccatgaaatccatacccaacaaaaagcatttttctaagctctacgagcgcagagcaaactccctgaacctcaagaacatcaaccccctcacctcgtttttctcganacacaacactaattcc

SEQ ID NO: 10586 - DNA, 303 bp, Glycine max
  Clone ID: LIB3039-018-Q1-E1-A5
ggttttccacattcatattttccgtgcgtttccctttcattttccctcactttctcgctcgccaaacgcccctctctctcctccaatgggcgaccagctcaccgacgaccagatcgccgagttcaaggaggccttcagcctcttcgacaaggacggcgatggttgtattactactaaggaacttgggactgtgatgcggtcactagggcaaaacccaactgaggcagaactgcaggatatgattaatgaggttgatgctgatggcaatggaaccaaccaggtcccagagttcctcaacctgat

SEQ ID NO: 10587 - DNA, 166 bp, Glycine max
  Clone ID: LIB3039-018-Q1-E1-A6
acccaaacgtccagttcgcgaaagcggttgcaattgcatagcatagagaaagtgcagagagagcacaacgtaaccactcaatcaaacaatccgttactccttaatttaatttccttccttccttccccggttgcaaaactcgctcccaaacaacaagccttcccca

SEQ ID NO: 10588 - DNA, 366 bp, Glycine max
  Clone ID: LIB3039-018-Q1-E1-A7
ggcacaagtgagtttgttgatcgagataactagaaacagtgtgatgaaaatgaaggtccttgttttcttcgttgctacaattttggtagcatggcaatgccatgcgtacgatatgttccctctccgaatgaacactggctatggtgcccgtactccggaggtgaaatgcgcaagttggaggcttgctgtggaagcacacgacatctttggctttgagaccattcctgaagagtgcgttgaagcaacaaaggaatacatccatggcgaacaatatagatcagactccaaaacagttaaccaacaagcttacttttatgccagagacctcgaagtccatcccaacgacacatttgtgttcagtataga

SEQ ID NO: 10589 - DNA, 351 bp, Glycine max
  Clone ID: LIB3039-018-Q1-E1-A8
ggagagaagagataagagatatggatccagacgcgttggcaaaggcattcgtggagcactactacagcaccttcgacaccaaccggaacggtttaacgaatctgtatcaggagggttccatgctgaccttcgaagggcagaagatccagggcgcttccagcatcgtcgctaagctcacttccctccctttccaacagtgccaacactccatctccaccgtcgactgccagccctccggtgtcaacgctggcatgcttgtcattgtcaacgggaatcctctagctcgctggcgaactagccactctcaagttcatccagctgttccatttgataccaacgcctcagggaaac

SEQ ID NO: 10590 - DNA, 385 bp, Glycine max; identical to SEQ ID NO: 8834
  Clone ID: LIB3039-018-Q1-E1-A9

SEQ ID NO: 10591 - DNA, 331 bp, Glycine max
  Clone ID: LIB3039-018-Q1-E1-B1
ggtaataccgtgtttggatttcgcgaaggggaaggaagaaacgccgaaaaagcaatgttgcgacgcagcaacgtccataaaggagagcaacccagagtgcctctgctacatcattgaagagacccacaagggtagcccacaggttaaaagcttgggcattcaagaggccaagctgcttcagctcccttctgtttgtaacgtcaaaaacgccagcatcaccaactgtcctaagcttttgggtctatccccaagttcccctgatgctgctatcttcacatcaaattctttcaagacaactccttctgcacctgcaacctcaaactcaaaaact

SEQ ID NO: 10592 - DNA, 384 bp, Glycine max
  Clone ID: LIB3039-018-Q1-E1-B10
aggggcacaagtttgttgagatagctagaggcaataagatgaaaatgaaagtgcttgttttgtttgttgctacagttttggtagcatatggatgccatggctcagactaccagaagttccctctccaaatgaaaactgggtttggtgggcaatacagcaatgaagtggcatgtgccagttggacgcttggcgtggaagcaaacaacgtagtcaagtggcaaactgttcctgcagcttgcggagagtacatagctgactacgttctacgagaccaatatagatcagattccaaaacagttaaccaataagcttatttctatgctaaatccctcaaactcaccaacaaagatgtcattgtcatggacgttgacgacactactctct

SEQ ID NO: 10593 - DNA, 422 bp, Glycine max
  Clone ID: LIB3039-018-Q1-E1-B11
acgcgtcaaacgactcacacattgcatctgctaactctctctctctgcgctctccactgaaccgagtctgaaagaggagaagatttaactaactccaatggctgcacgtgcggctgcaaggtacggatccagaaggctatttagcagtggttctgggaaaatacttagcgaggaggaaaaagctgcagagaatgcttactttaagaaagctgagcaagagaagttggagaagcttgctcgcaagggtcctcaatcagaagcagtctcggggggttcagtaactgatgccaaaccaagtagctcaggacatactggaacatcagttgacagagtttcaactgacaagtaccggaattatgcagttgtagctggtactgtaacaatgcttggggctttggggtggtaccttaaaggcactgcaa

SEQ ID NO: 10594 - DNA, 389 bp, Glycine max
  Clone ID: LIB3039-018-Q1-E1-B12
ggaaaatacggaacttgaaaccctcccaatataaaccctcgcttccttgtgtactctctcactttccattctcttcaaacctaacgcagcatcgcgtattctcttcattccatggctttgcccaaccagcaaaccgtggattaccctagtttcaaactcgttatcgtcggcgatggtggcacaggaaagacaacctttgtgaaaaggcatctcaccggagaattcgagaagaaatatgagccaaccatcggtgtggaggttcacccattggattttttcacaaactgtggaaagattcgattttactgctgggatactgctggacaggagaaatttggtggcctcagagatggatactatatccatggacaatgtgctattatcatgtt

SEQ ID NO: 10595 - DNA, 345 bp, Glycine max
  Clone ID: LIB3039-018-Q1-E1-B2
gatacaaactcaaaatcacaatggccttctcatcgtccatatggtcttcttccatctttgttcccaacccaaacagaaccaccatttccactcgattctctcacacaccctccaaaccccctctctcgccggcattcgccattccgccgctctccacggccaccgccacggacgtctcgggcgtcatcgacgggacgacgatcgcggtggtcagcggggggttcgtggcggcacttgcggcggtgctgtcgctgacggaccccgaacggcggggggaaaatccaaccggaggaggtgggccggcggcacaacgaagttggtagggagtacttcaacaactccggg

SEQ ID NO: 10596 - DNA, 365 bp, Glycine max
  Clone ID: LIB3039-018-Q1-E1-B3
ggaacacaaacagcagcgtcttggtttgtgagagagacagaggcacagagagaaaatggtttcggggtcaggaatctgcgcgaagagggtagttgtggacgcgcggcaccacatgctggggaggctggcatcgatcgtggcgaaggaacttctgaatgggcagaaggtggtggtggtgcgctgcgaggagatttgcatctccggtgggctcgtcaggcagaagatgaagtacttgcgtttcctccgcaagcgcatgaacaccaagccctctcacggccccatccatttccgtgcacccggcaagatcttctggcgcaccgctcgtgggatgataccacacaagacacagcgcggggaagctgctc

SEQ ID NO: 10597 - DNA, 268 bp, Glycine max
  Clone ID: LIB3039-018-Q1-E1-B4
ggaaacgaagaagccctaactacgcacgcattcgtgagaaaactcaatattcgtcgctcatggcactctcttctcgtctcttttccaaatccagattgatctatggcagtcaaatacttctacaaaaggagcatgctattccagttcgtcactttgctaaagagtctgcccctcctgcccttaagggagacgagatgctgaagaaaatttttgggggaggtgaagaacaaatttgagaccgccataggaatattaaagaaggagaaaa

SEQ ID NO: 10598 - DNA, 363 bp, Glycine max
  Clone ID: LIB3039-018-Q1-E1-B5
gggaacctacacctttggaaactcacacaccaccaccaccgttttcatcaatttcttatcttttctcattcccttctcttcttcctcaacacacacaaaatatctcttccaatttcaatttctcgtcgtccctcatcatggctcgtctcgcgatcgctgtcgccgccgtgctcctcgtggccctctccgcctccaccgcgacggcgcgtccctgcaggaccttcataatctcctcctactcgttccgcaaccctaactccaacaccttcgccaccatcaccgagatccgatccttcacccctctctacatcaccgacaaacccatcgggaaaccctcctcctccctacgacctcttcttcccc

SEQ ID NO: 10599 - DNA, 383 bp, Glycine max
  Clone ID: LIB3039-018-Q1-E1-B6
ggtgcacaagtgagtttgttgatcgagataactagaaacagtgtgatgaaaatgaaggtccttgttttcttcgttgctacaattttggtagcatggcaatgccatgcgtacgatatgttccctctccgaatgaacactggctatggtgcccgtactccggaggtgaaatgcgcaagttggaggcttgctgtggaagcacacaacatccgagcctttaaaaccattcctgaagagtgcgttgaaccaacaaaggactgcattaatggcgaacaatttagatcagactctaaaacagttaaccaacaagctttcttttatgctagtgaacgcgaagtccatcacaacgacatatttatattcggcatagataacaccgtactctc

SEQ ID NO: 10600 - DNA, 388 bp, Glycine max
  Clone ID: LIB3039-018-Q1-E1-B7
gacaagtgagtttgttgatcgagataactagaaacagtgtgatgaaaatgaaggtccttgttttcttcgttgctacaattttggtagcatggcaatgccatgcgtacgatatgttccctctccgaatgaacactggctatggtgcccgtactccggaggtgaaatgcgcaagttggaggcttgctgtggaagcacacaacatctttggctttgagaccattcctgaagagtgcgttgaagcaacaaaggaatacatccatggcgaacaatatagatcagactccaaaacagttaaccaacaagcttacttttatgccagagacctcgaagtccatcccaaggacacatttgtgttcagtatagatggcactgtactctctaatattcc

SEQ ID NO: 10601 - DNA, 291 bp, Glycine max
  Clone ID: LIB3039-018-Q1-E1-B8
gacacttcaaaatcctctggtaacccttattttatctattctctctctttcttttgtgttcgaagcagctagaaccaatggagaggaaaagaagccatgcctctttcaccatgtttgcaatgcttgttggagtgatctctcagagccttgtcattcctgtattatccaccactgttgaagatcagaagaactactacaccccagatccacatggtggaagtcgccccacaggctcacacagtagtactccgccatctcatgggcatggaagctctccatccctcacatcat

SEQ ID NO: 10602 - DNA, 382 bp, Glycine max
  Clone ID: LIB3039-018-Q1-E1-B9
gaaggtgcaagagtttgttgtgagctataagctagtttatcgtgaggagaatatgaagttgtttgttttctttgttgctgcagtagttttggtagcatggccatgccatggcgcaggctaccaaaggttccctctccgaatgaaaactggctatggtgagcgttcttcggaggtaaaatgcgcaagttttaggcttgctgtggaagcacacaacatccgagcctttaaaaccattcctgaagagtgcgttgaaccaacaaaggactacattaatggcgaacaatttagatcagactctaaaacagttaaccaacaagctttcttttatgctagtgaacgcgaagtccatcacaacgacatatttatattcggcatagataac

SEQ ID NO: 10603 - DNA, 350 bp, Glycine max
  Clone ID: LIB3039-018-Q1-E1-C10
gattacggggaacatttcactagtctctatttatcatcctcaataatgccatttacacgtctcctctctggagcatctaagcatatacctaaggtcgtctgcgaaatgacaatttgaggtcaatatgctgggcacatcgtgatgtggctctagtcactggtgatgccctgtatcgtcgacaacttcgtaacgctttgcaccgttggatgaagggcctacggcgtttcggcaagcgcctccatgacattggcgcttccatccaccgtgtgatctcgagtttcatgtgtcatcggtggctatttcaccggcgggaaaatcacctgcggttagtcgatttatcgtcccaagtt

SEQ ID NO: 10604 - DNA, 378 bp, Glycine max; identical to SEQ ID NO: 7899
  Clone ID: LIB3039-018-Q1-E1-C11

SEQ ID NO: 10605 - DNA, 374 bp, Glycine max
  Clone ID: LIB3039-018-Q1-E1-C12
ggttgtcaagcctgccgagaaaaccctagttcgcttgcagtcacacaagaggccaatcctattcatagctcgagatgggtgaagaagtgaaggtagttgttccagaatcagtgttgaagaagcgcaagagggaggaggaatgggcgttggccaagaagcaagaactcgatgctgccaagaagaagagagccgagagccgcaaactcatctacaacagagctaagcagtacgctaaggagtacgatcaccaggagaaggaattgattcggttgaaacgcgaggccaagctgaaaggtggtttctatgtggatccacaggctaagctgttgtttattattcgcattcgtggtattaatgccatggaccccaaatca

SEQ ID NO: 10606 - DNA, 294 bp, Glycine max
  Clone ID: LIB3039-018-Q1-E1-C2
gatcagcaacttatatatcatgattttaatctacgtattggcaccgatacacacatacatcaccaactgatatataatactagatttcttgcagtctattattagagagaagaattgagttggaagaacccagaaaaagaaacataagataaataaaacgatgtggtggccattcagcagaataggatcttctgggttttcaacatattctactgccgatgaagttactcatggaatcgatggaagtggtctcactgctattgttacaggagcatctagtggtcttggtgctga

SEQ ID NO: 10607 - DNA, 316 bp, Glycine max
  Clone ID: LIB3039-018-Q1-E1-C3
gatctgagagtgagatacagaaaacaaaaaggaaaccctagctggataggtcaaacatcatcatgtcggtcgaagagcaccatttctagtccaaggcacacgccggtgcctccaaaacctaccctcagcaagccggtaccattcgcaagaacggctacatcgtcatcaaaggacgcccctgcaacgttgtggaagtttcgacttccacaactggaaagcacggtcacgccaagtgccactttgttggaattgatattttcactgccaacaaccttgacgatagtgtgccctcttcatatacctgtgatgttcctca

SEQ ID NO: 10608 - DNA, 383 bp, Glycine max
  Clone ID: LIB3039-018-Q1-E1-C4
gaaggtgcaagagtttgttgtgagctataagctagtttatcgtgaggagaatatgaagttgtttgttttctttgttgctgcagtagttttggtagcatggccatgccatggcgcaggctaccaaaggttccctctccgaatgaaaactggctatggtgagcgttcttcggaggtaaaatgcgcaagttttaggcttgctgtggaagcacacaacatccgagcctttaaaaccattcctgaagagtgcgttgaaccaacataggactacattaatggcgaacaatttagatcagactccaaaacagttaaccaacaagctttcttttatgctagtgaacgcgaagttcatcacaacgacatatttatattcggcatacataaca

SEQ ID NO: 10609 - DNA, 211 bp, Glycine max
  Clone ID: LIB3039-018-Q1-E1-C5
gaggaaagaacagagagaccaaagcacttagtgctattcaataattacgaaaaaccaacagcgagtgttgtttttgtttggtccatgctggcccagggaatgaatagagatgagaggctttcggttgaagagaactgagttaagcggcgaacccaaacgcagaatcggcggcagaaattgccaccggcagcacgtcgaagacgggtgaccc

SEQ ID NO: 10610 - DNA, 382 bp, Glycine max
  Clone ID: LIB3039-018-Q1-E1-C6
ggcacaagtgagtttgttgatcgagataactagaaacagtgtgatgaaaatgaaggtccttgttttcttcgttgctacaattttggtagcatggcaatgccatgcgtacgatatgttccctctccgaatgaacactggctatggtgcccgtactccggaggtgaaatgcgcaagttggaggcttgctgtggaagcacacaacatctttggctttgagaccattcctgaagagtgcgttgaagcaacaaaggaatacatccatggcgaacaatatagatcagactccaaaacagttaaccagcaagcttacttttatgccagagacctcgaagtccatcccaaggacacatttgtgttcagtatagatggcaccgtactctct

SEQ ID NO: 10611 - DNA, 310 bp, Glycine max
  Clone ID: LIB3039-018-Q1-E1-C7
cacagcgacatatttagattcggcatagataacaccgtactctctaatatcccatactatgaatgacatcgatatggggtggatgaatttaatgagaccttatatgattaatgggttaacaagggcgacgcaccggcattgccaaagactcttaagaattacatcatgctgttgtctcttggcttcaatattggattcctgtcacgaagatatcttgacagaatggccgtaacataatcaaaccttaagaaggctggcttccacacatgggaacacttaactctcaacgatccacatcttatcactctaa

SEQ ID NO: 10612 - DNA, 214 bp, Glycine max
  Clone ID: LIB3039-018-Q1-E1-C8
gaacacataagtttgatgcactgaactttgactataattttcataattcagattgtccttctcttctgcattgcgacattgggggtttaattttctgacaaagcgtacgataggttcacgcccctcttttatagtgctgctttgcctcgtaatcgagacgttcaatacccaagttgaaagcttgctctgtgaacacacatgaaccttggtcttt

SEQ ID NO: 10613 - DNA, 387 bp, Glycine max
  Clone ID: LIB3039-018-Q1-E1-C9
ggaacacatgaggggattgatagacatgggtagtctgagcatagcagcgtcgaagcgttatgcgatcaccaagtgcatcatctcggtttcatcgcacgagttggtatcggattttggcgggagtcgtctcagtcgtgatcatcattgacgcagccatgccgcggtacgaccgtgacgactgcgagacgtagttgaaccaagaatctccagctgtgagaacacaccagaatgcaggttagaaacacaaggcgaatgtgacgacgtacaaccagcaatttgaggcacaacaaccataaagtttaattgataaatggatgacagaaaatcctgggtaaactgcagcgtttcatcagtgtggagtggcttaggcacatctaacggttcaaa

SEQ ID NO: 10614 - DNA, 386 bp, Glycine max
  Clone ID: LIB3039-018-Q1-E1-D1
cgaacacaccagtttccacgtcatcttatgtggatgacatattcggtggaatacatggggagagtgtcggtgttgatgatctgcttgataagattggtggcttaaatacaaacgctaaaagtccaaacgcaaaatcacccgcttttgatgatttgatccctggctttggtgtttccaataatggtgttgggatgaacaatccaagtgttactccaaacaaacctgctgcagcagcggcggcgtctcatgatgatccgtttttgatatttgaaactgcttcaagctcgccgtcttcagaatctttcctggacgcgctggagcagattagtaagttgaataattctaaagggacaaaatgaggttccccatcaatgaagtctccaccc

SEQ ID NO: 10615 - DNA, 385 bp, Glycine max
  Clone ID: LIB3039-018-Q1-E1-D10
ggcacaagtttgttgagatagctagaagcaataagatgaaaatgaaagtgcttgttttgtttgttgctacagttttggtagcatatgagtgccatggctcagactaccagaagttccctctccaaatgaaaactgggtttggtgggcaatacagcaatgaggtggcatgtgccagttggaggcttggcgtggaagcaaacaacgtagtcaagtggcaaactgttcctgcagcttgcggagagtacatagctgactacgttctaggagaccaatatagatcagattccaaaacagttaaccaacaagcttatttctatgctaaatccctcaaactcaccaacaaagatgtctttgtcttggacgttgacgacactactctctctaa

SEQ ID NO: 10616 - DNA, 381 bp, Glycine max
  Clone ID: LIB3039-018-Q1-E1-D11
gggaggcataagtgagtttgctgatagagataactacagtgagtgtgatgaaaatgaccgtccttgctttcttcctagcaataagtttggaagcaagggacagccatgcgtaagatacgttccctcaccgaataaagactggcgagcgtgcacgtacgccggaagtgacatgcgcaagttggatgcttgctgtggaaacacaaaccatcgttggcatagaaatcattcctgatgagtgcgttcaaccaacgaatgcatacatcgatagcaatcaatatcaatcacactccaagttagttaaccaacatacttacatttaagccacatacatctacatccaacggacagacacatgtgtattcaatatagaaggcaacgtac

SEQ ID NO: 10617 - DNA, 375 bp, Glycine max
  Clone ID: LIB3039-018-Q1-E1-D12
ggagctgaaaccgagaagaagaagatggagatgtatcagatctggagcaggagaatagcgttgggagcgttcgcgtttgttctgcttttcctatcggcctcagcagacgacgtcgttgtgctctctgaagataacttcgagaaggaagttggtcaggacagaggagctctcgttgagttctatgctccttggtgtggacactgcaaaaagcttgctccagaatatgaaaagcttggtagcagcttcaagaaagccaaatctgttttaatcggcaaggttgactgtgatgagcacaagagtttgtgcagcaaatatggagtctctgggtacccaacaattcagtggtttccaaaaggatctcttgaacccaaaaag

SEQ ID NO: 10618 - DNA, 316 bp, Glycine max
  Clone ID: LIB3039-018-Q1-E1-D2
gatccataaccatggcgtctaactctgcttccgctctttacttccttttatgcctatcgcccatcactttgcttctttctgcgtttcgtgctcaagctcaatctcatgctccagctcccactttcaagtactgtgagaagaatgcagactatgctgtgaaggtgagtggagtggaaatattgcctgaccccgtggagagatgaatgccattcatcgttatgatcccagcttacactcgtgagttaattcaaagcggggacttgttatatgaaatttcttatgctggaacacaagcacaatctgctacatttctcca

SEQ ID NO: 10619 - DNA, 375 bp, Glycine max
  Clone ID: LIB3039-018-Q1-E1-D3
gacaacacaacacaacgcgcactctctctttttctctctgttttttgttctctcttcgcttaaaccctatcgttcttctcgttttcgccgattctcgccatgccgaaagctaaatccgacgccaaagccgccgatagcaggttgaagcggaagggcgctggtgctgggaggaagcaatcgaggaaagctgctaaggaccctaacaagccgaagagacctccaagcgctttcttcgttttcatgtccgagttcagaaagcagttcaagaaggagcatcctaacaacaaatccgtcgctgttgtcggcaaagctggtggtgaaaaatggaaatcgctatctgatgctgaaaagggccctttcgttgctactgcggag

SEQ ID NO: 10620 - DNA, 382 bp, Glycine max
  Clone ID: LIB3039-018-Q1-E1-D4
gataacacaaacacaaattacatagcctcagtaatctgagagagaaacacaaacaatgaaggtttccattgccaagttccactcccttcccctatgttttttccttctcttggccttcaacacaaaacccctcctagcagcagaaccagagccagtggttgataagcaagggaaccctttggagccaggagtacggtactacgtgtggccactttgggctgatgaaggaggcctcacactaggccaaacaaggaacaagacatgccctctttatgttatccgtgacccttcattcattggcaccccagtttcattcttaacaccaggccttgaccatgttccaacactcactgatctaaccaatgatttccctgtggtgaca

SEQ ID NO: 10621 - DNA, 385 bp, Glycine max
  Clone ID: LIB3039-018-Q1-E1-D5
ggcacaagtgagtttgttgatcgagataactagaaacagtgtgatgaaaatgaaggtccttgttttcttcgttgctacaattttggtagcatggcaatgccatgcgtacgatatgttccctctccgaatgaacactggctatggtgcccgtactccggaggtgaaatgcgcaaattggaggcttgctgtggaagcacacaacatctttggctttgagaccattcctgaagagtgcgttgaagcaacaaaggaatacatccatggcgaacaatatagatcagactccaaaacagttaaccaacaagcttacttttatgccagagacctcgaagtccatcccaaggacacatttgtgttcagtatagatggcaacgtactctctaat

SEQ ID NO: 10622 - DNA, 382 bp, Glycine max
  Clone ID: LIB3039-018-Q1-E1-D6
ggcacaagtgagtttgttgatcgagataactagaaacagtgtgatgaaaatgaaggtccttgttttcttcgttgctacaattttggtagcatggcaatgccatgcgtacgatatgttccctctccgaatgaacactggctatggtgcccgtactccggaggtgaaatgcgcaagttggaggcttgctgtggaagcacacaacatctttggctttgagaccattcctgaagagtgcgttgaagcaacaaaggaatacatccatggcgaacaatatagatcagactccaaaacagttaaccaacaagcttacttttatgccagagacctcgaagtccatcgcaaggacacatttgtgttcagtatagatggcaccgtactctct

SEQ ID NO: 10623 - DNA, 298 bp, Glycine max
  Clone ID: LIB3039-018-Q1-E1-D7
ggaatcactctgcactctgcactctgcacaatgctttccctctccgtccctcctctcaacctcaaacccataacacccaatggggtctttctctcatcagcctctccctcacctcaccgtcgctacttcgtgaaacccatctccgccgtcctcaactcatcttccttcaagaaacctgagcagcctctgctgccgcagcatcaagtctaccagcccttccgccctcccccgtctcccctcgcctcgcaattcggcaccctcgacatcgccggccgaatcgacatcctcgccaagcgcc

SEQ ID NO: 10624 - DNA, 315 bp, Glycine max
  Clone ID: LIB3039-018-Q1-E1-D8
gacacttcaaaatcctctggtaacccttattttatctattctctctctttcttttgtgttctaagcagctagaagcaatggagaggaaaagaagccatgcctctttcaccatgtttgcaatgcttgttggagtgatctctcagagccttgtcattcctgtagtatccaccactgttgaagatcagaagaactactacaccccagatccacatgctggaagtcccccctcacgctcacacaggtagtactcctccatctcatgggcatggaagctctccatcctcacatcagcagagtagtccaagtaccccatca

SEQ ID NO: 10625 - DNA, 389 bp, Glycine max
  Clone ID: LIB3039-018-Q1-E1-D9
gctccgaaaaccctaacaacacaggcgcagacgcaaacgcaaacgcaaacgcaaacgcaaacgcagagcgtgatccattgacgaagatggtgcagcgtctcacctaccgcaagcggcacagctatgccaccaagtccaaccaacacagggtcgtcaaaacccctggtgggaagctcgtttatcagactaccaagaagagggccagcggacccaagtgccccgtcactggcaagaggattcaggggattccacacttgaggcctgcagagtacaagaggtcaaggttacccagaaaccgtaggactgtcaaccgtgcatatggtggggttttatctggaagtgccgtcagggagaggattatccgagccttcttagttgaagagcaaaag

SEQ ID NO: 10626 - DNA, 416 bp, Glycine max
  Clone ID: LIB3039-018-Q1-E1-E1
gtccaagacgaaagaaggggaggcctccaaatattttcctttttagctttgattagagtggcctagttgttgtttttctcaatgagaagggcttccactatgcattgcgcactttggcgcttctgtgttcccttgttgctacttgctagcttcagttatgcaccttttgttttggcgacaactgaaatttcagggaatgaagtgagcactgatggaaaggttttaaatgaagagttagcataacctaatctacaaggacatgatgaacaagcaaagtttaaaggatttattccaaagccaattcccatagtgaagcctattccaaaaccatttcccatcattaagcctattccaaagataattcctattgctaaacctattcctattccgatttataagcctatatcaaaatcaat

SEQ ID NO: 10627 - DNA, 371 bp, Glycine max
  Clone ID: LIB3039-018-Q1-E1-E10
ggtgcacaggcgaaaaccctaatcctgaggcactgaaagtgtgatatggcaagagtcatttcctcttcctgcgcacgcctcgcaatgcgcctcttctccaccaccaccacagccaccgcgttcgccgtcactttacccaaaccctcatcactctccctctcatcgcgtcgattcctcttccctctctcccatgccatcgtccctccctccacccgcgtcgccggaatccggtgccgcgttaaccgcgccggagactcggcgtactcaccgctgaactcggggtcgtcgtcttcgtcgttcagcgaccgcccccccacggagatggcgccgctcttccccggctgcgactacaaccactgggtcatcctcat

SEQ ID NO: 10628 - DNA, 359 bp, Glycine max
  Clone ID: LIB3039-018-Q1-E1-E11
ggtgcacaagtgagtttgttgatcgagataactagaaacagtgtgatgaaaatgaaggtccttgttttcttcgttgctacaattttggtagcatggcaatgccatgcgtacgatatgttccctctccgaatgaacactggctatggtgcccgtactccggaggtgaaatgcgcaagttggaggcttgctgtggaagcacacaacatctttggctttgagaccattctgaagagtgcgttgaagcaacaaaggaatacatccatggcgaacaatatagatcagactccaaaacagttaaccaacaagcttacttttatgccagagacctccaaatccatcccaaggacaaatttgtgttc

SEQ ID NO: 10629 - DNA, 241 bp, Glycine max
  Clone ID: LIB3039-018-Q1-E1-E12
gatcgcatttcatatcactcaccatcatttccaccacgtcagcgtcctcaaaaacgtttttcgcaatctctgaatttccaacagggtcaggggaatgaagataagcatcaggaggagaacaactggaaactcacacaatatacatcttcaatggccccatacaagttcaacccgacaatcgtatttccagaaatgcaaagggcactatgtatagcgtcaccatacaaatcttccagaaact

SEQ ID NO: 10630 - DNA, 380 bp, Glycine max
  Clone ID: LIB3039-018-Q1-E1-E2
gcacaagtgagtttgttgatcgagataactagaaacagtgtgatgaaaatgaaggtccttgttttcttcgttgctacaattttggtagcatggcaatgccatgcgtacgatatgttccctctccgaatgaacactggctatggtgcccgtactccggaggtgaaatgcgcaagttggaggcttgctgtggaagcacacaacatctttggctttgagaccattcctgaagagtgcgttgaagcaacaaaggaatacatccatggcgaacaatatagatcagactccaaaacagttaaccaacaagcttacttttatgccagagacctcgaagtccatcccaaggacacatttgtgttcagtatagatggcaccgtactctc

SEQ ID NO: 10631 - DNA, 271 bp, Glycine max
  Clone ID: LIB3039-018-Q1-E1-E3
ggcagcacaagcagaaaaggagaaggtttgggattttagagcgtatgtggttttggttggtaactgaagagtgtgtggaggaagaagaaggaatcggcggtgttcaactgacgatcgcatctcaaagtttggtcacgatcgttgctttgcttgttcgacatttttttcccttttggtttttctgaggcaatttccttagttgtatggttgtttgggttgttttctcgctgccgaaaatatataatgggcaaacggggcacttttcatggga

SEQ ID NO: 10632 - DNA, 350 bp, Glycine max
  Clone ID: LIB3039-018-Q1-E1-E4
ggcacaagtgagtttgttgatcgagataactagaaacagtgtgatgaaaatgaaggtccttgttttcttcgttgctacaattttggtagcatggcaatgccatgcgtacgatatgttccctctccgaatgaacactggctatggtgcccgtactccggaggtgaaatgcgcaagttggaggcttgctgtggaagcacacaacatctttggctttgagaccattcctgaagagtgcgttgaagcaacaaaggaatacatccatggcgaacaatattaattagactccaaaacagttatacaacaagcttacttttatgccagagacctcgaagtccatcccaaggacacat

SEQ ID NO: 10633 - DNA, 389 bp, Glycine max
  unsure (1)..(389): unsure at all n locations
  Clone ID: LIB3039-018-Q1-E1-E5
ggcacaagtttgttgagatagctagaagcaataagatgaaaatgaaagtgcttgttttgtttgttgctacagttttggtagcatatgaatgccatggctcagactaccagaagttccctctccaaatgaaaactgggtttggtgggcaatacagcaatgaggtggcatgtgccagttggaggcttggcgtggaagcaaacaacgtagtcaagtggcaaactgttcctgcagcttgcggagagtacatagctgactacgttctangagaccaatatagatcagattccaaaacagttaaccaacaagcttatttctatgctaaatcgctcaaactcaccaacaaagatgtctttgtcttggacgttgacgacactactctctctaatctc

SEQ ID NO: 10634 - DNA, 354 bp, Glycine max
  Clone ID: LIB3039-018-Q1-E1-E6
ggttctctcccctcaaacacagacacaacacaacaaggttgcaaagtgaagaaggattaagccatgaaagctctaattttaatcctcacgctatgcatcattgctgtcaccttctcatcacaagcagcaacctccatagtcactcaaccccaacccaacgaatttttcaagctcaaccaaaccaagccacagaatgatggtagttcctgtagttacacggtgagcataaaaacaagctgcagttctccctcctacaccagagattacatcggtcttgcatttggtgatgcttaaggctatcaggtttatgttccaacactggatgatcctggttcatggtcattcgagcggtgc

SEQ ID NO: 10635 - DNA, 333 bp, Glycine max
  Clone ID: LIB3039-018-Q1-E1-E8
ggaacctttgcattctattcattcaagattcagcaagtgcgttttggaagcagagaccgaaatacttcgagatggcccgtacaaagcaaactgctcgtaagtcaactggaggaaaagctcccaggaagcagcttgcaaccaaggctgcacgtaagtctgcaccaacaactggtggtgtgaagaagcctcatcgttatcgccctggaactgttgctcttcgtgagattaggaaataccagaagagcactgagctcctaatcaggaagcttcctttccagaagttggttcgtgaaattgcccaggatttcaagaatgatttgcgtttccagagcc

SEQ ID NO: 10636 - DNA, 386 bp, Glycine max
  Clone ID: LIB3039-018-Q1-E1-E9
gaaggtgcaagagtttgttgtgagctataagctagtttatcgtgaggagaatatgaagttgtttgttttctttgttgctgcagtagttttggtagcatggccatgccatggcgcaggctaccaaaggttccctctccgaatgaaaactggctatggtgagcgttcttcggaggtaaaatgcgcaagttttaggcttgctgtggaaacacacaacatccgagcctttaaaaccattcctgaagagtgcgttgaaccaacaaaggactacattaatggcgaacaatttagatcagactctaaaacagttaaccaacaagctttcttttatgctagtgaacgcgaagtccatcacaacgacatatttatattcggcatagataacaccg

SEQ ID NO: 10637 - DNA, 348 bp, Glycine max
  Clone ID: LIB3039-018-Q1-E1-F1
gcacaagtgagtttgttgatcgagataactagaaacagtgtgatgaaaatgaaggtccttgttttcttcgttgctacaattttggtagcatggcaatgccatgcgtacgatatgttccctctccgaatgaacactggctatggtgcccgtactccggaggtgaaatgcgcaagttggaggcttgctgtggaagcacacaacatctttggctttgagaccattcctgaagagtgcgttgaagcaacaaaggaatacatccatggcgaacaatatagatcagactccaaaacagttaaccaacaagcttacttttatgccagagacctcgaagtccatcccaaggacaca

SEQ ID NO: 10638 - DNA, 383 bp, Glycine max
  Clone ID: LIB3039-018-Q1-E1-F10
gagtgcacaagtgagtttgttgatcgagataactagaaacagtgtgatgaaaatgaaggtccttgttttcttcgttgctacaattttggtagcatggcaatgccatgcgtacgatatgttccctctccgaatgaacactggctatggtgcccgtactccggaggtgaaatgcgcaagttggaggcttgctgtggaagcacacaacatctttggctttgagaccattcctgaagagtgcgttgaagcaacaaaggaatacatccatggcgaacaatatagatcagactccaaaacagttaaccaacaagcttacttttatgccagagacctcgaagtccatcccaaggacagatttgtgttcagtatagatggcaccgtactct

SEQ ID NO: 10639 - DNA, 378 bp, Glycine max
  Clone ID: LIB3039-018-Q1-E1-F11
ggcacaagtgagtttgttgatcgagataactagaaacagtgtgatgaaaatgaaggtccttgttttcttcgttgctacaattttggtagcatggcaatgccatgcgtacgatatgttccctctccgaatgaacactggctatggtgcccgtactccggaggtgaaatgcgcaagttggaggcttgctgtggaagcaaaaaacatctttgggttttagaacattcctgaaaaatgcgttgaagcaacaaaggaatacatccatggcgaacaatatagatcagactccaaaacagttaaccaacaagcttacttttatgccagagacctcgaagtccatcccaaggacacatttgtgttcagtatagatggcaccgtact

SEQ ID NO: 10640 - DNA, 304 bp, Glycine max
  Clone ID: LIB3039-018-Q1-E1-F12
ggaggtcggttctcagttgaagcgttaccctcgctggcgccgcatctctccgcagcaaagcgcggcaggtcaccgcagcaacgcgccgcacctcactgcagcagctccgtcgccggcaacgccagtgggcctccagaaactgcagcgtttgggacgacggaaacaggctcgagctttgaaactttctgtgctttgctctgtttgaaagttctcgaacccctctgttgaacccttatcgaaactccgaatcctaattagttatgaagatttttaggcaaattagcaacagtggtaatcccaatat

SEQ ID NO: 10641 - DNA, 371 bp, Glycine max
  Clone ID: LIB3039-018-Q1-E1-F2
gggtggatgccaatgagaagaaacgcagaatgaaggcgaagaaagccaaaagcaagaaacataagaagcagacagcggcaaaaggtggagatggagtgcagcatcagaggaccgaggacgtacaagaagaacagtaatatcgtgggttggtatctctgggtaaaattggggctttgataattgttgccagacatagtcttgctttgtgcacagccacaactgacattacagttctatgttggagggtttgtccaagaatttactagaaatttctcgggcaaccaattgttattagttaaggaaaaagtgcctttaattttttcctcgtatcacgaagaaagctttgtcctctacaaaattgctgtattgcc

SEQ ID NO: 10642 - DNA, 357 bp, Glycine max
  Clone ID: LIB3039-018-Q1-E1-F3
gagcgaaacagggagtgatttcagtgagtgatcggtgttcacttgatctcatcataatcgtcagcgtcaattgaagaagatgccgatcagaaacatcgccgtcggaaggcctgaagaggcgactcaccccgacacgttgaaggcggctttggctgagttcatctcaaccttcatcttcgtgttcgccggctcaggctccggcatcgcctacaacgagctcaccgacaacggtgctgccacccctgccggcctcatctccgcctccatcgcccatgcattcgccctcttcgtcgccgtctccgtcggggccaacatctccgaggggccacgtcaaccccgccggtcaccttcgggcgc

SEQ ID NO: 10643 - DNA, 369 bp, Glycine max
  Clone ID: LIB3039-018-Q1-E1-F4
gggcgacgacgcgtccagaggcaacgagaaggacgacagaagggggagagaagttattagggtttttgagtgcggcggtccaaacactcttctctgcagcttttgcctacaactcccttcaccatggctgaagaaaccgagaaagcttttctgaagcaaccaaaagtgtttctcagcacaaagaagactgggaagggaaagagacctggaaaaggtgggaaccgcttttggaagtccattgggcttggatttaagactcccagggaagccatcgaaggaacctatattgacaagaagtgccccttcactggcaatgtttccatccgttggcgtatcttggctgggacatgtcacagtgctaagatgaac

SEQ ID NO: 10644 - DNA, 76 bp, Glycine max
  Clone ID: LIB3039-018-Q1-E1-F5
gagccggccgaactgcaccttcaacttcccttccagatggcaaagtctaagaatcatacactgcataaccatctcc

SEQ ID NO: 10645 - DNA, 386 bp, Glycine max
  Clone ID: LIB3039-018-Q1-E1-F6
ggcacaagtgagtttgttgatcgagataactagaaacagtgtgatgaaaatgaaggtccttgttttcttcgttgctacaattttggtagcatggcaatgccatgcgtacgatatgttccctctccaaatgaacactggctatggtgcccgtactccggaggtgaaatgcgcaagttggaggcttgctgtggaagcacacaacatctttggctttgagaccattcctgaagagtgcgttgaagcaacaaaggaatacatccatggcgaacaatatagatcagactccaaaacagttaaccaacaagcttacttttatgccagagacctcgaagtccatcccaaggacacatttgtgttcagtatagatggcaccgtactctctaata

SEQ ID NO: 10646 - DNA, 154 bp, Glycine max
  Clone ID: LIB3039-018-Q1-E1-F7
cggctgtcgagcaagactgacagaagcgggaaggtgcacagagtttgattgtgcagctatactgctagtcttatcgtgcaggagacatatcgaagttgctttgcttttctcttgttgctgcaggtagtttgtggtaccatgcgccatgcgcatg

SEQ ID NO: 10647 - DNA, 391 bp, Glycine max
  Clone ID: LIB3039-018-Q1-E1-F8
ggcacaagtgagtttgttgatcgagataactagaaacagtgtgatgagaatgaaggtccttgttttcttcgttgctacaattttggtagcatggcaatgccatgcgtacgatatgttccctctccgaatgaacactggctatggtgcccgtactccggaggtgaaatgcgcaagttggaggcttgctgtggaagcacacaacatctttggctttgagaccattcctgaagagtgcgttgaagcaacaaaggaatacatccatggcgaacaatatagatcagactccaaaacagttaaccaacaagcttacttttatgccagagacctcgaagtccatcccaaggacacatttgtgttcagtatagatggcaccgtactctctaatattcca

SEQ ID NO: 10648 - DNA, 216 bp, Glycine max
  Clone ID: LIB3039-018-Q1-E1-F9
acgcgtccatacgattgcaataggacaccaaaaggggacctggggtttcactggagatgcgtatgtcgtcgtctattgactaatttggtgcagtctcacacttaccgcatgagtcaccttcatggggatgctcctaaacaagatatcgtcggcatcacccctgattcgaaggtcgtttatcagaccattgtggagacgattaacgtccacatttgg

SEQ ID NO: 10649 - DNA, 375 bp, Glycine max
  Clone ID: LIB3039-018-Q1-E1-G1
gatgcatagcaattcccaattcctaattgtttaaacctaattctcatttcttcatcgttcgattcttctcctcctaaagatgcagatcttcgtggaaactttgaccggtaagaccatcacccttgaggtggagtcctccgacaccatcgataacgtgaaagctaagattcaagacaaggaagggatcccacctgaccagcagagacttatctttgcgggtaaacagcttgaggatggtcgaacccttgccgactacaacatccaaaaggaatccactctccacctcgtgcttcgcctcaagggtggcatgcaaatctttgtcaagactttgactgggatgaccatcaccctcgacgtcgaatcctcgggcaccat

SEQ ID NO: 10650 - DNA, 395 bp, Glycine max
  Clone ID: LIB3039-018-Q1-E1-G10
ccacgcgtcaacccaagcgtccgtcgctgctctcaatacaatcatggagaagctgtctttttcaaggcaccagtaaaacgggaagaaggcatggccctcatttttgtttgctgcaacccaacttgtggctaccgttggagagactatgactcttaatagtcaatgttcaacattggggagttgagcatatcaaattcttcactcttggatggatgagaaactttatttgtatatataaaacttggctactgtgaggacgttcataattaagtagttgtgatgactgtttaatctccctaaacaattatgttgacgcagttaatggtccaatcctttagtttatgggttatgaaagaaattcgcatttcttatttgagctccaagacatttatgaa

SEQ ID NO: 10651 - DNA, 128 bp, Glycine max
  Clone ID: LIB3039-018-Q1-E1-G11
gattttccttgcgtttctctttcactttccctcactttctcgctcgccgaacgcccctctctctcctccaccttacgcttctctcacggtcggtttcctttccgtcttctgtgccttgctttgcctcg

SEQ ID NO: 10652 - DNA, 214 bp, Glycine max
  Clone ID: LIB3039-018-Q1-E1-G12
ggttggtgtttaaaattaaaaccgagcctcttccccaaaggagacacagagcgagagagaatcgtaacaaaagcggtaaccggaataagttggctctacgatttgagccatggcaacaacaacaccctcaaaccgattcatcagaggcgtttgctctcacggcaatcctcagcactctgctttgcacggcggtggcggcgaaggacaccttgtg

SEQ ID NO: 10653 - DNA, 395 bp, Glycine max
  Clone ID: LIB3039-018-Q1-E1-G2
ggcacaagtgagtttgttgatcgagataactagaaacagtgtgatgaaaatgaaggtccttgttttcttcgttgctacaattttggtagcatggcaatgccatgcgtacgatatgttccctctccgaatgaacactggctatggtgcccgtactccggaggtgaaatgcgcaagttggaggcttgctgtggaagcacacaacatctttggctttgagaccattcctgaagagtgcgttgaagcaacaaaggaatacatccatggcgaacaatatagatcagactccaaaacagttaaccaacaagcttacttttatgccagagacctcgaagtccatcccaaagacacatttgtgttcagtatagatggcaccgtactctctaatattccatact

SEQ ID NO: 10654 - DNA, 292 bp, Glycine max
  Clone ID: LIB3039-018-Q1-E1-G3
ggcaagagtttgttgtgagctataagctagtttatcgtgaggagaatatgaagttgtttgttttctttgttgctgcagtagttttggtagcatgggcatgccatggcgcaggctaccaaaggttccctctccgaatgaaaactggctatggtgagcgttcttcggagggaaaatgcgcaagttttaagcttgctgtggaagcacacaacaatccgagcctttaaaaccattcctgaagagtgcgttgaaccaacacacgactacattaatggctaacaatttagatcagact

SEQ ID NO: 10655 - DNA, 357 bp, Glycine max
  Clone ID: LIB3039-018-Q1-E1-G4
ggcacaagtgagtttgttgatcgagataactagaaacagtgtgatgaaaatgaaggtccttgttttcttcgttgctacaattttggtagcatggcaatgccatgcgtacgatatgttccctctccgaatgaacactggctatggtgcccgtactccggaggtgaaatgcgcaagttggaggcttgctgtggaagcacacaacatctttggctttgagaccattcctgaagagtgcgttgaagcaacaaaggaatacatccatggcgaacaatatagatcagactccaaaacagttaaccaacaagcttacttttatgccagagacctcgaagtccatcccaaagggacatttgtgtt

SEQ ID NO: 10656 - DNA, 383 bp, Glycine max
  Clone ID: LIB3039-018-Q1-E1-G6
gatgcacaagtttgttgagatagctagaagcaataagatgaaaatgaaagtgcttgttttgtttgttgctacagttttggtagcatatgaatgccatggctcagactaccagaagttccctctccaaatgaaaactgggtttggtgggcaatacagcaatgaggtggcatgtgccagttggaggcttggcgtggaagcaaacaacgtagtcaagtggcaaactgttcctgcagcttgcggagagtacatagctgactacgttctaggagaccaatatagatcagattccaaaacagttaaccaacaagcttatttctatgctaaatccctcaaactcaacaacaaagatgtctttgtcttggacgttgacgacactactctct

SEQ ID NO: 10657 - DNA, 348 bp, Glycine max
  Clone ID: LIB3039-018-Q1-E1-G7
gaattcaaaatatatcatcaattataagcatgggtttgtggaacacaacgaatgcagtgtcttgccgctttcacaagtttggtgatgaccaaaagaatctggtcttccaaggtgatgccacgtcttcttccaagggcataaaactcaaaaagttagacggtggaagaaaaccagtgggtggcaatgtggggagagtgttatactcttctccagtgcacctttgggaaagctctacagtggtcgcaagctttgaaaccgacttcaccttttccatctcaacagaatctaataatccaagttatgggcctgccttcctcaatggaccaattggcactaaaatccctccaa

SEQ ID NO: 10658 - DNA, 233 bp, Glycine max
  Clone ID: LIB3039-018-Q1-E1-G8
gggcatagcaaggtcatttctcgaatttaatcaacactgtgcacaccaagtcccttcggcgattacgaatcgcagagcattgggacggaccatgcaaagcgctcggaactccaccggacgaaaggctccgctgacgcaattggcattgaaagccgcgcggaagtcagctccggagaacggaggagtgaagaaaccccaccgcatcacgtcaggaatggtggctctgaaggaca

SEQ ID NO: 10659 - DNA, 291 bp, Glycine max
  Clone ID: LIB3039-018-Q1-E1-G9
ctacgtgtttcaaggtggtgctgatgggggactcggcggtggggaagtcccagatactagctcggtttgcgaggaacgagttcagcttggactccaagtccaccatcggtgttgaatttcagaccaggacttttggttatcgatcacaggaccgtttatgctcatatctgggacactgccggccaagaacgatacaaagcagttacgagtgcatattacaggggtgctgtgggggcaatgttggtttatggcatcactaaacgccaaacctttgatcacataccgcgttgg

SEQ ID NO: 10660 - DNA, 369 bp, Glycine max
  unsure (1)..(369): unsure at all n locations
  Clone ID: LIB3039-018-Q1-E1-H1
gtcgccaccagcacctctaaaaaccacgccaccaaatgcaccggctgcggcaactgcaccagccccgccgaaaacgggatcgagatcctctcccaaatccccagcccccgcctcgtcaacctcatcggcttcagcaccgacccaaacggcaacaaattactcgtcgtcgaatacatgcccaacggctcgctccacgatctgttacactccgttaaaaaaccgcccggttggaaccgtanggtccggttcgcgcttcaggtcgcaaaagcggttcgcgaactacactcttccaaccctcgcgttattcaccgtgacgttaagtcttccaatgttttaatcgatcaagaatggaacgccaagctcggtgac

SEQ ID NO: 10661 - DNA, 381 bp, Glycine max
  Clone ID: LIB3039-018-Q1-E1-H10
ggatgtgttggtcaatgcgcagtgtgcgacatcgatcatcgtccgagaacaatcgtggtaggattatatacttaataataatgagacgagtgggtggcttcttagacttgttcggttcgtatgcatgttctgtccgttcacacattattcctctccagtcatgagtcgtcgattggcatggtttgaggaacgccagagtaagaataagtctcggcgaatgaaaaggtactggatgtgaaagggatgcctcagtcacctcccagctctagtatggttatacatctcccactgatattcactcctcacgcacaggtggttctcatgttacgatgtgatcacatgcatgatctaagttgatccaggatggaaataacttcaggg

SEQ ID NO: 10662 - DNA, 393 bp, Glycine max
  Clone ID: LIB3039-018-Q1-E1-H12
atcagactccaaaacagttaaccaacaagcttacttttatgccagagacctcgaagtccatcccaaggacacatttgtgttcagtatagatggcaccgtactctctaatattccatactacaaaaaacatggatatggggtggagaaatttaactcgaccttgtatgatgaatgggttaacaagggcaatgcaccggcactgcccgagactcttaagaattacaacaagctggtgtctcttggcttcaagattatattcttgtcaggaagaacactggacaaacaggccgtaacagaagcaaacttaaagaaggctggctaccacacatgggaaaaattaattctcaaggatccacaagatccttccactccaaatgcagtttcatgcaaaac

SEQ ID NO: 10663 - DNA, 358 bp, Glycine max
  Clone ID: LIB3039-018-Q1-E1-H2
ggcacaagtgagtttgttgatcgagataactagaaacagtgtgatgaaaatgaaggtccttgttttcttcgttgctacaattttggtagcatggcaatgccatgcgtacgatatgttccctctccgaatgaacactggctatggtgcccgtactccggaggtgaaatgcgcaagttggaggcttgctgtggaagcacacaacatctttggctttgagaccattcctgaagagtgcgttgaagcaacaaaggaatacatccatggcgaacaatatagatcagactccaaaacagttaaccaacaagcttacttttatgccagagacctcgaagttcatcccaaggacacatttttgttc

SEQ ID NO: 10664 - DNA, 382 bp, Glycine max
  Clone ID: LIB3039-018-Q1-E1-H3
ggtgaggctctgtaactgtcagcatcattctgccgtcgacgaagctgaaacttgtttcttcttctccttgcgcgaaccttttctactaaccccaatcgcttctctcccactccaattccccattcctcatctacataaccctaaccccacactctcacacaccaccaccaacatcatatattacatcgattctcaatcaaatcccaaacgttttgaaaccaccgtcacgatgatgctcagaattcgtagccgcgacggcctggagcgagtgagcgtcgaaaacccccacagcacaacagtgtcatacctaaaacggatcatcgaaacccaattgggaatccctgttcacaaccaaaccctgtccaaaaaccagaacctcctc

SEQ ID NO: 10665 - DNA, 263 bp, Glycine max
  Clone ID: LIB3039-018-Q1-E1-H4
ggatcagtgtttgaatgaatcattgatcaatctaatgtctcatcacggagcaagcccgtgttgtcccttctctccaagctcgccctttccttcgacggtgccgttttgggcgttgccttggccttcgccgccgtccgcaccctcttcaaattcaccggcacctctcgcttcctcccgaaaactccgcgggcatcctccatctccgtctccgagctccgctccctcctcgccgaagcaacctccgatgcccacgccggggaaat

SEQ ID NO: 10666 - DNA, 387 bp, Glycine max
  Clone ID: LIB3039-016-Q1-E1-H7
ggaagcggtgcaagaggagaggaagaagagaagaggaggcggtgcgcaccttagcatggattcctctccgtcctcttctctctcctctctcgcttcgtccccacggcaccaacatcctctctccatttgagaaaggcaccgattcccattctcattctcactctgcctcacatattgccaacccttgcttctctctcttccatcctcaccaccgatttcactttcaacaataagaacaataaggccagggtctgcttgtgactccgccacgtcaaaatgttgtggctcatgagattctcgggcttcttctccgccgcaatgctcgtcattctcctctctccttcccttcaatccttcgaccccgccgaagccatccggtcctcccat

SEQ ID NO: 10667 - DNA, 377 bp, Glycine max
  Clone ID: LIB3039-015-Q1-E1-B10
gagggaaaacgcaaaagacaaaagaagggtgttccgtcgtggcggcgtggtggaacttcgttcacagtgggtggcttgcgttttggaaaaacggtgtcgtgcggaaacagaggctacgtttacgactctcatcatatggacagcttacgccaggagaaagttcaaagatttgaagaatttgttgacaaacgcctgaaacctgatcttgttcatgctattgctcagcgggacaaggtatttgaacaacagaaaattttcactgatttgagaaaaaacattgaaaaccttgagaagaatagtgtaaccagtctaagaactttggtcaatattgggtctgaagtatacctgcaggcagaagtgccagatacacaacacat

SEQ ID NO: 10668 - DNA, 373 bp, Glycine max
  Clone ID: LIB3039-015-Q1-E1-B11
cagtaggaatgcaacaagacaacggaagggagggcctagttaacgtgactccagtactgtgtccatggcggctgcgtttacaagtatcagtgtaagactgatactgtcaactgttggagagaccagaggtttgcaactgcgtatgtgtaaccctaatcctaagaagctgaaagttatggaggggtttggaagatgttctggagtggcagtgggtgtgagaaaaagaaatcgaattggaacggttacggttcgggatcgggcaagttcttcgtcggacgatgccatgaatgcgcaatcaaaaatgactcagaaagtaatcattgacgtcagtattggaaatccatttgtgaagcttgtgtcacgtattgtgatt

SEQ ID NO: 10669 - DNA, 329 bp, Glycine max
  unsure (1)..(329): unsure at all n locations
  Clone ID: LIB3039-015-Q1-E1-B2
agggaaggttttgccccgttgttgccgctcaacctccgttaactccggaactctgcgccgaaaaacgaagccaatgggaagacacattgaatgggatctgctcgcaaggctcaagtcccaccgcaggaggcaaanggtggctgacaagtcataacaaganatcacatcttgggaatgaatgaanaaaacttttgctgttcacccatgccaaaggaattgtccttgaaaagataggtattgaggctaancagcccaactctgccattcgtaagtgtgccagggttcaacttatcaagaatgggaagaagattgccgcttttgtccctaat

SEQ ID NO: 10670 - DNA, 310 bp, Glycine max
  Clone ID: LIB3039-015-Q1-E1-B3
gatccaaagcataacaaagagccattgaactttgactataatattcagagttcagattactcactctaatcttctaagttttcattttggggtttaagtttctgaaggaaaaaaaaatgataaagtttgttctatttttgttctgctttgcctctgcactgagcctttcagtatcggagtccatatcatcttcagtgcaacctcatgctgctgaatctttctctgttggatatattcagatgaagactgcagcgaactgttcttacctggtagttatatctactagttgttcatcgcctaagtttacaac

SEQ ID NO: 10671 - DNA, 324 bp, Glycine max
  Clone ID: LIB3039-015-Q1-E1-B4
ggcacaagtgagtttgttgatcgagataactagaaacagtgtgatgaaaatgaaggtccttgttttcttcgttgctacaattttggtagcatggcaatgccatgcgtacgatatgttccctctccgaatgaacactggctatggtgcccgtactccggaggtgaaatgcgcaagttggaggcttgctgtggaagcacacaacatctttggctttgagaccattcctgaagagtgcgttgaagcaacaatggaatacatccatggcgaacaatatagattagactccaaaacagttaaccaacaagcttacttttatgccataga

SEQ ID NO: 10672 - DNA, 310 bp, Glycine max
  Clone ID: LIB3039-015-Q1-E1-B5
agtcaagaagcttgctgctgcagctcttgcagcagtgaaagatgatgctgccatagcggcctcaagcacggggaaacttgtgattactgaggttcgggactttgctggtcaagatattgaacttaaacagcttgtacattctgactcaaaggaggcactggagtgagccaaagctcctccactttctgcagtggatgctgtccttgaacaaatcattgaagaaacagaagctcagtgtactggataagaccaacgaggactggggtgaatttaaggaagaatagatgctggaagaatagcttgatgctta

SEQ ID NO: 10673 - DNA, 377 bp, Glycine max
  Clone ID: LIB3039-015-Q1-E1-B6
gactcaccacttcaaaacactcataacacaaagcacaaagcaaagctcatccttgagttaaaaaatggcagcagcttcttccatggctctctcatccccatccttggctggcaaggccgtgaagctgggcccatcagccccagaagtgggaagggtgagcatgaggaagaccgtcaccaagcaggtctcctcaggaagcccatggtacggcccagaccgagtcaagtacttgggcccattctctggcgagcccccgtcctacctaaccggtgagttcccaggcgactacggctgggacactgctgggctttccgcagacccagaaaccttcgccaagaaacgtgaactcgaagtgattcactccaggtgggccatgc

SEQ ID NO: 10674 - DNA, 326 bp, Glycine max
  Clone ID: LIB3039-015-Q1-E1-B7
gcacaagtgagtttgttgatcgagataactagaaacagtgtgatgaaaatgaaggtccttgttttcttcgttgctacaattttggtagcatggcaatgccatgcgtacgatatgttgcctctccgaatgaacactggctatggtgcccgtaatcgggaagtgaaatgcgcaagttggaggcttgctgtggaagcacacaacatctttggctttgagaccattcctgaagagtgcgttgaagcaacagaagaatacatccatggcgaacaatatatatcagactccataacagttaaccaacaagcttacttttatgccagagacct

SEQ ID NO: 10675 - DNA, 380 bp, Glycine max
  unsure (1)..(380): unsure at all n locations
  Clone ID: LIB3039-015-Q1-E1-B8
ggtaagagcatataaataacatagtcctcctcctttgtttttccacatcacatcacatcgcagagagagagagatccatcgatcaattaatttccaatggccgatcagctcaccgacgaacagatctctgagttcaaggaagcctttagcctcttcgacaaggacggcgatggttgtattaccaccaaggaacttgggactgtgatgcggtcgcttgggcagaacccaactgaggctgagctgcaggacatgataaatgaggttgatgctgatgggaatggtaccattgatttcccagaattcctcaatctcatggcgcgcaagatgaaagacactgattcagnagaagagctgaaggaggctttccgtgtgtttgacaa

SEQ ID NO: 10676 - DNA, 370 bp, Glycine max
  Clone ID: LIB3039-015-Q1-E1-B9
agggaacgttcaagagttagtcgtgagcaatcaggcagtgtatcgtgaggagaatatcaagttgttcgtacgcatcattcctcgcgtagttccaggtagcagagacgctcctatgaacagctgcaacagtgctccactgagtcagcaccagctacggtgagcgtgaagcagccgcatcgttagcatcctgcaagcgttacgcttcgtgagattaggccctaccatacaagtaccgaacttatgatccggaagctccccttccagacgctggttcctgatattactcaggatttcaagactgatctgcatttccagatccacaccgtgcttgcattgcacgaacctgctgacgcataacttgtttggctcc

SEQ ID NO: 10677 - DNA, 330 bp, Glycine max
  Clone ID: LIB3039-015-Q1-E1-C1
ggcacaagtgagtttgttgatcgagataactagaaacagtgtgatgaaaatgaaggtccttgttttcttcgttgctacaattttggtagcatggcaatgccatgcgtacgatatgttccctctccgaatgaacactggctatggtgcccgtactccggaggtgaaatgcgcaagttggaggcttgctgtggaagcacacaacatctttggctttgagaccattcctgaagagtgcgttgaagcaacaaaggaatacatccatggcgaacaatatagatcagactccaaaacagttaaccaacaagcttacttttatgccagagacctcca

SEQ ID NO: 10678 - DNA, 369 bp, Glycine max
  Clone ID: LIB3039-015-Q1-E1-C11
ggagaaagagaaagagagaattcgtaaaccctaatttcggaaagatcggcgatgactgcctccaaggatcgcgagaacttcgtctacatcgccaaactcgccgagcaggccgagcgttacgaagagatggtggaatcaatgaagaacgttgcgaatctcgacgttgaactgacggtggaggagcggaatttgctttctgttgggtacaagaatgtgattggtgctcgcagagcgtcctggaggatcctgtcttccattgagcagaaggaagaaacaaaagggaacgagttgaatgcgaagcggattaaggagtacagacagaaggttgaattggagctatcgaacatctgtaatgatgttatgagagtg

SEQ ID NO: 10679 - DNA, 386 bp, Glycine max
  Clone ID: LIB3039-015-Q1-E1-C12
ggcacaagtgagtttgttgatcgagataactagaaacagtgtgatgaaaatgaaggtccttgttttcttcgttgctacaattttggtagcatggcaatgccatgcgtacgatatgctccctctccgaatgaacactggctatggtgcccgtactccggaggtgaaatgcgcaagttggaggcttgctgtggaagcatacaacatctttggctttgagaccattcctgaagagtgcgttgaagcaacaaaggaatacatccatggcgaacaatatagatcagactccaaaacagttaaccaacaagcttacttttatgccagagacctcgaagtccatcccaaggacacatttgtgttcagtatagatggcaccgtactctctaata

SEQ ID NO: 10680 - DNA, 329 bp, Glycine max
  unsure (1)..(329): unsure at all n locations
  Clone ID: LIB3039-015-Q1-E1-C2
ggcacaagtttgttgagatagctagaagcaataagatgaaaatgaaagtgcttgttttgtttgttgctacagttttggtaacatatgaatgccatggctcagactaccagaagttccctctccaaatgaaaactgggtttggtgggcaatacagcaatgaggtggcatgtgccagttggaagcttggcgtggaagcaaacaacgtagtcaagtggcaaactgttcctgcagcttgcggagagtacatagctgactacgttctangagaacaatatagatcagattccanaacagttaaccaacaagcttatttctatgctaaatccctc

SEQ ID NO: 10681 - DNA, 381 bp, Glycine max
  Clone ID: LIB3039-015-Q1-E1-C3
gacaagtttgttgagatagctagaagcaataagatgaaaatgaaagtgcttgttttgtttgttgctacagttttggtagcatatgaatgccatggctcagactaccagaagttccctctccaaatgaaaactgggtttggtgggcaatacagcaatgaggtggcatgtgccagttggaggcttggcgtggaagcaaacaacgtactcaagtggcaaactgttcctgcagcttgcggagagtacatagctgactacgttctaggagaccaatatagatcagattccaaaacagttaaccaacaagcttatttctatgctaaatccctcaaactcaacaacaaaaaagtctcttgccttggacgttgacgacactaccctctc

SEQ ID NO: 10682 - DNA, 342 bp, Glycine max
  Clone ID: LIB3039-015-Q1-E1-C4
atgtttagtatatttaataacatcaactgaaactttataccgattccaatattttattcagcgcgttcatgcaacacgtcctagtaattccaattcactcacttttctcgtgacaggtattagtgttctcatattatgcttgttttaaccacattttgtgaatgtgtttttttccttcctttatattgcatcaaggtcccatttacgccttactgcttatatgtttcagttcttctgttattcatgatactgaactctcaccagatgtccccaaactttctggtaaggtcttgtagtatgtaaagcagacatgcaagtttttttatgaaaattatgacattt

SEQ ID NO: 10683 - DNA, 229 bp, Glycine max
  Clone ID: LIB3039-015-Q1-E1-C5
ggaacaagtgagtttgttgattgatataccctcaattcgtgtgaataagctgagagtccttgatttcatcgttgctgggtcttgggtattatggcactgccatgcctgcgatgtgctctctctccgaatgaacactggttatggtgctcgttatccggaagttacattcgcaagttgggtggcttgctcgttgcagtatacagggtctttcgctttgatagcagtcctc

SEQ ID NO: 10684 - DNA, 379 bp, Glycine max
  Clone ID: LIB3039-015-Q1-E1-C6
aatactcttattataataaaaataactataattaatatgctaaaaaaatttaagatatccaattatgagcagaaataattcttatattatgatcaattttatactttcattctaaatatctcacaaaatacttaattaaaatagtattaaaaatttattctacttaaaagacaatataaaagtattggtttgattctaataattttagtttattaatctatgaaacaagatgtgtgaggttcgtttctaataatgggttcctcccttttctcattctttaatttcattttgtttttactctttataagacttattataaatctcacctttaagaagaaaagaataggaaaaggagaagttatgcagcattaatattgga

SEQ ID NO: 10685 - DNA, 376 bp, Glycine max
  Clone ID: LIB3039-015-Q1-E1-C7
gaactacccagcaatagtaagtgcaaaaccgaaaacaaaaaaccaaacccaaacgaaaccgaccaaaatctcgccaacttcactttccgcttcatgtagtttctgcgttcccaactccttctcccgactctaccctgactcgcccgagtccacactcaaacccgcgctcatggcaaataacccttccgacgctcccgccgatgacttccttgaacaaatcctcggcctcccgaacttcgcttccgccgactccggcctttccgctgccgatgtcggcctcgccggtgcggccactcaggctccgatgatgctgcaactcaactccggcggaagcaaaggctaacttcgccggcgccgccttccacgcgcccgtgta

SEQ ID NO: 10686 - DNA, 386 bp, Glycine max
  Clone ID: LIB3039-015-Q1-E1-C8
gagagtgagagagagagagagagagagagagaggtatcacagtgaaacgaagaagccctaactacgcacgcactcattcttgagaaagctcaatattcattcgtccatggcactctcttctcgtctcttttccaaatccaaattgatctatggctgtcaaatacttctgcaaaaggagcatgctattccagttcgtcactttgctaaagagtctgcccctcctgcccttaagggagatcagatgctgaagaacatttttgtggaggtgaagaacaaatttgagactgccataggaatattaaagaaggagaagatcaccattgacccagaagatccagctgctgtttctcaataatgcaaaggtcatgaaaacagttagagagaag

SEQ ID NO: 10687 - DNA, 364 bp, Glycine max
  Clone ID: LIB3039-015-Q1-E1-C9
ggcacaagtttgttgagatagctagaagcaataagatgaaaatgaaagtgcttgttttgtttgttgctacagttttggtagcatatgaatgccatggctcagactaccagaagttccctctccaaatgaaaactgggtttggtgggcaatacagcaatgaggtggcatgtgccagttggaggcttggcgtggaagcaaacaacgtagtcaagtggcaaactgttcctgcagcttgcggagagtacatagctgactacgttctaggagaccaatatagatcagattccaaaacagttaaccaacaagcttatttctatgctaaatccctcaaactcaccaacaaagatgtctttgtcttggacgt

SEQ ID NO: 10688 - DNA, 92 bp, Glycine max
  Clone ID: LIB3039-015-Q1-E1-D1
ggttctagtgtgtgattgtttgttgttgtaactcgttcttcttcttttgttgttctgtgtttgtgtttgttttttctctcacctgaaaatgt

SEQ ID NO: 10689 - DNA, 389 bp, Glycine max
  Clone ID: LIB3039-015-Q1-E1-D10
gataacacaaacacaaattacatagcctcagtaatctgagagagaaacaaaaacaatgaaggtttccattgccaagttccactcccttcccctatgttttttccttctcttggccttcaacacaaaacccctcctagcagcagaaccagagccagtggttgataagcaagggaaccctttggagccaggagtagggtactacgtgtggccactttgggctgatgaaggaggcctcacactaggccaaacaaggaacaagacatgccctctttatgttatccgtgacccttcattcattggcaccccagtttcattcttagcaccaggccttgaccatgttccaacactcactgatctaaccattgatttccctgtggtgacagtgtgta

SEQ ID NO: 10690 - DNA, 385 bp, Glycine max
  Clone ID: LIB3039-015-Q1-E1-D11
ggcacacgcgccggctgagaaaggggtgtctggatttttgttggatttcctgatgggcggagtgtcggcggctgtgtccaagacagctgcggctccaatcgaacgagttaagttgctcatccaaaaccaggatgaaatgatcaagagtggtcggttgtctgaaccatacaaaggaattggcgattgtttcactcgaaccatgaaggatgaaggggtgattgctctttggagaggaaacactgctaatgttatcagatacttccctactcacgctctgaattttgcttttaatgattatttcaagaggcttttcaacttcaaaaaggataaagatggctactggaaatggtttgctgggaatttagcatctgggggggctgctggg

SEQ ID NO: 10691 - DNA, 391 bp, Glycine max
  Clone ID: LIB3039-015-Q1-E1-D12
ggcacaagtgagtttgttgatcgagataactagaaacagtgtgatgaaaatgaaggtccttgttttcttcgttgctacaattttggtagcatggcaatgccatgcgtacgatatgttccctctccgaatgaacactggctatggtgcccatactccggaggtgaaatgcgcaagttggaggcttgctgtggaagcacacaacatctttggctttgagaccattcctgaagagtgcgttgaagcaacaaaggaatacatccatggcgaacaatatagatcagactccaaaacagttaaccaacaagcttacttttatgccagagacctcgaagtccatcccaaggacacatttgtgttcagtatagatggcaccgtactctctaatattcca

SEQ ID NO: 10692 - DNA, 129 bp, Glycine max
  Clone ID: LIB3039-015-Q1-E1-D3
gcgtgacacactctgtacctgcgcattaaccgcggctggtgtagtggttacacgcagcgtgacagcgacacatggcagagccttatcgctcgcacgtttcactggctacccttcaattctcgccaggtt

SEQ ID NO: 10693 - DNA, 185 bp, Glycine max
  Clone ID: LIB3039-015-Q1-E1-D4
aaggtttcctctccggatgataactgggtaaggtgagcgttcttcggaggtaaaatgcgcaagttttaagcttgccgtggcagcacacaacatccgagcctttaaaaccattcctgaaaaatgccttgaaccaacaaaggactacattaatggcgaacaatttagatcagactctaaaacagtta

SEQ ID NO: 10694 - DNA, 185 bp, Glycine max
  Clone ID: LIB3039-015-Q1-E1-D5
gagtgtgtacgagtctgttgttacctcaaaacgacattaacatgctgagactcagacccatcatggtttccttggcggtgcattacctttgggaacatggacattccagggaacagggaacctacagttttcccccaggatccagaattgctcaagggaacgttattccgcaagttaaatgcgaa

SEQ ID NO: 10695 - DNA, 379 bp, Glycine max; identical to SEQ ID NO: 8837
  Clone ID: LIB3039-015-Q1-E1-D6

SEQ ID NO: 10696 - DNA, 330 bp, Glycine max
  Clone ID: LIB3039-015-Q1-E1-D7
ggggttctcctacagattcttcagcaactgcgattttggatcggaacctcttctgcggcgtatcaatgggacactccaacgtttggaattctcacccaagaaactacggtcctggttctcgcacttgccgagtgtgtgggaatccacatggattgatcaggaagtatggccttatgtgctgcatgcagtgcatccgtatcaatgccaatgaaattggcttcatcaagtatcgctaaaatagctgttgtcacgtacggaccaatattatgttctggcactaggatgttttgacgatgttatgtttgaagaaacttgacacgtgtttttttc

SEQ ID NO: 10697 - DNA, 378 bp, Glycine max
  Clone ID: LIB3039-015-Q1-E1-D8
gaatttatctttgcctttgatgtttgtcagctttttcttgcttccatagttcatggcgtgtgttcaagtcatcacagttcttctctttgcattggctcttgcaaaaattgacccctcaacatgccaaatggtgcagggcagagtcttctgcgttgactgcactcacaactatgacttatctgatattaaggtttcagtgaggtgtgatggtgtgaaaaaactggctttggcaactacagaaaatgatggctccttcaaggttgatcttcccttagaccacacaaaaccttcttctgtgaagaattgcttagcaaaacttcttggcgggccagttcagctttatgtctcaagggaaaaacaaggtatcccaaattatta

SEQ ID NO: 10698 - DNA, 388 bp, Glycine max
  Clone ID: LIB3039-015-Q1-E1-D9
ggtcttctgtttttttttttctttctaaaatgtaaagaaaacagttttcaatcagcaaaatctacagtttcaatctttcggatcttgttggtgttgtgtggatccttggatcgtgatcctctactcaatcctcattctggtcggttctctttctggggttttagatctctttgttctgtgcacttcaagtcgctgcttgcgtcagtggtgtttcagtgtcctccttttcatggcattttgactacccttttgccaggctagtgtgagtgatggatccaattaacattttacctgctgatggggttgaagtggttcaccaaaatggtgttcatgatgaaccttcaaattctggagaggatggtggcgtttcataagaattaaaccccaa

SEQ ID NO: 10699 - DNA, 331 bp, Glycine max
  Clone ID: LIB3039-015-Q1-E1-E1
gagctttagattcttttcccctagattcagccacagttggaaaaaaaaaaagttgttcgagatggcacgtacgaagcaaactgctcgtaagtccacaggaggaaaggcacctaggaagcagctcgcaaccaaggctgcacgtaagtctgcaccaactactggtggtgtgaagaagccacatcgttatcgtcctggtaccgttgctcttcgtgagattaggaaataccagaagagtaccgagcttttgatcaggaagctccccttccagaggctggttcgtgaaattgctcaggacttcaagactgatctgcgtttccagagccatgctgtg

SEQ ID NO: 10700 - DNA, 371 bp, Glycine max
  Clone ID: LIB3039-015-Q1-E1-E10
ggtgaaagaaaggcagcgatggaagaagacttcgacatccccggcggcgaggaaatggatctcggcgaagacgaggtcggcgaggagagggagatcggctctggcggcctcaagaagaagctcctcaatgaaggtcaaggctgggaaacccccgaagtcggtgacgaagtccaagttcattacacggggactttgctcgacgggactaagttcgattcgagccgcgacagggattctcccttcagcttcacgctcggacaagggcaagtaattaaaggatgggatgaaggtattaaaaccatgaagaaaggtgaaaatgctattttcaccatccctcccgagctagcttatggtgaatctggttcccctcc

SEQ ID NO: 10701 - DNA, 349 bp, Glycine max
  Clone ID: LIB3039-015-Q1-E1-E11
gaccatagaagaagcacaaagagaagcattagcactaggagcagcaacaactagtctcagctgaaatggcctcttcagtgatggcatctgtggccctcaaacctgcccctttcactgttgagaagtcctcagtgagaggccttccctctctctcaaggaactcttcttcattcagagttgtggccagtggcaagaagatcaagactgacaaaccttatggaattaatggtggcatggctttgagggatggaactgatgcatctggcaggaaaggaaagggaaagggtgtttaccagtttgtagacaaatacggtgctaatgtcgatggttacagtcctatctacgacac

SEQ ID NO: 10702 - DNA, 333 bp, Glycine max
  Clone ID: LIB3039-015-Q1-E1-E12
cgagcgtttcgcttcatataccagaagaaattgactaaataatgtgtatgcccatgtggatattgataatagtcacctattctctgcctcctttttctttccttttttcgcccatttcttaggcacaaaatatgccttctttcttgctttccccttcgtccggtcctgttaaggtttggatgatgtggggttacagctgtagagttctgctgataaacctatgtacaaatagaaattctgaaaacgggttaaccaaggaattacctcaaaggaattaataaacctaagttaaaaattggacctttggaatccaaaaatggaatttccggaacc

SEQ ID NO: 10703 - DNA, 380 bp, Glycine max
  Clone ID: LIB3039-015-Q1-E1-E2
gatacttgtaattcataggcagatatctaccgagagggttaaacacttagcatctgctgagggtaccttggtagacaccacactacccataatatggtcgaaaacaacaacccaagggtttttggttcttctatgtttctatgtttgcttgtgttgatgatttggaacaagattgttgttgttgttccacaagccgaggctcgagcattttttgtttttggtgattcgctagttgacaatggcaacaataactacctattcaccactgctcgtgccgactcatatccttatggcgttgactatcccactcacagggccactggccgtttctccaatgggcttcataatcccggacattatcagcgagaaaattgggtcag

SEQ ID NO: 10704 - DNA, 319 bp, Glycine max
  Clone ID: LIB3039-015-Q1-E1-E3
ggcacaagtgagtttgttgatcgagataactagaaacagtgtgatgaaaatgaaggtccttgttttcttcgttgctacaattttggtagcatggcaatgccatgcgtacgatatgttccctctccgaatgaacactggctatggtgcccgtactccggaggtgaaatgcgcaagttggaggcttgctgtggaagcacacaacatctttggctttgagaccattcctgaagagtgcgttgaagcaacaaaggaatacatccatggcgaacaatatagatcagactccaaaacagttaaccaacaagcttacttttatgcc

SEQ ID NO: 10705 - DNA, 353 bp, Glycine max
  Clone ID: LIB3039-015-Q1-E1-E4
ggaacggaaaagcactggcgcagctaccctgaggcttctcttctcttctcttctctgtcgtgagtcaccatggtgagggttagtgtgctgaacgatgctctgaagagcatgtacaatgctgacaaaaggggaaagcgccaagtcatgattatgccatcctccaaagtcattatcaaattccttttggtgatgcaaaagcacggatacatcggagagtttgagtatgttgatgaccacatggctggtaaaatcgtggttgaattgaacggtagactgaataagtgtggggttattagtccccgttttgatgtgggcgtcaaagagattgaaggttggactgctaagcttctccc

SEQ ID NO: 10706 - DNA, 353 bp, Glycine max
  Clone ID: LIB3039-015-Q1-E1-E5
cgacagaaggggaaggtgcaagagtttgttgtgagctataagctagtttatcgtgaggagaatatgaagttgtttgttttctttgttgctgcagtagttttggtagcatggccatgccatggcgcaggctaccaaaggttccctctccgaatgaaaactggctatggtgagcgttcttcggaggtaaaatgcgcaagttttaggcttgctgtggaagcacacaacatccgagcctttaaaaccattcctgaagagtgcgttgaaccaacaaaggactacattaatggcgaacaatttagatcagactctaaaacagttaaccaacaagctttcttttatgctagttaacgcca

SEQ ID NO: 10707 - DNA, 377 bp, Glycine max
  Clone ID: LIB3039-015-Q1-E1-E6
gactccaaaactgaacgctatagaaaatgttcaaaaaaattttcaggtgaagatgtatctgcacagaaccaagtgaaggcatctgttcaacgaaaaatacggcaaagtattgctgaagagtatccgggtcttgaacctgtgttggatgatatacttcccaagaagtcccctctaatagttgctaaatgtcagaaccatctcaatctggttcttgtgaacaacgtgccactgtttttcagtgtccgtgatggaccatacatgcccaccttgcgtcttctccatctatatccaaatataatgaaaaagttacaagttgaccgtggtgcaattagatttgtcttggcgggtgcaaacataatgtgtcctggtcctacatc

SEQ ID NO: 10708 - DNA, 321 bp, Glycine max
  Clone ID: LIB3039-015-Q1-E1-E7
ggaaacacacagaagacagagtgagacgcttctcacgatggagggaggagtatcctacgcgcgcatgcctcgggtcaaaatccgcgagctgaaggacgactacgccaagttcgagctccgcgacaccgacgcgagcatcgccaacgcgctgcggcgcgtgatgatcgcggaggtgccgacggtcgccatcgacctcgtggagatcgaggtcaactcctcggtgctcaatgacgagtttatcgctcacaggctgggcctcatccccctcactagcgagcgcgccatgtccatgcgcttctcacgtgactgcgacgcgtgcga

SEQ ID NO: 10709 - DNA, 379 bp, Glycine max
  Clone ID: LIB3039-015-Q1-E1-E8
gaaggtgcaagagtttgttgtgagctataagctagtttatcgtgaggagaatatgaagttgtttgttttctttgttgctgcagtagttttggtagcatggccatgccatggcgcaggctaccaaaggttccctctccgaatgaaaactggctatggtgagcgttcttcggaggtaaaatgcgcaagttttaggcttgctgtggaagcacacaacatccgagcctttaaaaccattcctgaagagtgcgttgaaccaacaaaggactacattaatggcgaacaatttagatcagactctaaaacagttaaccaacaagctttcttttatgctagtgaacgcgaagtcgatcacatcgacatatttatattcggcatagat

SEQ ID NO: 10710 - DNA, 360 bp, Glycine max
  Clone ID: LIB3039-015-Q1-E1-E9
gactgcgaaccagtagggactcccattccgactcttagccgccgatctctcagggcttgcatcttctcaggtaagctgtgaagatgtacacatcaaggaagaaaatccacaaggataaggatgctgaaccaactgaatttgaagagtcagttggacaggcattgtttgatctggaaaataccaatcaggagcttaaaagtgatctgaaggatttatacataaactcagccgtgcaagttgatgtttctggaaaccgcaaggctgttgttattcatgtcccttacagattaaggaaaggtttccgtaagattcatgttatgcttgtcagggagcttgagaagaagtttagtggcaaggatg

SEQ ID NO: 10711 - DNA, 318 bp, Glycine max
  Clone ID: LIB3039-015-Q1-E1-F1
gatccatactcaaaatacaaaaatggagagagtagctaaggtgttggtgatgttgagcatggtggtgttggtgcttgcatcaaatgctgaagggggacgattacttgaggaagagaatgtggatcagccccagaccttccttggatcaggtggaggccttggtgggatatttccaagcccaagcccaggcttcagcttcaccggcgtgggctttggcccatctgggttttgcactttccctggtggttgcaccggtactccttctttgcccactattcccggtgctggtgggtcactaccagtaccaacacatgcata

SEQ ID NO: 10712 - DNA, 374 bp, Glycine max
  Clone ID: LIB3039-015-Q1-E1-F11
gattggaataatatctaaagaagaagctatatagccagggcctctaagtgtgaaagttggatgattttgggtttgttgattgctatttcgttctcaagcatgcatatggacatggcattcgcagcaaggaatctcctgcagacagaattgatacctgagctgcagccagtagtgccacctgtcatacagcctagagagatagacatctctgacttgccgccactgctaccagtaccatcaccaccaattacccttcccatcccctaagcacttggatttggattcataaataatcactcatctccactctccattttcattcagttccctgttgttattgttgctttcaataagtgatcttttttcacatctgt

SEQ ID NO: 10713 - DNA, 385 bp, Glycine max; identical to SEQ ID NO: 8834
  Clone ID: LIB3039-015-Q1-E1-F12

SEQ ID NO: 10714 - DNA, 384 bp, Glycine max
  unsure (1)..(384): unsure at all n locations
  Clone ID: LIB3039-015-Q1-E1-F2
gacagcatatatatcaataatctattttatactatacctacattttgataattttctttgtagttgatagccatggctacccgtggaaagcttgaggttgacattgatctcaagtccaacgcagacaagtactggcaaacccttaggaattctactgaaatattccctaaggccttcccacatgattacaaaagcattgaggttcttgagggtgatggcaagtctcctggttctatccgccacataagttatggtgaaggttcaccacttgtgaaatcatcctttgagaagattgaggctgttgatgaggaaaagaaggtagtgtcgtacactatcattgaatggggaactcttcaagcactacanaacattcaagggagacat

SEQ ID NO: 10715 - DNA, 367 bp, Glycine max
  Clone ID: LIB3039-015-Q1-E1-F3
gggtgctttttgaatggcttaattataatttcctaactattttattctttgttgtggctcttggtatgcttggacagtttctttggacaaatgcatccggcttgtttagcaggaagccatctaaagttccccgttttgtcctcccagatggtatcttcgtgaatattgcaactgcagttggtgctgaggttaaccgtggtttgaggtttctccaagatgtttcatgtggaggaaacctaaaacaatttcttattgttatagtaagcttatgggctggtgctgtgattgggagttggtgcaattttttgactgtcatgtatattggttttgttgttgcacatacaatcccaattccccaatgaaaggt

SEQ ID NO: 10716 - DNA, 389 bp, Glycine max
  Clone ID: LIB3039-015-Q1-E1-F4
ggcacaagtgagtttgttgatcgagataactagaaacagtgtgatgaaaatgaaggtccttgttttcttcgttgctacaattttggtagcatggcaatgccatgcgtacgatatgttccctctccgaatgaacactggctatggtgcccgtactccggaggtgaaatgcgcaagttggaggcttgctgtggaagcacacaacatctttggctttgagaccattcctgaagagtgcgttgaagcaacaaaggaatacatccatggcgaacaatatagatcagactccaaaacagttaaccaacaagcttacttttatgccagagacctcgaagtccatcccaaaggacacaatttgtgttcggtataagatggcaccgtactctctaata

SEQ ID NO: 10717 - DNA, 302 bp, Glycine max
  Clone ID: LIB3039-015-Q1-E1-F5
tgtggccgccacataccacatagggggagatagatccgcttccagttgctcgaacgaatttctagcatgcggagcaatggcagacgttgaggtcgatgtgactgctgcagcagcaacagggcatccaaagagagagagcgtacacgaagttgagttacaggggcgtggatctccactcgcctcaggacatgtctagcaatgaactcctctggatgttcagtgctcgcgcacatgaacggttcaacatacgcctcaatcaagcacccagggcaatgatcatgaagctccacaaagcgtcatga

SEQ ID NO: 10718 - DNA, 341 bp, Glycine max
  Clone ID: LIB3039-015-Q1-E1-F6
gattctaagatcgatcatcttcaatttccctatattacttgcaatattgattgaacactactagatcatgtgtataacgttgtatagctagctagctagctttctattgtctaatatacctttgtctgtgttgtaaattaaggtgcaagaagcaagtaatccctcataatacacacacacacatatatatatatatataatggcggattggggtccagtggtgatagcagtggtgctgtttgtgttgctaagccctggtcttgtgtttcaattgccatggaagagcagagtggtggagtttgggaacatgcataccagtgcagtgtctatcttggtccaca

SEQ ID NO: 10719 - DNA, 355 bp, Glycine max
  Clone ID: LIB3039-015-Q1-E1-F7
ccaggcgtcagtaaggatgcgaggggacaacacaagggggcacaagtgagtttgttgatccacacacccacacacagtgtgatcagcatgaaggtccttgttatcttcgttgctacaattctggtagcaaggcagtgccatgcgtacgatatgttccctctccgaatgaacactggctatggtgcacgtacgccggaggtgaaatgcgcaagttggacgcatgctgtggaagcacacatcatctttggcgttgagaccattcctgaagagtgcgttgaagcaacccacgaatacatccatggcgaacaatatagatcagactccacaacagttaacctacacgcttacttttatg

SEQ ID NO: 10720 - DNA, 365 bp, Glycine max
  Clone ID: LIB3039-015-Q1-E1-F8
ggcacaagtgagtttgttgatcgagataactagaaacagtgtgatgaaaatgaaggtccttgttttcttcgttgctacaattttggtagcatggcaatgccatgcgtacgatatgttccctctccgaatgaacactggctatggtgcccgtactccggaggtgaaatgcgcaagttggaggcttgctgtggaagcacacaacatctttggctttgagaccattcctgaagagtgcgttgaagcaacaaaggaatacatccatggcgaacaatatagatcagactccaaaacagttaaccaacaagcttacttttatgccagagacctcgaagttcatcccaaggacacatttgtgttcagtatag

SEQ ID NO: 10721 - DNA, 377 bp, Glycine max
  Clone ID: LIB3039-015-Q1-E1-F9
ggaacttctcacgttcatttctacacatccctagctctgtcgttccgtcgttgacgatggcgtttcgggtgcgaagccctgacctccgctctctctttcttctctctctcttgtccatcgcttccgccaatgtcttcttcgaagagcgtttcgatgacgggtgggaaaatcgatgggttaaatcagattggaaaaaagatgagaacgtggctggggagtggaaccacacctctggtcaatggaatggagacgctaatgacaaaggtattcaaaccagtgaggattacagattctatgctatttcagctgagtaccctgaattcagcaacaagggtaagacactagtctttcaattttctgttaagcacgaacagaag

SEQ ID NO: 10722 - DNA, 334 bp, Glycine max
  Clone ID: LIB3039-015-Q1-E1-G1
gagcgaaacagagagtggtttcagtgagtgatcggtgttcacttgatccttcataagtcgtcatcatcatcatcatcatcaccgttgattgaagaagatgccgatcagaaacatcgccatcggaaggcctgaagaggctactcaccccgacacgttgaaggcggggttggctgagttcatctccaccttgatcttcgtgttcgccggttcaggttccggcatcgcctacaacaagctcaccgacaacggcgccgccactcccgccggcctcatctccgcttccatcgcccatgctttcgccctcttcgtcgccgtctccgtcgggcgcaacatc

SEQ ID NO: 10723 - DNA, 392 bp, Glycine max
  unsure (1)..(392): unsure at all n locations
  Clone ID: LIB3039-015-Q1-E1-G10
gattcatgattcaacaatgaagaattgattcaattcatagtctcaatcttccaaatttatcacagatccaaatccaccaccatgattcccgatctacccctccccttcctcttctccttattcatcatcttcttccacctcgctgaatccaaaccctccctcaccgccacgccaaccaccctcccagcctccggcgccaccgtcaatctccgctggtccggcatcccttccccctccgacctcgacttcctcgccatctattcccctccgacctccccgcacgacaacttcatcggatacctcttcctctcgcagtccgccacgtggcgcaccggctccggcaacctctccctcnccctcgtcgacctccgctccaactactcgttccgcaa

SEQ ID NO: 10724 - DNA, 381 bp, Glycine max
  unsure (1)..(381): unsure at all n locations
  Clone ID: LIB3039-015-Q1-E1-G11
aaagagacccggaaagggtgggaaccgcttttggaaatccattgggcttggatttaagactcccagggaagccatcgaaggaacctacattgacaagaagtgccccttcactggcaatgtttccatccgtggccgtatcttggctggaacatgtcacagtgctaagatgaacaggactattattgttaggaggaattatctccattttatcaagaagtaccagaggtacgagaaaaggcactccaacattcctgctcatatatcacctgctttccgtgtgaaggaaggagatcacgttattattggtcaatgcaggccactttctaagactgtgaggttcaatgtgttgaaagtgatcccagctggatcntctagcggtgc

SEQ ID NO: 10725 - DNA, 377 bp, Glycine max
  Clone ID: LIB3039-015-Q1-E1-G12
gaagatttgttcattgttgggtcaattgaagtctaagaaagaaaacagagagcgaagaaggagaagagatcagaaaaatggggtccaaagctccaaagaaggccaatctcctcgatcaccactccatcaagcacatcctcgacgagtcagtctccgaggtggtaacgagtcgtgggtttgtggaagacgtgagattgagcaatgtgaggcttcccaatggggcaatcatcatcgtcattgctctcttcgcccaattctacaagaagaagttccctgaaaatagggattttctcatcgcctgcatcgccttgtatgtgatcatcaatgggttgttgcagctgatcatatacactaaggagaaaaatgccattctgttc

SEQ ID NO: 10726 - DNA, 332 bp, Glycine max
  Clone ID: LIB3039-015-Q1-E1-G2
ggaccccaatactcggcatccggagaaaaccctagccactctcccggcgtcacgatgcagatcgtcgtgaaaaccctaacgggtaagacgatcacgttggacgtggagtcttcggacaccatcgacaacgtgaaggccaagatccaggacaaggaatgcatccctccggaccagcagcgcctcatcttcgccgggaagcagctggaggacggccgcaccctcgccgactacaacatccagaaggagtccacgcttcacctcgtcctccgcctccgtggcggtgccaagaagcgcaagaagaagacctacaccaagcccaagaagatcaagca

SEQ ID NO: 10727 - DNA, 380 bp, Glycine max
  Clone ID: LIB3039-015-Q1-E1-G3
gaaggtgcaagagtttgttgtgagctataagctagtttatcgtgaggagaatatgaagttgtttgttttctttgttgctgcagtagttttggtagcatggccatgccatggcgcaggctaccaaaggttccctctccgaatgaaaactggctatggtgagcgttcttcggaggtaaaatgcgcaagttttaggcttgctgtggaagcacacaacatccgagcctttaaaaccattcctgaagagtgcgttgaaccaacaaaggactacattaatggcgaacaatttagatcagactctaaaacagttaaccaacaagctttcttttatgctagttaacgccaagtcaatcacaacgacatatttatattcggcatagata

SEQ ID NO: 10728 - DNA, 384 bp, Glycine max
  unsure (1)..(384): unsure at all n locations
  Clone ID: LIB3039-015-Q1-E1-G4
ggggtctagttagagtgaatccatgaccgtgaccatggcggctgcgtttacaagtacaagtgcaacactgagactgtcaaatgttggagagagcagaggtttgcagctgcgtaagtgtaaccctaatcctaataagctgaaggttatgggggggtttggaggttgttctggagtggcagtgggtgtgagagaaagaaaaggaattggaagggttagggttcgggttcgggcgagttcttcgtcggacgaggcagtgagtgcgcagtcaaaagtgactcagaaagtattctttgacgtcagtattggaaatccagttgggaagcttgtgggacgtantgtgattggacggttcggcgacgatgtcccccaaacggccgagaactt

SEQ ID NO: 10729 - DNA, 335 bp, Glycine max
  Clone ID: LIB3039-015-Q1-E1-G5
agacgacagaagggcaaatatgatgtttcaacagtattggaagcaaaggctcttctgaaagaagccccccaagcagaagttggattgccagtcgacagaaatattcctctcattggtttcattggtaggcttgaagagcaaaaaggttctgatattcttgcagaagccattccccaatttatcaagcagaatgttcagttggtagccctaggaacaggaaaaagacaaatggaaaagcagcttgaggaacttgaaatatcataccctgataaggccagaggagtggcaaaattcaatgttcccctagcccacatgataatagctggagctgattt

SEQ ID NO: 10730 - DNA, 378 bp, Glycine max
  Clone ID: LIB3039-015-Q1-E1-G6
gggtgcaagagtttgttgtgagctataagctagtttatcgtgaggagaatatgaagttgtttgttttctttgttgctgcagtagttttggtagcatggccatgccatggcgcaggctaccaaaggttccctctccgaatgaaaactggctatggtgagcgttcttcggaggtaaaatgcgcaagttttaggcttgctgtggaagcacacaacatccgagcctttaaaaccattcctgaagagtgcgttgaaccaacaaaggactacattaatggcgaacaatttagatcagactctaaaacagttaaccaacaagctttcttttatgctagtgaacgccaagtccatcacaacgacatatttatattcggcatagata

SEQ ID NO: 10731 - DNA, 293 bp, Glycine max
  Clone ID: LIB3039-015-Q1-E1-G7
gggacaagtgagtttgttgatccagataactagaaacactgtgaggaaaaagaaagtccttggtttcctcggtgccagaattttggtagcaaggcaatgccatgcatacgacatgttcccactcggaatgaacactggcgatggtgcccgtacgccggaggtgaaatgcgcaagtttgaggcttgctgtggaatcacataacatcattggccatgagacccttcctgaagagtccgtttaagcaccttaggaaaacatccgaggcgaataatagcgatcagactccataacag

SEQ ID NO: 10732 - DNA, 378 bp, Glycine max
  unsure (1)..(378): unsure at all n locations
  Clone ID: LIB3039-015-Q1-E1-G8
gggcacaagtttgttgagatagctagaagcaataagatgaaaatgaaagtgcttgttttgtttgttgctacagttttggtagcatatgaatgccatggctcagactaccagaagttccctctccaaatgaaaactgggtttggtgggcaatacagcaatgaggtggcatgtgccagttggaggcttggcgtggaagcaaacaacgtagtcaagtggcaaactgttcctgcagcttgcggagagtacatagctgactacgttctaggagaccaatatagatcagattccaaaacagttaaccaacaagcttatttctatgctaaatccctcaaactcaccaacanagatgtctttgtcttggacgttgacgacactact

SEQ ID NO: 10733 - DNA, 368 bp, Glycine max; identical to SEQ ID NO: 8085
  Clone ID: LIB3039-015-Q1-E1-G9

SEQ ID NO: 10734 - DNA, 324 bp, Glycine max
  Clone ID: LIB3039-015-Q1-E1-H1
ggcacaagtgagtttgttgatcgagataactagaaacagtgtgatgaaaatgaaggtccttgttttcttcgttgctacaattttggtagcatggcaatgccatgcgtacgatatgttccctctccgaatgaacactggctatggtgcccgtactccggaggtgaaatgcgcaagttggaggcttgctgtggaagcacacaacatctttggctttgagaccattcctgaagagtgcgttgaagcaacaaaggaatacatccatggcgaacaatatagatcagactccaaaacagttaaccaacaagcttacttttatgccagaga

SEQ ID NO: 10735 - DNA, 282 bp, Glycine max
  Clone ID: LIB3039-015-Q1-E1-H10
ggcacaagtgagtttgttgatcgagataactagaaccagtgtgatgaaaatgagggcccttgtttcctccgttgcaacattttgggcacccaagaaaccacccggacgaaaaattccccccccccaagaacaccggctatggtgcccctactcccgaggtgaaatgcgcaagttggaggcttgctgtggaagcacacaacatctttggctttgagaccattcctgaagagtacgttgaagcaacaaacgaatacatccatggcgaacaatatagatcagact

SEQ ID NO: 10736 - DNA, 361 bp, Glycine max
  unsure (1)..(361): unsure at all n locations
  Clone ID: LIB3039-015-Q1-E1-H11
gcagtacagaaaacgcagttctcaccatttccctctcgattgtgagacttgttgttgttaactgaacttttctgagcaagaatgtctgggcgtggaaagggaggcaagggtttgggaaagggaggagcgaaacgacaccgtaaggtgctgcgcgataacattcagggaatcaccaagcccgcgattcggcgtttggctcgtangggtggcgtgaagcgtatcagtggtctcatctacgaagagacacgtggcgtgctcaagatctttttggagaacgtgattcgtgacgccgttacctacactgagcatgctaggagaaagaccgttacggcaatggacgtggtttatgctctcaagagac

SEQ ID NO: 10737 - DNA, 379 bp, Glycine max
  Clone ID: LIB3039-015-Q1-E1-H2
ttacaaattgttgacagtaaagataaacctgccatgggttttctttaccaagctatgtataaagccaaagaggagatgattaggaggtttcagaaaaataagaaggtagagccttacttgaatatcttggataggcattgggattctctttgtaaaagtatacatgctgctggttattggttaaatccagcttgtcatttcaatgaagaatttgctaagcataagtccacaacatctggccttttggatgtcattgaaaggtatgctcatggagatcctgatttgcaatttaatttggcaagtgaaatgagaatatttaaaaatgccgagttaaatttttggaaggctagttgctacacgtgaacggaatacggtgatg

SEQ ID NO: 10738 - DNA, 317 bp, Glycine max; identical to SEQ ID NO: 7580
  Clone ID: LIB3039-015-Q1-E1-H3

SEQ ID NO: 10739 - DNA, 344 bp, Glycine max
  unsure (1)..(344): unsure at all n locations
  Clone ID: LIB3039-015-Q1-E1-H5
gacacttcaaaatcctctagtaacccttcttttctctctctctctctcgtgttctgagctgctataagcactggagaggaaaagaagccatgcttctttcaccatgtttgcaatgcttgttggattgctctctcagagccttgtcattcctgtaatatccaccactgttgcagatcagaagaactactacaccccagatccacatgctggaagtccccccacaggctcacacaatagtagtcctccatctcatggccatgggagctctccaccctcacatcacaatagtccaagtactccatcaacaccctcacgtggaaactgtggatcatcanccccaaaac

SEQ ID NO: 10740 - DNA, 382 bp, Glycine max; identical to SEQ ID NO: 7731
  Clone ID: LIB3039-015-Q1-E1-H6

SEQ ID NO: 10741 - DNA, 292 bp, Glycine max
  Clone ID: LIB3039-015-Q1-E1-H7
ggcacaagtgagtttgttgatcgagataactagaaacagtgtgatgaaaatgaaggtccttgttttcttcgttgctacaattttggtagcatggcaatgccatgcgtacgatatgttccctctccgaatgaacactggctatggtgcccgtactccggaggtgaaatgcgcaagttggaggcttgctgtggaagcacacaacatctttggctttgagaccattcctgaagagtgcgttgaagcaacaaaggaatacatccatggcgaacaatatagatcagactccaaaaca

SEQ ID NO: 10742 - DNA, 367 bp, Glycine max; identical to SEQ ID NO: 7958
  Clone ID: LIB3039-015-Q1-E1-H8

SEQ ID NO: 10743 - DNA, 391 bp, Glycine max
  Clone ID: LIB3039-015-Q1-E1-H9
agaaggggactcaccacttcaaaacactcataacacaaagcacaaagcaaagctcatccttgagttaaaaaatggcagcagcttcttccatggctctctcatccccatccttggctggcaaggccgtgaagctgggcccatcagccccagaagtgggaagggtgagcatgaggaagaccgtcaccaagcatgtctcctcaggaagcccatggtacggcccagaccgagtcaagtacttgggcccattctctggcgagcccccgtcctacctaaccggtgagttcccaggcgactaccgctgggacactgctgggctttccgcagacccagaaaccttcgccaagaaccgtgaactcgaagtgatccactccaggtgggccatgctcggagc

SEQ ID NO: 10744 - DNA, 352 bp, Glycine max
  Clone ID: LIB3039-016-Q1-E1-A1
gactcacaaccacaacaaggcagcagtgcgaagagaaagaaagagaagaagcgcttatcgaactcggacggaagcactgagttaactcagagcgagtgaaagtgttgctgcgtgatgtctggtggtatcgcccgtggacgcctcaccgaggagcgcaagtcgtggcggaagaaccatccccatggttttgttgcgaagccggagacgctgcccgatggaaccgtgaacttgatggtgtggcattgcactattcccgggaagactgggactgattgggaaggtggctacttcccgcttacgctgcactttagtgaagactacccaagcaagcctccaaagtgtaaattcccac

SEQ ID NO: 10745 - DNA, 361 bp, Glycine max
  unsure (1)..(361): unsure at all n locations
  Clone ID: LIB3039-016-Q1-E1-A10
gaaggtgcaagagtttgttgtgagctataagctagtttatcgtgaggagaatatgaagttgtttgttttctttgttgctgcagtagttttggtagcatggccatgccatggcgcatgctaccaaaggttccctctccgaatgaaaactggctatggtgagcgttcttcggaggtaaaatgcgcaagttttaggcttgctgtggaagcacacaacatccgagcctttaaaaccattcctgaagagtgcgttgaaccaacaaaggactacattaatggcgaacaatttagatcagactctaaaacagttaaccaacaagctttcttttatgctagtgaacgcgaagtccatcacancgacata

SEQ ID NO: 10746 - DNA, 386 bp, Glycine max
  Clone ID: LIB3039-016-Q1-E1-A11
ttgtttttctctgcatgtcaagttagttttgaaagttcgaattagaagtgatagatttacccttggtgaaaatttgagtcatcattatctattttattcggtatgttttgccccattgattgcttgcacaatagccttggcttgactcttgttgatacttcttgcttcacatgcatgttgggagatgatttaggcattttgttcttataagcctctagccaaatgagcctatcttgaattaattcctttgatagcccctttgagcctatgttcccctttctttgttttgaagctcattacaagcattaagtggaaaaccatgatatcaccctacccttaaggaattttagagctttggaattgttttgggaataagtgttgggggg

SEQ ID NO: 10747 - DNA, 367 bp, Glycine max
  Clone ID: LIB3039-016-Q1-E1-A12
gattcgaaatcatgtcggaacccaagatacgtgatgtgctgatcagctgcgccgaagacacacaccaaggttttgtgggccatctctttaaatctctcacagatctcggattctccgtgaaggtagtctcaggagaccatcgggatcttaaggaataggaaattgactgcttcagggttttcattattgttttttcccatcactatgcaacttcttcatctcgcttggataaacttaccgagatcataaataagtacggtgcggcagaagatcgacgcatttttccatttttcttcgaggtggaaccgaatcatgtacggtttcaaagtggtagttttgaaatagcttttgattcacatgccaaccg

SEQ ID NO: 10748 - DNA, 356 bp, Glycine max
  Clone ID: LIB3039-016-Q1-E1-A2
ttgtccccatgtgtttaggtgcacttctatatcaaacatcaactgtctgcacaaccataggaaaagggcaactgaaagtcaaacacaatataaaattacaaactaccatcaaatattgtagcacaatttcaaattccaaaaaagaatcaatcattaacaagaaattttacacacaataaccatgcaagcaagcatacaagaaattgttttcaggaatgctgatgtaaattctgatataattcttgatactgttatgttcagggcttggacgtggatgactgcaaaagtgaaaggttttaagtactactttatacagtggatacaaggtatatgagcatgcattcaagcactgattt

SEQ ID NO: 10749 - DNA, 377 bp, Glycine max
  Clone ID: LIB3039-016-Q1-E1-A3
aggggataagtaagtattcatctcaatcctcaacctttccctcttctctctcaaccaataccctacctcccgaccctgttcccctctcgtatcggtcattgaaagaggaaagtctaagaccgaatctaagagagccgatcccaaacttgctgtgaataagaagggagccgccatcaaagctaggatacccgccggcaaggggaaggcagcgaaagaccctaacaagccaaagaggcctccaagtgctttcttcgttttcatggaggagttcaggaaggtattcatcaaagaacatcctgaaaacaatgcagtgtctgctgtgggcaaagctgctggagcaaaatggaagaccatgtctgatgctgaaaaagcacctt

SEQ ID NO: 10750 - DNA, 390 bp, Glycine max
  Clone ID: LIB3039-016-Q1-E1-A4
ggcattggggcatgcttttaatttcctagatctcccaaacaaattgtagcataagtcccatggccaaagagactagtgttgtttatctatatcccagcaaatcacaagtttggggtgagaattttgatcataaaaaacttgtaataacaacactagctgctaatggaaagaaggaggagagtaatggagcacctaatgacacatatcctgcgtttcccgggtggtatgctgatgtttcctggccaggagaagcacacacatatgaaatagaaaagattctattccacgggaaatcagaattccaagagcttcttgtatttgagtcttctagacaaggcaaggttgcaattcttgatgggcatatccagctgacagaaaacgatgaatttg

SEQ ID NO: 10751 - DNA, 380 bp, Glycine max
  Clone ID: LIB3039-016-Q1-E1-A5
gacacacagctattcctcttaagcttgctactgagtttccacactgcataccttaggtcttccgaattcgaagttaatttgcaagatggctaaggaaaaggctcagatcaacattgtggtggttggtcatgtggaccctgaggaggcaaccaccattaacgagctgaagaagcctgttgtggagaaagaagctccagggcatgccatatgagggcatgcacgtacggcctcggaggggaaccagaaaattatgttaacaaaataatctggaaccctaatgtatcagtgtcatcatcagtgtgtagtttaagctagctttgctatgggtacgttctttgagatgagagtcttgatgaacagtaccattctgatgtattgct

SEQ ID NO: 10752 - DNA, 379 bp, Glycine max
  Clone ID: LIB3039-016-Q1-E1-A6
gacggacgagggtttcgtttcgggtttgacgttgttcacaatcactttctgcgcttcactcactcccttcgtgcggttttctttctttgtcgagctcgtgcgaaaatgcgtgagattcttcacatacagggagggcaatgcggaaaccagatcggagcgaagttctgggaggtggtgtgcgcggagcacgggatcgattccacggggaggtaccagggggacaacgagttgcaactcgagcgagtcaacgtctattacaatgaagcgagttgcggaaggttcgtgccgagggcggtgctcatggatctagagccagggaccatggacagcgtcagatctggtccctacggtcagattttccgacctgataacttcgtct

SEQ ID NO: 10753 - DNA, 379 bp, Glycine max
  Clone ID: LIB3039-016-Q1-E1-A7
gaacacagaacaaaaacaaagaaaaaaaaacccttagccaacacaaccatcatggccacctctgctattcagcaatcagcattcactggtcaaactgctctgaagcagctcaatgagttcgtccgcaagaccggtggcgccggcaaaggtcgcactaacatgcgccgcaccgtcaagagtgctcctcagagcatttggtatggccctgaccgtcccaagtacttgggtccattcactgagcagattccatcatacctgaccggagaattccctggtgactacggatgggacactgctggattatcagctgaaccggaaaccttcgccaggaaccgggagctggaggtgattcacagcagatgggcaatgcttggtgccc

SEQ ID NO: 10754 - DNA, 374 bp, Glycine max
  Clone ID: LIB3039-016-Q1-E1-A8
gaatgattgatagaggagtgagtctcggggcatcaaagaagaaagatgggagacgtagcagataaattggcgtatttccaagcgataaccggtttagaagatccggagctctgcacagaaatcctggctgcccacaattgggacctggaactcgctatctctactttcacctcttcctcaaaccctaacaaccctccaccgcctcccgctctggcttggaaactcatcaccctacccgtttccgtcatctccgccagtctaggcttagtttccgccgctatcggcttgggcctatgggccgcggggggcgtcctctcctattccctcggcctcgtgggcctgggctcgccctcggccccattggtttccgtcac

SEQ ID NO: 10755 - DNA, 378 bp, Glycine max
  Clone ID: LIB3039-016-Q1-E1-A9
ggcacaagtgagtttgttgatcgagataactagaaacagtgtgatgaaaatgaaggtccttgttttcttcgttgctacaattttggtagcatggcaatgccatgcgtacgatatgttccctctccgaatgaacactggctatggtgcccgtactccggaggtgaaatgcgcaagttggaggcttgctgtggaagcacacaacatctttggctttgagaccattcctgaagagtgcgttgaagcaacaaaggaatacatccatggcgaacaatatagattagactccaaaacagttaaccaacaagcttacttttatgccagagacctcgaagtccatcccaaggacacatttgtgttcagtatagatggcaccgtact

SEQ ID NO: 10756 - DNA, 381 bp, Glycine max
  Clone ID: LIB3039-016-Q1-E1-B1
ggctgtgcaaaatcaggtagcagataactactacaggcctgatctcaaaagggcagctctggcaagattgagcgctgtcaataggagcctcagagtagctaagtctggtgtgaagaagaggaacagacaggctgtgaaggtccccagcaggaagtgaatttagaagagttaaattgcattctaaatttcttccatcctttccccattttgtagtttgtgttccagaactcaattctagattttctagttttgtttggagaggcaatttattgtgttttcaatatacaacaaccggaactactatgttatagctttcaacaactggtttggtttttttttctaaaaaaaaaaaaaaaaaaagaaaaaaaaaaagcggccgct

SEQ ID NO: 10757 - DNA, 352 bp, Glycine max
  Clone ID: LIB3039-016-Q1-E1-B10
gaattcagagagagcgagacggcagcacgcgcaaaaatggtgaagtttctgaaaccaaacaaagccgtcatcgtccttcagggacgctacgccggcaaaaaagccgtgatagtgcgaaccttcgatgaaggcacgcgcgagcgcccctacgggcactgcttggtggcagggataaagaagtaccctgcgaaggtgatcaagaaggattcggccaagaagacggccaagaagtcgcgtgtgaaggcgttcgtgaagctcgtgaactaccagcacctcatgcccacgcgctacacgctcgatgtcgatttgaaggacgcggttacccccgacgtgctccaagccaaggataaga

SEQ ID NO: 10758 - DNA, 364 bp, Glycine max
  Clone ID: LIB3039-016-Q1-E1-B12
gaaggtgcaagagtttgctgtgagctataagctagtttatcgtgaggagaatatgaagttgtttgttttctttgttgctgcagtagttttggtagcatggccatgccatggcgcaggctaccaaaggttccctctccgaatgaaaactggctatggtgagcgttcttcggaggtaaaatgcgcaagttttaggcttgctgtggaagcacacaacatccgagcctttaaaaccattcctgaagagtgcgttgaaccaacaaaggactacattaatggcgaacaatttagattagactctaaaacagttaaccaacaagctttcttttatgctagtgaacgcgaagtccatcacaacgacatattt

SEQ ID NO: 10759 - DNA, 382 bp, Glycine max
  Clone ID: LIB3039-016-Q1-E1-B2
ggtctcgtggaagtgtaagcaagcaaaaccctagcggcgcctgctttctttgttcgtgttttgcatcaggatggagtctcaggtgaagcacgcacttgttgtcaaagttatgggtcgtactggatccagaggacaagtgacccaggttagagtgaagtttttggatgatcagaaccgtcacatcatgaggaatgtgaaaggacctgtgagagaaggagacattctcaccctactcgagtctgaaagggaagcaagaagattgcgctagatggtctcttttttttggcttgcctccaaattcgaacaaaagcaatatttttcttgatatttatggtagttagtcggtgctaaaggggttatagcaccctatcttattgttttg

SEQ ID NO: 10760 - DNA, 370 bp, Glycine max
  Clone ID: LIB3039-016-Q1-E1-B3
gatcctttgtattctattcttcaagattcaggtactgcgtgtcggaagcagacacagaattgctcgtacgaagcaaacccgctcgtaagtccacaggaaggaacgctcctatgaagcagcttgcatacaaggctgcacgtaagtctgcaccaactactggtggtgtgaataagccccatcgttatcgtcctggtaccgttgctcttcgtgagattaggaaataccagaagagtaccgagcttttgatccggaagctccccttccagaggctggttcgtgaaattgctcatgacttcaagactgatctgcgtttccagagccacgccgtgcttgcattgcaagaagctgctgaggcataccttgttgggct

SEQ ID NO: 10761 - DNA, 375 bp, Glycine max
  Clone ID: LIB3039-016-Q1-E1-B4
gatcttttgcgttagggcactcaacattttacactcttttcttcttctcgttgttgcttcgctgttgaatcatggatcagaaggtcgatttcagcgctccccattccatgggaaccactatcatcggcgttacttacaacggcggtgtcgttctcggagccgactctcgaaccagcaccggagtgtatgttgccaaccgagcatcggacaaaatcactcagctcactgataatgtatacgtgtgtcgctctggatcggctgctgattctcagattgtctctgattatgtgcgttacttcctccatcaacacacaatacaacttggacaacctgcaacagttaaagttgctgcaaaccttgtccgacttctctcat

SEQ ID NO: 10762 - DNA, 368 bp, Glycine max; identical to SEQ ID NO: 9110
  Clone ID: LIB3039-016-Q1-E1-B5

SEQ ID NO: 10763 - DNA, 384 bp, Glycine max
  Clone ID: LIB3039-016-Q1-E1-B6
gacacttcaaaatcctctagtaacccttcttttctctctctctctctcgtgttctgagctgctagaagcaatggagaggaaaagaagccatgcttctttcaccatgtttgcaatgcttgttggattgctctctcagagccttgtcattcctgtaatatccaccactgttgcagatcagaagaactactacaccccagatccacatgctggaagtccccccacaggtttctccgattctctgtgctcacacaatagtagtcctccatctcatggccatgggagctctccaccctcacatcacaatagtccaagtactccatcaacaccctcaggtggaaactgtggatcatcacccccacaacatcatgatccaacaccctcaac

SEQ ID NO: 10764 - DNA, 373 bp, Glycine max
  Clone ID: LIB3039-016-Q1-E1-B7
ggtaataattcttataacacaacacaacccatggccaccacctccgcattcctcctccttcccctcctcctgctgctccacctcgccatcgccgctcacggcatcggcatcaactacggcacgctcggcgacaaccttccaccgcccgcggcggtggcgaacttcctgaagacgaatacgaccatcgaccgcgtgaagatctacgacgtgaacccggacatcctgcgggccttcgccggcagcggcatctccgtgacggtgaccgcccccaacggcgacatcgccgccttaaccaaaatcgactcggcgaggcagtgggtggcgacgcacatcaaaccctttcaccctcagaccaaaattaattacatcctcg

SEQ ID NO: 10765 - DNA, 359 bp, Glycine max
  Clone ID: LIB3039-016-Q1-E1-B8
ggaacttctcacgttcatttctacacatccctagctctgtcgttccgtcgttgacgatggcgtttcgggtgcgaagccctgacctccgctctctctttcttctctctctcttgtccatcgcttccgccaatgtcttcttcgaagagcgtttcgatgacgggtgggaaaatcgatgggttaaatcagattggaaaaaagatgagaacgtggctggggagtggaaccacacctctggtcaatggaatggagacgctaatgacaaaggtattcaaaccagtgaggattacagattctatgctatttcagctgagtaccctgaattcagcaacaagggtaagacactagtccttcaaatttcc

SEQ ID NO: 10766 - DNA, 383 bp, Glycine max
  Clone ID: LIB3039-016-Q1-E1-B9
aagacgacagaagggggggcgaggtagccagagagtgatacaatacagagtgcgttgttgctccttcgccacaactccctgccaacatgggtatctccagagattctatgcacaagaggcgtgccactggtggcaagaagaaggcatggaggaagaagagaaagtatgagcttggtcgccagcctgctaacactaagctgtcaagcaacaagacagtcaggaggatccgggttagaggtggaaatgtgaagtggagggcactgagattggatactggaaattactcctggggaagtgaagctgtaactcgcaagactcgtatactagatgtggtttacaatgcctcaaacaacgagcttgtgcgtactcagactcttgtaaaa

SEQ ID NO: 10767 - DNA, 373 bp, Glycine max
  Clone ID: LIB3039-016-Q1-E1-C1
gagtttcgactttgaagccctatctgccgcgacgcgacttcctccgactaggcaaccagagtgcttataaaaggaatagtagtaagcacattcatctcccctagatatgaactcagttgcaaggcgtttaccaagcttagtcagacattcaggtttcacacctgaacccttcaataatgggcatcatcaaatgcagcagctccagcaatgcagaggcataagagtgaaggtcatgggtgggaacttggaagcagcattgggattgatgcagcgtaagatgcaatcaagtgggattgagaggatgataaagcaagaacaaagattccatatcaaaaactctgagaagcgtgttttagcccaaaagaacttggag

SEQ ID NO: 10768 - DNA, 381 bp, Glycine max
  Clone ID: LIB3039-016-Q1-E1-C10
ggcacaagtgagtttgttgatcgagataactagaaacagtgtgatgaaaatgaaggtccttgttttcttcgttgctacaattttggtagcatggcaatgccatgcgtacgatatgttccctctccgaatggaacactggcaatggtgcccttattccggaggtaaattccccaatttggaggcttgctgtgaaagcacacaccatctttggctttgaaacaatccttaaaaattcctttaaaccaccaatggatacattcaatgcgaacaatatatattaaactccaaaacactttaccaacaagcctacatttatgccagagacatccaaatctatctcacagagacatatgtgttcactatagatggcaccgtattctc

SEQ ID NO: 10769 - DNA, 357 bp, Glycine max
  Clone ID: LIB3039-016-Q1-E1-C11
gggtcctcttaactttggaggagaagaaaatcccttacaaactccacctcatcgatctcagtaacaaacccgaatggtttttgggtgtgaatcctgaagggaaggtgccagtggttctttttgatggcaaatgggtggctgattctgatgtaattgtggggatactagaggaaaagtacccagaaccctctctaatcactcctcctgaatttgcctccgtgggatcaaagatatttgggtcttttgtgagttttctgaagagcaaggatacaaacgatggaactgagcaagcattggttgctgaattgagtgccttggatgaacatctcaagacccatggtccatacattgctgggg

SEQ ID NO: 10770 - DNA, 357 bp, Glycine max
  Clone ID: LIB3039-016-Q1-E1-C12
caccaaacaaaacagtaacaccacacagccatgacagacagggtgtacccatcggccaagcccgccgcggttaacggcgccgccgccaacccatctttcccggcgactaaggctcaactttacggcgccacacgccccacctaccgccctcagccccaccaccggcgccggagcaagcgccggtgctgctgcaccttcttcttctggctgatcctcaccgttctgatcctcctcctcctgatcggcgtcggcggcacggtgttctacctcctctaccgcccccaccaccccaccttcaccgtgacgtcgctgaaactctcttacctgaacctcacctcctcctccaacatccttaac

SEQ ID NO: 10771 - DNA, 386 bp, Glycine max
  Clone ID: LIB3039-016-Q1-E1-C2
ccatgtacatattcaaaatgtttcaatctctactcctcctgaatccccttatactgttggcatagtgccagattcttctgataatgtgtgtatagaagattgtattgttgccatgggatttgatgcaatttctctcaaaagtggctgggatgagtatggcattgcttatggaaggcctactgagaatgtacacatcagaagggtgcaacttcatgcattttctggctctgctcttgcatttggcagtgacatgtctggtggcatttcaaatgttctagtggagcatgctcatcttttcaactcaaatagtggcattgagttcagaaccaccaagggaagaggtggttatatgaaagaaattgttatgtcagacatacaaatggaga

SEQ ID NO: 10772 - DNA, 386 bp, Glycine max
  unsure (1)..(386): unsure at all n locations
  Clone ID: LIB3039-016-Q1-E1-C3
gagacacanaataaaccaacgtattctctttctctcttcaatggccggaatccgcttgcagccggaggactctgacgtctcccaacaatcccgcgcggtggctctctccgccaccgatctggtctccgacgacgaccgctccgtcgccgccgactcttggtccatcaagagcgagtacggaagcactctggacgacgaccagcgccatgctgacgccgccgaagctctctccaacgccaacctccgacctccctccgattacagttctgacaaggatgaacctgattctgaagcagtcacatccatgctgggatttcagagttattgggattctgcatatgctgacgagctcacaaattttcgtgaacatggtcatactggtgaag

SEQ ID NO: 10773 - DNA, 389 bp, Glycine max
  Clone ID: LIB3039-016-Q1-E1-C4
atgattcggagccaaagaagagaagaaagaatgagacaacttcaagtttgcctaaagagaagcaatctgctgcagctaagactggcaagaagggggttgataaaaaagcttcaggtgcttcccttttcatctcatttgggccaggatcctctctgccttcaaattcggatcttaccacactgtatggtaagtttggagctctgaatgaatcagaaacatctatgctctctagtgattgcactgctcgtgtgttcttcctgaaagcctctgatgctgaaaaggccttgagccattcacagaacatgaacccctttggctcttccgaagcctctttcagacttgagtatctttctgctggttccaagtctgaaaaatccaagtttaaagct

SEQ ID NO: 10774 - DNA, 379 bp, Glycine max
  Clone ID: LIB3039-016-Q1-E1-C5
gagagtggtggagtgtgcagaagagcgtcgcagtcgcaaccctaatcagaagaagcgcagcttcaagcgagtgacagccaccagccatgggtcgtatgcacagccgcggtaagggtatatcctcttctgctttgccctacaaaaggacacctcctagctggctcaagatctcttcgcaagatgtcgaagaaaatatctgcaagtttgcgaagaaaggtttgaccccgtctcagattggtgtcattctcagagattctcacggtattgctcaggtcaatagcgtcactggcagcaaaatccttcgcatcctcaaagctcacggacttgcgcctgaagttccagaggacctgtaccatttgattaagaacgcagtttcaat

SEQ ID NO: 10775 - DNA, 383 bp, Glycine max
  Clone ID: LIB3039-016-Q1-E1-C6
gattgttggcttgtgctctgctcgtgcctctagggttatcatatctccatttccatttcctctctctcagtttccaagaatcttaagctatgggaaagtcttacccaaccgtgagcgctgattaccagaaggccgttgagaaggcgaagaagaagctcagaggcttcatcgctgagaagagatgcgctcctctaatgctccgtttggcatggcactctgctggaacttacgacgtgagctcgaagaccggtggtcccttcggaaccataaagcacccctccgaactcgctcacggcgctaacaacggtcttgacatcgctgttaggcttttggagccactcaaagcggagtttcctattttgagctacgccgatttctaccag

SEQ ID NO: 10776 - DNA, 375 bp, Glycine max
  Clone ID: LIB3039-016-Q1-E1-C7
gatctcaatttcttttctctttgtcgcaaagagaagagatctgcctcctttttatcaaatctatctcttcttcaagaatagttgaaaatggggctgtctttcaccaagttgttcagccgactgtttgccaagaaagagatgcgtatactgatggtgggtctcgatgctgcgggtaagaccaccattctgtacaagctcaagcttggagagattgtcaccaccattcccaccattgggtttaatgtggaaactgtggaatataagaacatcagcttcactgtctgggatgttggaggtcaggacaagatccgtcctttgtggagacattacttccaaaatacacaaggacttatttttgtggttgatagcaatgac

SEQ ID NO: 10777 - DNA, 383 bp, Glycine max
  Clone ID: LIB3039-016-Q1-E1-C8
ggccgataccaagccagctgtttcactcttttctctctttccctttctattatctctccaacttcactccttttattcccttatcacttcttagttctttccttatcctttcgctatccagacatgtaatctctcctttaccaagttttgttttactatttgatcggatcggatcggatcttgctttcgccattaattactcatggagatccgtgccgatgcagataccagctccttttcaagtttgttcgcagctgtgtcatatggatttacatcaatggccatggtttttatcaacaaggctgttcttatgcagtatgcatattcaatgactctcctcactctgcagcaattggttaccaccttgcttattcactttggta

SEQ ID NO: 10778 - DNA, 395 bp, Glycine max
  Clone ID: LIB3039-016-Q1-E1-D1
ggcacaagtttgttgagatagctagaagcaataagatgaaaatgaaagtgcttgttttgtttgttgctacagttttggtagcatatgaatgccatggctcagactaccagaagttccctctccaaatgaaaactgggtttggtgggcaatacagcaatgaggtggcatgtgccagttggaggcttggcgtggaagcaaacaacgtagtcaagtggcaaactgttcctgcagcttgcggagagtacatagctgactacgttctaggagaccaatatagatcagattccaaaacagttaaccaacaagcttatttctatgctaaatccctcaaactcaccaacaaagatgtctttgtcttggacgttgacgacactactctctctaatctccagtat

SEQ ID NO: 10779 - DNA, 370 bp, Glycine max
  Clone ID: LIB3039-016-Q1-E1-D10
ggagcagcgcaagtgataagaaagggaagaaatatggggtggaaatgtcatctagcccccaattcggataagagaagaatctagaaaccagaataccattggacctcgtttctccaacgtggctttttccaagcgctaaattgctactccaacactctgagccacgttccccatctctgccactgccatcagcattctcaacacctcctccctcactcactcatcagtggcatcaacaatatcagcaatggccatgatcaacgccaaatgcgtcaacccaaagttccccaaccccaccaagctcgtaccatcaaaaccttcccttcaggtcaaccttccaaagggcctaatagcctcacccgataacagc

SEQ ID NO: 10780 - DNA, 368 bp, Glycine max
  Clone ID: LIB3039-016-Q1-E1-D11
ggtaatccttacgctctctcactcacaaacgcacactgaattcaaaaacatcgaaagagagaggcatggccgagcaaaccttcatcatgatcaagccagatggcgttcaaagaggccttattggcgagattattagcagatttgagaggaagggtttttacttgaaagggttgaaactcgttactgtggaccgtccttttgctgagaagcactatgctgatttgtctgcaaagcctttctttagtggtttggtggattacattgtctctggccctgttgttgccatgatctgggagggtaagaatgttgttacaactggccgaaagattatcggagccacaaacccagctcaatctgagcctggaact

SEQ ID NO: 10781 - DNA, 378 bp, Glycine max; identical to SEQ ID NO: 10181
  Clone ID: LIB3039-016-Q1-E1-D12

SEQ ID NO: 10782 - DNA, 386 bp, Glycine max; identical to SEQ ID NO: 10250
  Clone ID: LIB3039-016-Q1-E1-D2

SEQ ID NO: 10783 - DNA, 369 bp, Glycine max
  Clone ID: LIB3039-016-Q1-E1-D3
gacagcatatatatcaataatctattttatactatacctacattttgataattttctttgtagttgatagccatggctacccgtggaaagcttgaggttgacattgatctcaagtccaacgcagacaagtactggcaaacccttaggaattctactgaaatattccctaaggccttcccacatgattacaaaagcattgaggttcttgaaggtgatggcaagtctcctggttctatccgccacataagttatggtgaaggttcaccacttgtgaaatcatcctttgagaagattgaggctgttgatgaggaaaagaaggtagtgtcgtacactatcattgatggggaactcctccagcactatacaaca

SEQ ID NO: 10784 - DNA, 376 bp, Glycine max
  unsure (1)..(376): unsure at all n locations
  Clone ID: LIB3039-016-Q1-E1-D4
gaccacgaatcccctcaacttttcncatacttactcatactactaaaatggcctccttccgtgtgcctctcctatcatttttcttcattgctttgtcacttttatccattggcaatgtccaagccagtagaaaacttctggcacccacattgcccaatatgaacaattctcctcctcgcgtgatttttcctccattcccaccagtaacagactggccagagtataggttgccttcacccttaactcgcacacttccacccttctcatcaccttccacaactaccaatccttgagttgttgcattatttgctacaagtatatatgctccacagaccacagttgattaatgtagcgtaatcaatgttgcttagcatgt

SEQ ID NO: 10785 - DNA, 367 bp, Glycine max
  unsure (1)..(367): unsure at all n locations
  Clone ID: LIB3039-016-Q1-E1-D5
ggcacaagtgagtttgttgatcgagataactagaaacagtgtgatgaaaatgaaggtccttgttttcttcgttgctacaattttggtagcatggcaatgccatgcgtacgatatgttccctctccgaatgaacactggctatggtgcccgtactccggaggtgaaatgcgcaagttggaggcttgctgtggaagcacacaacatctttggctttgagaccattcctgaagagtgcgttgaagcaacaaaggaatacatccatggcgaacaatatagattagactccaaaacagttaaccaacaagcttacttttatgccagagacctcgaagtccatcncaaggacacatttgtgttcagtatagat

SEQ ID NO: 10786 - DNA, 384 bp, Glycine max
  Clone ID: LIB3039-016-Q1-E1-D6
ggcactcattctttcattctcattgccgtcacagagagagacaagaaacaatgaagtttaaccatagggtttcctcaagccgtcgcaagagccgcaaggctcacttcaccgctccgtcgagcgtgcgccgcgtcctgatgagcgcgcctctctccaccgatctccggtcaaagtacaacgtgcggtccattccggttcgcaaggacgacgaggttcaggtcgtgaggggaacctacaagggccgcgagggcaaagtggtccaggtctatcgccgcaagtgggtcatccacatcgagcgcatcacccgcgagaaggttaacggctccaccgttaacgttggcattcacccttccaaggttgtcgtcaccaagctccgaatggaca

SEQ ID NO: 10787 - DNA, 386 bp, Glycine max; identical to SEQ ID NO: 10250
  Clone ID: LIB3039-016-Q1-E1-D7

SEQ ID NO: 10788 - DNA, 364 bp, Glycine max
  Clone ID: LIB3039-016-Q1-E1-D8
ggagcagcagaatcttcaggccaagccaggtaagcaagcacaacacaaccccgaaatggcttctgcttctgttcccatggctttctcgctgagctctgttatcaacaacaacaagccttcatccgaagccttcttcaggccactacccctacggcaaccaaagaggaccctcttcaccacaaaggcagtgtcaaactccaaggctcaaatcaatgcatctttgaaggagaaggcagttgcaggactcacagcagcttctgtgacagcatctatggtggttccggaggtggctcatgctgctggatatgagttctccccttccctcaagaaccttctgctaagcatctttgctggtgggtttgtt

SEQ ID NO: 10789 - DNA, 355 bp, Glycine max; identical to SEQ ID NO: 8385
  Clone ID: LIB3039-016-Q1-E1-D9

SEQ ID NO: 10790 - DNA, 390 bp, Glycine max
  Clone ID: LIB3039-016-Q1-E1-E1
aatatttatttcaagtactggagatcaggcacagtcaatgagtggaaatggcgctatggcatttgatgtagagtacgcacgatggttagaagagcataatagacaaaccaatgagctaagggctgcaataaattctcatgctggagatattgaacttcgaaccattgttgacaatttcatgacacaatttgatgatatcctcaggctgaaaggtattgcagcaaaagctgatgttttccacattctgtcaggaatgtggaagactccagctgagaggtgtttcatgtggattggaggctttcgctcatccgaactactcaagcttcttgaaagtcagttggagcctttaaccgagcaacaattgatgggcatctacaacttgcagcagtc

SEQ ID NO: 10791 - DNA, 303 bp, Glycine max
  Clone ID: LIB3039-016-Q1-E1-E10
aggtcaacgtccaagacaaagacatctgtgttggtgagtttgatggatttagcatagaaataagcttgttgctacaattttggtaacatatgtgtgctctgggtcacagtactagaagttccctcacgaactgaccactgggtttgctgggcaatgtaccatcgcggtgggatgtgccacttggatgattggtcttcaagcgtacaatgtactcatgtgacactttgtgcctgcagcttgcggatagtacatatctgactaagtcctaagagatcagttgagatcagattcgactacagttat

SEQ ID NO: 10792 - DNA, 331 bp, Glycine max
  Clone ID: LIB3039-016-Q1-E1-E11
gctgtaaaaccctagataaaccctaatagtcacaccgtcccttcaaatatggccaaaaagaaagtctctcaatctcacgaccccaaagaatcccaaaacgtaaagcaacccttgccaatggctactccaaccgatggctcctcagaactgcagattcagaacctcaaaaacctcaacgccgtccttctcaaggagaagaaggaggtggaaaagagcgttgaaacgttaacagaggaaaaagatggtgttcgtaaggctttgaatgttcttcagaaggagttagaggataagcagcacgagcttgatgaagctgttagagtgaggagtgaga

SEQ ID NO: 10793 - DNA, 380 bp, Glycine max
  Clone ID: LIB3039-016-Q1-E1-E12
ggttgtgtgagtgaagaagcagagggagtagcggcattaaaaatgcagatcttcgtgaaaactctgacagggaagactataaccctcgaggtcgagagcagcgacaccatcgacaatgtcaaggccaagattcaagacaaggaaggcattcctccggatcagcagcgtttgattttcgccggaaagcagcttgaagatggaaggaccctggccgattacaacatccagaaggaatcaacccttcatctcgtcctcaggcttcgtggtggcatcattgagccttccctcatggctttggctcgcaaatacaaccaggacaagatgatttgccgcaaatgctatgctcgtctgcatcctaaggctgtgaactgccgtaagaa

SEQ ID NO: 10794 - DNA, 384 bp, Glycine max
  Clone ID: LIB3039-016-Q1-E1-E2
gagcagagatcattgtccattatcacagaaatgggtgaaaacaaggaagaagaaaagaaagaagagaccacagaggaaaagaaggaaaaagagcctccagagatagtgctcaaggttgatatgcactgtgaagcttgtgcaaggaaagttgcaaaagcattgaaaggatttgaaggaatggaggaggtgactgcagatagcaaggcaagcaaagtggtagtgaaaggaaaggcagcagaccccataaaggtgtgtgagagactacaaaagaaaagtggcaagaaagtagagctcatttcacctttgcctaaacctccagaggagaacatagaagaagaaatcaaagaagaaccgcagccagaggagaaaaacgacgagctccct

SEQ ID NO: 10795 - DNA, 386 bp, Glycine max
  Clone ID: LIB3039-016-Q1-E1-E3
ggaagaacaagtcttgcattgggtggagcatacttagaaacagcaactatgtctctcatgcagcttactagctcccctgttggctcactggtccgtttcattgtaatatttgctttatggtacagaaccatggctttggccaagttgccaccaaacgcttcatcagttccagcagttttagcgtttggagattccatcgtggacccaggcaacaacaacaacataaaaacattgatcaagtgcaacttcccaccttatggaaaggattttcagggaggaaacccaacgggtcgattttgcaatggaaaaattccttctgacttaatagttgaacaattgggtattaaggagtatttgcctgcatatttggatccgaatctcaaatc

SEQ ID NO: 10796 - DNA, 359 bp, Glycine max
  Clone ID: LIB3039-016-Q1-E1-E4
gaaggtgcaagagtttgttgtgagctacaagctagtttatcgtgaggagaatatgaagttgtttgttttctttgttgctgcagtagttttggtagcatggccatgccatggcgcaagctaccaaaggttccctctccgaatgaaaactggctatggtgagcgttcttcggaggtaaaatgcgcaagttttaggcttgctgtggaagcatacaatatccgatcctttaaagccattcctgaagactgcgttgaaccaacaaaggactacattactggcgaacaatttagatcagactctaaaacagttaaccaacaagctttcatttatgctagtgaacgctaagtccatcacaacgaca

SEQ ID NO: 10797 - DNA, 414 bp, Glycine max
  Clone ID: LIB3039-016-Q1-E1-E5
agcgactgagagaagagaagagaattgtgatggggggaggacagggtcacggcacaacctacaaaggtgttaccattcatcagccaaagcgctggcacactatcaccggcaagggtttgtgcgcggtcatgtggttttgggtattctacagggcaaagcaagatggtcctgttgtattgggctggagacatccttgggagggtcaccatgatgatcatggcaagggccattagcattccttaggcatgagctccaagaacaggaagaacagaatttgaagtgtctgttgctgtggatgtgttgttcaaatgtttactttgatcaattcaataaatttggctgtaaaataagagatttctttttgcatgatttcatgagcattagatatgtctgtgcaccttacctgctaactgg

SEQ ID NO: 10798 - DNA, 384 bp, Glycine max
  unsure (1)..(384): unsure at all n locations
  Clone ID: LIB3039-016-Q1-E1-E6
ggcacaagtgagtttgttgatcgagataactagaaacagtgtgatgaaaatgaaggtccttgttttcttcgttgctacaattttggtagcatggcaatgccatgcgtacgatatgttccctctccgaatgaacactggctatggtgcccgtactccggaggtgaaatgcgcaagttggaggcttgctgtggaagcacacaacatctttggctttgagaccattcctgaagagtgcgttgaagcaacaaaggaatacatccatggcgaacaatatagattagactccaaaacagttaaccaacaagcttacttttatgccagagacctcgaagtccatcncaaggacacatttgtgttcagtatagatggcaccgtactctctaa

SEQ ID NO: 10799 - DNA, 385 bp, Glycine max
  Clone ID: LIB3039-016-Q1-E1-E7
tttcatcttctgattctgattatttttttctttattttgttcagatggagaaggtgagaatggagattgatgaaaagaggaagaggcaagcgaggaggttcatcgaggctattgaagttggagtgatgaagaagctgaaggcgaaggaagaggaaatagagaaaatcggaaaactgaattgggcgttggaagagaaagtgaagcatctttgcatggagaatcaggtgtggcgcaacttagcggaagcgaacgaagccacggcaaatgctctacgctgcaatttggagcaagttttggcgcagtgtggcggaatcgcggcggaggaagaccgcggcggcgcaaccgtgtgcggcggcgcggagatggacgacgcggagtcctgctg

SEQ ID NO: 10800 - DNA, 376 bp, Glycine max
  Clone ID: LIB3039-016-Q1-E1-E8
ggcacaagtgagtttgttgatcgagataactagaaacagtgtgatgaaaatgaaggtccttgttttcttcgttgctacaattttggtagcatggcaatgccatgcgtacgatatgttccctctccgaatgaacactggctatggtgcccgtactccggaggtgaaatgcgcaagttggaggcttgctgtggaagcacacaacatctttggctttgagaccattcctgaagagtgcgttgaagcaacaaaggaatacatccatggcgaacaatatagattagactccaaaacagttaaccaacaagcttacttttatgccagagacctcgaagtccatcccaaggacacatttgtgttcagtatagatggcaccgta

SEQ ID NO: 10801 - DNA, 375 bp, Glycine max; identical to SEQ ID NO: 9827
  Clone ID: LIB3039-016-Q1-E1-E9

SEQ ID NO: 10802 - DNA, 380 bp, Glycine max
  Clone ID: LIB3039-016-Q1-E1-F1
ggttgtctgaaccatacaaaggaattggcgattgtttcactcgaaccatgaaggatgaaggggtgattgctctttggagaggaaacactgctaatgttatcagatacttccctactcaggctctgaattttgcttttaaggattatttcaagaggcttttcaacttcaaaaaggataaagatggctactggaaatggtttgctgggaatttagcatctgggggggctgctggggctccctccctcttgtttgtctattctttggactatgcccgaacacgtttagcaaatgatgcaaaggctgcaaagaagggtggtgagaggcagttcaatggcttgattgatgtttacaggaaaaccattaagtctgatggcattgct

SEQ ID NO: 10803 - DNA, 341 bp, Glycine max
  Clone ID: LIB3039-016-Q1-E1-F10
gatactgaaaacggatggatgagaagtactaagcaacttcttctgcacgagaaattccttcatcgccaaacacaatgaaggaactgggcgtggttgcaatcctgttgtcaatagagttctttgacgtgattgtctacactgtaagcaaagcagccatgaagaagggcatgaatgactttgtgtttgtcatgtactccaatgccttcgcaacttgcctccttcttcccataacttttatcttttataggaaaagagctcttcctccactcacatatttcatagttggccaattatttattaatggcttcttaagttgcagtgttcagatgctcaggtttttt

SEQ ID NO: 10804 - DNA, 355 bp, Glycine max
  Clone ID: LIB3039-016-Q1-E1-F11
ggtaacagtgtgaaagagagggggtcccaagtggaatttattgtttctacctatcgcatgcatccgttttgttttctttttattttagatgtggtgttgtgaaatctaatggcatgcttagaaatgtacaacaactcagagcacaacaagaacaacaagggtgataatcatcaccatcatcatcaatgcgctccaatgagcccaagaatctctttctcaaatgattttgtggatgtgcaacaagccatgaagctgcaagaacaaagaggtggctcatccagattagacacgccagtgtcttcagacttcgagttttcagtggcaaactacaccatgatgagtgctgatgagcttt

SEQ ID NO: 10805 - DNA, 382 bp, Glycine max
  Clone ID: LIB3039-016-Q1-E1-F12
ggcacaagtgagtttgttgatcgagataactagaaacagtgtgatgaaaatgaaggtccttgttttcttcgttgctacaattttggtagcatggcaatgccatgcgtacgatatgttccctctccgaatgaacactggctatggtgcccgtactccggaggtgaaatgcgcaagttggaggcttgctgtggaagcacacaacatctttggctttgagaccattcctgaagagtgcgttgaagcaacaaagggatacatccatggcgaacaatatagattagactccaaaacagttaaccaacaagcttacttttatgccagagacctcgaagtccatcccaaggagacatttgtgttcagtatagatggcaccgtactctct

SEQ ID NO: 10806 - DNA, 388 bp, Glycine max
  unsure (1)..(388): unsure at all n locations
  Clone ID: LIB3039-016-Q1-E1-F2
ggcacaagtgagtttgttgatcgagataactagaaacagtgtgatgaaaatgaaggtccttgttttcttcgttgctacaattttggtagcatggcaatgccatgcgtacgatatgttccctctccgaatgaacactggctatggtgcccgtactccggaggtgaaatgcgcaagttggaggcttgctgtggaagcacacaacatctttggctttgagaccattcctgaagagtgcgttgaagcaacaaaggaatacatccatggcgaacaatatagattagactccaaaacagttaaccaacaagcttacttttatgccagagacctcgaagtccatcncaaggacacatttgtgttcagtatagatggcaccgtactctctaatatt

SEQ ID NO: 10807 - DNA, 377 bp, Glycine max
  Clone ID: LIB3039-016-Q1-E1-F3
ggaacttcccacgttcatttctacacatccctagctctgtcgttccgtcgttgacgatggcgtttcgggtgcgaagccctgacctccgctctctctttcttctctctctcttgtccatcgcttccgccaatgtcttcttcgaagagcgtttcgatgacgggtgggaaaatcgatgggttaaatcagattggaaaaaagatgagaacgtggctggggagtggaaccacacctctggtcaatggaatggagacgctaatgacaaaggtattcaaaccagtgaggattacagattctatgctatttcagctgagtaccctgaattcagcaacaagggtaagacactagtctttcaattttctgttaagcacgaacagaag

SEQ ID NO: 10808 - DNA, 391 bp, Glycine max
  unsure (1)..(391): unsure at all n locations
  Clone ID: LIB3039-016-Q1-E1-F5
gatagcaaaatcgtttctccaatttaatcaccattgtacaacccaattcccttcgtcgttttcgattaagagagcaatggcacgtaccaagcaaaccgctcgcaagtccaccggaggaaaggctccgaggaagcaattggcaaccaaagccgctcgcaagtcagccccggcgaccggcggagtgaagaagccccaccgcttcaggccaggaacggtggctctgagggagattcgaaagtaccagaagagcaccgaacttctgatccgaaaactcccattccagaggctcgtcagagaaatcgctcaggatttcanaaaccgatctccgctttcagagcagcgccgtttcggctcttcaggaagccgcggaggcttatctcgttggactctt

SEQ ID NO: 10809 - DNA, 376 bp, Glycine max
  Clone ID: LIB3039-016-Q1-E1-F6
gaccacagaatcaaacaaaacaaaaccccttcccttccacatacactcttctccaatctcaccccaaaaaaacttgcaacaaaccaaaaaccatgcttgatgaatcagtctcatccaccccaacattcttgggcagcctgtacagctggttcacccccactgtcttcttcctcctcctccaactagtcattggcaccattttcatcatctcaaaccttgccaacacccacaaacaccaacaacaagaaccacaacaagcacatgactttccacaccaccatcttcccagattcccttccatgctccaaagactcaaatccatcaacttttacccttcttcccctttcagatcccaagaccttcaaaaccctcattt

SEQ ID NO: 10810 - DNA, 383 bp, Glycine max; identical to SEQ ID NO: 10345
  Clone ID: LIB3039-016-Q1-E1-F7

SEQ ID NO: 10811 - DNA, 353 bp, Glycine max
  Clone ID: LIB3039-016-Q1-E1-F8
gacaccaaaatttgccaattgccatttcaatccccagtttcttcttcaacgtcctcttacgagcagatcccaattctccttcccagtttcaaaccctaattccctcattcccatggcctcagaagagcccactgtcgcggtggaacccgctcccgaacctgccaccgccgagcctcccccggaggagaaggaggagcccaaacctgaagccaaggctaagaaaaccaaggaacccaaacctaaaaaggtttccagaccacgcaaccctcccactcatccttcctacgaggagatgattaaagacgcaattacctcgctgaaggagaaaaccggttcgagccaacacgcgattg

SEQ ID NO: 10812 - DNA, 385 bp, Glycine max; identical to SEQ ID NO: 8834
  Clone ID: LIB3039-016-Q1-E1-G1

SEQ ID NO: 10813 - DNA, 367 bp, Glycine max
  Clone ID: LIB3039-016-Q1-E1-G10
gggcacaagtgagtttgttgatcgagataactagaaacagtgtgatgaaaatgaaggtccttgttttcttcgttgctacaattttggtagcatggcaatgccatgcgtacgatatgttccctctccgaatgaacactggctatggtgcccgtactccggaggtgaaatgcgcaagttggaggcttgctgtggaagcacacaacatctttggctttgagaccattcctgaagagtgcgttgaagcaacaaaggaatacatccatggcgaacaatatagatcagactccaaaacagttaaccaacaagcttacttttatgccagagacctcgaagtccatcccaaggacacatttgtgttcagtataga

SEQ ID NO: 10814 - DNA, 358 bp, Glycine max; identical to SEQ ID NO: 7967
  Clone ID: LIB3039-016-Q1-E1-G11

SEQ ID NO: 10815 - DNA, 278 bp, Glycine max
  Clone ID: LIB3039-016-Q1-E1-G12
gcatttagtcaaatttctgccaatttatctacattgaagtttcaggataacattgaactcttttgtcagacaaggcgcaatattaataccgttcttaatgagtatgtgatgtgaatattataaataagttcattattaatataatccaaatccattttgtttagagcttaatttgatgtgtattgccttttgaagtttgctcattaagtttgtgcagaatgagaacgatgcctggcataatgagccaaatgcccccttttcttgtttccatgaatgag

SEQ ID NO: 10816 - DNA, 386 bp, Glycine max; identical to SEQ ID NO: 10090
  Clone ID: LIB3039-016-Q1-E1-G3

SEQ ID NO: 10817 - DNA, 378 bp, Glycine max; identical to SEQ ID NO: 10755
  Clone ID: LIB3039-016-Q1-E1-G4

SEQ ID NO: 10818 - DNA, 412 bp, Glycine max
  Clone ID: LIB3039-016-Q1-E1-G5
cccacgcgtccggacgacagaaggggataacgttatccattaacaaggtcactgatttgtgcaaatgatgtctttgcagaggaccaagttgtttccttttttcattgtccttgtttccttcacatgtagtctctcccttgctatgtccagtaaccagttggagcagtttgcttcggaggaagaagtgtttcaactattccaagcgtggcagaaggagcataagcgtgaatatggcaaccaagaggagaaggcaaagaggttccagatattccaaagtaatttgaggtacatcaacgagatgaatgcgaagaggaagtcacctacgacgcaacatcgtttgggtctgaacaagtttgctgatatgagtcctgaggagtttatgaaaacctacttgaaagaaatagagatgccc

SEQ ID NO: 10819 - DNA, 381 bp, Glycine max
  Clone ID: LIB3039-016-Q1-E1-G6
ggcttaaattatcataaccctaacaatattcgttcggtcagtgtctgagagtagattgagcatcagaggaacgatgtcgaagaagaacaacctcgccaagagaaagaagcagtacgaattcgatctccaaagagagaaacaagagaagataaagaaagagcagaagctccatgcgaagaacaacaagatgaaagttgatggtagtgacaagaaaaagaaaggtgggagtggatttcaggtggggaagagaaaagtgaagaccaagttgactgcccttgctaaagctaaggctgcccaggcaatggagcttgacaaatgagcatgtccgccttgcaagttatttgcagcgatgaagagtttggcattttgttttcatgatga

SEQ ID NO: 10820 - DNA, 381 bp, Glycine max
  Clone ID: LIB3039-016-Q1-E1-G7
ggggagagaatagagaagagagatggatccagacgcgttggcaaaggcattcgtggagcactactacagcaccttcgacaccaacaggaacggcttagcgaatctctaccaggagggttccatgctcactttcgaagggcagaagatccaaggcgcttccaacatcgttgccaagctcacctccctcccttttcagcagtgtcaccactcaatctccaccgtctactgccagccctccggcgtcaacgccggcatgctcgtcttcgtcagcggaatacttcagctcgccggcgaacagcacactctcaagttcacccagatgtctcacttataccaacacctcagggaagctattatgtgttgaatgacatattccgttta

SEQ ID NO: 10821 - DNA, 380 bp, Glycine max
  unsure (1)..(380): unsure at all n locations
  Clone ID: LIB3039-016-Q1-E1-G8
ggcacaagtgagtttgttgatcgagataactagaaacagtgtgatgaaaatgaaggtccttgttttcttcgttgctacaattttggtagcatggcaatgccatgcgtacgatatgttccctctccgaatgaacactggctatggtgcccgtactccggaggtgaaatgcgcaagttggaggcttgctgtggaagcacacaacatctttggctttgagaccattcctgaagagtgcgttgaagcaacaaaggaatacatccatggcgaacaatatagattagactccanaacagttaaccaacaagcttacttttatgccagagacctcgaagtccatcncaaggacgcatttgtgttcagtatagatggcaccgtactct

SEQ ID NO: 10822 - DNA, 357 bp, Glycine max
  Clone ID: LIB3039-016-Q1-E1-G9
ggcagtttcaaattttcttttccttcactttcccgagaaaaaaataacacttttcactttcttcactacgttctcacttcgatatggctcgtacgaagcaaaccgctcgcaagtccaccggtggcaaggcgccacgtaagcagctcgccaccaaggccgctcggaagtccgctccggcgaccggaggagtgaagaagccccaccgcttcgggccgggaaccgtggcgctgagggaaatcagaaagtaccagaagagcaccgagcttctcatcaggaagcttccatttcagaggctcgtgagagaaatcgcgcaggatttcaagaccgatttgcgtttccagagcagcgctgtttccg

SEQ ID NO: 10823 - DNA, 380 bp, Glycine max
  Clone ID: LIB3039-016-Q1-E1-H1
gatagcgaaacagagagtggtttcagtgagtgatcggtgttcacttgatccttcataagtcgtcatcatcatcatcatcatcaccgttgattgaagaagatgccgatcagaaacatcgccatcggaaggcctgaagaggctactcaccccgacacgttgaaggcggggttggctgagttcatctccaccttgatcttcgtgttcgccggttcaggttccggcatcgcctacaacaagctcaccgacaacggcgctgccacccctgccggcctcatctccgcctccatcgcccatgcattcgccctcttcgtcgccgtctccgtcggcgccaacatctccggcggccacgtcaaccccgccgtcaccttcggcgccttcgt

SEQ ID NO: 10824 - DNA, 392 bp, Glycine max
  Clone ID: LIB3039-016-Q1-E1-H10
gaaggtgcaagagtttgttgtgagctataagctagtttatcgtgaggagaatatgaagttgtttgttttctttgttgctgcagtagttttggtagcatggccatgccatggcgcaggctaccaaaggttccctctccgaatgaaaactggctatggtgagcgttcttcggaggtaaaatgcgcaagttttaggcttgctgtggaagcacacaacatccgagcctttaaaaccattcctgaagagtgcgttgaaccaacaaaggactacattaatggcgaacaatttagattagactctaaaacagttaaccaacaagctttcttttatgctagtgaacgcgaagttcatcacaacgacatatttatattcggcatagataacaccgtactct

SEQ ID NO: 10825 - DNA, 384 bp, Glycine max
  Clone ID: LIB3039-016-Q1-E1-H11
gggatgagcatcctaagttgtggatggagctacatgtcaaaaacagggagaagcttctcacatcccttcgtcaacacctctccgactcttctcgttctctccatggcttcgtcctccttcaaggtggcgaggagcaaacgcgttacgacaccgatcacttggagctcttcaggcaagagagttacttcgcttacttgtttggagtcatagagcctggattctatgcagctattgacgttgcaactgggaattctatcctatttgctcctaggttaccttctgagtatgctgtttggttgggggagattaagccactctcctactttaaggaacactacatggttaccacgtgttgcttctcagatgaaattgaaagtgtattgc

SEQ ID NO: 10826 - DNA, 377 bp, Glycine max
  Clone ID: LIB3039-016-Q1-E1-H12
ggtgagttgagaggatcgtgagaggggcagtagccgagattccgtgagttgcaaaaatgaagacgattctttccaccgagaccatgaacatcccggacggcgtgagcatcaaagttcatgccaaggtcatcgaagttgagggcccccgcggaaaattggtgcgagacttcaagcatttgaatctcgattttcagctcattactgacgaaaacggtaaaagaaagctgaaaatcgacgcgtggtttggttctcggaaaacatccgccgccattcgcaccgccttgagccacgtggagaatcttatcaccggcgtcaccaagggctaccgctacaaaatgaggttcgtttatgcccattttcccatcaacgcaagcatc

SEQ ID NO: 10827 - DNA, 384 bp, Glycine max
  Clone ID: LIB3039-016-Q1-E1-H2
gggcattggagagattggtacacccccccaaaacaagccccaattatggctctgaatctttgtatctcacctaactgtaaatgggtttcatctcctgcttccttagatagtgcatcttctttgagatcttcacttggttcttgttttggtaacataaacattgctagtgtgagtttaagcactagtagaagtttgagtttgaggaggagtgggagtgttagtgtaagatctagtttggaaactacggggcccacagttacagtgggacaggtcactgaggttaacaaggataccttctggccgatcgttaaggctgccggggataaaaccgttgtccttgacatgtacacacaatggtgtgggccttgcaaagcgatggctcca

SEQ ID NO: 10828 - DNA, 377 bp, Glycine max
  Clone ID: LIB3039-016-Q1-E1-H3
gacactaaacaagttaaaagaagagcatcactgaactaacaaagcaaccctatgtcgaaggtggtttgtgtcaccggagccagcggcgccatcggatcatgggtggtcctactcctcctccagcgtggttacaccgtccatgccaccgtccaagatatcaaggatgaaaatgagacgaaacatttggaggaaatggaaggagcaaagagtcatctccatttttttgaaatggatcttcttgacatcgactccattgccgctgccataaagggttgttccggcgtaatccaccttgcatgtcctaacatcattggtcaagtcgaagatcccgagaaacagatattggaaccggcgataaaaggaacggttaatgtgtt

SEQ ID NO: 10829 - DNA, 357 bp, Glycine max
  Clone ID: LIB3039-016-Q1-E1-H4
gatgacttcatcatttaattgactcagctctcccctctctctcgcagtcccatccatctgaagcaagcattacagcaaaggaccaaaacccaaataaaacacaaatttcattttatttatttatttgtttattcatttatttttagaaaaagtggagagccatatggaatttgacgagcacgaggaccaagagcaagaagaggaggacgacgaggaggaaatgggattctcagtggcggcggcggcgagttacgactcgctgggaaacgccgcggtgaggtctaaaattagcggcggcgatggtgttgcggccaccgtgaattccggtcgcaaagggacggtgagatacagagaatg

SEQ ID NO: 10830 - DNA, 256 bp, Glycine max
  Clone ID: LIB3039-016-Q1-E1-H5
gactcaccacttcaaaacactcataacacaaagcacaaagcaaagctcatccttgagttaaaaaatggcagcagcttcttccatggctctctcatccccatccttggctggcaaggccgtgaagctgggcccatcagccccagaagtgggaagggtgagcatgaggaagaccgtcaccaagcaggtctcctcaggaagcccatggtacggcccagaccgagtcaagtacttgggcccattctctggcgagcccccg

SEQ ID NO: 10831 - DNA, 353 bp, Glycine max
  Clone ID: LIB3039-016-Q1-E1-H6
ggcttgttgttgtgtcaaccatggcgtcgtttgggtctctgaaatccaccattttcgaaaaagaagagagaaaacagcagtatcagtcgcacattcgaggcctcaatgcatacgaccgtcacaaaaaattcatcgacgactacggtaatgtttctcttacaaaatccttaaatcatttattattcactacctcttttttaaaaaataaaatataaatataaatttcctgtttcatgataaatgtcgttttgtttagggttgatggacaataaggaattgatcaaacttgtagctgctggtttggttggttccttataataataataatgtcctatagcaaatggatgatgaac

SEQ ID NO: 10832 - DNA, 317 bp, Glycine max
  Clone ID: LIB3039-015-Q1-E1-B1
ggcacaagtgagtttgttgatcgagataactagaaacagtgtgatgaaaatgaaggtccttgttttcttcgttgctacaattttggtagcatggcaatgccatgcgtacgatatgttccctctccgaatgaacactggctatggtgcccgtactccggaggtgaaatgcgcaagttggaggcttgctgtggaagcacacaacatctttggctttgagaccattcctgaagagtgcgttgaagcaacaaaggaatacatccatggcgaacaatatagatcagactccaaaacagttaaccaacaagcttacttttatt

SEQ ID NO: 10833 - DNA, 318 bp, Glycine max
  Clone ID: LIB3039-013-Q1-E1-B7
gacgattactaccaagtgaaaaagcaattaactaagcatatatagcgtgtaagacagtgagaaaaaaagtgttgtgtagagagaaatggctaggtggtgcatcttggtggttcttgcccttgtcgtggttgcaagtgccagaaacatgcccaatgacgcaggtttggaggaccagaagaacttcctcgggtatgggttctctggaattgggaacaatgggcctccccttggaagaattggttccgggtttgaaggtaataagggttggccttccgggctccgttgaattggaagaatccgttggcctaaccggctccg

SEQ ID NO: 10834 - DNA, 397 bp, Glycine max
  Clone ID: LIB3039-013-Q1-E1-B8
ggaatcggagggactgcagaagtcgcaacccaaccaaccatggcagcttctgatcccgacaagttgatggtcaaagctgataaactaacaagactcagtctcacgaggtggagtgcggattggaaaagtgctactgttctttatgagcaggcagctaatgggtttagagttgccaaggactatgagaatgctaaaatagcatatgagaaagcttcgaaaggacaagaaatgctttcttcaccttgggatgcggctaagcacatggaatccgctgctgctctcgcaaaggatctaagacactggcaagaagttgtggacttctatcgaaaggcatctgaattatatatggagtgtgggagaccacaacctgcatcagatgctcttgcaaagggagccc

SEQ ID NO: 10835 - DNA, 249 bp, Glycine max
  Clone ID: LIB3039-013-Q1-E1-B9
tgggaagacgaaaacatgggattgttgatttcaaccatgtcatctacagtggtacatgtaatgtccctagtgttcgtccagtctccaaaatcttcattatggaactacttaccaatgaaatatcttacctctaccatttcattcagcttaatcatcttgatctcagtaagtgaaatgatcaactcgaaggcttgctgtgcaatcaaaccacatctttggcattgagaacattcctgaggagtgcgttca

SEQ ID NO: 10836 - DNA, 400 bp, Glycine max
  Clone ID: LIB3039-013-Q1-E1-C1
ggtgctcactcatctatctattataaccaaacactcttcttcatattcttcttcttcttcttgttcttgttctatctgtgacgagcatcatggcctcgagagcagtgctattgttggctatgtgtgtgcttccggccatggttgtggccattcgcccagcaaagaaccctttttgcgtgaagggtcgcgtctactgtgacccttgccgtgctggttttgagacctcagcaaccacctacattgccggtgctgagattatgttgcaatgcaagagcagggttagcaacgaggttgtgtacaccaagaaggggtacactgactcaactggagcatacacaatgtacgtggacgaggatcacgcagattagatatgcagtggcaagcttgtaagcagccctca

SEQ ID NO: 10837 - DNA, 383 bp, Glycine max
  Clone ID: LIB3039-013-Q1-E1-C10
ggtgcacaagtgagtttgttgatcgagataactagaaacagtgtgatgaaaatgaaggtccttgttttcttcgttgctacaattttggtagcatggcaatgccatgcgtacgatatgttccctctccgtatgaacactggctatggtgcccgtactccggaggtgaaatgcgcaagttggaggcttgctgtggaagcacacaacatctttggctttgagaacattccttaaaaattgctttgaagcagtaaaggaatacatccatggcgaacaatatagattagactccaaaacagttaaccaacaagcttacttttatgccagagacctcgaagtccatcccaaggacacatttgtgttcagtatagatggcaccgtactct

SEQ ID NO: 10838 - DNA, 382 bp, Glycine max; identical to SEQ ID NO: 10440
  Clone ID: LIB3039-013-Q1-E1-C2

SEQ ID NO: 10839 - DNA, 376 bp, Glycine max
  Clone ID: LIB3039-013-Q1-E1-C3
gtgattctactaggccacagtgactcttacacaagagacaagctgatgcaagtgaccatcgcatacaaccatttcggagagggacttatccagagaatgccacgttgtagacatggatatttccacgtggtgaacaatgactacactcactgggagatgtatgctattggtggaagtgctaaccccaccatcaacagccagggcaacagatacaatgctcctactaacccttttgccaaggaggtgactaagagagtggaaacagcagaaacccaatggaagggttggaattggaggtcagagggagatttgttactgaatggggcctatttcactccatctggtgctggagcctcagccagctatgctagagcct

SEQ ID NO: 10840 - DNA, 400 bp, Glycine max
  unsure (1)..(400): unsure at all n locations
  Clone ID: LIB3039-013-Q1-E1-C4
ggcacaagtgagtttgttgatcgagataactagaaacagtgtgatgaaaatgaaggtccttgttttcttcgttgctacaattttggtagcatggcaatgccatgcgtacgatatgttccctctccgaatgaacactggctatggtgcccgtactccggaggtgaaatgcgcaagttggaggcttgctgtggaagcacacaacatctttggctttgagaccattcctgaagagtgcgttgaagcaacanaggaatacatccatggcgaacaatatagatcagactccaaaacagttaaccaacaagcttacttttatgccagagacctcgaagtccatcccaaggacacatttgtgttcagtatagatggcaccgtactctctaatattccatactacaaa

SEQ ID NO: 10841 - DNA, 389 bp, Glycine max
  unsure (1)..(389): unsure at all n locations
  Clone ID: LIB3039-013-Q1-E1-C5
ggagcaaaaccctaatccctatttttcttcctcagtagtgtcatttacgcttctcttctctgcagcaactatgcctaaccctaaggtcttcttcgacatgaccatcggcggtcaatctgctggccgcatcgtgatggagctctacgccgacgtcactccccgcaccgccgagaacttccgcgcgctttgcaccggcgagaagggcgtanggcggagcggcaagcccctccactacaagggctcgtccttccaccgcgtgatcccgagtttcatgtgtcagggtggcgacttcaccgccggaaacggaaccggcggcgagtcgatttatggcgccaagttcgccgacgagaacttcgtgaagaagcacaccggtcccggcatcctctcca

SEQ ID NO: 10842 - DNA, 381 bp, Glycine max; identical to SEQ ID NO: 7852
  Clone ID: LIB3039-013-Q1-E1-C6

SEQ ID NO: 10843 - DNA, 376 bp, Glycine max
  Clone ID: LIB3039-013-Q1-E1-C7
gataaccatggcgtctaactctgcttccgctctttacttccttttatgcctatcgcccatcactttgcttctttctgcgtttcgtgctcaagctcaatctcatgctccagctcccactttcaagtactgtgaaaagaatgcagactatgctgtgaaggtgagtggagtggaaatattgcctgaccccgtggagagaggagtgccattcacctttaagatcccagcttatactcctgaaccaattcaaagcggggacttgttatatgaaatttcttatgctggaatagaagcacaacctgctacatttctccatgatctctgtgaggaagcaccatgcccagtacctgcaggcaactttgtgctcgttcacaccgaa

SEQ ID NO: 10844 - DNA, 396 bp, Glycine max
  unsure (1)..(396): unsure at all n locations
  Clone ID: LIB3039-013-Q1-E1-C8
gacaaaagtggtgtgtgtggagagagagagaacagaacaaagagggagagatagagagagagggcaaaaagatgggttaggctgaaaagtgagttggtataacattgttggtttggtttaatttagtttcctcagtgcagagggctcttttattttggtggtgatggaagtgggaaaattgaatggcaggaacttttggaagaggcagaagcaagtttcagagtggtggcagttgcacaagcaacacgaagtgcaaagctgggagtgcaaggaatcaacaacccattaggaataagtgcanagcttcattaaaagctggaagaggaaaatcacaacaggggtctgactctggatcctaacaggaattatcatcatcatcatcttctgcatcaacaa

SEQ ID NO: 10845 - DNA, 392 bp, Glycine max
  Clone ID: LIB3039-013-Q1-E1-D1
ggcacaagtgagtttgttgatcgagataactagaaacagtgtgatgaaaatgaaggtccttgttttcttcgttgctacaattttggtagcatggcaatgccatgcgtacgatatgttccctctccgaatgaacactggctatggtgcccgtactccggaggtgaaatgcgcaagttggaggcttgctgtggaagcgcacaacatctttggctttgagaccattcctgaagagtgcgttgaagcaacaaaggaatacatccatggcgaacaatatagatcagactccaaaacagttaaccaacaagcttacttttatgccagagacctcgaagtccatcccaaggacacatttgtgttcagtatagatggcaccgtactctctaatattccat

SEQ ID NO: 10846 - DNA, 368 bp, Glycine max
  Clone ID: LIB3039-013-Q1-E1-D10
ggcacaagtgagtttgttgatcgagataactagaaacagtgtgatgaaaatgaaggtccttgttttcttcgttgctacaattttggtagcatggcaatgccatgcgtacgatatgttccctctccgaatgaacactggctatggtgcccgtactccggaggtgaaatgcgcaagttggaagcttgctgtggaagcacacaacatctttggctttgagaccattcctgaagagtgcgttgaagcaacaaaggaatacatccatggtgaacaatatagatcagactccaaaacagttaaccaacaagcttacttttatgccatagacctcgaggtccatcccaaggacacatttgtgttcagtatagatg

SEQ ID NO: 10847 - DNA, 216 bp, Glycine max
  Clone ID: LIB3039-013-Q1-E1-D11
gatattgtaggagcaacaactgtgaaatctgtggaatcaaaggggcaagctgagaagtgtgccaagagaaagaggaagaaccagtatcgcggaatccgccagcgtccatggggaaagtgggctgctgagattcgcgacccaagaaagggggttcgtgtttggcttggaactttcagcactgctgaagaagctgcaagagcttacgatgctgaaaca

SEQ ID NO: 10848 - DNA, 386 bp, Glycine max
  Clone ID: LIB3039-013-Q1-E1-D12
gctgtctgcttcttcactttctctcgtttcaatcgaaaaaaaatcatgggcagaaaattcttcgtcggtggcaactggaaatgcaatgggaccactgaggaggtgaagaagattgttactactttaaatgaagctaaagtccctggagaagatgttgtagaagttgttgtgagccctccttttgtgttccttccttttgtaaaaagtttgctgcccccctgatttccatgtctcggcccaaaattgttgggttcgcaaaggtggtgcttatactggagaggttagtgctgaaatgcttgttaatttgggaattccttgggttattattggtcactctgaacggaggcagcttttgaatgaatcaaatgagtttgtgggagataaag

SEQ ID NO: 10849 - DNA, 412 bp, Glycine max
  unsure (1)..(412): unsure at all n locations
  Clone ID: LIB3039-013-Q1-E1-D2
agaaggatcagcagggagaattaggtttttagggtttacaccgagcagccacacctcccgcagcagccatggttctcaaaactgaactatgccgattcagtggtgccaagatctacccaggaaagggcatcagatttgttcgtggtgattctcaggttttcctgtttgcagactcaaaatgtaagaggtatttccacaatcgcctgaagccttcaaagctcacctggactgcaatgtacagaaagcaacacaaaaaggacattgctcaagaagctgtgaggaagaggagacgtgctgccaaaaagccttactctaggtccattgttggtgcgaccttggaagtaatccagaanaagagagctgaggagccagaagttcgagatgcagctagggaagctgctcttcgtgaaat

SEQ ID NO: 10850 - DNA, 381 bp, Glycine max
  Clone ID: LIB3039-013-Q1-E1-D3
ggcacaagtgagtttgttgatcgagataactagaaacagtgtgatgaaaatgaaggtccttgttttcttcgttgctacaattttggtagcatggcaatgccatgcgtacgatatgttccctctccgaatgaacactggctatggtgcccgtactccggaggtgaaatgcgcaagttggaggcttgctgtggaagcacacaacatctttggctttgagaccattcctgaagagtgcgttgaagcaacagaggaatacatccatggcgaacaatatagatcagactccaaaacagttaaccaacaagcttacttttatgccaaagacctcgaagttcacccaaggacacatttgtgttcagtatagatggcaccgtactctct

SEQ ID NO: 10851 - DNA, 348 bp, Glycine max
  Clone ID: LIB3039-013-Q1-E1-D4
tggggtagttcacactgtgcagatagacatcacgctcaaaccatcgttcgcaacactgctggatggcgactcaatggtggcaacatcggtccaggaatagtcagtcagctttgcttcgtggatgattctcaagctttcatgtttgcaccactacccatgtccgaggtatttccacaatcggctgaaaccttcaaagctcacgtgaactgcactgtaggcacagcaacaaatacaggacattgctcaagaatctgtgaggaatatgacacgtgctagcaagatcccttactctaggtcgattgttggtgcaaccttgtgagtaatcagaagaagagagctgaggagcca

SEQ ID NO: 10852 - DNA, 382 bp, Glycine max
  unsure (1)..(382): unsure at all n locations
  Clone ID: LIB3039-013-Q1-E1-D5
ggcacaagtgagtttgttgatcgagataactagaaacagtgtgatgaaaatgaaggtccttgttttcttcgttgctacaattttggtagcatggcaatgccatgcgtacgatatgttccctctccgaatgaacactggctatggtgcccgtactccggaggtgaaatgcgcaagttggaggcttgctgtggaagcacacaacatctttggctttgagaacattcctgaagagtgcgttgaagcaacanaggaatacatccatggcgaacaatatagatcagactccataacagttaaccaacaagcttacttttatgccagagacctcgaagtccatcacaaggacacatttgtgttcagtatagatggcaccgtactctct

SEQ ID NO: 10853 - DNA, 365 bp, Glycine max
  Clone ID: LIB3039-013-Q1-E1-D6
ggtgcacaagtgagtttgttgatcgagataactagaaacagtgtgatgaaaatgaaggtccttgttttcttcgttgctacaattttggtagcatggcaatgccatgcgtacgatatgttccctctccgaatgaacactggctatggtgcccgtactccggaggtgaaatgcgcaagttggaggcttgctgtggaagcacacaacatctttggctttgagaccattcctgaagagtgcgttgaagcaacaaaggaatacatccatggcgaacaatatagatcagactccataacagttaaccaacaagcttacttttatgccagagacctcgaagtccatcgcaaggacacatttgtgttcagtat

SEQ ID NO: 10854 - DNA, 392 bp, Glycine max
  Clone ID: LIB3039-013-Q1-E1-D7
gaaggtgcaagagtttgttgtgagctataagctagtttatcgtgaggagaatatgaagttgtttgttttctttgttgctgcagtagttttggtagcatggccatgccatggcgcatgctaccaaaagttccctctccgaatgaaaactggctatggtgagcgttcttcggaggtaaaatgcgcaagttttaggcttgctgtggaagcacacaacatccgagcctttaaaaccattcctgaagagtgcgttgaaccaacaaaggactacattaatggcgaacaatttagatcagactctaaaacagttaaccaacaagctttcttttatgctagtgaacgcgaagtccatcacaacgacatatttatagtcggcatagataacaccgtactct

SEQ ID NO: 10855 - DNA, 399 bp, Glycine max
  unsure (1)..(399): unsure at all n locations
  Clone ID: LIB3039-013-Q1-E1-D8
ggcagtttcaaattttcttttccttcactttcccgagaaaaaaatagcacttttcactttcttcactacgttcgcacttcgatatggctcgtacgaagcaaaccgctcgcaagtccaccggtggcaaggcgccacgtaagcagctcgccaccaaggccgctcggaagtccgctccggcgaccggaggagtgaagaagccccaccgcttcaggccgggaaccgtggcgctgagggaaatcagaaagtaccagaagagcaccgagcttctcatcaggaagcttccatttcagatgctcgtgagagaaatcgcgcaggatttcaagaccgatttgcgtttccagagcagcgctgtttccgcgcttcaggaggctgctgaggcntaccccgttgggttgttcg

SEQ ID NO: 10856 - DNA, 173 bp, Glycine max
  Clone ID: LIB3039-013-Q1-E1-D9
aggggcacaagtgagtttgttgatcgagataactagaaacagtgtgatgaaaatgaaggtccttgttttcgtcgctgccacgatttaggtagcatagcaatgccatgcgtatgatatgttccctctccgtatgaacactggctatggtgcccgtacgccggaggtgaaatgcg

SEQ ID NO: 10857 - DNA, 388 bp, Glycine max
  Clone ID: LIB3039-013-Q1-E1-E1
gaaggtgcaagagtttgttgtgagctataagctagtttatcgtgaggagaatatgaagttgtttgttttctttgttgctgcagtagttttggtagcatggccatgccatggcgcaggctaccaaaggttccctctccgaatgaaaactggctatggtgagcgttcttcggaggtaaaatgcgcaagttttaggcttgctgtggaagcacacaacatccgagcctttaaaaccattcctgaagagtgcgttgaaccaacaaaggactacattaatggcgaacaatttagattagactctaaaacagttaaccaacaagctttcttttatgctagtgaacgcgaagtccatcacaacgacatatttatattcggcatagataacaccgtt

SEQ ID NO: 10858 - DNA, 390 bp, Glycine max
  Clone ID: LIB3039-013-Q1-E1-E10
ggcacaagtttgttgagatagctagaagcaataagatgaaaatgaaagtgcttgttttgtttgttgctacagttttggtagcatatgaatgccatggctcagactaccagaagttccctctccaaatgaaaactgggtttggtgggcaatacagcaatgacgtggcatgtgccagttggaggcttggcgtggaagcaaacaacgtagtcaagtggcaaactgttcctgcagcttgcggagagtacatagctgactacgttctaggagaccaatatagatcagattccaaaacagttaaccaacaagcttatttctatgctaaatccctcaaactcaccaacaaagatgtctttgtcttggacgttgacgacactactctctccaatctcc

SEQ ID NO: 10859 - DNA, 397 bp, Glycine max
  Clone ID: LIB3039-013-Q1-E1-E11
ggggaaccctaattctgcgaggtgagtgaaaatggcggtacccttgctctccaagaagatcgtgaagaagcgcgtcaagaagtttatacgcccccagagtgatcgcaagatctccgtcaagccaagctggcgcagacccaagggtattgattctcgtgtcaggagaaagttcaaaggatgcactttgatgcccaacattggttatggctcagacaagaaaacccgccattatctaccaaatggtttcaagaaatttgtcgtgcacaatgtgaaagacctggaacttctcatgatgcataacaggacatattgtgctgagattgctcacaatgtatccacaaggaagaggaaggacatagttgagagagctgctcagcttgatgttgtcttgacgaac

SEQ ID NO: 10860 - DNA, 388 bp, Glycine max
  Clone ID: LIB3039-013-Q1-E1-E12
ggtattccttacgctctctcactcacaaacacacactgaactaaaaaacatcaaaagagacatggctgagcaaaccttcatcatgatcaagcctgatggcgtccaaagaggccttattggcgagatcattagcagatttgagaagaaaggtttctacttgaaaggtttgaaacttgttactgtggaccgtccttttgctgagaagcactatgctgatttgtctgccaagcctttctttagtggtttggtggattacattatctctggccctgttgttgccatgatctgggagggcaagaatgttgttacaactggccgaaagattatcggagccacaaacccagctcaatctgagcctggaactatccgtggtgactttgccattgac

SEQ ID NO: 10861 - DNA, 372 bp, Glycine max
  Clone ID: LIB3039-013-Q1-E1-E2
gatccataaccatggcgtctaactctgcttccgctctttacttccttttatgcctatcgcccatcactttgcttctttctgcgtttcgtgctcaagctcaatctcatgctccagctcccactttcaagtactgtgaaaagaatgcagactatgctgtgaaggtgagtggagtggaaatattgcctgaccccgtggagagaggagtgccattcacctttaagatcccagcttatactcctgaaccaattcaaagcggggacttgttatatgaaatttcttatgctggaatagaagcacaacctgctacatttctccatgatctctgtgaggaagcaccatgcccagtacctgcaggcaactttgtgctcgttc

SEQ ID NO: 10862 - DNA, 397 bp, Glycine max; identical to SEQ ID NO: 7408
  Clone ID: LIB3039-013-Q1-E1-E3

SEQ ID NO: 10863 - DNA, 237 bp, Glycine max
  Clone ID: LIB3039-013-Q1-E1-E4
gcaagcatggagttagtgcaatcaggaggctgaggaaaactgataataatagaattgcaaaggcttgtggtgctgttattgtgaacagaccagatgaattgcaggagtctgatgttggtactggtgctgggttatttgaggttaagaaaattggagatgagtactttgcatagagtgtttatttcagagaacccaggggttgtactgttctacgaaggggtgccagtaaggatccat

SEQ ID NO: 10864 - DNA, 389 bp, Glycine max
  Clone ID: LIB3039-013-Q1-E1-E5
gacaacacagaagcggaaaaaagaagaaggaagaaaagttagcagtagtttggcgtggtaattggtagagcgagaaacagagaaatggacgattacacgagggaaatgatggacctgaagacactggtcactcgcactctcgagaagaaaggcgtcctcgccaggatccgtgccgaactcagggcgagtgtgttcgaagccatcgaagaggaagatcgtgtgattgagaaggaacaaggtctacctcctgcattgctaggtagttgcaacgatcgagctaagcagcttcacgcttctcctccagggagacttcttacggcaatgatatgtgaataccttgactgggcgcagctcagtcatacgctaaaagtttatcttccggaatgtaa

SEQ ID NO: 10865 - DNA, 382 bp, Glycine max
  Clone ID: LIB3039-013-Q1-E1-E6
ggcacaagtgagtttgttgatcgagatagctagaaacagtgtgatgaaaatgaaggtccttgttttcttcgttgctacaattttggtagcatggcaatgccatgcgtacgatatgttccctctccgaatgaacactggctatggtgcccgtactccggaggtgaaatgcgcaagttggaggcttgctgtggaagcacacaacatctttggctttgagaccattcctgaagagtgcgttgaagcaacaaaggaatacatccatggcgaactatatagatcagactccaaaacagttaaccaacaagcttacttttatgccagagacctcgaagtccatcacaaggacaaatttgtgttcagtatagatggcaacgtactctct

SEQ ID NO: 10866 - DNA, 379 bp, Glycine max
  Clone ID: LIB3039-013-Q1-E1-E7
ggcacaagtttgttgagatagctagaagcaataagatgaaaatgaaagtgcttgtgttgtttgttgctacagttttggtagcatatgaatgccatggctcagactaccagaagttccctctccaaatgaaaactgggtttggtgggcaatacagcaatgaggtggcatgtgccagttggaggcttggcgtggaagcaaacaacgtagtcaagtggcaaactgttcctgcagcttgcggagagtacatagctgactacgttctaggagaccaatatagatcagattccaaaacagttaaccaacaagcttatttctatgctaaatccctcaaactcaccaacaaagatgtctttgtcttggacgttgacgacactactct

SEQ ID NO: 10867 - DNA, 399 bp, Glycine max
  Clone ID: LIB3039-013-Q1-E1-E8
ggatagcgaaacagagagtggtttcagtgagtgatcggtgttcacttgatccttcagaagtcgtcatcatcatcatcatcatcaccgttgattgaagaagatgccgatcagaaacatcgccatcggaaggcctgaagaggctactcaccccgacacgttgaaggcggggttggctgagttcatctccaccttgatcttcgtgttcgccggttcaggttccggcatcgcctacaacaagctcaccgacaacggcgccgccactcccgccggcctcatctccgcttccatcgcccatgctttcgccctcttcgtcgccgtctccgtcggcgccaacatctccggcggccacgtcaaccccgccgtcaccttcggcgccttcgtgggcggcaacatcacctt

SEQ ID NO: 10868 - DNA, 262 bp, Glycine max
  Clone ID: LIB3039-013-Q1-E1-E9
ggtagcgccagactgagaggaagagagagggagattctttgtttgctaccttctctcggaaaaatggttacgttcaggtttcaccagtaccacgtggttgggagggctcttcccacggaagcagatcatcaccccaagatctaccgaatgaagctctgggccacaaacgaagttcgcgccaagtccaggttctggtaatttctgaggaaactgaggaatgtggacaataccagtggccagctgcttgccatcaactgaattt

SEQ ID NO: 10869 - DNA, 398 bp, Glycine max
  Clone ID: LIB3039-013-Q1-E1-F1
ggcacaagtttgttgagatagctagaagcaataagatgaaaatgaaagtgcttgttttgtttgttgctacagttttggtagcatatgaatgccatggctcagactaccagaagttccctctccaaatgaaaactgggtttggtgggcaatacagcaatgaggtggcatgtgccagttggaggcttggcgtggaagcaaacaacgtagtcaagcggcaaactgttcctgcagcttgcggagagtacatagctgactacgttctaggagaccaatatagatcagattccaaaacagttaaccaacaagcttatttctatgctaaatccctcaaactcaccaacaaagatgtctttgtcttggacgttgacgacactactctctctaatctccagtatttt

SEQ ID NO: 10870 - DNA, 395 bp, Glycine max
  Clone ID: LIB3039-013-Q1-E1-F10
gacgctcaattcattttcttctcctctctctctctcctagggttagggttttctctcttcatcactctctgtgtcgctccgtttcaatggctcagcaagacgctcaaaacggcgggtcggagaatgccgctgctgctgctacggtgtcgtttgtcgctgtgaagccgcagctcctcgtcgaagctcccaaagccaacgacgccattctgttcttcaaggctgcgtttggcgctgaggaagttggccgtacgctcaaccctaagcgcaaagctgagcacgagctccctctcatactctccgcagaactcaaaatcgctggctccaccattctcgtcgccgacctcgttgatgacacttcttcgccagcgaaaacggggggaaacggtgtccttttg

SEQ ID NO: 10871 - DNA, 403 bp, Glycine max
  Clone ID: LIB3039-013-Q1-E1-F11
gaaggtgcaagagtttgttgtgagctataagctagtttatcgtgaggagaatatgaagttgtttgttttctttgttgctgcagtacttttggtagcatggccatgccatggcgcaggctaccaaaggttccctctccgaatgaaaactggctatggtgagcgttcttcggaggtaaaatgcgcaagttttaggcttgctgtggaagcacacaacatccgagcctttaaaaccattcctgaatagtgcgttgaaccaacacaggactacattaatggcgaacaatttagatcagactctaaaacagttaaccaacaagctttcttttatgctagtgaacgcgaagtccatcacaacgacatatttatattcggcatagataacaccgtactctctaatatccca

SEQ ID NO: 10872 - DNA, 377 bp, Glycine max
  Clone ID: LIB3039-013-Q1-E1-F12
gagaaaaaggttggttgggcattcgccgtaaacagaagagagagagagagagagagagagtcctgaaacttgggtgcgattccttcactcacaacaacaacacatcactatggctcttctgagtcgagcctcttcacgcttccctcagctggtttcccctcaaagggtagtttcactccacacaacgctcccatctctgaacgcatccccatccacagccacgcctacaccatatgccccgccaccgcctccgtccgcttcctctcccgccggcgtttcgaaggcggcggagttcgtgatctcgaaggtggacgatctgatgaactgggcccgccgcggctccatctggcccatgaccttcggcctcgcctgctgcg

SEQ ID NO: 10873 - DNA, 370 bp, Glycine max
  Clone ID: LIB3039-013-Q1-E1-F2
ggatagcgaaacagagagtggtttcagtgagtgatcggtgttcacttgatccttcataagtcgtcatcatcatcatcatcatcaccgttgattgaagaagatgccgatcagaaacatcgccatcggaaggcctgaagaggctactcaccccgacacgttgaaggcggggttggctgagttcatctccaccttgatcttcgtgttcgccggttcaggttccggcatcgcctacaacaagctcaccgacaacggcgccgccactcccgccggcctcatctccgcttccatcgcccatgctttcgccctcttcgtcgccgtctccgtcggcgccaacatctccgggggccacgtcaaccccgccgtcaccttc

SEQ ID NO: 10874 - DNA, 395 bp, Glycine max
  Clone ID: LIB3039-013-Q1-E1-F3
ggaagagtgaagagaatggctcccaagggtttaacctttctggctgtgttaatatgcgtttcagcactgtcactgagtccttctgttgcgggggaagggcaaaataatggccttgttatgaacttctacaaggaatcatgccctcaggctgaagacatcatcacagaacaagtcaagcttctctacaagcgccacaagaacactgctttctcctggctcaggaacatcttccatgactgtgctgttcagagttgtgatgcttcactgttgctggactccacaagaaggagcttgtctgagaaggaaacagatagaagctttgggttgagaaatttcaggtacattgagaccatcaaagaagctttggaaagagaatgccctggagttgtttcatg

SEQ ID NO: 10875 - DNA, 377 bp, Glycine max
  Clone ID: LIB3039-013-Q1-E1-F4
gagagaaagagagagaaagatgtcgaagcgtggtcgtggtggttcggcggggaacaagttccgcgtcgctgggtcttccagtggcggcgacggtgaactgcgccgacaacacgggggcgaagaacctctacatcatttcggtgaaagggatcaaaggccgtttgaaccgtcttccctcggcctgcgttggcgacatggtgatggccaccgtgaagaagggaaaacccgatctgaggaagaaggtcttgccagctgtcatcgttcgccagcgcaagccatggcgccgaaaggacggcgtctacatgtacttcgaagataatgctggtgttattgtcaatcccaagggagaaatgaaaggttctgctatcactggtccc

SEQ ID NO: 10876 - DNA, 377 bp, Glycine max
  Clone ID: LIB3039-013-Q1-E1-F5
gacaacacacattcccatcatcacaccaacaacaacacaccatgttcacagttctgcttctcttctcactccttcttaccacctctacttcccacaacataatatcataccctcatttccaacaactcaatgtcaaacaaatcctcacagaaaccaaactcaacccaacaaatacctacaaacacctccaacaccaaaaactcaacattgccaccgaagcatcttcaccggcaaaatataaactgaagctagttcacagagacaaagtccccacgtttaacacctcgcacgaccaccgaacccgattcaatgcacgaatgcagcgagacaccagaagggtcgccgccctccgccgccatctggccgccggaaaaccc

SEQ ID NO: 10877 - DNA, 390 bp, Glycine max
  Clone ID: LIB3039-013-Q1-E1-F6
gaaagcaatcctctagcttatgctcacaatggcttcgtcatcttgttctgctgccaccatccacttcatcctgctttcaatatccctcttctcagtttcctctttaccattaccacatgaatcaacttccacaccaaacaaaatcttcttcctgcccattaagatagacgcagcaaccaacatgttctacaccacaattggcattggaactccccaacacagcacaaatctagtgattgatcttggcggagaatacctctggcatgactgcagcatcagacgctacaattcatcatccatacgtaagatcgtttgtaagtcaaagaaatgccccgagggtgctgcatgcgtttccactggctgcattggcccttataaaacaggctgcgc

SEQ ID NO: 10878 - DNA, 392 bp, Glycine max
  Clone ID: LIB3039-013-Q1-E1-F7
ggcacaagtgagtttgttgatcgagataactagaaacagtgtgatgaaaatgaaggtccttgttttcttcgttgctacaattttggtagcatggcaatgccatgcgtacgatatgttccctctccgaatgaacactggctatggtgcccgtactccggaggtgaaatgcgcaagttggaggcttgctgtggaagcacacaacatctttggctttgagaccattcctgaagagtgcgttgaagcaacaaaggaatacatccatggcgaacaatatagatcagactccaaaacagttaaccaacaagcttacttttatgccagagacctcgaagtccatcccaaggacacatttgtgttcagtatagatggcaccgtactctctaatattccat

SEQ ID NO: 10879 - DNA, 387 bp, Glycine max
  Clone ID: LIB3039-013-Q1-E1-F8
ggcacaagtttgttgagatagctagaagcaataagatgaatatgaaagtgcttgttgtgtttgttgccacagttttggtagcatatgaatgccatggctcagactaccagaagttccctctccaaatgaaaactgggtttggtgggcaatacagcaatgaggtggcatgtgccagttggaggcttggcgtggaagcaaacaacgtagtcaagtggcaaactgttcctgcagcttgcggagagtacatagctgactacgttctaggagaccaatatagatcagattccaaaacagttaaccaacaagcttacttctatgctaaatcactcaaactcaccaacaaagatgtctttgtcttggacgttgacgacactactctctctaatc

SEQ ID NO: 10880 - DNA, 207 bp, Glycine max
  Clone ID: LIB3039-013-Q1-E1-F9
tggggcacatgtttgttgagatagctagaagcactcttattaacatgaaagtgcttgtcttgtttgttgctacagttttggtagcatattaatgccatggctcagactaccagaaattccctctccaaattaaaactgggtttggtgggcattcaagccatgatgtggcatctgccacttcgacgcatggcctggaagcacacaacg

SEQ ID NO: 10881 - DNA, 400 bp, Glycine max; identical to SEQ ID NO: 9460
  Clone ID: LIB3039-013-Q1-E1-G1

SEQ ID NO: 10882 - DNA, 385 bp, Glycine max
  Clone ID: LIB3039-013-Q1-E1-G10
ggcacaagtttgttgagatagctagaagcaataagatgaaaatgaaagtgcttgttttgtttgttgctacagttttggtagcatatgaatgccatggctcagactaccagaagttccctctccaaatgagaactgggtttggtgggcaatacagcaatgaagtggcttgtggcaattggaagcgtggcgtggaagcaaacaacgtagtcaagtggcaaactgttcctgcagcttgcggagagtacatagctgactacgttctaggagaccaatatagatcagattccaaaacagttaaccaacaagcttatttctatgctaaatccctcaaactcaccaacaaagatgtctttgtcttggacgttgacgacactactctctctaa

SEQ ID NO: 10883 - DNA, 385 bp, Glycine max
  unsure (1)..(385): unsure at all n locations
  Clone ID: LIB3039-013-Q1-E1-G11
ggcacaagtgagtttgttgatcgagataactagaaacagtgtgatgaaaatgaaggtccttgttttcttcgttgctacaattttggtagcatggcaatgccatgcgtacgatatgttccctctccgaatgaacactggctatggtgcccgtactccggaggtgaaatgcgcaagttggaggcttgctgtggaagcacacaacatctttggctttgagaccattcctgaagagtgcgttgaagcaacaaaggaatacatccatggcgaacaatatagattagactccaaaacagttaaccaacaagcttacttttatgccagagacctcgaagtccatcncaaggacacatttgtgttcagtatagatggcaccgtactctctaat

SEQ ID NO: 10884 - DNA, 407 bp, Glycine max
  Clone ID: LIB3039-013-Q1-E1-G12
ggcacaagtgagtttgttgatcgagataactagaaacagtgtgatgaaaatgaaggtccttgttttcttcgttgctacaattttggtagcatggcaatgccatgcgtacgatatgttccctctccgaatgaacactggctatggtgcccgtactccggaggtgaaatgcgcaagttggaggcttgctgtggaagcacacaacatctttggctttgagaccattcctgaagagtgcgttgaagcaacaaaggaatacatccatggcgaacaatatagatcagactccaaaacagttaaccaacaagcttacttttatgccagagacctcgaagtccatcccaaggacacatttgtgttcagtatagatggcaccgtactctctaataatccatactacaaaaaacatg

SEQ ID NO: 10885 - DNA, 365 bp, Glycine max
  Clone ID: LIB3039-013-Q1-E1-G2
ggtggaaatattactgattagttcccaccatcggtgttggtaactaaagacttcttggtgggtccactgttttacggtttgtttgcacacttttcatttccgatccataattgtcccaattctttccactcgcgaaatccagagatatcgatcaacagattcgtgcgacacgttaaattgttttcaaggttgcgcatatccaggatgcaggcatcgcgggcaaggttgttcaaagagtacaaagaggtgcagcgggaaaaggccgttgatcctgatattcaactagtttgtgatgattcaaacatttttaaatggactgctcttatcaagggaacctctgagactccttttgagggtggtgtgtt

SEQ ID NO: 10886 - DNA, 234 bp, Glycine max
  Clone ID: LIB3039-013-Q1-E1-G3
ggcacatgtgagtttgttgctcaagacaactacaagtaatgtgatgaaacttaaagtccctgctgtcttcggggctataagcatggttgccaggtcagatcaatcgtaggaaaagttccctccacgtcatgaaatcgagcgatagcgctcctcatccggatgtgacacgcccaacttggacgattgctgcggaaacccacaatacagttggcgctgacaatattcctcaaaaat

SEQ ID NO: 10887 - DNA, 362 bp, Glycine max
  Clone ID: LIB3039-013-Q1-E1-G4
gaatccagagaaaaatggggtggcaaagggacctactaagttttataacccagagatccatgctgctgcattctgtctgccttcttttgtggacaaggttgattgatccaacagacattcataaatgactcggtagcattaaggaattgctgttagttaccctttgtttttgctgtgtcgttctgcatatttatgatattatccttttagtatgttaattagttttactttatattccctaaaatattagatgttacacacgtgtatgattatcatctaatgtaaggtttgcacctattgaggtatcaatgaaatgaaatctgaaatttagtttttccaacgaaaaaagggtcgtccagttc

SEQ ID NO: 10888 - DNA, 416 bp, Glycine max
  Clone ID: LIB3039-013-Q1-E1-G5
gaagacgacagaaggggactcaccaggtgaaccaatatagcccaagccctatacaaccaaaccctaacacacacccatttgattcagtttccatggctagcctcaaggttgcatttttggctgcagtgctctgcatggttgtggtgagtgcacccatggcacatgcagctatcacgtgcgggcaggtgacgaatagcctgatcaattgcatcggttacctccagaacggaggaactccgccgtcgggatgctgcaacggagtgaagagcctcaatgccgccgccaagaccaccgccgaccgccagacggcgtgcaactgcctcaagtcggccgccagccaaatctccggcttcaaagccatcaacgccgcctcgctctccgacaaatgcggagtctccatcccctacaagatcagc

SEQ ID NO: 10889 - DNA, 388 bp, Glycine max
  Clone ID: LIB3039-013-Q1-E1-G6
ggcacaagtttgttgagatagctagaagcaataagatgaaaatgaaagtgcttgttttgtttgttgctacagttttggtagcatatgaatgccatggctcagactaccagaagttccctctccaaatgaaaactgggtttggtgggcaatacagcaatgaggtggcatgtgccagttggaggcttggcgtggaagcaaacaacgtagtcaagtggcaaactgttcctgcagcttgcggagagtacatagctgactacgtcctaggagaccaatatagatcagattccaaaacagttaaccaataagcttatttctatgctaaatccctcaaactcaccaacaaagatgtctttgtcttggacgttgacgacactactctctctaatct

SEQ ID NO: 10890 - DNA, 383 bp, Glycine max
  Clone ID: LIB3039-013-Q1-E1-G7
gaaggtgcaagagtttgttgtgagctataagctagtttatcgtgaggagaatatgaagttgtttgttttctttgttgctgcagtagttttggtagcatggccatgccatggcgcaggctaccaaaggttccctctccgaatgaaaactggctatggtgagcgttcttcggaggtaaaatgcgcaagttttaggcttgctgtggaagcacacaacatccgagcctttaaaaccattcctgaagagtgcgttgaaccaacaaaggactacattaatggcgaacaatttagatcagactctaaaacagttaaccaacaagctttcttttatgctagtgaacgcgaagtccatcacaacgacatatttatattccgcatagataaca

SEQ ID NO: 10891 - DNA, 235 bp, Glycine max
  Clone ID: LIB3039-013-Q1-E1-G8
gaatgttgtgttgtgtcgcttcgcttcacaaactctcttcttctattgcaaagacccttttgaagtaatccatggagtctcagtcactttcgagattctagcttcgtcattccttaagcaatctcgtgcttgcactctttcaggcggcaggtaatagtgaagtcgcttactgcgataagaaggcagattatccggtaaaggtgtcgggagttgagatctcaccagaccctgtgga

SEQ ID NO: 10892 - DNA, 359 bp, Glycine max
  Clone ID: LIB3039-013-Q1-E1-G9
gcacaagtgagtttgttgatcgagataactagaaacagtgtgatgaaaatgaaggtccttgtttacttcgttgctacaattttggtagcatggcaatgccatgcgtacgaaatgttccctctccgaatgaacactggctatggtgcccgtactccggacgtgaaatgcgcaagttggaggcttgctgtggaagcacacaacatctttggctttgagaccattcctgagtaatgcgtttgaacaacaaaggaatacatccatggcgaacaatatagatcagactccaaaacagttaaccaacaagcttacttttatgccagagacctcgaagtcaatcccaaggacacatttgtgttcag

SEQ ID NO: 10893 - DNA, 384 bp, Glycine max
  Clone ID: LIB3039-013-Q1-E1-H1
ggcacaagtttgttgagatagctagaagcaataagatgaaaatgaaagtgcttgttttgtttgttgctacagttttggtagcatatgaatgccatggctcagactaccagaagttccctctccaaatgaaaactgggtttggtgggcaatacagcaatgaggtggcatgtgccagttggaggcttggcgtggaagcaaacaacgtagtcaagtggcaaactgttcctgcagcttgcggagagtacatagctgactacgttctaggagaccaatatagatcagattccgaaacagttaaccaacaagcttatttctatgctaaatcgctcaaactcaccaacaaagatgtctttgtcttggacgttgacgacactactctctcta

SEQ ID NO: 10894 - DNA, 375 bp, Glycine max
  Clone ID: LIB3039-013-Q1-E1-H10
gacacagagcggttctcatattttggagaatccgaaaaacacgttaaagaaagtcccattcccactaccgaagcaaattaagaagatgaagcagcagagagtggagtttatgggcatgggcatgggcatgggcatgggcctgggccttttggtggtgatgatggcatgtgggtcggcgagtggtgcggatgatttggcaaccaagtgttcagcggtgattcagaaggtaataccgtgtttggatttcgcgaaggggaaggaagaaacgccgaaaaagcaatgttgcgacgcagcaacgtccataaaggagagcaacccagagtgcctctgctacatcattgaagaggcccacaagggtaacccacaaggtaaaaa

SEQ ID NO: 10895 - DNA, 382 bp, Glycine max
  unsure (1)..(382): unsure at all n locations
  Clone ID: LIB3039-013-Q1-E1-H11
ggcacaagtttgttgagatagctagaagcaataagatgaaaatgaaagtgcttgttttgtttgttgctacagttttggtagcatatgaatgccatggctcagactaccagaagttccctctccaaatgaaaactgggtttggtgggcaatacagcaatgaggtggcatgtgccagttggaggcttggcgtggaagcaaacaacgtagtcaagtggcaaactgttcctgcagcttgcggagagtacatagctgactacgttctaggagaccaatatagatcagattccacaacagttaaccaacaagcttatttctatgctaaatcnctcaaactcaccaacaaagatgtctttgtcttggacgttgactacactactctctc

SEQ ID NO: 10896 - DNA, 396 bp, Glycine max
  Clone ID: LIB3039-013-Q1-E1-H12
atcaggcgtcgatagaggggggacactaaacaagttaaaagaagagcatcactgaactaacaaagcaaccctatgtcgaatgtggtttgtgtcaccggagccagcggcgccatcggatcatgggtggtcctactcctcctccagcgtggttacaccgtccatgccaccgtccaagatatcaaggatgaaaatgagacgaaacatttggaggaaatggaaggagcaaagagtcatctccatttttttgaaatggatcttcttgacatcgactccattgccgctgccataaagggttgttccggcgtaatccaccttgcatgtcctaacatcattggtcaagtcgaagatcccgagaaacagatattggaaccggcgataaaaggaacggttaatgtg

SEQ ID NO: 10897 - DNA, 382 bp, Glycine max
  Clone ID: LIB3039-013-Q1-E1-H2
gactcaagcagaggatctctatcgagtaaattaactatgaagcctaccctactattatccctttcgttcctgccgctctttgctttcctggctctttcagaagatgttgaacaagttgtggacataagtggcaaccccattttcccaggtggcacatattacattatgccatcaacttggggcgctgccggtggtggattgaaactaggccggacatgaaactcaaactgcccagttactgttttgcaagattactcagaaatcttccgtggcacaccagtcaaattcatcatacctgggataagccctggaatcatctttacaggtactccacttgaaatcgagttcgcagagaaaccttattgtgctgaatcctccaaat

SEQ ID NO: 10898 - DNA, 400 bp, Glycine max
  Clone ID: LIB3039-013-Q1-E1-H3
gatccatactcaaaatacacaaatggagagagtagctaaggtgttggtgatgttgagcatggtggtgttggtgcttgcatcaaatgctgaagggggacgattacttgaggaagagaatgtggatcagccccagaccttccttggatcaggtggaggccttggtgggatatttccaagcccaagcccaggcttcagcttcaccggcgtgggctttggcccatctgggttttgcactttccctggtggttgcaccggtactccttctttgcccactattcccggtgctggtgggtcactaccagtaccaacacatgcataaggaaatggctttggtagaagacctatattattacttaatgctaaagtaccctagaatttgtttaagctttaatttgccttt

SEQ ID NO: 10899 - DNA, 395 bp, Glycine max
  Clone ID: LIB3039-013-Q1-E1-H5
ggcacaagtgagtttgttgatcgagataactagaaacagtgtgatgaaaatgaaggtccttgttttcttcgttgctacaattttggtagcatggcaatgccatgcgtacgatatgttccctctccgaatgaacactggctatggtgcccgtactccggaggtgaaatgcgcaagttggaggcttgctgtggaagcacacaacatctttggctttgagaccattcctgaagagtgcgttgaagcaacaaaggaatacatccacggcgaacaatatagatcagactccaaaacagttaaccaacaagcttacttttatgccagagacctcgaagtccatcccaaggacacatttgtgttcagtatagatggcaccgtactctctaatattccatact

SEQ ID NO: 10900 - DNA, 395 bp, Glycine max
  unsure (1)..(395): unsure at all n locations
  Clone ID: LIB3039-013-Q1-E1-H7
agaagggggaacatcatcacattacattagattggtggtaatggcagcgtcgctacaagcagcagctactttcatgcaacccaccaagttgagcaggagcaacactttgcagcaaaagtctactcagtccatttccaaggcttttggtttggaacctgttggagctaaaaaggtcacatgctcccttcaggctgatcttaaggacttggctcacaagtgtgttgacgctaccaaaattgcaggattcgcccttgccacctctgccctcgttgtctctggggcaagtgctgaaggtgttccaaagaggctaaccttcgacgaaatccagagcaagacctacttggaagtgaaggggacaggaacagcanaccagtgcccaacanttgatggtggat

SEQ ID NO: 10901 - DNA, 107 bp, Glycine max
  Clone ID: LIB3039-013-Q1-E1-H8
gggtgcaagagtttgttgtgagctataagctagtttatcgtgaggagaatatgaagttgtttgttttctttgttgctgcagtacttttggtagcatggccatgccat

SEQ ID NO: 10902 - DNA, 381 bp, Glycine max
  Clone ID: LIB3039-013-Q1-E1-H9
gatgggaacacagatacagattacatatgctcagtaatctgagagataaacagaaacactgtccgtttccagtgtgaagttccactccgttcccctatgttttttccttctcgtggtcttcatcatagaacccctccaatcagcataaccagagctagtggttgatatgcaagggaacactttggggctactactaaggtactacgtatggccacattgggctgattaatgatgcctcagacgatgtcacataaggaatatgacatgcgctcttgatgttagctgtgatccttcattcattggcatcccagtttcattcttagcaccaggccttgaccatgtcacaatactcactgatcgtaccattgagttccctgtggt

SEQ ID NO: 10903 - DNA, 345 bp, Glycine max
  Clone ID: LIB3039-014-Q1-E1-A1
gaccacagaatcaaacaaaacaaaaccccttcccttccacatacactcttctccaatctcaccccaagaaaacttgcaggcaaaccaggaaccatgcttgatgaatcagtctcatccaccccaacattcttgggcagcctgtacagctggttcacccccactgtcttcttcctcctcctccaactagtcattggcaccattttcagcatctcaaaccttgccaacacccacaagcaccaacaggaggaaggacaacaagcacatgactttccacaccaccatcttcccagatccccttccatgctccaaagactcaaatccatcaacttttacccttcttcccct

SEQ ID NO: 10904 - DNA, 382 bp, Glycine max
  unsure (1)..(382): unsure at all n locations
  Clone ID: LIB3039-014-Q1-E1-A10
ggcacaagtgagtttgttgatcgagataactagaaacagtgtgatgaaaatgaaggtccttgttttcttcgttgctacaattttggtagcatggcaatgccatgcgtacgatatgttccctctccgaatgaacactggctatggtgcccgtactccggaggtgaaatgcgcaagttggaggcttgctgtggaagcacacaacatctttggctttgagaccattcctgaagagtgcgttgaatcagcataggaatacatccatggcgaacantatagatcggactccataacagttaaccaacaagcttacttttatgccagagacctcgaagtccatcccaaggacacatttgtgttcagtatagatggcaccgtactctct

SEQ ID NO: 10905 - DNA, 394 bp, Glycine max
  Clone ID: LIB3039-014-Q1-E1-A11
ggcacaagtgagtttgttgatcgagataactacaaacagtgtgatgaaaatgaaggtccttgttttcttcgttgctacaattttggtagcatggcaatgccatgcgtacgatatgttccctctccgaatgaacactggctatggtgcccgtactccggaggtgaaatgcgcaagttggaggcttgctgtggaagcacacaacatctttggctttgagaccattcctgaagagtgcgttgaatcaacaaaggaatacatccatggcgaacactatagatcagactccaaaacagttaaccaacaagcttacttttatgccagagacctcgaagtccatcccaaggacacatttgtgttcagtatagatggcaccgtactctctaatattccatac

SEQ ID NO: 10906 - DNA, 377 bp, Glycine max
  Clone ID: LIB3039-014-Q1-E1-A12
gagagaggatggagtatttaagctcacaccgtaacacataataaccatactaaattcgtaaacccttttctcaaagcacaggcttagttatataccttcttcttcttcgaccttcgatttgggcccaacacaaacgcaccattggctccgatcactgcgcgacccaattccatggcggctggccctacaacaacatcaccctccgatcgacccaccatggtccctcccccaatgctcgtctccgactccttcgccaaggacgccatcctcgcctggttccgcggcgagttcgctgccgccaacgccatcatcgacgccctctgcgcccacctctccgcctcctccgcccacgattacgacgccgtcttcaacgccat

SEQ ID NO: 10907 - DNA, 382 bp, Glycine max
  Clone ID: LIB3039-014-Q1-E1-A2
gaactcgttctagtgtgtgattgtttgttgttgtaactcgttcttcttcttttgttgttctgtgtttgtgtttgttttttctctcacctgaaaatgtcttgctgcggtggtaactgtggttgcggaagctcctgcaagtgcggcaacggctgcggaggctgcaagatgtacccagacttgagctacactgagtcaaccaccaccgagaccttggtcatgggagtggcacctgttaaggctcaatttgagggtgctgaaatgggtgtgcccgctgagaacgatggctgcaaatgtggaccaaactgctcctgcaacccctgcacttgcaagtgaggtgttgggagagcaagcttcaagcagagatagcccttaattaggaata

SEQ ID NO: 10908 - DNA, 341 bp, Glycine max
  Clone ID: LIB3039-014-Q1-E1-A3
agaagacgacagaaggggacgattactaccaagtgaaaaagcaattaactaagcatatatagcgtgtaagacagtgagaaaaaaagtgttgtgtagagagaaatggctaggtggtgcatcttggtggttcttgcccttgtcgtggttgcaagtgccagaaacatgcccaatgacgcagggttggaggaccagaagaacttcctcgggtatgggttctctggagttggcaacaatgggcttccctttggaggagtgggttctgggtttgatggtaatatgggtgggccttctgggctcggtggatttggaggattcggtgggcctaacgggctcggaggtct

SEQ ID NO: 10909 - DNA, 363 bp, Glycine max
  Clone ID: LIB3039-014-Q1-E1-A4
gacacttcaaaatcctccaataacccttcctttcccccccccccccccgtgttctgagctggtaaaaacaatggggaaggaaagaagccatgcttctttcaccatgttttgcatgcttgttggattggtctctcagagccttgtcattcctgtaatatccaccactgttgcagatcagaacaactactacaccccagatccacatgctggaagtccccccacaggctcacacaatagtagtcctccatctcatggccatgggagctctccaacctcacatcacaatagtccaagtactcgatcaacaccctcaagtggaaactgtggatcatcacccccacagcatcatgatccaacaccctc

SEQ ID NO: 10910 - DNA, 315 bp, Glycine max
  Clone ID: LIB3039-014-Q1-E1-A5
gagcgaaacagagagtgatttcagtgagtgatcggtgttcacttgatctcatcataatcgtcagcgtcaattgaagaagatgccgatcagaaacatcgccgtcggaaggcctgaagaggcgactcaccccgacacgttgaaggcggctttggctgagttcatctcaaccttcatcttcgtgttcgccggctcaggctccggcatcgcctacaacaagctcaccgacaacggcgctgccacccctgccggcctcatctccgcctccatcgcccatgcattcgccctcttcgtcgccgtctccgtcggcgccaacat

SEQ ID NO: 10911 - DNA, 309 bp, Glycine max
  Clone ID: LIB3039-014-Q1-E1-A6
gacaagtgagtttgctgatcgagataactagaaacagtgtgatgaaaatgaaggtccttgttttcttcgttgctacaattttggtagcatggcaatgccatgcgtacgatatgttccctctccgaatgaacactggctatggtgcccgtactccggaggtgaaatgcgcaagttggaggcttgctgtggaagcacacaacatctttggctttgagaccattcctgaagagtgcgttgaagcaacaaaggaatacatccatggcgaacaatatagatcagactccaaaacagttaaccaacaagcttact

SEQ ID NO: 10912 - DNA, 326 bp, Glycine max
  Clone ID: LIB3039-014-Q1-E1-A7
ggcacaagtgagtttgttgatcgagataactagaaacagtgtgatgaaaatgaacgtccttggtgtcttcgtctgctacaagtttggtaacatggcaatgccaagcctacgatatgttccctctccgaatgaacactggctatggtgcccgtactccggatgtgaaatgcgcaacttggacgcttgctgtagaagcacacaacatctttggctttgagaccattcctgaagagtgcgttgaggcaacatcggcatacatccatggcgaacaatatacatcagactccaaaacagttaaccaacaagcttacttttatgccagagac

SEQ ID NO: 10913 - DNA, 346 bp, Glycine max
  Clone ID: LIB3039-014-Q1-E1-A8
ggcacaagtgagtttgttgattgagataactagaaacagtgtgatgaagatgaaggtccttgttttcttcgttgctacaattttggtagcatggcaatgccatgcgtacgatatgttccctctccgaatgaacactggctatggtgcccgtactccggaggtgaaatgcgcaagttggaggcttgctgtggaagcacacaacatctttggctttgagaccattcctgaagagtgcgttgaagcaacaaaggaatacatccatggcgaacaatatagatcagactccaaaacagttaaccaacaagcttacttttatgccagagacctcgaagtccatcccaaggac

SEQ ID NO: 10914 - DNA, 221 bp, Glycine max
  unsure (1)..(221): unsure at all n locations
  Clone ID: LIB3039-014-Q1-E1-A9
tgggacgattactagaggtganaaacaattatctaagcatgtatagcgtgtattacattgagaaaaaaaaattgttgggtaaagagaaatggctaggtggtgcatcttggaggttcttgcccttgtcgtggttgacagtgcaaaaaccatgccaaatgacccaggtttggaggacaagaaaaccttccccgggtaggggtcccctggatttggaaaaattg

SEQ ID NO: 10915 - DNA, 364 bp, Glycine max
  Clone ID: LIB3039-014-Q1-E1-B1
gaaggggaaaaaaaaaagagtagagtggataatggcttcgttatcgctttgcatagccatgaggagcacccactcgctcagcttctctcattctcactaccccaaaaccatcttcactctctttgaaccttacccgcacttgctccagcgctcgctctccgctcctccattgctccttcctcgcttctccttcccatctctcttccccttcctccgtttcaggcttgtcacttggattggatttgacatctaatgttgggaccagaagaggaaaaggttctggcctagttgtgagggcaggcaaggctgctctttgtctgactaagagaagcagatcaagaaaatcattggcacgcactcatgg

SEQ ID NO: 10916 - DNA, 387 bp, Glycine max
  Clone ID: LIB3039-014-Q1-E1-B10
cggaaattccttcagtccttggagcttttcgaggaaaatgagaggaaaaagttggcaatcttcacagcacttgctttttcccagaagctgtctggtctcccaccagaaactgtgttccaaccacttcttaaagataaccttgtggccaaagggctagttctgtcatttatgactgacttctttaaggagtatctgattgacaacagtcttgatgatcttatttcaattctaaaacggggtaaagtagaggagaatcctttggacattttcccccctacaaaaagatctaatgaagccttctctgagcatttcaccaaggaaggactggtggccttggtggagtataatgaaaagaaaaattttgaggtgaaacttaaggaaatgaag

SEQ ID NO: 10917 - DNA, 392 bp, Glycine max
  Clone ID: LIB3039-014-Q1-E1-B12
ggcgtacacagcctcaacaaccctaacgcgtgcagagcagagagagacgcagccatggggcgaagacccgcgaggtgttataggcaaattaagaacaaaccataccccaagtcacggttttgccgtggtgttcctgatcccaagatcaggatttacgatgttggtatgaagaagaagggtgttgatgagtttcctttctgtgtccatctggttagttgggagaaggagaacgtttctagtgaggccctggaagctgctcgtattgcttgcaacaagtacatggccaaatttgctggaaaggatgctttccacttgagagtcagggtgcacccattccatgttcttaggatcaacaagatgctttcgtgtgctggagctgataggctccaaac

SEQ ID NO: 10918 - DNA, 362 bp, Glycine max
  unsure (1)..(362): unsure at all n locations
  Clone ID: LIB3039-014-Q1-E1-B3
gaattgaaaaaccaattaactaagcatatataccgtgtaaaacattgagaaaaaaagtgttgtgtanaaagaaatggctaggtggtgcatcttggtggttcttgcccttgtcgtggttgcaagtgccagaaacatgcccaatgacgcaagtttggaggaccagaagaacttcctcgggtatgggttctctggagttggcaacaatgggcttccctttggaggagtgggttctgggtttgatggtaatatgggtgggccttctgggctcggtggatttggaggattcggtgggcctagcgggctcggaggtcttggtaacngtgaagggcccaaccttcctctcccttgagagttgagaacac

SEQ ID NO: 10919 - DNA, 351 bp, Glycine max
  Clone ID: LIB3039-014-Q1-E1-B4
gacacttcaaaatcctctagtaacccttcttttctctctctctctctcgtgttctgagctgctacaagcaatggagaggaaaagaggccatgcttctttcaccatgtttgcaatgcgtgttggattgctctctcagagccttgtcattcctgtaatatccaccactgttgcagatcagaagagctactacaccccagatgcacatgctggaagtccccgcacaggctcacacgatagtagtcctcgacgtcatggccatgggagctctccaccctcacatcacaatagtccaagtactccatcaacaccctcaggtggaaactgtggatcatcacccccagaggatcatga

SEQ ID NO: 10920 - DNA, 389 bp, Glycine max
  Clone ID: LIB3039-014-Q1-E1-B5
ggcacaagtttgttgagatagctagaagcaataagatgaaaatgaaagtgcttgttttgtttgttgctacagttttggtagcatatgaatgccatggctcagactaccagaagttccctctccaaatgaaaactgggtttggtgggcaatacagcaatgaagtggcatgtgccaattggaggcttggccttgaagcaaacaacgtattcaagtggcaaactgttcctgcaacttgccgagagtacatagctgactacgttctatgagaccaatatagatcaaattccaaaacagttaaccaacaagcttatttctatgctaaatccctcacactcaccaacaaagatgtctttgtcttggacgttgacgacactactctctctaatctc

SEQ ID NO: 10921 - DNA, 382 bp, Glycine max
  unsure (1)..(382): unsure at all n locations
  Clone ID: LIB3039-014-Q1-E1-B6
gaccacattccaaaacacaaacacatacattgtagtatcacttttgtctcggaatttgttcttttgagttatggcaagcttaaaggttgcatgtgtggttttgatgtgcatggctgtgatgagtgcaccaatgatggtgcaagccgtgtcatgcaatgatgtttctgtgaacctagcaccgtgcctatcttacctgatgcagggtggagatgttccagaatcgtgctgtagcggattgaggaagattctgggttctgccagcaccacctttgacaaacaaaccgtgtgcaaatgtcttcagcaagctgctaataactatggcatcaacgacgaatacgctcaggcactncccgcccgctgcaatgtcagggtcgcttacaag

SEQ ID NO: 10922 - DNA, 354 bp, Glycine max
  Clone ID: LIB3039-014-Q1-E1-B7
ggtgcctggccatccggtttcccagatctgctccttcctcaccccacagaagtcagttgaagagcatgggtcgtggagttagcagtggtggtggtcaaagttccttgggttatctttttggcagtggagaggcccctgccgcaaaaccggcaacaaacaatgccccagcccaacctgaagtgcaggctgtaaataatgcgcctccttcaaaagcatctcctcctactaaaacaatagaccctaacaaggctgctggtataaacagtcattctactggtggccagaacaccggcaacttcatcacggaccgaccctcaaccaaggtccatgctgcccctggtggtggttcttctc

SEQ ID NO: 10923 - DNA, 321 bp, Glycine max
  Clone ID: LIB3039-014-Q1-E1-B8
ggcacaagtgagtttgttgatcgagattgctagatgcaatgtgatgaaaatgaatgtccttgttttctgcgttgctacacttttggtagcatggtaatgccatgcgtacgagatgtgccctctccgaatgaacactggctatggtgaccgtacaccggacgtgtaatgcgcaagttagatgcttgctgtggaagcatacagtatctttggctttgagaccagtcctgaagagtacgttgaagcagtacatgaatacatccatggcgaacaatatagatcagactcaaagatagttcaccaacaagcttacttttatgccat

SEQ ID NO: 10924 - DNA, 361 bp, Glycine max
  Clone ID: LIB3039-014-Q1-E1-B9
gatatttgagttcaaacagatcaaagccatggccacctccaacttctctattgttctctccgtctccctagccttctttttggtgctacttaccaaggcacactcgatcgataccgtttctttcaccttcaacaagttcaacccagtccaaccaatcattatgctccaaaaatatgctagtatttcatcctctggggtgttacaactcaccaaagttggcagcaacggcgtgcccaactcgggatctctcggtcgtgccctttacgctgccccaatccagatttgggacagcgaaaccggcaaggtagccatctgggctacatcctttaaattcaacattttcgcacccaacagatcatac

SEQ ID NO: 10925 - DNA, 390 bp, Glycine max
  Clone ID: LIB3039-014-Q1-E1-C1
gaccacattccaaaacacaaacacatacattgtagtatcacttttgtctcggaatttgttcttttgagttatggcaagcttaaaggttgcatgtgtggttttgatgtgcatggctgtgatgagtgcaccaatgatggtgcaagccgtgtcatgcaatgatgtttctgtgaacctagcaccgtgcctatcttacctgatgcagggtggagatgttccagaatcgtgctgtagcggagtgaggaacattctgggttctgccagcaccacctttgacaaacaaaccgtgtgcaaatgtcttcagcaagctgctaataactatggcatcaacgacgaatacgctcagacactccccgcccgctgcaatgtcagcgtcgcttacaagatcagccg

SEQ ID NO: 10926 - DNA, 306 bp, Glycine max
  unsure (1)..(306): unsure at all n locations
  Clone ID: LIB3039-014-Q1-E1-C10
ggcacaagtttgttgagatagctagaagcaataagatgaaaatgaaagtgcttgttttgtttgttgctacagttttggtagcatatgaatgccatggctcagactaccagaagttccctctccaaatgaaaactgggtttggtgggcaatacagcaatgaggtggcatgtgccagttggaggcttggcgtggaagcaaacaacgtagtcaagtggcaaactgttcctgcagcttgcggagagtacatagctgactacgttctangagaccaatatagatcagattccaaaacagttaaccaacaag

SEQ ID NO: 10927 - DNA, 286 bp, Glycine max
  Clone ID: LIB3039-014-Q1-E1-C11
ggcacaagtgagtttgttgatcgagataactagagacagtgtgatgaaaatgaaggtccttgttttcttcgttgctacaattttggtagcatggcaatgccatgcgtacgatatgttccctctccgaatgaacactggctatggtgcccgtactccggaggtgaaatgcgcaagttggaggcttgctgtggaagcacacaacatctttggctttgagaccattcctgaagagtgcgttgaagcaagaaaggaatacatccatggcgaacaatatagatcagactcc

SEQ ID NO: 10928 - DNA, 358 bp, Glycine max; identical to SEQ ID NO: 7611
  Clone ID: LIB3039-014-Q1-E1-C12

SEQ ID NO: 10929 - DNA, 366 bp, Glycine max
  Clone ID: LIB3039-014-Q1-E1-C2
tgatgcaaaggctgcaaaaaagggtggagagagacaattcaatggtctcgttgatgtctacaggaagacattggcatctgatggtgttgccgggctctaccgtggtttcaacatctcatgtgttggaatcatcgtgtatcgtggtctgtactttggattgtatgattctgttaaaccagttgtcctcacagggtcattgcaggatagcttttttgccagctttgcccttggatggctcattaccaatggtgcaggtcttgcatcatacccaatagacactgttagaagaagaatgatgatgacctctggtgaagctgtcaagtacaagagctccttggatgcattcacacagatcctcaagagtga

SEQ ID NO: 10930 - DNA, 353 bp, Glycine max
  Clone ID: LIB3039-014-Q1-E1-C3
gaagcaaagccctaatccctctttcttcctcttcctcagtagggcgattttcgattcacttctctgcaactaggcctaaccctaaggtcttcttcgacatgaccatcggcggtcaacctgccggccgcatcgtgatggagctctacgccgacgtgactccgagcaccgccgagaacttccgcgcgctctgcatcggtgagaagggcgccgggtcggacggtaagcccctccactacaaatgctcgtccttccagcgcgtgatcccgaacttcatgtgccagtgcggcgacttcaccgccggaaacggcaccagacgcgagtcgatctacggcgccaagttcgccgacgagaac

SEQ ID NO: 10931 - DNA, 359 bp, Glycine max
  Clone ID: LIB3039-014-Q1-E1-C4
gaaccctcattcagtttctctttctctctgtgaacacaaaccctaacaagaagaagaaagagcgatgatgcgttggtagatcgtgatctggtgcgggcgcgatcattgtacgatcggtgcgttcgaatttcgcactgacgtttgggagttgagtgaaggaatcgctattatgtctgaattggtggcgcgtacgggccggcatcagcagcggtacgagaacggttaccgtcttgtttccggggaggttgggagactgacgaaactgttgagcaggcagctgtcagggaagctgtataagaagcaggagttcgaggagacataatggattttcttggacactacgaagtttacgagtaaga

SEQ ID NO: 10932 - DNA, 386 bp, Glycine max
  Clone ID: LIB3039-014-Q1-E1-C5
gacaggtgcaagttgagattttgattgttgttgggctcccaaattcccaaaacagtgatgatcttaagtaaaagaaatgtttttggcaccaagggaaaaatgggtatagatttcatgattttggtgttaacattgtcatggttttgtctgactactatatgcgtctcagctacaaaacaagcatacccaccaacaccacaaccgaaccagaacctaaggtttgaccaagatggagaattcgagatattgcaggtggcagatatgcactatgcaaatggcaagaccacgcattgcttgaatgtgctcccttcccagaatttttcttgctctgacctcaacaccactatctttcttaacagaatgatcaaagcgggagaaacccaatc

SEQ ID NO: 10933 - DNA, 363 bp, Glycine max
  Clone ID: LIB3039-014-Q1-E1-C8
gatagcgaaacagagagtggtttcagtgagtgatcggtgttcacttgatccttcataagtcgtcatcatcagcatcatcatcaccgttgattgaagaagatgccgatcagaaacatcgccatcggaaggcctgaagaggctactcaccccgacacgttgaaggcggggttggctgagttcatctccaccttgatcttcgtgttcgccggttcaggttccggcatcgcctacaacaagctcaccgagaacggcgccgccactcccgccggcctcatctccgcttccatcgcccatgctttcgccctcttcgtcgccgtctccgtcggcgccaacatctccggcggccacgtcaaccccgccgtc

SEQ ID NO: 10934 - DNA, 180 bp, Glycine max
  Clone ID: LIB3039-014-Q1-E1-C9
acatataagcataatctctggaaaaccttatctgatcctggctcatagccgacgaataaggatggggcaaactatgtggcctggtttggggttcagaatttaaccatagttttactcatttacatatatatattgaatgcacattctgtagcatacgatatcttgtatacggttgaatat

SEQ ID NO: 10935 - DNA, 209 bp, Glycine max
  Clone ID: LIB3039-014-Q1-E1-D1
gattcccaacgaaccaacacagcctcacaagtaacaaacttataacacacactctctctctctctctctgcaatggctggaatggttcacctttgcattgcatcattggtcactctttttgttgcaacaagtgctagaattcctggggttttcaatggtggtgcatggcagggtgcccactgcactttctacggtggaaatgatgcctc

SEQ ID NO: 10936 - DNA, 384 bp, Glycine max
  Clone ID: LIB3039-014-Q1-E1-D10
gcttgtttgcgagatagaagcgtaagcagcggctaccctaacctcgtcttcctctctactaatttcagctatggccgacgaagctgtggttgttccagatcccacccagatcgatgtcaagctctttaaccgctggagcttcgaggatattgaggttactgacatttcactggctgattacattggagttgcggcatccaagcacgccacatatgttcctcacaccgccggaaggtactccgtgaagcggttcaggaaggcgcagtgccccattgttgagaggctcaccaactctctcatgatgcatggtagaaacaatggcatgaaactcttggctgttaggatcatcaagcatgctatggagattattcatttgttgactga

SEQ ID NO: 10937 - DNA, 388 bp, Glycine max
  Clone ID: LIB3039-014-Q1-E1-D11
ggcacaagtgagtttgttgatcgagataactagaaacagtgtgatgaaaatgaaggtccttgttttcttcgttgctacaattttggtagcatggcaatgccatgcgtacgatatgttccctctccgaatgaacactggctatggtgcccgtactccggaggtgaaatgcgcaagttggaggcttgctgtggaagcacacaacatctttggctttgagaccattcctgaagagtgcgttgaagcaacagatgaatacatccatggcgaacaatatagattagactccaaaacagttaaccaacaagcttacttttatgccagagacctcgaagtccatcccaaggacacatttgtgttcagtatagaaggcaccgtactctccaatatt

SEQ ID NO: 10938 - DNA, 380 bp, Glycine max
  Clone ID: LIB3039-014-Q1-E1-D12
ggtgcacaagtgagtttgttgatcgagataactagaaacagtgtgatgaaaatgaaggtccttgttttcttcgttgctacaattttggtagcatggcaatgccatgcgtacgatatgttccctctccgaatgaacactggctatggtgcccgtactccgggggtgaaatgcgcaagttggaggcttgctgtggaagcacacaacatctttggctttgagaccattcctgaagagtgcgttgaagcaacaaaggaatacatccatggcgaacaatatagatcagactccaaaacagttaaccaacaagcttacttttatgccagagacctcgaagtccatcccaaggacacatttgtgttcagtatagatggcaccgtact

SEQ ID NO: 10939 - DNA, 382 bp, Glycine max
  Clone ID: LIB3039-014-Q1-E1-D2
gaaggtgcaagagtttgttgtgagctataagctagtttatcgtgaggagaatatgaagttgtttgttttctttgttgctgcagtagttttggtagcatggccatgccatggcgcaggctaccaaaggttccctctccgaatgaaaactggctatggtgagcgttcttcggaggtaaaatgcgcaagttttaggcttgctgtggaagcacacaacatccgagcctttaaaaccattcctgaagagtgcgttgaaccaacaaaggactacattaatggcgaacaatttagatcagactctaaaacagttaaccaacaagctttcttttatgctagtgaacgcgaagtccatcacaacgacatatttatagtcggcagagataca

SEQ ID NO: 10940 - DNA, 285 bp, Glycine max
  unsure (1)..(285): unsure at all n locations
  Clone ID: LIB3039-014-Q1-E1-D3
ggtacacctgaatttgtttattgacaatactagaatcaatgttgagaaaaataagggcctttgtttcctccttgtggtacaattttggtaccagtgcaatgccatgcgtacgatatatgccctctccgaatgaacactggctatggtgcccgtactccggaggtgaaatgcgcaagttggangcttgctgtgaaagcacacaacatctttggctttgagaccattcctgaaaagtgcgttgaggcaggaatggaatacatccatggcgaacaatatagataagac

SEQ ID NO: 10941 - DNA, 389 bp, Glycine max
  Clone ID: LIB3039-014-Q1-E1-D5
gatccacagatttcgcgaaaaataaaaaaatatcacgcgctggtaccacctttccccaaaccatcaattcgaatcctcccagtttccacaatcttcaaccttcaaattctgcgtcacctttcttcatttcacttcagagagagagaacaaaacagaatgggcgtcgtggtgatcgacggcagcaccgtgcgcgacttcgtgaacgacgaaaccgccttcaccaagagcgtggacgagcagttctcggcgctggacctcaacaacgacggcgtcctctcgcgctcggagctccgcacggccttcgagtccatgcgcctcatcgagacgcacttcggcatcgacgtttccacgccgctggagcacgtcgggaggcgctacgactccatctt

SEQ ID NO: 10942 - DNA, 68 bp, Glycine max
  Clone ID: LIB3039-014-Q1-E1-D6
ttccaaaaaaacaacaaagggggacctcgctgtgaacacatcaatggattacacaaaacctaggcatc

SEQ ID NO: 10943 - DNA, 311 bp, Glycine max
  unsure (1)..(311): unsure at all n locations
  Clone ID: LIB3039-014-Q1-E1-D7
ggtgggcgaggtagccagagagtgatacaatacagagtgcgttgttgctccttcgccacaactccctgcgaacatgggtagtctccagagattctatgcacaanaggcgtgccactggtggcaagaagaaggcatggaggaagaagagaaagtatgagcttggtcgccagcctgctaacactaagctgtcaagcaacaagacagtcaggaggatccgggttagaggtggaaatgtgaagtggagggcactgagattggatactggaaattactcctgnggaagtgaagctgtaactcgcaggactcgtata

SEQ ID NO: 10944 - DNA, 320 bp, Glycine max
  Clone ID: LIB3039-014-Q1-E1-D8
cagtgtacattaccgaaaatggcgttgcggaatcaaagaatgactcacttgcaatcaatggaagcccgaaaggatggtattcgaattagataccatgatggccatctcaaatccctgcttcatgcgatcaaagatagagttaatgtgaagggctactatatatggtcattttcagatagctttgaatgggatgctggttacacagctcgatttggcatcatatatgtggattacaagaacaatttgagtagataccctaagtcctctgcgttttggctgaaaacaatgctgttactgcgtttgcgaatcaacatgatctc

SEQ ID NO: 10945 - DNA, 391 bp, Glycine max
  Clone ID: LIB3039-014-Q1-E1-E1
ggcacaagtgagtttgttgatcgagataactagaaacagtgtgatgaaaatgaaggtccttgttttcttcgttgctacaattttggtagcatggcaatgccatgcgtacgatatgttccctctccgaatgaacactggctatggtgcccgtactccggaggtgaaatgcgcaagttggaggcttgctgtggaagcacacaacatctttggctttgagaccattcctgaagagtgcgttgaagcaacaaaggaatacatccatggcgaacaatatagatcagactccaaaacagttaaccaacaagcttacttttatgccagagacctcgaagtccatcccaaggacacatttgtgttcagtatacatggcaccgtactctctaatattccg

SEQ ID NO: 10946 - DNA, 387 bp, Glycine max
  Clone ID: LIB3039-014-Q1-E1-E10
ggttctagtgtgtgattgtttgttgttgtaactcgttcttcttcttttgttgttctgtgtttgtgtttgttttttctctcacctgaaaatgtcttgctgcggtggtaactgtggttgcggaagctcctgcaagtgcggcaacggctgcggaggctgcaagatgtacccagacttgagctacactgagtcaaccaccaccgagaccttggtcatgggagtggcacctgttaaggctcaatttgagggtgctgaaatgggtgtgcccgctgagaacgatggctgcaaatgtggaccaaactgctcctgcaacccctgcacttgcaagtgaggtgttgggagagcaagcttcaagcagagatagcccttaattaggaataatgataaact

SEQ ID NO: 10947 - DNA, 390 bp, Glycine max
  Clone ID: LIB3039-014-Q1-E1-E11
ggccgtttattcatggaccagaagaatacatcatagcttctttctcatttcacacacacaagaaccttgagacatcatgaagatttcaagttccaagcaattggctgtgggatttgcacttggaaatgaaggataggcaacgttggagagctgaagaggatgctttacttcgtgcatatgtcaaacagtatggtcctagggaatggaatctcgtgtctcagcgcatgaacacacctcttaacagggatgccaagtcatgcttataaaggtggaagaactacctcaaacccggcattaaaaaaggatctcttactgaggaagagcagcgtctagtcatcaatcttcaagcaacgcacgggaacaagtgggagaaaattgcagcacaagtcc

SEQ ID NO: 10948 - DNA, 385 bp, Glycine max
  Clone ID: LIB3039-014-Q1-E1-E12
ggaacttctcacgttcatttctacacatccctagctctgtcgttccgtcgttgacgatggcgtttcgggtgcgaagccctgacctccgctctctctttcttctctctctcttgtccatcgcttccgccaatgtcttcttcgaagagcgtttcgatgacgggtgggaaaatcgatgggttaaatcagattggaaaaaagatgagaacgtggctggggagtggaaccacacctctggtcaatggaatggagacgctaatgacaaaggtattcaaaccagtgaggattacagattctatgctatttcagctgagtaccctgaattcagcaacaagggtaagacactagtctttcaattttctgttaagcacgaacagaagcttgactg

SEQ ID NO: 10949 - DNA, 393 bp, Glycine max
  Clone ID: LIB3039-014-Q1-E1-E2
gacaccgagtcgcagaaaaagaaaaaagcgatcatagtttcacttcggccttatcctgtttagggtttcggttctcgaccctatctttcacgtatcgaaaccttaaatttacgatcaggtctgagcaatctggttggtagaacctttggtcttagtgagtcaagttttatgtctgaattggacgatcaaattcctactgccttcgatccttttgctgatgcaaatgctgatgactcgggtgctgggtcaaaggagtatgtgcatattcgtgtacagcagcgaaatggtaggaaaagcctgacaaccgttcagggattgaaaaaggaattcagctataacaggatacttaaagacgtcaagaaagagttctgttgcaatggaacagttgttcag

SEQ ID NO: 10950 - DNA, 388 bp, Glycine max
  Clone ID: LIB3039-014-Q1-E1-E3
ggccctccttctctcttccttccttccaacgactacaaatcactgcaatcaaggtttgacttccatgggaccctgttaagcttccggaaccccattccaaatttctccgtgttggatgcgtcctccaaacaaaatgggaataagggccaatcccaaaaatttgaatttccgaaattgcagaataaaggttaagagccccaaaaattgccccagaaaagggtcgtgacgtaaccccgttgggtccttggccttctgaaggatctgcaccaaaagtgcacaaaggagatggatgaatatgttggctgcatgtactaccatacaaatgaatttgacgtgtgtcgcaaagagcagcaagcatttgagaaaaagtgcgctttggaatgaaatt

SEQ ID NO: 10951 - DNA, 369 bp, Glycine max
  Clone ID: LIB3039-014-Q1-E1-E4
ggaagaacaagtcttgcattgggtggagcatacttagaaacagcaactatgtctctcatgcagcttactagctcccctgttggctcactggtccgtttcattgtaatatttgctttatggtacagaaccatggctttggccaagttgccaccaaacgcttcatcagttccagcagttttagcgtttggagattccatcgtggacccaggcaacaacaacagcataataacattgatcaagtgcaacttcgcaccttatggaatggattttcagggaggaaacccaacgggtcgattttgcaatggagaaattccttctgacttaatagttgaacaattgggtattaaggagtacttgcctgcatatttg

SEQ ID NO: 10952 - DNA, 400 bp, Glycine max
  Clone ID: LIB3039-014-Q1-E1-E6
cgacagaaggggaacaaacacttattatatattcatctttctcttttttagcttttcttttcctctaaaagtgagtccttccttcttcgatcacttgttaaagtcacatatcatagcaatggcagcacgtgcctacagccccatcatggttgccctctctttgcgtcttttggtcacattctctaatgtagctgaggcttatacacgcagtggaacacttcgtccttcagattgtaaaccaaagtgtacttaccgttgctctgcaacttcacacaagaagccatgcatgtttttctgccagaagtgttgtgctaaatgcctatgcgttcctcctggtacatatggcaacaagcaaatttgcccttgctacaacagctggaagacgaaggaaggaggaccc

SEQ ID NO: 10953 - DNA, 386 bp, Glycine max
  Clone ID: LIB3039-014-Q1-E1-E7
ggcacaagtgagtttgttgatcgagataactagaaacagtgtgatgaaaatgaaggtccttgttttcttcgttgctacaattttggtagcatggcaatgccatgcgtacgatatgttccctctccgaatgaacactggctatggtgcccgtactccggaggtgaaatgcgcaagttcgaggcttgctgtggaagcacacaacatctttggctttgagaccattcctgaagagtgcgttgaagcaacagaggaatacatccatggcgaacaatatagatcagactccaaaacagttaaccaacaagcttacttttatgccagagacctcgaagtccatcccaaggacacatttgtgttcagtagagatggcaccgtactctctaata

SEQ ID NO: 10954 - DNA, 327 bp, Glycine max
  Clone ID: LIB3039-014-Q1-E1-E8
gaggcggagacgaataagtgacgagaagagaagagaagggatttggatctgaaaagacaatatggggggaggaagggaagcaggcaggaacaggttcatacaggattggggcactgccagagagaatctggagttcaagttccgttggactcgccgcagccgtgctcttgttggcatcttcggcatcgctattcccgtcctcgtctacaagggcatcgtccgtgaattccatatgcaggatgaggatgatggtcggccgtacaggaagttcatgtgagagagtatggagagtcttttgtaataattcgtcaagttagaccttgatac

SEQ ID NO: 10955 - DNA, 366 bp, Glycine max
  Clone ID: LIB3039-014-Q1-E1-E9
gatgccacaatggttgtccctcttaggcactttcttgttttctctctcaccctcatatccatcatcttccaaacccatggagcgttctctgagcaatcaataatcaagttacccacagaccaaccaagggtagagaaactgacccacttgcattttttctaccacgacatcttatagggcaagaacatcacggtggtgaaaatcatcgagccatcagcgagcgaggttcgtgaagcaactgggtttggaaccactttcaggattgacaatgttttgaccgagggtccagagctgagctcgaagcacgttgggagggctcaggggctgtttggcttggcctctttggaggaccgtggaatggtgatg

SEQ ID NO: 10956 - DNA, 389 bp, Glycine max
  Clone ID: LIB3039-014-Q1-E1-F1
gaattattatttttttcatcgcattcaacctttctcttcctcctcactcaaacttcccctctctacgccgttcctcccaaatggatgcaccaatggagttttggggtgttgaggttaaggttggtcagaccgtgacagttgacccaatggatcctgtggattcatacatacacatatctcaggttgcgctcggagaggcgaaaaaggagaaacctaatgagtctgtggttttgtatttggaagttggtgaacagaagattgtcttgggaaccctttctagggatggcattcctcatctatcgttggatttggttctggactccgattccgagctttcccacacttcagaaagtgcaagtgtctttttcggtgggtacagagtactaact

SEQ ID NO: 10957 - DNA, 361 bp, Glycine max
  Clone ID: LIB3039-014-Q1-E1-F10
ggtgagacgagggtaaggtcgcgttgtgttgcgtcgtgtcgtgcgctgttcctctgtctgtcgtttttgttttcagaccaaaccctagctccgcatcgcaaccatgtcgaccaagcaaggtggaaaagctaagcctttgaagaaacccaagtctgataagaaggattacgacgaggttgacatggctaacattcagaagaaaaaggaagaggagaaggcgctaaaggagttgaaagccaaggcgcaacagaagggaagctttggaggttctgggctcaagaaaagtggaaagaaataagggctctttatcatgattgtatacatccaatattgagccctgtagtttattaccatgataact

SEQ ID NO: 10958 - DNA, 371 bp, Glycine max
  Clone ID: LIB3039-014-Q1-E1-F11
ggctgcagcttgtcatcaccatcgcgcccaagagagagagagagagagaggcgcgaaaatgagcggagcgaaggggaagaagaagggagcgagctttgtgatcgattgcgcgaagccggtggaggataaaattatggacattgcttctctggagaagttccttcaggagaggattaaggttggcggcaaggccggtgcactcggcgattccattactgtcactagggacaagagcaagatcaccgtcacctccgacagcaacttctctaaacggtatctgaaatatttgaccaagaagtacttgaaaaagcacaatgtgagggattggcttcgcgtgattgcatccaacaaggagcggagtgtctatgaat

SEQ ID NO: 10959 - DNA, 378 bp, Glycine max
  unsure (1)..(378): unsure at all n locations
  Clone ID: LIB3039-014-Q1-E1-F12
gagggtagatcaggcaggcttcagttcagccatgagaactcatactcacacttacacttatactattttctctctaattcttctctccttatttcttcgaacccattccgaggttataacgttaacctctgatacatttaatgataagatcaaggagaaagacactgcatggtttgtgaaattctgcgttccctggtgcaagcattgtaagaatcttggttcattgtgggatgatttggggaaagcaatggaaggagaagatgaaatanaggttggagaagtcgattgcggcatggacaaagcagtatgttccaaagttgatattcactcctatcctacctttaaggttttctatgatggtgaagaagtaccagatac

SEQ ID NO: 10960 - DNA, 395 bp, Glycine max
  unsure (1)..(395): unsure at all n locations
  Clone ID: LIB3039-014-Q1-E1-F2
gacaagtgagtttgttgatcgagataactagaaacagtgtgatgaaaatgaaggtccttgttttcttcgttgctacaattttggtagcatggcaatgccatgcgtacgatatgttccctctccgaatgaacactggctatggtgcccgtactccggaggtgaaatgcgcaagttggaggcttgctgtggaagcacacaacatctttggctttgagaccattcctgaagagtgcgttgaancaacaaaggaatacatccatggcgaacaatatagatcagactccaaaacagttaaccaacaagcttacttttatgccagagacctcgaagtccatcncaaggacacatttgtgttcagtatagatggcaccgtactctcgaatattcaatactac

SEQ ID NO: 10961 - DNA, 388 bp, Glycine max
  Clone ID: LIB3039-014-Q1-E1-F3
ggcacaagtgagtttgttgatcgagataactagaaacagtgtgatgaaaatgaaggtccttgttttcttcgttgctacaattttggtagcatggcaatgccatgcgtacgatatgttccctctccgaatgaacactggctatggtgcccgtactccggaggtgaaatgcgcaagttggaggcttgctgtggaagcacacaacatctttggctttgagaccattcctgaagagtgcgttgaagcaacagaggaatacatccatggcgaacaatatagatcagactccaaaacagttaaccaacaagcttacttttatgccagagacctcgaagtccatcccgaagacacatttgtgttcagtatagatggcaacgtacgctctaatatt

SEQ ID NO: 10962 - DNA, 374 bp, Glycine max
  Clone ID: LIB3039-014-Q1-E1-F4
gagcgaaacagagagtgatttcagtgagtgatcggtgttcacttgatctcatcataatcgtcagcgtcaattgaagaagatgccgatcagaagcatcgccgtcggaaggcctgaagaggcgactcaccccgacacgttgaaggcggctttggctgagttcatctcaaccttcatcttcgtgttcgccggctcaggctccggcatcgcctacaacaagctcaccgacaacggcgctgccacccctgccggcctcatctccgcctccatcgcccatgcattcgccctcttcgtcgccgtctccgtcggcgccaacatctccggcggccacgtcaaccccgccgtcaccttcggcgccttcgtcggcggcaacatca

SEQ ID NO: 10963 - DNA, 363 bp, Glycine max
  Clone ID: LIB3039-014-Q1-E1-F5
gctcacgatctgaggaagacaccaatcttctctccacgcccttcttgggtaaccgtctgaagtgcagcaatggcagatggattgcattcgcagcatccatcggtagttcagaagttatctggacagtcttatcttgtgtccaggcttgctcctaatcactccagaaactgttctaccactggtagttacttcaatggaggtttgcagtcttcaggtttggttccagtcacggcacacgcgccggctgagaaaggggtgtctggatttttgttggatttcctgatgggcggagtgtcggcggctgtgtccaagacagctgcggctccaatcgaacgagttaagttgctcatccaaaaccaggat

SEQ ID NO: 10964 - DNA, 370 bp, Glycine max
  Clone ID: LIB3039-014-Q1-E1-F6
ggcacaagtgagtttgttgatcgagataactagaaacagtgtgatgaaaatgaaggtccttgttttcttcgttgctacaattttggtagcatggcaatgccatgcgtacgatatgttccctctccgaatgaacactggctatggtgcccgtactccggaggtgaaatgcgcaagttggatgcttgctgtggaagcacacagcatctttggctttgagaccattcctgaagagtgcgttgaagcaacagaggaatacatccatggcgaacaatatagatcagactccaaaacagttaaccaacaagcttacttttatgccagagacctcgaagtccatcccaaggacacatttgtgttcagtatagagggc

SEQ ID NO: 10965 - DNA, 385 bp, Glycine max
  Clone ID: LIB3039-014-Q1-E1-F7
ggcagcgcttgagaccaagccccactcaaccaccacaccactctctctgctcttcgtctacctttcaagtttttaaagtagtaagatggcagagacattcctagttacctcagagtcagtgaacgagggacaccctgacaagctctgcgaccaaatctccgatgctgtcctcgacgcttgccttgaacaggacccagacagcaaggttgcctgcgaaacatgcaccaagaccaacttggtcatggtcttcggagagatcaccaccaaggccaacgttgactacgagaagatcgtgcgtgacacctgcaggaacatcggcttcgtctcaaacgatgtgggacttgatgctgacaactgcaaggtccttgtaaacattgagcagcag

SEQ ID NO: 10966 - DNA, 393 bp, Glycine max
  Clone ID: LIB3039-014-Q1-E1-F8
acacaaaatataagaatggcgtttacgctttatggtctaccaatgtcgacaaacactacccgtgccatgatctgtctccatgagaaagaggtggattttgaacttgttccagtcagtgtgttcgctgcagagcataagcagcctccttttctctccaagaatccctttggtttgattccagtactggaagatggtgatctcactctttttgagtccagagccattaccgcagatgtggctgaggaattcaaggaaacaggagccgatctgataaggcataaggacgcgaaagaagcagcactggtaaaggtgtggacagaggtacagtctcattactacgagccagcagtgtcacccattatctacgagtgcttcgggggcccctttccaagg

SEQ ID NO: 10967 - DNA, 393 bp, Glycine max
  Clone ID: LIB3039-014-Q1-E1-F9
gggactcgaagtgtaagcactaagtggttgaggaaatgggaacccttgggagagcgatctacagcgttggtaactggattcgagggactggacaggccattgatcgtctcggttccctcctccagggcggttactacgtccaagagcagctgtctaggcatcgaactctgatggacatatttgataaggctcctgttgttgatgaggatgtatttgttgcgcctagtgcctccgtcattggagacgttcaacttggaagaggatcatccatttggtatggagttgtcttgaggggtgatgttaacagcatcagagttggaactggaactaacatacaggacaactctctggtgcatgttgcaaagtcaaatttaagtgggaaggtgttgccta

SEQ ID NO: 10968 - DNA, 391 bp, Glycine max
  Clone ID: LIB3039-014-Q1-E1-G1
gaaggtgcaagagtttgttgtgagctataagctagtttatcgtgaggagaatatgaagttgtttgttttctttggtgctgcagtagttttggtagcatggccatgccatggcgcaggctaccaaaggttccctctccgaatgaaaactggctatggtgagcgttcttcggaggtaaaatgcgcaagttttaggcttgctgtggaagcacacaacatccgagcctttaaaaccattcctgaagagtgcgttgaaccaacaaaggactacattaatggcgaacaatttagatcagactctaaacagttaaccaacaagctttcttttatgctagtgaacgcgaagtccatcacaacgacatatttatattcggcataggtaacaccgtactct

SEQ ID NO: 10969 - DNA, 377 bp, Glycine max
  Clone ID: LIB3039-014-Q1-E1-G10
gactctcgctcttgcaattattcctcttctcgcaatccgcactaaaattctagggttccgaaatggacgctgacggaaagatcaagaagggcgccggcggaagaaagggcggcggcccaaagaagaagccggtttcaaggtccgtcaaagccggtctccaattccccgtcggaagaattggccgttatttgaagaaaggaaggtacgctcagcgtgtcggtaccggtgctcccgtatacttggctgcagttctcgaatacctagctgccgaggtgcttgagttggctgggaatgcagcacgtgacaacaagaagaacaggattattccaagacacgtgcttttggcagtgaggaacgatgaggagttggggaaattg

SEQ ID NO: 10970 - DNA, 378 bp, Glycine max
  Clone ID: LIB3039-014-Q1-E1-G11
gggtttcagtgagtgatcggtgttcacttgatccttcataagtcgtcatcatcatcatcatcatcaccgttgattgaagaagatgccgatcagaaacatcgccatcggaaggcctgaagaggctactcaccccgacacgttgaaggcggggttggctgagttcatctccaccttgatcttcgtgttcgccggttcaggttccggcatcgcctacaacaagctcaccgacaacggcgccgccactcccgccggcctcatctccgcttccatcgcccatgctttcgccctcttcgtcgccgtctccgtcggcgccaacatctccggcggccacgtcaaccccgccgtcaccttcggcgccttcgtgggcggcaacatcac

SEQ ID NO: 10971 - DNA, 392 bp, Glycine max
  Clone ID: LIB3039-014-Q1-E1-G12
gacacttcaaaatcctctggtaacccttattttatctattctctctctttcttttgtgttctaagcagctagaagcaatggagaggaaaagaagccatgcctctttcaccatgtttgcaatgcttgttggagtgatctctcagagccttgtcattcctgtagtatccaccactgttgaagatcagaagaactactacaccccagatccacatgctggaagtcccccctcaggtttctccgattctctgtgctcaaacagtagtactcctccatctcatggccatggaagctctccaacctcacatcatcacagtagtccaagtactccatcaacaccctcaggtggaaactgtggatcatcacctccacaacatcatgatccaacaacaccc

SEQ ID NO: 10972 - DNA, 394 bp, Glycine max
  Clone ID: LIB3039-014-Q1-E1-G2
gttccccattcccaaatttctcattctcccatttcctctcagaaccctcgatcactcccacgcgctcctatatcctcgccttcaccgtcgctctctccaacgatcacaacaacatcgtcatcccatggcaaacgccgcatctggtatggcagtccatgatgactgcaagttaaggtttttggagctgaagacaaagaggacacaccgtttcatagtttttaagattgaggagcagcagaagcaggtcattgtggagaagcttggtgagccagcccaaggctatgaagatttcactgccagccttcctgctgatgagtgccgttatgctgtttatgattttgagtatctgactgaagggaatgtccctaaaagcagagattggtttcattgcatg

SEQ ID NO: 10973 - DNA, 350 bp, Glycine max
  Clone ID: LIB3039-014-Q1-E1-G4
gcacaagtgagtttgttgatcgagataactagaaacagtgtgatgaaaatgaaggtccttgttttcttcgttgctacaattttggtagcatggcaatgccatgcgtacgatatgttccctctccgaatgaacactggctatggtgcccgtactccggaggtgaaatgcgcaagttggaggcttgctgtggaagcacacaacatctttggctttgagaccattcctgaagagtgcgttgaagcaacagaggaatacatccatggcgaacaatatagatcagactccaaaacagttaaccaacaagcttacttttatgccagagacctcgaagtccatcccaaagacacatt

SEQ ID NO: 10974 - DNA, 389 bp, Glycine max
  Clone ID: LIB3039-014-Q1-E1-G5
gaactcctcaaactgaaaagtgaacagagaaagaaatggagaatgcggaggagcagcagcagcaaaacgaggaggttttgtcggttgaacttccggctccttccggttggaataaactgttcttccctaagaaagtgggaacaccaagaaaaagtgagattgtattcattgctccaactggggaggagatcaataccaaaaaacaattggagcagtacctaaaggcacatcctggcaatcctgtcatttcagagtttgactggggaactggtgagacccccaggcgatcagcaaggatcagtgagaaggtcaagtcaactccaccagcagatagtgatactccaaagaaacgtgctcggaaatcatcaggatcaaagaaggataacaaa

SEQ ID NO: 10975 - DNA, 389 bp, Glycine max
  unsure (1)..(389): unsure at all n locations
  Clone ID: LIB3039-014-Q1-E1-G6
ggcacaagtgagtttgttgatcgagataactagaaacagtgtgatgaaaatgaaggtccttgttttcttcgttgctacaattttggtagcatggcaatgccatgcgtacgatatgttccctctccgaatgaacactggctatggtgcccgtactccggaggtgaaatgcgcaagttggaggcttgctgtggaagcacacaacatctttggctttgagaccattcctgaagagtgcgttgaagcaacaaaggaatacatccatggcgaacaatatagatcagactccanaacagttaaccaacaagcttacttttatgccagagaactcgaagtccatcccaaggacacatttgtgttcagtatagatgggcacgtactctctaatattc

SEQ ID NO: 10976 - DNA, 375 bp, Glycine max
  Clone ID: LIB3039-014-Q1-E1-G7
gatcgatttgattgtttctgagtaatggcttcgtcgcgagtagatctggatgggaaccccataaagcccatcaccatttgcatgattggcgccggtggcttcattgggtcccacctctgcgagaagctcatgtcggagacccctcacagtgtcctcgccttggatgtctacaatgacaagatcaaacacctcttggaaccccacacgctcccttgggcctctcgcatccagttccatcgcctcaacatcaagcacgattcccgtctcgaaggcctcatcaaaatgtcagatctgactattaatctggctgccatttgcactcccgcggattacaacacgcgccctcttgacacaatttacagcaacttcatcgac

SEQ ID NO: 10977 - DNA, 369 bp, Glycine max
  unsure (1)..(369): unsure at all n locations
  Clone ID: LIB3039-014-Q1-E1-G8
ggaacgaaaattagggtttgtagtgtagcaggaagaagcagcaatggcgccgaagataacacgtaaggttagcagaaaccctgaattgataaggggaaaatgaaagtgcttgttttgtttgttgctacagttttggtagcatatgaatgccatggctcagactaccagaagttccctctcgaaatgaaaactgggtttggtgggcaatacagcaatgaggtggcatgtgccagttggaggcttggcgtggaagcaaacaacgtagtcaagtggcaaactgttcctgcagcttgcggagagtacatagctgactacgttctangagaccaatatagatcagattccaaaacagttaaccaacaagcttat

SEQ ID NO: 10978 - DNA, 384 bp, Glycine max
  Clone ID: LIB3039-014-Q1-E1-G9
gaaccacaagaatgagggagatattgcacgtgcaaggtgggcaatgcgggaaccaaatcggttccaagttctgggaagtgatatgcgacgaacacggcatcgaccccaccggaaagtacaccggcgacgaggcctccgatctccaactggagaggatcaacgtctactacaatgaggcctccggcggaaggtacgttccccgggccgtcctcatggatctggagcccggcaccatggacagcatcagatccggcccatacggcaagatcttcaggcccgacaactttgtctttggccagtccggcgccggcaacaattgggccaagggccactacaccgaaggtgccgagttgatcgattccgtcctcgacgtcgttcgcaaag

SEQ ID NO: 10979 - DNA, 388 bp, Glycine max
  Clone ID: LIB3039-014-Q1-E1-H1
ggcacaagtgagtttgttgatcgagataactagaaacagtgtgatgaaaatgaaggtccttgttttcttcgttgctacaattttggtagcatggcaatgccatgcgtacgatatgttccctctccgaatgaacactggctatggtgcccgtactccggacgtgaaatgcgcaagttggaggcttgctgtggaagcacacaacatctttggctttgagaccattcctgaagagtgcgttgaagcaacaaaggaatacatccatggcgaacaatatagatcagactccaaaacagttaaccaacaagcttacttttatgccagagacctcgaagtccatcccaaggacacatttgtgttcagtatagatggcaccgtaatctctaatatt

SEQ ID NO: 10980 - DNA, 387 bp, Glycine max
  Clone ID: LIB3039-014-Q1-E1-H11
ggcacaagtgagtttgttgatcgagataactagaaacagtgtgatgaaaatgaaggtccttgttttcttcgttgctacaattttggtagcatggcaatgccatgcgtacgatatgttccctctccgaatgaacactggctatggtgcccgtactccggaggtgaaatgcgcaagttggaggcttgctgtggaagcacacaacatctttggctttgagaccattcctgaagagtgcgttgaagcaacaaaggaatacatccatggcgaacaatatagatcagactccaaaacagttaaccaacaagcttacttttatgccagagacctcgaagtccatcccaaggacacatttgtgttcagtatagatggcaccgtactctcgaatat

SEQ ID NO: 10981 - DNA, 386 bp, Glycine max
  Clone ID: LIB3039-014-Q1-E1-H12
gagtcaaagatcgatttgatcatcaatcagtgctcctcaagcatggaagacgctgacgtcaatgatatcatcttcgctttgaataggctgtcaacgagagttccagcctcgaccatgttatgtcccacatcgaacaatccgatgagtgcacctgcgccgactattacttcgactcctactctcatttcggaattcacgaacagatgttgaaggatactgtgagatccaggacatatcataatgtcatttatcagatcaagtttttattcacgattaaagtaattctcgatgttggtgctgggactgggatattatcacgaatttgtgccaaagctcgggcaaaagacgtctatgcggttaattgctcccacatggctgacatggca

SEQ ID NO: 10982 - DNA, 398 bp, Glycine max
  Clone ID: LIB3039-014-Q1-E1-H2
gaaggtgcaagagtttgttgtgagctataagctagtttatcgtgaggagaatatgaagttgtttgttttcgttgttgctgcagtagttttggtagcatggccatgccatggcgcaggctaccaaaggttccctctccgaatgaaaactggctatggtgagcgttcttcggaggtaaaatgcgcaagttttaggcttgctgtggaagcacacaacatccgagcctttaaaaccattcctgaagagtgcgttgagccaacaaaggactacattaatggcgaacaatttagatcagactctaaaacagttaaccaacaagctttcttttatgctagtgaacgcgaagtccatcacaacgacatatttatattcggcatagataacagcgtactctctaata

SEQ ID NO: 10983 - DNA, 390 bp, Glycine max
  Clone ID: LIB3039-014-Q1-E1-H3
ggcacaagtgagtttgttgatcgagataactagaaacagtgtgatgaaaatgaaggtccttgttttcttcgttgctacaattttggtagcatggcaatgccatgcgtacgatatgttccctctccgaatgaacactggctatggtgcccgtactccggaggtgaaatgcgcaagttggaggcttgctgtggaagcacacaacatctttggctttgagaccattcctgaagagtgcgttgaagcaacagaggaatacatccatggcgaacaatatagatcagactccataacagttaaccaacaagcttacttttatgccagagacctcgaagtccatcgcaaggacacatttgtgttcagtatagatggcaccgtagtctctaatattcc

SEQ ID NO: 10984 - DNA, 314 bp, Glycine max
  Clone ID: LIB3039-014-Q1-E1-H4
ttccagaggatgatcatgacgaatactgcgcacatggaacaagagtacgccgaaaagcgttccaaactctgcctgcatgagaccgatgaaacgcagaggaagaaattggatgaactgaaagtcgtggaaaattcctaatttgattacgataaaatgaaccagagaatgcaagatgagattgatggcttactgcggagaatggaagcaacatagcatcaatgggtttaattttatttttgttgcatttccttaggttttcttactcaggatactgctaaatgtgtaatttaatgatatgtgatgtgttggtaatg

SEQ ID NO: 10985 - DNA, 357 bp, Glycine max
  Clone ID: LIB3039-014-Q1-E1-H5
gagcgaaacagagagtgatttcagtgagtgatcggtgttcacttgatctcatcataatcgtcagcgtcagttgaagaagatgccgatcagaaacatcgccgtcggaaggcctgaagaggcgactcaccccgacacgttgaaggcggctttggctgagttcatctcaaccttcatcttcgtgttcgccggctcaagctccggcatcgcctacaacaagctcaccgacaacggcggctgccacccctgccggcctcatctccgcctccatcgcccatgcattcgccctcttcgtcgccgtctccgtcggcgccaacatctccggcggccacgtcaaccccgccgtcaacttcggcgcct

SEQ ID NO: 10986 - DNA, 367 bp, Glycine max
  Clone ID: LIB3039-014-Q1-E1-H6
gacctctcccacttgcgatcggaagaaagagatcatcaaaccctaacacgctctctctttctctctccgaatccgaattttttatcagcttctcctcgatcattgtgattgagattgagattaaccctaacgcacacgctcactgttgcgattccgagttctatggctatgagcggtgcgtcttcggatcattcccccaagcccggcgtctcctcgccctgcagccagatttgtcggcgcgctggtcggccttcctcaaactcccggccgactccacccgtcgtcaaggcctccgtcgcggtcaattctccgccgacggaagattctgacaacggcggcggaaacaatgtcattaccggcaaaaggc

SEQ ID NO: 10987 - DNA, 348 bp, Glycine max
  Clone ID: LIB3039-014-Q1-E1-H7
ggtttgctgcgagcgaatccctctctctatctctcacacacactttctctctctctctctctcacccagatcttgtagcaatggcgagcgctcctactccacgcgaagagttcgtgtacatggcgaagctgggggaacaggccgagcgctacgaggagatggtggagttcatggataatgtctccgcctccgccgagagcgaggagctgaccgtggaggagcgtaagctcctctccgtcgcctacaagaacgtgatcggcgctcgccgcgcctcctggcgcatcatctcctcaatcgagcataatgaggagagccgcggcaacgaggaccacgtcgccgtcatccgcg

SEQ ID NO: 10988 - DNA, 218 bp, Glycine max
  Clone ID: LIB3039-014-Q1-E1-H8
ggtatgttacaaacgattcactcactctcactctcacaggcaatttgacgcactcacgctcacacgcagttggtgtcgtagtgggaagcgcacggactcaacgcgaacagttcgggtaaatggtcaaaccggggtagcaggtctgcctctacgaggtgatgctggagttcatggagaagggctccagctccgccgacagcgaggagctgaccgtggac

SEQ ID NO: 10989 - DNA, 392 bp, Glycine max; identical to SEQ ID NO: 10878
  Clone ID: LIB3039-014-Q1-E1-H9

SEQ ID NO: 10990 - DNA, 312 bp, Glycine max
  Clone ID: LIB3039-015-Q1-E1-A1
gacacacagctattcctcttaagcttgctactgagtttccacactgcataccttaggtcttccgaattcgaagttaatttgcaagatggctaaggaaaaggctcagatcaacattgtggtggttggtcatgtggaccctgaggaggcaaccaccattaacgagctgaagaagcctgttgtggagaaagaagctccagggcatgccatatgagggcatgcacgtacggcctcggaggggaaccagaaaattatgttaacaaaataatctggaaccctaatgtatcagtgtcatcatcagtgtgtagtttaagc

SEQ ID NO: 10991 - DNA, 374 bp, Glycine max
  Clone ID: LIB3039-015-Q1-E1-A10
ggttctatctaattcagtttttttctcccatcataaaatatcgaccctctcctttccctcgtcatcaaccaatggctcccccaaaggccgagaagaagcccgcggtgaaaaagctcgcagagaaggctccggcggagaagaagcccaaggtcgacaagaagatatcgaaggaaggaggaagcgagaagaagaagaagagaacaaagaagagcgtggagacctataagatttacatcttcaaggtgctgaagcaggttcaccccgacatcggaatctcaatcaaggccatggggatcatgaacagtttcataaacgacatcttcgagaagctcgcccaagagtcgtcgcgattggctatgtataacaagaagcct

SEQ ID NO: 10992 - DNA, 375 bp, Glycine max
  Clone ID: LIB3039-015-Q1-E1-A12
gacaccatccgttctagtctcaacttctgctcttccaactcctacaacgcttttctctgcactcatgggcaaggtcaagatcggaatcaacggatttggaagaattggccgtttggttgccagagtcgctctgcaaagagacgatgttgaactcgttgccgttaacgaccctttcattaccaccgattacatgacatacatgtttaaatacgacagtgttcacggacactggaagcatcacgatgtcaccgttaaggacgagaagacccttctcttcggtgacaaggcagtcactgtttttggacacagaaaccctgaagagatcccatgggggtcaactggagctgacatcattgttgagtcaacggagttttc

SEQ ID NO: 10993 - DNA, 311 bp, Glycine max
  unsure (1)..(311): unsure at all n locations
  Clone ID: LIB3039-015-Q1-E1-A2
gcctcttctctcgcgtcgctccgcaccaatttcaccgcacgaatatcctgttgtttggagcgattcgagaaaaactctgtaaacatgttggtttaccaggacctccttacaggtgatgagcttctctctgactccttccgttacaaggaaattgagaatggaatgctgtgggaagttgaggggaagtgggttgttaaaggagcagttgatgtagacattggtgcaaacccttctgctgaaggtggaggagaagatganggagttgatgatgcagctgttaaagttgttgacattgttgacacattcagact

SEQ ID NO: 10994 - DNA, 368 bp, Glycine max
  Clone ID: LIB3039-015-Q1-E1-A3
ggcagagagagagagagagagagagtgagggagagagagtgaggcttcttctacccagatttgtttcattttaaccaaagaagaatctctcacaaatggcgtcaagagcaattgttcaacaacaacaagccagaggtgaagcagtagtagggggaggaaaacagcataagaagaacggtgttgcggatggaaggaaccgcaatgcattgggtgacattgggaatttggccaatataagaagtgccgttgaaatcaagccaaatcgccctatcagaaggagttttggtgcgcaattacttgccaatgcacaagccggaacaactgcctgggaataacaggaaccaagcttgtgctaatgtgcctggtcc

SEQ ID NO: 10995 - DNA, 321 bp, Glycine max
  Clone ID: LIB3039-015-Q1-E1-A4
gagcatagatcgagacaacttcaatctctcgtatgcattacgatgttccattttccaattcataaccctaactccgttcgaagcaccagatcgtgatggcaccagaggcagataataagccagcatagaagaagcctgtggacgacaacaggtcgactgtgggagacaaagctccggcggcgaagaagccaaaggcctgaaataagcttccgattgatggaggcgccggcggagaaggtaagaagaataagacatccacgaagagcgtggagacatacaagatctacatcttcaatgatctgaatcaggttcaccctgaca

SEQ ID NO: 10996 - DNA, 325 bp, Glycine max
  Clone ID: LIB3039-015-Q1-E1-A5
gattttagcggttcaaatcacaacttcggctcttccgactcctatagcacgtttcgtcgcaatcatgaacattgtcaagatcgggatcacctgctttggaagtattgactgtatgattgacacactcacactggttacgcaacgatgtagagctcatgacagtaatgcagcctttcgataacaccgtttacatgacatacatgttggttaacgtcaatgttcacagccagtggtcacatcaagaggtcaccgttaaggacgaaaatacccatcgtcttcggtgacaaggcactcactgtttttggacacagctatcctgaagaga

SEQ ID NO: 10997 - DNA, 406 bp, Glycine max
  unsure (1)..(406): unsure at all n locations
  Clone ID: LIB3039-015-Q1-E1-A6
aagggggtgtggaatctagtgagagagagcagaggaaaaggggaagaaaaatgttgagtgcgacggcgatcggcgcgttattgggtttgggaacccagatgtactccaatgttctccgcaaactcccctacatgcgccatccgtgggagcacgtggtcggaatggggttgggcgcggtgtttgtgaaccagcttctgaaatgggaagcccaagtggagcaagacctcgacaagatgctcgaaaaggccaaggccgccaacgaaagacgttatatagatggagatgatgattaatgcatgtcttcatggattgtggcagttggtgaaaataatcatgaaatatgttgaacttgttgcctttgttttctgatttgatgatgttaggtttgtaaggctgtnaaaacttt

SEQ ID NO: 10998 - DNA, 355 bp, Glycine max
  Clone ID: LIB3039-015-Q1-E1-A7
aggtggcactcaaacattgtttgttgtaggaagaggaatcttgagaaatggcaggggacagcaagagcaagattctgttcatcggagggactggttacatcggaaaattcatcgtggaagccagcgccaaagctggccacccaactttccttttggtgagggagtccactctctccgaccccgcaaaatcacccctcatcgacaatttcaaaggcctcggtgtcaatcttgttttaggagatctatacgatcaccaaagtttggtgagtgctataaagcaggtcgatgtggtaatttctactgtacgacacctgcagctagctgatcaagataagatcatttctgcaattaaaga

SEQ ID NO: 10999 - DNA, 348 bp, Glycine max
  Clone ID: LIB3039-015-Q1-E1-A8
ggcgtacgcagcttcatccctaacgcgtgcatagcagagtcagagacagagacgcagccatggggcggagacctgcgaggtgttataggcaaattaagaacaagccataccccaagtcacgtttctgccgtggtgttcctgatcccaagatcaggatttatgatgttggtatgaagaagaagggtgttgatgagtttccttgctgtgtccatctggttagttgggagaaggaaaatgtttcaagtgaggccctgcaagctgctcgcattgcttgcaagacgtacatggccaaatttgctggaaaggatgctttccacttgagagtcacggtgcacccattccatgttc

SEQ ID NO: 11000 - DNA, 360 bp, Glycine max; identical to SEQ ID NO: 10222
  Clone ID: LIB3039-015-Q1-E1-A9

SEQ ID NO: 11001 - DNA, 397 bp, Glycine max; identical to SEQ ID NO: 9657
  Clone ID: LIB3039-013-Q1-E1-B6

SEQ ID NO: 11002 - DNA, 369 bp, Glycine max
  Clone ID: LIB3039-011-Q1-E1-D11
gcacaagtgagtttgttgatcgagataactagaaacagtgtgatgaaaatgaaggtccttgttttcttcgttgctacaagtttggtaggagggcaatgccatgcgtacgatatgttccctctccgaatgaacactggctatggtgcccgtactccggaggtgaaatgcgcaagttggaggcttgctgtggaagcacacaacatctttggctttgagaccattcctgaagagtgcgttgaagcaacaaaggaatacatccatggcgaacaatatagatcagactccaaaacagttaaccaacaagcttacttttatgccagagacctcgaagtccatcccaaggacacatttgtgttcagtataaatggg

SEQ ID NO: 11003 - DNA, 414 bp, Glycine max
  unsure (1)..(414): unsure at all n locations
  Clone ID: LIB3039-011-Q1-E1-D2
ggcacaagtgagtttgttgatcgagataactagaaacagtgtgatgaaaatgaaggtccttgttttcttcgttgctacaattttggtagcatggcaatgccatgcgtacgatatgttccctctccgaatgaacactggctatggtgcccgtactccggaggtgaaatgcgcaagttggaggcttgctgtggaagcacacaacatctttggctttgagaccattcctgaagagtgcgttgaagcaacaaaggaatacatccatggcgaacaatatagatcagactccaaaacagttaaccaacaagcttacttttatgccagagacctcgaagtccacccaaggacacatttgtgttcagtatagatggcaccgtactctctaatattccatactacanaaacatggatatgggg

SEQ ID NO: 11004 - DNA, 425 bp, Glycine max
  unsure (1)..(425): unsure at all n locations
  Clone ID: LIB3039-011-Q1-E1-D3
ccacgcgtcaaacggatgcaagaagacaacaaaagggggccttggtgggtgcaccgataatggcgcaagccatgacatgcaatgatgtaacggtcaacatggcacagtgcctatcctacctgatgcacggaggaacaccttcaacactttgctgcagcggagtcaagaacattcttggctctgctgtcaccaccgttgacaaacaaactgtgtgcaactgtctcaaggcggatgctgctaagtacaacatcaatgaccagtatgctcaggcactccctggtttctgcaaggtcaatgtcacttacaagattagccgctccactaactgtgcaagcatcaggttctgaacaagccatggacagatctgctcatttctgcancgggatactgatgcagcagtgaagcacttactatcacgataagag

SEQ ID NO: 11005 - DNA, 253 bp, Glycine max
  Clone ID: LIB3039-011-Q1-E1-D4
ggcgtattgagtgaaccttatggtgtgtactctatcacgtacaatgatctgtcgggccgcatatcacacttacggtccgcactgaccctgagatgatcacgttaatcacattgtagtcgaggtctcagatatattcctggatctgcagttgggctcgttaagccaaaaactgtgtccttttatctcaccacgaatcttagctcagtacatgaatctcctgcagtatgcccacgcactctttacccttctgcat

SEQ ID NO: 11006 - DNA, 281 bp, Glycine max
  Clone ID: LIB3039-011-Q1-E1-D5
gacacgtgagtcagcagatcgaaagtactatgatgcactgtgatgaccatcacggtacttgatctcttcacgtcccaacgttgggtaccggggacgatccatacgtccaaatgtattccgcgttgtaatgaaaactcctaattgctgatgtactctcgacgttaaatcctcaagttgcacgcatggtgcggcagcgtattctatctttcgaagagagagaagctgagacgagtacgtaggcgcaacccgtgactgcagctaacgcgtactcgatgcgatca

SEQ ID NO: 11007 - DNA, 410 bp, Glycine max
  unsure (1)..(410): unsure at all n locations
  Clone ID: LIB3039-011-Q1-E1-D6
ggagctggtattcaaggaggacggacaggaatacgcgcaggttctccgaatgctcggaaacggtcgctgcgaagcgatgtgcatcgacggcaccaagcgcctctgccacatccgcggcaagatgcacaagaaggtctggatcgccgccggcgacatcatcctcgtcggcctccgcgactaccaggacgacaaggctgacgtcatcctcaagtacatgcccgatgaggcccgcctcctcaaggcctacggcgagcttcccgacaccaccaggctcaacgagggcatcggcgccggcctcgatgangangangacggttccgggaatgattatattgagttcgaggatgaggatattgataagatttgaaacaaatacaaataattacggttttggttttggttgctgttga

SEQ ID NO: 11008 - DNA, 381 bp, Glycine max
  Clone ID: LIB3039-011-Q1-E1-D7
ggaataatacgaagatgactagcaaagggttgctgagaggagcttcgttaactgcaaacgcagtttggcatagaagcagtttcttcccaaaggtaacggttagcgtccaccccaagttggtgaaatttcagagcttctcatcaaccaccgcttgctcctctcttccacccccggatttgcctcgtttggcaaaaactgctcaaatttcacttaccccaaacgaggttgaagaaattgctcccaaaattcaacaagttatagaatggtttggacagctgcagggtattgatcttgaaagtgttgaaccctcgatcagagcagagactgaaaacaatttgcgtggtaatgctcctgaaacatttgaccatagggacgccttga

SEQ ID NO: 11009 - DNA, 400 bp, Glycine max
  Clone ID: LIB3039-011-Q1-E1-D8
gacggcactcgttttcgttctcgttctggtttatagatctttgcgaaggaggtttacagcgctcaaccaaagatgcagaacgaggaaggacagatcactgagctttacattcctaggaagtgctccgccacaaacagattgattaccgctaaggaccatgcttcggttcagatcaacattgggcatgtggatgagaatggcgtctacaatggccatttctccacttttgccctctgcggattcatccgtgctcagggtgatgctgacagtgctctagaccgcttgtggcagaagaagaaagttgaagttaagcaacagtagacacccatgatagtttgttacttcgttatgtattaatttctactcttgctagagatatttgagtactatgattgtcgtt

SEQ ID NO: 11010 - DNA, 358 bp, Glycine max
  Clone ID: LIB3039-011-Q1-E1-D9
ggcacaagtgagtttgttgatcgagataaccacaatcagtgtgatgaatatgaacgtccgtgttttcttcgttgctacaattttggtagcatggcaatgccatgcttacgatatgttccctctccgaatgaacattggctatggtgcccgtactccggaggtgaaatgcgcaagttggaagcttgctgtggaagcacacaacatcattggctttgagaccattcatgacgagtgcgttgaagcatcaaaggaatacatccatggcgaagaatatagattagactccataacagttatccaacaagcttacttttatgccagagacctcgaagtccatcacaatgacacatttgtgttc

SEQ ID NO: 11011 - DNA, 417 bp, Glycine max
  Clone ID: LIB3039-011-Q1-E1-E1
gtattttgattggagtggagaggatgtgagacatattggtgagactgatttcagtatgctgtggatatatgtttaccagcctgattatgttcaaggggttgatggtgaattaatacaacatttattccaaagaataaaaatattgattgtttaagtttttgtgtaatttcagaaagatgtattcatcattgtccaacgcaatgaattcaggaacaactgaacaagaataataatggcttctaaaatgttgtaaaaatgcatttttatttttatagtatataattgttgatttaagtattgggataacagataattgacggtgcatcagcaacaaggggattacgtaatggcgcaatgccattggacgatgcaagtgggttgggtcctggcatccatcaaggctgggaatgtggactg

SEQ ID NO: 11012 - DNA, 375 bp, Glycine max
  unsure (1)..(375): unsure at all n locations
  Clone ID: LIB3039-011-Q1-E1-E10
ggagcgtcttccctcaactccgagcgagagaagttattagggtttttgagtgcggcggtccaaacactcttctctgcagcttttgcctacaactcccttcaccatggctgaacaaaccgagaaagcttttctgaagcaaccaaaagtgtttctcagcacaaagaagactgggaagggaaagagacctggaaaaggtgggaatcgcttttggaagtccattgggcttggatttaagactcccagggaagccatcgaaggaacctatattgacaagaagtgccccttcactggcaatgtttccatccgtggccgtatcttggctggaacatgtcacagtgctaagatgaacaggactattantgttagaaggaatta

SEQ ID NO: 11013 - DNA, 384 bp, Glycine max
  Clone ID: LIB3039-011-Q1-E1-E11
ggtgcacaagtgaatttgttgatcgagataactagaaacagtgtgatgaaaatgaaggtccttgttttcttcgttgctacaattttggtagcatggcaatgccatgcgtacgatatgttccctctccgaatgaacactggctatggtgcccgtactccggacgtgaaatgcgcaagttggaggcttgctgtggaagcacacaacatctttggctttgagaccattcctgaagagtgcgttgaagcaacaaaagaatacatccatggcgaacaatatagatcagactctacaacagttaagcaacaggcttacttttatgccagagacctcgaggtccatctcacggacacatttgtgttcagtatagatggcaccgtactctct

SEQ ID NO: 11014 - DNA, 382 bp, Glycine max; identical to SEQ ID NO: 7731
  Clone ID: LIB3039-011-Q1-E1-E12

SEQ ID NO: 11015 - DNA, 363 bp, Glycine max
  Clone ID: LIB3039-011-Q1-E1-E3
aatccttgtggcgtcaaccctaacttatcttccctctttggaattggcgtcatccaaaaactctacagcctgtatcaaacgttccgccccgtaaggttcaacattatctggtatcagagcttcggctcttgatgcaggttctatcctatcctattatttttctttgaaatttgtccaggttcatgttttgtccttgttctgttatttgcgtttttgtttacatcttgtttcgttcttgtttgcgtcctgtgttctgttatttgcgtttttgtttacatcttgtttcattcttgtttgcgtcctgtgttctgttatttgcgttcttgtttacatcttatttcgttcttgttcttgttcttgtca

SEQ ID NO: 11016 - DNA, 390 bp, Glycine max
  unsure (1)..(390): unsure at all n locations
  Clone ID: LIB3039-011-Q1-E1-E4
gccgctgagctccctttctcctcggtccacagagacaaaatgtaagacaggtgccaacagttcatcacgaaagaaaggactagctgagccgagatcactaactaaaacgaatttaatactaatcgaaaatactaatagaatagaaatagaactgtcttttcatatagatatcccttcaacacaacataggtcatcgaaaggatctcgaagacccaccaacgcacgaaagccgggatctttcagaaaatggattcctattcgaagggtgcataaccgcatggataagctcacactaacccgtcaatttgggatccaattcggttccttaagangtatcgggaangaattttggaatgtaataatatcgattcatacagatacagaagaaag

SEQ ID NO: 11017 - DNA, 297 bp, Glycine max
  Clone ID: LIB3039-011-Q1-E1-E6
cggagtcggtgttcaagtacgacagacaccatcacacggctgtggcgaggttttccagcctctacttcagcaagcccaccggcgatctcaagagcgtcgtcaacgataccatccacgaccctgatcacggtgctcgtcgaatcatggtgggctacatcaacaacgtcggcatccgcaacgatgaggagctcgtcgtcgacgtcaatgtcgcctatattggctactacaggttcatccgcaaggccgacagcctcctgatcgataccgtcatgcactgcgcatccagcagcgacggta

SEQ ID NO: 11018 - DNA, 280 bp, Glycine max
  Clone ID: LIB3039-011-Q1-E1-E7
gatcagtagagaccaccttccctctcttctgttaccaatggctcgctcagcaaactacatttctttccttttcctcatcaggcgttttgtgtgctcttcatatcagtgcaagagacagccagttcttcagcaaagtcacccattttgacggatacagtgtcaaagagacagaacttcccaataaagaggcaccagaagtaaacaagccagagcaacattcacctttcaatccggagactgaatccagctatggcctatatggtcatcatgatgagtatac

SEQ ID NO: 11019 - DNA, 398 bp, Glycine max
  Clone ID: LIB3039-011-Q1-E1-E8
ggatgcaatactgcaaagcactgcactgaattggattgggtttgcagcagaagcagcgaaggatatggcgattcttccttctcttgcagttccttcaactcccatttctcgggtaaagctgtttcaatgccaaccctgtcaattccatagatgcacagaactatatcttcctcatcaaacatattatactcgaactacatcaattaaagtatcaatggcagaccaaaatgagccgagtgaggttaatatgcagattgggatcatgagggagaaacttaaagaaacactgccagtctcagttcaagaatttccttggaaaaaaagctgagcatatactcctagacagactacttaatcttgcacaagagacagtgaagtggtctcttgttctgtttttc

SEQ ID NO: 11020 - DNA, 370 bp, Glycine max
  Clone ID: LIB3039-011-Q1-E1-E9
gaaggtgcaagagtttgttgtgagctataagctagtttatcgtgaggagaatatgaggttgtttgttttctttgtctgctgcagtacttttggtaccatggtcatgccatggcgcatgctaccaaaggttccctctccgaatgaaaactggctatggtgagcgttcttcggaggtaaaatgcgcacgttttaggcttgctgtggaagcacagaacatccgagcctttaaaactattcctgaagagtgcgttgaacctaaaaaggactacatttatggcgaacagtttatatcagactctaaaatagttatccaacaagctttcttttatgctagtgaacgcgaaatctatcacatcgacatatttatatt

SEQ ID NO: 11021 - DNA, 380 bp, Glycine max
  Clone ID: LIB3039-011-Q1-E1-F1
gatccatactcaaaatacaaaaatggagagagtagctaaggtgttggtgatgttgagcatggtggtgttggtgcttgcatcaaatgctgaagggggacgattacttgaggaagagaatgtggatcagccccagaccttccttggatcaggtggaggccttggtgggatatttccaagcccaagcccaggcttcagcttcaccggcgtgggctttggcccatctgggttttgcactttccctggtggttgcaccggtactccttctttgcccactattcccggtgctggtgggtcactaacagtaccaacacatgcataaggaaatggctttggtagaagacctatattattacttaatgctaaagtaccctagaatttgt

SEQ ID NO: 11022 - DNA, 319 bp, Glycine max
  Clone ID: LIB3039-011-Q1-E1-F10
ggcacaagtgagtttgttgatcgagataactagaaacagtgtgatgaaaatgaaggtccttgttttcttcgttgctacaattttggtagcatggcaatgccatgcgtacgatatgttccctctccgaatgaacactggctatggtgcccgtactccggaggtgaaatgcgcaagttggaggcttgctgtggaagcacacaacatctttggctttgagaccattcctgaagagtgcgttgaagcaacaaaggaatacatccatggcgaacaatatagattagactccaaaacaatttaacaacaagcctaattttaagcc

SEQ ID NO: 11023 - DNA, 323 bp, Glycine max
  Clone ID: LIB3039-011-Q1-E1-F11
gaagccagtgataattgctttcagataactgatagttgtgtgcaattatgtgaactcaagaatgtctcaacccgactcgttggtggctgagattgaggtgaaaacctctgctgatcacttttacgacaccttgaagggtaagaaacaggatcgtattcatgatgttgcgcctcatcatatccataaggtggaagttcatgaaggtgagtgggataaatctggcaatatcaaggtgcttacattcgctgatggggacactgttgaaaccttaacggagagagttgattttgatgatgaatacaagaagataacctacaccatat

SEQ ID NO: 11024 - DNA, 382 bp, Glycine max; identical to SEQ ID NO: 10602
  Clone ID: LIB3039-011-Q1-E1-F12

SEQ ID NO: 11025 - DNA, 394 bp, Glycine max
  Clone ID: LIB3039-011-Q1-E1-F2
gagaaaattgtggaagccgttggggatttgaagcttgactctttggtcatgggtagcagaggcttgggtgccatacaaagggtattactggggagtgtgactaattatgtcaccgcaaatgcgagttgccctataacgattgtgaaagactctgccccttctactatctgataagctactgaatttggttggcctttgcaatcggttgtttttatcttcatcagtgaccagagtgtgtttccctccgttcttacttcttacacatgtttaattgggattatgaacacacttgaatgattaaggatttggcaagcataatgtatattttcagagtctcttttaagcgcatggttatagccacaaaattgtgcttataaataagctttgtgctgaa

SEQ ID NO: 11026 - DNA, 411 bp, Glycine max
  unsure (1)..(411): unsure at all n locations
  Clone ID: LIB3039-011-Q1-E1-F3
ggcacaagtgagtttgttgatcgagataactagaaacagtgtgatgaaaatgaaggtccttgttttcttcgttgctacaattttggtagcatggcaatgccatgcgtacgatatgttccctctccgaatgaacactggctatggtgcccgtactccggaggtgaaatgcgcaagttggaggcttgctgtggaagcacacaacatctttggctttgagaccattcctgaagagtgcgttgaagcaacaaaggaatacatccatggcgaacaatatagattagactccaaaacagttaaccaacaagcttacttttatgccagagacctcgaagtccatccaaggacacatttgtgttcagtatagatggcaacgtactctctaatattccatactacannaaacatggatat

SEQ ID NO: 11027 - DNA, 362 bp, Glycine max
  Clone ID: LIB3039-011-Q1-E1-F4
ggagttcaacttcgagggtttccttcacatctctgtaatttccatttccacagttactcttgtgaactaccgagatttgaagcgagtgatggctgcgaacgaagagaatcgaatatttgttggaggtttatcctgggacgttacggagcgtcaactcgagcatgcctttgctcgttacggcaaaattctcgaatgccagatcatgatggaaagggatacaggccgtccacgtggatttgggtttatcacatttgcagaccgtacgggaatggaggatgcaatcaaggaaatgcatggacgggaaaatggtgatcgtatcatctcagtcaacatagcacagcccaagatggggggtgatgatg

SEQ ID NO: 11028 - DNA, 406 bp, Glycine max
  Clone ID: LIB3039-011-Q1-E1-F5
gaaggtgcaagagtttgttgtgagctataagctagtttatcgtgaggagaatatgaagttgtttgttttctttgttgctgcagtacttttggtaacatggccatgccatggcgcaggctactaaaggttccctctccgaatgaaaactggctatggtgagcgttcttcggaggtaaaatgcgcaagttttaggcttgctgtggaagcacactacatccgagcctttaagatcattcctgaagagtgcgttgaaccaacagaggactacattaatggcgaacaatttagatcagactctagtacagttaaccaacaggctttcgttgatgctagtgaacgcgaagtccatcacaacgacatatttatattcggcatagataacaccgtactctctaatatcgcatac

SEQ ID NO: 11029 - DNA, 397 bp, Glycine max
  unsure (1)..(397): unsure at all n locations
  Clone ID: LIB3039-011-Q1-E1-F6
ggcacaagtgagtttgttgatcgagataactagaaacagtgtgatgaaaatgaaggtccttgttttcttcgttgctacaattttggtagcatggcaatgccatgcgtacgatatgttccctctccgaatgaacactggctatggtgcccgtactccggaggtgaaatgcgcaagttggaggcttgctgtggaagcacacaacatctttggctttgagaccattcctgaagagtgcgttgaagcaacaaaggaatacatccatggcgaacaatatagatcagactccanaacagttaaccaacaagcttacttttatgccagagacctcgaagttcaatcccaagacacatttgtgttcagtatagatggcaccgtactctctaataattcatactac

SEQ ID NO: 11030 - DNA, 361 bp, Glycine max
  Clone ID: LIB3039-011-Q1-E1-F7
tgggaaggtgcaagagtttgttgtgagctagaagctagtttatcgtgatgagaacatcaagttgtttgttttcgttgttgctgcagtacttttggtagcatggtcatgccatggcgcaagctaccacaagttccctctccgaatgaaagctggctatggtgatcgttcgtctgatgtaaaatgcgcaagttttaggcttgctgtgaaaacacacaacatctgagcctttacaaccattcctgacgagtgcgttgaaccatcaaaagactacattaatggcgatcaatttagatcagactctaatacagttaaccaacaagcttacttttatgccactgaacgctaagtccatcacaacgac

SEQ ID NO: 11031 - DNA, 247 bp, Glycine max
  Clone ID: LIB3039-011-Q1-E1-F8
ggattactaccaagtcaaaaagcagttaacgaagcatatattgcgtgtaacacagtgagaattaaagtgttgggtaacgagaaatggctaggtgtcgcaccttgggggttcttgcccttggcatggttgcagttgccagaaagctgccaattgatccaggtttggaggaccagaggaatttcctcgggtacgggttcacgtgagttggcgaaattgggcttccatttggagaattgggtactgggtt

SEQ ID NO: 11032 - DNA, 381 bp, Glycine max
  Clone ID: LIB3039-011-Q1-E1-F9
ggcacaagtttgttgagatagctagaagcaataagatgaaaatgaaagtgcttgttttgtttgttgctacagttttggtagcatatgaatgccatggctcagactaccagaagttccctctccaaatgaaaactgggtttggtgggcaatacagcaatgacgtggcatgtgccagttggaggcttggcgtggaagcaaacaacgtagtcaagtggcaaactgttcctgcagcttgcggagagtacatagctgactacgttctacgagaccaatatagatcagattccaaaacagttgaccaacacgcttatttctatgccaaatccctcagactcaccaacaaagatgtctttgtcgtggacgttgacgacactactctct

SEQ ID NO: 11033 - DNA, 366 bp, Glycine max
  Clone ID: LIB3039-011-Q1-E1-G1
gaagtggatcaggcaaacttacccaacatggaaacaatggaaggctcaagcagatatggaatgtatagaactaagggggaattttctgttgacttgaagcttggccaagtgggaaattctggcagggaatcatcagtgttgactaagtccaaagatggtggtgctgttggagtctccaaaatgatatcctcatcttcttcagggtcagctaagagagctcgttcccttagcaacgggacacaaacagtgtcatgccttgtggacgggtgccactctgatctcagtaactgcagagactatcataggcgccataaggtctgtgaagtccattccaagactgcacaggtcacaattggaggccagaaa

SEQ ID NO: 11034 - DNA, 368 bp, Glycine max; identical to SEQ ID NO: 8085
  Clone ID: LIB3039-011-Q1-E1-G10

SEQ ID NO: 11035 - DNA, 349 bp, Glycine max
  Clone ID: LIB3039-011-Q1-E1-G11
ggcacaggtgagtttgttgatcgagataactagaaacagtgtgatgaagatgaaggtccttgttttcttcgctgctacaattttggtagcatggcaatgccatgcgtacgatatgttccctctccgaatgaacactggctatggtgcccgtactccggaggtgaaatgcgcaagttggaggcttgctgtggaagcacacaacatctttggctttgagaccattcctgaagagtgcgttgaagcaacaaaagaatacatccatggcgaacaatatagattagactccaaaacagttaaccaacaagcttacttttatgccacgagacctcgaagtccatcccaaggacac

SEQ ID NO: 11036 - DNA, 360 bp, Glycine max
  unsure (1)..(360): unsure at all n locations
  Clone ID: LIB3039-011-Q1-E1-G12
gacagcatatcaataatctattttatactatacccacattttgataattatttttctagttgataagccatggctactcgaggaaagcttgaggttgacgttgatctcaagtctaacgcagacaagtactggcaaacccttaggaactccactgaaatattccccaaggccttccccaatgattacaaaagcattgaggttcttgacggtgatggcaaatcacctggttctatccgccacataagttatggtgaacgttcaccacttgtgacgtcatcctttgagaagattgatgctgttgatgaagaanagaacgtagtgtcgtacactatcattgatggagaaatcctcgagcactac

SEQ ID NO: 11037 - DNA, 403 bp, Glycine max
  Clone ID: LIB3039-011-Q1-E1-G2
gatccataaccatggcgtctaactctgcttccgctctttacgtccttttatgcctatcgcccatcactttgcttctttctgcgtttcgtgctcaagctcaatctcatgctccagctcccactttcaagtactgtgaaaagaatgcagactatgctgtgaaggtgagtggagtggaaatattgcctgaccccgtggagagaggagtgccattcacctttaagatcccagcttatactcctgaaccaattcaaagcggggacttgttatatgaaatttcttatgctggaatagaagcacaacctgctacatttctccatgatctctgtgacgaagcaccatgcccagtacctgcaggcaactttgtgctcgttcacaccgaattattgcctccgggttaccccac

SEQ ID NO: 11038 - DNA, 413 bp, Glycine max
  unsure (1)..(413): unsure at all n locations
  Clone ID: LIB3039-011-Q1-E1-G3
ggaacctttgcactctattcattcaagattcagcaagtgcgttttggaagcagagaccgaaatacttcgagatggcccgtacaaagcaaactgctcgtaagtcaactggaggaaaagctcccaggaagcagcttgcaaccaaggctgcacgtaagtctgcaccaacaactggtggtgtgaagaagcctcatcgttatcgccctggaactgttgctcttcgtgagattaggaaataccagaagagcactgagctcctaatcaggaagcttcctttccagaggttggttcgtgaaattgcccaggatttcaagactgatctgcgtttccagagccatgctgtgcttgcattgcaagaggctgctgaggcatnacttgttgggctctttgaggacactaacttgtgtgccattcac

SEQ ID NO: 11039 - DNA, 369 bp, Glycine max
  unsure (1)..(369): unsure at all n locations
  Clone ID: LIB3039-011-Q1-E1-G4
gacattccaaaacacaaacacatacattgtagtatcacttttgtctcggaatttgttcttttgagttatggcaagcttaaaggttgcatgtgtggttttgatgtgcatggctgtgatgagtgcaccaatgatggtgcaagccgtgtcatgcaatgatgtttctgtgaacctagcactgtgcctatcttacctgatgcagggtggagatgttccagaatcgtgctgtagcggagtgaggaacattctgggttctgccagcaccacctttgacaaacataccgtgtgcacatgtcttcagcaagctgctaataactatggcatcaacgacgaatacgctcatgcactcnccgtccgctgcaatgtcagcgt

SEQ ID NO: 11040 - DNA, 388 bp, Glycine max
  Clone ID: LIB3039-011-Q1-E1-G5
ggttttcatttggtttcttccttctcacacttcccccaattcccaaaccaaaccctctctcttccggcgttctgagggtggcgtcgccggcgattcccccctccggttccctctccacccttcaattcaaccctctcgtcttcgcttcactgattccctctttcaaaatgcttccgatcgcttgctagggttttccctctcccaaatctcctcctcggaaagcagcctgtaccttttattcctccgactaatcaacttctttgctatggctattcgtgtaacgttttccttttcgggctatgtcgcccagagcctcgcctcctctgccggcgtgcgcgtcgccaattcgcgttgcgtccaggaatgctggattcgtacgcgcctctct

SEQ ID NO: 11041 - DNA, 293 bp, Glycine max
  unsure (1)..(293): unsure at all n locations
  Clone ID: LIB3039-011-Q1-E1-G6
ggcacaagtttgttgagatagctagaagcaataagatgaaaatgaaagtgcttgttttgtttgttgctacagttttggtagcatatgaatgccatggctcagactaccagaagttccctctccaaatgaaaactgggtttggtgggcaatacagcaatgaggtggcatgtgccagttggacgcttggcgtggaagcaaacaacgtagtcaagtggcaaactgttcctgcagcttgcggagagtacatagctgactacgttctangagaccaatatagattagattccaaaaca

SEQ ID NO: 11042 - DNA, 366 bp, Glycine max
  Clone ID: LIB3039-011-Q1-E1-G7
gactcttcaaattccacttcaacaaaccctaaaccctaatgctctgaaactcacattcccagaaagttgagaaatatgagaattccaagcaattgcgagttcacacgaatcacgccctctgctttcagctaccaccgtctcaaatcctacgtttccgactgcagagccgtgcttctcccctcattcggcggcccgcacgtgctccagcttcgctcgcacgtgccagtccctccgctcaagcctcacgatgtcctcgttcgtgcgcgcgccgtctccgttaaccccttggacacccgaatgcgtgctggctacgggcgttccatcttcgagccgctgttgcctctcattttggggcgcgacgtcagc

SEQ ID NO: 11043 - DNA, 397 bp, Glycine max
  Clone ID: LIB3039-011-Q1-E1-G8
agcgacagaaggggcttcttcttatttgtgacgaagcaaacgctgccgaattcgttatcgctttgcactagcagctttgaaacccggttcatccgaagcccttcagcgaaccatgtcgaggagaaaggttagagagccaaaggaggaaaatgtgactctgggtccagctgttacagatggtgaacacgtctttggcgttgctcgcatctttgcctccttcaaggacaccttcatccatgtcactgacttgtctggcacggaaacccttgtccgaatcattggtggtatgaaagtcaaagctgacagagatgaatcatctccttatgctgctatgcttgcagctcatgatgttgctgccagattcaaggaactgggcataactgctcttcataacaag

SEQ ID NO: 11044 - DNA, 382 bp, Glycine max
  Clone ID: LIB3039-011-Q1-E1-G9
ggcacaagtttgttgagatagctagaagcaataagatgaaaatgaaagtgcttgttttgtttgttgctacagttttggtagcatatgaatgccatggctcagactaccagaagttccctctccaaatgaaaactgggtttggtgggcaatacagcaatgaggtggcatgtgccagttggaggcttggcgtggaagcaaacaacgtagtcaagtggcaaactgttcctgcagcttgcggagagtacatagctgactacgttctaggagaccaatatagatcagattcgaaaacagttaaccaacaagcttagttctatgctaaatcgctcaaaactcacaaacaaagatgtctttgtcttggacgttgacgacactactctct

SEQ ID NO: 11045 - DNA, 381 bp, Glycine max
  Clone ID: LIB3039-011-Q1-E1-H1
ggcacaagtttgttgagatagctagaagcaataagatgaaaatgaaagtgcttgttttgtttgttgctacagttttggtagcatatgaatgccatggctcagactaccagaagttccctctccaaatgaaaactgggtttggtgggcaatacagcaatgaggtggcatgcgccagttggaggcttggcgtggaagcaaacaacgtagtcaagtggcaaactgttcctgcagcttgcggagagtacatagctgactacgttctaggagaccaatatagatcagattccaaaacagttaaccaacaagcttatttctatgctaaatccctcagactcaccaacaaagatgtccttgtcttggacgttgacgacactactctct

SEQ ID NO: 11046 - DNA, 387 bp, Glycine max
  Clone ID: LIB3039-011-Q1-E1-H10
gacacaaacaccttattagactctctctgactttcctcgaacacaacacacaacaacatagttagccttagccttaataaccttagcagcgtcgacaatggccggcgacgacctcgccggagaccacacgccggagcttctgtgcctggtccacgaaatcgccggaatgtgctcggcggggtcctcctccggcgccgacgccatgttccgcaaggactgcaccgatctggttcgccggatctccctcctcacccacctcttcgaggagattaaggaactcaaaaacaacaacgatgtcggtggttccgcttcttcctcttcttcttactcgtcctcttcttcctcggcgtcttcaaagtggtcttctgatctggtcctcgcgcttca

SEQ ID NO: 11047 - DNA, 382 bp, Glycine max
  Clone ID: LIB3039-011-Q1-E1-H11
gagggttattggacacattcttcagcgactgcgtttttggatcggaacctcttctgcggcgtagcaatgggacactccaacgtttggaactctcacccaaaaaaactacggtcctggttctcgcacttgccgtgtgtgtgggaatccacatggactgatcaggaagtatggccttatgtgctgcaggcagtgcttccgtagcaatgccaaggaaattggcttcatcaagtatcgctaaaagagcagttgtcaactacggaccaatattgtgttctggcactaggatgttttgaggatgttatgtttgaagaaacttgagactttcttttttcatctaattaattatcagacgtaatttgtggtactaagaatacttttatat

SEQ ID NO: 11048 - DNA, 387 bp, Glycine max
  Clone ID: LIB3039-011-Q1-E1-H12
gaaggtgcaagagtttgttgtgagctataagctagtttatcgtgaggagaatatgaagttgtttgttttctttgttgctgcagtagttttggtagcatggccatgccatggcgcaggctaccaaaggttccctctccgaatgaaaactggctatggtgagcgttcttcggaggtaaaatgcgcaagttttaggcttgctgtggaagcacacaacatccgagcctttaaaaccattcctgaagagtgcgttgaaccaacaaaggactacattaatggcgaacaatttagattagactctaaaacagttaaccaacaagctttcttttatgctagtgaacgcgaagtccatcacaacgacatatttatattcggcatagataacaccgt

SEQ ID NO: 11049 - DNA, 367 bp, Glycine max
  Clone ID: LIB3039-011-Q1-E1-H2
ggagacacaaactcacacactttgtactctccgtccttccttcttcgatccagatctctctccttctccctcaaatggcttcccttctgcaatgttccatgcccctcgtcactctttcgaatcgagctctagtacccggtaccaggatctccaacccaagttcagtttccctttcaattaagggaagaagtttcccatccgttacattgcagcccagagggcgtcggtttcagcttagatgtgcggcaaaaccagagacagtgaagaaggtgtgtgacatagtcaagaagcaattggcactgccagatgaatcagctgttactggagagtctaaatttgctgcgcttggaactgattctcttgacac

SEQ ID NO: 11050 - DNA, 388 bp, Glycine max
  unsure (1)..(388): unsure at all n locations
  Clone ID: LIB3039-011-Q1-E1-H3
ggccagtgccattcccttcacaccattctcacaaaacaactttcagactctgagaaagaatggctgccaacacattgatgagtactgctatctcagccttcccatctctcctttcttcctcaaaatccagatttgccaccgcagttcctctttctagctttggtgtcaccaatgcctcttcttctcgcttttctatgagtgctgactggatgccaggccagcctagacctccttaccttgatggttcagcacctggtgactttggattcgaccctcttcgtcttggtgaagtaccagagaatcttgagaggttcanagagtcagaactcattcactgcagatgggccatgcttgctgttcagggattttggttcagangcattgggct

SEQ ID NO: 11051 - DNA, 320 bp, Glycine max
  Clone ID: LIB3039-011-Q1-E1-H4
ggaattaggtttttacggtttacaccgagcagccacacctcccgcagcagccatggttctcaaaactgaactatgccgattcagtggtgccaagatctacccaggaaagggcatcagatttgttcgtggtgattctcaggttttcctgtttgcaaactcaaaatgtaagaggtatttccacaatcgcctgaagccttcaaagctcacctggactgcaatgtacagaaagcaacacacaatggacattgctcaagaagctgtgatgaagaggagacgtgctgccaaaaagccttactctacgtccattgttggtgcgacct

SEQ ID NO: 11052 - DNA, 388 bp, Glycine max
  unsure (1)..(388): unsure at all n locations
  Clone ID: LIB3039-011-Q1-E1-H5
gacatctttcactcgttctctgaaattttaattgacttttctcccctcataaaaaaaacctaccaatggctcccgcaaaggcagagaagaagcccgcggagaagaagccggcagagaaggccccagcggagaagaagccgaaggcggagaagaagatatcgaaggaaggaggaagcgagaagaagaagaagagaacaaagaagtgcgttgagacctacaagatctacatcttcaaggtgttgaagcaagtgcaccccgacatcgggatctccagcaaggctatggggatcatgaacagtttcataaacgacatcttcgagaagctcgcccaggagtcatcgcgtctcgctanggtacacaagaagcccacattacttccagggagatc

SEQ ID NO: 11053 - DNA, 382 bp, Glycine max
  Clone ID: LIB3039-011-Q1-E1-H6
gacaacacagaacaaaaacaaagaaaaaaaaaaacccttagccaacacaaccatcatggccacctctgctattcagcaatcagcattcactggtcaaactgctctgaagcagctcaatgagttcgtccgcaagaccggtggcgccggcaaaggtcgcactaacatgcgccgcaccgtcaagagtgctcctcagagcatttggtatggccctgaccgtcccaagtacctgggtccattctcggagcagattccatcatacctgaccggagaattccctggtgactacggatgggacactgctggattatcagctgacccggaaacctttcgccaggaacgggagctggaggtgattcacagcagatgggcaatgcttggtgcc

SEQ ID NO: 11054 - DNA, 392 bp, Glycine max
  Clone ID: LIB3039-011-Q1-E1-H7
gacagaaaagaaaaaggaaaccctagctggataggtcaaacatcatcatgtcggacgaagagcaccatttcgagtccaaggcagacgccggtgcctccaaaacctaccctcagcaagccggtaccattcgcaagaacggctacatcgtcatcaaaggacgcccctgcaaggttgtggaagtttcgacttccaaaactggaaagcacggtcacgccaagtgccactttgttggaattgatattttcactgccaagaaacttgaggatattgtgccctcttctcacaactgtgatgttcctcatgtgaatcgtactgattaccagctcattgatattgctgaggatggatttttgagtctgcttactgaaaatgggaacaccaaggatgacctc

SEQ ID NO: 11055 - DNA, 374 bp, Glycine max
  unsure (1)..(374): unsure at all n locations
  Clone ID: LIB3039-011-Q1-E1-H8
ggggaacaaataccatctctcgtccattgtctgcgtctcactcatcctctcccttctcttacattgttcatttctcaactctttctctcgtttcttccaagacctaatctggattagcctctcatcggatttcaattctcacggtcttcaccgaccgccagatctcttagcancgctcttcttttcatcgattanataacagaaaattggcttaattttattctaacatcctaagcaaaaactaacgttttcacccgattttaacattcgagagaagagttagtttattttattgtatttttttattaagttactgtttctatttaaatcgataaacggcgaggtcgagcgttagaattcgaaatccggaaaaa

SEQ ID NO: 11056 - DNA, 383 bp, Glycine max
  Clone ID: LIB3039-011-Q1-E1-H9
gagtgcacaagtgagtttgttgatcgagataactagaaacagtgtgatgaaaatgaaggtccttgttttcttcgttgctacaattttgggggcatggcaatgccatgcgtacgatatgttccctctccgaatgaacactggctatggtgcccgtactccggaggtgaaatgcgcaagttggaggcttgctgtggaagcacacaacatctttggcgttgagaccattcctgaagagtgcgttgaagcaacaaaggaatacatccatggcgaacaatatagatcagactccaaaacagttaaccaacaagcttacttttatgccagagacctcgaagtccatcccaaggacacatttgtgttcagtatagatggcaccgtactct

SEQ ID NO: 11057 - DNA, 324 bp, Glycine max
  Clone ID: LIB3039-012-Q1-E1-A1
ggagtagcgatggagaagaagaagggtgagctaaagtcaattttccttcctttcctttccactagtcacataatcccgctagtggacatggccagactcttcgccttgcacgacgtcgacgtcaccatcatcaccaccgcacataacgccaccgttttccaaaagtccatcgatttagatgcgagtcgcggtcgccccatcagaacgcacgttgtcaacttccccgccgcacaagtgggtctccccgttgggatcgaaagcttcaacgtcgatacgcctcgggaaatgacccccagaatctacatgggcctattcccttctcca

SEQ ID NO: 11058 - DNA, 77 bp, Glycine max
  Clone ID: LIB3039-012-Q1-E1-A10
gggcacacgtgagtttgttcatcgagacatctagaaacagtgtgatcaaaatgaacgtccttgttttcttcgttgct

SEQ ID NO: 11059 - DNA, 161 bp, Glycine max
  Clone ID: LIB3039-012-Q1-E1-A11
ggggcacaatttagtttgttgatcaaaatacctataaacattgtcataaaaatgacggtccttgttttcttcgttgctacacttttgcaaccatgggaatgccatccgtacaaaacttaccccctccgaataacaactggttatggtgcccgtactccgga

SEQ ID NO: 11060 - DNA, 345 bp, Glycine max
  Clone ID: LIB3039-012-Q1-E1-A12
gcatgcaagagtaccccaacaaacaatcctatcaatattagccttgtcagttaccttccattaagcattggtatcagaaagaaggaccacgtaattgcattgcatcacccatcaattaattagtaataaataccgtttatgtgagaagaccaaaacgaggagcatgatgttaacttggccttatgactaacacacacattgattgattacacaccaatattaaagtccttcaatcattctaaacctagccaggacaattcctaggaagcaacacccatattaatagtatcctaccacaaccacaaaaaccaattaactacaagaaaaaaaaacgcctcaaaataa

SEQ ID NO: 11061 - DNA, 342 bp, Glycine max
  Clone ID: LIB3039-012-Q1-E1-A2
ggaagcatttagtgagagtgagagcgatagcaaaaacagcaatatcttcttccttccctaagcctaaaaataaaatatcttgtcattgaggtggactcacattcgccatatcgtcttctcccatggccgccaccgatgaatccctccgcaaatccctcgccgagaagcacgccgcagtggaagcccaaggcaactccgtccgcgccctcaaggccgccaaatccgccaaacccgaaatctacgccgcaatcgaagccctaaactcgctgaagctcgaaaaaagctccatcgagcactcgctcctcggcggctccgacatccgcgaggcctttcgtcagtccg

SEQ ID NO: 11062 - DNA, 340 bp, Glycine max
  Clone ID: LIB3039-012-Q1-E1-A3
ggccgacgtacgtatcgatgcgagaagagacagaagggggcacaagtgagtttgttgatcgagataactagaaacagtgtgatgaaaatgaaggtccttgttttcttcgttgctacaattttggtagcatggcaatgccatgcgtacgatatgttccctctccgaatgaacactggctatggtgcccgtactccggaggtgaaatgcgcaagttggaggcttgctgtggaagcacacaacatctttggctttgagaccattcctgaagagtgcgttgaagcaacaaaggaatacatccatggcgaacaatatagatcagactccaaaacagtttaccaac

SEQ ID NO: 11063 - DNA, 396 bp, Glycine max; identical to SEQ ID NO: 8695
  Clone ID: LIB3039-012-Q1-E1-A4

SEQ ID NO: 11064 - DNA, 342 bp, Glycine max
  Clone ID: LIB3039-012-Q1-E1-A5
aagacgacagaacggggtaactgtcagcatcattctgccgtcgacgaagctgaaacttgtttcttcttttccttgcgcgaaccttttctactaaccccaatcgcttctctcggactcgaattctgcattcctcatctacataaccctatccccacactctcacacaccagtaccaacatcatatattacatcgattctcaatcatggtccaaacgttttgaaaccaccgtcacgatgatgctcagaattcgtatccgcgactgcctggagcgagtgagcgtccaaaacccccgcagcacaacagtgtcatacctaaaacggattatcgaaacccaatttgga

SEQ ID NO: 11065 - DNA, 306 bp, Glycine max
  Clone ID: LIB3039-012-Q1-E1-A6
gatgggtggcagaaacagaagcacatcaccacgaaccaatcccaacctttcagttcccccacaaataaaatagttaccacaacccactattagttgcttgctgcgagcgaatccctctctctatctctcacacacactttctctctctctctctctctcacccagatcttgtagcaatggcgagcgctcccactccacgcgaagagttcgtgtacatggcgaagctggcggagcaggccgagcgctacgaagaagatggggagttcatggagaaggtctccgcctccgccgagagcgaagagctga

SEQ ID NO: 11066 - DNA, 325 bp, Glycine max
  Clone ID: LIB3039-012-Q1-E1-A7
gatccataaccatggcgtctaactctgcttccgctctttacttccttttatgcctatcgcccatcactttgcttctttctgcgtttcgtgctcaagctcaatctcatgctccagctcccactttcaagtactgtgaaaagaatgcagactatgctgtgaaggtgagtggagtggaaatattgcctgaccccgtggagagaggagtgccattcacctttaagatcccagcttatactcctgaaccaattcaaagcggggacttgttatatgaaatttcttatgctggaatagaagcacaacctgctacatttctccatgatctctg

SEQ ID NO: 11067 - DNA, 302 bp, Glycine max
  Clone ID: LIB3039-012-Q1-E1-A8
ggtaagagtttgttgtgaccaacactccatctgatcgtgaggacaatataaacttatctgtcatcactgtggctccatcagtgttgctagcacagccacactctcatgcacgatatcacacgttcactcactgagtgaagactggctacgatgatcttactgcgaatgtaatatgcacatgtcctaagcctgctgtgaaagcactgacaatcagattcattatcacaactcatgatcattacgtagatccaagcgaggacttgataaatgacgattcatatacatcagactctgcaccagtt

SEQ ID NO: 11068 - DNA, 372 bp, Glycine max
  unsure (1)..(372): unsure at all n locations
  Clone ID: LIB3039-012-Q1-E1-A9
aggccgaggaaaaaaaagaataagaaaaagaagaaaaaaacacagcgtcctagatttcctcttctctgcttcggaagaaagagaaaacaaacaaaacaatggcgttcgcttctttcctcggcagagtcctcttcgcttctgtcttcatactctctgcttaccaacaatttaatgaatatggagttgatgggggacctgctacaaaagcactcagacctaagtttgatgcctttacacatcgggtgcattctcaagtgggctttcaaatttcagagattagtctgaaatttttaattgctggggctattgctctgaagggtcttggangggttcttttcatatttggcagctcttttggagctttgcttctgc

SEQ ID NO: 11069 - DNA, 340 bp, Glycine max
  Clone ID: LIB3039-012-Q1-E1-B1
gaccacattccaaaacacaaacacatacattgtagtatcacttttgtctcggaatttgttcttttgagttatggcaagcttaaaggttgcatgtgtggttttgatgtgcatggctgtgatgagtgcaccaatgatggtgcaagccgtgtcatgcaatgatgtttctgtgaacctagcaccgtgcctatcttacctgatgcagggtggagatgttccagaatcgtgctgtagcggagtgaggaacattctgggttctgccagcaccacctttgacaaacaaaccgtgtgcaaatgtcttcagcaagctgctaataactatggcatcaacgaccaatacgct

SEQ ID NO: 11070 - DNA, 392 bp, Glycine max
  Clone ID: LIB3039-012-Q1-E1-B10
ggcacaagtgagtttgttgatctagataactagaaacagtgtgatgaaaatgaaggtccttgttgtcttcgttgccacaattttggtagcatggcaatgccatgcgtacgatatgttccctctccgaatgaacactggctatggtgcccgtactccggatgtgaaatgcgcaagttggacgcttgctgtggaagcacacaacatctttggctttgagaccattcctgaagagtgcgttgaagcaacagaggaatacatccatggcgaacaatatagatcagactcctcaacagttaaccaacaagcttacttttatgccatagacctcgaagtccatcccaaggacacatttgtgttcagtatagatggcaccgtactctcaaaaattccaa

SEQ ID NO: 11071 - DNA, 379 bp, Glycine max
  Clone ID: LIB3039-012-Q1-E1-B12
ggcagcaagtgccattttatttggcccaacctcctcgattctagggtttcaacaatggcgctgttccttctcaacaaatccgcttcgggctacagcctgttcgaggttcacggcgtcaatgaaatcggccagaacaccgaagcggttcggaactccgtttcggacctcaacaggttcggcaaagtcgttaagcttcgctccttcaaccctttcacttccgctctcgatgctctcaaacagtgcaacgccgtctccgaaggcatattaactggtgagctgaggactgtcttggagaccaacttgcctaaagtgaaggaaggtaagaagtccaagttcagtttaggtgtgtccgatcctaagattggttcccagatatctg

SEQ ID NO: 11072 - DNA, 384 bp, Glycine max
  unsure (1)..(384): unsure at all n locations
  Clone ID: LIB3039-012-Q1-E1-B2
gacagacaccgacacagatctgtcttccgaagcaggaactaaatatggctgacttgttggaatggtcaaagcaagataagaaacgaatgcttcatgtcgtctaccgtgttggtgaccttgatcgcaccatcaaattttacacagaatgtttaggaatgaagcttttgaggcaaagagatatcccagaggagaaatatgctaatgcttttcttggatttggccctgaagaatcccattttgttgttgaattaacatataattatggggttacctcgtatgacattggcgatggctttggacattttgcaattgcaactcaagacatttataaattggttgagcacatcaaggncaaagggtggnaacatcacaagggaacctggt

SEQ ID NO: 11073 - DNA, 147 bp, Glycine max
  unsure (1)..(147): unsure at all n locations
  Clone ID: LIB3039-012-Q1-E1-B3
caacggggtgcgcatcttcatccctaacgcgtgcatatcagagtcacacacacacaccaatcattcgactgagacttccangtcttataaggggttggggacaacccataccccaagtcacgtttctgccgtcgtcttccttatccc

SEQ ID NO: 11074 - DNA, 403 bp, Glycine max
  Clone ID: LIB3039-012-Q1-E1-B4
gaaagtgcaagagtttgttgtgagctataagctagtttatcgtgaggagaatatgaagttgtttgttttctttgttgctgcagtagtgttggtagcatggccatgccatggcgcatgctaccataggttccctctccgaatgaaaactggctatggtgagcgttcttcggacgtaaaatgcgcaagttttaggcttgctgtggaagcacacaacatccgagcctttaaaaccattcctgaagagtgcgttgaaccaacaaaggactacattaatggcgaacaatttagatcagactctaaaacagttaaccaacaagctttcttttatgctagtgaacgcgaagtcatcacaacgacatatttatattcggcatagataacatcgtactctctaatatcccat

SEQ ID NO: 11075 - DNA, 373 bp, Glycine max
  Clone ID: LIB3039-012-Q1-E1-B5
agacagatgagaacagacaagagcgtggagacctatatgatctacatcttcaaggtgttgaagcaagtccaccggcgacatcgggatctccatcacggctatagggatcatgagcagtgcataaacgacatcttggagaagctcgcccaggagtcatcgcgtctcgctaggtagatcaggaatcccatcattacttccagggagatccaaacggcggtgcgtttggtcctctctggggagtcggctaagcacgccgtgtccgaaggcactacagccgtctccacattcgccagctcttgattggtctcgtgtgtgtctgtcaaggtattctgtcaaccctatttgattggggtttctccaccttcagattacg

SEQ ID NO: 11076 - DNA, 386 bp, Glycine max
  unsure (1)..(386): unsure at all n locations
  Clone ID: LIB3039-012-Q1-E1-B6
ggttctagtgtgtgattgtttgttgttgtaactcgttcttcttcttttgttgttctgtgtttgtgtttgttttttctctcacctgaaaatgtcttgctgcggtggtaactgtggttgcggaagctcctgcaagtgcggcaacggctgcggaggctgcaagatgtacccagacttgagctacactgagtcaaccaccaccgagaccttggtcatgggagtggcacctgttaaggctcaatttgagggtgctgaaatgggtgtgcccgctgagaacgatggctgcaaatgtggaccaaactgctcctgcaacccctgcacttgcaagtgaggtgttgggagagcaagcttcaagcacagatacccttaacttangaaatatgataaac

SEQ ID NO: 11077 - DNA, 353 bp, Glycine max
  Clone ID: LIB3039-012-Q1-E1-B7
ggggtctgtccattgaaaccactctccaaaatttctctctctctccatccatccatctattgcacacttccatcatcatggccatcgcaagagagactcaacctcaacctcagcaacacaaggattcttcggaggtttcgggttcagctgcggagcaacgaaggtggacgctaaacgatttcgatatcggaaagcctctcggaaggggaaaattcggtcacgtttatttggccagggagaagactagtaatcatattgttgctttgaaagtactcttcaagagccaattgcaacaatcccaagttgtgcatcaacttcgacgtgaagttgaaatacaaagtcatctccgaaat

SEQ ID NO: 11078 - DNA, 397 bp, Glycine max
  unsure (1)..(397): unsure at all n locations
  Clone ID: LIB3039-012-Q1-E1-B8
ggcacaagtgagtttgttgatcgagataactagaaacagtgtgatgaaaatgaaggtccttgttttcttcgttgctacaattttggtagcatggcaatgccatgcgtacgatatgttccctctccgaatgaacactggctatggtgcccgtactccggaggtgaaatgcgcaagttggaggcttgctgtggaagcacacaacatctttggctttgagaccattcctgaagagtgcgttgaagcaacaaaggaatacatccatggcgaacaatatagatcagactccaaaacagttaaccaacaagcttacttttatgccagagacctcgaagtccatcncaaggacacatttgtgttcagtatagatggcaccgtactctctaatattccatactac

SEQ ID NO: 11079 - DNA, 208 bp, Glycine max
  Clone ID: LIB3039-012-Q1-E1-B9
acccaggcgtccgagacgacagaaggggaccacattccggatgacaatcgcatacattgtagtcacacttttgtctcggaatgtgttcgtttgagtcatggcaagcttaatggttgcatgtgtggttttgacgtgcatggccgtcaggagtgcactaatgacggtgcaagccgtgtcatgtcgtgatgtgtcagtgaacctatcaacg

SEQ ID NO: 11080 - DNA, 400 bp, Glycine max
  Clone ID: LIB3039-012-Q1-E1-C1
ggcacaagtgagtttgttggtcgagataactagaaacagtgtgatgaaaatgaaggtccttgttttcttcgttgctacaattttggtagcatgggaatgccatgcgtacgatatgttccctctccgaatgaacactggctatggtgcccgtactccggaggtgaaatgcgcaagttggaggcttgctgtggaagcacacaacatctttggctttgagaccattcctgaagagtgcgttgaagcaccaaaggaatacatccatggcgaacaatatagatcagactcaaaacagtttagcaacaagcttacttttatgccagagacctcgaagtccatcccaaggacacatttgtgttcagtatagatggcaccgtactctctaatattccctactacaaaa

SEQ ID NO: 11081 - DNA, 345 bp, Glycine max
  Clone ID: LIB3039-012-Q1-E1-C10
ggcacgcaagcagactagcaacttgtattgttgctacaaggcatataaattttcagcattgcaagttgcaaccattttgaccagcgagcaataagaagctttcgaccaagagaacaaagaagaacccatttatcactcgttggaaaaaatcccagatctcaaaacatggaattttcgcagagtcacacggtatagatgataagcatggcacttgctcttgtcgccaatgttggtgacatcgcttacaattactacgtcaccaagaatccaatacggtgcttggatcctgagaacatcagagaatttaaacttgttaaacgcactcaactcaaccataatgttgcc

SEQ ID NO: 11082 - DNA, 306 bp, Glycine max
  unsure (1)..(306): unsure at all n locations
  Clone ID: LIB3039-012-Q1-E1-C11
gcatgttgttgttattgttattctctccaaacaacgcgctcatcaactccttactgtaattcgcgtccatcgaaatgtcgcgctcgtcaacccagaccctaaatccccgaaatatcatccgcaccgcgtaacaatcttcgtaagttcttcgaaatccacgcaagctaatgaagtacaacacgatacgatccacagttcccggtaatcagatcgccggcgaatcgagcgatttcgacgcggaatcggagtttgagttttcgattaatttcgagggtttgagccttgngatattgttgtttttccgga

SEQ ID NO: 11083 - DNA, 343 bp, Glycine max
  Clone ID: LIB3039-012-Q1-E1-C12
ggtaatccttacgctctctcactcacaaacgcacactgaattcaaaaccatcgaaagagacaggcatggccgagcaaaccttcagcaggatcaagccagatggcgttcaaagaggccttattggcgagattattagcagatttgagaggaagggtttttacttgaaagggttgaaactcgtaactgtggaccgtccttttgctgagaagcactatgctgatttgtctgcaaagcctttctttagtggtttggtggattacattgtctctggccctgttgttgccatgatctgggagggtaagaatgttgttacaactggccgaaagattatcggagccacaaa

SEQ ID NO: 11084 - DNA, 403 bp, Glycine max
  Clone ID: LIB3039-012-Q1-E1-C2
ggagcaaaaccctaatccctatttttcttcctcagtagtgtcatttacgcttctcgtctctgcagcaactatgcctaaccctaaggtcttcttcgacatgaccatctgcggtcaatctgctggccgcatcgtgatggagctctacgccgacgtcactccccgcaccgccgagaacttccgcgcgctttgcaccggcgagaagggcgtagggcggagcggcaagcccctccactacaagggctcgtccttccaccgcgtgatcccgagtttcatgtgtcaaggtggcgacttcaccgccggaaacggaaccggcggcgagtcgatttatggcgccaagttcgccgacgagaacttcgtgaagaagcacaccggtcccggcatcctctccatggcgaacgccggt

SEQ ID NO: 11085 - DNA, 248 bp, Glycine max
  Clone ID: LIB3039-012-Q1-E1-C3
ggaacaaatcactaagccctattattcttcctcaataatgtcaattacacttcacgtctctgcagcaactatgcctaaccctaaggtcgtctgggacatgaacatctgcgatcaatctgctggccgcatcatgatggagctctatgcccatgtcactcaccgcacagccgagaatttccgcgctctttgcaacggcgataacggcctatggcggagcgacaatccccaccaatacaatggctcctcct

SEQ ID NO: 11086 - DNA, 391 bp, Glycine max
  unsure (1)..(391): unsure at all n locations
  Clone ID: LIB3039-012-Q1-E1-C4
gtcaccacttcanaacactcataacacanagcacaaagcaaagctcatccttgagttaaaaaatggcagcagcttcttccatggctctctcatcggcatccttggctggcaaggccgtgaagctgggcccatcagccccagaagtgggaagggtgagcatgaggaagaccgtcaccaagcaggtctcctcaggaagcccatggtacggcccagaccgagtcaagtacttgggcccattctctggcgagcccccgtcctacctaaccggtgagttcccaggcgactacggctgggacactgctgggctttccgcagacccagaaaccttcgccaagaaccgtgaactcgaagtgattcactcaaggtgggccatgctcggagccttgggctg

SEQ ID NO: 11087 - DNA, 366 bp, Glycine max
  Clone ID: LIB3039-012-Q1-E1-C5
ggcacaagtttgttgagatagctacaagcaataagatgaaaatgaaagtgcttgttttgtttgttgctacagttttggtagcatatgaatgccatggctcagactaccagaagttccctctccaaatgaaaactgggtttggtgggcaatacagcaatgacgtggcatgtgccagttggaggcttggcgtggaagcatacaacgtaatcaagtggcaaactgttcctgcagcttgcggagagtacatagctgactacgttctatgagaccagtatagatgagattccaatacagttaagcaacaaacttatttctatgcgaaatccctcatactcaccacgcaagatgtccttgtcctggaccttg

SEQ ID NO: 11088 - DNA, 194 bp, Glycine max
  Clone ID: LIB3039-012-Q1-E1-C6
ggcacaactttgttcacatacctacacgcaataagatgaaaatcaaagtgcttgttttgtttattcctacacttttgctggcacagggggggcatgcctcatactaccagaacttccctctccacataaaaactggctttggtgggcaatacagcaattacgtggcatgttccaatttcatgcttgtcgtccaa

SEQ ID NO: 11089 - DNA, 341 bp, Glycine max
  Clone ID: LIB3039-012-Q1-E1-C7
ggcagtttcaaattttcttttccttcactttcccgagaaaaaaataacacttttcactttcttcactacgttctcacttcgatatggctcgtacgaagcaaaccgctcgcaagtccaccggtggcaaggcgccacgtaagcagctcgccaccaaggccgctcggaagtccgctccggcgaccggaggagtgaagaagccccaccgcttcaggccgggaaccgtggcgctgagggaaatcagaaagtaccagaagagcaccgagcttctcatcaggaagcttccatttcagaggctcgtgagagaaatcgcgcaggatttcaagaccgatttgcgtttccag

SEQ ID NO: 11090 - DNA, 260 bp, Glycine max
  Clone ID: LIB3039-012-Q1-E1-C8
ggcacaagtgaatttggtgatccataaaactagaaacaatgtgatgaaaattaaagtccttggtttcatcgttgcaacaattttgggagcatgggaatgccatgcgtacgaaatgttccctctcccaatgaacactggctatggtgcccgtaatccggaggtgaaatgcgcaaattggaagcttgctgtggaaacacacaacatctttgggtttgagaccattccccaaaagtgcgtttaagcaacacaggaatacatcc

SEQ ID NO: 11091 - DNA, 331 bp, Glycine max
  Clone ID: LIB3039-012-Q1-E1-C9
ggactcttagtgtcttactccgatgagtgaaccctcacctggcaatcaaccctaacattccaaagctcgaaggtgaacagtgagtgagtgagtgagtcagaacccaggatttggcgaaagtgaagcgatgagcagtgataggaatattggggttgccttggacttttccataggaagcagactcgctctcaaaagggctattgacaaacttctccgcaacggtgacatacgctacatcgtccacatcaagccttccggaggaagtgaattccgaaatcttcactggtccaccactgggtcacctctgattccgttgtcggagtttcgtgag

SEQ ID NO: 11092 - DNA, 333 bp, Glycine max
  Clone ID: LIB3039-012-Q1-E1-D1
cagtctagagtgactggggctaagtattcataccagtggatggccttggcccaacagaacaactggcatgtcttgctggatgctggatcattgggccccaaggacatggattcccttggcttgtccctatttcgtccagattttatagtcacatcattttacagggtttttgggtatgatcccacaggttttggttgtcttcttatcaagaaatctgtgatgcaaagccttcaaaatcagtctggttgtactggatctggaatggtgaagattacccccgagtttcctatgtaattgagtgattctgtagatggtttggataaatttgttggg

SEQ ID NO: 11093 - DNA, 375 bp, Glycine max
  Clone ID: LIB3039-012-Q1-E1-D10
gagtgcacaagtgagtttgttgatcgagataactagaaacagtgtgatgaaaatgaaggtccttgttttcttcgttgctacaattttggtagcatggcaatgccatgcgtacgatatgttccctctccgaatgaacactggctatggtgcccgtactccggaggtgaaatgcgcaagttggaggcttgctgtggaagcacacaacatctttggctttgagaccattcctgaagagtgcgttgaagcaacaaaggaatacatccatggcgaacaatatagatcagactccaaaacagttaaccaacaagcttacttttatgccagagacctcgaagtccatcccaaggacacatttgtgttcagtatagatggcac

SEQ ID NO: 11094 - DNA, 291 bp, Glycine max; identical to SEQ ID NO: 7794
  Clone ID: LIB3039-012-Q1-E1-D11

SEQ ID NO: 11095 - DNA, 226 bp, Glycine max
  Clone ID: LIB3039-012-Q1-E1-D2
ggcacaagtgagtttgttgatcgagatcactagaatcagtgtgattaaaatgaaagtccttgttttcttccttgctacaattttggtagcatggcaatgccatgcgtacgacatgttccctctccgaatgaacactggctatggtgcccgtactccggacgtgaaatgctcaagttggacgcatgctgtttaagcacacaccaaccttggcgttgagaccattcct

SEQ ID NO: 11096 - DNA, 351 bp, Glycine max
  Clone ID: LIB3039-012-Q1-E1-D3
cacgcgtcgaacgatgcgagacgacaaaaggggaaattctatttggggtttaggaaaaaggtcaaggccgaaaacactttcttctctcaattcctgaaaaaaaggacataccaaaaacttatttggatggcaaatcaccgatcaataccgcatctgatgagctagcacgtcaattgcttaatgctatcactgattccttaccatattaaactctggattccgattttgtgcccgaaaccaacgacgcagacagctttgcaagaccaaacggtgatttcgatgacaagtttatgtctgaattgatttcaatctcctatgttgaatctcccgatgtcaaaatctgatatatta

SEQ ID NO: 11097 - DNA, 401 bp, Glycine max
  Clone ID: LIB3039-012-Q1-E1-D4
ggcacaagtttgttgagatagctagaagcaatacgatgaaaatgaaagtgcttgttttgtttgttgctacagttttggtagcatatgaatgccatggctcagactaccataagttccctctccagatgaaaactgggtttggtgggcaatacagcaatgatgtggcatgtgccagttggaagcttggcgtggaagcaaacaacgtagtcaagtggcaaactgttcctgcagcttgcggatagtacatagctgactacgttctaggagaacaatatacattagattccataacaggttaaccaacaagcttatttctatgctaaatcactcatactcaccaacacagatgtctttgtcttggacgttgacgacactactctctctaatctccagtagtttgc

SEQ ID NO: 11098 - DNA, 289 bp, Glycine max
  Clone ID: LIB3039-012-Q1-E1-D5
tcaatggggatgcgatatctctacatactggcgtccacgtccgtccttctaccaacatcactactctcatttctagctatatgctggtctatggggcgcactggctataattctcgtggcttcgcactagttcctccatactttatcctcacatcaatttacactgtttttgggtatgattccacatcttttgcttgtcttcttatgaggctatctgtgatgccggtccttcaaaatcaatctgattctactggatctcaaatcgtcaaaattacctccgagtttccta

SEQ ID NO: 11099 - DNA, 322 bp, Glycine max
  Clone ID: LIB3039-012-Q1-E1-D6
ggaacctttgcattctattcattcaagattcagcaagtgcgttttggaagcagatagcgaaggggggcgagatggcccgtacaaagcaaactgctcgtaagtcaactggaggaaaagctcccaggaagcagcttgcaaccaaggctgcacgtaagtctgcaccaacaactggtggtgtgaagaagcctcatcgttatcgccctggaactgttgctcttcgtgagattaggaaataccataagagcactgagctcctaatcacgaagcttcctttcgagaggttggttcgtgaaacttcccaggatttcaagactgatcagcg

SEQ ID NO: 11100 - DNA, 397 bp, Glycine max
  Clone ID: LIB3039-012-Q1-E1-D7
gactcaagcacaacatctctatcgagtaaattaactatgaagcctaccctactattatccctttccttcctgcctctctttgctttcctggcgctttcagaagatgttgaacaagttgtggacataagtggcaaccccattttcccaggtggcacatattacattatgccatcaacttggggcgctgccggtggtggattgaaactaggccggacaggaaactcaaactgcccagttactgttttgcaagattactcagaaatcttccgtggcacaccagtcaaattcagcatacctgggataagccctggaatcatctttacaggtactccacttgaaatcgagttcgcagaaaaaccttaattgtgctgaaaccccccaaattggttgccttttg

SEQ ID NO: 11101 - DNA, 368 bp, Glycine max
  Clone ID: LIB3039-012-Q1-E1-D8
gaaacaaaaaccatcaccaaaaaaagaaaatgatgctcggagagcaccatcgcgcgaatccaacggttcacgtgccaccgtggccaacccacgacgatccaacggccgagatgtactccgcgtttttaacaaacgacgtcaatgctggtgagtactctccgtactatcttcaagaagcactaacggctctgcagcgttttctgccgtctaacgaaacggacgctgactcggacacggaggctcaacccgacgcggcggtggacgcgtactcgtgcgaccatttccgcatgtacgagttcaaggtccgtcgatgcgcacgtggcaggtcacacgactggacggagtgtccgtacgcgcatcccggcgag

SEQ ID NO: 11102 - DNA, 380 bp, Glycine max
  Clone ID: LIB3039-012-Q1-E1-D9
ggcctcagccctaaaacccaaggctgctgagtgttgcagaggcatgtctgagtcggacacgaagaagaagaagcagcagcagcgcagcggcggagagcatgaacgagaagaagggttgatgatcaagccccagagcttcactccccccatcgacacctcccaatggcccattctcctcaaaaactacgagcgcctcaacgtccgcaccggccactacacccccattccctccggctactcccccctgaagcgccccctctccgagtacctcaaatacagcgtcctcaacctcgacaagcccgccaacccttcctcccacgaggtcgtggcctggatcaagcgcctcctccgcgtcgaaaaaacggccactccggtaccct

SEQ ID NO: 11103 - DNA, 318 bp, Glycine max
  Clone ID: LIB3039-012-Q1-E1-E1
gagatttacgtttataaggatgacatcaagcatcaaaacctcccgcaacagctatggctctcaccactgatctcagccgattcagtggtgccatgatttatccaagaatcggcatcagatttgttcgtagagatgctcatgtttacccgtatgcaaacccataatctaacacgtaattccacaagcacctgaagccttcactgctcacctgaactgccatctacactgcgctgtacaaaaaggacattgctcaagacactgttcagaagacgatacgtactaccaaaaatccttactctaagtctaatgctaggtcca

SEQ ID NO: 11104 - DNA, 389 bp, Glycine max
  Clone ID: LIB3039-012-Q1-E1-E10
ggatcctttgtattctattcttcaaaattcaggcacagatggctccgtacgaagcaaaccgctcgtaagtccacaggaggaaaggctcctaggaagcagcttgcaaccaaggctgcacgtaagtctgcaccaactactggtggtgtgaagaagccccaccgttatcgtcctggtaccgttgctcttcgtgagattaggaaataccataagagtaccgagcttttgatccggaagctccccttccagaggctggttcgtgaaattgctcaggacttcaagactgatctgcgtttccagagccacgccgtgcttgcattgcaagaagctgctgaggcataccttgttgggctctttgaggacactaacctgtgtgccattcacgccaagcg

SEQ ID NO: 11105 - DNA, 366 bp, Glycine max
  Clone ID: LIB3039-012-Q1-E1-E11
gaatattggatggtggaaatggaatcagcagctgaaaaccctaactacccggcggtggactacaagcgaccttccatcttgtcatttcctcggaggcccgccctcagagtgacatccgagttcgatagtaaaagcgcagtcttcttccataagatttcctgcaagttgttggacagccttgccaacttcaagttttcgttcaaccacagcggtaagggcggcgacatctccgaacctcaattcagctttgtctccaagcaccttagcctccactacgacctcgaagaccataatgctctcgttaagacctccatcgatcttgctctcagtttgcaactcactgcttctcatgatctcaaggctcaa

SEQ ID NO: 11106 - DNA, 290 bp, Glycine max
  Clone ID: LIB3039-012-Q1-E1-E2
ggcagttcaattccaatatattccattctctctgtgtatttccctaactctcccttcaagatgcagatcttcgtcaagaccctcatgggggaaggcatcatccttgaagtggatagctcttagatcatcgacaacctcaaggccaagatccaggacacggaatgaatccccccggatcagcaacgtctcacttcgccggaaagcacctttaggacgggcgttcgcttgctgactacaacattcaaaatgagagtgatcttcagctcgtcctccgtctccatggtagcatg

SEQ ID NO: 11107 - DNA, 220 bp, Glycine max
  Clone ID: LIB3039-012-Q1-E1-E3
ttacatttttaattattacattaagcatcaaaacctccctccacatctattgctctcaacactgatctctaccctttcctttgtggggtgatttacccactaatctacatcacatttgttcttagacattctcatgtttacccttatgcatacccatattctaacacataattctacaagtacctcaacacttcaaatctcacttcaactggcatctaca

SEQ ID NO: 11108 - DNA, 228 bp, Glycine max
  Clone ID: LIB3039-012-Q1-E1-E5
ggcacaagtgagtttgttgatccagataactaaaaacaatcttatcaatactattgtccgtgttatcttcgttcctacaattttggcaggggtcaaactaccaacttttcactctctacctcaccgatgtgcttaggcgctcaagacaccattcacgtgacatgttccagttccctgcttggcttactatcaaacaacgtagtcatgtgtgggggtgttcctgcatct

SEQ ID NO: 11109 - DNA, 386 bp, Glycine max
  Clone ID: LIB3039-012-Q1-E1-E6
gggaacatcatcacattacattagattggtggtaatggcagcgtcactacaagcagcagctactttcatgcaacccaccaagttgagcaggagcaacactttgcagcaaaagtctactcagtccatttccaaggcttttggtttggaacctgttggagctaaaaaggtcacatgctcccttcaggctgatcttaaggacttggctcacaagtgtgttgatgctaccaaaattgcaggattcgcccttgccacctctgccctcgttgtctctggggcaagtgctgaaggtgttccaaagaggctaaccttcgacgaaatccagagcaagacctacttggaagtgaaggggacaggaacagcaaaccagtgcccaacaattgatggtg

SEQ ID NO: 11110 - DNA, 340 bp, Glycine max
  Clone ID: LIB3039-012-Q1-E1-E7
agacgacataaagggtcactcgttctatctaattcagtttttttctcccatcataaaaaaccgaccctctcctttccctcttcaccaaccaatggctcccccaggggcggataacaaccccgctgataaaaagcccgcagataacgctccggcggagaataatcccaaggcccacaagaagatatcaaatgaatgaagaatcgagaagaagaataagagaacaaacaagagcgtggagacctacaagatttacatcttcaaggtgctgaaacaggttcaccccgacatcggaatctcaagcaaagccatggggatcatgaacagtttcataaacgacatc

SEQ ID NO: 11111 - DNA, 401 bp, Glycine max
  Clone ID: LIB3039-012-Q1-E1-E8
ggcacaagtgagtttgttgatcgagataactagaaacagtgtgatgaaaatgaaggtccttgttttcttcgttgctacaattttggtagcatggcaatgccatgcgtacgatatgttccctctccgaatgaacactggctatggtgcccgtactccggaggtgaaatgcgcaagttggaggcttgctgtggaagcacacaacatctttggctttgagaccattcctgaagagtgcgttgaagcaacaaaggaatacatccatggcgaacaatatagatcagactccaaaacagttaaccaacaagcttacttttatgccagagacctcgaagtccatcccaagggcacatttgtgttcagtatagatggcaccgtactctctaatattccatactacaaaa

SEQ ID NO: 11112 - DNA, 383 bp, Glycine max
  Clone ID: LIB3039-012-Q1-E1-E9
gaaggtgcacgatttttttgtaagctataagctattttatcgttaggagaatatgaagttgtttgttttctttgttgctgcagtaattttggtagcatggccatgccatggcgcatgctaccaaaggttccctctccgaatgaaaactggctatggttagcgttcttcggacgtaaaatgcgcaagttttaggcttgctgtggaagcacacaacatccgcgcctttaaaaccattcctgaagatgaacgcgaagtctatcacaactacatatttatattcggcatatataacaccgtactctctaatatctcatactatgataaacatggaatatggggtggaggaatttaatgaaaccttatatgatgaatgggttaacaag

SEQ ID NO: 11113 - DNA, 355 bp, Glycine max
  Clone ID: LIB3039-012-Q1-E1-F1
gtcactcgttctatctaattcagtttttttctcccatcataaaaaaccgaccctctcctttccctcttcaccaaccaatggctcccccaaaggccgagaagaagcccgcggagaaaaagcccgcagagaaggctccggcggagaagaagcccaaggccgagaagaagatatcgaaggaaggaggaagcgagaagaagaagaagagaacaaagaagagcgtggagacctacaagatttacatcttcaaggtgctgaagcaggttcaccccgacatcggaatctcaagcaaggccatggggatcatgaacagtttcataaacgacatcttcgagaaactcgcccaggagtcgtcgcg

SEQ ID NO: 11114 - DNA, 255 bp, Glycine max
  Clone ID: LIB3039-012-Q1-E1-F10
gaaccaaaaaagggtccaacaaaacccaatccaatttcggcccgtcccgggaaaaggaaacctcaacggaacggtccgatccatttccgaatggggcaaccgctgaacttcccggccggaggaattcggctaagtttcccttcgtcggtcaacggctcggcaagctttcaacggcggtcttcggtcggcgccttcgcggctaaggcggtggatacgcagcggccggcggcaagcctttacaaggtgctgcaattc

SEQ ID NO: 11115 - DNA, 390 bp, Glycine max
  unsure (1)..(390): unsure at all n locations
  Clone ID: LIB3039-012-Q1-E1-F11
ggttgtatgagcggttcaacaagaaaatccccccgggcaaaaaaaaagtttaattgaaaaaagaaaaaaaaaaaaaaaaagaaaacaaagaagaagaagaaatttgacggggtgtgtgatcgggtcctcaagtgaagatctgangctgttggtgtctcttttcttttctccgagttccaaagatgagcgcttctaagttcatcaagtgcgtcactgttggggatggtgctgtgggcaaaacctgcttgcttatttcctacaccagcaacactttccccaccgattatgttccgactgtcttttacaatttcagtgcaaatgtngttgtcaatgggagcattgtgaatctgggtttgtgggatactgctggacaagaagattacaacagat

SEQ ID NO: 11116 - DNA, 341 bp, Glycine max
  Clone ID: LIB3039-012-Q1-E1-F12
ggaacctgatcgatctctttaccagttgcaacactacaccgggattccccctaaacccgtttgcgttgttgtttgcgaagaaatggcgactaagaggagcgtgggaacgttgaaggagggtgatttgaaagggaagagggtgttcgtgagggtcgatctgaacgtgcctttggatgacaaccttaacatcaccgatgacactagagtccgtgctgctgttcccaccatcaagtacttaactggtcatggagccaaagtgatcctttctagccacttgggacgtcctaaaggtgtaacacctaaatacagtttgaagcctcttgttccaaggctgtctcaac

SEQ ID NO: 11117 - DNA, 393 bp, Glycine max
  unsure (1)..(393): unsure at all n locations
  Clone ID: LIB3039-012-Q1-E1-F2
ggcttaaaaagcctcaacaaccctaacgcgtgcagagcagagagagacgcagccatggggcaaagacccgcgaggtgttatangcaaattaagaacaaaccataccccaagtcacggttttgccgtggtgttcctgatcccaagatcaagatttacgatgttggtatgaagaagaagggtgttgatgagtttcctttctgtgtccatctggttagttgggagaaggaaaacgtttctagtgaggccctggaagctgctcgtattgcttgcaacaagtacatggccaaatttgctggaaaggatgctttccacttgagagtcannggtgcaccattccatgtccctangatcaacangatgctttcgtgtgctggagctgataggctccaaact

SEQ ID NO: 11118 - DNA, 335 bp, Glycine max
  Clone ID: LIB3039-012-Q1-E1-F3
gtggttgggttttcagaagagcgtcccaatttgtaaccctaaatcagaaaaaagcgcagcttcaagcgagtgacagccaccagccatgggtcgtatgcacagccgcggtaagggtatatcctcttctgctttgccctacaaaaggacacctcctagctggctcaagatctcttcgcaagatgtcgaagaaaatatctgcaagtttgcgaagaaaggtttgaccccgtctcagattggtgtcattctcagagattctcacggtattgctcaagtcaatagcgtcactggcagcaaaatccttcgcatcctcaaagctcacggacttgcgcctgaaa

SEQ ID NO: 11119 - DNA, 401 bp, Glycine max
  unsure (1)..(401): unsure at all n locations
  Clone ID: LIB3039-012-Q1-E1-F4
ggcacaagtgattttgttgatcgagataactagaaacagtgtgatgaaaatgaaggtccttgttttcttcgttgctacaattttggtagcatggcaatgccatgcgtacgatatgttccctctccgaatgaacactggctatggtgcccgtactccggaggtgaaatgcgcaagttggaggcttgctgtggaagcacacaacatctttggctttgagaacattcctgaagagtgcgttgaagcaacanaggaatacatccatggcgaacaatatagatcagactccaaaacagttaaccaacaagcttacttttatgccagagacctcgaagttcatcccaaggacacatttgtgttcagtatagatggcaccgtactctccaatatccatactacaaaaa

SEQ ID NO: 11120 - DNA, 360 bp, Glycine max
  Clone ID: LIB3039-012-Q1-E1-F5
ggcacaagtgagtttgttgatcgagataactagaaacagtgtgatgaaaatgaaggtccttgttttcttcgttgctacaattttggtagcatggcaatgccatgcgtacgatatgttccctctccgaatgaacactggctatggtgcccgtactccggaggtgaaatgcgcaagttggacgcttgctgtggaagcacacaacatctttggctttgagaccattcctgaagagtgcgttgaagcaacaaaggaatacatccatggcgaacaatatagatcagactccaaaacagttaaccaacaagcttacttttatgccagagacctcgaagtccatcccaaggacacatttgtgttcag

SEQ ID NO: 11121 - DNA, 384 bp, Glycine max
  Clone ID: LIB3039-012-Q1-E1-F6
gagaaaatggaccttcagttcttcaccttcttcacttgaatcgcaacttcccaaatccaaatctcacagagaaaccctaattcagagccgaaccctcccaaaatgtcctcgccgcttacctaccccgcggtgctcgacgacaaggacctcgacgacgccgcattgtgggccatgatcgactccgccacagcctcacactccccctccaagtgcaagtccctagcctccgccaaattccccatccgccagctcccttccccgatctcaaacccctccccgccgcccaagttccggaaggtcctccgggactctggcgacagcggcgaggtggtgcaagacccgtggccctaccgccctccgcggaagatcgcgaggacgtgtcct

SEQ ID NO: 11122 - DNA, 367 bp, Glycine max
  Clone ID: LIB3039-012-Q1-E1-F7
gattgttggcttgtgcactgctcgtgcttctacggttatcacatctcctcttccatcttcatctcactcagtttccaagaatcataggctgaggggacagtcttagtcatccgtgagtgctgattacgagatggtcgttgagaaggcgatcaacaagctcacatgcttcatcactgtgaagagatccacacctttacagtcccgttcggcatggcactctgtaggatctgacgacgtgagatcgaagagctgtcgtcccttcgtgacacataaatcaccgctgcgaacgttctcacgggtcttacagcagtcttgacatcgctgtgaggcgtttggagccacttagagctgactttcccagtttgag

SEQ ID NO: 11123 - DNA, 336 bp, Glycine max
  unsure (1)..(336): unsure at all n locations
  Clone ID: LIB3039-012-Q1-E1-F8
aaggcagcggtggtttacgagagaaagaagcaactcaacaaattaagggtgaaagctgagaaggttgctgaagagaagctcggttcccaacttgatgttcttggccctgttaagttatgaagtatttttggtaatggttggaaatttttaagccaatttaaacaaattgaactaactttcaattttgcctgaaggtgccttggtaatggatctaagaattgaaaaccgaataacctggaaaccgttttttaattaaatgtgtgtgttgtataaattttgtcacccagaaatgttttccattgccttgagaanaaagaaaaactctgtacactgtgt

SEQ ID NO: 11124 - DNA, 65 bp, Glycine max
  Clone ID: LIB3039-012-Q1-E1-F9
atgaagacgacagaaggtacagctgcagattcgacacaaggtacgctgcgataacagacagaacg

SEQ ID NO: 11125 - DNA, 289 bp, Glycine max
  Clone ID: LIB3039-012-Q1-E1-G1
gatgttagcataggaggttgagtagttcttcatcatagtcttaaacattaaaccttagcaaaactcaacaatgctagacatcaaaggctacctcgtactcttcttcctatggttcatatcaaccattctgatacgttccatcttcaagaaaccacagcgtctaagactcccaccgggtcctccaatttcaatacccttgctgggacacgcgccatatctccgttcactgctccaccaaacattgtacaagctatcactgcgctatggacctttgatcacgtcatgatcg

SEQ ID NO: 11126 - DNA, 345 bp, Glycine max
  Clone ID: LIB3039-012-Q1-E1-G10
agggaaaatcccaatttcctcctcctccgttttcccccaagggggttcccctccccaaccttcggggggtaaaccaagttttggcaatggaaaaaggaggaaagggcgcttcgctgttaagcaaagggggactaggatccctaaaagggaaagatgacattgcaacaaaatcagcaaagggaaggagggttcagttttcaactgatggtccattatttgaatctggagtaagtagtaactcagccacttcactaaaatctggtggaaaaggaggaatgggagacaatgttgcaaaaggtggaaagaattctcagtcaaaagactcccatccatcagattacagag

SEQ ID NO: 11127 - DNA, 69 bp, Glycine max
  Clone ID: LIB3039-012-Q1-E1-G11
ggcatcagtgagtttgctgcttcagattaccacaaacagtgttctgaaaatgaaaggccctggtttcct

SEQ ID NO: 11128 - DNA, 351 bp, Glycine max
  Clone ID: LIB3039-012-Q1-E1-G12
ggttccggtgttttaaccaaatccaaattttgggaaacctccgcagaaggtggtgctccggaggtgactcgggaaacttccatgggttctttcacctttgacctgtacaacaagcatgccccgaggacttgtaggaacttcattgaactgtctcgccgaggttactacgacaacgttaaattccataggatcattaaggacttcatagtacaaggtggggatcccactggaacaggaagaggaggagaatccatatatggtgcaaagtttgaagatgatattaaaccaaaattgaagcacactggagctggaatcttatccatggcaaatgctggcccaaacaccaatggt

SEQ ID NO: 11129 - DNA, 406 bp, Glycine max
  Clone ID: LIB3039-012-Q1-E1-G2
ggcacaagtgagtttgttgatcgagataactagaaacagtgtgatgaaaatgaaggtccttgttttcttcgttgctacaattttggtagcatggcaatgccatgcgtacgatatgttccctctccgaatgaacactggctatggtgcccgtactccggatgtgaaatgcgcaagttggaggcttgctgtggaagcacacaacatctttggctttgagaccattcctgaagagtgcgttgaagcaacaaaggaatacatccatggcgaacaatatatatcagactccaaaacagttaaccaacatgcttacttttatgccagagacctcgaagtccatcccaaggacacatttgtgttcagtatacatggcaccgtactctctaatattccatactacaaaaaacac

SEQ ID NO: 11130 - DNA, 375 bp, Glycine max
  unsure (1)..(375): unsure at all n locations
  Clone ID: LIB3039-012-Q1-E1-G3
gaaggtgcaaaagtttgttgtgagctataagctagtttatcgtgaggagaatatgaagttgtttgttttctttgttgctgcagtagttttggtagcatggccatgccatggcgcaggctaccaaaggttccctctccgaatgaaaactggctatggtgagcgttcttcggaggtaaaatgcgcaagttttaggcttgctgtggaagcacacaacatccgagcctttaaaaccattcctgaagagtgcgttgaaccaacaaaggactacattaatggcgaacaatttagattagactctanaacagttaaccaacaagctttcttttatgctagtgaacgcgaagtcaatcacaacgacatatttatattcggcat

SEQ ID NO: 11131 - DNA, 402 bp, Glycine max
  Clone ID: LIB3039-012-Q1-E1-G4
gccttacgtaaattctcaacaaagcaaccctgagcagtgttaataaccaaactctctcaagtctctagagagaagctaccagactcaaggggagatacccaattagctaacccctctcacacttacagaccatgccaaacgcaaacatgcttctccttttcctcttccttctggcgctcttctcagccatgacaacaccgtcaacctccgcgatcgacaccttcatctttgccggctgctcccagcccaagttcacgccgggttccgcctacgaaaataccgtcaactcgctcctcacctctctcgtcaactccgccgccttcgccaactacaacaacttcaccgtccccgcctcctccgacgccgtctacggcctcttccagtgccgcggggacctcaaca

SEQ ID NO: 11132 - DNA, 316 bp, Glycine max
  Clone ID: LIB3039-012-Q1-E1-G5
ggagagaattatcaaaggtgaaacgaagaagccctaactacgcacgcattcgtgagaaaactcaatattcgtcgctcatggcactctcttctcgtctcttttccaaatccaaattgatctatggcagtcaaatacttctacaaaaggagcatgctattccagttcgtcactttgctaaagagtctgcccctcctgcccttaagggagacgagatgctgaagaacatttttgtggaggtgaagaacaaatttgagaccgccataggaatattaaagaaggagaaaatcaccattgacccagaagattcagctgctgt

SEQ ID NO: 11133 - DNA, 388 bp, Glycine max
  Clone ID: LIB3039-012-Q1-E1-G6
ggcacaagtgagtttgttgatcgagataactagaaacagtgtgatgaaaatgaaggtccttgttttcttcgttgctagaattttggtagcatggcaatgccatgcgtacgatatgttccctctccgaatgaacactggctatggtgcccgtactccggaggtgaaatgcgcaagttggaggcttgctgtggaagcacacaacatctttggctttgagaccattcctgaagagtgcgttgaagcaacaaaggaatacatccatggcgaacaatatagattagactccaaaacagttaaccaacaagcttacttttatgccagagacctcgaagtccatcccaaggacacatttgtgttcagtatagatggcaccgtactctctaatatt

SEQ ID NO: 11134 - DNA, 399 bp, Glycine max
  Clone ID: LIB3039-012-Q1-E1-G7
ggcgtacacagcctcaacaaccctaacgcgtgcagagcagagagagacgcagccatggggcgaagacccgcgaggtgttataggcaaattaagaacaaaccataccccaagtcacggttttgccgtggtgttcctgatcccaagatcaggatttacgatgttggtatgaagaagaagggtgttgatgagtttcctttctgtgtccatctggttagttgggagaaggaaaacgtttctagtgaggccctggaagctgctcgtattgcttgcaacaagtacatggccaaatttgctggaaaggatgctttccacttgagagtcacggtgcacccattccatgttcttacgatcaacacgatgctttcgtgtgctggagctgataggctccaaactggaatg

SEQ ID NO: 11135 - DNA, 396 bp, Glycine max
  Clone ID: LIB3039-012-Q1-E1-G8
ggactctcgcgggtggacaacgaaatttctcagccaaagaacaaggatcagaatcgtttaatcaagttgaggaagatggcactagtctccggaggaagatcaacactgaaccctaacgcccctctttacattcccgccgcgttccgccaagtggaggatttttctccagaatggtggcagctggtgacgacactgacatggtaccatgactactggctaagccagcagcacgatgatggagccttctatggcgaggatgggtttgatggcaatgatgtggttgatttgcttcctgattcgtttgattttgatgctggtgaagatctttttgaagagtttattcgatcttctgaatcccaagaagaaactggacccaaaggaactggcataactttt

SEQ ID NO: 11136 - DNA, 362 bp, Glycine max
  Clone ID: LIB3039-012-Q1-E1-G9
gataccaaaacagagagtggtttcagtgagtgatcggtgtgcacctgatccttcacaagtcgtcatcatcatcatcatcatgaccgttgattgaagaagatgccgatcagaaacatcgccatcggaaggcctgaagaggctattcaccccgacacgttgacggcggggttggctgagttcatctccaccttgatcttcgtgttcgccggttcaggttccggcatcgcctacaataagctcaacgacaacggcgccgccactcacgccggcctcatctccgcttccatcgcccatgcattcgccctcttcgtcgccgtctccgtcggagccaacatctccggcggtcacgtcaagcccgcccg

SEQ ID NO: 11137 - DNA, 321 bp, Glycine max
  unsure (1)..(321): unsure at all n locations
  Clone ID: LIB3039-012-Q1-E1-H1
gaaaggtgcccccacaaacacaactaacacaacctttgctaatgaaaaatatctccttttttcatttgcaacggttgctttgaatgaaggaagcagtaacggctatattataatttgtgaggaggcattgatgtggaagaacaagaacacgtgaaggagtttgtgttgtgttgtagagaggaaaaattagtgagagggcaagatggattttacttcgttcttgacgtccctggggacttcgtttgtgatatttctggttttgatgattgtgtttgcgtttctatcaagtangcctgngaacaatgtggtgtactaccccaa

SEQ ID NO: 11138 - DNA, 392 bp, Glycine max
  Clone ID: LIB3039-012-Q1-E1-H10
ggagtttgttgatcgagataactagaaacagtgtgatgaaaatgaaggtccttgttttcttcgttgctacaattttggtagcatggcaatgccatgcgtacgatatgttccctctccgaatgaacactggctatggtgcccgtactccggaggtgaaatgcgcaagttggaggcttgctgtggaagcacacaacatctttggctttgagaccattcctgaagagtgcgttgaagcaacaaaggaatacatccatggcgaacaatatagattagactccaaaacagttaaccaacaagcttacttttatgccagagacctcgaagtccatcccaaggacacatttgtgttcagtatagatggcaccgtactctctaatattccatactacaaa

SEQ ID NO: 11139 - DNA, 343 bp, Glycine max
  Clone ID: LIB3039-012-Q1-E1-H11
ggcgtagcgaaccaacagagaaaattgccattctccgaaacaagtccggggaaaaaggaagaaaacccgcaaagctcaaaatgggaaacgagtttttgaaggcaaagtgcttaatgaactgtgaagttgcattgattcttgagcacaagtatgagcagcttcaacagacatccgatgatcccatgaatcaagtttctcaggtatttgaaaagtcactgcagtatgtgaagcgcttcagccgctataaaaatcccgatgctgttagacaagttcgagaaattctcgccagatatgaattggctgagtttgagttgtgtgtccttggcaacctttgcccaaaaac

SEQ ID NO: 11140 - DNA, 318 bp, Glycine max
  Clone ID: LIB3039-012-Q1-E1-H12
gacaaatctcggaagcaaacgcagcattgggagatagaaggagagagagaaggagagagagagaaggacccttacccttcccaaccgctggcttgcctttgaggcttcggaccctggcttggtcggcgtcttccttctttctttctttctttctcggtgtgtcgtaatggctctcccagactcttcttcccgtcgcaactccctgatcccctccttcatctactcctcttcctccaaaacgctccctctccaccaaaaggctcaacacgggctccgctgccgccgccgccgctccctccccgccgccgggcaatctcg

SEQ ID NO: 11141 - DNA, 362 bp, Glycine max
  Clone ID: LIB3039-012-Q1-E1-H2
gcaaacttgagtttgttgatcgacataactataatcagtgtgatgaaaatgaaggtccatgttttcttcgttgctacacttttggtaccatggaattgccatgcgtacgatatgttccctctcctaatgaacactggctatggtgcccgtactccggatgtaaaatgcgcaagttgaatgcttgctgtggaagcacacaacatctttggctttgagatcattcctcaagagtgcgttgaatcagcaaatgaatgcatccatggcgaacattagagatcagactccaaatcagttaaacatcagacttacatttatgccagatacctcgatttccatcccaatgacacatttgtgttcagtat

SEQ ID NO: 11142 - DNA, 346 bp, Glycine max
  Clone ID: LIB3039-012-Q1-E1-H3
gattctacattctctagagcacacacaaaccctcccctcacactctccaaaccctagcggcactacacacgttatctctctctctctctctcgcggtctctccttccccaagatgtcgagcgccgatcccgagcaccgataagaggaggaggcacccgccgtctgcgacgactaggacaccggagcacacgtcgctcccatcgtcaagctcgaggaggttgctgtcaccaccggcgaggaggacgaagatgcaatcctagatctcacatcgaatctttaccggttcgacaaggatgggaaccagtggaaggagcgaggcgcgggcaccgtgaagttcctgaagcat

SEQ ID NO: 11143 - DNA, 384 bp, Glycine max
  Clone ID: LIB3039-012-Q1-E1-H4
ggcagcagcagctttgaacgacgcagaaggttcatccaatctccgaatcctttaatcgcattgcaaccatgtcgaggagaaaggtcagagagccaaaggaggaaaacgtgactcttggcccagctgttagagatggcgaacatgtctttggcgtcgctcgcatatttgcctcctttaatgataccttcattcatgtcactgatctgtctgggagggaaacgcttgtccgcatcactggtggaatgaaggttaaggctgacagagatgaatcatctccttatgctgctatgcttgcagctcaggatgttgctgccagatgcaaggaacttggcattactgctcttcatatcaaactccgtgccacgggtgggaacaagacaaaaa

SEQ ID NO: 11144 - DNA, 338 bp, Glycine max
  Clone ID: LIB3039-012-Q1-E1-H5
atgagataaactgtatcaattatgagccagatgaattgagcatgttgcctgaacgaggagctgaaagtgcatcaatgagttatgaccctgctttagactatgaaatgcaggcccaggctggtggtactttacaaaataagaacaaagaggtattgactgacaccaaaccaggatctaaggggttggataaggaggcaaaatcaaaacttaccccaaataattctgataaaagaaagactggtgggccgataaggagagggaagacttctaaacctaatgctttggatgaagcacgagcacgtgctgagagcttacggaactacaaagcggatctccag

SEQ ID NO: 11145 - DNA, 391 bp, Glycine max
  Clone ID: LIB3039-012-Q1-E1-H6
tccacaaagccacttgacatctttaggttccaatctttggaatgaagatctagagtgtcttgaatggctagaatctaaggaatctcgatccgttgtttatgtgaattttggcagcatcactgttatgtctgcagaacaactcttggagtttgcttggggtttggccaatagcaagaaaccctttttgtggatcattaggcctgaccttgtcattggtggatccgtgattttgtcgtctgagtttgtcagtgaaacaagagacagaagcctaatagcaagttggtgtccacaggaacaagtgctaaaccatccttcaattggtgtattcttgactcattgtggatggaactcaactactgaaagtgtttgtgctggagtgccaatgttgtgt

SEQ ID NO: 11146 - DNA, 402 bp, Glycine max
  Clone ID: LIB3039-012-Q1-E1-H7
ggcacaagtgagtttgttgatcgagataactagaaacagtgtgatgaaaatgaaggtccttgttttcttcgttgctacaattttggtagcatggcaatgccatgcgtacgatatgttccctctccgaatgaacactggctatggtgcccgtactccggaggtgaaatgcgcaagttggaggcttgctgtggaagcacacaacatctttggctttgagaccattcctgaagagtgcgttgaagcaacaaaggaatacatccatggcgaacaatatagatcagactccaaaacagttaaccaacaagcttacttttatgccagagaactcgaaattcatcgcaaagacacatttgtgttcagtatagatggcaccgtactctctaatattccatactacaaaaa

SEQ ID NO: 11147 - DNA, 355 bp, Glycine max
  unsure (1)..(355): unsure at all n locations
  Clone ID: LIB3039-012-Q1-E1-H8
ggagtctgcgactgagaagtgcgacgctgctgcaaagtgcaagcggatttggtcttcttctttactcccaatcatttctctgtgcaaggataagtgtgttatctatctaaaaacacaagatgtcagctgggcctggacttgaatctctagtagatcagacaatttcagtcattacaaatgatggacgaaatatagtgggagtcctgaaaggttttgaccaggcaacaaatattattcttgatgagtcncatgaacgggtttattctacaaaggaaggtgtgcaacaacttgttcttggtttgtacatcatcaagggtgacaatataagtgttgttggtgaactggatgaagaact

SEQ ID NO: 11148 - DNA, 403 bp, Glycine max
  unsure (1)..(403): unsure at all n locations
  Clone ID: LIB3039-012-Q1-E1-H9
acccacacgtccggccaacccttcgaacggttccaaaaaaacaacaaaagggggaacaaatgaatttggttattcaaaataacaaaaaacattttaataaaaataaaggtccttgtttccttcgttgctacaattttggtagcatggcaatgccatgcgtacgatatgttccctctccgaatgaacactggctatggtgcccgtactccggaagtgaaatgcgcaagttggangcttgctgtggaagcacacaacatctttggctttgagaccattcctgaagagtgcgttgaagcaacaaaggaatacatccatggcgaacaatatagattagactccaaaacagttaaccaacaagcttacttttatgccagagacctcgaagtccatcccaaggacacat

SEQ ID NO: 11149 - DNA, 405 bp, Glycine max; identical to SEQ ID NO: 9625
  Clone ID: LIB3039-013-Q1-E1-A10

SEQ ID NO: 11150 - DNA, 201 bp, Glycine max
  Clone ID: LIB3039-013-Q1-E1-A11
gaaggtgcaagagtttgttgtgagctataagctagtttatcgtgaggagaatatgaagttgtgtgttttctttgttgctgcagtaattttggtagcatggccatgccatggcgcaggctatcacaggttccctctccgaatgagaactggctatcgtgagcgttcttcggaggtaaaatgctcaagttttacgcttgctgt

SEQ ID NO: 11151 - DNA, 397 bp, Glycine max
  unsure (1)..(397): unsure at all n locations
  Clone ID: LIB3039-013-Q1-E1-A12
ggcacaagtgagtttgttgatcgagataactagaaacagtgtgatgaaaatgaaggtccttgttttcttcgttgctacaattttggtagcatggcaatgccatgcgtacgatatgttccctctccgaatgaacactggctatggtgcccgtactccggaggtgaaatgcgcaagttggaggcttgctgtggaagcacacaacatctttggctttgagaccattcctgaagagtgcgttgaagcaacaaaggaatacatccatggcgaacaatatagattagactccaaaacagttaaccaacaagcttacttttatgccagagacctcgaagtccatcncaaggacacatttgtgttcagtatagatgggcacgtactctctaatattccatactac

SEQ ID NO: 11152 - DNA, 401 bp, Glycine max
  Clone ID: LIB3039-013-Q1-E1-A2
gattgttggcttgtgctctgctcgtgcctctagggttatcatatctccatttccatttcctctctctcagtttccaagaatcttaagctatgggaaagtcttacccaaccgtgagcgctgattaccagaaggccgttgagaaggcgaagaagaagctcagaggcttcatcgctgagaagagatgcgctcctctaatgctccgtttggcatggcactctgctggaacttacgacgtgagctcgaagaccggtggtcccttcggaaccataaagcacccctccgaactcgctcacggcgctaacaacggtcttgacatcgctgttaggcttttggagccactcaaagcggagtttcctattttgagctacgccgatttctaccagttggctggcgttgttgcc

SEQ ID NO: 11153 - DNA, 328 bp, Glycine max
  unsure (1)..(328): unsure at all n locations
  Clone ID: LIB3039-013-Q1-E1-A3
ggttctagtgtatgtgattgttgtgcttttcgttcgcatcttctctctctctcagaaagatgaaggtggtcgccgcgtatttgctcgccgtcctcggtggcaacaacagcccctccgccgatgtcatcaaggaaatccttggctccgttggagtagaagcagatgaagataggattgaatcgtttttgtctgaagttaagggtaaggatatagttgagcttattgctgccggtanggaaaagttggccacggttccttctggtggtggtggtgccgttgccgtcgccgcagctcctgngggaagtgctgctgctgctgctcctgctgc

SEQ ID NO: 11154 - DNA, 398 bp, Glycine max
  Clone ID: LIB3039-013-Q1-E1-A4
ggcgttgaaatggcttaaacgctccctacccttccataattgttggtctctttcagtgcctcagtttggtgttttcaacaagttgattggatgggatttgctttgtcttttggttccttgcctgttttggtttcctcttatgactttgctaccccaaataaagaaattcaatggctggggtctgtcttcactggcatcatcttctgtgttgttggatatggcaaattgagtagtgcagagaaaattgaatggaataaccggggattctcaacatttcatgctctgtttgcatcatttacgtcattttacctcttggtgttatcagatattttcaacaaggattcacatgaagaacttgttattaatagatcatccactttctcaaattcggtactggg

SEQ ID NO: 11155 - DNA, 390 bp, Glycine max
  Clone ID: LIB3039-013-Q1-E1-A5
ggttctagtgtatgtgattgttgtgactcgttcttcttcgtcgttatcttcttcttttgttgtttgtgtgtttgttttttctctcacctgaaaatgtcttgctgcggtggtaactgtggttgcggaagcgcctgcaagtgcggcaacggctgcggaggctgcaagatgtacccagacttgagctacaccgagtcaaccaccaccgagaccttggtcatgggagtggcaccagttaaggctcaattcgagagtgctgaaatgggtgttcccgctgagaacgatggctgcaaatgtggagctaactgcacctgcaacccctacacttgcaagtgaggtgttggagagctaaagcttcaagcagaaatggcccttagaaataatgattaaaac

SEQ ID NO: 11156 - DNA, 386 bp, Glycine max
  Clone ID: LIB3039-013-Q1-E1-A6
ggctgtgagtgagacaccgatagatagagagcgcggcataacctaaacctatctttcttctctctctgtgtgtgcgcttcaacggcaaccagaagcagccatggccactgcaaggactgtgaaggatgtttcacctcatgagttcgttaaggcgtactcctctcacctcaagcgatccggcaagatggagctgccagagtggactgatattgtgaaaactgcaagatttaaggagttggctccttatgatcctgactggtactatgtcagagctgcttccatggcaagaaagatctacttgagaggaggacttggtgttggtgcctttcagaggatttatggtgggagcaagaggaatggtagtcgccctcctcatttttgcaaga

SEQ ID NO: 11157 - DNA, 340 bp, Glycine max
  Clone ID: LIB3039-013-Q1-E1-A7
gattcgaatggatcacgagtggatgggttccgctgtataagctagacctagcttacgtctctcgcagtgtgtgtgaatctgctgaatgcagaatgttccaaggttatggtctagactgtaactgatgtgtcatcacacacaattcgttaaagcgttatcctctcagcgagtctagttgagaggcatcacgctgaagtaatattctgatattatagcaactgcactatttagaggatttgctccttatgatcctgactgctactatgtcacagttgcatcgatagcgagattcatatacatgataagatgacttggtattggtacctttcagatgatttat

SEQ ID NO: 11158 - DNA, 393 bp, Glycine max; identical to SEQ ID NO: 8734
  Clone ID: LIB3039-013-Q1-E1-A8

SEQ ID NO: 11159 - DNA, 182 bp, Glycine max
  Clone ID: LIB3039-013-Q1-E1-A9
gacaatcgaacgggaaaaggcgtcttcataaacgccgcccaaaacttctcatacccttttattcattccattcgtttctagggttttcttttctttgccgataaaatgagagagtgcatttcgatccacattggccaggccggtatccaggttggaaacgcctgctgggaactctattgcct

SEQ ID NO: 11160 - DNA, 377 bp, Glycine max
  Clone ID: LIB3039-013-Q1-E1-B1
gacaagtgagtttgttgatcgagataactagaaacagtgtgatgaaaatgaaggtccttgttttcttcgttgctacaattttggtagcatggcaatgccatgcgtacgatatgttccctctccgaatgaacactggctatggtgcccgtactccggaggtgaaatgcgcaagttggaggcttgctgtggaagcacacaacatctttggctttgagaccattcctgaagagtgcgttgaagcaacaaaggaatacatccatggcgaacaatatagatcagactccaaaacagttaaccaacaagcttacttttatgccagagacctcgaagtccatcccaaggacacatttgtgttcagtatagatggcaccgtactc

SEQ ID NO: 11161 - DNA, 419 bp, Glycine max
  Clone ID: LIB3039-013-Q1-E1-B11
acggactcatccagctgtcagaagaccacacaacgggtaagggaggggtatttcatcactgttgatattgaaaaaggcatgcaacatgggcacgacgtgctactctatgatgaccgtgatcccacaattgatcgataatctggagatttaaagtttcgtatccgtactgcacctcacgacaccttcagaagataaagcaatgacttgcacactactgtcactataactctggttcaagcccctgttggttttgagaagaccattaaacacctagatgagcatctggtggacataagcacaattgaaatcacaaagccaaagcaagtgacgaagttcaaatgggatggtatgccattgcatagtagcaacagaaaaagagatctttacgtcacttttgacgttctattccccacgtcact

SEQ ID NO: 11162 - DNA, 387 bp, Glycine max
  unsure (1)..(387): unsure at all n locations
  Clone ID: LIB3039-013-Q1-E1-B12
ggggtctagttagagtgaatccatgaccgtgaccatggcggctgcgtttacaagtacaagtgcaacactgagactgtcaaatgttggagagagcagaggtttgcagctgcgtaagtgtaaccctaatcctaataagctgaaggttatgggggggtttggaggttgttctggagtggcagtgggtgtgagagaaagaaaaggaattggaagggttagggttcgggttcgggcgagttcttcgtcggacgaggcagtgagtgcgcagtcaaaagtgactcaaaaagtaatctttgacgtcagtaatggaaatccaattgggaagcttgtgggacgtattgtgattggactgtacggcgacgatgtcncccaaacggccgagaacttccg

SEQ ID NO: 11163 - DNA, 400 bp, Glycine max
  Clone ID: LIB3039-013-Q1-E1-B2
gaaggtgcaagagtttgttgtgagctataagctagtttatcgtgaggagaatatgaagttgtttgttttctttgttgctgcagtagttttggtagcatggccatgccatggcgcaggctaccaaaggttccctctccgaatgaaaactggctatggtgagcgttcttcggaggtaaaatgcgcaagttttaggcttgctgtggaagcacacaacatccgagcctttaaaaccattcctgaagagtgcgttgaaccaacaaaggactacattaatggcgaacaatttagattagactctaaaacagttaaccaacaagctttcttttatgctagtgaacgcgaagtccatcacaacgacatatttatattcggcatagataacaccgtactctctaatatc

SEQ ID NO: 11164 - DNA, 400 bp, Glycine max
  Clone ID: LIB3039-013-Q1-E1-B3
gaacgttatattcatcagaatcactccaacatttcaaccgaaagaaacctctctctctctctctcccatgcgtttctcaaaaaaccaaagctattagtttagttgcttccttattttcttcgccagagatcgcaggatgtcgtcgccgaggttcccaggtggtggagcctccgatttctacggcggagcaggaggatttcccagtcagttcacggcggttcaacccaccatgaacaaccactccgccaccacaccccgccctctctaccgatcccaaccttcaattctgcttaacccctcgtcccacatcgcccaacaccaaccatcccctctcatcgggaaacgcaccctcgccgaattccaaacccacaacctcaacagcagcaacaacaacaacaat

SEQ ID NO: 11165 - DNA, 336 bp, Glycine max
  Clone ID: LIB3039-013-Q1-E1-B4
gctttcttcgttgctacaattttggtagcatggcaatgccatgcgtacgatatgttccctctccgaatgaacaccggctatggtgcccgtactccggaggtgaaatgcgcaagttggaggcttgctgtggaagcacacaacatctttggctttgagaccattcctgaagagtgcgttgaagcaacaaaggaatacatccatggcgaacaatatagatcagactccaaaacagttaaccaacaagcttacttttatgccagagacctcgaagtcgatcccaaggacacatttgtgttcagtatagatggcaccgtactctctaatattccatactac

SEQ ID NO: 11166 - DNA, 394 bp, Glycine max
  Clone ID: LIB3039-013-Q1-E1-B5
ggcacaagtgagtttgttgatcgagataactagaaacagtgtgatgaaaatgaaggtccttgttttcttcgttgctacaattttggtagcatggcaatgccatgcgtacgatatgttccctctccgaatgaacactggctatggtgcccgtactccggaggtgaaatgcgcaagttggaggcttgctgtggaagcacacaacatctttggctttgagaccattcctgaagagtgcgttgaagcaacataggaatacatccatggcgaacaatatagattagactccaaaacagttaaccaacaagcttacttttatgccagagacctcgaagtccatcccaaggacacatttgtgttcagttatagatggcacgtactctctaatattccatac

SEQ ID NO: 11167 - DNA, 380 bp, Glycine max
  Clone ID: LIB3039-011-Q1-E1-D10
gcacaagtgagtttgttgatcgagataactagaaacagtgtgatgaaaatgaaggtccttgttttcttcgttgctacaattttggtagcatggcaatgccatgcgtacgatatgttccctctccgaatgaacactggctatggtgcccgtactccggaggtgaaatgcgcaagttggaggcttgctgtggaagcacacaacatctttggctttgagaccattcctgaagagtgcgttgaagcaacaaaggaatacatccatggcgaacaatatagatcagactccaaaacagttaaccaacaagcttacttttatgccagagacctcgaagtccatcgcaaggacacatttgtgttcagtatagatggcaccgtactctc

SEQ ID NO: 11168 - DNA, 359 bp, Glycine max
  Clone ID: LIB3039-009-Q1-E1-E4
ggtgcacaagtgagtttgttgatcgagataactagaaacagtgtgatgaaaatgaaggtccttgttttcttcgttgctacaattttggtagcatggcaatgccatgcgtacgatatgttccctctccgaatgaacactggctatggtgcccgtactccggaggtgaaatgcgcaagttggaggcttgctgtggaagcacacaacatctttggctttgagaccattcctgaagagtgcgttgaagcaacaaaggaatacatccatggcgaacaatatagatcagactccaaaacagttaaccaacaagcttacttttatgccagagacctcgaagtccatccaaagacacatttgtgttc

SEQ ID NO: 11169 - DNA, 354 bp, Glycine max
  Clone ID: LIB3039-009-Q1-E1-E5
ggcacaagtttgttgagatagctagaagcaataagatgaaaatgaaagtgcttgttttgtttgttgctacagttttggtagcatatgaatgccatggctcagactaccagaagttccctctccaaatgaaaactgggtttggtgggcaatacagcaatgaggtggcatgtgccagttggaggcttggcgtggaagcaaacaacgtagtcaagtggcaaactgttcctgcagcttgcggagagtacatagctgactacgttctaggagaccaatatagatcagattccaaaacagttagccaacaagcttatttctatgctaaatccctcaaactcaccaacaaagatgtctttg

SEQ ID NO: 11170 - DNA, 132 bp, Glycine max
  Clone ID: LIB3039-009-Q1-E1-E6
ttgggtggaagtttgaaacaacaaagtattattgcacggttattgatgctcctggacacaaggatttcattaagaatatgattactgggacatcccaagctgactgtgctgttcttatcaatgattcgacca

SEQ ID NO: 11171 - DNA, 169 bp, Glycine max
  Clone ID: LIB3039-009-Q1-E1-E8
ggtgctgaggacgaggagaatgaagaggatgaggaagacgacgacgatgaagcattgcagcccccaaagaaaagaaagaagtgaatttagtttaatcaagcctcccgtttgtaatgttatgtacgaatttggcttccaacttgcatgtttttacctttttgggtactaa

SEQ ID NO: 11172 - DNA, 360 bp, Glycine max
  Clone ID: LIB3039-009-Q1-E1-E9
ggacgtgttggtgtgcagagaggcaagagagaagttgaatggaaacggtggtctctcgcgctgtcctcgttctctgcactccgcaccgagccagaactcaccctttcactaaacctaacaaactcctccgttcctccctcagccgcggcgccgcttccttatccgccaccagcaaatgggcggagcgcctcattgccgatttccaattcctcggcgacgccgccgcctccacttccacctccactctcagcccctcctccgtccctccccgcctcgatcctcctgagcgctacgtgtcgatccctctcgacctgtaccgcattctcggcgccgaaccgcacttcctcggcgacggcattc

SEQ ID NO: 11173 - DNA, 392 bp, Glycine max
  Clone ID: LIB3039-009-Q1-E1-F1
ggaagaacaagtcttgcattgggtggagcatacttagaaacagcaactatgtctctcatgcagcttactagctcccctgttggctcactggtccgtttcattgtaatatttgctttatggtacagaaccatggctttggccaagttgccaccaaacgcttcatcagttccagcagttttagcgtttggagattccatcgtggacccaggcaacaacaacaacataaaaacattgatcaagtgcaacttcccaccttatggaaaggattttcagggaggaaacccaacgggtcgattttgcaatggaaaaattccttctgacttaatagttgaacaattgggtattaaggagtatttgcctgcatatttggatccgaatctcaaatctagtga

SEQ ID NO: 11174 - DNA, 369 bp, Glycine max
  Clone ID: LIB3039-009-Q1-E1-F10
ggacgtgttggtgtgcagagaggcaagagagaagttgaatggaaacggtggtctctcgcgctgtcctcgttctctgcactccgcacccaaccacaactcaccctttcactaaacctaacaaactcctccgttcctccctcagccgcggcgccgcttccttatccgccaccagcaaatgggcggagcgcctcattgccgatttccaattcctcggcgacgccgccgcctccacttccacctccactctcagcccctcctccgtccctccccgcctcgatcctcctgagcgctacgtgtcgatccctctcgacctgtaccgcattctcggcgccgaaccgcacttcctcggcgacggcattcgcaaggcct

SEQ ID NO: 11175 - DNA, 355 bp, Glycine max
  Clone ID: LIB3039-009-Q1-E1-F11
ggtgcacaagtgagtttgttgatcgagataactagaaacagtgtgatgaaaatgaaagtccttgttttcttcgttgctacaattttggtagcatggcaatgccatgcgtacgatatgttccctctccgaatgaacactggctatggtgcccgtactccggacgtgaaatgcgcaagttggaggcttgctgtggaagcacacaacatctttggctttgagaccattcctgaagagtgcgttgaagcaacatacgaatacatccagggccaacaatatagatcagactcaaaacagtttacaacaagcttaactttatgccagagacctccaagtccatctccaagacacatttgtg

SEQ ID NO: 11176 - DNA, 351 bp, Glycine max
  Clone ID: LIB3039-009-Q1-E1-F12
ggtacacatgtgtgtgtggttatagagatctctagacagagtgtggtgaatgtgagtgtctgtgttctcctcggcgctacattttggggaacaggacagtgacatgcataagatatgttctctctccaagtgaacagtggatagggcgcgtatactcggggtgtgatatgcacattttaggcgtgtgctgtggacacacacaatatctgtggttttgacaatactcgagaagagtgtgttgacacaacaggagtatatatatatggagaactatatatatgacactccaacagagttacacaacactcatatttatatgacagagatctcgatctatatcacagagacata

SEQ ID NO: 11177 - DNA, 277 bp, Glycine max
  Clone ID: LIB3039-009-Q1-E1-F2
ggttttgtttcccataccatagaagaagcacaatgagaagcattagcactatgagcagcaacaactagtctcagctgaaatggcctcttcagtgatggcatctgtggccctcaaacctgcccctttcactgttgagaagtcctcagtgagaggccttccctctctctcaaggaactcttcttcattcagagttgtggccagtggcaagaagatcaagactgacaaaccttatggaattaatggtggcatggctttgagggatggaactgatgcatct

SEQ ID NO: 11178 - DNA, 361 bp, Glycine max
  Clone ID: LIB3039-009-Q1-E1-F3
gaaacaaatcctcacagaaaccaaactcaacccaacaaatacctacaaacacctccaacaccaaaaactcaacattgccaccgaagcatcttcaccggcaaaatataaactgaagctagttcacagagacaaagtccccacgtttaacacctcccacgaccaccgaacccgattcaatgcacgaatgcatcgagacaccaaaagggtcgccgccctccgccgccatctggccgccggaaaacccacctacgccgaagaggcattcgggtcggacgtggtttccggcatggagcaaggaaccggagaatacttcgtgagaatcggagttggaagccaactcgaaaccaatactttgtcatcg

SEQ ID NO: 11179 - DNA, 325 bp, Glycine max
  Clone ID: LIB3039-009-Q1-E1-F4
gagtgcacaagtgagtttgttgatcgagataactagaaacagtgtgatgaaaatgaaggtccttgttttcttcgttgctacaattttggtagcatggcaatgccatgcgtacgatatgttccctctccgaatgaacactggctatggtgcccgtactccggaggtgaaatgcgcaagttggaggcttgctgtggaagcacacaacatctttggctttgagaccattcctgaagagtgtgttggagcaacaaaggaatacatccatggcgaacaatatagattagactccaaaacagttaaccaacaagcttacttttatgccaga

SEQ ID NO: 11180 - DNA, 330 bp, Glycine max
  Clone ID: LIB3039-009-Q1-E1-F5
ggtacatagaaaacaagagcttccgtggcagtggtagttgccaaactagtagcaagaagtaagtcacgtttttctccgttttcattcatcacaatattaaagcttttagtttccttcagtatgggggacacttacgttttggccacaccgaagcgcaaccgttccgatgacgtggacggcggcgaggcgaagaagctgctgttgcagcagggcgaggcagacccggcggcggcgctggcgagcgcgcggcacgagttcggggagcacggcggggtgaacatgtcgatcgaggcgtcggcgatgttcacggtgatggagccggagacgatg

SEQ ID NO: 11181 - DNA, 338 bp, Glycine max
  Clone ID: LIB3039-009-Q1-E1-F6
gatgcacaagtttgttgacatagctagaagcaataatatgaaaatgaaagtgcttgttttgtttgttgctacacttttggcagcatatgaatgccatggctcatactaccacaagttccctctccgaatgataactgggtttggtaggcaatacaacactgaggtggcatgtgccagttggaggcttggcgtggcagcaaacaacgtagtcaaatggcaaactgttcctgcagcttgcggacagtacatagctgactacgtactacgagaccattatcaatcagattccagaacagttaaccaacaagcttatttctatgctaaatccctcaaactca

SEQ ID NO: 11182 - DNA, 302 bp, Glycine max
  Clone ID: LIB3039-009-Q1-E1-F7
ggcacaagtgagtttgttgatcgatataactagaaacagtgtgatgaaaatgaatgtccttgttttcgtcgttgctacaattttggtagcgtggcaatgccatgcgtacgatatgttccctctccgaatgaacactggctatggtgcccgtactccggatgtgaaatgcgcaagttggaggcttgctgtggaagcacacaacatctttggctttgagaccattcctgaagagtgcgttgaagcatcataggaatacatctatggagaacactatagatcagactccacaacagttaaccaac

SEQ ID NO: 11183 - DNA, 358 bp, Glycine max; identical to SEQ ID NO: 9027
  Clone ID: LIB3039-009-Q1-E1-F8

SEQ ID NO: 11184 - DNA, 382 bp, Glycine max
  Clone ID: LIB3039-009-Q1-E1-F9
gtaccgtgcgctagttctgagtattctgatcgctccctgagagagctcgtcgcggcggttgcagaagaagattgcaagatgaagttcagcatcgcgaatcccaccactggatgccagaagaagctcgagatcgacgacgatctgaaactgcgagcattttgggacaagaggatctcacaggaggtcatcggagatgcactcggtgaggaatttaagggctatgtcttcaaaattaccggaggttgtgacaaacaaggatttccaatgaagcaaggagtgctgactcctggtcgtgttagacttttgcttcacaggggaactccttgcttccgtggatatggaaggcgtaatggagagcgtaggagaaagtctgttcgtgggt

SEQ ID NO: 11185 - DNA, 384 bp, Glycine max
  unsure (1)..(384): unsure at all n locations
  Clone ID: LIB3039-009-Q1-E1-G1
ggcacaagtttgttgagatagctagaagcaataagatgaaaatgaaagtgcttgttttgtttgttgctacagttttggtagcatatgaatgccatggctcagactaccagaagttccctctccaaatgaaaactgggtttggtgggcaatacagcaatgaggtggcatgtgccagttggaggcttggcgtggaagcaaacaacgtagtcaagtggcaaactgttcctgcagcttgcggagagtacatagctgactacgttctaggagaccaatatagatcagattccaaaacagttaaccaacaagcttatttctatgctaaatccctcaaactcaccaacanagatgtctttgtcttggacgttgacgacactactctctcta

SEQ ID NO: 11186 - DNA, 315 bp, Glycine max
  Clone ID: LIB3039-009-Q1-E1-G10
gacaagtgagtttgttgatcgagataactagaaacagtgtgatgaaaatgaaggtccttgttttcttcgttgctacaattttggtagcatggcaatgccatgcgtacgatatgttccctctccgaatgaacactggctatggtgcccgtactccggaggtgaaatgcgcaagttggaggcttgctgtggaagcacacaacatctttggctttgagaccattcctgaagagtgcgttgaagcaacaaaggaatacatccatggcgaacaatatagattagactccaaaacagtttaccaacaagcttacttttatg

SEQ ID NO: 11187 - DNA, 308 bp, Glycine max
  unsure (1)..(308): unsure at all n locations
  Clone ID: LIB3039-009-Q1-E1-G11
ggtgcagacgtgagtttgttgatcgagataactagaaacagtgtgatgaaaatgaacgtccttgatttcttcgttgctacaattttggtagcatggcaatgctatgcgtacgatatgttccctctccgaatgaacactggctatggtgcacgtactccggaggtgaaatgcacaagttggaggcttgctgtggaagcacacagcatctttggctttgagaccattcctgaagagtgcgttgaagcaacacaggaatacatccatggcgaacaatatagattagactcaancacagttaaccaacaagc

SEQ ID NO: 11188 - DNA, 329 bp, Glycine max
  Clone ID: LIB3039-009-Q1-E1-G12
ggtgcacaagtgagtttgttgatcgagataactagaaacagggtgatgaaaatgaaggtccttgttttcttcgttgctacaattttggtagcatggcaatgccatgcgtacgatatgttccctctccgaatgaacactggctatggtgcccgtactccggaggtgaaatgcgcaacttggaggcttgctgtggaagcacacaacatctttggctttgagaccattcctgaagagtgcgttgaagcaacaaaggaatacatccatggcgaacaatatagatcagactccaaaacagttaaccaacaagcttacttttatgccagagacct

SEQ ID NO: 11189 - DNA, 424 bp, Glycine max
  Clone ID: LIB3039-009-Q1-E1-G2
agacacttcaaaatcctctagtaacccttcttttctctctctctctctcgtgttctgagctgctagaagcaatggagaggaaaagaagccatgcttctttcaccatgtttgcaatgcttgttggattgctctctcagagccttgtcattcctgtaatatccaccactgttgcagatcagaagaactactacaccccagatccacatgctggaagtccccccacaggtttctccgattctctggtgctcacacaatagtagtcctccatctcatggccatgggagctctccaccctcacatcacaatagtccaagtactccatcaacaccctcaggtggaaactgtggattaacacccccacaacatcatgatccaacaccctcaactccatcaacaccatcaaaccctccctcaagtggatact

SEQ ID NO: 11190 - DNA, 394 bp, Glycine max
  Clone ID: LIB3039-009-Q1-E1-G3
ggaaggaagagagattcaggagggagccagagtgagggatacagagaaagaagaaggataaagatttaaaattggaagaggaacaataggaagggaagggagaaaaccctaattaatagataatagaaagagattgcatgatcgatggaaaaaccctagaagaatcatcggagcaggcaggcaagggggcacaatcgacgacgccgtagatgcttgttgcggttggagcgtcgtgggatctgaattggttcctgcaactgttgctctccgtcatcgtcgtggccgttggggttcactatttcgtcaaggccaccgcttccaagtacttcttagtcgacgccaatttcaaaggggaacaccacgccctcgccgccgccgaaccaatgcccggcgc

SEQ ID NO: 11191 - DNA, 212 bp, Glycine max
  Clone ID: LIB3039-009-Q1-E1-G4
agagaggtttgcgacagtgaatgcctcactctgctgccgtccctaatctgaacgctcccgccatctgcgataggatttcatggctccaaagatcgacaatgatctcctaccctcatgtaatcctgacaagtctggtcgtgcgaatcagaacaagaagaagtggagcaagggtaagcaaaacgaaaaggtgaataacatactgctcctccatc

SEQ ID NO: 11192 - DNA, 343 bp, Glycine max
  Clone ID: LIB3039-009-Q1-E1-G6
gacactaagcgtgaactaatatcgaaattcaattataccctgaccctgtgttagtttcgtgtgttgagaagcagagagaggcagagatgcaatgaagcgcagctgacggtgaagccttggatttcgagcctgaggacgatgacttgatggacgaggacggcgcccccgacgccgacgcttctccgcctcaacctaagctcaaatccgccatcaccgccgccgccgcgcccaaaaagaccaatggtcgcggattccggcaggacaccgacgccaaccgtgacactcgcctctccggctccgacttcgactctctcaccaaccgaggcggccctaggcctcaaag

SEQ ID NO: 11193 - DNA, 287 bp, Glycine max
  Clone ID: LIB3039-009-Q1-E1-G7
cggggctgccgctctctgataaattcagatattgtgggatatagaataccggtatagaaaatgacgaccaggttcaagaagaacaggaagaagagaggtcacgtcagcgccggacacggccgtatcggcaagcacctcatgcatcacggaggtcgcggtaacgccggtggcatgcatcatcaccgtatcctcatcgacaagtaccatcctggtttcttcgggaaggtaagcatgcgctacttccacagacttcgcaacaaattctacaatccgattatcaacatcga

SEQ ID NO: 11194 - DNA, 339 bp, Glycine max
  Clone ID: LIB3039-009-Q1-E1-G8
gtcgtcatagcatttctaagccatatccaccattccacctagctcgccaatcacatcttcactacaccataaaccttcttaatttcgcgcttcattttctcctctactgtcataatcatggggaccttccctcgcttcgacccaatcaccacccaagaccggtccaactagaccgtgggctccgaccttgacggcaccctcctcgtctcccggagcgccttcccctactacctcctcgttgccctcgaagccggcagcgtcctctgcgccctcctcctcctaacctccgccccctttgtctacgttacctacctcgtcctctccgaaaccctcgccatc

SEQ ID NO: 11195 - DNA, 315 bp, Glycine max
  Clone ID: LIB3039-009-Q1-E1-G9
ggcacaagtgagtttgttgatcgagataactagaaacagtgtgatgaaaatgaaggtccttgttttcttcgttgctacaattttggtagcatggcaatgccatgcgtacgatatgttccctctccgaatgaacactggctatggtgcccgtactccggaggtgaaatgcgcaagttggaggcttgctgtggaagcacacaacatctttggctttgagaccattcctgaagagtgcgttgaagcaacaaaggaatacattcaatgggcgaacaatatagatcagactcccaaaacagtttaacaacaggcttactt

SEQ ID NO: 11196 - DNA, 386 bp, Glycine max
  unsure (1)..(386): unsure at all n locations
  Clone ID: LIB3039-009-Q1-E1-H1
gaaggtgcaagagtttgttgtgagctataagctagtttatcgtgaggagaatatgaagttgtttgttttctttgttgctgcagtagttttggtagcatggccatgccatggcgcaggctaccaaaggttccctctccgaatgaaaactggctatggtgagcgttcttcggaggtaaaatgcgcaagttttaggcttgctgtggaagcacacaacatccgagcctttaaaaccattcctgaagagtgcgttgaaccaacanaggactacattaatggcgaacaatttagatcagactctaaaacagttaaccaacaagctttcttttatgctagtgaacgcgaagtccatcacaacgacatatttatattcggcatagataacaccg

SEQ ID NO: 11197 - DNA, 376 bp, Glycine max
  Clone ID: LIB3039-009-Q1-E1-H10
gacaacaattccacaacgcgatctctctctattctttgaaaccaaagttcaaactctgtcttccctgggttctatttcgaaatcaacgaggatgagtttcacagaggcagcagccacagagaagaaaggtggaagagggaaaccgaagacttcaaagtccgtttcccgttcctccaaagctggccttcagtttcccgtcggccgtgtcgctcgctacctcaaggccggtcgctacgcccagcgcgttggctccggttcccttgtttatctctccgcggttctcgaatacctcgctgccgaggttttggagcttgcggggaacgctgcgagggacaacaagaagacgaggatcgttccgaggcacattcaactggcg

SEQ ID NO: 11198 - DNA, 384 bp, Glycine max
  Clone ID: LIB3039-009-Q1-E1-H11
ggcacaagtgagtttgttgatcgagataactagaaacagtgtgatgaaaatgaaggtccttgttttcttcgttgctacaattttggtagcatggcaatgccatgcgtacgatatgttccctctccgaatgaacactggctatggtgcccgtactccggaggtgaaatgcgcaagttggaggcttgctgtggaagcacacaacatctttggctttgagaccattccttgaagagtgcgttgaagcaacaaaggaatacatccatggcgaacaatatagatcagactccaaaacagttaaccaacaagcttacttttatgccagagacctcgaagtccatcccaaggacacatttgtgttcagtatagatggcaccgtactctcta

SEQ ID NO: 11199 - DNA, 381 bp, Glycine max
  Clone ID: LIB3039-009-Q1-E1-H12
gatagaagaagcagaaagagaagcattagcaaaagcaagaagaactagtctaagcagaaatggcctcttcagtgatggcatctgtggccctcaaacctgcccctttcactgttgagaagtcctcagttagaggccttccctccctctcaaggaactcctcttcattcagagttgtggccagtggtggcaagaagatcaagactgacaagccttatggaattaatggtggcatggctttgagggaaggagttgatgcatctggcaggaaaggaaagggaaaaggcgtttaccagtttgtagacaaatacggtgctaatgtcgatggttacagtcctatctacgacaccaaggactggtctccaaccggtgatgtctacgctg

SEQ ID NO: 11200 - DNA, 345 bp, Glycine max
  Clone ID: LIB3039-009-Q1-E1-H2
gaccaaatcacgctctctaataacatttctaatctcattctccttctgttcaaatactctctctcatggcatcagataagaagattaggatcggcatcaacgggtttggaaggattggccgtttggtggccaaggttgcccttcaaaggagtgatgttgaacttgttgctgtcaacgatcctttcatcaccactgattacatgacatacatgttcaagtacgacaccgttcatggccagtggaagcattttgatgtgaaggtgaaagactctaagacccttctctttggtgagaagcccgtcaccgtttttggaatcagggaacctgaggaaattccatgggggt

SEQ ID NO: 11201 - DNA, 312 bp, Glycine max
  Clone ID: LIB3039-009-Q1-E1-H3
gcgtccacggctacgacaaaacgggaaaattcagctacgcattttccttgttgctgttctaaaacaatcatccacatattcaccgtcgccactataacagtagctccaatcaatcgtgctatgggttgagttgtaccagcacttaacaatgttcaggacacggtaaccacccctttgttcaataagcgtccgaatcagttctggatctgaagcccgctgccgccttagcgggacctgacacgcttcgtgaagtggccgattaacgtccaaatccaacgcatgaagcgcatcctcaatcaaaggctcaaggtc

SEQ ID NO: 11202 - DNA, 148 bp, Glycine max
  Clone ID: LIB3039-009-Q1-E1-H4
ggctgcagcttatcatcagcatctcgcccaagagagagagagagagatgcgcgaaaatgaccgtagcgactgcgatgatgcagggatcgagctttgtgatcgattgcgctaagccggtggacgacaccgttatggacattgcttctct

SEQ ID NO: 11203 - DNA, 382 bp, Glycine max
  Clone ID: LIB3039-009-Q1-E1-H5
cgacagaaggggaaaattcacacacacatattctttgttgcaatatcacaaacacctcgtccgtcacaatgcagctagctgtggcggccaacgctgtcgtttcaccgtcgccgttccgacctcatccccttctccggtcatccttctccggcgtctccgttaagctcactccccaatccataacgttttcacgcttgaagcccctcaccgtcttcgccgccaccaagaaggccgtcgctgtcctcaaggggacctccgccgtcgaaggcgtcgccactctcatccaagaagacgatggcccgacgacagtttctgttagcatcactggccttactccggggcttcatggttttcacctacatgagtatggtgataccacaaa

SEQ ID NO: 11204 - DNA, 382 bp, Glycine max
  Clone ID: LIB3039-009-Q1-E1-H6
gacgttcacattcaggaatcgttttcttcagaaatttgccatcgttgagagaagcgtgagagccttagtcgttcaagatgagagctaagtggaagaagaagcgcatgaggaggttgaagaggaagcgccgaatgatgagacagagatctaagtaggtgcttgagcaggagttgagatgagctttcaatcggctacaagcctaatgacattttaggctgttatggctcttatgatcttgaggtctaatcgctaggggagcttcaatcttgacttaatttgctttactggtcctggtcctggtccaagactattgactgtgggttaagttgtgatgtttaatgttttgtggtatctaattaggtactggtttttaaactttttg

SEQ ID NO: 11205 - DNA, 327 bp, Glycine max
  Clone ID: LIB3039-009-Q1-E1-H7
ggcacgagtgagtttgttgatcgagataactagaaacagtgtgatgaaaatgaaggtccttgttttcttcgttgctacaattttggtagcatggcaatgccatgcgtacgatatgttccctctccgaatgaacactggctatggtgcccgtactccggaggtgaaatgcgcaagttggaggcttgctgtggaagcacgcaacatctttggctttgagaccattcctgaagagtgcgttgaagcaacaaaggaatacatccatggcgaacaatatagatcagactccaaaacagttaaccaacaagcttacttttatgccagagaact

SEQ ID NO: 11206 - DNA, 303 bp, Glycine max
  Clone ID: LIB3039-009-Q1-E1-H8
ggcacaagtgagtttgttgatcgagataactagaaacagtgtgatgaaaatgaatgtccttgttttcttcgatgctacaagtttggtaccatggcattgacatgcgtacgatatgttccgtctccgaatgaacactggctatggtgcccatactccggaggtgaaatgcgcaagttggaggcttgctgtggaagcacacaacatctttggctttgagaccattcctgaacagttcgttgaagcaacaaaggaatacatccatggcgaacaatataaattagactccaaaacagtttatcaaca

SEQ ID NO: 11207 - DNA, 365 bp, Glycine max
  unsure (1)..(365): unsure at all n locations
  Clone ID: LIB3039-009-Q1-E1-H9
gctgcgcaggtagagagagcgagagaacaagaacataagggaaccacagcggcggtaacagaagaacaagcagagaatgggtcgagtgagaacgaagacggtgaagaaatcctctcggcaggtgatagagcgtcactactcgcgcatgaccctggacttccacacgaacaagaagcttctggaggaagtggcgataatcccgtcgaagaggctaaggaacaagatcgcggggttctcgacgcacctgatgaagcgcatccagaagggccctgtgcgcggcatctcnctcaagctccaggaggaggagcgcgagcgccgcatggacttcgtccccgacgtctccgccatcaacaccgaccacatcg

SEQ ID NO: 11208 - DNA, 388 bp, Glycine max
  Clone ID: LIB3039-010-Q1-E1-A1
ggttgtgaatcaacatagatattccgttttgcgtttctctgcctaaaaggattgaaacatgggtcaagcactaggttgctatcaagttgatcagtcaaatgtggctatcaaggagcattttgggaaatttgatgatgtcctacaacctgcatgtcaatgcctgccttggtgtcttgggtaccagattgctggtagtttgtcactgcgtgtgcggcaacttgatgttcgatgtgagacgacacccaaggacaatgtctttgtcactgtggttgcatctgtgcaatacccagctgtgtctgagaaagcatctgatgcattctataggcttaccaacacaagggagcagatccaatcatatgtttttgatgtcatcagggccactgtacca

SEQ ID NO: 11209 - DNA, 357 bp, Glycine max
  Clone ID: LIB3039-010-Q1-E1-A10
ggtgaaggatcctcaaaaggcatatctgagaacaatcacacccaagttcgagacgcttattgacatttcagtgatagagatattgtcaaggcatgcttctgatgaggtctaccttggccaaagggataatccaaattggactacggattcaaaggcattggaagctttcacaaagtttggaaacacactggcagaaattgagggaaaaatcacacagaggaacaatgatccaagtctgaaaagccgacatgggccagttcagcttccatacacattgctccatcgttcaagtgaggaagggatgagtttcataggaattcccaacagtatctccatctaaaatgtgtgtgtggtttg

SEQ ID NO: 11210 - DNA, 355 bp, Glycine max
  Clone ID: LIB3039-010-Q1-E1-A11
gacacaagattgagacacgagacagacaatgccaggactcacagcaccttccgattactcccaagaacccccccgccactcttctcttctcagcaacgccaaggaacctttcaatgcggagccaccgcgtgctgcgttggttgcttcctacgtcacgccttccgatttcttctataagaggaaccacggtccaatccccatcgttgagaacatcaacagatattccgtgaacgtgtccggcttggtggagcgtcccaaacagctcttcatgaaagatatatggatgcttccaaagtataatgtcactgccacgttgcagtgtgcaggttatcgaaggactgctatgagcaagacc

SEQ ID NO: 11211 - DNA, 310 bp, Glycine max
  Clone ID: LIB3039-010-Q1-E1-A12
ggttgtgtgagtgacacaacacagggagtaccggcattacaaatgcagatcatcgagaaaactctgacacggaagactactatcttcgaagtcgagagcagggacactatcgagaatgtcaacggcaagattcaatacaatgaatgcaatcctccggatcagcagcgtttgaatttcaccagaaagcatcttgaccatagcaggaccctgatcgattacaacatccagaacgaatcaagccttcatctcgtcctcaagcatcgtggcagcatcaatgaaccttccctcatagctttggctcgcaaataca

SEQ ID NO: 11212 - DNA, 406 bp, Glycine max
  Clone ID: LIB3039-010-Q1-E1-A2
aggtggaatttcagaacaaccaaataggagagcccaaggtgacatttgaggggaatattgaggaatacaacgaaaatgatgctgtattgttctttgatggtgagacacttcgattggagcggcttcatatggctgttaagcaactgcggcatctacgaatgcctggtgaatctgcaggtgctgcatctacagttgtggctgctccatctggaccagctttagatccgcgatcatcccctgttgggaagtctgtaaaaccagcacctcttggcaggagctcatttccggctgtgccagttgaagtggtacgcattgatattggtgaacccgagaatactggaatcaaatctggttctaagaggtcatttgatcatctaaatgaactgcccattaatacctcaccaga

SEQ ID NO: 11213 - DNA, 394 bp, Glycine max
  Clone ID: LIB3039-010-Q1-E1-A3
gacgcacccacaccattctacactcccctctctcactcactcacactctcttctgtcatagctgtaccacgtttttcttctccatctgagcctctgtcccaacaccattctcatggctgctctagctctagcactgcttcttctggctttcactggcgcttcaagtgctacatggtgcgtttgcaaggatggaatcgacgcgatcctgcagaaaaccttggactatgcttgtggagctggtgctgactgtaatcctctccaccaaaacgggccttgtttccagcccaacaccgttagggcccactgtaactacgccgtgaacagctacttccaaaggaatggtcaagctcaagggtcctgcgactttgcgggaacagccattgttactgcatct

SEQ ID NO: 11214 - DNA, 379 bp, Glycine max
  Clone ID: LIB3039-010-Q1-E1-A4
ggtgcacaagtgagtttgttgatcgagataactagaaacagtgtgatgaaaatgaaggtccttgttttcttcgttgctacaattttggtagcatggcaatgccatgcgtacgatatgttccctctccgaatgaacactggctatggtgcccgtactccggaggtgaaatgcgcaagttggaggcttgctgtggaagcacacaacatctttggctttgagaccattcctgaagagtgcgttgaagcaacaaaggaatacatccatggcgaacaatatagatcagactccaaaacagttaaccaacaagcttacttttatgccagagacctcgaagtccatcccaaggacacatttgtgttcagtatagatggcaccgtac

SEQ ID NO: 11215 - DNA, 392 bp, Glycine max
  unsure (1)..(392): unsure at all n locations
  Clone ID: LIB3039-010-Q1-E1-A5
gagcttaatttgtgccacaactcataaaggaaagctttgagatttgttggacattttagagtggtgagaggatggtgggtgttatttcgttggtaacaggaatggctggtccaagtgggtttggatcagcttcaactgcagaacaggttaatgaaggagttgatgccagcaacctcactgcaattatcacaggaggagcaagtggtataggattggagacagcacgagtgttggctcttcgaaaggtccatgtcatcattgcagtacgaaacatggtgtctgcaaaagaggctaaacaacanatactagaggagaatgagtctgcacgagtggacataatgaagctcgacctttgctcagtgaattctattagatcatttgtggacaacttc

SEQ ID NO: 11216 - DNA, 379 bp, Glycine max; identical to SEQ ID NO: 8837
  Clone ID: LIB3039-010-Q1-E1-A6

SEQ ID NO: 11217 - DNA, 350 bp, Glycine max
  Clone ID: LIB3039-010-Q1-E1-A7
ggcacaagtgattttgttgatcaaaataactagaaccagtgtgatgaaaatgaaggtccttgttttcttcgttgctacaattttggtagcatggaaatgccatgcgtacaaaatgttccctctccgaatgaacactggctatggtgcccgtactccggaggtgaaatgcgcaatttggaggcttgctgtggaagcacacaaaatctttggctttgagaccattcctgaaaattgcgttgaagcagcaaaggaatacatccatggcgaacattatagatcagactccaaagcagttaaccaacaagcttacttttatgccagagacctcgaagtccatcccaaggacacat

SEQ ID NO: 11218 - DNA, 339 bp, Glycine max
  Clone ID: LIB3039-010-Q1-E1-A8
ggtataggcagctaaaaacaaagagtgtgatagtaagagtagtagaatagcggtctggtccaagtgctgcattatgcacacagagaaatggaacggttgtcatcttcgtccgcgatcgcgcagaagacatgggaactcgagaacaacatcaccccggtggacattccgggctgcgccgccatctcctccacaatcatcacgataagcaccgaccacgcgatcttctactacgacgaggcgggccagaaccagttccagcacgacaagtcctgcgccaacgaagttcactacttcaagcacgtgaagatctccgcactcgcgctcctcacgatggtcgtc

SEQ ID NO: 11219 - DNA, 382 bp, Glycine max; identical to SEQ ID NO: 7731
  Clone ID: LIB3039-010-Q1-E1-A9

SEQ ID NO: 11220 - DNA, 393 bp, Glycine max
  Clone ID: LIB3039-010-Q1-E1-B1
ggcacaagtgagtttgttgatcgagataactagaaacagtgtgatgaaaatgaaggtccttgttttcttcgttgctacaattttggtagcatggcaatgccatgcgtacgatatgttccctctccgaatgaacactggctatggtgcccgtactccggaggtgaaatgcgcaagttggaggcttgctgtggaagcacacaacatctttggctttgagaccattcctgaagagtgcgttgaagcaacaaaggaatacatccatggcgaacaatatagatcagactccaaaacagttaaccaacaagcttacttttatgccagagacctcgaagtccatcccaatgacacatttgtgttcagtatagatggcaccgtactctctaatattccata

SEQ ID NO: 11221 - DNA, 355 bp, Glycine max; identical to SEQ ID NO: 9080
  Clone ID: LIB3039-010-Q1-E1-B10

SEQ ID NO: 11222 - DNA, 370 bp, Glycine max
  Clone ID: LIB3039-010-Q1-E1-B11
gccgccgagcttattagaagataaaaggaggagcaggaagcatcaccgttaccaaacatggtgaaagggcgccaacgagagcgtgttagactttacgtcaggggttcaatacatggatacaagaggtccaagtcaaatcaatacccaaacacctcattaatccagattgagaatgtaaacactaaggaagaagttgcgtggtactgtgggaagcgtatggcttacatttacaaagccaatgtaaagaaggacggaagccactatcgctgcatttggggtatggtcaccaggcctcatggtaacagtggtatagttcgtgctaagttcaagtccaatctgccgcccagatcaatgggagcacaggttagag

SEQ ID NO: 11223 - DNA, 207 bp, Glycine max
  Clone ID: LIB3039-010-Q1-E1-B12
ggaacctgcttcctaactaactgagcgaacagcaggaagcatcgacgtaacagccactgctgaccggtttcaatgaaaccgtgtaagactttatttcagtcattcagcacgtggataccaagaggccaagtccaatcattcaggtgacaggtcaatcgtcgacattaagaatgtctgtatgcacggctctatcgcatgccactgtgc

SEQ ID NO: 11224 - DNA, 208 bp, Glycine max
  Clone ID: LIB3039-010-Q1-E1-B2
cagggaagagaacacgatacagtttagtccggtaagcagaaatgagttccctctctaccacgaccgctaccaccatgaattccatgcctcagtcgagtgccactaactacaagatcaagttcagacaaaagataagcattttagaccttgagtctcattcaccatgtagcacgttaactgacacgatcacctcatcgacgattcgtgc

SEQ ID NO: 11225 - DNA, 392 bp, Glycine max
  Clone ID: LIB3039-010-Q1-E1-B3
ggttggcagcgaaaggaagagacaagaggcttcacatcgagactcagcttcacctgtaatcagacaattgcggtcaacgtcgaagtcatatcattacgatgcaagtaaatgaagaacacaacaaaccttgctcagacccatttttacagtggagtcagtggcagttgcttgattctcttttacctacgggtggatttgctcattcttttggccttgaagcagcagttcagtgccacttagtgtctgattccaatgaccttaagacatttgttatccatatattggagaatacaggaagcttactccttccttttgtgtactcagcttccatgttgcccaatttagaaacttggcataagcttgacaaaatattggatgctaccctaactaat

SEQ ID NO: 11226 - DNA, 348 bp, Glycine max
  Clone ID: LIB3039-010-Q1-E1-B4
agggaacagcgaagcagagagtgatttcagtgagtgatcggtgttcacttgatctcatcagaatcgtcagcgtcaattgaacaagatgccgatcagagatatcgtcgtcggaaggcctgaagaggcgactcatcccgacacgttgaatgcggctttggctgatttcatcgtcaaccttcagcttcgtgttcgccggctcaagctccggcatcgcctacattaagctcaccgatcacggcgctgtcatccctgccgggctcatctctgcctcaatcgcccatgcattcgccctcttcgtcgccgtctccgtcggtgccaacatcttcggcggccacgtcatacccgccg

SEQ ID NO: 11227 - DNA, 390 bp, Glycine max
  Clone ID: LIB3039-010-Q1-E1-B5
ggcacaagtgagtttgttgatcgagataactagaaacagtgtgatgaaaatgaaggtccttgttttcttcgttgctacaattttggtagcatggcaatgccatgcgtacgatatgttccctctccgaatgaacactggctatggtgcccgtactccggaggtgaaatgcgcaagttggaggcttgctgtggaagcacacaacatctttggctttgagaccattcctgaagagtgcgttgaagcaacaaaggaatacatccatggcgaacaatatagatcagactccaatacagttaaccaacaagcttacttttatgccagagacctcgaagtccatcccaaggacacatttgtgttcagtatagatggcaccgtactctctaatattca

SEQ ID NO: 11228 - DNA, 364 bp, Glycine max; identical to SEQ ID NO: 9559
  Clone ID: LIB3039-010-Q1-E1-B6

SEQ ID NO: 11229 - DNA, 336 bp, Glycine max
  unsure (1)..(336): unsure at all n locations
  Clone ID: LIB3039-010-Q1-E1-B7
ggcacaagtttgttgagatagctagaagcaataagatgaaaatgaaagtgcttgttttgtttgttgctacagttttggtagcatatgaatgccatggctcagactaccagaagttccctctccaaatgaaaactgggtttggtgggcaatacagcactgaggtggcatgtgccagttggaggcttggcgtggaagcaaacaacgtactcaagtggcaaactgttcctgcagcttgcggagagtacatagctgactacgttctatgagaccaatatagatcagattccaaaacagttaaccaacaagcttatttctatgctaaatcactcanactca

SEQ ID NO: 11230 - DNA, 388 bp, Glycine max
  Clone ID: LIB3039-010-Q1-E1-B8
ggcacaagtgagtttgttgatcgagataactagaaacagtgtgatgaaaatgaaggtccttgttttcttcgttgctacaattttggtagcatggcaatgccatgcgtacgatatgttccctctccgaatgaacactggctatggtgcccgtactccggaggtgaaatgcgcaagttggaggcttgctgtggaagcacacaacatctttggctttgagaccattcctgaagagtgcgttgaagcaacaaaggaatacatccatggcgaacaatatagatcagactccaatacagttaaccaacaagcttacttttatgccagagacctcgaagtccatcccaaggacacatttgtgttcagtatagatggcaccgtactctctaatatt

SEQ ID NO: 11231 - DNA, 381 bp, Glycine max
  Clone ID: LIB3039-010-Q1-E1-B9
gagacaacgtttgttcgattcttaacacaacttcagctactcactctcttcttccaggtccagccatgctcttcgctacagtcatgggcacagtcaagatcggaatcaacggatttggaacacttggccgtatggttgccaaagtcgctcttcatcgagacgatgtgtacctcgtttccgtgaatgatgctttcattaacaccgactatatgacatacatgtttcaatacgacatgtgttcacggacactggaagcatcacgatgtcaacgtttatgactagaagacccttctcttcagtgacaagccagtcactgattctggacacatgaaccttgatcagatcgcatgatggtcaaccagagctgatagcattgttgac

SEQ ID NO: 11232 - DNA, 341 bp, Glycine max
  Clone ID: LIB3039-010-Q1-E1-C1
gagtttcatttttctcacgttctttctttctatcttttttttttttcaatgctcttactctataacctctgcttcgtttgttcattgtggtagaaactagaagtggatggtggtggctacaacttaacaacaacctctttgagcagttcaatggagcaagtgatgagacccaaatcaccattgccgggcttagttgattttcatgggaagcggaagcaaatggttaagattcacgttttggagagagagattggtttgcttcaggaggaattaaaatcacttgaaggccttaaccctgcttctacatgctgcaaagagcttgatgcctttgtagactctgt

SEQ ID NO: 11233 - DNA, 303 bp, Glycine max
  Clone ID: LIB3039-010-Q1-E1-C10
gaaggtgcacaagtttgttgtgagctatccactaatttatcgtgaggagaacatgaagttgtatgcattctttgttgctgcagcacatttggtagcatggccatgccatggcgcaagctaacacaggttccttctccgaatgaaaactggctatggtgatcgttcttcggaggtaaaatgcgcaagttttaggcatgctgtggcagcacacatcatccgagcctttaaaaccattcctgaagagtgcgttgaaccaagacatgactacattaatggcgaacaatttagatcagactccaaaac

SEQ ID NO: 11234 - DNA, 383 bp, Glycine max
  Clone ID: LIB3039-010-Q1-E1-C11
ggcacaagtgagtttgttgatcgggataactagaaacagtgtgatgaaaatgaaggtccttgttttcttcgttgctacaattttggtagcatggcaatgccatgcgtacgatatgttccctctccgaatgaacactggctatggtgcccgtactccggaggtgaaatgcgcaagttggaggcttgctgtggaagtacacaacatctttggctttgagaccattcctgaagagtgcgttgaagcaacagaggaatacatccatggcgaacaatatagatcagactccaaaacagttaaccaacaagcttacttttatgccagagacctcgaagtccatcccaaggacacatttgtgttcagtatagatggcaccgtactctcta

SEQ ID NO: 11235 - DNA, 374 bp, Glycine max
  Clone ID: LIB3039-010-Q1-E1-C12
ggcacaagtgagtttgttgatcgagataactagaaacagtgtgatgaaaatgaatgtccttgttttcttcgttgctacaattttggtagcatggcaatgccatgcgtacgatatgttccctctccgaatgaacactggctatggtgcccgtactccggatgtgaaatgcgcaagttggacgcttgctgtggaagcacacaacatctttggctttgagaccattcctgaagagtgcgttgaagcaacaaaggaatacatccatggcgaacaatatatatcagactccaaaacagttaaccaacaagcttacttttatgccagagacctcgaagtccatcccaaggacacatttgtgttcagtatagatggcaccg

SEQ ID NO: 11236 - DNA, 365 bp, Glycine max
  Clone ID: LIB3039-010-Q1-E1-C2
gacatgcgtacaacctcatcattcaattgactcagcactcctttcacacgtagaattgttgattcgtagatcatctgcgcgcagtcccatccgatgcatgcaggagaccacaacccaaatacaacagcaaatttaattacatagtcgtttttagaaaaaaacaaatcaaaagtggtgagcgatatggaatttgacgagcacgaggaccaagatgaagaggaggaagatgaaatgggattctcagtggcggctgcaagttacgactcgctgggaaacgcggcggtgaggtctaacatgagcggcggcgaaggagttgccgtcaccgggaattctggtcggtaagggacgctgagatacagagaatg

SEQ ID NO: 11237 - DNA, 365 bp, Glycine max
  Clone ID: LIB3039-010-Q1-E1-C3
ggcacaagtgagtttgttgatcgagataactagaaacagtgtgatgaaaatgaaggtccttgttttcttcgttgctacaattttggtagcatggcaatgccatgcgtacgatatgttccctctccgaatgaacactggctacggtgcccgtactccggaggtgaaatgcgcaagttggaggcttgctgtggaagcacacaacatctttggctttgagaccattcctgaagagtgcgttgaagcaacaaaggaatacatccatggcgaacaatatagattagactccaaaacagttaaccaacaagcttacttttatgccagagacctcgaagtccatcccaaggacacatttgtgttcagtatag

SEQ ID NO: 11238 - DNA, 380 bp, Glycine max
  Clone ID: LIB3039-010-Q1-E1-C4
ggcacaagtgagtttgttgatcgagataactagaaacagtgtgatgaaaatgaaggtccttgttttcttcgttgctacaattttggtagcatggcaatgccatgcgtacgatatgttccctctccgaatgaacactggctatggtgcccgtactccggaggtgaaatgcgcaagttggaggcttgctgtggaagcacacaacatctttggctttgagaccattcctgaaaagtgcgttgaagcaacaaaggaattcatccatggcgaacaatatagattagactccaaaacagttaaccaacaagcttacttttatgccagagacctcgaagtccatcccaaggacacatttgtgttcagtatagatggcaccgtactct

SEQ ID NO: 11239 - DNA, 385 bp, Glycine max
  Clone ID: LIB3039-010-Q1-E1-C5
ggagcttttctttctttctctgctctcttttcttttaagtttccactctcacacactctcgctcttctctttctctgcaataatctctcttctcttcttcactctctcaactcctgccaaacccccatttccgcagttcttaaatttggagtctgatgtcaccgccattgctggttatcgaagatgaagggcagtgccatgcctcgatggtagtatctgcatcttcatgatccctgaactgtttctccctaaatgaggctggatttaaagaatgcaattacctgggattgtcagattgctcttcggtggacagttctactgtcacgaatttgtctgatgagaaaaaggagaatctgaatttgatggctaatgagttgaggcttgg

SEQ ID NO: 11240 - DNA, 387 bp, Glycine max
  Clone ID: LIB3039-010-Q1-E1-C6
gattgttgttgctattatcatccgcagctgcttttagtcgcaccgcaaacagtgagccatggccgtcggaaagaacaagcgcatctccaaggggaagaagggtggcaagaagaaggcagctgatccctttgccaagaaggattggtatgacattaaggctccttctgtttttcaagtgaaaaatgttggcaaaaccctcgtctctcgtactcagggtaccaagattgcttctgaaggactcaagcatagagtgtttgaggtctccttggctgatcttcaaggggatgaggatcatgcattcaagaagattaggttgagagctgaagatgtgcaagggaagaatgttctgacaaatttctggggaatggatttcacaacagacaagct

SEQ ID NO: 11241 - DNA, 364 bp, Glycine max
  Clone ID: LIB3039-010-Q1-E1-C7
ggctcccattatatctgacgaatcaccgccaaaaggtgtgtagtttaagtgtgaatccctttccctctctactcttctttcactttccatttccatttccattttttctggttcactttctcgatggcctccgagaaccccaccgccgacgacgccgtcaacggcttcaatcggccggaaatgttctcggaaaacctcgccggcaccgtcgacgcctacgaccgccacgtgttcctctgctacaagagtcacctgtcctggcccccgcgcatcgaggcctccgacgccgatcccttccccaagcgcgtcgccgccaccttcaaagcccgcaagaacgacttgcccctcaagacgaaaatcaccg

SEQ ID NO: 11242 - DNA, 366 bp, Glycine max
  Clone ID: LIB3039-010-Q1-E1-C8
ggccgaaaccaaaacccaaacccacagcacaatatgctatgctatgctctctaatccgtatccgccgtcaggctccgttccaccacactctccgctctctcatgccgattaaccgtttctcctcatcctcctcctcctccgcctccgccgccgccgccgccgccatggttgctcacgcgaaggacgaggcgtaccttagcgcggcgattccgaagcgcgtccgtctcttcgagaccatccaagccgagcaacgcacgcaacccctctcgctttcgccggattctatcaaggtcactctccccgaaggtaacgtcaacgacgccaaaaagtggctctcgacaccgctcgaccttgcgcgcgaaatct

SEQ ID NO: 11243 - DNA, 363 bp, Glycine max
  unsure (1)..(363): unsure at all n locations
  Clone ID: LIB3039-010-Q1-E1-C9
ggactaaacccaggctgtaaaccctttttccatctagagttgttgcggctctcttctctgcacactcagaatgcagtccacactcttcagccccacccattcccttatccccacttcaccacactctatcagatccaattctggtcatgcttctctctccgttcgcgcctccatcgccgtggaaacccccacggagacggtgaagctgaacaagtacagctcccgcatcaccgagcccaaatcgcagggcgcctcncaggccgtgctctacagcgtcggtctctccgaggacgacatggccaagccccaggtcggcgtctcctcggtctggtacgaagggaacacctgcaacatgcacctcct

SEQ ID NO: 11244 - DNA, 389 bp, Glycine max
  Clone ID: LIB3039-010-Q1-E1-D1
ggacaaatgatggtaattagaggaagcacagtgtgtgactgtgccccaatttcttgtgcttaaagtgagcatgcatttacaactcacaagacacgatgccttcggctcaggatccattctatgttgtcaagcacgatattcaagagtctattgataagctagaatccacttttcaccaatgggaaaactactgctgatgttggcgatcgatccagtctatcaaaggaagttcttgctagttgtgaaagcagtgcatggcaagtggatgaattggacacagcaatttctgtggctgcaacagatccttcatggcatcgcattgatgaggtggaggttgaaaaccggatgaagtggaccagtgatgctcgcatccaggtgagcaaagcaaa

SEQ ID NO: 11245 - DNA, 378 bp, Glycine max; identical to SEQ ID NO: 10181
  Clone ID: LIB3039-010-Q1-E1-D10

SEQ ID NO: 11246 - DNA, 380 bp, Glycine max
  Clone ID: LIB3039-010-Q1-E1-D11
ggcacacgtttgttgagatagctagaagcaataacatgaatatgaaagtgcttgttttgtttgttgctacagttttggtaacatatgaatgccatggctcagaccaccacaagttccctctccaaatgaaaactgggtttggtgggcaatacagcaattaagtcgcatgtgccagttggatgcttggcgtggaagcagcatcgtagtcacgtcgcaaactgttcctgcagcttgcggagagtacatagctgactacgttccaagagaccaattatacattagattccaaaacagtttaacaacatgcttacttcgatgccaaaaccctcaaactcaccaacaaagatgtctttgtcttggacgtttacgacactactctc

SEQ ID NO: 11247 - DNA, 383 bp, Glycine max
  Clone ID: LIB3039-010-Q1-E1-D2
ggactcaaaaagagggttaacaagaaaaaaaaaaaacttgaaataccttcaactcgaagaacacaaccactgaaaaaagagaaagtgagaaaagggtcgaacaactggtgaagtcattgatggctacagaggaagagagtgcggtgaaggagcctttggatctcattaggctcagcctcgacgagcgtatctatgtcaaactccgttccgacagagagcttcgtggcaaacttcacgcttatgatcagcatcgtaatatgattcttggtgatgttgaagaaattgttactacagtggaaatcgatgatgagacatacgaagaaattgtgaggactacaaagcggacagttcctttcctgtttgtcacgggagatggggtgata

SEQ ID NO: 11248 - DNA, 389 bp, Glycine max
  Clone ID: LIB3039-010-Q1-E1-D3
ggcacaagtttgttgagatagctagaagcaataagatgaaaatgaaagtgcttgttttgtttgttgctacagttttggtagcatatgaatgccatggctcagactaccagaagttccctctccaaatgaaaactgggtttggtgggcaatacagcaatgaggtggcatgtgccagttggaggcttggcgtggaagcaaacaacgtagtcaagtggcgaactgttcctgcagcttgcggagagtacatagctgactacgttctaggagaccaatatagatcagattccaaaacagttaaccaacaagcttatttctatgctaaatccctcaaactcaccaacaaagatgtctttgtcttggacgttgacgacactactctctctaatctc

SEQ ID NO: 11249 - DNA, 392 bp, Glycine max
  Clone ID: LIB3039-010-Q1-E1-D4
gaactcagcttcggctacgtctccgacgacaccccaaacccaccttgttcccttaacgccacactcaataaccctctgatctttaccctttcccttccccttcttcaacacacacataatatctcttccaattttctcctccaatttcaatttctcgtcgtccctcaatatggctcgtctctcgatcgtcgccatcgtcgccgccgtgctcctcctggacctctccgccaaccccgcgacggcgcgtccctgcaggagcttcataatcacctcctactccttccgcaaccctaactccaacacgttcgccaccatcaccgagatccgatccttcacccctctctacatcaccgacacatccccctcctatgcccttttcttcctacacgcga

SEQ ID NO: 11250 - DNA, 383 bp, Glycine max
  Clone ID: LIB3039-010-Q1-E1-D5
gactcaccacttcaaaacactcataacacaaagcacaaagcaaagctcatccttgagttaaaaaatggcagcagcttcttccatggctctctcatccccatccttggctggcaaggccgtgaagctgggcccatcagccccagaagtgggaagggtgagcatgaggaagaccgtcaccaagcaggtctcctcaggaagcccatggtacggcccagaccgagtcaagtacttgggcccattctctggcgagcccccgtcctacctaaccggtgagttcccaggcgactacggctgggacactgctgggctttccgcagacccagaaaccttcgccaagaaccgtgaactcgaagtgatccactccaggtgggccatgctcggag

SEQ ID NO: 11251 - DNA, 386 bp, Glycine max; identical to SEQ ID NO: 10250
  Clone ID: LIB3039-010-Q1-E1-D6

SEQ ID NO: 11252 - DNA, 379 bp, Glycine max
  unsure (1)..(379): unsure at all n locations
  Clone ID: LIB3039-010-Q1-E1-D7
gcacaagtgagtttgttgatcgagataactagaaacagtgtgatgaaaatgaaggtccttgttttcttcgttgctacaattttggtagcatggcaatgccatgcgtacgatatgttccctctccgaatgaacactggctatggtgcccgtactccggaggtgaaatgcgcaagttggaggcttgctgtggaagcacacaacatctttggctttgagaccattcctgaagagtgcgttgaagcaacanaggaatacatccatggcgaacaatatagattagactccaaaacagttaaccaacaagcttacttttatgccagagacctcgaagtccatcccaaggacacatttgtgttcagtatagatggcaccgtactct

SEQ ID NO: 11253 - DNA, 383 bp, Glycine max
  Clone ID: LIB3039-010-Q1-E1-D8
gggtaataattcttataacacaacacaacccatggccaccacctccgcattcctcctccttcccctcctcctgctgctccacctcgccatcgccgctcacggcatcggcatcaactacggcacgctcggcgacaaccttccaccgcccgcggcggtggcgaacttcctgaagacgaagacgaccatctaccgcgtgaagatctacgacgtgaacccggacatcctgcgggccttcgccggcagcggcatctccgtgacggtgaccgcccccaacggctacatcgccgccttaaccaaaatcgactcggcgaggcagtgggtggcgacgcacatcaaaccctttcacactcagaccacaattaattacatcctcgtccgcagcg

SEQ ID NO: 11254 - DNA, 359 bp, Glycine max
  Clone ID: LIB3039-010-Q1-E1-D9
tgggatagcacaatcgtttctccagtttaatcatcattgtacaacccaattcccttcgtcgtgttcgactaagagagcagtggcacgtaccaagcaaaccgctcgcaagtccagcggaggaaaggctctgaggaagcagttggcaacgagagccgctcgcaagtcagccccggcgaccggcggagtgaagaagccccagcgcttcaggccaggaacggtggctctgagggagattcgaaagtaccagaagagcaccgaacttctgatccgaaaactcccattccagaggctcgtcagagaaatcgctcaggatttcaaacacgatctccgctttcagagcagcgccgtttcggctcttc

SEQ ID NO: 11255 - DNA, 377 bp, Glycine max
  Clone ID: LIB3039-010-Q1-E1-E1
ggaatctcaatatcagtctctaatatttttctcactgtcttgtctctccatagaaccgtcgatacagagattgcagctgcaacatctggtgctgtgttaaatgggttgggatcctccttcatgagtggaggaaacacgagtcaaacccttctggccactgctattggaggcaaagttggtgctgctgctgttactgttagtcctagaagactcattgtggtatctgctgctgcaccaaagaagtcatggctccctgatgtcagaagttgtggcaacctcgtcgacccagaatggcttgatggatcgctaccaggtgactatggcattgacccactacgccttgggaaagacccagcattcctcaaatggtacagaga

SEQ ID NO: 11256 - DNA, 360 bp, Glycine max; identical to SEQ ID NO: 10222
  Clone ID: LIB3039-010-Q1-E1-E10

SEQ ID NO: 11257 - DNA, 365 bp, Glycine max
  Clone ID: LIB3039-010-Q1-E1-E11
ggtgatagtcagtcgagttaatcagataaaggatcttgagaaacaggtcaaggatcggaaagattgggctcatgagaaggcacgccacgcggcataaaagctaagcagtgatctgattgagctgaaaaagttcaagatggaaagagaggagaataaaaaactgccgaaggagacaggggcagctgaggagctggacaacccaaccatgatgagactctcagaaatggagaatgccttgagaaagactagtggtcaaatggaccaagcaactgcagctgtcagaaaacttgaggcggagaaagctgaaatcaaagcagagttagaggcttctaaattaagtgcatcagagtcagtcacaagctgtt

SEQ ID NO: 11258 - DNA, 381 bp, Glycine max
  Clone ID: LIB3039-010-Q1-E1-E12
gaacacaacgcaacacaacgcgcactctctcttttctctcttaacacaaaaacccctatcgttcttcgcggtttcgccgattcgcgccatgccgaaagccaaatccgacgccaaagccgccgatagccggttgaagcgcaagggcgctggtgctggaaggaagcaatcgaagaaagctgctaaggatcctaacaagccaaagagacctccaagcgctttcttcgttttcatgtccgagttcagagagcagtttaagaaggagcatcctaacaacaaatccgtcgctgttgtcggtaaagctggtggtgacaaatggaaatcgctgtctgatgctgaaaatgcccccttcgttgccatggccgaaaagaagaaacaagagta

SEQ ID NO: 11259 - DNA, 358 bp, Glycine max
  Clone ID: LIB3039-010-Q1-E1-E2
ggcacaagtgagtttgttgatcgagataactagaaacagtgtgatgaaaatgaaggtccctgttttcttcgttgctacaagtttgggggcatggcaatgccatgcgtatgatatgtgccctcaccgaatgaacactgtctatggtgcccgtactccggacgtgaaatgcgcaagttggaggcttgctgtggaagcacacaacatctttggctttgagaccattcctgaatagtgcgttgaagcaccacaggaatatatccatggcgaacaatatagatcagactccaaaacagttaaccaacaagcttacttttatgccagagacctcgaaatcgatctcaaggacacatttgtgttc

SEQ ID NO: 11260 - DNA, 397 bp, Glycine max
  Clone ID: LIB3039-010-Q1-E1-E3
aagacgacagaaggggacagctgaagctataaggagggactacccagatgaagattggttgcacttaactggccttatccatgatctcggcaaggtgctgaatttgcctagttttggaggacttcctcaatgggctgtagtaggggacacattcccagttggttgcagatttgatgaatccattgttcaccataagtattttaaggaaaatccagactacaacaatccagcatacaacactaaatatgggatttactcagagagatgtggacttaacaatgtgatgatgtcatggggacacgatgactacatgtatctagtggcaaaggagaatagtactacactgccctctgcggctttgttcattataagataccattcattctatgcattacat

SEQ ID NO: 11261 - DNA, 209 bp, Glycine max
  Clone ID: LIB3039-010-Q1-E1-E4
caaagggacgttctacgcaatagacaaaccctaactagttgaatctaccttcccccatccaatctcccgtgccagtacaaacctccttcgcccgggagagaccctcagatcgacgcctcctcgttttgctcgatgacttcgccatcaaatcctctcactctcacttcttcaacacactcagttctcgcgaattcaatctcgacctccac

SEQ ID NO: 11262 - DNA, 365 bp, Glycine max
  Clone ID: LIB3039-010-Q1-E1-E5
gagagtggtggggtgtgcagaagagcgtcgcagttgtaaccctaatcagaagaagcgcagcttcaagcgagtgacagccaccagccatgggtcgtatgcacagccgcggtaagggtatatcctcttctgctttgccctacaaaaggacaccccctagctggctcaagatctcttcgcaagatgtcgaagaaaatatctgcaagtttgcgaagaaaggtttgaccccgtctcagattggtgtcattctcagagattctcacggtattgctcatgtcaatagcgtcactggcagcaaaatccttcgcatcctcaaagctcacggacttgcgcctgaaatttcagaggatctgtaccatttgattaag

SEQ ID NO: 11263 - DNA, 374 bp, Glycine max
  Clone ID: LIB3039-010-Q1-E1-E6
ggccacccccacctcaattttctcctccttttgtgcttccaactcttttctttgttatattattcgctttcgactttctcccaacccttggaatcgacatgactatcctcattgagcaatctgatcactttggggctgaagtagaggcaaagactgaaccaataaatgagagggaactggtgttggatggtggatttctgataccacagaccaactcatttgggcacatgtttagggcttataatgatgctgtaagtgagaggcgtgaaggagtggagaacttctacagaaaaaatcacacttaccaatcagttgatttcgtgaagaaaatgagagaggagtatgcaaaattgaacagggtagagatgagcata

SEQ ID NO: 11264 - DNA, 383 bp, Glycine max
  Clone ID: LIB3039-010-Q1-E1-E7
gatagaagaagcagaaagagaagcattagcaaaagcaagaagaactagtctaagcagaaatggcctcttcagtgatggcatctgtggccctcaaacctgcccctttcactgttgagaagtcctcagttagaggccttccctccctctcaaggaactcctcttcattcagagttgtggccagtggtggcaagaagatcaagactgacaagccttatggaattaatggtggcatggctttgagggaaggagttgatgcatctggcaggaaaggaaagggaaagggcgtttaccagtttgtagacaaatacggtgctaatgtcgatggttacagtcctatctacgacaccaaggactggtctccaaccggtgatgtctacgctggc

SEQ ID NO: 11265 - DNA, 379 bp, Glycine max
  Clone ID: LIB3039-010-Q1-E1-E8
gagagagtgttggtacgaaaaatgtcgaagctgatcttcgtgttcctttcgcttattcctcgtctctgcacctccttctcccgagagagaccctcagatcgacgcgtcctcgttttgctcgatgacttcgcgatcaaatcctctcattctctcttcttcaactccctcaaatctcgcggcttcgatctccaattccacctcgcagacgacccccaaattgcgctccagagatacggccagtacctctacgacgccctaattctcctttccgccagcattgaacgtgagttttccacttctcacccccccattgatatgttttttctttttccttttttcctgaaaactatggagatcgtgatttgtgttaaattgtttc

SEQ ID NO: 11266 - DNA, 381 bp, Glycine max
  Clone ID: LIB3039-010-Q1-E1-E9
gaacagcgaaacagagagtgatttcagtgagtgatcggtgttcacttgatctcatcataatcgtcagcgtcaattgaagaagatgccgatcagaaacatcgccgtcggaaggcctgaagaggcgactcaccccgacacgttgaaggcggctttggctgagttcatctcaaccttcatcttcgtgttcgccggctcaggctccggcatcgcctacaacaagctcaccgacaacggcgctgccacccctgccggcctcatctccgcctccatcgcccatgcattcgccctcttcgtcgccgtcaccgtcggcgccaacatctccggcggccacgtcaaccccgccgtcaccttcggcgccttcgtcggcggcaacatcacctt

SEQ ID NO: 11267 - DNA, 410 bp, Glycine max
  Clone ID: LIB3039-010-Q1-E1-F1
agacgtcagtagagcagagaaagaggaaaccacgctattacacaatgaattaggtggtagagatagatgaacggagggtaaaaaatgtcaacgacgttcaatacgaccatgcaaaagatatggcacgtcagcgcctgtcacggtcgtaacaggaagcatcgcaagcatcccagtggtcagggtaaccccagtcgcatgcaccaccaccgcatcctcttcgacaactatcatcccagtttcttcggaaaggtgtgtaagcactacttccacatactccgcaacaacttctactgccccatcgtcaacattgataagctatggtccctcctaactcaagaagccaacgacaatgtcaccgacgacaatgcaccattactcgatgtcacccagttcggttactttaaagtttt

SEQ ID NO: 11268 - DNA, 221 bp, Glycine max
  Clone ID: LIB3039-010-Q1-E1-F11
ggcatcaattcaaaatatatcatcaattataagcatgggtttgtggaacacaacgaatgcagtgtcttgccgctttcacaagtttggtgatgaccaaaagaatctggtcttccaaggtgatgccacgtcttcttccaggggcatagaactcacaaagttagacggtggaggaaaaccagtgggtggcagtgtggggagagtgttatactcttctccagtgc

SEQ ID NO: 11269 - DNA, 323 bp, Glycine max
  Clone ID: LIB3039-010-Q1-E1-F12
ggcatcaattcaggatatatcatcaattataagcatgggtttgtggaacacaacgaatgcagtgtcctgccgctttcacaagtggtggtgaggaccaaaagaatctggtcttccaaggtgatgccacgtcttcatccatgggcatagaactcacaaagttagacagtggaggaaaaccactgggtggcagtgtggggagagtgttatactcgtctccagtgcaactttggaaaagctctacagtggtcgcaagctttgaaaccgacttcatcttttccatcacaacagactctactactccaggtgatggccttgccttcttc

SEQ ID NO: 11270 - DNA, 54 bp, Glycine max
  Clone ID: LIB3039-010-Q1-E1-F2
gaacgtgcagcaatttgatatgagcattaagcgatttaaacatcaggacacaat

SEQ ID NO: 11271 - DNA, 384 bp, Glycine max
  Clone ID: LIB3039-010-Q1-E1-F3
ggcacgagtttgttgagatagctagaagcaataagatgaaaatgaaagtgcttgttttgtttgttgctacagttttggtagcatatgaatgccatggctcagactaccagaagttccctctccaaatgaaaactgggtttggtgggcaatacagcaatgaggtggcatgtgccagttggaggcttggcgtggaagcaaacaacgtagtcaagtggcaaactgttcctgcagcttgcggagagtacatagctgactacgttctaggagaccaatatagatcagattccaaaacagttaaccaacaagcttatttctatgctaaatccctcaaactcaccaacaaagatgtctttgtcttggacgttgacgacactactctctcta

SEQ ID NO: 11272 - DNA, 357 bp, Glycine max
  Clone ID: LIB3039-010-Q1-E1-F4
gacaacacaacgcaacacagcgcgcactctctcttttctctcttaacacaaaaaccctatcgttcttcgcggtttcgccgattctcgcgatgccgaaagccaaatccgacgccaaaaccgccgatagccggttgaagcgcaagggcgctggtgctggaaggaagcaatcgaagaaagctgctaaggatccgaataagccaaagagacctccaagcgctttcttcgatttcgtgtccgagttcagagagcagtttaagaaggagcatcctaacagcaaatccgtcgctgttgtcggtaaagctggtggtgacaaatggaaatcgcagtctgatgctgaaaaagtcaccttcgttgcca

SEQ ID NO: 11273 - DNA, 383 bp, Glycine max
  Clone ID: LIB3039-010-Q1-E1-F5
cggggcacaattgagtttgttgatcgagataactagatacagtgtgatgaaaatgaaggtccttgttttcttcgatgctacaagtttggtggcatggcaatgccatgcatacgatatgttccctctccgaatgaacactggctatggtgcccgtacaccggaggtgaaatgctcaaattggaggcttgctgtggaagcacacaacatctttggctttgagaccattcctgaagagtgcgttgaagcaacaaaggaatacatccatggcgaacactatagatcatactccagaacagttaaccaacaagcttacttttatgccagagacctcgaagtccatcgcaaggacacatttgtgttcagtagagatggtaacgtactct

SEQ ID NO: 11274 - DNA, 363 bp, Glycine max
  Clone ID: LIB3039-010-Q1-E1-F6
ggcacaaaaatacaatacaaaacaaaacagagcaaagagagagtgtgtgaaaagtgagacaaagaacagaacaacaatgacgacacttaaggttcctcagcctcttccccccgttgcagatgattgtgagcagctccgaaaagccttctcaggttggggaactaacgaggagctgattgtatcgatcttggctcataggaatgctgctcagaggaagcttatcagagaaacttatgcccagacctatggagaagatctcctcaaggccttggacaaagaactcacgagtgattttgagaggctggttcatctttggacacttgattctgctgaacgtgatgcatttttggcagacgaggcgac

SEQ ID NO: 11275 - DNA, 254 bp, Glycine max
  Clone ID: LIB3039-010-Q1-E1-F7
gcacaagtttgttgagatagctagaagcaataagatgaaaatgaaagtgcttgttttgtttgttgctacagttttggtagcatatgaatgccatggctcagactaccagaagttccctctccaaatgaaaactgggtttggtgggcaatacaacaatgaagtggcatgtgccaatttgaaggtttgccttgaaacaaacaacgttatccagttgcaaactgttcctgcaacctgccgagaattcataactgacc

SEQ ID NO: 11276 - DNA, 380 bp, Glycine max; identical to SEQ ID NO: 7921
  Clone ID: LIB3039-010-Q1-E1-F9

SEQ ID NO: 11277 - DNA, 387 bp, Glycine max
  Clone ID: LIB3039-010-Q1-E1-G1
ggttctagtgtgtgattgtttgttgttgtaacgcgttcttcatccttcgtggttctgtgtttgtgtttggtttttctcgcacctgagaatgtcatgctgcggtgataattgtggttgctgaaactcctgcaagtgcggcaacagctgcggaggctgcaagatgtagccagacttgagctacagtgagtcaaacaccacccatacatggtcacgggagtggcacctgttaacgctcaatttgagggtgctgaaaagggtgtgctcgctgagaacgatggctgcaaatgtggacgaaactgctcctgcaaacgctgcacttgcaagtgaggtgttgggagaacaaacttcaagcatagataacccttaattacgaataatgataaacta

SEQ ID NO: 11278 - DNA, 376 bp, Glycine max
  unsure (1)..(376): unsure at all n locations
  Clone ID: LIB3039-010-Q1-E1-G10
ggaacctcaaaatcagtctctaatatttttctcactgtcttgtctctccagagaactgtatagagagagatggcagctgcaggatctggtgctgtgttaaatgggttgggatcttccttcttgagtggaggaaacaggagccaaacccttctggccactgctattggaggcaaagttggtgctgctgctgttactgttagtcctagaagactcattgtggtagctgctgctgcacccaagaagtcatggctccctggtgtcagaggtggtggcaacctcgtcgacccagaatggcttgatggatcgctaccaggtgactatggctttgacccactaggccttgggaaggacccagcattcctcanatggtacagag

SEQ ID NO: 11279 - DNA, 351 bp, Glycine max
  Clone ID: LIB3039-010-Q1-E1-G11
acagaaggggaaatcgatagatagatagataagtaaaaatggcgcagtgtgtgaccaaaaacacattcgtgcaaggaaaacccttccttccagttccagcagctcccactaaaaatgttcggagagtggttcagtgcggtgtgtggtgcaggaagaaggagatacacccgcaattccacgaggaagcgaaggtgtactgcaacggggagctggtgctgacgacaggtgggacccagaaggagtacgtggtcgacgtgtggtcggggaaacaccctttctacctcggaagccggtcggcgtctatggtcagcgacgaccaggtcgagaagttcccaagaaattcggagagct

SEQ ID NO: 11280 - DNA, 350 bp, Glycine max
  unsure (1)..(350): unsure at all n locations
  Clone ID: LIB3039-010-Q1-E1-G12
gaggtgcaggaaaattaatctccctttcattttctctgcatctgtactctccaaaatgccgtccttagaggaggagctcttcccttcaaccccaggcaagttcaagatcgagcgggcccaccacatgaaccgccagctctaccgctgcttcgcctccaccagcaccatgttcctgtgggccctctttttaatcgccctcaccgcttcatatctcagcttccaaggcttcgttgattccggcagccgctacctctccgcctcctgnggcgggattcagtgggagaagcaagtccgcacctccgcccggattcaccgtcaaggcggcaatgtcgtcctcgtcaccggcgctg

SEQ ID NO: 11281 - DNA, 360 bp, Glycine max
  Clone ID: LIB3039-010-Q1-E1-G2
gatcctctgcgagtgagtgtttcgttggagtcagaggcgatgatgtcttcaattacattcctatggatcctggtggtgtgtttgacgggatcatgcgcgctaagccaaccgcagaagctatcagcgtacgatgttctcatggagtacggcttcccggtgggtcttcttccgaagggaggcatagggtattcactgaacagagacagctgcgagttcgctgtgtattttgaaggagcctgcagcttcgacatagaatcctacgcgctcaagtacaagtccacaatcacgggtgtgatctccaatggcaggctctacactctcaaaagtgtcaccgtcagaatcttgctcctgtggctcaac

SEQ ID NO: 11282 - DNA, 380 bp, Glycine max
  Clone ID: LIB3039-010-Q1-E1-G3
ggcacaagtgagtttgttgatcgagataactagaaacagtgtgatgaaaatgaaggtccttgttttcttcgttgcgacaattttggtagcatggcaatgccatgcgtacgatatgttccctctccgaatgaacactggctatggtgcccgtactccggaggtgaaatgcgcaagttggaggcttgctgtggaagcacacaacatctttggctttgagaccattcctgaagagtgcgttgaagcaacaaaggaatacatccatggcgaacaatatagatcagactccaaaacagttaaccaacaagcttacttttatgccagagacctcgaagtccatcccaaggacacatttgtgttcagtatagatggcaccgtactct

SEQ ID NO: 11283 - DNA, 187 bp, Glycine max
  Clone ID: LIB3039-010-Q1-E1-G4
gacgactacattgagtgaacaatattttccctccactaaggtcgcaatttttcttaaagcccatgacaccctcactgaggcaactgctgcagcatagaatcgcgatttttccaaaatgtccatgtccaaaagttccacgatgcatcagtacatcaactaccgtatgcgtgtcaccattcaggacggt

SEQ ID NO: 11284 - DNA, 350 bp, Glycine max
  Clone ID: LIB3039-010-Q1-E1-G5
gataagtgccataacacataaacagaatggcttccacgtttggcgcatcttcaattaccttcctctcttcacgatactactcgtctcaggcccttgccaccgattcaccctctctaaccacagtgcagatatttgggcgcaagttttgcggaggaagaaatggatttcacagcgtcaagggaaggtctctgttcgcggttgcgagtgttcttgccactcaacttaactctgcataataggctcagaagattgcttttaccgagagccagaggtcagtgtacccattttcggctatagttggacaggatgaaatgaagctttgccttctcctaaatgtgattgatcccaaa

SEQ ID NO: 11285 - DNA, 380 bp, Glycine max
  Clone ID: LIB3039-010-Q1-E1-G6
gacactaaacaagttaaaagaagagcatcactgaactaacaaagcaaccctatgtcgaaggtggtttgtgtcaccggagccagcggcgccatcggatcatgggtggtcctactcctcctccagcgtggttacaccgtccatgccaccgtccaagatatcaaggatgaaaatgagacgaaacatttggaggaaatggaaggagcaaagagtcatctccatttttttgaaatggatcttcttgacatcgactccattgccgctgccatagagggttgttccggcgtaatccaccttgcatgtcctaacatcattggtcaagtcgaagatcccgagaaacagatattggaaccggcgataaaaggaacggttaatgtgttgaa

SEQ ID NO: 11286 - DNA, 331 bp, Glycine max
  Clone ID: LIB3039-010-Q1-E1-G7
ggtctcgctctgcacaaagcctaacaccaaaaccagaagcgacatcgcaatcgcaatccagcgaatatgatagtcgtcactggagacgtgctcgcattgttgggagggaatccttcaccgtctgcagatgacatcaaacacatcctcggcgcaattggcgctgaagctgataatgagttgattgagttgctcatgactgaactcaagggaaaagacatcaggtgagctaattgctaatggaagtgcaaagatgtctgcagtgtctggtggcggtgcagcggttgccgttgctgctgcagtagctggaggtgcagctgcacctgctgccgaa

SEQ ID NO: 11287 - DNA, 388 bp, Glycine max
  Clone ID: LIB3039-010-Q1-E1-G8
ggcacaagtgagtttgttgatcgagataactagaaacagtgtgatgaaaatgaaggtccttgttttcttcgttgctacaattgtgggtagcatggcaatgccatgcgtacgatatgttccctctccgaatgaacactggctatggtgcccgtactccggaggtgaaatgcgcaagttggaggcttgctgtggaagcacacaacatctttggctttgagaccattcctgaagagtgcgttgaagcaacaaaggaatacatccatggcgaacaatatagatcagactccaaaacagttaaccaacaagcttacttttatgccagagacctcgaagtccatcccaaggacaaatttgtgttcagtatagatggcaacgtactctcgaatat

SEQ ID NO: 11288 - DNA, 278 bp, Glycine max
  Clone ID: LIB3039-010-Q1-E1-G9
gagaagaaacggaagcggtgtaaaagtaacagaggcggatagaaccgaaatacccaacccgaccgggtgagcgtgactgtaggagtttctaattgcctggttcagcttcaccttcaccttcaccttctcttcttcttctctctctcatggtcttgtagcggaaccgttctcgcttctcggagaatattgcctccatcccctccgctgaactcaattacctcatttatcgctaccttcaagaatcaggtttcacgcatgctgcttttacttttggttat

SEQ ID NO: 11289 - DNA, 304 bp, Glycine max
  Clone ID: LIB3039-010-Q1-E1-H1
ggtgcacaagtgcatttgttgatcgacataactagaaacagtgtgatgaccatgaacgtccttgttttcttcgttgctacaattttggtagcatggcaatgccatgcctacgatatgttctctctccgaatgaacactggctatggtgcccgtactccggaggtgaaatgcgcaagttggaggcttgctgtggaagcacacaacatctttggctttgcgaccattcctgacgactgcgttaaagcagcatacgaatacatccatggcgaacaatatacatcagactccacaacagttaaccaac

SEQ ID NO: 11290 - DNA, 365 bp, Glycine max
  Clone ID: LIB3039-010-Q1-E1-H10
gaacacaaacacaaattacatagcctcagtaatctgagagagaaacataaacaatgaaggtttccattgcgaagttccactcccttcccctatgttttttccttctcttggccttcaacacaaaacccctcctagcagcagaaccagagccagtggttgataagcaagggaaccctttggagccaggagtagggtactacgtgtggccactttgggctgatgaaggaggcctcacactaggccaaacaaggaacaagacatgccctctttatgttatccgtgacccttcattcattggcaccccagtttcattcttagcaccaggccttgaccatgttccaacactcactgatctaaccattgat

SEQ ID NO: 11291 - DNA, 365 bp, Glycine max
  unsure (1)..(365): unsure at all n locations
  Clone ID: LIB3039-010-Q1-E1-H11
gatcacaacatcatagtaagcactatagtaaaaaaaggacattcattcatctatggctacccttattgctcccagcaaccactctccccaagaagatgctgaagctctcagaaaggcttttgaaggatggggaactgatgagaacactgtcatagtaattttgggtcatagaactgtgtatcagaggcagcagatcagaagagtttatgaggaaatttaccaggaggatcttgtgaagcgcctagagtctgagatcaaaggagactttgagaaagccgtgtaccgatggatactggaacctgcagatcgtggtgctgttttggccaatgttgccatcaggagtggcanaaactacaatgtcattg

SEQ ID NO: 11292 - DNA, 385 bp, Glycine max
  unsure (1)..(385): unsure at all n locations
  Clone ID: LIB3039-010-Q1-E1-H12
gaaaacaacaaattttcagactcaacaagcttcgaaccaaatcttattgagaaaatgtctggtcgtggaaagggtggaaagggtttgggaaagggaggtgccaagaggcacaggaaggttcttcgtgacaacatccagggcatcacgaaacctgcgattcgtaggttagcgagaagaggtggcgtgaagaggatcagtggtttgatctacgaggaaaccagaggagttctgaagatattcttggagaacgtgattcgcgatgctgtgacctacactgagcacgctangaggaagacggttactgctatggatgttgtttatgctcttaagaggcagggaaggaccctctatggttttggaggctaaaaagttcttagtgttattg

SEQ ID NO: 11293 - DNA, 383 bp, Glycine max
  Clone ID: LIB3039-010-Q1-E1-H2
gaccgcgcaccacactgagaggaagagggagtgagagagagtgttcttcgtttgctaccttctcccagaaatggttacgttcaggtttcaccagtaccaggtggtcgggagggctctcccaacggaagcagatcagcatccgaagatctaccgaatgaagctctgggccaccaacgaggttcgcgccaagtctaagttctggtattttttgaggaagctgaagaaggtgaagaagagcaatggtcaagttcttgctatcaacgagatttttgagaagaacccaaccaagattaagaactacgggatatggttgcggtatcagagtacgactggttaccacaacatgtacaaggagtaccgcgataccactctaaacggttcag

SEQ ID NO: 11294 - DNA, 385 bp, Glycine max
  Clone ID: LIB3039-010-Q1-E1-H3
ggcacaagtgagtttgttgatcgagataactagaaacagtgtgatgaaaatgaaggtccttgttttcttcgttgctacaattttggtagcatggcaatgccatgcgtacgatatgttccctctccgaatgaacactggctatggtgcccgtactccggaggtgaaatgcgcaagttggaggcttgctgtggaagcacacaacatctttggctttgagaccattcctgaagagtgcgttgaagcaacaaaggaatacatccatggcgaacaatatagatcagactccaaaacagttaaccaacaagcttacttttatgccggagacctcgaagtccatcccaaggacacatttgtgttcagtatagatggcaccgtactctctaat

SEQ ID NO: 11295 - DNA, 395 bp, Glycine max; identical to SEQ ID NO: 7929
  Clone ID: LIB3039-010-Q1-E1-H4

SEQ ID NO: 11296 - DNA, 380 bp, Glycine max
  Clone ID: LIB3039-010-Q1-E1-H6
gctcctttgtttgattagggttttttcgcttcttctattcactctgttacggtgcaacctagcagcctccaaatccaatggcttcagagaagaaactttcgaacccaatgagggagataaaagtgcagaagctcgtcctcaatatctctgttggcgagagtggagatcgtctcaccagagccgccaaggtgttggaacaacttagtggccaaaccccagtgttttccaaagcaaggtacactgttcgttcctttgggattagaagaaatgagaagattgcatgctatgtcactgtcagaggtgacaaggcaatgcaacttttggagagtggtttgaaggtgaaggaatatgaacttctcagaaggaacttcagtgatacg

SEQ ID NO: 11297 - DNA, 379 bp, Glycine max
  Clone ID: LIB3039-010-Q1-E1-H7
ggaaacagagagtgatttcagtgagtgatcggtgttcacttgatctcatcataatcgtcagcgtcaattgaagaagatgccgatcagaaacatcgccgtcggaaggcctgaagaggcgactcaccccgacacgttgaaggcggctttggctgagttcatctcaaccttcatcttcgtgttcgccggctcaggctccggcatcgcctacaacaagctcaccgacaacggcgctgccacccctgccggcctcatctccgcctccatcgcccatgcattcgccctcttcgtcgccgtctccgtcggcgccaacatctccggcggccacgtcaaccccgccgtcaccttcggcgccttcgtcggcggcaacatcaccttcctc

SEQ ID NO: 11298 - DNA, 375 bp, Glycine max
  Clone ID: LIB3039-010-Q1-E1-H8
gaaggtgcaagagtttgttgtgagctataagctagtttatcgtgaggagaatatgaagttgtttgttttctttgttgctgcagtagttttggtagcatggccatgccatggcgcaggctaccaaaggttccctctccgaatgaaaactggctatggtgagcgttcttcggaggtaaaatgcgcaagttttaggcttgctgtggaagcacacaacatccgagcctttaaaaccattcctgaagagtgcgttgaaccaacaaaggactacattaatggcgaacaatttagatcagactctaaaacagttaaccaacaagctttcttttatgctagtgaacgcgaagttcatcacaacgacatatttatattcggcat

SEQ ID NO: 11299 - DNA, 375 bp, Glycine max
  Clone ID: LIB3039-010-Q1-E1-H9
gaattattattattgctttgcaaaacactaaccaaccaaaacaaagggaaaaaaaaagtatccactttcccttcttcttcttccatttgggttttctcaaaagtgaaaagcaaattccgtgacttccacaatcaccactcggatcagtatgcacaccagtctcagaaaacccacaagaacaaaaatcagatttttccaaaactcttgagtgatagactttgaatgaaatcttgtttttcattaacgagattcaattgaagtgaagtgattattcactggaaaacttatttttcatagtattggaggtacaactgaagctgttagatttgttttaactacacgagttcgttggatatttgagcatggctgggaatc

SEQ ID NO: 11300 - DNA, 385 bp, Glycine max
  Clone ID: LIB3039-011-Q1-E1-A1
ggttctagtgtgtgattgtttgttgttgtaactcgttcttcgtcttttgttgttctgtgtttgtgtttgttttttctctcacgtgaaaatgtcttgctgcggtggtaactgtggttgcggaagctcctgcaagtgcggcaacggctgcggatgctgcaagatgtagccagacttgagctacactgagtcaaccaccaccgagaccttggtcatgggagtggcacctgttaaggctcaatttgagggtgctgaaatgggtgtgcccgctgagaacgatggctgcaaatgtggaccaaactgctcatgcaacccctgcacttgcaagtgaggtgttgggagagcaggcttcaagcagagatacccttaattaggaatatgataaact

SEQ ID NO: 11301 - DNA, 375 bp, Glycine max
  Clone ID: LIB3039-011-Q1-E1-A10
ggagcgaagaagatattagggtttttgagtgcggtgcggcgatcctagcactctcttctgcagctttcgccgacagcttcattcaccatggctgagcaaaccgagaaggcttttttgaaacaaccaaaagtgtttctcagctcgaggaagactgggaagggaaagagacccggaaagggtgggaagcgcttttggaaatccattgggcttggatttaagactcccagggaagccatcgaaggaacctacattgacaagaagtgccccttcactggcaatgtttccatccgtggccgtatcttggctggaacatgtcacagtgctaagatgaacaggactattagtgttaagaggaattatctccattttagcaag

SEQ ID NO: 11302 - DNA, 405 bp, Glycine max
  Clone ID: LIB3039-011-Q1-E1-A11
ccgctttcatccaggttgtttacatggctttggttggatcatttccatttaactccttcctatcaggagtactttcttgtgtacgaactgctgttcttgctgtttgcctcaggatgcaagtgaataaagagaataaggaattcaaggatcttgcacctgagcgcgcttttgcggattttgttctctgtaatttggtgcttcatttggtgatcatgaacttccttggataaattgggtttgtgtggcggttgttgtttctgattgaacccttggataataaaaattaaatagtactatacctagacttctgtaagagtacttatagacagtagccggcattctactaattgctttagctttatgttgattacccccaccccccatttctggttccctgttttgaac

SEQ ID NO: 11303 - DNA, 369 bp, Glycine max
  Clone ID: LIB3039-011-Q1-E1-A12
gagattgatgagcgtcatgatgttggacagtgtgactagcaagcagagtcattggagacgtcgatgtcacagttgcgggggcatggaaaggacgggagtacaataagtgaacgttcaaaatgttcagtttcaagggtgtggataccgatgcacgtctggaaatgtccatcgatgaatgcttgaaaatcataagtgatcgctcacgtagagagtactacagaggactcagtagaaagcccataggcttgaatacaaggcttcgcatagcgataagagaagctccaccatgatgagaagccagaacctgtacgcacacatctccgcaacacgatcactgtgactgatatgagtggaatcaatattgcagtg

SEQ ID NO: 11304 - DNA, 369 bp, Glycine max
  Clone ID: LIB3039-011-Q1-E1-A2
ggttctcacagcatatatatcaagaatctattttatactatacctacattttgacaattttctttgtagttgatagccatggctacccgtggaaagcttgaggttgacattgatctcaagtccaacgcagacaagtactggcaaacccttaggaattctactgaaatattccctaaggccttcccacatgattacaaaagcattgaggttcttgagggtgatggcaagtctcctggatctatccgccacataagttatggtgaacgttcaccacttgtgaaatcatcctttgagaagattgacgctgttgatgaggaaaagaacgtactgtcgtacactatcattgatggggaactcctccagcactac

SEQ ID NO: 11305 - DNA, 389 bp, Glycine max
  Clone ID: LIB3039-011-Q1-E1-A3
actacagaagggggaagctggaaaagttagaagtagtgaagaaaatgaaagtcattgttttcttcgttgctataataattttaggtgcagaatggcaatgcaatgggtcagagcatgagcatgagcatggccacagctaccaaattttccctttgcgaatgaaaaccggccccggtggccactacattccggaggtatcgtgcaaaagttggaggcttggtgtggaagcacacaacgtcattgactggagaaccattcctcaagattgcgagggatatataggaaactacatgcttggccaccaatatagattagactccaaaacagtttgccgtgaagcttatttttatgctaaaaccatcaacatcactgccaagaccacattggtg

SEQ ID NO: 11306 - DNA, 401 bp, Glycine max
  Clone ID: LIB3039-011-Q1-E1-A4
ggaagctggaaaagttagcagtagtgaagaaaatgaaagtcattgttttcttcgttgctataataattttaggtgcagaatggcaatgcaatgggtcagagcatgagcatgagcatggccacagctaccaaattttccctttgcgaatgaaaaccggccccggtggccactacattccggaggtatcgtgcaaaagttggaggcttggtgtggaaacacacaacgtcattgactggagaaccattcctcaagattgcgacggatatataggaaactacatgcttggccaccaatatagatcagactccaaaacagtttgccgtgaagcttatttttatgctaaaaccatcagcatcactgccaagaccacatgggtgttttatgtagatgagactacactc

SEQ ID NO: 11307 - DNA, 380 bp, Glycine max
  Clone ID: LIB3039-011-Q1-E1-A5
gactcaagcacaacatctctatcgagtaaattaactatgaagcctaccctactattatccctttccttcctgcctctctttgctttcctggctctttcagaagatgttgaacaagttgtggacataagtggcaaccccattttcccaggtggcacatattacattatgccatcaacttggggcgctgccggtggtggattgaaactaggccggacaggaaactcaaactgcccagttactgttttgcaagattactcagaaatcttccgtggcacaccagtcaaattcagcatacctgggataagccctggaatcatctttacaggtactccacttgaaatcgagttcgcagagaaaccttaatgtgctgaatcctcaaa

SEQ ID NO: 11308 - DNA, 394 bp, Glycine max
  Clone ID: LIB3039-011-Q1-E1-A6
ggcacaagtgagtttgttgatcgagataactagaaacagtgtgatgaaaatgaaggtccttgttttcttcgttgctacaattttggtagcatggcaatgccatgcgtacgatatgttccctctccgaatgaacactggctatggtgcccgtactccggaggtgaaatgcgcaagttggaggcttgctgtggaagcacacaacatctttggctttgagaccattcctgaagagtgcgttgaagcaacataggaatacatccatggcgaacaatatagatcagactccaaaacagttaaccaacaagcttacttttatgccagagacctcgaagtccatcccaaggacacatttgtgttcagtatagatggcaccgtactctctaatattccatac

SEQ ID NO: 11309 - DNA, 403 bp, Glycine max
  Clone ID: LIB3039-011-Q1-E1-A7
ggcacaagtgagtttgttgatcgagataactagaaacagtgtgatgaaaatgaaggtccttgttttcttcgttgctagaattttggtaggatggcaatgccatgcgtacgatatgttccctctccgaatgaacactggctatggtgcccgtactccggaggtgaaatgcgcaagttggaggcttgctgtggaagcacacaacatctttggctttgagaccattcctgaagagtgcgttgaagcaacaaaggaatacatccatggcgaacaatatagatcagactccaaaacagttaaccaacaagctttactttatgccagagacctcgaagtccatcccaaggacacatttgtgttcagtatagatggcaccgtactctctaatattccatactacagaaaa

SEQ ID NO: 11310 - DNA, 353 bp, Glycine max
  Clone ID: LIB3039-011-Q1-E1-A8
ggtgaggcgagggtaaggtcgcgttgtgttgcgtcgtgtcgtgcgctgttcctctgtctctcgtttttgtgttcagaccgaaccctagctccgcatcgcaaccatgtcgaccaagcaaggtggaaaagctaagcctttgaagaaacccaagtctgataagaaggattacgacgagattgatgtggctaacattcagaagaaaaaggaagaggagaaggcgctaaaggagttgaaagccaaggcgcaacagaagggaagctttggaggttctgggctcaagaaaagtggaaagaaataagggctctttatcatgattgtatgcattcaatattgagccctgtaattacagttgc

SEQ ID NO: 11311 - DNA, 366 bp, Glycine max
  Clone ID: LIB3039-011-Q1-E1-A9
aacttcgaattcaaactcatactctggccgaagtttctggatgtttatattaccatatctgttgaataattaagatggcatgctgttgcttcatggacttgggatgcccaggatgaaacctgtgggatttgtaggatggcctttgatggatgttgtcctgactgcaaacttcctggagatgactgcccactgatttggggtgtatgcaatcacgcatttcatctgcactgtatcctgaaatgggtgaattctcagacatcacaagcgcattgccccatgtgccgtacggagtggcagtttaaaggatgagagctcaggttttcattttctttttcgagtgtgaccagagagcaatgtaaattggta

SEQ ID NO: 11312 - DNA, 410 bp, Glycine max
  Clone ID: LIB3039-011-Q1-E1-B1
ggcccaccaaacgccattcaatttgcctccctcccaatcccacagcgctccctccaccgtgacaatcactcactccccactcatcaccaggagagaaacgcgtgagaaacattcctctcagagcgcgtggaaacaccccctctcccaccaccaacccttgccgtcgtgccctgtccctccacaaccaaacccttccttctctcaacttgcttattcccacaacacaacacaacgcacaaacacacagaaaatttctagagcgagaaagtgagaggagagagaaagtagctgatcctccatggcctccaccaaggaacgcgaaaactttgtctacaccgccaagctcgccgaacaagccgaacgctatgaagaaatggtggaagcaatgaagaatgtggcgaacctgaacg

SEQ ID NO: 11313 - DNA, 359 bp, Glycine max
  Clone ID: LIB3039-011-Q1-E1-B10
gagacacgtacgcaactgaaacggaaaaccctattacatgaatagaactcctatcttgttcgctctcttctttcatctttgtgccttcagctcatatcgaccatcatgccaacgctgatgatgatcatgtgtacgacagtgacggcgatcagcttcaatacggtgtcaattactgcgtgttgccagtgataacaagagctggcagtggaatagcagtaacataaggacgaaacgaggattgacctctgactgtggtgcaatctggcagcgagctctctgatgggttatcgatacagatgtgcatctcgatcagcatgagtcgctttcatcattcattgccagcatttcagtaacattca

SEQ ID NO: 11314 - DNA, 343 bp, Glycine max
  Clone ID: LIB3039-011-Q1-E1-B11
gggagagattagagatccagtcagaacaatatctttctctctctgtttggtttggcctcttgctgtaagaagccagccacagtactgttgcgctcctgtggaatcatcgatgggctttaacaggttccacatcggttgagctttgtatcagatatgccaatattgttatccttattcttgtgatataccagtttgtatgatcatattttctcggattgtctagcaagtttagctcaattggaccttgaactaattattataaatctattacgattatcttcaatttctacgaagattgcatatttaatagaattttgagattataggtacaagtagaggataa

SEQ ID NO: 11315 - DNA, 360 bp, Glycine max
  Clone ID: LIB3039-011-Q1-E1-B12
ggtttcagagtggtggggtgtgcagaagagcgtcgcagttgtaaccctaatcagaagaagcgcagcttcaagcgagtgacagccaccagccatgggtcgtatgcacagccgcggtaagggtatatcctcttctgctttgccctacaaaaggacacctcctagctggctcaagatctcttcgcaagatgtcgaagaaaatatctgcaagtttgcgaagaaaggtttgaccccgtctcagattggtgtcattctcagagattctcacggtattgctcaggtcaatagcgtcactggcagcaaaatccttcgcatcctcaaagctcacggacttgcgcctgaaattccagaggatctgtacca

SEQ ID NO: 11316 - DNA, 382 bp, Glycine max
  Clone ID: LIB3039-011-Q1-E1-B2
gattccattttctaaaatggcaagcaacaccaccatggtagacgagcgtgcaggggcggagatcgtgtatggcgcggaggaatgccaccgcagctccatggagctcctggaagagcttggattccccaaaggggtgatgccattgaaggaccttgtggagtgcggccgggttcgcgaaacggggttcatttggatgaagcagaaggcgccaagccagcacttcttcgaggcaaccaagaccctcgtgagctacgcggcggaggtcaccgcctatgtggaaaagttcaagatgaagaagatgaatggcatcaagagcaagcaagtgttcatttgggtgccaattgctgagatgagcattgatggggacaatgggaaaagatac

SEQ ID NO: 11317 - DNA, 352 bp, Glycine max
  Clone ID: LIB3039-011-Q1-E1-B3
aggggcacaagtgaggttgttgatcgagataactagaaacagtgtgatgaagatgaaggtccttgatttcgtcgtagctacaattttgggagcatgggaatgccatgcgtaagagatgttccctcaccgaatgaacactggatatgggggccgtaattcggaggtgatatgcgcaacttgggggcttgctgtggaagcacaaacatctttggcattgggaacaatccctggaaaatgcgttggagcaacagacgaatacgtccatggcaaaaaatgtcaatgagaatcaagaacagttaaccaacaagcttacttttaggccagagacctcgaagtcaatcccaaggacaca

SEQ ID NO: 11318 - DNA, 363 bp, Glycine max
  unsure (1)..(363): unsure at all n locations
  Clone ID: LIB3039-011-Q1-E1-B4
ggaacctttgcattctattcattcaagattcagcaagtgcgttttggaagcagagaccgaaatacttcgagatggcccgtacaaagcaaactgctcgtaagtcaactggaggaaaagctcccaggaagcagcttgcaaccaaggctgcacgtaagtctgcaccaacaactggtggtgtgaagaagcctcatcgttatcgccctggaactgttgctcttcgtgagattaggaaataccagaagagcactgagctcctaatcaggaagcttcctttccagaggttggttcgtgaaattgcccaggatttcaagactgatctgcgtnttcagagccatgctgtgcttgcattgcaagaggctgctg

SEQ ID NO: 11319 - DNA, 396 bp, Glycine max
  Clone ID: LIB3039-011-Q1-E1-B5
gggtcctcacataggaaaagaagcggtgttcgaatttgaggggtgaatggatcaatcgttccttgtaatggtctcgaatctcctccagctccacaactccctggaccccaccagctccctcctctccaacgccgacggcgcatcctccctcctccactcctcctccgtcgcccctctcctcttcttcaccatcgcctccgtcctctccttcgtcgcctccacgcgcccctctccttcctcggactactctgtctctgccttccgcaccctctccacagaacacatctggtccctggaagcccctcttcgccacgcccactggcgcttcctctacggcctctcctaccccgtcttcaacacggtcgtcgacaagctcaggccccacatcgccctctc

SEQ ID NO: 11320 - DNA, 415 bp, Glycine max
  unsure (1)..(415): unsure at all n locations
  Clone ID: LIB3039-011-Q1-E1-B6
gataccacaaacaaaacacaagccaagtgaaagtgagaaagaataaaaatcaaagagcataatgtcagggatcattcacaagattggggagacccttcatgtgggagggcacaagaaggaggaggagcataagggtgagcaccatgctggagaatacaaaggggagcaccatggtgaacacagtagtgagtacaaaggagagcatcatggtgaacacaaagctggagagtaccatggtgagcacaagccagagcacaaagaggggttcctagacaaagtcaaggacaagattcatggtgagggcggcgccgccganggcgagaagaagaagacggagaagaagaagaagagcatggccatgagcatgggcatgacagcagcagcagcagtgacagtgattaaactgctgcatcac

SEQ ID NO: 11321 - DNA, 398 bp, Glycine max
  Clone ID: LIB3039-011-Q1-E1-B7
gattttcttcgttgagcagaaagctaaaggctaaagcctagaaccttcttcctttacacctcgctggaaccagcgatggatcctcagcctgagccagtcagctacatatgcggagattgtggaatggagaatacgctgaagcccggtgacgttatacagtgccgtgagtgcggttaccgtattctttacaagaagcgcactcgtcgcattgtccagtacgaggcacgctgaagaaaactgctataacgtttgcaagtaatttccatgaagaaattgttactacatctgtgttgtgtgatattgaagaactacttttaattctacagtagattgctttttgggtgatgtttagcacaagataaaaactttgaatgtgaatatattacaaacatccgtgt

SEQ ID NO: 11322 - DNA, 402 bp, Glycine max
  Clone ID: LIB3039-011-Q1-E1-B8
gatacatagagagcgtggcataacgtaaacttatccttcctccctctgtgtgtgtgcgcatcaaacgcaaccagatgcagccatggccactgccagaactgtgaaggacgtttctcctcaggagttcgtcaaggcttactcttctcacctcaagcgatctggcaagatggagctgccacagtggactgatattgtgaaaactgcaagatttaaggagttggctccatatgatcctgactggtactatgtcagagctgcttccatggcaagaaagatctacctgagaggaggacttggtgttggtgcctttcagatgatttatggtgtgagcaagaggaatggtagccggcctcctcatttctgcaagagcagtggtgctgtagctcgtcatattcttcaaca

SEQ ID NO: 11323 - DNA, 380 bp, Glycine max
  unsure (1)..(380): unsure at all n locations
  Clone ID: LIB3039-011-Q1-E1-B9
gacacagctattcctcttaagcttgctactgagtttccacactgcataccttaggtcttccgaattcgaagttaatttgcaagatggctaaggaaaaggctcagatcaacattgtggtggttggtcatgtggaccctgaggaggcaaccaccattaacgagctgaagaagcctgttgtggagaaagaagctccagggcatgccatatgagggcatgcacgtacggcctcggaggggaaccagaaaattatgttaacaaaataatctggaaccctaatgtatcagtgtcatcatcagtgtgtagtttaagctagctttgctatggttacgttctttgagatgagagtcttgatgaacagtaccattctgatgtantgcttt

SEQ ID NO: 11324 - DNA, 376 bp, Glycine max
  Clone ID: LIB3039-011-Q1-E1-C10
ggtgcacaagtgagtttgttgatcgagatacctagaaacagtgtgatgaaaatgaaggtccttgttttcttcgctgctacaattttggtagcatggcaatgccatgcatacgatatgttccctctccgaatgaacactggctatggtgcccgtactccggaggtgaaatgcgcaagttggaggcttgctgtggaggcacacaacatcatcggctttgagaccattcctgaagagtgcgttgaagcaacaaaggaatacatccatggcgaacaatatagatcagactccaaaacagttaaccaacatgcttacttttatgccagagacctcgaagtccatcccaaggacacatttgtgttcagtagagatggcaccg

SEQ ID NO: 11325 - DNA, 350 bp, Glycine max
  Clone ID: LIB3039-011-Q1-E1-C11
ggcagcgcttgagattaagccccactcaaccaccacaccactctctctgctcttcttcgacctttcaagtttttagagtattaagatggcagagacattcctatttacctcagagtcagtgaacgagggacaccctgacaagctctgcgaccatatctccgatgctgtcctcgacgcttgccttgatcaggacccagacagcaaggttgcctgcgaaacatgcaccaagaccaacttggtcatggtcttcggagagatcaccaccaaggccaacgttgactacgagaagatcgtgcgtgacacctgcacgaacatcggcttcgtctcaaacgatgtgggacttgatgctg

SEQ ID NO: 11326 - DNA, 386 bp, Glycine max
  Clone ID: LIB3039-011-Q1-E1-C12
ggtcactcaccacttcaaaacactcataacacaaagcacaaagcaaagctcatccttgagttaaaaaatggcagcagcttcttccatggctctctcatccccatccttggctggcaaggccgtgaagctgggcccatcagccccagaagtgggaagggtgagcatgaggaagaccgtcaccaagcaggtctcctcaggaagcccatggtacggcccagaccgagtcaagtacttgggcccattctctggcgagcccccgtcctacctaaccggtgagttcccaggcgactacggctgggacactgctgggctttccgcagacccagaaaccttcgccaagaaccgtgaactcgaagtgatccactccaggtgggccatgctcggag

SEQ ID NO: 11327 - DNA, 368 bp, Glycine max
  Clone ID: LIB3039-011-Q1-E1-C2
ggacaacgaaactcacagaagaaagaagaaaaagaagcgaaactaaagtcagcattcgaaaaagatgagtagcatcggtacaggttacgatctatcggtcaccactttctcccctgatggccgcgttttccagatcgagtatgccgctaaagccgtcgacaacagcgggactgttattgggatcaagtgcaaagatggggttgtgttgggcgttgagaagcttattccgtcgaaaatgatgcttccgggttccaatagaagaatacactccgttcatcgtcactctgggatggctgtagcaggattagcagctgatggcagacaaattgttggcagggctaagtctgaagctactaactatgacagcg

SEQ ID NO: 11328 - DNA, 340 bp, Glycine max
  Clone ID: LIB3039-009-Q1-E1-E3
ggcagtaggcagaggtattgtcgatttaaagaagcaaatcctcgatgaggaaagtgcacaagtgagtttgttgatcgagataactagaaacagtgtgatgaaaatgaaggtccttgttttcctcgttgctacaattttggtagcatggcaatgccatgcgtacgatatgttccctctccgaatgaacactggctatggtgcccgtactccggaggtgaaatgcgcaagttggaggcttgctgtggaagcagacaacatctttggctttgagaccattcctgaagagtgcgttgatgcaccataagaatacatccatggcgaacaatacagatcagactcc

SEQ ID NO: 11329 - DNA, 319 bp, Glycine max
  Clone ID: LIB3039-011-Q1-E1-C3
gggccaaaaaaccacaggaaggggggaacctttctcacagaacaatcaagaattagaagcttgactattgtcagcattcgccgaagatgagtaacatcggtagatgttacgatctagcggtcaccacattcgcacgagatggtcgcattttccagctcgagtatgccgctgcagctgtctctaccagcgggactgttagtgtgatcaagtgcaaacatagcgttgtgttaaccgttgacaagcttattccgatcgaaaatgatgctaccaggttccactagaacaagacactccgttcatcgacactctggcatggctg

SEQ ID NO: 11330 - DNA, 199 bp, Glycine max
  Clone ID: LIB3039-011-Q1-E1-C4
gagaacctttgcacaccaaacacacaagaatcacctcctttgtatcgtcatcattcatgcatcttgcatccccatagcctcatgcctcaatggcgcgctaagtactatcgcccgattaagacgccaccactatattggcctccactctacaagtcactactgtacaacccactggtttataaatcaacatcaccggctt

SEQ ID NO: 11331 - DNA, 271 bp, Glycine max
  Clone ID: LIB3039-011-Q1-E1-C5
aaaagaacaacaaaagggggtacacacgcgtttgcagatcaagtaccctatagccactgtaatgacatgtatggtcctctgaaatcatcgctgctacactggtggtagcatagcaatgtcatccgtactagatgttcccgtctccgaaatgaacacgggagtatagtgaccctactccggtgagtgacatcctcagattcgaagtctgctgtgaaagcacacgacatctttgactttgtgaccattcatgttgcgtgcgttggcacagcat

SEQ ID NO: 11332 - DNA, 398 bp, Glycine max
  unsure (1)..(398): unsure at all n locations
  Clone ID: LIB3039-011-Q1-E1-C6
ggagttgagaggatcgtgagaggggcagtagccgagattccgtgagttgcaaaaatgaagacgattctttccagcgagaccatgaacatcccggacggcgtgagcatcaaagttcatgccaaggtcatcgaagttgagggcccccgcggaaaattggtgcgagacttcaagcatttgaatctcgattttcagctcattactgacgaaaacggtaaaagaaagctgaaaatcgacgcgtggtttggttctcggaaaacatccgccgccattcgcaccgccttgagccacgtggagaatcttatcaccggcgtcaccaagggctaccgctacaaaatgaggttcgtttatgcccattttcccatcaacgcangcatcggcaacagcaacaggtctattga

SEQ ID NO: 11333 - DNA, 292 bp, Glycine max
  Clone ID: LIB3039-011-Q1-E1-C7
agcagcaaaagggggtccaaagggggaattgttaggagtgggacacgggcctcctcctttggtggtccggtgttggggttggtttttcccctaacgggaagaggccttgatctgggggaaatggtggttccggaaccacgggaaggtcaggaaacggtaggggaggcggaaaaagttaccaagacttgacacaacatgaattcaacaacaaccacaacacttggccatggaattggaactggtaaggcgcaaatttaaggttgctaaaatggttgtgccgattaaaaacaat

SEQ ID NO: 11334 - DNA, 385 bp, Glycine max
  Clone ID: LIB3039-011-Q1-E1-C8
gataaccatggcgtctagctctgcttccgctctttacttccttttatgcctatcgcccatcactttgcttctttctgcgtttcgtgctcaagctcaatctcatgctccagctcccactttcaagtactgtgaaaagaatgcagactatgctgtgaaggtgagtggagtggaaatattgcctgaccccgtggagagaggagtgccattcacctttaagatcccagcttatactcctgaaccaattcaaagcggggacttgttatatgaaatttcttatgctggaatagaagcacagcctgctacatttctccatgatctctgtgaggaagcaccatgcccagtacctgcaggcaactttgtgctcgttcacaccgaattattgcct

SEQ ID NO: 11335 - DNA, 385 bp, Glycine max
  Clone ID: LIB3039-011-Q1-E1-C9
gactcaccaggtgcaccaacagagcccacgccctatacaaccaaaccctaacacacacccatttgattcactttccatggctagcctcaaggttgcatttttggctgcagtgctctgcatggttgtggtgagtgcacccatggcacatgcagctatcacgtgcgggcaggtgacgaatagcctgatcaattgcatcggttacctccagaacggaggaatgccgccgtcgggatgctgcaacggtgtgaagagcctcaatgccgccgccaagaccaccgccgaccgccagacggcgtgcaactgcctcaagtcggccgccagccaaatctccggcttcaaagccaacaacgccgcctcgctcgccggcacatgcggagtctccatc

SEQ ID NO: 11336 - DNA, 397 bp, Glycine max; identical to SEQ ID NO: 7408
  Clone ID: LIB3039-007-Q1-E1-F5

SEQ ID NO: 11337 - DNA, 401 bp, Glycine max
  unsure (1)..(401): unsure at all n locations
  Clone ID: LIB3039-007-Q1-E1-F6
gaagcaaagtcgcaaattctcctcctacaccaacaaaaatggcaccttctccacaagaaatcatcttccgatccccactccccgatattcccatccccacacatctcccattgtactcttactgcttccaaaacttgtcaaagttccatgaccgtccatgcctcatcgacggcgacaccggcgagaccctcacctacgccgacgtcgacctcgctgctcgccgcatcgcctccggcctccacaaaatcggcatccgccagggtgacgtcatcatgctcgtcctacgcaactgcccgcagttcgccctcgccttcctcggcgccacccaccgtggcgccgtcgtcnacacagccaaccccttctacacgccggcggaacttgcgaagcaggcgacggccacg

SEQ ID NO: 11338 - DNA, 366 bp, Glycine max
  Clone ID: LIB3039-007-Q1-E1-F7
gattgttggcttgtgctctgctcgtgcctctagggttatcatatctccatttccatttcctctctctcagtttccaagaatcttaagctatgggaaagtcttacccaaccgtgagcgttgattaccagaaggccgttgagaaggcgaagaagaagctcagaggcttcatcgctgagaagagatgcgctcctctaatgctccgtttggcatggcactctgctggaacttacgacgtgagctcgaagaccggtggtcccttcggaaccataaagcacccctccgaactcgctcacggcgctaacaacggtcttgacatcgctgttaggcttttggggccaatcaaagcggagtttcctaatttgagct

SEQ ID NO: 11339 - DNA, 400 bp, Glycine max
  unsure (1)..(400): unsure at all n locations
  Clone ID: LIB3039-007-Q1-E1-F8
gacacaccgtttgttctattcttaactcaacttctgctacccactctcttcttccaagtccaaccacgcttttctctacagtcatgggcaaggtcaagatcggaatcaacggatttggaagaattggccgtttggttgccagagtcgctctgcaaagagacgatgtggagctcgttgccgttaacgaccctttcattaccaccgattacatgacatacatgtttaaatacgacagtgttcacggacactggaagcatcacgatgtcaccgttaaggacgagaagacccttctcttcggtgacaagccagtcactgtttttggacacaggaaccctgaagagatccatggnggtcaactggagctgatatcattgttgagtccacgggagttttcaacgat

SEQ ID NO: 11340 - DNA, 372 bp, Glycine max
  unsure (1)..(372): unsure at all n locations
  Clone ID: LIB3039-007-Q1-E1-G1
gacagcatatatatcaataatctattttatactatacctacattttgataattttctttgtagttgatagccatggctacccgtggaaagcttgaggttgacattgatctcaagtccaacgcagacaagtactggcaaacccttaggaattctactgaaatattccctaaggccttcccacatgattacaaaagcattgaggttcttgagggtgatggcaagtctcctggttctatccgccacataagttatggtgaaggttcaccacttgtgaaatcatcctttgagaagattgaggctgttgatgangaaaagaaggtantgtcgtacactatcattgatggggaactcctccagcactacaanacattc

SEQ ID NO: 11341 - DNA, 398 bp, Glycine max
  unsure (1)..(398): unsure at all n locations
  Clone ID: LIB3039-007-Q1-E1-G10
gcacaagtttgttgagatagctagaagcaataagatgaaaatgaaagtgcttgttttgtttgttgctacagttttggtagcatatgaatgccatggctcagactaccagaagttccctctccaaatgaaaactgggtttggtgggcaatacagcaatgaggtggcatgtgccagttggaggcttggcgtggaagcaaacaacgtagtcaagtggcaaactgttcctgcagcttgcggagagtacatagctgactacgttctaggagaccaatatagatcagattccaaaacagttaaccaacaagcttatttctatgctaaatccctcaaactcaccaacanagatgttcttgtcttggacgttgacgacactactctctctaatcctcagtattttg

SEQ ID NO: 11342 - DNA, 390 bp, Glycine max
  unsure (1)..(390): unsure at all n locations
  Clone ID: LIB3039-007-Q1-E1-G11
ggcacaattttgttgaaatacctaaaagcaataagataaaaatgaaagtgcttgttttgtttgttgctacagttttggtagcatatgaatgccatggctcagactaccagaagttccctctccaaatgaaaactgggtttggtgggcaatacagcaatgaggtggcatgtgccagttggaggcttggcgtggaagcaaacaacgtagtcaagtggcaaactgttcctgcagcttgcggagagtacatagctgactacgttctangagaccaatatagatcagattccaaaacagttaaccaacaagcttatttctatgctaaatccctcaaactcaccaacaaagatgtctttgtcttggacgttgacgacactactctctctaatctcc

SEQ ID NO: 11343 - DNA, 377 bp, Glycine max; identical to SEQ ID NO: 10721
  Clone ID: LIB3039-007-Q1-E1-G12

SEQ ID NO: 11344 - DNA, 423 bp, Glycine max
  Clone ID: LIB3039-007-Q1-E1-G2
acggctgcaaaaaacaacaaaagggcaaggacaaaacgttgaaaaaccgcagtgggccggctaaaatgccttacgctttgctctatccttctagtgaggagggattgactttcagaggaattcccaacagtatctccatctatgggctctatggttgttgcagtactttccctggttttcaataaaagtgaatagaaggaatatgattccttcatctacctatgtatggttaagttatgtatttggggtgattgaatgttctcgtgtttgctgttaagtgttaatgaagaaattctgtctgtataaattgctgttaagtgttctcgcgcatgtttcaacaatgatagctggcatggcaaagtgcaaactagaataaatcatcatcttatgtaaacgatttccattacagcaagggttgtccct

SEQ ID NO: 11345 - DNA, 399 bp, Glycine max
  Clone ID: LIB3039-007-Q1-E1-G3
gaaggtgcaagagtttgttgtgagctataagctagtttatcgtgaggagaatatgaagttgtttgttttctttgttgctgcagtagttttggtagcatggccatgccatggcgcatgctaccaaaggttccctctccgaatgaaaactggctatggtgagcgttcttcggaggtaaaatgcgcaagttttaggcttgctgtggaagcacacagcatccgagcctttaaaaccattcctgaagagtgcgttgaaccaacataggactacattaatggcgaacaatttagatcagactctaaaacagttaaccaacaagctttcttttatgctagtgaacgcgaagtccatcacaacgacatatttatattcggcatagataacaccgtactctctaatat

SEQ ID NO: 11346 - DNA, 306 bp, Glycine max
  unsure (1)..(306): unsure at all n locations
  Clone ID: LIB3039-007-Q1-E1-G4
cggatgcaaaaaaacaacaaaaggggatcgttctcaaacttgtgattattcctccctttaacaatccacacccaaattctaaggttccgaaatggacgctggcggaaagatcaagaagggcgccggaggtagaaagggcggcggcccaaagaagaagccggtttcaaggtccgtcaaagccggtctccaattccccgtcggaagaattggccgttatttgaagaaaggaaggtacgctcagcgtgtcggtaccggtgctcccgtatacttggctgcagttctcgaatacctagctgccgangtgct

SEQ ID NO: 11347 - DNA, 397 bp, Glycine max
  unsure (1)..(397): unsure at all n locations
  Clone ID: LIB3039-007-Q1-E1-G6
ggcacaagtgagtttgttgatcgagataactagaaacagtgtgatgaaaatgaaggtccttgttttcttcgttgctacaattttggtagcatggcaatgccatgcgtacgatatgttccctctccgaatgaacactggctatggtgcccgtactccggaggtgaaatgcgcaagttggaggcttgctgtggaagcacacaacatctttggctttgagaccattcctgaagagtgcgttgaagcaacaaaggaatacatccatggcgaacaatatagatcagactccaaaacagttaaccaacaagcttacttttatgccagagacctcgaagtccatcccaaggacacatntgtgttcagtatagatggcaacgtactctctaatatttcatactac

SEQ ID NO: 11348 - DNA, 406 bp, Glycine max
  Clone ID: LIB3039-007-Q1-E1-G7
gattgttggcttgtgctctgctcgtgcctctagggttatcatatctccatttccatttcctctctctcagtttccaagaatcttaagctatgggaaagtcttacccaaccgtgagcgctgattaccagaaggccgttgagaaggcgaagaagaagctcagaggcttcatcgctgagaagagatgcgctcctctaatgctccgtttggcatggcactctgctggaacttacgacgtgagctcgaagaccggtggtcccttcggaaccataaagcacccctccgaactcgctcacggcgctaacaacggtcttgacatcgctgttaggcttttggagccactcaaagcggagtttcctattttgagctacgccgatttctaccagttggctggcgttgttgccgttga

SEQ ID NO: 11349 - DNA, 374 bp, Glycine max
  Clone ID: LIB3039-007-Q1-E1-G8
gacctatcaagttaatttgcgtctatattcattttggcatcgaggttgaatctcatcggagagagaaaaaccataaccatgtctggaagaggaaagggaggcaagggtctcggaaagggaggagcgaaacgacaccgtaaggttctgagggataacattcagggcataacgaagcccgtaattcgccgtctcgcgagacgtggcggcgtgaagcgtatcagtggtctcatctacgaagaaacccgcggtgttctcaagatcttcctcgagaacgtcattcgcgacgctgtcacctacactgagcacgctcgccgcaagaccgtcactgccatggacgttgtttacgccctcaagaggcaaggcaaagacctcta

SEQ ID NO: 11350 - DNA, 421 bp, Glycine max
  Clone ID: LIB3039-007-Q1-E1-G9
tctgcaaaaagacaacagaaggggaggaacaagaagcgaaaatataacaaataatttgtactttcatcaaaacaaaatcccgttgtatttttctcagatggctcgaacgaagcaaacggcccgcaagtccaccggcggcaaggcgccgcggaagcagctggcgactaaggcggctcgcaagtcggctccggcgaccggcggcgtgaagaagccgcacagattcaggccgggaaccgtggcgctgcgcgagatccggaagtatcagaagagcacggagctactcatccggaagcttccgttccagcgcttggtccgcgagatcgcgcaagacttcaagaccgacctccggttccagagctccgccgtctccgcgctccaggaggccgccgaggcttacttggtcggtctcttcgaagacacg

SEQ ID NO: 11351 - DNA, 328 bp, Glycine max
  Clone ID: LIB3039-007-Q1-E1-H1
ggcacaagtgagtttgttgatcgagataactagaaacagtgtgatgaaaatgaaggtccttgttttcttcgttgctacaattttggtagcatggcaatgccatgcgtacgatatgttccctctccgaatgaacactggctatggtgcccgtactccggaggtgaaatgcgcaagttggaggcttgctgtggaagcacacaacatctttggctttgagaccattcctgaagagtgcgttgaagcaacaaaggaatacatccatggcgaacaatatagatcagactccagaacagttaaccaacaagcttacttttatgccagagacctc

SEQ ID NO: 11352 - DNA, 358 bp, Glycine max
  unsure (1)..(358): unsure at all n locations
  Clone ID: LIB3039-007-Q1-E1-H10
ggccgaaaaccctaacaacacaggcgcagagcgtgatccattgacgaagatggtgcagcgtctcacctaccgcaagaggcacagctatgccaccaaatccaaccaacacagggtcgtcaaaacccctggtgggaagctcgtttatcagaccaccaagaagagggccagcgggcccaagtgccccgtcactggcaagaggattcaggggattccacacttgaggcctgcagagtacaagagatcaaggttacccagaaaccgtaagactgtcaaccgtgcatatggcggagttttgtctggaagtgctgtcanggagaggattatccgagctttcttagatgaagagcacaagattgtg

SEQ ID NO: 11353 - DNA, 390 bp, Glycine max
  unsure (1)..(390): unsure at all n locations
  Clone ID: LIB3039-007-Q1-E1-H11
ggagcaaaaccctaatccctatttttcttcctcagtagtgtcatttacgcttctcttctctgcagcaactatgcctaaccctaaggtcttcttcgacatgaccatcggcggtcaatctgctggccgcatcgtgatggagctctacgccgacgtcactccccgcaccgccgagaacttccgcgcgctttgcaccggcgagaagggcgtatggcggagcggcaagcccctccactacaagggctcgtccttccaccgcgtgatcccgagcttcatgtgtcagggtggcgacttcaccgccggaaacggaaccggcggcgagtcgatttatggcgccaagttcgccgacgagaacttcgtgaagaagcacaccggtcncggcatcctctccat

SEQ ID NO: 11354 - DNA, 341 bp, Glycine max
  Clone ID: LIB3039-007-Q1-E1-H12
ggggcacaagtgcaatttgcttgatcgtagataactacaatacagtgtgattaaaatgcacgtccctgcattcatcattgctacaactttggtcgcatggcactgccatacctacgataagttccctctccgaatgaacactggctacggtgcccgtattccggaggtgaaatgcgcaaattggaggcttgctgtgaaagcacacaacatctttggctttgagaccattcctgaagagtgcattgaatcatcatacgaatacatccatggcgaccaatatagataggctccaacataattaaccaacaagcttacttttatgccacagacctcgaagtcca

SEQ ID NO: 11355 - DNA, 295 bp, Glycine max
  Clone ID: LIB3039-007-Q1-E1-H2
gacccacacgtcaagctgggagaacaacagaagggggaacctttgcattcaattcattcaaaattcagcaagtgctttttggaagcatagaccgagatacttcgagatggcccgtataaagcagggtgggcgtaagtcaactggaggaaaagctctcacgaagcatcttgcaacaaatgctgcacgtaagtcggcagcaataatcggtggtgtgatgaaccctcatcatgattgccgtggaagtgtagaacatcctaacattaagaactattccagtagcactgatctcctaatc

SEQ ID NO: 11356 - DNA, 407 bp, Glycine max
  Clone ID: LIB3039-007-Q1-E1-H3
gaagatggttgaagaagtacgcaggcaattcaacaccattccagggttgatggagggaactgctaagcctgactatgccacatgtgttaagatctccactgatgcttccattaaagaaatgattccacctggtgctcttgtcatgcttacaccgcttgttgttggaatcctttttggtgttgaaacactttctggtgtcctagctggatctttggtgtctggtgtacagattgctatttctgcatccaacaccggtggtgcttgggataatgccaagaagtacattgaggctggtgcttctgagcatgcaagaagccttggtccaaaagggtcagattgtcacaatgcagctgttattggtgacaccattggagaccctctaaaggatacatctggaccttcactta

SEQ ID NO: 11357 - DNA, 388 bp, Glycine max
  unsure (1)..(388): unsure at all n locations
  Clone ID: LIB3039-007-Q1-E1-H4
gagagaaccaaagttccaattttttggtttggggatagatagagtgatacacatcacattttctcaaagtaatttattaattaataaataaatggcggcggcggcggcagtgacggtgctactcccacctaggattccgancgccaccaacgttacccgctgctctgctttgccttctctgcctcctcgcggcaccaacacgaaaaacactttgctcttatcctccctaaacacttcccagtgtnccgaagatcttctctgcttcagaacatagcttctccagaggaatcatcctcagtagatgccaatgaggtgttcacagaatttaaaggaaaattgggatgctcttgaaaacaagtccaaagtacttttttatggtggtgggggc

SEQ ID NO: 11358 - DNA, 385 bp, Glycine max
  unsure (1)..(385): unsure at all n locations
  Clone ID: LIB3039-007-Q1-E1-H5
ggctgtgagtgagacaccgatagatagagagcgcggcataacctaaacctatctttcttctctctctgtgtgtgcgcttcaacgggaaccagaagcagccatggccactgcaaggactgtgaaggatgtttcacctcatgagttcgttaaggcgtactcctctcacctcaagcgatccggcaagatggagctgccagagtggactgatattgtgaaaactgcaagatttaaggagttggctccttatgatcctgactggtactatgtcagagctgcttccatggcaagaaagatctacttgagaggaggacttggtgttggtgcctttcaaangatttatggtgggagcaagaggaatggtagtcgccctcctcatttttgcaag

SEQ ID NO: 11359 - DNA, 394 bp, Glycine max
  Clone ID: LIB3039-007-Q1-E1-H6
cagggaaggtgcaagagtttgttgtgagctataagctagtttatcgtgaggagaatatgacgttgtttgctctctttgttgctgcagtagttttggtaacatggccatgccatggtgcaggttaccaaaggttccctctccgactgaaaactggctatggtgagcgttcttcggtggtaaaatgcgcaagttttaagcttgctgtggaagcacacaacatccgagcctttaaaaccattcctgaagagtgcgttgatccaacacaggactacattaatggcgaacactttagatcagactctaaaacagttaaccagcaagctttcttttatgctactgaacgctaagtccatcacaacgacatatttatattcggcatagataatatcgtact

SEQ ID NO: 11360 - DNA, 407 bp, Glycine max
  Clone ID: LIB3039-007-Q1-E1-H7
gagagacaagctcgcaaagagaagaaacttgctaaaagcatgaccccatcaaagcgtgctttggcaagacagacagagagtccatcttctttgaagaagcgcaagcagttaaccatggacgattatgcaagcacggggaaaagaagaaaataaatgaacatatgttctatattgcgtaggataaggggttgttgggttttaaaagccttggtgattttgatgtggcccggacatgacaactgatggtcaggcttgtcttccaaaagccgtgctaccaacctgacttatgtaggctccaattatctgtcgtatggctagttagagaatatcatgtagaaatgggatgttgtattgtcagtatgtatatctacaaaaaaatccttagatttgaacagctagtgaaatga

SEQ ID NO: 11361 - DNA, 237 bp, Glycine max
  Clone ID: LIB3039-007-Q1-E1-H8
tccaaaagggtgcactcgtcactctgctgctcgcgatatctagtaacagtgtgatgcgaatgaaaggccttgttctcatcgttgatactcttttggtagcatggcaatgccatgcgtacgacatgtaccctcccccgatgaatgctggctgaagtgcccgtacaccagaggtgacatgcgcaagttggaagcgtgctgttgtagcacacaacatctttggctttgagaccattcctg

SEQ ID NO: 11362 - DNA, 394 bp, Glycine max; identical to SEQ ID NO: 7948
  Clone ID: LIB3039-007-Q1-E1-H9

SEQ ID NO: 11363 - DNA, 214 bp, Glycine max
  Clone ID: LIB3039-008-Q1-E1-A1
gacaccgattcgcataacaagaaacaatcgatcatagtttcacgtcggccttatccactttacggtttcggttctctacactaactttcacgtatcgaatccttacatttcacatcaggtcagagcaatctggttggtagaacctttggtcttagtcactcaagttttacgtccgaattaaacgatcaaaatcctactgccttcgatccttctg

SEQ ID NO: 11364 - DNA, 391 bp, Glycine max
  Clone ID: LIB3039-008-Q1-E1-A10
ggtcacttaatccaaatacaaaagctatcctcacaccccataaaatcacaatgacaacaaaaacaacttctctcctcctccttcatgtaattctcctcgccacggcggaagccgccgccgccggcggccactggaaggtcctccagcaaagcatcggcattgtggccatgcacatgcagctcctctacaccgacacggtggtgatcttcgaccgcaccgacttcggcctctccaacctctccctccctgacggcctctgccgccacgacgccgccgagatggccgtgaaaaccgactgcaccgcccactccctcgaatacgacgtctcctccaacaccttccgccccctcttcctccagaccaatgtctggtgctcctccgcctccgttgc

SEQ ID NO: 11365 - DNA, 358 bp, Glycine max
  Clone ID: LIB3039-008-Q1-E1-A11
ggagcaaaaccctaatccctatttttcttcctcagtagtgtcatttacgcttctcttctctgcagcaactatgcctaaccctaaggtcttcttcgacatgaccatcggcggtcaatctgctgggcgcatcgtgatggagctctacgccgacgtcactccccgcaccgccgagaacttccgcgcgctttgcaccggcgagaagggcgtatggcggagcggcaagcccctccactacaagggctcgtccttccaacgcgtgatcccgagtttcatgtgtcagggtggcgacttcaccgccggaaacggaaccggcggcgagtcgatttatggcgccaagttcgccgacgagaacttcgtg

SEQ ID NO: 11366 - DNA, 392 bp, Glycine max
  Clone ID: LIB3039-008-Q1-E1-A12
ggcacttcaattgcaatcaaattagttcattctctttgcgcagttccctacctctcctttcaagatgcagatcttcgtcaagaccctcaccggaaagagcatcacccttgaggtggaaagctctgacaccatcgacaacgtcaaggccaagatccaggacaaggaaggaattcccccggatcagcaacgtctcatcttcgccggaaagcagctcgaggacggccgtaccctcgccgactacaacatccagaaggagtcaacccttcaccttgtccttcgtctccgtggtggcatgcagatcatcgtcaagactctcactggcaaaaccataaccctagaggtcgaaagctctgacaccattgacaacgtcaaggccaagatccaggacaagg

SEQ ID NO: 11367 - DNA, 411 bp, Glycine max
  unsure (1)..(411): unsure at all n locations
  Clone ID: LIB3039-008-Q1-E1-A2
aacgacagaaggggacagcatatatatcaataatctattttatactatacctacattttgataattttctttgtagttgatagccatggctacccgtggaaagcttgaggttgacattgatctcaagtccaacgcagacaagtactggcaaacccttaggaattctactgaaatattccctaaggccttcccacatgattacaaaagcattgaggttcttgagggtgatggcaagtctcctggttctatccgccacataagttatggtgaaggttcaccacttgtgaaatcatcctttgagaagattgacgctgttgatgangaaaagaaggtantgtcgtacactatcattgatggggaactcctccagcactacaaaacattcaagggagacatttcagtgactccaat

SEQ ID NO: 11368 - DNA, 358 bp, Glycine max
  Clone ID: LIB3039-008-Q1-E1-A3
gatcgaagcaaaaaatgaaaacccaaagtgcttctctcctctgtctttttctctctcttgctatccttttggctagtggcactgctgcaggtgcaactccaagaaacgcagtgccaagccaccatgtttcaacattcaacagaagcctttttccttccacttttcactttggaattggttcatctgcttaccaggcagaacgagcagcatgtgtagatgggagaggaccaagcatatgggacacctacactatacagcatactgaaaacatttgggatcattacaccggtgacatgggaactgatttttatcatcgatacaagggtgacataaaaatagcgaaagaaaatgggctgga

SEQ ID NO: 11369 - DNA, 399 bp, Glycine max
  unsure (1)..(399): unsure at all n locations
  Clone ID: LIB3039-008-Q1-E1-A4
gattgttggcttgtgctctgctcgtgcctctagggttatcataactccatttccatttcctctctctcagtttccaagaatctgaagctatgggaaagtcttacccaaccgtgagcgctgattaccagaaggccgttgagaaggcgaagaagaagctcagaggcttcatcgctgagaagagatgcgctcctctaatgctccgtttggcatggcactctgctggaacttacgacgtgagctcgaagaccggtggtcncttcggaaccataaagcacccctccgaactcgctcacggcgctaacaacggtcttgacatcgctgttaggcttttggagccactcaaagcggagtttcctattttgagctacgccgatttctaccagttggctggcgttgttg

SEQ ID NO: 11370 - DNA, 385 bp, Glycine max
  Clone ID: LIB3039-008-Q1-E1-A5
ggccattgttgttgctattatcatccgcagctgcttttattcgcaccgcaaacagtgagccatggccgtcggaaagaacaagcgcatctccaaggggaagaagggtggcaagaagaaggcagctgatccctttgccaagaaggattggtatgacattaaggctccttctgtttttcaagtgaaaaatgttggcaaaaccctcgcctctcgtactcagggtaccaagattgcttctgaaggactcaagcatagagtgtttgaggtctccttggctgatcttcaaggggatgaggatcatgcattcaagaagattaggttgagagctgaagatgtgcaagggaagaatgttctgacaaatttctggggaatggatttcacaacagac

SEQ ID NO: 11371 - DNA, 396 bp, Glycine max
  Clone ID: LIB3039-008-Q1-E1-A6
gaaggtgcaagagtttgttgtgagctataagctagtttatcgtgaggagaatatgaagttgtttgttttctttgttgctgcagtagttttggtagcatggccatgccatggcgcaggctaccaaaggttccctctccgaatgaaaactggctatggtgagcgttcttcggaggtaaaatgcgcaagttttaggcttgctgtggaagcacacaacatccgagcctttaaaaccattcctgaagagtgcgttgaaccaacagaggactacattaatggcgaacaatttagatcagactctaaaacagttaaccaacaagctttcttttatgctagtgaacgcgaagtccatcacaacgacatatttatattcggcatagataacaccgtactctctaa

SEQ ID NO: 11372 - DNA, 392 bp, Glycine max
  unsure (1)..(392): unsure at all n locations
  Clone ID: LIB3039-008-Q1-E1-A8
ggcattatatttgagttcacacaaatcagagccatggacacctccaacttctctattgttctctccgtctctctaaccttctttttggtgctacttaccaaggcacactcgaccgataccgtttctttcaccttcaccacgttcatcccagtccaaccaaacattatgctccaaaaagatgctagtatttcatcctctggggtgttacaactcactaaagttggcagcaacggcgtgcccatctcgggatctctcggtcatgccctttacgctgctccaatccagatttgggacagcgaaaccggcattgtanccagctgggctacatcctttatattcaacattttcgcactcaacacatcacactcatctgacgggcttgccttcttctt

SEQ ID NO: 11373 - DNA, 289 bp, Glycine max
  Clone ID: LIB3039-008-Q1-E1-A9
gactacgagaggaagcgaaaggaatcacaatcacgttttgcgacaaaatgagaaacagcgctttcggtttaagcagcaccgttaacaatgtttttcatattggattcggggtaggcacggacatccgcctgagattgctcacccaaaacctctggtctcctcttctgatctcacagagttccctaatctccctcgcactttcgacgacgttcgctctccactccaactcaaatttagccatcaacccctacccaattactttgacttctagcaaatcggaccttgcact

SEQ ID NO: 11374 - DNA, 334 bp, Glycine max
  Clone ID: LIB3039-008-Q1-E1-B1
gatccatactcaaaatacataaatggagagagtagctaaggtgttggtgatgttgagcatggtggtgttggtgcttgcatcaaatgctgaagggggacgattacttgaggaagagaatgtggatcagccccagaccttccttggatcaggtggaggccttggtgggatatttccaagcccaagcccatgcttcagcttcaccggcgtgggctttggcccatctgggttttgcactttccctggtggttgcaccggtactccttctttgcccactaatcccggtgctggtgggtcactaccagtaccaacacatgcataaggaaatggctttggt

SEQ ID NO: 11375 - DNA, 390 bp, Glycine max
  Clone ID: LIB3039-008-Q1-E1-B10
ggagcgaagaagatattagggtttttgagtgcggtgcggcgatcctagcactctcttctgcagctttcgccgacagcttcattcaccatggctgagcaaaccgagaaggcttttttgaaacaaccaaaagtgtttctcagctcgaagaaaactgggaagggaaagatacccggaaagggtgggaaccgcttttggaaatccattgggcttggatttaagactcccagggaagccatcgaaggaacctacattgacaagaagtgccccttcactggcaatgtttccatccgtggccgtatcttggctggaacatgtcacagtgctaagatgaacaggactattattgttaggaggaattatctccattttatcaagaagtaccagaggtac

SEQ ID NO: 11376 - DNA, 359 bp, Glycine max
  Clone ID: LIB3039-008-Q1-E1-B11
ggagcgaagaagatattagggtttttgagtgcggtgcggcgatcctagcactctcttctgcagctttcgccgacagcgtcattgggcatggatgagcaaaccgagaaggcttttttgaaacaaccaaaagtgtttctcagctcgacgaaaactgggaagggaaagatacccggaaagggtgggaaccgcttttggaaatccattgggcctggatttaagactcccagggaagccatctaaggaacctacattgacaacgatcatgccccttcactgggaatgtttccatccgtggccgtatcctggctggaacatgtcacagtcctgacatgaacaggactaatagtgttaggaggaat

SEQ ID NO: 11377 - DNA, 387 bp, Glycine max
  Clone ID: LIB3039-008-Q1-E1-B12
ggcacaagtttgttgagatagctagaagcaataagatgaaaatgaaagtgcttgttttgtttgttgctacagttttggtagcatatgaatgccatggctcagactaccagaagttccctctccaaatgaaaactgggtttggtgggcaatacagcaatgaggtggcatgtgccagttggaggcttggcgtggaagcaaacaacgtagtcaagtggcaaactgttcctgcagcttgcggagagtacatagctgactacgttctaggagaccaatatagatcagattccaaaacagttaaccaacaagcttatttctatgctaaatccctcaaactcaccaacaaagatgtctttgtcctggacgttgacgacactactctctctaatc

SEQ ID NO: 11378 - DNA, 381 bp, Glycine max
  unsure (1)..(381): unsure at all n locations
  Clone ID: LIB3039-008-Q1-E1-B2
gactcatccttcattaccaagcatatctcatttgaatacattccttgtagtttatactgaaagatgggtttgaagatggcgttactgatcctaggcctttccctcatgctccttttggtctcctctgaggtggcatccacgaatacaaaagaggaggcaaatggagtggatgatgccaaatatcccggtggaagctatggagggggttacccaggtcatggcggtggcggttatcctggccatggcggtggcggttatcctggccatggcggtggtggtggctatcctggtcatggtggtggccaccctggtcatggtggcggctaccctggccgtggtggtggatactgtangcatggctgttgcngtggccggacatac

SEQ ID NO: 11379 - DNA, 343 bp, Glycine max
  Clone ID: LIB3039-008-Q1-E1-B3
tcgggacacacagagcggttctcatattttggagaatccgaataacacgttaaagaaagtcccattcccactaccgaggcagattaggaagatgaagcagcacagagtggagtttatgggcatgggcatgggcatgggcatgggcctgggccttttggtggtgatgatggcatgtgggtctgcgagtggtgcggatgatttggcaaccaagtgttcagcggtgattcataaggtaataccgtgtttggatttcgcgaatgggaatgaagaaacgccgaaaaagcaatgttgcgacgcagcaacgtccataaaggagagcaacccacagtgcctctgctacatc

SEQ ID NO: 11380 - DNA, 212 bp, Glycine max
  Clone ID: LIB3039-008-Q1-E1-B4
gaaacaaagtctcttctacgggcaattccttcggcgttatgatctcaccagtcccgtcaggcgcctgaaccttgtcctccatcgggcatggctgagaacagccacagggagtttttgcaatcgccacccttgtctctgagcacgacgtaggctccgtcgcggaaggcagacagctgaggtgggagatgcatctgtgcatcgaatgctgttcg

SEQ ID NO: 11381 - DNA, 374 bp, Glycine max
  Clone ID: LIB3039-008-Q1-E1-B5
ggaaggcagtaaaatgggctggctgtaaggcccaatttgaatagaaggaacagtcgcggagaggttgcagtcggcgacgaaggaagcggggttaactctccggaccagaaggaacaagaaagatcatctttaatgatttgttactagtgagaagacctcaaagctcttataccagacatttgcgagttatgaacaatattttgtctttgggaatatgcatggattctcccctgttgatggttttgtggagataagcaattgcttggcagaagtgattaaatatgtgggtaatgaatcgtctactggtctcttctttatccaacatcacacccaaaacgcagtccccaatgtcatcaaacttaagaacaacatta

SEQ ID NO: 11382 - DNA, 390 bp, Glycine max
  Clone ID: LIB3039-008-Q1-E1-B6
ggaagcagcggaaacaaacatgtcgtggtgttactgcgctaagcctatgactttgcagttgccgttgcaatcaagagcagcatcatcgttccattcccacgttggaggagtaacagtaacattctcaacactgtctcttcgaccctcttctcctcttgttctgacccataacctccacttccaacccaaactcaaacgcgcttccacaaccattcgctgctcctctgcgttgactcctcaattgaagtctaccttggatcaagttattgcttcaaataaagtagttgtgtttatgaagggaactaaagactttccacagtgtggattctcaaacacagtggtgcaaatattgaagtccctaaatgtgcctttttgaaccataaatgtgct

SEQ ID NO: 11383 - DNA, 356 bp, Glycine max
  Clone ID: LIB3039-008-Q1-E1-B7
gaccacattccaaaacacagacacatacattgtagtatcacttttgtctcggaatttgttcttttgagttatggcaagcttaaaggttgcatgtgtggttttgatgtgcatggctgtgatgagtgcaccaatgatggtgcaagccgtgtcatgcaatgatgtttctgtgaacctagcaccgtgcctatcttacctgatgcagggtggagatgttccagaatcgtgctgtagcggagtgaggaacattctgggttctgccagcaccacctttgacaaacaaaccgtgtgcaaatgtcttcagcaagctgctaataactatggcatcaacgacgaatacgctcaggcactccccgccc

SEQ ID NO: 11384 - DNA, 321 bp, Glycine max
  Clone ID: LIB3039-008-Q1-E1-B8
ggcacaagtgagtttgttgatcgagataactagaaacagtgtgatgaaaatgaaggtccttgttttcttcgttgctagggttttggtagcatggcaatgccatgcgtacgatatgttccctctccgaatgaacactggctatggtgcccgtactccggaggtgaaatgcgcaagttggaggcttgctgtggaagcacacaacatctttggctttgagaccattcctgaagagtgcgttgaagcaacagaggaatacatccatggcgaacaatatagatcagactccagatcagttgagcaacaggcttacttttatgccag

SEQ ID NO: 11385 - DNA, 359 bp, Glycine max
  Clone ID: LIB3039-008-Q1-E1-B9
gacactaaacaagttaaaagaagagcatcactgaactaacaaagcaaccctatgtcgaaggtggtttgtgtcaccggagccagcggcgccatcggatcatgggtggtcctactcctcctccagcgtggttacaccgtccatgccaccgtccaagatatcaaggatgaaaatgagacgaaacatttggaggaaatggaaggagcaaagagtcatctccatttttttgaaatggatcttcttgacatcgactccattgccgctgccataaagggttgttccggcgtaatccaccttgcatgtcctaacatcattggtcaagtcgaagatcccgagaaacagatattggaaccggcgataaa

SEQ ID NO: 11386 - DNA, 346 bp, Glycine max
  unsure (1)..(346): unsure at all n locations
  Clone ID: LIB3039-008-Q1-E1-C1
ggcacaagtttgttgagatagctagaagcaataagatgaaaatgaaagtgcttgttttgtttgttgctacagttttggtagcatatgaatgccatggctcagactaccagaagttccctctccaaatgaaaactgggtttggtgggcaatacagcaatgaggtggcatgtgccagttggaggcttggcgtggaagcaaacaacgtagtcaagtggcaaactgttcctgcagcttgcggagagtacatagctgactacgttctangagaccaatatagatcagattccaaaacagttaaccaacaagcttatttctatgctaaatccctcaaactcaccaacaaaga

SEQ ID NO: 11387 - DNA, 392 bp, Glycine max
  Clone ID: LIB3039-008-Q1-E1-C10
gacattgactgaagccagcgagtgagcgagcgagcgaggtagggttttcgttgttcccccgtctttgaattcagttcgcgacgatggggtccatccccgatccaggcgagttgagcgagttgactcagccgagcttcgacgagttccagcgccaaacttccctcatgaccagctgcaccctcctctggaaggagctctccgaccacttctcctccctcgagcaagacctcaaccacaaatccgaagccctcaaacgcaagattcgcaccctcgacaacactacttccgactccctccgcctcctcgatcgccgcgaaacctccctcgacgccacgctccagatcgccctccgcacgctcgacacgcgccgcaccgctgccctctccgccctc

SEQ ID NO: 11388 - DNA, 388 bp, Glycine max
  Clone ID: LIB3039-008-Q1-E1-C11
gacttgcggctgcagcagagaagcactcatcattcttcgtttgtctaagatccgccttctctgaattgtaaaaatgtcgctcggagaaactgcttgttcatacgcagctctcatccttcatgaagatggaatcagtgtaactgtatccttttgtgtgcccttaggttttgcgttaacgaattgtgagtgaatgttcgaaataatttaatttctttgttttgggttatgttttctagtgttagtttagatttaattcaattgaagaaccgagtaattggtattaaatcaaaactaaaaaaaagtttctgtgaagtaatttttattgaaaatgtggttccaatttaacctgtaatttcttgttgagattcatttgtaaacaaattaaata

SEQ ID NO: 11389 - DNA, 387 bp, Glycine max
  unsure (1)..(387): unsure at all n locations
  Clone ID: LIB3039-008-Q1-E1-C12
ggcacaagtgagtttgttgatcgagataactagaaacagtgtgatgaaaatgaaggtccttgttttcttcgttgctacaattttggtagcatggcaatgccatgcgtacgatatgttccctctccgaatgaacactggctatggtgcccgtactccggaggtgaaatgcgcaagttggaggcttgctgtggaagcacacaacatctttggctttgagaccattcctgaagagtgcgttgaagcaacaaaggaatacatccatggcgaacaatatagatcagactccaaaacagttaaccaacaagcttacttttatgccagagacctcgaagtccatcncaaggacacatttgtgttcagtatagatggcaccgtactctctaatat

SEQ ID NO: 11390 - DNA, 397 bp, Glycine max
  Clone ID: LIB3039-008-Q1-E1-C2
caacaaaagggggatccacaattttgttgaaatacctaaaattaatgaaatgaaaatgaaattgcttgttttgtttgttgctacagttttggtagcatatgaatgccatggctcagactaccagaagttccctctccaaatgaaaactgggtttggtgggcaatacagcaatgaggtggcatgtgccagttggaggcttggcgtggaagcaaacaacgtagtcaagtggcaaactgttcctgcagcttgcggagagtacatagctgactacgttctaggagaccaatatagatcagattccaaaacagttaaccaacaagcttatttctatgctaaatccctcaaactcaccaacaaagatgtctttgtcttggacgttgacgacactactctctct

SEQ ID NO: 11391 - DNA, 342 bp, Glycine max
  Clone ID: LIB3039-008-Q1-E1-C3
gcagccaaagaaaagaaaatcctcaattttctgagcagccaaacactctctctctgtctctcgaaaattctcagtttgcagagaggatcggaatcatgtcgtggcaagcgtatgtcgacgatcaccttctgtgtgacatcgaaggtaaccacctcactcacgctgctatcatcggccaagacggcagcgtttgggctcagagtaccgacttccctcagttcaaacctgaggagataactgccatcatgaatgactttaatgagcctggatcacttgctccaactggattgtatctcggtggcaccaaatatatggtcatccaaggtgaacccggtgctgtca

SEQ ID NO: 11392 - DNA, 97 bp, Glycine max
  Clone ID: LIB3039-008-Q1-E1-C4
gcaaaaagacaacagaagggggagatttccattctctggcgctctgtgtctctatgatccgcttctaacggtccaaaatgttcggggcctgtgtcgc

SEQ ID NO: 11393 - DNA, 393 bp, Glycine max
  Clone ID: LIB3039-008-Q1-E1-C6
gactctgcagcagcacctttaaacgccgaaggttcatccaatctccgaaggccttcaccggattgcaaccatgtcgaggagaaaggttagagagccaaaggaggaaaacgtgactctgggcccagctgttagagatggtgaacatgtttttggagtcgctcgcatctttgcctccttcaatgacaccttcattcatgtcactgatctgtctgggagggaaacacttgtccgcatcactggcgggatgaaggttaaagctgacagagatgaatcatctccatatgctgctatgcttgctgcgcaagatgttgctgctaaatgcaaggaactgggcataactgctcttcatatcaagctccgtgccacaggtggaaacaagacaaaaacaccagg

SEQ ID NO: 11394 - DNA, 383 bp, Glycine max
  Clone ID: LIB3039-008-Q1-E1-C7
gaaggtgcaagagtttgttgtgagctataagctagtttatcgtgaggagaatatgaagttgtttgttttctttgttgctgcagtagttttggtagcatggccatgccatggcgcaggctaccaaaggttccctctccgaatgaaaactggctatggtgagcgttcttcggaggtaaaatgcgcaagttttaggcttgctgtggaagcacacaacatccgagcctttaaaaccattcctgaagagtgcgttgaaccaacaaaggactacattaatggcgaacaatttagatcagactctaaaacagttaaccaacaagctttcttttatgctagtgaacgcgaagttcatcacaacgacatatttatattcggcatagataaca

SEQ ID NO: 11395 - DNA, 395 bp, Glycine max
  Clone ID: LIB3039-008-Q1-E1-C8
gattcccaaaatttctcattctccctttcctctccgaaccctcgatcactctcacgcgctcctatattcgctcctccagcgtcgctctctcgaacaaccacaacaccatcttcatcacatggcaaacgcagcatctggtatggcagtccatgatgactgcaagttgaggtttttggagctgaaggcaaaaaggacacaccgtttcatagtttttaagattgaggagcagcagaagcaggtcattgtggagaagcttggtgagcctgcccagggctatgaagatttcactgccagccttcctgctgacgagtgccgttatgctgtttatgattttgagtatctgactgaagggaatgtccctaaaagcagaatttttttcattgcgtggtcccctg

SEQ ID NO: 11396 - DNA, 375 bp, Glycine max
  Clone ID: LIB3039-008-Q1-E1-C9
gataacaaaattttcctagaaacgttttctaatcggtcgcagagaaatgaaaaagctggcaaggaagttgcacaatgaagaagacgaaaacttatctcttccggttcacgacggagactctcgtcccttggaccctcaagagcaagaagagctggttcgttctcttgaaaggagtcaagctcagcagagtcgcttatggaggacggtatttgcagctctattcttctgttacatcgtgtttcttttgtactccatcttccagcaggcttcatctccatgggaactgcggtatcacgcttacttcatggaggagatctactcgtggatgattatatttgcagactgggtgggtgttttagcatgctcatttgccat

SEQ ID NO: 11397 - DNA, 358 bp, Glycine max
  Clone ID: LIB3039-008-Q1-E1-D1
ggcacaagtgagtttgttgatcgagataactagaaacagtgtgatgaaaatgaaggtccttgttttcttcgttgctacaattttggtagcatggcaatgccatgcgtacgatatgttccctctccgaatgaacactggctatggtgcccgtactccggaggtgaaatgcgcaagttggaggcttgctgtggaagcacacagcatctttggctttgagaccattcctgaagagtgcgttgaagcaacaaatgaatacatccatggcgaacaatatagatcagactccacaacagttaaccaacaagcttacttttatgccagacacctcgaagtccatcccaaggacacatttgtgttc

SEQ ID NO: 11398 - DNA, 382 bp, Glycine max
  unsure (1)..(382): unsure at all n locations
  Clone ID: LIB3039-008-Q1-E1-D2
ggttctagtgtgtgattgtttgttgttgtaactcgttcttcttcttttgttgttctgtgtttgtgtttgttttttctctcacctgaaaatgtcttgctgcggtggtaactgtggttgcggaagctcctgcaagtgcggcaacggctgcggaggctgcaagatgtacccagacttgagctacactgagtcaaccaccaccgagaccttggtcatgggagtggcacctgttaaggctcaatttgagggtgctgaaatgggtgtgcccgctgagaacgatggctgcaaatgtggaccaaactgctcctgcaacccctgcacttgcaagtgangtgttgggagagcaagcttcaagcagagatagcccttaattaggaataatgat

SEQ ID NO: 11399 - DNA, 385 bp, Glycine max; identical to SEQ ID NO: 10948
  Clone ID: LIB3039-008-Q1-E1-D3

SEQ ID NO: 11400 - DNA, 402 bp, Glycine max
  Clone ID: LIB3039-008-Q1-E1-D4
ggcacaattgattttgttgatcgagataactagaaacagtgtgatgaaaatgaaggtccttgttttcttcgttgctacaattttggtagcatggcaatgccatgcgtacgatatgttccctctccgaatgaacactggctatggtgcccgtactccggaggtgaaatgcgcaagttggaggcttgctgtggaagcacacaacatctttggctttgagaccattcctgaagagtgcgttgaagcaacaaaggaatacatccatggcgaacaatatagatcagactccaaaacagttaaccaacaagcttacttttatgccagagacctcgaagtccatcccaaggacacatttgtgttcagtatagatggcaacgtactctctaatattccatactacaaaaa

SEQ ID NO: 11401 - DNA, 290 bp, Glycine max
  Clone ID: LIB3039-008-Q1-E1-D5
ggttcagtcgatgattagccagatggaatatcagtattaagtttccacatcatcgtcatcacactgacaggtaacactacacccttccaggtccagagcatagataccaccgacacagtgactgacaagattcaagtgacggaatgcattcctccggatcagcagcgtttgattttcgccggaaagcagcttgaagatggaacgaccctgaccgattagatcatccagacagagtcaacacttcatctcgtgctcacgcatcatggtggcatcatatgaacttctctcat

SEQ ID NO: 11402 - DNA, 400 bp, Glycine max
  Clone ID: LIB3039-008-Q1-E1-D6
gattgggagagaggatgggtgcagaagcaaatggcggcgagaagcaattgaaatttctgatctacggtcgcagcggttggattggtggtctactgggtaagctctgcgaagagcgcgggatccaatatgagtacggcaccggcagattggagaaccgctcgtcgttggaggcggacatagcggcagtgaagcccagccacgtgttcaacgccgcgggtgtcacgggtagacccaatgtggactggtgcgaatctcacaaagttgaaaccatccgaaccaacgtcgtcggcactctcaccctcgccgacgtctgccatcataaaggcctcatcctcatcaactacgccaccggctgcatcttcgagtacgattcttcccacactctcggatccggcatcgc

SEQ ID NO: 11403 - DNA, 397 bp, Glycine max
  Clone ID: LIB3039-008-Q1-E1-D7
gaaggtgcaagagtttgttgtgagctataagctagtttatcgtgaggagaatatgaagttgtttgttttctttgttgctgcagtagttttggtagcatggccatgccatggcgcaggctaccaaaggttccctctccgaatgaaaactggctatggtgagcgttcttcggaggtaaaatgcgcaagttttaggcttgctgtggaagcacacaacatccgagcctttaaaaccattcctgaagagtgcgttgaaccaacaaaggactacattaatggcgaacaatttagatcagactctaaaacagttaaccaacaagctttcttttatgctagtgaacgcgaagtcgatcacaacgacatatttatattcggcatagataacaccgtactctctaat

SEQ ID NO: 11404 - DNA, 389 bp, Glycine max
  Clone ID: LIB3039-008-Q1-E1-D8
gatcctttgtattctattcttcaagattcaggtactgcgtttcggaagcagacacagatggctcgtacgaagcaaaccgctcgtaagtccacaggaggaaaggctcctaggaagcagcttgcaaccaaggctgcacgtaagtctgcaccaactactggtggtgtgaagaagccccaccgttatcgacctggtaccgttgctcttcgtgagattaggaagtaccagaagagtaccgagcttttgatccggaagctccccttccagaggctggttcgtgaaattgctcaggacttcaagactgatctgcgtttccagagccacgccgtgcttgcattgcaagaagctgctgaggcataccttgttgggctctttgaggacactaacctgtg

SEQ ID NO: 11405 - DNA, 387 bp, Glycine max
  Clone ID: LIB3039-008-Q1-E1-D9
gaaacatcaacatggctgccaaactcactctatcttctcccctttccttcaaaacttcatttcttccaaaatcaccatcattttctccaggtttatgctcccccagaactaatgttactggtgtcaaagtccatgctaaattaggtggtggagatgaacaagccaagaacggaggcaagaagaaattcataacaagagaggaagaaccacaacagtattggcagacagcaggagaaagagaaggagagaatcccatgaagactcctcttccttacataatcatatttggtatgtcaactccttttgttatcttggccattgcttttgcaaatggttggattaaggtgcctgttcgatgagacagcactttacttctcattctcaaac

SEQ ID NO: 11406 - DNA, 380 bp, Glycine max
  unsure (1)..(380): unsure at all n locations
  Clone ID: LIB3039-008-Q1-E1-E1
ggcacaagtgagtttgttgatcgagataactagaaacagtgtgatgaaaatgaacgtccttgttttcttcgttgctacaattttggtagcatggcaatgccatgcgtacgatatgttccctctccgaatgaacactggctatggtgcccgtactccggaggtgaaatgcgcaagttggaggcttgctgtggaagcacacaacatctttggctttgagaccattcctgaagagtgcgttgaagcaacaaaggaatacatccatggcgaacaatatagatcagactccaaaacagttaaccaacaagcttacttttacgccagagacctcgaagtcnatcccaaggacacatttgtgttcagtatagatggcaccgtactct

SEQ ID NO: 11407 - DNA, 300 bp, Glycine max
  Clone ID: LIB3039-008-Q1-E1-E10
gaatgcacaggatgatttgaatagatgactctattaacatcacagtacaagtccagtagatactgtgtctggagatttatgcgaacgatgcattcttcgacgatcaattcggtctggccgtcgatctctactctgaatccatactattggatcctagtgacgccaatctctttcgtggccatagcccaagcacagattaagctcaacgctttcactgacgccgtttccgatgccaacaattccatccacataaacccttctgtgcccaatgcctatcttcgtacatccatcgcatgtatc

SEQ ID NO: 11408 - DNA, 415 bp, Glycine max
  Clone ID: LIB3039-008-Q1-E1-E12
acccacgcgtccgagacgacagaagggggtttctaaaacactatcccttttactgtttattgacaaagagaaacaatcggaggatctgttctgttccataagatggctggacttttaggatataggagccttccacctaaggcaaagaatctggtagttgctgggggtttgacagcttttgtctttggtgcatacttctacaccatgagggctgttggaggcactgatgaactgcaggtagcaattgataagtttgaagctgacaagagcaagaatgagggtgatgccaacatgccatcaaaggtctaaagcttgtacaataaagcaatactttgggtgtattcactgttttggtttgggatcaagctttttacttagtatgagaatgttctaaaaggaatgatattgaatctag

SEQ ID NO: 11409 - DNA, 391 bp, Glycine max
  Clone ID: LIB3039-008-Q1-E1-E2
ggtaccaagatggcttcacttccatgtctcctcttttccatccatttcattgttatcatgtcaagttccttacccacaaatagtgatgaagtgtttgcaaaacagtctccaatgtctccatccacaaaacccgtggaaaaaatcacccaactacacttctatttccataacaacgtaacggagaaaaacccaactgctatgagaattgttgggcctcccaagggcttcattactcagtttgggactgttgtgatgatggatgaccctctaactgaaggaccaagtccaagttcaaagcttgttggaagatctcagtgaatctatgctttggcttctcaacatgagtttgggtcgttgctcatggtgacgaattttttcttcactgaaggta

SEQ ID NO: 11410 - DNA, 367 bp, Glycine max; identical to SEQ ID NO: 7958
  Clone ID: LIB3039-008-Q1-E1-E3

SEQ ID NO: 11411 - DNA, 366 bp, Glycine max
  Clone ID: LIB3039-008-Q1-E1-E4
gcaaaaaaacaacagaaggggggggtttcattgttgggtgctgaagcaaatttgcggtgtaccagaggcaatggaggttcaaagtctcagctttgagaataacattttgtgggttggctcttttgtggaggctttggtgcttgacactttccttgccactgccaaatctcttgcttgctttgtcatcttgactggatctctccttacggatgtcaataatttagtgtcaccgatggtggatggaaggtttcctttagaccaactgtgcaagggaaaacatacttttgaagaaaacaaagatgctagtgatacagacgatgatgatgatgacgacaatgtgaatgatggagatgacgacaatgatga

SEQ ID NO: 11412 - DNA, 393 bp, Glycine max
  Clone ID: LIB3039-008-Q1-E1-E5
gacacttcaaaatcctctagtaacccttcttttctctctctctctctcgtgttctgagctgctagaagcaatggagaggaaaagaagccatgcttctttcaccatgtttgcaatgcttgttggattgctctctcagagccttgtcattcctgtaatatccaccactgttgcagatcagaagaactactacaccccagatccacatgctggaagtccccccacaggctcacacaatagtagtcctccatctcatggccatgggagctctccaccctcacatcacaatagtccaagtactccatcaacaccctcaggtggaaactgtggatcatcacccccacaacatcatgatccaacatcctcaactccatcaacaccaatcaaacctccctc

SEQ ID NO: 11413 - DNA, 399 bp, Glycine max; identical to SEQ ID NO: 8826
  Clone ID: LIB3039-008-Q1-E1-E6

SEQ ID NO: 11414 - DNA, 291 bp, Glycine max
  Clone ID: LIB3039-008-Q1-E1-E7
gaaaagttattttgttgatccaaataactataaacagtgtgatgaaattcatggtccgtgttttcctcgatgctacaaatttggtaacatggcaatgtcatgcgtacaatattttcctcccccgattgaacactggttatggtgcccgtacaccggaagtgaaatgcgtcaaatttgaggcttgctgtgtaagcacacaacatctttggctttgagaccattcctgaaaacttcgttgaagcaacaaacgaatacatctatggcgaacaatatatatctgactctaaaaca

SEQ ID NO: 11415 - DNA, 393 bp, Glycine max
  Clone ID: LIB3039-008-Q1-E1-E8
ggtgttctattatcttcaaaatgacaaaatccttaaaaaaaagaaaactcagcattgacttaagctaccgcaccattagttcttcttggtctgaaccattaaactagactcacacgcgcacccatcaccgtctgatctcgatcgcacggacaatggcgtaccgcagcgccatcgtgcgcagagcccaagaggccagccaccgcgacacatggcgagccgctctctccgaattcatctccacactcatcttcgtcttcgccggctccggctcctccgtggccgtcaacaagctcaccgtcgacaagccctccgccctcgtcgtcgccggcgtcgcacacgccttcgccctattcgtcgccgtctctgtaagcactaacatctcaggcggccacg

SEQ ID NO: 11416 - DNA, 384 bp, Glycine max
  Clone ID: LIB3039-008-Q1-E1-E9
ggatgcacaagtttgttgagatagctagaagcaataagatgaaaatgaaagtgcttgttttgtttgttgctacagttttggtagcatatgaatgccatggctcagactaccagaagttccctctccaaatgaaaactgggtttggtgggcaatacagcaatgaggtggcatgtgccagttggaggcttggcgtggaagcaaacaacgtagtcaagtggcaaactgttcctgcagcttgcggagagtacatagctgactacgttctaggagaccaatatagatcagattccaaaacagttaaccaacaagcttatttctatgctaaatccctcaaactcaccaacaaagatgtctttgtcttggacgttgacgacactactctct

SEQ ID NO: 11417 - DNA, 391 bp, Glycine max
  Clone ID: LIB3039-008-Q1-E1-F10
ggtgctctgctcgtgcctctagggttatcatttctccatttccattttctctctcacttttcaagaatcgtaagctatgggaaagtcttacccaactgtgagtgctgattaccagaaggccgttgagaaggcgaagaagaagctcagaggcttcatcgctgagaagagatgcgctcctctaatgctccgtttggcatggcactctgctggaacctttgacaagggcacgaagaccggtggacccttcggaaccatcaagcaccctgccgaactggctcacagcgctaacaacggtcttgacatcgctgttaggcttttggagccactcaaggcggagttccctattttgagctacgccgatttctaccagttggctggcgttgttgccgtt

SEQ ID NO: 11418 - DNA, 131 bp, Glycine max
  Clone ID: LIB3039-008-Q1-E1-F11
gatactcctctcatgcatctacagtattcacatctccatttccagattcatctgacatcattacaatacttgattcctctggaacggtcggggtctcttgtgacttctgagtcttgcattgtcatcttctt

SEQ ID NO: 11419 - DNA, 216 bp, Glycine max
  Clone ID: LIB3039-008-Q1-E1-F12
ggttctctgcgcttgcctctatggttatcatttcaccatttccagtttttcgctgctccttgcattctgccactcacaaggatacgggtccaccgacatgtaaatgttccgtctctcaatgacgtcttctttaggtggacaatacagcaatgcattggtacgtgccatttagccgcttcgcttcttctcagtcaaccacctcactttgcgggctgt

SEQ ID NO: 11420 - DNA, 339 bp, Glycine max
  Clone ID: LIB3039-008-Q1-E1-F2
ggagcgaagaagatattagggtttttgagtgcggtgcggcgatcctagcactctcttctgcagctttcgccgacagcttcattcaccatggctgagcaaaccgagaaggcttttttgaaacaaccaaaagtgtttctcagctcgaagaaaactgggaagggaaagagacccggaaagggtgggaaccgcttttggaaatccattgggcttggatttaagactcccaggggagccatcgaaggaacctacattgacaagaagtgccccttcactggcaatgtttccatccgtggccgtatcttggctggaacatgtcacagtgctaagatgaacaggact

SEQ ID NO: 11421 - DNA, 400 bp, Glycine max
  unsure (1)..(400): unsure at all n locations
  Clone ID: LIB3039-008-Q1-E1-F3
gacgctcaattcattttcttctcctctctctctcctagggttatggttttctctcttcatcactctctgtgtcgctccgtttcaatggctcagcaggacgctcaaaacggcgggtcggagaatgccgctgctgctgctacggtgtcgtttgtcgctgtgaagccgcagctcctcgtcgaagctcccaaagccaacgacgccattctgttcttcgaggctgcgtttggcgctgaggaagttggccgtacgctcaaccctaagcgcaaagctgagcacgagctcnctctcatactctccgcagaactcaaaatcgctggctccaccattctcgtcgccgacctcgttgatgacacttcttcgccagcgaaaacggggggaaacggtgtcgttttgtgcttgg

SEQ ID NO: 11422 - DNA, 391 bp, Glycine max
  unsure (1)..(391): unsure at all n locations
  Clone ID: LIB3039-008-Q1-E1-F4
caaaaaaacaacagaagggggaaaaattttgttgaaatacctaaaaccattaaaatgaaattgaaattgcttgttttgtttgttgctacagtttttggtagcatatgaatgccatggctcagactaccagaagttccctctccaaatgaaaactgggtttggtgggcaatacagcaatgaggtggcatgtgccagttggaggcttggcgtggaagcaaacaacgtagtcaagtggcaaactgttcctgcagcttgcggagagtacatagctgactacgttcangagacaatataatcaatcaaaacattacaaaagctattcatgcaaatccccaactcacagcanagatgtctttgtcttggacgttgacgacactactctctctaatct

SEQ ID NO: 11423 - DNA, 386 bp, Glycine max
  unsure (1)..(386): unsure at all n locations
  Clone ID: LIB3039-008-Q1-E1-F5
ggcacaagtgagtttgttgatcgagataactagaaacagtgtgatgaaaatgaaggtccttgttttcttcgttgctacaattttggtagcatggcaatgccatgcgtacgatatgttccctctccgaatgaacactggctatggtgcccgtactccggaggtgaaatgcgcaagttggaggcttgctgtggaagcacacaacatctttggctttgagaccattcctgaagagtgcgttgaagcaacaaaggaatacatccatggcgaacaatatagatcagactccaaaacagttaaccaacaagcttacttttatgccagagacctcgaagtcaatcncaaggacacatttgtgttcagtatagatggcaacgtactctctaata

SEQ ID NO: 11424 - DNA, 390 bp, Glycine max
  Clone ID: LIB3039-008-Q1-E1-F6
ggcacaagtttgttgagatagctagaagcaataagatgaaaatgaaagtgcttgttttgtttgttgctacagttttggtagcatatgaatgccatggctcagactaccagaagttccctctccaaatgaaaactgggtttggtgggcaatacagcaatgaggtggcatgtgccagttggaggcttggcgtggaagcaaacaacgtagtcaagtggcaaactgttcctgcagcttgcggagagtacatagctgactacgttctaggagaccaatatagatcagattccaaaacagttaaccaacaagcttatttctatgctaaatccctcaaactcaccaacaaagatgtctttgtcttggacgttgacgacactactctctctaatctcc

SEQ ID NO: 11425 - DNA, 350 bp, Glycine max
  unsure (1)..(350): unsure at all n locations
  Clone ID: LIB3039-008-Q1-E1-F7
gaacctttgcattctattcattcaagattcagcaagtgcgttttggaagcagagaccgaaatacttcgagatggcccgtacaaagcaaactgctcgtaagtcaactggaggaaaagctcccaggaagcagcttgcaaccaaggctgcacgtaagtctgcaccaacaactggtggtgtgaagaagcctcatcgttatcgccctggaactgttgctcttcgtgagattaggaaataccagaagagcactgagctcctaatcaggaagcttcctttccagaggttggttcgtgaaattgcccaagatttcaagactgatctgcgtntccaagagcatgctgtgcttgcattgc

SEQ ID NO: 11426 - DNA, 386 bp, Glycine max
  Clone ID: LIB3039-008-Q1-E1-F8
gaaagaaaaacgaacaagaaaaaatcggatgagctatacatttcttagcagaaacttcaccggacctgagaattgagaaagtgtagtttgagtttcacatcaaaagattgtgtgtaagaagcgttttcttcagatcgatggaatatcttgggattgatctaagctgcgccgttggatctctccgccacggccagttaccggagaaggactgcttgctccctctcatttccaaactcctcggctacgccatcgtcgcggcttccaccaccgtcaaactcccccagattatgaaaattctgaagcatcagagtgtgagaggacttagcatgatatccttcgagcttgaagttattggatataccattgccttggcttactgtctccac

SEQ ID NO: 11427 - DNA, 386 bp, Glycine max; identical to SEQ ID NO: 10250
  Clone ID: LIB3039-008-Q1-E1-F9

SEQ ID NO: 11428 - DNA, 420 bp, Glycine max
  Clone ID: LIB3039-008-Q1-E1-G1
aaaaaacaacaaaagggggaaaaattgatttggttgttcaaaataactaaaaacattgtgataaaaatgaaggtcccttgtttttcttccgttgctacaattttggtagcatggcaatgccatgcgtacgatatgttccctctccgaatgaacactggctatggtgcccgtactccggaggtgaaatgcgcaagttggaggcttgctgtggaagcacacaacatctttggctttgagaacattcctgaagagtgcgttgaagcaacaaaggaatacatccatggcgaacaatatagattagactccaaaacagttaaccaacaagcttacttttatgccagagacctcgaagtccatcgcaaggacacatttgtgttcagtatagatggcaccgtactctctaatattccatactacaaa

SEQ ID NO: 11429 - DNA, 383 bp, Glycine max
  Clone ID: LIB3039-008-Q1-E1-G10
gaggtcatctagactaagagacagagtagaggagcttactcatcagctcgaagagtttgagaacagggaagattcaaggagccataatcggcctagatatgtatgttggccatggcagtggctcggcatggactttgttggatttcagcagcgacccgatacacaacaggaggcttctaacgaaatggaactttccgaacctctattataattgggcattttcttttctcttcttttttatgttcttttgtgtatttatgttaatttcttcaaattaatgttacaaagttgtagtttataccatcaacatgttccaccatctcttagaatgcaaccatggtggttactggttgagcattaggctcctgtaaagtgagaaagtg

SEQ ID NO: 11430 - DNA, 284 bp, Glycine max
  Clone ID: LIB3039-008-Q1-E1-G12
gacggttcaagagtttgttgtgagctactagctactttatcgtgaggataataggcctttgtttcttctctgcgttgcttttggtgtcatggtagcaccgtgcttccaaggtgtccgctctcgaaagttccatcgcctatgtgagcccgtgctcaggtggtggtacctccgaggtagaagcctcctgttgtaggcctgctgatcattgcgcattgcaaccaatcctttagaatgcttcgtggaaagtgcgttgtacctccatgggaattcatttatgtcaaacc

SEQ ID NO: 11431 - DNA, 401 bp, Glycine max
  Clone ID: LIB3039-008-Q1-E1-G2
aggggaaacttcaaaatcctctagtaaccttcttttctctctctctctctcgtgttctgagctgctagaagcaatggagaagaaaagaagccatgcttctttcaccatgtttgcaatgcttgttggattgctctctcagagccttgtcattcctgtaatatccaccactgttgcagatcagaagaactactacaccccagatccacatgctggaagtccccccacaggtttctccgattctctgtgctcacacaatagtagtcctccatctcatggccatgggagctctccaccctcacatcacaatagtccaagtactccatcaacaccctcaggtggaaactgtggatcatcaccccacaacatcatgattcaaacacctcaactccatcaacaacatc

SEQ ID NO: 11432 - DNA, 390 bp, Glycine max
  Clone ID: LIB3039-008-Q1-E1-G4
ggcacaagtttgttgagatagctagaagcaataagatgaaaatgaaagtgcttgttttgtttgttgctacagttttggtagcatatgaatgccatggctcagactaccagaagttccctctccaaatgaaaactgggtttggtgggcaatacagcaatgaggtggcatgtgccagttggaggcttggcgtggaagcaaacaacgtagtcaagtggcaaactgttcctgcagcttgcggggagtacatagctgactacgttctaggagaccaatatagatcagattccaaaacagttaaccaacaagcttatttctatgctaaatccctcaaactcaccaacaaagatgtccttgtcctggacgttgacgacactactctctctaatctca

SEQ ID NO: 11433 - DNA, 398 bp, Glycine max
  Clone ID: LIB3039-008-Q1-E1-G5
gatagcgaaacagagagtggtttcagtgagtgatcggtgttcacttgatccttcataagtcgtcatcatcatcatcatcatcaccgttgattgaagaagatgccgatcagaaacatcgccatcggaaggcctgaagaggctactcaccccgacacgttgaaggcggggttggctgagttcatctccaccttgatcttcgtgttcgccggttcaggttccggcatcgcctacaacaagctcaccgacaacggcgccgccactcccgccggcctcatctccgcttccatcgcctatcctttcgccctcttcgtcgccgtctccgtcggcgccaacatctccggcggtcacgtcaaccccgccgtcaccttcggcgccttcgtgggcggcaacatcacctt

SEQ ID NO: 11434 - DNA, 402 bp, Glycine max
  Clone ID: LIB3039-008-Q1-E1-G6
gatgcgtcgttttgaggaaaagaaatttgagatgcgcaatggcgcaaagaagaaagaccaacgaagttcaaaaccattaattaaccaattctcattcgttggttcattcaattctcgatcccccatctaattagggtttccatgctctcccaaacaagaagcgattaagattagatttttcagcaatgaacaacaccaacccaaccaagaatgctgcaacgccgtcgtttttcaccaaccctggaacaccctccatccccatgaaccaccttctctcccaaacgcagcctcaaccacaaggtgccacgtcacacttccacggccactttcagctttcacaaccccaaacccacgtgctcgcaccacaacaacagccacaccctcatcctcatcctcaagtgc

SEQ ID NO: 11435 - DNA, 365 bp, Glycine max
  Clone ID: LIB3039-008-Q1-E1-G7
gatcactctgctgcctcgctctgtttctgtctctgtgtttgcggctgaggattccgaacgagcgaccttcttcgtttctcgcaaagtttaagtcatcatgggtaaggaaaagactcacatcaacattgtcgtcattggacatgtcgactctgggaagtcaactaccactggtcatttgatctacaagcttggaggtattgacaagcgtgtgattgagaggttcgagaaggaggctgctgagatgaacaagaggtcattcaagtatgcctgagtgcttgacaagctcaaggctgagcgcgaaagaggaatttacattgatattgctttgtggaagttttgaacaacaagtactactgcacagtcat

SEQ ID NO: 11436 - DNA, 396 bp, Glycine max
  Clone ID: LIB3039-008-Q1-E1-G8
gacagcagcagagcaaaagaaagaaagaaagaaagtgcaacttcctctgttttgctcccctgtttaagccttatcataagcttagaatggcacacaaggaattttccattgccctagtgactctcattgttctctttgtcaacacgaacctccaaggtgccacggctgactatggtggtggttggcagagtgctcatgccactttctatggtgggggtgatgcttctggcacaatgggtggagcatgtgggtatggaaatttgtatagccagggatatggaactgacactgtggctctaagcactgctttgttcaacaatggcttaagctgtggatcttgctatgaaatgagatgtgatgatgacccaagatggtgcaaacctggctctattaccg

SEQ ID NO: 11437 - DNA, 391 bp, Glycine max
  Clone ID: LIB3039-008-Q1-E1-G9
gacacttcaaaatcctctagtaacccttcttttctctctctctctctcgtgttctgagctgctagaagcaatggagaggaaaagaagccatgcttctttcaccatgtttgcaatgcttgttggattgctctctcagagccttgtcattcctgtaatatccaccactgttgcagatcagaagaactactacaccccagatccacatgctggaagtccccccacaggctcacacaatagtagtcctccatctcatggccatgggagctctccaccctcacatcacaatagtccaagtactccatcaacaccctcaggtggaaactgtggatcatcacccccacaacatcatgatccaacaccctcaactccatcaacaccatcaaaccctccc

SEQ ID NO: 11438 - DNA, 274 bp, Glycine max
  unsure (1)..(274): unsure at all n locations
  Clone ID: LIB3039-008-Q1-E1-H1
ggcacaagtgagtttgttgatcgagataactagaaacagtgtgatgaaaatgaaggtccttgttttcttcgttgctacaattttggtagcatggcaatgccatgcgtacgatatgttccctctccgaatgaacactggctatggtgcccgtactccggaggtgaaatgcgcaagttggaggcttgctgtggaagcacacaacatctttggctttgagaccattcctgaagagtgcgttgaagcaacanaggaatacatccatggcgaacaatat

SEQ ID NO: 11439 - DNA, 389 bp, Glycine max
  Clone ID: LIB3039-008-Q1-E1-H10
gacaagtttgttgagatagctagaagcaataagatgaaaatgaaagtgcttgttttgtttgttgctacagttttggtagcatatgaatgccatagctcagactaccagaagttccctctccaaatgaaaactgggtttggtgggcaatacagcaatgaggtggcatgtgccagttggaggcttggcgtggaagcaaacaacgtagtcaagtggcaaactgttcctgcagcttgcggggagtacatagctgactacgttctaggagaccaatatagatcagattccaaaacagttaaccaacaagcttatttctatgctaaatccctcaaactcaccaacaaagatgtctttgtcttggacgttgacgacactactctctctaatctcca

SEQ ID NO: 11440 - DNA, 208 bp, Glycine max
  Clone ID: LIB3039-008-Q1-E1-H11
gactcgctagttcaaaccactctaaacaatatggtggtgcctctactccctaataagattgttactacaatggtgaaaacattcaagaggcctcacacagacaagaaaattctgtcacgacaaactggaacagactatagggtaccgaatcccatgtaaggagaatgttcaaggtatgcactttgattccaaacattgaatatggttc

SEQ ID NO: 11441 - DNA, 393 bp, Glycine max
  unsure (1)..(393): unsure at all n locations
  Clone ID: LIB3039-008-Q1-E1-H12
gggggattttttgggtgccattgttgttgctattatcatccgcagctgcttttattcgcaccgcaaacagtgagccatggccgtcggaaagaacaagcgcatctccaaggggaagaagggtggcaagaagaaggcagctgatccctttgccaagaaggattggtatgacattaaggctccttctgtttttcaagtgaaaaatgttggcaaaaccctcgtctctcgtactcagggtaccaagattgcttctgaaggactcaagcatagagtgtttgaggtctccttggctgatcttcaaggggatgaggatcatgcattcaagaagattaggttgagagctgaagatgtgcaagggaagaatgttctgacaaatttctgangaatggatttcac

SEQ ID NO: 11442 - DNA, 366 bp, Glycine max
  Clone ID: LIB3039-008-Q1-E1-H2
gattgttggcttgtgctctgctcgtgcctctagggttatcatatctccatttcaatttcctctctctcagtttccaagaatcttaagctatgggaaagtcttacccaaccgtgagcgctgattaccagaaggccgttgagaaggcgaagaagaagctcagaggcttcatcgctgagaagagatgcgctcctctaatgctccgtttggcatggcactctgctggaacttacgacgtgagctcgaagaccggtggtcccttcggaaccataaagcacccctccgaactcgctcacggcgctaacaacggtcttgacatcgctgttaggcttttggagccactcaaagcggagtttcctattttgagct

SEQ ID NO: 11443 - DNA, 373 bp, Glycine max
  Clone ID: LIB3039-008-Q1-E1-H3
aaggggaaggtgcaatagtttgttgtgagctataagctagtttaccgtgaggagaatatgaacttgctttgttttctttgttgctgcagtagttttggtagcatggccatgccatggcgcaggctaccaaaggttccgtctccgaatgagaactggctatggtaagcgttcttccgaggtaaaatgcgcaagttttatgcttgctgtggaagcacacaacatccgagcctttaacaccattcctgacgagtgcgttgagccaccacaggactacattaatggccaacaatttagatcagactctaaaacagttaatcaacatgctttcttttatgctagtgaacgcgaagtcgatcacaacgacatatttata

SEQ ID NO: 11444 - DNA, 285 bp, Glycine max
  unsure (1)..(285): unsure at all n locations
  Clone ID: LIB3039-008-Q1-E1-H4
gataacacaaacacaaattacatagcctcagtaatctgagagagaaacaaaaacaatgaaggtttccattgccaagttccactcccttcccctatgttttttccttctcttggccttcaacacaaaacccctcctagcagcagaaccagagccagtggttgataagcaagggaaccctttggagccaggagtanggtactacgtgtggccactttgggctgatgaaggaggcctcacactaggccanacaaggaacaagacatgccctctttatgttatccgtga

SEQ ID NO: 11445 - DNA, 392 bp, Glycine max
  unsure (1)..(392): unsure at all n locations
  Clone ID: LIB3039-008-Q1-E1-H5
gacagcatatatatcaataatctattttatactatacctacattttgataattttctttgtagttgatagccatggctacccgtggaaagcttgaggttgacattgatctcaagtccaacgcagacaagtactggcaaacccttaggaattctactgaaatattccctaaggccttcccacatgattacaaaagcattgaggttcttgagggtgatggcaagtctcctggttctatccgccacataagttatggtgaaggttcaccacttgtgaaatcatcctttgagaagattgaggctgttgatgaggaaaagaacgtagtgtcgtacactatcattgatggggaactcctcnagcactacanaacattcaatggagacatttctgtgac

SEQ ID NO: 11446 - DNA, 395 bp, Glycine max
  Clone ID: LIB3039-008-Q1-E1-H6
ggagcgtagttgaggttttgcttttgccacttcgaaaccaaattttcttcgttcgtccttctgtgatctcttcttccaccatgagcaggtcagggcaaccaccggatttgaagaagtacatggataagaagcttcagatcaagctgaacgcaaatcgcatggttgttggtactctccgtggctttgaccagtttatgaattgagttgttgacaacactgtggaagtgaatggcaatgagaaaaatgacatagggatggtggtaattagaggaaatagtgtggtcactgttgaggcgcttgaacccgtgaataggacttgatttctgtttgttgtaaacatttagatgagtatttcctggttttaacggttgtgtatttgaacaatgtagctatgg

SEQ ID NO: 11447 - DNA, 155 bp, Glycine max
  Clone ID: LIB3039-008-Q1-E1-H7
ggaacctaattgaggttttgcctttgccacttcaaaaccagattttcatcattcgtccttctgtgatgacttcttccagtatgtgcacgtgagggcaaccacaggagttgcataagtacatttatgagatccttcagatcacgctgaacgcaaat

SEQ ID NO: 11448 - DNA, 400 bp, Glycine max
  Clone ID: LIB3039-008-Q1-E1-H8
gcacaagtgagtttgttgatcgagataactagaaacagtgtgatgaaaatgaaggtccttgttttcttcgttgctacaattttggtagcatggcaatgccatgcgtacgatatgttccctctccgaatgaacactggctatggtgcccgtactccggaggtgaaatgcgcaagttggaggcttgctgtggaagcacacaacatctttggctttgagaccattcctgaagagtgcgttgaagcaacaaaggaatacatccatggcgaacaatatagattagactccaaaacagttaaccaacaagcttacttttatgccagagacctcgaagtccatcccaaggacacatttgtgttcagtatagatggcaccgtactctctaatattccatactacaaaa

SEQ ID NO: 11449 - DNA, 307 bp, Glycine max
  unsure (1)..(307): unsure at all n locations
  Clone ID: LIB3039-008-Q1-E1-H9
gggtgtcaggttctggaatctgcgcaaagcgagtggtggtggacgctcgccagcacaggttgggtcggctatcgtcgaacgtggcgaatgagcttctgcatgggcacaaggttgccgtcgtgcgctgcgaacagatttgcatctccagcagtctggtgaggcagaatatgacatacgtgagattcctctgcanacgcatgaacaccatcacctcgcatggtgctatcgacttctgcgccgaatccataatcgtctaggtcaccgttcatggaatgatatcacactcgacaacacgtggggaagctgc

SEQ ID NO: 11450 - DNA, 341 bp, Glycine max; identical to SEQ ID NO: 9765
  Clone ID: LIB3039-009-Q1-E1-A1

SEQ ID NO: 11451 - DNA, 390 bp, Glycine max
  unsure (1)..(390): unsure at all n locations
  Clone ID: LIB3039-009-Q1-E1-A10
ggagcatggcctcatattggtagatactaagtatgagtttgggaaggcaaatgatggttcaattatgttgattgatgaggtccatactcctgattcaagtagatattggatagccaattcttacctggagcgctttcaaaatggtcttgagcctgaaaatattgacaaggagtttttgaggctgtggtttataagtcactgcaacccttatgaagatgaggtccttcctgatgctcctgaagatcttgtctgtgaattagcctggcgatacattttcttgtatgagactataacaaaatcaaagtttgaggtgccatcgactgaggagcctatacatgaccgaattacacganatgttgcatctgcactgtcatcnctaaagtagcctgg

SEQ ID NO: 11452 - DNA, 379 bp, Glycine max
  Clone ID: LIB3039-009-Q1-E1-A11
ggtgcacaagtgagtttgttgatcgagataactagaaagagtgtgatgaaaatgaaggtccttgttttcatcgttgctacaattttggtagcatggcaatgccatgcgtacgatatgttccctctccgaatgaacactggctatggtgcccgtactccggaggtgaaatgcgcaagttggaggcttgctgtggaagcacacaacatctttggctttgagaccattcctgaagagttcgttgaagcaacaaaggaatacatccatggcgaacaatatagatcagactccaaaacagttaaccaagaagcttacttttatgccagagacctcgaagtccatcccaaggacacatttgtgttcagtatagatggcaccgtac

SEQ ID NO: 11453 - DNA, 353 bp, Glycine max
  unsure (1)..(353): unsure at all n locations
  Clone ID: LIB3039-009-Q1-E1-A12
ggtgcacaagtgagtttgttgatcgagataactagaaacagtgtgatgaaaatgaaggtccttgttttcttcgttgctacaattttggtagcatggcaatgccatgcgtacgatatgttccctctccgaatgaacactggctatggtgcccgtactccggaggtgaaatgcgcaagttggaggcttgctgtggaagcacacaacatctttggctttgagaccattcctgaagagtgcgttgaagcaacanaggaatacatccatggcgaacaatatagatcagactccanaacagttaaccaacaagcttacttttatgcaagagacctcgaagtccatcccaaggacacatt

SEQ ID NO: 11454 - DNA, 379 bp, Glycine max
  Clone ID: LIB3039-009-Q1-E1-A2
gagggttttgcgctgttgttgctgctcatcctccgtaacctccgagctctgcaccgaagaacgaagccatggggaagacacatggaatgggatctgctcgcaagctcaagtcccaccgcaggaggcaaaggtgggctgacaagtcatacaagaaatcacatcttggaaatgaatggaagaaaccttttgctggttcatcccatgccaagggaattgtccttgaaaagataggtattgaggctaagcagcccaactctgccattcgtaagtgtgccagggttcaacttatcaagaatgggaagaagattgccgcttttgtccctaatgacggttgcttgaactacattgaagagaatgacgaagtcttgattgctggatt

SEQ ID NO: 11455 - DNA, 346 bp, Glycine max
  Clone ID: LIB3039-009-Q1-E1-A3
ggcacaagtgagtttgttgatcgagataactagaaacagtgtgatgaaaatgaaggtccttgttttcttcgttgctacaattttggtagcatggtaatgccatgcgtacgatatgttccctctccgaatgaacactggctatggtgcccgtactccggagttgaaatgcgcaagttggaggcttgctgtggaagcacacaacatctttggctttgagaccattcctgaagagtgcgttgaagcaacaaaggaatacatccatggcgaacaatatagatcagactccaaaacagttaaccaacaagcttacttttatgccagagacctcgaagttcatcccaaggac

SEQ ID NO: 11456 - DNA, 265 bp, Glycine max
  Clone ID: LIB3039-009-Q1-E1-A4
agaaacagtaagtccacgcaatacatattttaagcgctgtatcaccaagtttggaaggcttttggggtacccggtgagacacagtggattcattagatctccatggatatggagctctgttctgtagccatcatctctctttttcgttttcattattggcttactaatgtgccctgtagttgatttctgatatccacaggagaagatatgaatgtgaagcacatcgtgttgtggttcggaaacctctgactctgtctgttgccat

SEQ ID NO: 11457 - DNA, 368 bp, Glycine max
  Clone ID: LIB3039-009-Q1-E1-A5
aagccaaatggaagattcttcagctataatccagcaacaaagaagacaaccctgcttgcccaagacctctactttgccaatggggttgcagtttcagcagatcaacaatttgtggtcttctgtgaatctgtcttgatgagatgcaataaatatttcgtcctgagccctaaaacaggaaccatagagaagttctgtgacctgcctggcatgcctgataacattcattatgatggacaggggcactatttgattgcaatgttcacggccctttctcccgaattggaattggcatatagataccctttcattacgaaggcttttgcaatgtttacaaagtatgtacggagtctatctatctccaagaatgg

SEQ ID NO: 11458 - DNA, 339 bp, Glycine max
  Clone ID: LIB3039-009-Q1-E1-A6
ggtacacagcctcaacaaccctaacgcgtgcagagcagagagagacgcagccatggggcgaagacccgcgaggtgttataggcaaattaagaacaaaccataccccaagtcacggttttgccgtggtgttcctgatcccaagatcaggatttacgatgttggtatgaagaagaagggtgttgatgagtttcctttctgtgtccatctggttagttgggagaaggaaaacgtttctagtgaggccctggaagctgctcgtattgcttgcaacaagtacatggccaaatttgctggaaaggatgctttccacttgagagtcagggtgcacccattccatgt

SEQ ID NO: 11459 - DNA, 388 bp, Glycine max
  unsure (1)..(388): unsure at all n locations
  Clone ID: LIB3039-009-Q1-E1-A7
ggcacaagtttgttgagatagctagaaccaataagatgaaaatgaaagtgcttgttttgtttgttgctacagttttggtagcatatgaatgccatggctcagactaccatcagttccctctccaaatgaacactgtgtttggttggcaatacagcaatgaggtggcatgtgccagttggatgcttggcgtcgaagcagacaacatattcaagtggcaaactgttcctgcatcttgcggagagtacatagctgactacgttctacgagaccaatatacatcagattccattacagttaaccaacangcttatttctatgctaaatccctcaaactcaccatcaaagatgtctttgtcatggacgttgacgacactactctctcgaatct

SEQ ID NO: 11460 - DNA, 220 bp, Glycine max
  Clone ID: LIB3039-009-Q1-E1-A8
gggggggcacaagtgagtttgatgatcgagataactagtaacaatgtgatgaaaaggaatgtccgtggcttcatcgttgctacaattttggtagcatggcaatgccatgcataagatatgttccctcaccgaatgaacactggctatggtgcccagtatccaggtgtgaaatgcacatttttgacgcatgctgtttgagcacacaatatccttgggtttg

SEQ ID NO: 11461 - DNA, 356 bp, Glycine max; identical to SEQ ID NO: 7609
  Clone ID: LIB3039-009-Q1-E1-A9

SEQ ID NO: 11462 - DNA, 357 bp, Glycine max
  unsure (1)..(357): unsure at all n locations
  Clone ID: LIB3039-009-Q1-E1-B1
ggccattgttgttgctattatcatccgcagctgcttttattcgcaccgcaaacagtgagccatggccgtcggaaagaacaagcgcatctccaaggggaagaagggtggcaagaagaaggcagctgatccctttgccaagaaggattggtatgacattaaggctccttctgtttttcaagtgaaaaatgttggcaaaaccctcgtctctcgtactcagggtaccaagattgcttctgaaggactcaagcatagagtgtttgaggtctccttggctgatcttcaaggggatgangatcatgcattcaagaagattaagttgagagctgaagatgtgcaagggaagaatgttctgacaaa

SEQ ID NO: 11463 - DNA, 233 bp, Glycine max
  Clone ID: LIB3039-009-Q1-E1-B10
gagtgcacaagtgagtttgttgatcgagataactagaaacagtgtgatgaaaatgaaggtccttgttttcttcgttgctacaattttggtagcatggcaatgccatgcgtacgatatgttccctctccgaatgaacactggctatggtgcccgtactccggaggtgaaatgcgcaagttggaggcgtgctgtggaagcacacaacatctctggggttgagaccatatcctgaa

SEQ ID NO: 11464 - DNA, 386 bp, Glycine max; identical to SEQ ID NO: 10250
  Clone ID: LIB3039-009-Q1-E1-B11

SEQ ID NO: 11465 - DNA, 367 bp, Glycine max
  Clone ID: LIB3039-009-Q1-E1-B12
ggcacaagtgagtttgttgatcgagataactagaaacagtgtgatgaaaatgaacgtccttgttttcttcgttgcgacaattttggtagcatggcaatgccatgcgtacgatatgttccctctccgaatgaacactggctatggtgcccgtactccggaggtgaaatgcgcaagttggaggcttgctgtggaagcacacaacatctttggctttgagaccattcctgaagagtgcgttgaagcaacaaaggaatacatccatggcgaacaatatagatcagactccaaaacagttaaccaacaagcttacttttatgccagagacctcgaagtccatcccaaggacacatttgtgttcagtatagat

SEQ ID NO: 11466 - DNA, 371 bp, Glycine max
  Clone ID: LIB3039-009-Q1-E1-B2
ggagtgagtaattagaaaggggtttccaagggttaccggaaggttgcattgcaataaaacccccccgaataagcccggcggacttttgtaggttttcctccgaaccaaaaatttcccttccggccgttaatccggccccgttgtggaaacgttttctcccttccgattaccattccatcatttccaagtctccttcgcctctcaactatccttccaagaaggagctctatctcgctctctcggatcgccctatcatcatcgatcagggtaaaaagagctttcaattggagaaaaagagtgggaagaagtgttacatgcttgctgctagagctctcagcattatttggggtgacactgagcaatactggaac

SEQ ID NO: 11467 - DNA, 380 bp, Glycine max
  unsure (1)..(380): unsure at all n locations
  Clone ID: LIB3039-009-Q1-E1-B3
ggcatctgattcgttcgttcactttcactttaccaactcctaacaatttctctctgtttccttcttcaccgcatcaatggagttggacggcgttctcctcggcatgtgcaaccctctcctcgacatctctgccgtcgtcgacgacgctttcttgcaaaaatacggtatcaagttgaacgatgcgattctcgctgaggataagcacaaacctatgtatgaagaattggctaacaatcctaatgtggagtacattgctggaggtgctactcagaattcaatcagggttgctcagtggatgcttcaagcaccaggtgccacaagttacataggttgcatangaaaagacaaatttggagaagagatgaagaagaaatgttcac

SEQ ID NO: 11468 - DNA, 400 bp, Glycine max
  unsure (1)..(400): unsure at all n locations
  Clone ID: LIB3039-009-Q1-E1-B4
ggcgcacccagagaggaggaagctttgagagagagagagggaggagggagagtgttgacgctccatcaagatgggtatttctagggattccatgcacaagaggcgtgccactggtggcaagaaaaaggcttggagaaagaagagaaagtatgagcttgggcgtcaggcagcaaacaccaagttatcaagcaacaagacaatcaggaggattcgtgttagaggtggcaatgttaaatggagggcattgaggctggatactggcaattactcatggngtagtgaagcagttactcgcaagactcgtattctagatgttgtttacaatgcctcaaacaacgagcttgtgcgaactcagaccctggtcaagagtgctattgtccaggttgatgctgctcctttc

SEQ ID NO: 11469 - DNA, 355 bp, Glycine max
  Clone ID: LIB3039-009-Q1-E1-B5
aaacaacagagaggaaggcacatggaacaatcttcagggattgtccagcaacagggaagacaaccctgcgtgcccaagatctcaactttgcgaatgaggttgcaggttcagcagatgagcaacttgtggtcctctgtgactcagtcgtgatacgatacgggcaatagttcgaccagggccataaaacatgaagtattaactaacttctgatgatatgcctggcatgcatgataacattcattatgcaggacaagtgcactatgtggatgcaatgttcacggcccttgctcacgaacatggaattggcatatacatacccatgcattacgaaagcctctgcacagtttacattcta

SEQ ID NO: 11470 - DNA, 315 bp, Glycine max
  Clone ID: LIB3039-009-Q1-E1-B6
gattccaccagtacagaaaacgcagttctcaacaattccctctcgaatgtgagacttgttggtggtaactgaacttttccgagcaagaatgtctgggcgtggaaagggaagcaacggtttgggaaagggatgagcgaaacgacaccgtaaggtgctgcgcgataacattcacggaatcaccaagcccgcgaatcggcgtttggctcctaagggtggcgtgaaacgtatcagtggtctcatctacgaagagacacgtggcatgctcaagatctttttggagaaagtgattcctgacgcccttacctacactgagca

SEQ ID NO: 11471 - DNA, 373 bp, Glycine max
  unsure (1)..(373): unsure at all n locations
  Clone ID: LIB3039-009-Q1-E1-B7
ggaatgacaaaatatttttagttaaaaatattgagagaagtataataattttgagcatccaaaacggttatcggtaattcccagcttcacaaaatactgttacaaccattctggcgtagaatccggttccagacaaacacacactcccacatccaaatccaaatagaaaacacaaacacactctcactttttctcattcacaccgacacacgcattccccccatacgccgtcgttttccaaagcttcgcgccttcaaatccaatccacattcccatcaatcagcactggagtcgctccaagtgctgaagcctcactcnccctccgccgccggccagatccgcttccgctccccttcctccgccgaactcctcg

SEQ ID NO: 11472 - DNA, 211 bp, Glycine max
  Clone ID: LIB3039-009-Q1-E1-B8
ggcacaagtgagtttgttgatcgagataaccacaaacagtgtgattaaaatgaaggtccttgttttcctcgttgctacaattttggtatcatggcaatgccatgcgtacgatatgttcactctccgaatgaacactggctatggtgcccgtactcaggaggtgaaatgcgcaagttggatgcttgctgtggaagcacacagcatctttggc

SEQ ID NO: 11473 - DNA, 364 bp, Glycine max; identical to SEQ ID NO: 9559
  Clone ID: LIB3039-009-Q1-E1-B9

SEQ ID NO: 11474 - DNA, 338 bp, Glycine max
  unsure (1)..(338): unsure at all n locations
  Clone ID: LIB3039-009-Q1-E1-C1
ggtattgtagaactgaacaagggtttctctttctctttctctgtctgcttcttcactttctctcgtttcaatcgaaaaaaatcatgggcagaaaattcttcgtcggtggcaactggaaatgcaatgggaccactgaggaggtgaagaagattgttactactttaaatgaagctaaagtccctggagaagatgttgtanaagttgttgtgagccctccttttgtgttccttccttttgtaaaaagtttgctgcgccctgatttccatgtctcggcccaaaattgttgggttcgcaaaggtggtgcttatactggagaagttagtgctgaaatgcttgtt

SEQ ID NO: 11475 - DNA, 377 bp, Glycine max
  Clone ID: LIB3039-009-Q1-E1-C10
ggcacaagtgagtttgttgatcgagataactagaaacagtgtgatgaaaatgaacgtccttgttttcttcgttgctacaattttggtagcatggcaatgccatgcgtacgatatgttccctctccgaatgaacactggctatggtgcccgtactccggaggtgaaatgcgcaagttgggggcttgctgtggaagcacacaacatctttggctttgagaccattcctgaagagtgcgttgaagcaacgaaggaatacatccatggcgaacaatatagatcagactccagaacagttaaccaacaagcttacttttatgccagagacctcgaagtccatcgcaaggacacatttgtgttcagtatagatggcaccgtac

SEQ ID NO: 11476 - DNA, 299 bp, Glycine max
  Clone ID: LIB3039-009-Q1-E1-C11
ttgttgttagatataactaatttagtgtgatgagaatataagtctgtgtgttctccttcgctacaaatttggggcagggcaatgccatgcctacgagcagtgctctctccgtttcctcaccgactataaagtgcctattctgaacgtgctatgcgcagattatgggcatgttgtaggcgtacacatcaacactagagtatccaccactctataaacattccttaaaactgcgttggaatacatccagggcaaataataggcaataaactccaatcaaattctacaacaatcttacattt

SEQ ID NO: 11477 - DNA, 363 bp, Glycine max
  Clone ID: LIB3039-009-Q1-E1-C12
ggcacaagtgagtttgttgatcgagataactagaaacagtgtgatgaaaatgaaggtccttgttttcttcgttgctacaattttggtagcatggcaatgccatgcgtacgatatgttccctctccgaatgaacactggctatggtgcccgtactccggaggtgaaatgcgcaagttggaggcttgctgtggaagcacacaacatctttggctttgagaccattcctgaagagtgcgttgaagcaacaaaggaatacatccatggcgaacaatatagatcagactccaatacagttaaccaacaagcttacttttatgccagagacctcgaagtccatcccaaggacacatttgtgttcagtat

SEQ ID NO: 11478 - DNA, 299 bp, Glycine max
  Clone ID: LIB3039-009-Q1-E1-C2
gattatgaatgagtggcaatagcagcaacaacaacaatataagtaaaagaatctctgtgttgtcatcacacttcgctagatccagccccatcatggcttcagagaagcaagcggctcttgccgtcactccctctgatgctgatgctcctaccatatttgacaagatcatcaataaggagattccttctactgtggtttatgaggatgacaaggtgcttgccttcagggacataactcctcaagctcctacacatattcttatcattcctaaattcaaagacgggttaagtggtctatcc

SEQ ID NO: 11479 - DNA, 390 bp, Glycine max
  Clone ID: LIB3039-009-Q1-E1-C3
gaaggtgcaagagtttgttgtgagctataagctagtttatcgtgaggagaatatgaagttgtttgttttctttgttgctgcagtagttttggtagcatggccatgccatggcgcaggctaccaaaggttccctctccgaatgaaaactggctatggtgagcgttcttcggaggtaaaatgcgcaagttttaggcttgctgtggaagcacacaacatccgagcctttaaaaccattcctgaagagtgcgttgaaccaacaaaggactacattaatggcgaacaatttagatcagactctaaaacagttaaccaacaagctttcttttatgctagtgaacgcgaagtccatcacaacgacatatttatattcggcatagataacaccgtact

SEQ ID NO: 11480 - DNA, 384 bp, Glycine max
  unsure (1)..(384): unsure at all n locations
  Clone ID: LIB3039-009-Q1-E1-C5
gacttctgaatctattgaatcaacaatcatgtcggacgaagagcaccatttcgagtccaaggccgacgccggagcctccaaaacctacgctcagcaagccggtaccatccgcaagaacggctacatcgtcatcaaaggccgcccctgcaaggttgtggaagtttcgacttccaaaactggaaagcacggtcacgctaagtgtcactttgttggaattgatattttcactgccaagaaacttgaggatattgtgccctcttctcacaactgtgatgttcctcatgtgaatcgtactgattaccagctcattgatattgctgaggatggatttttgagtctgcntactgaaaatggtaacactaaggatgacctcaagcttcccac

SEQ ID NO: 11481 - DNA, 276 bp, Glycine max
  Clone ID: LIB3039-009-Q1-E1-C6
ggcacaagtgagtttgttgatcgagataactataagcagtgtgatgaaaatgaaagtccttggtttcttcgttgctacaattttggtagcatggcaatgccatgcgtacgacatgttccctctccgaatgaacactggctacggtgcccgtactccggaggtgaaatgcgcaagttggaggcttgctgtggaagcacactatatctttggctttgagaccattcctgaagagtgcgttgatgcagctaatgaatacatccatggcgaataatatat

SEQ ID NO: 11482 - DNA, 346 bp, Glycine max
  Clone ID: LIB3039-009-Q1-E1-C7
gacagcatagcactctttgcaacacaacagagtaagacaacacagagataagcgtcttaataaacgctcttctctgaaaaggctgatttcttctcttcttctcttctctttcgtttcgatcttcgatctctgaaaatgagagagtgcatttcattccacatcggtcatgccggtattcaggtcagaaacgcctgctgggagctctactgcctcgaacacggcattcagcctgatgggcagatgccaagtgataagactgttggtggaagtgatgatgctttcaacaccttcttcagtgaaactggggctggaaagcacgtgcctcgtgcgaattttgtagatctcg

SEQ ID NO: 11483 - DNA, 333 bp, Glycine max
  Clone ID: LIB3039-009-Q1-E1-C8
ggcacaagtttgttgagatagctagaagcaataagatgaaaatgaaagtgcttgttttgtttgttgctacagttttggtagcatatgaatgccatggctcagactaccagaagttccctctccaaatgaaaactgggtttggtgggcaatacagcaatgaggtggcatgtgccagttggaggcttggcgtggaagcaaacaacgtagtcaagtggcaaactgttcctgcaacttgcggagagtacatagctgactacgttctaagagaccaatatagatcagattccaaaacagttaaccaacaagcttatttctatgccaaatccctcaaac

SEQ ID NO: 11484 - DNA, 370 bp, Glycine max
  Clone ID: LIB3039-009-Q1-E1-C9
gaccacattccaaaacacaaacacatacattgtagtatcacttttgtctcggaatttgttcttttgagttatggcaagcttaaaggttgcatgtgtgggtttgatgtgcatggctgtgatgagtgcaccaatgatggtgcaagccgtgtcatgcaatgatgtttctgtgaacctagcaccgtgcctatcttacctgatgcagggtggagatgttccagaatcgtgctgtagcggagtgaggaacattctgggttctgccagcaccacctttgacaaacaaaccgtgtgcaaatgtcgtcagcaagctgctaataactatggcatcaacgacgaatacgctcaggcactctccggccgctgcaaggtcagc

SEQ ID NO: 11485 - DNA, 373 bp, Glycine max
  Clone ID: LIB3039-009-Q1-E1-D10
gacttctcttcacacctttgttcactcttcttctcttgcggctagggttttagcgcagcttcttctagatttaaggaagatgggtaaggaaaaggttcacatcagtattgtggtcattggccatgtcgactctgggaaatccactaccactggtcacctgatttacaagcttggaggcattgacaagcgtgttattgagaggtttgagaaggaagctgctgagatgaacaagaggtctttcaagtatgcctgggtgctggacaaacttaaggctgagcgtgaaagaggaatcaccattgatattgctttgtggaagtttgaaacaacaaagtattattgcacagttattgatgcgcctggacatagggatttc

SEQ ID NO: 11486 - DNA, 385 bp, Glycine max
  unsure (1)..(385): unsure at all n locations
  Clone ID: LIB3039-009-Q1-E1-D11
ggcatttccaaatttccttttccttcactttcccgagaaaaaaatagcacttttcactttcttcactacgttctcacttcgatatggctcgtacgaagcaaaccgctcgcaagtccaccggtggcaaggcgccacgtaagcagctcgccaccaaggccgctcggaagtccgctccggcgaccggaggagtgaagaagccccagcgcttcaggccgggaaccgtggcgctgagggaaatcagaaagtaccagaagagcaccgagcttctcatcaggaagcttccatttcagaggctcgtgagagaaatcgcgcaggatttcaagaccgatttgcgtttccagagcagcgctgtttccgcgcttcangaggctgctgaggcttacct

SEQ ID NO: 11487 - DNA, 368 bp, Glycine max
  Clone ID: LIB3039-009-Q1-E1-D12
ggcattacatttgagttcaaacaaatcaaagccatggccacctccaacttctctaatgttctctccgtctccctaaccttctttttggtgctacttaccaaggcacactcgaccgataccgtttctttcaccttcatcaagttcaacccagtccaaccaaacattatgctccaaaaagacgctagtatttcatcctctggggtgttacaactcaccaaagttggcagcaacggcatgcccacctctggatctctcggtcgtgccctttacgctgccccaatccatatttgggacagcgaaaccggtaacgtagccagctgggctacatcctttaaattcaacattttcgcactcaacacatcaaactc

SEQ ID NO: 11488 - DNA, 216 bp, Glycine max
  Clone ID: LIB3039-009-Q1-E1-D2
ggttctcatttctctttctgtagccctcaatcaccggagagagagtgagtgcaaagccatcgtcttcgtctcagacaagtagtttggtaaaagatggctgatgctgaggatattcaaccccttgtctgtgacaatggaactggaatggtgaaggcaggatttgctggtgatgatgctcctagggctgtgttcccagtattgttgggcgacctcgtc

SEQ ID NO: 11489 - DNA, 394 bp, Glycine max
  Clone ID: LIB3039-009-Q1-E1-D3
gaagatgactggattacaagatacttctttactggaggaactatgccttcggcaaatctacttctttatttccaagatgatgttactgtcaccaaccattggctagtaaatgggaaacactacgcacagaccagtgaagaatggctcaaaagaatggaccagagaatgactttcatcaagccaattatgcaatcaacatacggcaaggactcagctaccaagtggactgcttattggagaacattcttcatagctgtagcagaactttttggatacaataacggtgaagaatggatggttgcacacttccttttcaaaaagaaataaataagccgaaacctaatctttttatttgactatttgagaacggccttaggacaaaaaagctgctaca

SEQ ID NO: 11490 - DNA, 328 bp, Glycine max
  Clone ID: LIB3039-009-Q1-E1-D4
gtcagccactgcgatttccagaagcacccgttgtgagttttgcagcaagggatcttataagagggttgcttgtaaaggaacctcagcacagattggcttacaaaagaggcgctaccgagatcaagcaacaccctttttttgaaggtgtgaattgggcattgatcagatgtgccaccccacccgagatccccaaggctgtagagtttgagaagataccctcaccagcttcatcaagtggtggtgaaaaggctgctaaccatatctcaatagctaatcagaaaggttctgataattatctggagtttggattcctctagagagagagaga

SEQ ID NO: 11491 - DNA, 381 bp, Glycine max
  unsure (1)..(381): unsure at all n locations
  Clone ID: LIB3039-009-Q1-E1-D5
gagagatgtgtttggcaaagctatggggcttactgaccaagatatcgttgctctatctgggggtcacactattggagctgcacacaaggagcgttctggatttgagggtccctggacctctaatcctcttattttcgacaactcatacttcacggagttgttgagtggtgagaaggaaggtctccttcagctaccttctgacaaggctcttttgtctgaccctgtattccgccctctcgttgataaatatgcagcggacgaagatgccttctttgctgattacgctgaggctcaccaaaagctttccgagcttgggtttgctgatgcctaagcaacgtttaggggattgttgaagangcatggtgcccataatatttctct

SEQ ID NO: 11492 - DNA, 378 bp, Glycine max
  Clone ID: LIB3039-009-Q1-E1-D6
tgctgctccccccgcacaaactgctggtgaatcaagatataatttgagacgactcaaaactggagcaacaacttcatctgctagagctatgtctggtggtggcaaagaaagtcagggagaggttgatcgtgtaaaagatacagaagagggaattattgactcaaatacttctcattcacattcagtgggcattactaatgagaatggtgaaagcatacatcttgagcagtctctgaaaggtgtggagacaaaggccggttatggtggtgataccaccgagacctttgccaacaatatggccttgagtgaggatgtgaatggaacagcagatgatgtggatgagaatgatgctgagtatacgagtgaaccccgtgggga

SEQ ID NO: 11493 - DNA, 362 bp, Glycine max
  Clone ID: LIB3039-009-Q1-E1-D7
ggcacaagtgagtttgttgatcgagataactagaaacagtgtgatgaaaatgaaggtccttgttttcttcgttgctacaattttggtagcatggcaatgccatgcgtacgatatgttccctctccgaatgaacactggctatggtgcccgtactccggaggtgaaatgcgcaagttggaggcttgctgtggaagcacacaacatctttggctttgagaccattcctgaagagtgcgttgaagcaacaaaggaatacatccatggcgaacaatatagatcagactccaaaacagttaaccaacaagcttacttttatgccagagacctcgaagtccatcccaaggacacatttgtgttcagta

SEQ ID NO: 11494 - DNA, 137 bp, Glycine max
  Clone ID: LIB3039-009-Q1-E1-D8
ggatctcctcaaaactcaagcattgcatccctcttgaattgtaatttgttttgtgcttcatataaaagttctgccaaatcaagacggggtttaagatcataatgtgtgttttgcaacaatgcgcaaattctttgctg

SEQ ID NO: 11495 - DNA, 383 bp, Glycine max
  Clone ID: LIB3039-009-Q1-E1-D9
gactcaccacttcaaaacactcataacacaaagcacaaagcaaagctcatccttgagttaaaaaatggcagcagcttcttccatggcgcgctcaggcccatccttggctggcaaggccgggaagctgggcccatcagccccagaagtgggaagggtgagcatgaggaagaccgtcaccaagcaggtctcctcaggaagcccatggtacggcccagaccgagtcaagtacttgggcccattctctggcgagcccccgtcctacctaaccggtgagttcccacgcgactaccgctgggacactgctgggctttccgcagacgcaggaacctttcccaagaaacgtgaactcgaagtggatcactccaggtgggccatgctcggag

SEQ ID NO: 11496 - DNA, 381 bp, Glycine max
  unsure (1)..(381): unsure at all n locations
  Clone ID: LIB3039-009-Q1-E1-E1
gatgcacaagtttgttgagatagctagaagcaataagatgaaaatgaaagtgcttgttttgtttgttgctacagttttggcagcatatgaatgccatggctcagactaccagaagttccctctccaaatgaaaactgggtttggtgggcaatacagcaatgaggtggcatgtgccagttggaggcttggcgtggaagcaaacaacgtagtcaagtggcaaactgttcctgcagcttgcggagagtacatagctgactacgttctangagaccaatatagatcagattccaaaacagttaaccaacaagcttatttctatgctaaatccctcaaactcaccaacaaagatgtctttgtcttggacgttgacgacactactct

SEQ ID NO: 11497 - DNA, 379 bp, Glycine max
  Clone ID: LIB3039-009-Q1-E1-E10
gaggtttgtgatagtgattgcctccctctgctgccgtccctaatctgaatgctctcgccatctgcgatcggatttcatggttccaaagagggagaacgctcccccatcttcatccatgcctgccacgtctggccgtggctaacacaagaagaagaattggaacaagggtaaacaaaatgaaaaggtgaataacatggtgctcttcgatcagggtacctatgacaagctcctctctgaagcacccaactacaagctcattactccttccattctctctgaccgtttgaggattaatggatcacttgcaacgaaggctattacggaattgatggctagaggttcaatcacgatggtgtctgcccatgcaagtcagcagatt

SEQ ID NO: 11498 - DNA, 384 bp, Glycine max
  Clone ID: LIB3039-009-Q1-E1-E11
gggcacaagtgagtttgttgatcgagataactagaaacagtgtgatgaaaatgaaagtccttggtttcctcgttgccacaattttggtagcaagggaatgccatgcctacgaaaagttccctcccccaatgaacaccgggtaatgggcccgtaatccggaagttaaatgcccaagttgtgaggcttgccgtggaaacacaaaacaacctttgcttttagaacattcctgaagagtgcgttgaagcaacaaaggaatacatccatggcgaacaatatagatcagactccaaaacagttaaccaacaagcttacttttatgccagagacctcgaagtccatcccaaggacacatttgtgttcagtatagatggcaccgtactctct

SEQ ID NO: 11499 - DNA, 376 bp, Glycine max
  Clone ID: LIB3039-009-Q1-E1-E12
cgggattcatggcaatgttcatggccttaatggcatgcaattgttcaacattggtctctgcttccctacaaaccatgcatgtttcaaccaggggatcagcaccatcaacatcgttaggtccccctctatacaactctcctaccatgtcaccacatattgagcctttgtttccaactcctgcaggttctgcattctctccaacagactcctcatgatcccacacttcattcaattcttaaccctcccaaccgctgatgtcaccagtaatccatagtcattattggcttttccaccttcagagtctacgtaagttaaggccacatcttccaagggtgaatcactgccactttattcatttttacatcatgccattctg

SEQ ID NO: 11500 - DNA, 302 bp, Glycine max
  Clone ID: LIB3039-009-Q1-E1-E2
ggcacaagtgagtttgttgatcgagataactagaaacagtgtgatgaaaatgaaggtccttgttttcttcgttgctacaattttggtagcatggcaatgccatgcgtacgatatgttccctctccgaatgaacactggctatggtgcccgtactccggaggtgaaatgcgcaagttggaggcttgctgtggaagcacacaacatctttggctttgagaccattcctgaagagtgcgttgaagcaacaaaggaatacatccatggcgaacaatatagatcagactccaaaacagttaaacaac

SEQ ID NO: 11501 - DNA, 412 bp, Glycine max
  unsure (1)..(412): unsure at all n locations
  Clone ID: LIB3039-007-Q1-E1-F4
ggcagttcaattccaatatattccattctctctgtgtatttccctacctctcccttcaagatgcagatcttcgtcaagaccctcaccggcaagaccatcacccttgaagtggaaagctctgacaccatcgacaacgtcaaggccaagatccaggacaaggaaggaatccccccggaccagcaacgtctcattttcgccggaaagcaacttgaggacggccgtacccttgctgactacaacattcagaaggagagtactcttcacctcgtcctccgtctccgtggtggcatgcagatcttcgttaagacactcaccggcaagaccataaccctagaggttgaaagctccgacaccatcgataacgtcaaggccaagacccaggacaaagagggtatcnccccggaccagcaac

SEQ ID NO: 11502 - DNA, 378 bp, Glycine max
  Clone ID: LIB3039-005-Q1-E1-F8
gaggtgcaagagtttgttgtgagctataagctagtttatcgtgaggagaatatgaagttgtttgttttctttgttgctgcagtagttttggtagcatggccatgccatggcgcaggctaccaaaggttccctctccgaatgaaaactggctatggtgagcgttcttcggaggtaaaatgcgcaagttttaggcctgctgtggaagcacacaacatccgagcctttaataccattcctgaagagtgcgtttgaacaacaaaggactacattcatggggaacaatttagattagactccaaaccagtttaccaacaagctttcttttaagctagtgaacgcgaagtccatcacaacgacataattatattcggcatacat

SEQ ID NO: 11503 - DNA, 76 bp, Glycine max
  Clone ID: LIB3039-005-Q1-E1-G1
cgtcacccaaacgtcgacgctgcagaagacacaaaaggctatgttcttaacaacacagtctccttgcaccctggtt

SEQ ID NO: 11504 - DNA, 358 bp, Glycine max
  Clone ID: LIB3039-005-Q1-E1-G10
ggcacaagtgagtttgttgatcgagataactagaaacagtgtgatgaaaatgaaggtccttgttttcttcgttgctacaattttggtagcatggcaatgccatgcgtacgatatgttccctctccgaatgaacactggctatggtgcccgtactccggaggtgaaatgcgcaagttggaggcttgctgtggaagcacacaacatctttggctttgagaccattcctgaagagtgcgttgaagcaacaaaggaatacatccatggcgaacaatatagatcagactccataacagttaaccaacaagcttacttttatgccagagacctccaagtccaacccaaagacacatttgtgttc

SEQ ID NO: 11505 - DNA, 388 bp, Glycine max
  unsure (1)..(388): unsure at all n locations
  Clone ID: LIB3039-005-Q1-E1-G11
gagaaaaaggttggttgggcattcgccgtaaacagaagagagagagagagagagagagagtcctgaaacttgggtgcgattccttcactcacaacagcaacacatcactatggctcttctgagtcgagcctcttcacgcttccctcagctggtttcccctcaaagggtagtttcactccacacaacgctcccatctctgaacgcatccccatccacagccacgcctacaccatatgccccgccaccgcctccgtccgcttcctctcccgccggcgtttcgaaggcggcggagttcgtgatctcgaaggtggacgatctgatgaactgggcccgccgcggctccatctggcccatgaccttcgngctcgcctgctgcgccgtcgaaatg

SEQ ID NO: 11506 - DNA, 382 bp, Glycine max
  Clone ID: LIB3039-005-Q1-E1-G12
ggagatggctctgggaagaggcagtgcagtggttctactactttgcttcttgctgcttcactctcagatggctcgtgctgccacctacacagttggagattctgggggttggacctttaacactgttgcctggcccaaaggaaagctctttcgggctggtgacacacttgctttcaattatagccctgggactcacaatgtggtggccgtgaacaaggctggatatgatagctgcaagactccaagaggagccaaagtgtataagtcagggacggatcagatcagacttgccaagggacagaactacttcatctgcaattatgttggtcactgcgagtctgggatgaaaattgccatcaacgctgcctgagtttaataatat

SEQ ID NO: 11507 - DNA, 350 bp, Glycine max
  Clone ID: LIB3039-005-Q1-E1-G2
ggcacaagtgagtttgttgatcgagataactagaaacagtgtgatgaaaatgaaggtccttgttttcttcgttgctacaattttggtagcatggcaatgccatgcgtacgatatgttccctctccgaatgaacactggctatggtgcccgtactccggaggtgaaatgcgcaagttggaggcttgctgtggaagcacacaacatctttggctttgagaccattcctgaagagtgcgttgaagcaacaaaggaatacatccatggcgaacaatatagatcagactccaaaacagttaaccaacaagcttactttttatgccagagacctcaaagtccatcccaaggacaca

SEQ ID NO: 11508 - DNA, 395 bp, Glycine max
  unsure (1)..(395): unsure at all n locations
  Clone ID: LIB3039-005-Q1-E1-G3
gagccacgtacgcaactgaaaaggaaaaccctaagagatgaagagaactcctatcttgttccctctcttctttcttctttgtgccttcacctcatatctaccttcagccaccgctgatgatgatcatgtgtacgacactgacggcgataagcttcaatacggtgtcaattatttcgtgttgccagtgataagaggaaatggcggtggaatacaagtagcaaaagcaggaaacgaaacttgccctctgactgtggtgcaatctggcaatgagctctctgaggggttaccggataaagattgcatctcgataagcangagtcgctttcatcacccaaggccagcttttcaagagcattcagttcggtgtgtttcatccacactcaggacagggtgtc

SEQ ID NO: 11509 - DNA, 318 bp, Glycine max
  Clone ID: LIB3039-005-Q1-E1-G4
ggttgtgtgagtgaagaagcagagggagtagcggcattaaaaatgcagatcttcgtgaaaactctgacagggaagactataaccctcgaggtcgagagcagcgacaccatcgacaatgtcaaggccaagattcaagacaaggaatgcattcctccggatcagcagcgtttgattttcgccggaaagcagcttgaagatggaaggaccctggccgattacaacatccagaaggaatcaacccttcatctcgtcctcaggcttccttgtggcatcattgagccttccctcatggctttggctcgcaaatacaaccaggac

SEQ ID NO: 11510 - DNA, 370 bp, Glycine max
  unsure (1)..(370): unsure at all n locations
  Clone ID: LIB3039-005-Q1-E1-G5
atcccaaatacgcctaagattgatctgtggcaaagtctcctcaagcgaactctttcctggaaacgaatgtgagcatcatagtaaattgcttggtctctcctatcctaaaatccaattgaaattgttgatactgtgatgtactgtgacaacacttcagcgaggaaattcagccttaatagacctggaagcacaggactgggcctccaattttcaggttggagtactgacgttttggtattgatccactcatcttcctcagctctaaattcaacanatatgacatggtcttcctgattgtatgcacatactatccttactaatagtatttcagcaactaaaacaatgtgaactacatcatatggatgttcat

SEQ ID NO: 11511 - DNA, 358 bp, Glycine max
  Clone ID: LIB3039-005-Q1-E1-G6
ggcacaggtgagtttgttgatcgagataactagaaacagtgtgatgaaaatgaaggtctttgttttcttcgttgctacaattttggtagcatggcaatgccatgcgtatgatatgttccctctccgaatgaacactggctatggtgcccgtactccggaggtgaaatgcgcaagttggaggcttgctgtggaagcacacaacatctttggctttgagaccattcctgaacagtgcgttgaagcaacaaatgaatacatccatggcgaacactatacatcagactccaaaacagttaaccaacaagcttacttttatgccacagacctcgaagtccatcccaaggacacatttgtgttc

SEQ ID NO: 11512 - DNA, 388 bp, Glycine max
  Clone ID: LIB3039-005-Q1-E1-G8
catatttttctcccttctggcttctttttccttggttggtaatgatcctgcacactctaaatatttcttgtacagttaagtatttacttcctccgatcctctttataagaaacaagttttagtgtattttacactaaaacttgtttcttattaaaaaaaaaaagacagtaggtagtattataataatgaaactgagtgatgtcagttatcctggacccatgtttggttaggttgttctgccttgaccggttgttacatgtttgatattttgatcattacgtcttaatacgtacacaggctgttaaagaaacggggcgcaagttccgggagaccattcttgctcttggaggtggcaagccaccactagatgtaagatacactacatcac

SEQ ID NO: 11513 - DNA, 384 bp, Glycine max
  Clone ID: LIB3039-005-Q1-E1-G9
gaattgagcggcggggcagaggaaggggcagagttttggagtttgaaagagaaaatattgattgcagttgagttctaatgagtaacgaatacgattacctgttcaagcttctcctaatcggagactcttccgttggaaaatcctgcttgcttctcagattcgctgtgagtcatcacttcccttcactttcatctctcttgttcttgttcttcacctcctttgtttcttcatttcgtttcaggatgactcctatgtcgacagctacataagtaccattggagttgatttcaaaatcagaacggtggagctggaagggaaaaccgtcaagctgcagatttgggatacagctggacaggagcgattcaggactataacaagcagtta

SEQ ID NO: 11514 - DNA, 406 bp, Glycine max
  Clone ID: LIB3039-005-Q1-E1-H1
tctcacaacccatctttcatatccaaattccaatgcttcttcttccttcttatttcaatttcaatcactactattattactctttcacgcttttgcttctcgatttttaaaccctaaatctatctatctgtctaatagataagatagggcaaaaacaaaacaaaacaaaataaaaccctagccaaagaaagaccttgttgagcagcagcagcagagagagagaggcttatggaaggagtaccgcacccaatacccagaactgtcgaagaggttttcaccgattttaagggcagacgcgctggtttgattaaggccctcactactgacgttgaaaagttttaccagcagtgcgattccgagaaggagaatttgtgtctatatgggtttccaaatgaaacatgggaag

SEQ ID NO: 11515 - DNA, 373 bp, Glycine max
  Clone ID: LIB3039-005-Q1-E1-H10
ggcgcacccagagaggaggaagctttgagagagagagagggaggagggagagtgttgacgctccatcaagatgggtatttctagggattccatgcacaagaggcgtgccactggtggcaagaagaaggcatggagaaagaagagaaagtatgagcttgggcgtcaggccgcaaacaccaagttatcaagcaataaaactatccggaggattcgtgttcgaggtggcaatgttaaatggagggcattgaggttggataccggcaattactcatggggtagtgaagcagttactcgcaagactcgtattctagatgttgtttacaatgcctcaaacaatgagcttgtgcgaactcagaccctggtcaagaatgct

SEQ ID NO: 11516 - DNA, 354 bp, Glycine max
  Clone ID: LIB3039-005-Q1-E1-H11
gatttttgagtgtttgtgagtttgtctgtgacactctctctttctctctctctacgcttcacttttccgtaataaacccttcagaagcgaaagcggtttctcgtttttggaccttatctctctttctaaggttcgattctgcgtactttgggaggaacagacacacatgaaggattcgaattcggatctgtttgacccggtcatggcgatggagtccgagtggtctcgcggcggcaccacctccgatgccgatttcgccttcgccttcaacggcagcaacttctccgacagggttctccggatcgagatcatgcacgaccccgtcgacgccgccctgattcggacgcctgggca

SEQ ID NO: 11517 - DNA, 320 bp, Glycine max
  unsure (1)..(320): unsure at all n locations
  Clone ID: LIB3039-005-Q1-E1-H12
ggcacaagtttgttgagatagctagaatcaataagatgaaaatgaaagtgcttgttttgtttgttgctacagttttggtagcatatgaatgccatggctcagactaccagaagttccctctccaaatgaaaactgggtttggtgggcaatacagcaatgaggtggcatgtgccagttggaggcttggcgtggaagcaaacaacgtactcaagtggcaaactgttcctgcagcttgcggagagtacatagctgactacgttctangagaacaatatagatcagattccacaacagttaaccaacaagcttatttctatgct

SEQ ID NO: 11518 - DNA, 373 bp, Glycine max
  Clone ID: LIB3039-005-Q1-E1-H2
ggaagccttgaacttgaactatcgggtcttcatcttggctctctctgtttaagatcgatatggatttgtattttcctttggcaatacttgtgctgatattaggcacaccatactctagtgcttttgggaagagtgaaagtaatgtgaaaacagctgtttttctgtctcccaagtttgaacttggaccgggttcggtagccaataaatttgattatgatattgattttccaagaggtcgtattgccctcaagagtttcaatgctgaagtagttgatgaagcatggaactctgtgggtctccatgagacttatctccatcactgggttgttgcaagatactatcaacctaaatatgttaagacagacaaaagcta

SEQ ID NO: 11519 - DNA, 355 bp, Glycine max
  unsure (1)..(355): unsure at all n locations
  Clone ID: LIB3039-005-Q1-E1-H3
gacaaaacacaaacctagtgcatagcatattccagtgtttttcatttcatcgtgcattcaatggccaccacagcagctctatccggaaccatggtgagcacctccttcatgaggaggcaacctatgaccaccacaagcctaaagacattccccaacgttggtgaagctctttttggtctgaaaagtggacgaggtggtcgtgtcacttgcatggcctcgtacaaggtgaagctcataaccccagaaggagaagtggagtttgaatgcccagatgatgttttcattgttgacaaggcaaacgacgaaggcattgaacttccctactcgtgcanggccggttcttgcgtttcctgtg

SEQ ID NO: 11520 - DNA, 303 bp, Glycine max
  Clone ID: LIB3039-005-Q1-E1-H4
ggcacaagtgagtttgttgatcgagataactagaaacagtgtgatgaaaatgaaggtccttgttttcttcgttgctacaattttggtagcatggcaatgccatgcgtacgatatgttccctctccgaatgaacactggctatggtgcccgtactccggaggtgaaatgcgcaagttggaggcttgctgtggaagcacacaacatctttggctttgagaacattcctgaagagtgcgttgaagcaacaaaggaatacattcatggcgaacaatatagattagacccaaaacagttaaccaacaa

SEQ ID NO: 11521 - DNA, 289 bp, Glycine max
  Clone ID: LIB3039-005-Q1-E1-H5
gacacttcaaaatcctctagtaacccttcttttctctctctctctctcgtgttctgagctgctagaagcaatggagaggaaaagaagccatgcttctttcaccatgtttgcaatgcttgttggattgctctctcagagccttgtcattcctgtaatatccaccactgttgcagatcagaagaactactacaccccagatccacatgctggaagtccccccacaggctcatacaatactagtcgtccatctcatgagcatgggagctctccatgctcacatcacactagt

SEQ ID NO: 11522 - DNA, 346 bp, Glycine max
  unsure (1)..(346): unsure at all n locations
  Clone ID: LIB3039-005-Q1-E1-H6
gccccacaccaaacgagccatttgggagttaggttctgcacgctctgcttccagcgagtgttctttcttcgtttcaacaccttaatttgcacacgctgcttcttcagcttgagaaatggcacaagaaacctttctattcacatctgaatctgtaaacgagggtcaccccgacaagctgtgcgaccagatctctgatgcagtgctcgatgcgtgccttgaacaggaccctgacagcaaggttgcctgtgagacatgcaccaagaccaacatggtcatggtctttggagagatcacaaccaaagccaacgtanactatgagaagattgtccgtgacacatgccgcgaa

SEQ ID NO: 11523 - DNA, 385 bp, Glycine max
  unsure (1)..(385): unsure at all n locations
  Clone ID: LIB3039-005-Q1-E1-H7
gacggacgagggtttcgtttcgggtttgacgttgttcacaatcactttctgcgcttcactcactcccttcgtgcggttttctttctttgtcgaactcgtgcgaaaatgcgtgagattcttcacatacagggagggcaatgcggaaaccagatcggagcgaagttctgggaggtggtgtgcgcggagcacgggatcgattccacggggaggtactacggggacaacgagttgcaactcgagcgagtcaacgtctattacaatgaagcgagttgcggaaggttcgtgccganggcggtgctcatggatctagagccagggaccatggacagcgtcagatctggtccctacggtcagattttccgacctgataacttcgtcttcgggc

SEQ ID NO: 11524 - DNA, 379 bp, Glycine max
  Clone ID: LIB3039-005-Q1-E1-H8
gatgcacacttaattcctcaggatatctacactactactgcatctaactgaaatcaaagtttcaattaactgaagcagacatggcctctcagagttgcatcattttggctttgttcatcgctattttttccttctcaagcatggacacagcatttgcagcacgccatctcttgcagaatattccagggctaccagatttctctacaccccccaccttgccacctttaacaatcccaaatgtactatgcaatggatccatattcacattcttacccatcttatgtccaccatcttcaagcaccagtactactatcccttaaggcttcacttggagttcgatacataatttatgcactaatctctacgtactcgatctgca

SEQ ID NO: 11525 - DNA, 388 bp, Glycine max
  Clone ID: LIB3039-005-Q1-E1-H9
aggggcacaagtgagtttgttgatcgagatacctacacacaatgtgatgaaaatgtaagtccttgatttcttcgatgctacaattttcgtagcatgggaattccatgcgtacgatatgttccctctccgaatgaacactggctattgtgcccgtactccggacgtgaaatgcgcacattggaagcttgctgtggaagcacacaacatctttggctttgagaccattcctgaagagtgcgttgaaacaacaaaggaatacatccatggcgaacaatatagatccaactctagtacagttaaccaacaggcttactttttatgccagagacctcgaaaatccatccccaagaaacatttgtgttcagtatagatggcaccgtactctcta

SEQ ID NO: 11526 - DNA, 364 bp, Glycine max
  Clone ID: LIB3039-006-Q1-E1-A10
gaaggtgcaagagtttgttgtgagctataagctagtttatcgtgaggagaatatgaagttgtttgttttctttgttgctgcagtagttttggtagcatggccatgccatggcgcaggctaccaaaggttccctctccgaatgaaaactggctatggtgagcgttcttcggaggtaaaatgcgcaagttttaggcttgctgtggaagcacacaacatccgagcctttaaaaccattcctgaagagtgcgttgaaccaacaaaggactacattaatggcgaacaatttagatcagactctaaaacagctaaccaacaagctttcttttatgctagtgaacgcgaagtccatcacaacgacatattt

SEQ ID NO: 11527 - DNA, 130 bp, Glycine max
  Clone ID: LIB3039-006-Q1-E1-A12
gacattttctacgtattgaatctcaagattctaagagagattttgctgctctttgaacaatggtgtttgcttgattttggatatggcgctgggctcacatctcatcacccttaacctctcagacactagt

SEQ ID NO: 11528 - DNA, 364 bp, Glycine max
  Clone ID: LIB3039-006-Q1-E1-A2
gacagacagacacacactcgggtctgccgtcacaaaaaaattatcgagatcccctttttctcctaagaaaagccatggctaagggtcccggtctctagtctgacatcggcaagaaagccagggatctgctgttcaaggactaccacagtgaccagaagttcaccatcaccacctactcacccactggagttgctataacagcatcaggaaccaggaaaagtgaactgtttgtggctgatgtcaaaacccagttgaagaacaaaaacatcactactgatatcaaagttgatacagattctaatctcttcacaactatcactgttaatgaacctgctcctggtctgaaggctatttttagcttcaa

SEQ ID NO: 11529 - DNA, 281 bp, Glycine max
  Clone ID: LIB3039-006-Q1-E1-A3
gcgtcaaacgcgaggaggagacgacagaaggcggaaaaaaaaaatgggaatgagagattttcaggatcaagcttaaggcattccgggtgaaacgttttttctttggaagaaggagaaatagatggagtgcaaagaagccttcatggatgattccaatatcacatggtcatcatgtggtggagcatcatgtaatcaaaggtgggtctgatgactcgaacttcgattcagttgtgatacagagagagcaaatgggtcacacagaactgtggtactttggaatc

SEQ ID NO: 11530 - DNA, 199 bp, Glycine max
  Clone ID: LIB3039-006-Q1-E1-A4
tggagaagcaaagggcgttgagttgttgccagtggaacaagccacaccaacgataggtcctcctcctcctcctgctcctcccactacgagggaagaggccactggaagactccgatgcccactccagttacgtcaagattctcgctgttattcaagaccttcgtcctcactttcgccaagttctccgaactccatacta

SEQ ID NO: 11531 - DNA, 230 bp, Glycine max
  Clone ID: LIB3039-006-Q1-E1-A5
ggttccaaaagacgacagaaggggatacagtagtgagtatgttgagcgtcattgtgagcatcaatatgatgaaatcatgtggcctcgtcttcttcctcgtcatcattgtcgttgcatcgcaattggatgcgtacgaggtgttcacactctgtgtgtcaaatggccatggggtccatggtctggatgtgaaatacccaagttgtgcgtttgccggggggacacacagtatc

SEQ ID NO: 11532 - DNA, 290 bp, Glycine max
  Clone ID: LIB3039-006-Q1-E1-A7
ggcacaagtgagtttgttgatcgagataactagaaacagtgtgatgaaaatgaaggtccttgttttcttcgttgctacaattttggtagcatggcaatgccatgcgtacgatatgttccctctccgaatgaacactggctatggtgcccgtactccggaggtgaaatgcgcaagttggaggcttgctgtggaagcacacaacatctttggctttgagaccattcctgaagagtgcgttgaagcaacaaaggaatacatccatggggaacaatatagatcagactcaaaaa

SEQ ID NO: 11533 - DNA, 295 bp, Glycine max
  Clone ID: LIB3039-006-Q1-E1-A8
catcgccggtgggctcgtcagggagaagatgaagtacttgcgtttcctccgcaagcgcatgaacaccaagccctctcacggcggcatccagttccgtgcacccggcaagatcttctggcgcaccgttcgtgggatgataccacacaagacaaagcgcggggaagctgctcttgcgcgattgaaggtgtatgagggcattcctcctccttatgacaagaccaagacgatggttgttcctgatgctctcaaggtgttgaggcttcagaacggacacaaatactgtcatctgggccaa

SEQ ID NO: 11534 - DNA, 206 bp, Glycine max
  Clone ID: LIB3039-006-Q1-E1-A9
gccaaaagctaagcacaacaagaccacaatccaaataagtgttgacaaaaaaatgcgtttggttggttggaaattagttattaaggattttggaatcatccgaggaaacaaagggcacaagataaatgggaacttggtgattaagccaaaaaatgtgttggatatcaacagcatcaccaatgttaaaggtgtcaatgggaaccgga

SEQ ID NO: 11535 - DNA, 282 bp, Glycine max
  Clone ID: LIB3039-006-Q1-E1-B11
cccaagcgtccacccacgcgtccggaagacgacagaacgggaagacacattgattgcactaacggcatagaaatacacaatacaacgtggtttatgtttatccgcctccacttggatatctccgtcctcggtcccaaataacaaactaaactgctccaaaccaaacacaatactcaacataactcattttcgcagatctttctgttccttcaaaatgcaatcttccatttcactctcttcttcctacgctcgcaccatttcgggaccacactactcttttcc

SEQ ID NO: 11536 - DNA, 366 bp, Glycine max
  Clone ID: LIB3039-006-Q1-E1-B12
ggcacaagtgagtttgttgatcgagataactagaaacagtgtgatgaaaatgaaggtccttgttttcttcgttgctacaattttggtagcatggcaatgccatgcgtacgacatgttccctctccgaatgaacactggctatggtgcccgtactccggaggtgaaatgcgcaagttggaggcttgctgtggaagcacacaacatctttggctttgagaccattcctgaagagtgcgttgaagcaacaaaggaatacatccatggcgaacaatatagatcagactccaaaacagttaaccaacaagcttacttttatgccagagacctcgaagtccatcccaaggacacatttgtgttcagtataga

SEQ ID NO: 11537 - DNA, 298 bp, Glycine max
  Clone ID: LIB3039-006-Q1-E1-B2
ggtggtgtagactgtcgagcagtgaataccagttgctcctatagccggcgctcaacaacatggcggacaaggcagtcaccatccgaaccagaaagttcatgacgaacaggcttctctccagaaagcaattcatcgttgatgtccttcatccagggagggctaatgtttccaaggctgaactgaaggagaaattgggcagaatgtatgacgtgaaagacactaacactgtatttgtcttcaagtttcgaactcattttggtggtggcaagtccactgggtttggtttgatctatgattc

SEQ ID NO: 11538 - DNA, 210 bp, Glycine max
  Clone ID: LIB3039-006-Q1-E1-B3
ggaccgagaaagatattaggggttttgagtgcggtgcggggatcctagcactctcttctgcagctttcgccgacagcttcattcaccatggctgagcgaaacgaaaaggcttttttgaaacaaccaaaagtgtttctcaacctccaagaaaactgggaaaggaaagagacccggaaaaggtgggaaccgcttttgggaaatccattgggc

SEQ ID NO: 11539 - DNA, 360 bp, Glycine max
  Clone ID: LIB3039-006-Q1-E1-B4
gaaggtgcaagagtttgttgtgagctataagctagtttatcgtgaggagaatatgaagttgtttgttttctttgttgctgcagtagttttggtagcatggccatgccatggcgcaggctaccaaaggttccctctccgaatgaaaactggctatggtgagcgttcttcggaggtaaaatgcgcaagttttaggcttgctgtggaagcacacaacatccgagcctttaaaaccattcctgaagagtgcgttgaaccaacaaaggactacattaatggcgaacaatttagatcagactctaaaacagttaaccaacaagctttcttttatgctagtgaacgcgaagttcatcacaacgacat

SEQ ID NO: 11540 - DNA, 349 bp, Glycine max
  Clone ID: LIB3039-006-Q1-E1-B6
gataactgagcgcttcgcagaagaaccatttctctcttttgtctctctcattttcaactctcaacaatgccgccggcgaagcgcaaagcggaaggaactgctgcagctgccgcgtcttctgcggcggctccgatgagagtcactcgtgctgcggcgaagcgcgccgccgcgagctccgaccctccgccggtgccggtggttaagaaggcggcgaagaaggccaaagttgctgctgctgctaagaagcagaaaaggaacgaaaaggaaaatgaagatgttccggttgagagcgagaacaaagcggaagaaaaagaagaaggaggagacgcctccgagaagaacgttctag

SEQ ID NO: 11541 - DNA, 337 bp, Glycine max
  Clone ID: LIB3039-006-Q1-E1-B8
ggatagctaaaattccgaatcaggaaagaaaaagcctactaatgccgccgatggggaggaagcgaaaggtagcacccagatcttctctatcgagcgagccacctctcaagcagcagcaaccaaaacccgaaaatccccctcaagaatacgaagaagtcgaagaggaagttgaggaagaagaggtataggaagaggtcgaagaggaagaagaagaagaagatgaggacgaggaagaagaggaggaggaagaagaagaataagaagaaaacgacgtcgtcaaacaacagcagcagcaacagcaagacgaagacgacatcgcgatatcgaaacttctgga

SEQ ID NO: 11542 - DNA, 351 bp, Glycine max
  Clone ID: LIB3039-006-Q1-E1-B9
gaaccaagtttgcttgcgtgtatattcattttagcatcaaggttgaatctcagagaaaaggaaacatcgacaagcatgtctggaagaggaaagggaggcaagggtctcggaaagggaggagccaaacgacaccgtaaggttctgagggataacattcagggaatcaccaagcccgcgattcgccgtctggccagacgtggtggcgtcaagcgtatcagtggtcttatctatgaagaaactcgcggtgttctcaagatctttctacggaacgtcattcgcgacgctgtcacctacactgaacacgctcgccgcaagaccgtcactgccatggacgttgtttacgccctcaag

SEQ ID NO: 11543 - DNA, 358 bp, Glycine max
  unsure (1)..(358): unsure at all n locations
  Clone ID: LIB3039-006-Q1-E1-C10
gacacacagctattcctcttaagcttgctactgagtttccacactgcataccttaggtcttccgaattcgaagttaatttgcaagatggctaaggaaaaggctcagatcaacattgtggtggttggtcatgtggaccctgaggaggcaaccaccattaacgagctgaagaagcctgttgtggagaaagaagctccagggcatgccatatgagggcatgcacgtacggcctcggaagggaaccagaaaattatgttaacanaataatctggaaccctaatgtatcagtgtcatcatcagtgtgtagtttaagctagctttgctatggttacgttctttgagatgagagtcttgatgaac

SEQ ID NO: 11544 - DNA, 364 bp, Glycine max
  unsure (1)..(364): unsure at all n locations
  Clone ID: LIB3039-006-Q1-E1-C11
gaagctctggcaaaattccaggatcctgcagaggctgacaagttgatgaaaattcagagagagttggatgaaacaaaaatcatccttcataaaactattgatagtgtgctggctagaggggagaagctggacagtttagttgagaagagttctgatctgagtgccgcatcgcagatgttctacaaacaggccaagaaaaccaatcagtgttgtaccatattgtaagcaagctttcaagctgtcagtatgcagcgtgctcgtcttgaatcctgttccgacatggagactgttggtangagaaaatagcctcatatgtctatatcactccattgtttgcttgttgaaaattatgttatatacccta

SEQ ID NO: 11545 - DNA, 379 bp, Glycine max
  unsure (1)..(379): unsure at all n locations
  Clone ID: LIB3039-006-Q1-E1-C12
gacacttcaaaatcctctggtaacccttattttatctattctctctctttcttttgtgttctaagcagctagaagcaatggagaggaaaagaagccatgcctctttcaccatgtttgcaatgcttgttggagtgatctctcagagccttgtcattcctgtagtatccaccactgttgaagatcagaagaactactacaccccagatccacatgctggaagtcccccctcaggctcacacagtagtactcctccatctcatggccatggaagctctccaccctcacatcatcacagtagtccaagtactccatcaacaccctcaggtggaaactgtggatcatcacctccacaacatcatgatccaacancaccctcaac

SEQ ID NO: 11546 - DNA, 299 bp, Glycine max
  Clone ID: LIB3039-006-Q1-E1-C2
ggcacaagtgagtttgttgatgcagatagctagaaacagtgtgatgaaaatgaaggtccttgttttcttcgtggctacaattttggtagcatggcagtgccatgcgtacgatatgttccctctccgaatgaacactggctatggtgcccgtactccggaggtgaaatgcgcaagttggacgcttgctgtggaagcacacaacatctttggctttgagaccattcctgaagagtgccttgaagcaacaaaggaatacatccatggcgaacaatatagatcagactccaaaacagttaacc

SEQ ID NO: 11547 - DNA, 236 bp, Glycine max
  Clone ID: LIB3039-006-Q1-E1-C3
aaatgaaagtgcttgttttgtgtgttgctacagttttggtagcatatgaatgccatggctcaaactaacacaagttccctctccaaatgaaaactgggtttggtgggcaatacagcaatgaggtggcatgtgccacttggaaggctggcgttggaacaaacaacgtactcaactggcaaactgttccctcagcttgcggagagtacataactgactacgttctaggataccaatat

SEQ ID NO: 11548 - DNA, 318 bp, Glycine max
  Clone ID: LIB3039-006-Q1-E1-C4
cggggagtcaagatgcgttctttgtgaaagaagggactcaacaagtacgtcaaacagctccagcaacaccctttgagaaccaacgtaatcactgcacgggtactatcagcgatcagcgatgttgtgtctcagaaacttaccgggatacagaaaattcaactcaaacgacttcttttcagagtgatttttggagccgcttatcttggaccctttggacacttttttcatttaatactggataaaattttcaaaggaaagagagattcaaacactgtggctaaaaaagttctgacttaacagttaacatccaatccttgg

SEQ ID NO: 11549 - DNA, 307 bp, Glycine max
  Clone ID: LIB3039-006-Q1-E1-C5
gaacgaaccagtcattgtccctagcccaacccccgccctatggccaccctcggccagatccaaaacggcgtttcttcagacaatctcgccgccgctgaacctcgctccagcaccgcctacgtccccccgcccgatgccgccgccgataagcggtggccggggtggccgggccactgcgtgttccgcctcatcgtgccggtgctcaacgtcggcagcatcatcagccgcaaggaggagctcatcaacaagacctgcgaggaaacgaaagctcgcattcgtgtcctcgacggcgccctcggcacctccg

SEQ ID NO: 11550 - DNA, 349 bp, Glycine max
  Clone ID: LIB3039-006-Q1-E1-C7
gatcgcaagccacttcagagaaaatggcggtacctctgctctcgaagaagatcgtgaagaagagggtgaagaagttcaagaggcctcagagtgacaggaaaatttccgtcaagacaaactggcgtagaccaaagggtatagattcccgtgttaggagaaagttcaagggatgcactttgatgccaaacatcggttatggttctgacaagaagacccgccactatctccctaatggttttaagaaatttgttgttcacaatgtgaaggacttggaactgctcatgatgcacaacaggacttactggtctgagattgctcacaatatatccacaggaaagagaaaagatat

SEQ ID NO: 11551 - DNA, 264 bp, Glycine max
  Clone ID: LIB3039-006-Q1-E1-C8
taatgggatcgcaagccacgtcagataaaatcagggtacctctgctctcgagcaatatcgtcgacaagacgatgaaggggttcaggaggcctcagggtgacaggaaaagttccgtcaacacaaactggcgtagaccaaagggtatacattcccgtgtgaggacaaagttcaatggatgcactttggggccaaacatcggttatgggtctgacaacaagaccgccagtatctccctaagggttttaagaaatttgttgttcacaa

SEQ ID NO: 11552 - DNA, 196 bp, Glycine max
  Clone ID: LIB3039-006-Q1-E1-C9
caaaaagagatagcaatccacatcatcgaaaatggctgcacctctgctctctaataaaatcatgaacaataaggtgaaggggttcaggacgcctcatattgacatgataatttccgtcaagacaaaatgtcatatatcacacggtatagactccattcttaggacaatgttcatgggatacactttggatccaaag

SEQ ID NO: 11553 - DNA, 355 bp, Glycine max
  unsure (1)..(355): unsure at all n locations
  Clone ID: LIB3039-006-Q1-E1-D1
ggcacaagtttgttgagatatgtagaagcaataagatgaagatgaaagtgcttgttttgtttgttgctacagttttggtaccatatgaatgccatggctcagactaccagaagttccctctccaaatgaaaactgggtttggtgggcaatacagcaatgaggtggcatgtgccagttggaggcttggcgtggaaggcaacaacgtagtcaagtggcaaactgttcctgcagcttgcggagagtacatagctgactacgttctangagaccaatatagatcagattccaaaacagttaaccaacaaacttatttctatgctaaatccctcagactcaccaacaaagatgtccttgt

SEQ ID NO: 11554 - DNA, 358 bp, Glycine max
  Clone ID: LIB3039-006-Q1-E1-D10
gaactcttcctctttttacttcccctatggctcgtcactccttgctcttagccctcctcctcttcgccgccgtggccaccgccgcgatggcggtggccgcgtccgacgccgacgacatcctgatccgtcaggtggtgccagatgttggcgaagccgaagaggaggacaacctgctgaacgccgagcaccacttcgcgagcttcaaggccaagttcgccaagacctacgccaccaaggaggagcacgatcatcgcttcggcgtcttcaagtccaacctccgcagagccaggctgcacgccaagctcgacccctccgccgtccacggcgtcaccaaattctccgatttaactccgggcga

SEQ ID NO: 11555 - DNA, 258 bp, Glycine max
  Clone ID: LIB3039-006-Q1-E1-D12
gacaacactcatagtagagtaaccaaaaggagagtgcaataactcgttgtacattcctagtgtgtgggagagacatggctaagatgtgtgttttggtgttggttcttgctctggctgtggccacaagtgccagaaacgttcccaaccccaaggatgctggtcttaaggaccagaagaacttcatcagctatggtggagttggtggttattccgggattgggaacaatggactgccttttggaggagctggtgccggaa

SEQ ID NO: 11556 - DNA, 355 bp, Glycine max
  Clone ID: LIB3039-006-Q1-E1-D3
gaacacctcctaaagttttatagagagaaattttcccaacagaaattcccattccctaacaaaattttagaaaaattatgttactataattgtctttgtgtacagatttgagagactaacactatattttactacaattatcttattttggttcaacccgattttgccttgtatgtactccatatctgccgtattagttgttggatttgggaacatcctttccttctctggatcagcttttggctcaatggcaacatttatcccatcctggttgaacccgattctggcttgtatgtcctccatatcttcagtaactgttgcattttaggacatccatttcatctcttgatcagca

SEQ ID NO: 11557 - DNA, 384 bp, Glycine max
  Clone ID: LIB3039-006-Q1-E1-D4
gatagctattcgcagttcccagattcagtttaatcctaattctgcacttcttgatcattcgatttttctcctcaagatgcagagattcggaaaaacgttgaccggcaagaccatcacccttgacgtggaatcctccgacaccattgacaacgtaaaagctaagattcatgacaaggaagggatctcacctgaccagcagagacttatctttgcgggtaaacaacttgaggatggtcgcacccttgccgattacaacatccacaaggaatcaaccctccatctcgtgcttcgcctcaagggtggcatgcagatctttgtcaagactttgaccgggaagaccatcacccttgaggtggaatcctcggagagcattgagaatgttaa

SEQ ID NO: 11558 - DNA, 183 bp, Glycine max
  Clone ID: LIB3039-006-Q1-E1-D7
ggtgtgattgtttgatggtgtgacgcggtcatcctctcttgttgttctgtggctgtgtgtgtgtgttcgctcacccgaacatgtcatgctgtcgtggtaactgtggatgcggaagctcctgcaagtgcggaaatggctgcagaggctgcaagatgtacccatacttgaactacactgagtcaa

SEQ ID NO: 11559 - DNA, 360 bp, Glycine max
  Clone ID: LIB3039-006-Q1-E1-D8
ggcaagagtttgttgtgagctagaagctagtttatcgtgaggagaatatgaagttgtttgttttctttgttgctgcagtaattttggtagcatggccatgccatggcgcaggctaccaaaggttccctctccgaatgaaaactggctatggtgagcgttcttcggaggtaaaatgcgcaagttttaggcttgctgtggaagcacacaacatccgagcctttaaaaccattcctgaagagtgcgttgaaccaacaaaggactacattaatggcgaacaatttagatcagactctaaaacagttaaccaacaagctttcttttatgctagtgaacgcgaagtccatcacaacgacatattta

SEQ ID NO: 11560 - DNA, 386 bp, Glycine max
  Clone ID: LIB3039-006-Q1-E1-D9
aagacgacagaagggtggaggcatctggcatattggttaagcggactgatgaagagctgttaaaaacattggattcgttcattgttgtggaaagagaaggtcacataattgcttgtgctgccctttttcctcactttgaggagaagtgcggagaggttgcttgtattgcagtatctcctgattgccgtggccaatgacagggtgacaaattgcttgattatatggagaagaaagcatcatctcttggattgaatatgcttttccttcttacaacacgtacagcagattggtttgtaaggcgtggattttcggaatgttcaattgattatcttcctgaaaagaaaatgagaatgatcaatctttcccgcaattctaagtattatatg

SEQ ID NO: 11561 - DNA, 289 bp, Glycine max
  Clone ID: LIB3039-006-Q1-E1-E1
gattgagtgagagtgttccctctcctctcttctgctcaaacaatgtcgcaaacaacgttgcacgctttcgtcgccaaaaaccttggatgtggaatggcagaaggcaagtgtctcccatgttcaagtgtttctggaagaactgctgctgtatattcctactcttctctaggtcatcgcagaattcattcccatgtcccaagttagaggactaaagtgtggctttaggggtgcatcttttgtatgtgaagcacagaggaaccagatttctcaaggcaaaacaagcatgggt

SEQ ID NO: 11562 - DNA, 368 bp, Glycine max
  Clone ID: LIB3039-006-Q1-E1-E11
gaaggtgcaagagtttgttgtgagctataagctagtttatcgtgaggagaatatgaagttgtttgttttctttgttgctgcagtagttgtggtagcatggccatgccatggcgcaggctaccaaaggttccctctccgaatgaaaactggctatggtgagcgttcttcggaggtaaaatgcgcaagttttaggcttgctgtggaagcacacaacatccgagcctttaaaaccattcctgaagagtgcgttgaaccaacaaaggactacattaatggcgaacaatttagatcagactctaaaacagttaaccaacaagctttcttttatgctagtgaacgcgaagtccatcacaacgacatatttatat

SEQ ID NO: 11563 - DNA, 361 bp, Glycine max
  Clone ID: LIB3039-006-Q1-E1-E12
gacttgtaataattcttataacacaacacaacccatggacaccacctccgcattcctcctccttcccctcctcctgctgctccacctcgccatcgccgctcacggcatcggcatcaactacggcacgctcggcgacaaccttccaccgcccgcggtggtggcgaacttcctgaagactaagacgatcatctaccgcgtgaagatctacgacgtgaacccggacatcctgcgggccttcgccggcagcggcatctccgtgacggtgaccgcccccaacggtgacatcgccgccttaaccaaaatcgactcggcgatgcagtgggtggcgacgcacatcaaaccctttcaccctcatgccaaa

SEQ ID NO: 11564 - DNA, 360 bp, Glycine max
  unsure (1)..(360): unsure at all n locations
  Clone ID: LIB3039-006-Q1-E1-E3
gacaacaatctaagagtgagttgtgtgtagttgaaattaacaagtatcaaagatgtttggaatcatcggaggaaacaaaggtcacaagataaacgggaacttggtgattatgcgaaagaatgtgttggatatcaacagcattaccagtgttaagggtgtcatcggaaccggcattaacatcattggangagtcgtcggaaccgttactgctttggcgtcccacatctccatccagctcattagtgccaccaacgctgaatgacatgggaaaggaaaagttggaaaggctacaaatttaagaggacaagtgtcgttaccaaccttgggagctggcgaagatgcatacgatgttcattttga

SEQ ID NO: 11565 - DNA, 367 bp, Glycine max
  Clone ID: LIB3039-006-Q1-E1-E4
ggcacaagtgagtttgttgatcgagataactagaaacagtgtgatgaaaatgaaggtccttgttttcttcgttgctacaattttggtagcatggcaatgccatgcgtacgatatgttccctctccgaatgaacactggctatggtgcccgtactccggaggtgaaatgcgcaagttggaggcttgctgtggaagcacacaacatctttggctttgagaccattcctgaagagtgcgttgaagcaacaaaggaatacatccatggcgaacaatatagatcagactccagaacagttaaccaacaagcttacttttatgccagagacctcgaagttcatcgcaaggacacatttgtgttcagtatagat

SEQ ID NO: 11566 - DNA, 237 bp, Glycine max
  Clone ID: LIB3039-006-Q1-E1-E5
gaaggtgcaagagtgtgtgtgtgagctataagctagtttagcgtgaggagaatatgaagttgtttgttttctttgttgctgcagtagttttggtagcatggccatgcgatggcgcatgttaccaaatgttccctctccgaatgaaaactggctatgagtgagcgttcttcggatgtaaatatcgcacgttagaggcatgctgtggaagcacataacatccgagcctttaagaccatt

SEQ ID NO: 11567 - DNA, 347 bp, Glycine max
  Clone ID: LIB3039-006-Q1-E1-E6
gagtgaagaacaagtcttgcattgggtggagcatacttagaaacagcaactatgtctctcatgcagcttactagctcccctgttggctcactggtccgtttcattgtaatatttgctttatggtacagaaccatggctttggccaagttgccaccaaacgcttcatcagttccagcagttttagcgtttggagattccatcgtggacccaggcaacaacaacaacataaaaacattgatcaagtgcaacttcccaccttatggaaaggattttcagggaggaaacccaacgggtcgattttgcaatggaaaaattccttctgacttaatagttgaacaattgggtat

SEQ ID NO: 11568 - DNA, 364 bp, Glycine max
  unsure (1)..(364): unsure at all n locations
  Clone ID: LIB3039-006-Q1-E1-E7
gagagacactctctataatgtttaaaaattaaacatgattttccttcctttcattaagagaaatttagaactggtaaggtagaaggaaaatggataaagctctcactaaactgggtagcacttggatctccaagaaagccaaggcagagatttcccacataaccgacgacctatcatctctctcaaatactgtcgaagagaaggcaaagcttttcatcaacaagctcaaaggtaaaacccagaaagccttgccagatctccttcgagagtacaacattcctccgggtctgttcncccgcaacataacatgctacgaatttgatgcatcaaagggaaagttgatcgtgtacttatcctcaccctg

SEQ ID NO: 11569 - DNA, 278 bp, Glycine max
  Clone ID: LIB3039-006-Q1-E1-E8
aaacatgtcacgatgaagcgtatcgggagtgagagagaagtgtctaccagacatcttcaaacgcaacgagaagtcagtgcgtgggcgagagtgagcactattcggagtgagcggaggtatgattaattatggtgatagcataaggaacaccttggtaagagtttgaagttgggtacggtggatggggataagatgtcccggacaaggttgaatctgccccgtcgagggaatatgaatgtatccccgacgcttttgatggttatcactcggtcaggctg

SEQ ID NO: 11570 - DNA, 371 bp, Glycine max
  Clone ID: LIB3039-006-Q1-E1-E9
ggtctgaaacagagagtgagagagagggcaaaaccctagctttggagtcttccctcccatctcccacttcttgcaatctctgcagccatggcgagtaccaaagttcagagggttatgacccaacctattaacttgattttcaggtttcttcagagcaaagcgcgcattcagatttggctttttgagcagaaggatttgaggattgaaggccgaatcatcggttttgatgaatacatgaatttggttcttgatgatgctgaagaagtgaacgtcaagaagaaaagcagaaagacattagggaggatccttcttaaaggagacaacataaccttgatgatgaacacggggaaatgattaacactctggcacag

SEQ ID NO: 11571 - DNA, 378 bp, Glycine max
  Clone ID: LIB3039-006-Q1-E1-F11
gaattcagcaaaacactcaagcacaacatctctatcgagtaaattaactatgaagcctaccctactattatccctttccttcctgcctcgctttgctttcctggctctttcagaagatgttgaacaagttgtggacataagtggcaaccccattttcccaggtggcacatattacattatgccatcaacttggggcgctgccggtggtggattgaaactaggccggacaggaaactcaaactgcccagttactgttttgcaagattactcagaaatcttccgtggcacaccagtcaaattcagcatacctgggataagccctggaatcatctttacaggtactccacttgaaatcgagttcgcagagaaaccttaatg

SEQ ID NO: 11572 - DNA, 376 bp, Glycine max
  unsure (1)..(376): unsure at all n locations
  Clone ID: LIB3039-006-Q1-E1-F12
agaacgggaggtttgtgatagtgattgcctccctctgctgccgtccctaatctgaaggctcccgccatctgcgatcggatttcatggctccaaagaaggacaaggctcccccaccttcatccaagcctgccaagtctggcggtggcaagcagaagaagaagaagtggagcaagggtaagcaaaatgaaaatgtgaataacatggtgctcttcgatcagggtacctatgacaagctcctctctgaggcacccaaatacaagctcattactccttccattctctctgaccgtgtgaggattaatggatcacttgcaangaaggctattaaggaattgatggctagaggttcaatcangatggtgtctgcccatgcaag

SEQ ID NO: 11573 - DNA, 356 bp, Glycine max
  Clone ID: LIB3039-006-Q1-E1-F2
gacttgtaatagttcttataacacagcagaacccatggccaccacctccgcattcctcctccttcccctcctcctgctgctccacctcgccatcgccgctcacggcatcggcatcaactacggcacgctcggcgacaaccttccaccgcccgcggcggtggcgaacttcctgaagacgaagacgaccatcgaccgcgtgaagatctacgacgtgaacccggacatcctgcgggccttcgccggcagcggcatctccgtgacggtgaccgcccccaacggcgacatcgccgccttaaccaaaatcgactcggcgaggcagtgggtggcgacgcacatcaaacccctttcacctcaga

SEQ ID NO: 11574 - DNA, 315 bp, Glycine max
  Clone ID: LIB3039-006-Q1-E1-F3
tcactctgcgaaggtgcaacctgacagcctccaaatccaatggcttcagagaagagactttcgaacccaatgagggagataaaagtgcagaagctcgtcctcaatatctctgttggcgagagtggggatcgtctcaccagagccgccaaggtgttggaacaacttagtggccaaaccccagtgttttccaaagcacggtacactgttcgttcccttgggattagaagaaatgagaagattgcatgctatgtcactgtcaaacgtgacaacggaatgcaacttttggagacttgtttgaaggtgaaggaatatgaa

SEQ ID NO: 11575 - DNA, 345 bp, Glycine max
  Clone ID: LIB3039-006-Q1-E1-F4
gacaacacaacgcaacacaacgcgcactctctcttttctctcttaacacaaaaaccctattgttcttcgcggtttcgccgattctcgccatgccgaaagccaaatccgacgccaaagccgccgatagccggttgaagcgcaagggcgctggtgctggaaggaagcaatcgaagaaagctgctaaggatcctaacaagccaaagagacctccaagcgctttcttcgtttacatgtccgagttcagagagcagtttaagagggagcatcctaacaacaaatccgtcgctgttgtcggtaaagctggtggtgacaaatggaaatcgctgtctgatgctgaaaaggccc

SEQ ID NO: 11576 - DNA, 342 bp, Glycine max
  Clone ID: LIB3039-006-Q1-E1-F5
ggaagctttgcattcgagtcatgcaagattcagcaagtgcgttttggaagcagagaccgaaatacttcgagatggcccgtacagagcaaactgctcgtaagtcaactggaggaaaagctcccaggaagcagcttgcaaccaaggctgcacgtaagtctgcacgaacaactggtggtgtgaagaagcctcagcggttagcgccctggaactgttgctcttcgtgagattaggacataccagaagagcactgagcttctaatcaggaagcttcctttccagaggttggttcgtgaaattgcccaggatttcaagactgatcggcgtttccagagccatgcggtg

SEQ ID NO: 11577 - DNA, 285 bp, Glycine max
  Clone ID: LIB3039-006-Q1-E1-F7
gaccaagtgaaccaatatagcccaagccctatacaaccaaaccctaacacacacccatttgattcagtttccatggctagcctcaaggttgcatttttggctgcagtgctctgcatggttgtggtgagtgcacccatggcacatgcagctatcacgtgcgggcaggtgacgaatagcctgatcaattgcatcggttacctccagaacggaggaacgccgccgtcgggatgctgcaacggagtgaagagcctcaatgccgccgccaagaccaccgccgaccgccag

SEQ ID NO: 11578 - DNA, 403 bp, Glycine max
  Clone ID: LIB3039-006-Q1-E1-F8
ggcattatatttgagttcaaacaagtcaaagccatggccacctccaacttctctattgttctctccgtctccctagccttctttttggtgctacttaccaaggcacactcgaccgataccgtttctttcaccttcaacaagttcaacccagtccaaccaaacattatgctccaaaaagatgctagtatttcatcctctggggtgttacaactcaccaaagttggcagcaacggcgtgcccacctcgggatctctcggtcgtgccctttacgctgccccaatccagatttgggacagcgaaaccggcaaggtagccagctgggctacatcctttaaattcaacattttcgcacccaacagatcagactcagctgacgggcttgccttcttcttggcacccgtcg

SEQ ID NO: 11579 - DNA, 139 bp, Glycine max
  Clone ID: LIB3039-006-Q1-E1-F9
gaaatcaagttatattcacttgctacaaaattatatccatctcaagatacacacttatactcacgatcaccctagtcatctcgaccatggggcttccgcatatacccactctcggacctgttatccttcaccttcactc

SEQ ID NO: 11580 - DNA, 324 bp, Glycine max
  unsure (1)..(324): unsure at all n locations
  Clone ID: LIB3039-006-Q1-E1-G1
cggggttctcttaagtccctcccattccaatggattctgcgttctccatcaacaccaccgcgcaagtggcgctcttcagagcgctccacggtcatctccaccgagctcctcaacgcgccttgctccgccgcaacctaaaatgcctcgttacttcctataacagcagcagcaactgctgccgcattccgtgctctttcggctccgtgccgtcgccgtcctcgcttcgatccttccgcggactgctcccgcgaacgccgcgctgcatttcgagctccgcggcttcctttgcttctcctgccggcggtggaaatggcngcgctggaa

SEQ ID NO: 11581 - DNA, 374 bp, Glycine max
  Clone ID: LIB3039-006-Q1-E1-G10
gggacaaatgtgcatcgaatttcaatacctccaaacaaaatcacttttgttgaagcttcgcatcttcccttcatttatctttctctttaacccaatttgattatctctctctctctctctctactattcagcctctattgttctttccttctcttcttagccttggagctggttgatggatattgaacccttgtgggctattggggggtggtcatttctttcaaattattgcatggcagaacctaaagcatcatcatcatcatcaccaatctcagaacctttctcaaaatcaccctcttttcttcacttcctctcacttttcttcatcctcctccttctcatcaacctatcccaccagccacacccttctacca

SEQ ID NO: 11582 - DNA, 347 bp, Glycine max
  Clone ID: LIB3039-006-Q1-E1-G11
gaagcacaccattattttattatgaatgagtggcaatagcagcaacaacaacaatataagtaaaagaatctctgtgttgtcatcacactgggctagatccagccccatcatggcttcagagaagcaagcggctcttgccgtcactccctctgatgctgatgctcctaccatatttgacaagatcatcaataaggagattccttctactgtggtttatgacgatgacaaggtgcttgccttcagggacataactcctcaagctcctacacatattcttatcattcctaaattcaaagacgggttaagtggtctatccaaagctgaggaaaggcactttgagattcttg

SEQ ID NO: 11583 - DNA, 194 bp, Glycine max
  Clone ID: LIB3039-006-Q1-E1-G12
gggttttctggggattttcttcttggctcttaacctcatgtttgctaatattctcattcttctgtccccgcatcgtccccttggcagggcacgcgctcgctctctccgcatgtttcctctcactacggactcctagagcagaggtaagatcattcggttgtctttcaacaaatccttttaaccagatccttgct

SEQ ID NO: 11584 - DNA, 361 bp, Glycine max
  Clone ID: LIB3039-006-Q1-E1-G3
gaaggtgcaagagtttgttgtgagctagaagctagtttatcgtgaggagaatatgaagttgtttgttttctttgttgctgcagtaattttggtagcatggccatgccatggcgcaagctaccaaaggttccctctccgaatgaaaactggctatggtgagcgttcttcggaggtaaaatgcgcaagttttaggcttgctgtggaagcacacaacatccgagcctttaaaaccattcctgaagagtgcgttgaaacaacaaaggactacattaatggcgaacaatttagattagactctaaaacagttaaccaacaagctttcgtttatgctagtgaacgcgaagtcgatcacaacgacata

SEQ ID NO: 11585 - DNA, 324 bp, Glycine max
  unsure (1)..(324): unsure at all n locations
  Clone ID: LIB3039-006-Q1-E1-G4
aagagaggagttgcggttaaggatccatctgctccccatggagttcggcttttgattgaggactatccttatgcttctgatgggctagagatatgggatgccatcaagtcctgngtgcatgaatatgtctcattctactacaagtcagatgcagcaattcaacaagatcccgagctccaagcttggtggaaagaacttgtccaagtgggtcatggtgatttgaaagataagccatggtggcaaaagatgcaaactcgtgaagagttgattgaagcctcggctaccctcgtatggatcgcttcaacccttcatgcaactgttaac

SEQ ID NO: 11586 - DNA, 338 bp, Glycine max
  Clone ID: LIB3039-006-Q1-E1-G5
gacagacaaacactcgcattctctctctctctctctctctccgacctagcgagaccgagcgatccgagcctaatctcgcgatgctccgccgcgcaacctcgtccctcctcaccggcgcctcccgccgccgcctctcctccgacgtgccggcgacccccgccgcggattccgccttcgcggaggcgtggaaggaagtgagccccaacatcgacccgccgaagacgccgctggcgtacatgaagccccgaccacccactcgctcggctctcccttccaagctcacagtcaacttcgtcttgccctactcttctcaattggacgcaaaagaggttgatatg

SEQ ID NO: 11587 - DNA, 370 bp, Glycine max
  Clone ID: LIB3039-006-Q1-E1-G7
agcagtgccaccactcaagtctccaccgtcgactgccagcccgccggcgtcaacgccggcatgcccgtcttcgtcagcggaaaccttcagctcgccggcgaacagcacagtctcaagtggagccagatgttccatttgataccaacacctcagggaagctattatgtgttgaatgacatattccgtttaaactatgcatgaagatgtcatatgaccggcaaggccatagaagaagtttgcctatagcaagctgtttcagattgcacatttgaaattgaaattgggttctttttggttggttgtgttgaacgcttaattgtgcctgttgtgtttagaactttctgttgtgactggttaaaaaccctccttc

SEQ ID NO: 11588 - DNA, 279 bp, Glycine max
  Clone ID: LIB3039-006-Q1-E1-G8
ggcacaagtgagtttggtgatcgagataactagaaacagtgtgatgaaaatgaaggtccttgttttcttcgttgctacaattttggtagcatggcaatgccatgcgtaagatagtgttccctctccgaatgaacactggctatggtgcccgtactccggaggtgaaatgcgcaagttggaggcttgctgtggaagcacacaacatctttggctttgagaccattcctgaagagtgcgttgaagcaacataggaatacatccatggcgaacaatatagat

SEQ ID NO: 11589 - DNA, 387 bp, Glycine max
  Clone ID: LIB3039-006-Q1-E1-G9
ggcagcaacagcagcattcactgaaagcactcagtagggtttgcggtttcagagtttgtgacgcacgcatccatggccaccaccaccaacgccgccgcagccccgccgcgccagctctcccagaaggaagccgacatccagatgatgttagccgccgacgtccacctcggcaccaaaaactgcgacttccaaatggaacgttacatcttcaagcgccgcaacgacgggatttacattattaaactttgggaagacatgggagaagcttcagttagcagctagggttattgttgcaattgagaaccctcaggatatcattgtccattccgcaaggccttatggtcaaagagcggttctgaagtttgctcagtacactggtgctcatgc

SEQ ID NO: 11590 - DNA, 289 bp, Glycine max
  Clone ID: LIB3039-006-Q1-E1-H1
ggattcggcaaagttgatttcaattcaatttgatttccccctttttcttctccacgtttgtgcctgcaacctcaaataccgattagggttcatgctacactgaacttggtttcggtgttccaagttagttagaggcattgttgcttgcatagatctctgatctgaaaatgaatgcgtccaggttcaataagtgcgtcaccgtcggcgacggtgctgtcggcaaaacctgcttgttgaattcctacaccagcaacacttttcccacagactatgtgcccaacgtttttga

SEQ ID NO: 11591 - DNA, 400 bp, Glycine max
  Clone ID: LIB3039-006-Q1-E1-H10
ttcacggatccatccagacgctgccaaaacatgagagaaggggacacttcagaatcctctagtaagccttcttttctctctctctctctcgtgttctgagctgctagaagcaatggagaggaaaagaagccatgcttctttcaccatgtttgcaatgcttgttggattgctctctcatagccttgtcattcctgttatatccaccactgttgcagatcagaagaactactacaccccagatccacatgctggaagtctccccacaggtttctccgattctctgtgctcaaacaatagtagtcatccatctcatggccatgggagctctcgaccctcatgtcacaatagtccatgtactccatcaacaccctcaggtggaaactgtggatcatcaccccca

SEQ ID NO: 11592 - DNA, 381 bp, Glycine max
  unsure (1)..(381): unsure at all n locations
  Clone ID: LIB3039-006-Q1-E1-H11
gcacaagtttgttgagatagctagaagcaataagatgaagatgaaagtgcttgttttgtttgttgctacagttttggtagcatatgaatgccatggctcagactaccagaagttccctctccaaatgaaaactgggtttggtgggcaatacagcaatgaggtggcatgtgccagttggaggcttggcgtggaagcaaacaacgtagtcaagtggcaaactgttcctgcagcttgcggagagtacatagctgactacgttctangagaacaatatagatcagattccaaaacagttaaccaacaagcttatttctatgctaaatccctcaaactcacaancanagatgtctttgtcctggacgttgacgacactactctctc

SEQ ID NO: 11593 - DNA, 360 bp, Glycine max
  Clone ID: LIB3039-006-Q1-E1-H2
ggtcgacggacgcgtccgtccagacgtcagacgactacaaaacggggacaaaatgaggatgctgatcgatgtgaattcaattcagtttgatttcccactattgtcttcgccacctttgtgcgctgcaacctcaggttggcgaggagggttcatgctacaatgaacttggtttcggtgttcaaagttagttagatgcattgatgcttgcagagatctctgatcttaagatgagtgcgtcgaagttcagtaagttcatcagcgtcggggacagtgctgtcgacaaaacctgcttgttgagttcctacaccagcagcaattttcccacatactatgtgcccaccgtttttgaaaatttcaatg

SEQ ID NO: 11594 - DNA, 284 bp, Glycine max
  unsure (1)..(284): unsure at all n locations
  Clone ID: LIB3039-006-Q1-E1-H3
ggcacaagtttgttgagatagctagaagcaataagatgaaaatgaaagtgcttgttttgtttgttgctacagttttggtagcatatgaatgccatggctcagactaccagaagttccctctccaaatgaaaactgggtttggtgggcaatacagcaatgaggtggcatgtgccagttggaggcttggcgtggaagcaaacaacgtagtcaagtggcaaactgttcctgcagcttgcggagagtacatagctgactacgttctangagaacantatagatcagat

SEQ ID NO: 11595 - DNA, 318 bp, Glycine max
  Clone ID: LIB3039-006-Q1-E1-H4
gactgatacaggaacagctagcagagaaacagagttacaagtaaagtaaatgaagaagatcattaatggcttctcttgcaacctgagctgctgttcaaccagctgcgctcaatggccttgctggaagttccctctctggaactaagctctctttcaagccctctcgccacactgtcaaatccaagaacttcacgagtggtgccgtggtagcaaagtatggtgacaagagtgtgtactttgatttggaggatctgggcaacactacggggcagtgggacttgtatggctcagatgcacctttaccctacaaacctcctc

SEQ ID NO: 11596 - DNA, 371 bp, Glycine max
  Clone ID: LIB3039-006-Q1-E1-H5
gatggcgttgagctctgcgctcgctctctctgtctcctacgattcgttttgccccttttgttgccctaatttcaaccatgcctcgccgtagctccggtggaagatctgcccgtcctgctcctcgggcagctcctcgtcctgctccagttcaccatgctcctcctccagcccctgctcagagtggtggtggatctatgcttggtggcattggttcaaccatatctcaacgtatggcttctggcaccggaagtgcagtggcacacagggctgtggatgcagtcatgggtcctcagtacattcaacatgaaatagttgttacagatgctgctgctgctgcccctgcacccactgcatatacttttggtggcgat

SEQ ID NO: 11597 - DNA, 358 bp, Glycine max
  Clone ID: LIB3039-006-Q1-E1-H7
gaaggtgcaagagtttgttgtgagctataagctagtttatcgtgaggagaatatgaagttgtttgttttctttgttgctgcagtagttttggtagcatggccatgccatggcgcaggctaccaaaggttccctctccgaatgaaaactggctatggtgagcgttcttcggaggtaaaatgcgcaagttttaagcttgctgtggaagcacacaacatccgagcctttaaaaccattcctgaagagtgcgttgaaccaacaaaggactacattaatggcgaacaatttagattagactctaaaacagttaaccaacaagctttcttttatgctagtgaacgcgaagtcgatcacaacgac

SEQ ID NO: 11598 - DNA, 253 bp, Glycine max
  Clone ID: LIB3039-006-Q1-E1-H8
gacaccacaccgagtcgcaaaaaaagaaaaaagcgatcatagtttcacttcggccttatccagtttagggtttcggttctctaccctatctttcacgtatcgaaaccttaaatttacgatcaggtctgagcaatctggttggtagaacctttggtcttagtgagtcaagttttatgtctgaattagacgattaaattcctactgccttcgatccttttgctgatgcaaatgctgatgactccggtgctgggtc

SEQ ID NO: 11599 - DNA, 318 bp, Glycine max
  Clone ID: LIB3039-006-Q1-E1-H9
gactcaagcacagcatctctatcgagtaggttaacgatgaagcctaccctactattatccctttccttcctgcctctctttgcgttcctggctctttcagaagatgttgaacaagttgtggacataagtggcaaccccattttcccaggtggcacatattacattatgccatcaacttggggcgctgccggtggtggattgaaactacgccggacaggaaactcatactgcccagttactgttttgcaagattactcagaaatcttccgtggcacaccagtcagattcagcatacctgggataagccctggaatcatc

SEQ ID NO: 11600 - DNA, 303 bp, Glycine max
  Clone ID: LIB3039-007-Q1-E1-A1
gagcgaaacagagagtgatttcagtgagtgatcggtgttcacttgatctcatcataatcgtcagcgtcaattgaagaagatgccgatcagaaacatcgccgtcggaaggcctgaagaggcgacccaccccgacacgttgaaggcggctttggctgagttcatctcaaccttcatcttcgtgttcgccggctcaggctccggcatcgcctacaacaagctcaccgacaacggcgctgccacccctgccggcctcatctccgcctccatcgcccatgcattcgccctcttcgtcgccgtctccgt

SEQ ID NO: 11601 - DNA, 381 bp, Glycine max
  unsure (1)..(381): unsure at all n locations
  Clone ID: LIB3039-007-Q1-E1-A10
ggcgtacacagcctcaacaaccctaacgcgtgcagagcagagagagacgcagccatggggcgaagacccgcgaggtgttataggcaaattaagaacagaccataccccaagtcacggttttgccgtggtgttcctgatcccaagatcaggatttacgatgttggtatgaagaagaagggtgttgatgagtttcctttctgtgtccatctggttagttgggagaaggaaaacgtttctagtgaggccctggaagctgctcgtattgcttgcaacaagtacatggccaaatttgctggaaaggatgctttccacttgagagtcagggtgcacccattccatgttcttaggatcaacangatgctttcgtgtgctggagctgat

SEQ ID NO: 11602 - DNA, 347 bp, Glycine max
  Clone ID: LIB3039-007-Q1-E1-A11
gagaggaatcagaatcgcgtttgggagaagaagagcaaaatcgctgtgaaaatgagcggaacggtgaagaaagttagcgatgtagcattcaaggtgggaaggaacatcgattgggatggaatggcgaagcttctggtctccgatgaggctcgcacggagttctccaatctccgtcgcgctttcgacgaggttaactcccaactccaaaccaagtttagccaggaacctgagcccattgattgggattactatagaaagggaattggcactcgtttggtggatatgtacaaggagcattatgagagcattgagatccccacgtttgttgatacagtaactcctcaata

SEQ ID NO: 11603 - DNA, 281 bp, Glycine max
  Clone ID: LIB3039-007-Q1-E1-A12
gagaggaatcagaatcgcgtttgggagaagaagagcaaaatcgctgtgaaaatgagcggaacggtgaagaaagttagcgatgtagcattcggggtgggaaggaacatcgattgggatggaatggcgaagcttctggtctccgatgaggctcgcagggagttctccaatctccgtcgcgctttcgacgaggttaactcccaactccaaaccaagtttagccaggaagctgagcccattgagtgggattactatagaaacggaattggcactcgtttggtgga

SEQ ID NO: 11604 - DNA, 381 bp, Glycine max
  Clone ID: LIB3039-007-Q1-E1-A2
gacacacattagtagttaaagttctcacttgagttctgaactcctctgcattccttagtgaggctaatggaactacagttaatattggtgaaaatgatactatcactagcaatggccatgatgatgatgatgccatgttattcagttgctgtggacattaatcaacaagtgaagcaagtggtagcaaagcataacgtgtcttgcctcctagtttttggagactcaagtgttgattctgggaacaacaatgctcttcacaccactatgaaaagcaactttcctccttatgggaaagacttctttgacagccgcccaactggaaggtttagtaatgggagactttgcatagagctcgttgctgaagcattgaggtacataaaa

SEQ ID NO: 11605 - DNA, 340 bp, Glycine max
  Clone ID: LIB3039-007-Q1-E1-A3
ggcacaagtgagtttgttgatcgagataactagaaacagtgtgatgaaaatgaaggtccttgttttcttcgttgctacaattttggtagcatggcaatgccatgcgtacgatatgttccccctccgaatgaacactggctatggtgcccgtactccggaagtgaaatgcgcaagttggaggcttgctgtggaagcacacaacatctttggctttgagaccattcctgaagagtgcgttgaagcaacaaaggaatacatccatggcgaacaatatagatcagactccataacagttaatcaacaagcttacttttatgccagagatctcgaagtccaatcc

SEQ ID NO: 11606 - DNA, 406 bp, Glycine max
  unsure (1)..(406): unsure at all n locations
  Clone ID: LIB3039-007-Q1-E1-A4
ggcacaagtgagtttgttgatcgagataactagaaacagtgtgatgaaaatgaaggtccttgttttcttcgttgctacaattttggtagcatggcaatgccatgcgtacgatatgttccctctccgaatgaacactggctatggtgcccgtactccggaggtgaaatgcgcaagttggaggcttgctgtggaagcacacaacatctttggctttgagaccattcctgaagagtgcgttgaagcaacanaggaatacatccatggcgaacaatatagatcagactccaaaacagttaaccaacaagcttacttttatgccagagacctcgaagtccatcccaaggacacatttgtgttcagtatagatggcaccgtactctctaatattccatactacaaaaaacat

SEQ ID NO: 11607 - DNA, 401 bp, Glycine max
  unsure (1)..(401): unsure at all n locations
  Clone ID: LIB3039-007-Q1-E1-A5
ggtgcacaagtgagtttgttgatcgagataactagaaacagtgtgatgaaaatgaaggtccttgttttcttcgttgctacaattttggtagcatggcaatgccatgcgtacgatatgttccctctccgaatgaacactggctatggtgcccgtactccggaggtgaaatgcgcaagttggaggcttgctgtggaagcacacaacatctttggctttgagaccattcctgaagagtgcgttgaagcaacaaaggaatacacccatggcgaacaatatagatcagactccaaaacagttaaccaacaagcttacttttatgccagagaactcgaagtcaatcncaaggacacatttgtgttcagtatagatggcaccgtactctctaatattccatactacaa

SEQ ID NO: 11608 - DNA, 408 bp, Glycine max
  unsure (1)..(408): unsure at all n locations
  Clone ID: LIB3039-007-Q1-E1-A6
ggagataactagaaacagtgtgatgaaaatgaaggtccttgttttcttcgttgctacaattttggtagcatggcaacgccatgcgtacgatatgttccctctccgaatgaacactggctatggtgcccgtactccggaggtgaaatgcgcaagtcggacgcttgctgtggaagcacacaacatctttggctttgagaccattcctgaagagtgcgttgaagcaacataggaatacatccatggcgaacaatatagatcagactccaaaacagttaaccaacaagcttacttttatgccagagacctcgaagtccatcncaaggacacatttgtgttcagtatagatggcaccgtactctctaatattccatactacaataaacattgatatggggttgaaaaatttaa

SEQ ID NO: 11609 - DNA, 241 bp, Glycine max
  Clone ID: LIB3039-007-Q1-E1-A7
ggaggcaagaagttgtattttggcatccccgtggcttcaagaagagaatctcaatggaggcccacgagctgaagcgcgtgttccagatgttcgaccgcaacggcgacgggagaataacgaagaaggagctgaacgactcgctggagaacctgtgcatcttcatctctgacaaggacctgagccaaatgatccagaggatcgacgtcaccggcgaacgttgcatggacatggaagattttgg

SEQ ID NO: 11610 - DNA, 363 bp, Glycine max
  Clone ID: LIB3039-007-Q1-E1-A8
ggaggcaagaagttgtattttggcatccccgtggcttcaagaagagaatctcaatggaggcccacgagctgaagcgcgtgttccagatgttcgaccgcaacggcgacgggagaataacgaagaaggagctgaacgactcgctggagaacctgtgcatcttcatctctgacaaggacctgagccaaatgatccagaggatcgacgtcaacggcgacggttgcgtggacatggacgagtttggggagctgtatcagaccataatggacgagcgcgacaatgaggaggacatgagggaggccttcaacgtcgtcgaccagaacgccgacggcttcatcaccgtccgacagttgaggaccgtcttgt

SEQ ID NO: 11611 - DNA, 330 bp, Glycine max
  Clone ID: LIB3039-007-Q1-E1-A9
gaagtaacatatgcgtgagcgtgaaaatgaattttggagcgaaaccccattacgtattgttgtgttgtgtggtgtgactgggatcagatctgcccctttctctgtgcaattagcgtgccctaggcctggccatgggagacgaagaagaggaggaggtgctcggttcgggtcaatcagcctccaccaacagcttgccacctcccgctgatagcacactcctcaaattgaaccatctcgacatacatgctgatgatgctgtatcacacgcttctcttgctgccaagaagaaaaagagaggcggccaacgggctgttggacctgataagagtg

SEQ ID NO: 11612 - DNA, 299 bp, Glycine max
  Clone ID: LIB3039-007-Q1-E1-B1
ggcttctttcacatggagcagacaaaaagcatatggtctcccgtcacagatccaagaagtggtttcaaccgggaatccaaaagtttccaaaggcacaagccccctcaccgtttcactccccccacagtcaccgtcgtcacagccgcattctcactccatccacggcgcaactcccagttccagggtccctccaacgccattaacgacactgccaaaggtgaaacggcctctccatagggggagcccctccaccgggccaaaaccctagcctcgaatctcgccacaatcctcaaactcac

SEQ ID NO: 11613 - DNA, 237 bp, Glycine max
  Clone ID: LIB3039-007-Q1-E1-B10
acccaaaggggcacaactgagtttgttgatcaccataactaaaaacagtgtgattaaaatgaatatctttatattcctcgatgtcacaaatttggcacgggggcaatactatgcgtacaatatgtgccctctccgaatgtctcacgtcaaaggtgcatgtacttcggccgtgtaatgctcaagttggcacgcttgctgtgctactacacactatctttggatatgggactattcctg

SEQ ID NO: 11614 - DNA, 390 bp, Glycine max
  Clone ID: LIB3039-007-Q1-E1-B11
gaagcacaacatctctatcgagtaaattaactatgaagcctaccctactattatccctttccttcctgcctctctttgctttcctggctctttcagaagatgttgaacaagttgtggacataagtggcaaccccattttcccaggtggcacatattacattatgccatcaacttggggcgctgccggtggtggattgaaactaggccggacaggaaactcaaactgcccagttactgttttgcaagattactcagaaatcttccgtggcacaccagtcaaattcagcatacctgggataagccctggaatcatctttacaggtactccacttgaaatcgagttcgcagagaaaccttattgtgctgaatcctccaaatgggtggcgtttg

SEQ ID NO: 11615 - DNA, 392 bp, Glycine max
  Clone ID: LIB3039-007-Q1-E1-B12
gacacttcaaaatcctctggtaacccttattttatctattctctctctttcttttgtgttctaagcagctagaagcaatggagaggaaaagaagccatgcctctttcaccatgtttgcaatgcttgttggagtgatctctcagagccttgtcattcctgtagtatccaccaccgttgaagatcagaagaactactacactccagatccacatgctggaagtcccccctcaagctcacacagtagtactcctccatctcatggccatggaagctctccaccctcacatcatcacagtagtccaagtactccatcaacaccctcaggtggaaactgtggatcatcacctccacaacatcatgatccaacaacaccctcaactccatcaacacca

SEQ ID NO: 11616 - DNA, 412 bp, Glycine max
  Clone ID: LIB3039-007-Q1-E1-B2
gaaggtgcaagagtttgttgtgagctataagctagtttatcgtgaggagaatatgaagttgtttgttttctttgttgctgcagtagttttggtagcatggccataccatggcgcaggctaccaaaggttccctctccgaatgaaaactggctatggtgagcgttcttcggaggtaaaatgcgcaagttttaggcttgctgtggaagcacacaacatccgagcctttaaaaccattcctgaagagtgcgttgaaccaacaaaggactacattaatggcgaacaatttagatcagactctaaaacagttaaccaacaagctttcttttatgctagtgaacgcgaagtccatcacaacgacatatttatattcggcatagataacaccgtactctccaatatcccatactaagaa

SEQ ID NO: 11617 - DNA, 230 bp, Glycine max
  Clone ID: LIB3039-007-Q1-E1-B3
ggcacaagtgagtttgttgatcgagatcactaggaacagtgtgatgaaaatgaacgcccttgttttctccgttgctagaattttggtagcatggcaatgccatgcgtacgataggttccctctccgaatgaacactggctatggtgcccgtactccggaggtgaaatgcccaagttgaaggcttgctgtggaaccacacaaaatctttggttttgaaacaatccctaaaa

SEQ ID NO: 11618 - DNA, 358 bp, Glycine max; identical to SEQ ID NO: 7611
  Clone ID: LIB3039-007-Q1-E1-B4

SEQ ID NO: 11619 - DNA, 224 bp, Glycine max
  Clone ID: LIB3039-007-Q1-E1-B5
tgattcactgcatgcctcacgtatgcgttccagtttttagcattgttgcataatcaactggtttgaacatggacatacgtcaacacgctatcactccattagaattaattatggtcaaggctgcttcctccctctacttacggaaaaccacgttgttccagggtccgtccatttccttcatggccttggccacaggttaagacatgcagcaggaagaggtcctc

SEQ ID NO: 11620 - DNA, 382 bp, Glycine max
  Clone ID: LIB3039-007-Q1-E1-B6
ggagctccttacgtaaattctccacgaagcaaccctgagcagtgaccataaccacactctctcaagtctctagagagaagctaccaaactccacaacacatacccaattagctaacccctctcacacttacagaccatgccaaacgcaaacatgcttctccttttcctcttccttctggcgctcttctcagccatgacaacaccgtcaacctccgcgatcgacaccttcatctttgccggctgctcccagcccaagttcacgccgggttccgcctacgaaaataccgtcaactcgctcctcacctctctcgtcaactccgccgccttcgccaactacaacaacttcaccgtccccgcctcctccgacgccgtctacgggctc

SEQ ID NO: 11621 - DNA, 370 bp, Glycine max; identical to SEQ ID NO: 9729
  Clone ID: LIB3039-007-Q1-E1-B7

SEQ ID NO: 11622 - DNA, 333 bp, Glycine max
  Clone ID: LIB3039-007-Q1-E1-B8
gctccgaaacccgccccgagaatgcgatccatatcggatcccccggtgccccctcgctcctcctccggcggaagcgactcctcctcgggcgcatccatcgatccgatcttccacctcctccgcgtcctccccttcagcttcctccgccctgctcgcctccgcctcaagcttcccgccttcagcctcccctccccgaacgccgtcttcgcactcctcctcctcacctacttcatggtcgtctccggcattgtttacgatatcatcgacgagccccccggaatcggatccactcaggacacctacactggtgccgtccgacccgtcggcttcatg

SEQ ID NO: 11623 - DNA, 316 bp, Glycine max
  Clone ID: LIB3039-007-Q1-E1-B9
ggaacctttgcattctattcattcaagattcagcaagtgcgttttggaagcagagaccgaaatacttcgagatggcccgtacagagcaaagtgctcgtaagtcaactggaggaaaagctcccaggaagcagtttgcaaccaaagctgcacgtaagtctgcaccaacaactggtggtgtgaagaaacctcatcgttatctccctggaactgttgctcttcgtgagaataggagataccagaagagcactgatctcctaatcaggaaacttcctttccaaaggttggttcgtgaaattgcccaggatttcaagactga

SEQ ID NO: 11624 - DNA, 385 bp, Glycine max
  Clone ID: LIB3039-007-Q1-E1-C1
gggtgcaagagtttgttgtgagctataagctagtttatcgtgaggagaatatgaagttgtttgttttctttgttgctgcagtagttttggtagcatggccatgccatggcgcaggctaccaaaggttccctctccgaatgaaaactggctatggtgagcgttcttcggaggtaaaatgcgcaagttttaggcttgctgtggaagcacacaacatccgagcctttaaaaccattcctgaagagtgcgttgaaccaacaaaggactacattaatggcgaacaatttacatcacactctcacagtattcgaagtactccatcaacaccctcaggtggaaactgtggatcatcacctccacaacatcatgatccaacaacaccctcaac

SEQ ID NO: 11625 - DNA, 392 bp, Glycine max
  Clone ID: LIB3039-007-Q1-E1-C10
gacaatacagagtgcgttgttgctccttcgccacaactccctgccaacatgggtatctccagagattctatgcacaagaggcgtgccactggtggcaagaagaaggcatggaggaagaagagaaagtatgagcttggtcgccagcctgctaacactaagctgtcaagcaacaagacagtcaggaggatccgggttagaggtggaaatgtgaagtggagggcactgagattggatactggaaattactcctggggaagtgaagctgtaactcgcaagactcgtatactagatgtggtttacaatgcctcaaacaacgagcttgtgcgtactcagactcttgtaaaaagtgctattgttcaagttgatgctgctccattcaaacagtggtacct

SEQ ID NO: 11626 - DNA, 360 bp, Glycine max
  Clone ID: LIB3039-007-Q1-E1-C11
ggcacaagtgagtttgttgatcgagataactagaaacagtgtgatgaaaatgaaggtccttgttttcttcgttgctacaattttggtagcatggcaatgccatgcgtacgatatgttccctctccgaatgaacactggctatggtgcccgtactccggaggtgaaatgcgcaagttggaagcttgctgtggaagcacacaacatctttggctttgagaccattcctgaagagtgcgttgaagcaacaaaggaatacatccatggcgaacaatatagatcagactccaaaacagttaaccaacaagcttacttttatgccagagacctcgaagtccatcccaaagacacaattgtgttcag

SEQ ID NO: 11627 - DNA, 414 bp, Glycine max
  unsure (1)..(414): unsure at all n locations
  Clone ID: LIB3039-007-Q1-E1-C12
ggaacccttatctatatcttcttatagcttcatcccaaaaagctcttttccttctaaatttgattccttagttcagcattctattattatatatggcttcttcaccttcctcagaaaacaaaaacctagagggagtagctggtggtaccggagagaaacccattccacttggtgagaacgttctgcagaagcatgctgcattctttgacttgaataaagatggtgtcatctacccatgggagacttttaaagggttgcgtgaaatcgggactggggttttgctgtccgttggaggtgctattttcatcaatgtgtttctcagtcagagtactcgtcccggaaagtttccatctatactttttccaattgaaattaanaatatccaacgcggcaaacacggcagtgacactggag

SEQ ID NO: 11628 - DNA, 338 bp, Glycine max
  Clone ID: LIB3039-007-Q1-E1-C2
ggagtacaacttcacattttagactaataccccctcttttgctgcatcagaagagttgtgaatgaagaccatggctgcacaagctcttgtagcatcatcttctcttaccgtctcaggggaggctgcgatacacactcttggaacaagatcataccaatctcgatctggcgtcgccaaatgagcctcctttcttgttaatgtagctgctaacccccctgtcaagcttggatcagatcgacctttgtggtttgcatcaaagcaagatcattcttacgtggatggcatcctatcaggtgactatggaattgaccctctgggaccttcataccctgaaggaa

SEQ ID NO: 11629 - DNA, 403 bp, Glycine max
  Clone ID: LIB3039-007-Q1-E1-C3
gacagacaagggtttcttccgggttcacgtttcacaatcactttttgcgcttctctcactcactcactcttcttcttcctcttcgtgtggttttctttctcgaactcgaacgaagatgcgtgagattcttcacatccagggagggcaatgcgggaaccagatcggagccaagttctgggaggtggtgtgcgcggagcacgggatcgattcaacggggaggtaccaaggggacaacgagttgcaactcgagcgagtcaacgtctactacaatgaagcgagttgcggaaagttcatgccaagaggggtatcagtggataaagtgcgaagtggaaagtattaagcagacttggcttggagtggtggttctaaatgatatcaaagaatatagctgagtatagatttg

SEQ ID NO: 11630 - DNA, 340 bp, Glycine max
  Clone ID: LIB3039-007-Q1-E1-C4
gagcatagcgaaacagagagtggtttcagtgagtgatcggtgttcacttgatccttcataagtcgtcatcatcatcatcatcatcaccgttgattgaagaagatgccgatcagaaacatcgccatcggaaggcctgaagaggctactcaccccgacacgttgaaggcggggttggctgagttcatctccaccttgatcttcgtgttcgccggttcaggttccggcatcgcctacaacaagctcaccgacaacggcgccgccactcccgccggcctcatctccgcttccatcgcccatgctttcgccctcttcgtcgccgtctccgtcggcgccaacatct

SEQ ID NO: 11631 - DNA, 411 bp, Glycine max
  Clone ID: LIB3039-007-Q1-E1-C5
aagacgacagaagggtcagaacaatttgatgggagtgggcccttacgaggaaattacaaggagtatgattcaaaaggaaaatcaccatctgattctggatctgctgaagttaagcatcatttgagtgatggagaaaatgctaccagtgaagaaaattctaaactctttggagatgtgtttcaggaaccaattagaactgcaaaggactcaacaatcctgaatgataacgggacactgacttcagtgaatggtaactacaagtcagaagagtcaagtgaaaatgcaggagctgatgataacccaggatggatatcagtggaaaaagtgggaagtggaaagtattaagcaaacttggcttggagtggtggttctaaatgatatcaaagaatatagctgagtatagatttgtta

SEQ ID NO: 11632 - DNA, 394 bp, Glycine max
  Clone ID: LIB3039-007-Q1-E1-C6
gaaacaaaactcgcttccgagttccgatcctcaagacagaaacccgagaacttctcataacacaatgctctttccgttagttccacttcctctcccactctgactcagttcccatttaaaagcaaaccctctcaaatcaaagactctctctaacccttgtcctttatcattatcatcacattcataactctttcacaatttggatatataattatgcaaccctgtagcagagaaatgcaaggcctcaactccctcttaaattcttcatcccaaatctcccttcaagaccttcacaatcacaccactaaccagatccaaaattcacacatgaaccaccaacaccaccaacagcaacaacaacaacaccaacaacaacaacaccaacttgctcact

SEQ ID NO: 11633 - DNA, 350 bp, Glycine max
  Clone ID: LIB3039-007-Q1-E1-C7
gaaggagacttggtgcgaaagttgaaagcacgaaaatggggtgggtttggaaggatgacaacagcgacgatgttcgacgcgataactcttcggaacgatgcgccaccaccaaggtcgtcaaatctcagtgcagaacagaggaggtcgaaactggaaagttcgtcagaaagtgcgagaaaaccgaagagattctcaggaattgcatcggaaagcccgccgaagtgttgcaatcaaacatagagtatactgaagatgatatcacagaagaagtacttaagttacggtatgttcatgccaacggaggtgctcatggatctggagccagggaccatggacagcgtcagatctgg

SEQ ID NO: 11634 - DNA, 405 bp, Glycine max
  unsure (1)..(405): unsure at all n locations
  Clone ID: LIB3039-007-Q1-E1-C8
ggcacaagtgagtttgttgatcgagataactagaaacagtgtgatgaaaatgaaggtccttgttttcttcgttgctacaattttggtagcatggcaatgccatgcgtacgatatgttccctctccgaatgaacactggctatggtgcccgtactccggaggtgaaatgcgcaagttggaggcttgctgtggaagcacacaacatctttggctttgagaccattcctgaagagtgcgttgaagcaacaaaggaatacatccatggcgaacaatatagatcagactccaaaacagttaaccaacaagcttacttttatgccagagacctcgaagtccatcncaaggacacatttgtgttcagtatagatggcaccgtactctctaatattccatactacaaaaaaca

SEQ ID NO: 11635 - DNA, 386 bp, Glycine max
  unsure (1)..(386): unsure at all n locations
  Clone ID: LIB3039-007-Q1-E1-C9
ggcagcaacagcagcattcactgaaagcactcagtagggtttgcggtttcagagtttgtgacgcacgcatccatggccaccaccaccaacgccgccgcagccccgccgcgccagctctcccagaaggaagccgacatccagatgatgctagccgccgacgtccacctcggcaccaaaaactgcgacttccaaatggaacgttacatcttcaagcgccgcaacgacgggatttacattattaaccttgggaagacatgggagaagcttcagttagcagctanggttattgttgcaattgagaaccctcaggatatcattgttcaatccgcaaggccttatggtcaaagagcggttctgaagtttgctcagtacactggtgctcatgc

SEQ ID NO: 11636 - DNA, 407 bp, Glycine max
  Clone ID: LIB3039-007-Q1-E1-D1
agttctagtgtgtgattgtttgttgttgtaactcgttcttcttcttttgttgttctgtgtttgtgtttgttttttctctcacctgaaaatgtcttgctgcggtggtaactgtggttgcggaagctcctgcaagtgcggcaacggctgcggaggctgcaagatgtacccagacttgagctacactgagtcaaccaccaccgagaccttggtcatgggagtggcacctgttaaggctcaatttgagggtgctgaaatgggtgtgcccgctgagaacgatggctgcaaatgtggaccaaactgctcctgcaacccctgcacttgcaagtgaggtgttgggagagcaagcttcaagcagagatagcccttaattaggaataatgataaactattaatgtgtagctaaaaac

SEQ ID NO: 11637 - DNA, 375 bp, Glycine max
  Clone ID: LIB3039-007-Q1-E1-D10
gacacacagtctcttcttcttgcaattccttcctcgttatggagtcgcgagtgctgtcacgcgccggaaccttgtcctccctccctcacctccgcaagccgccgcgggaggccgtctccagcgcctccctcgtcgccgtgaaggccgtgggctccgtcgcggacggcggaaacctgatttgggggaggcagctgcgcccggagctctgctcgccggtgctgaagaaggaggctgtcctcctccggccatgcctcgccgccgcctcctcgccggccgaaggtagtgattccgcccgagaaagcaaaggttgctccggcggggttcttcgacaagttaccggctctggtcaccggatttttcttcttcacgtggtac

SEQ ID NO: 11638 - DNA, 329 bp, Glycine max
  Clone ID: LIB3039-007-Q1-E1-D11
gactcaccacttcaaaacactcataacacaaagcacaaagcaaagctcatccttgagttaaaaaatggcagcagcttcttccatggctctctcatccccatccttggctggcaaggccgtgaagctgggcccatcagccccagaagtgggaagggtgagcatgaggaagaccgtcaccaagcaggtctcctcaggaagcccatggtacggcccagaccgagtcaagtacttgggcccattctctggcgagcccccgtcctacctaaccggtgagctcccaggcgactacggctgggacactgctgggctttccgcagacccagaaacct

SEQ ID NO: 11639 - DNA, 367 bp, Glycine max
  Clone ID: LIB3039-007-Q1-E1-D12
gaaggtgcaagagtttgttgtgagctataagctagtttatcgtgaggagaatatgaagttgtttgttttctttgttgctgcagtagttttggtagcatggccatgccatggcgcaggctaccaaaggttccctctccgaatgaaaactggctatggtgagcgttcttcggaggtaaaatgcgcaagttttaggcttgctgtggaagcacacaacatccgagcctttaaaaccattcctgaagagtgcgttgaaccaacaaaggactacattaatggcgaacaatttagatcagactctaaaacagttaaccaacaagctttcttttatgctagtgaacgccaagtccatcacaacgacatatttata

SEQ ID NO: 11640 - DNA, 389 bp, Glycine max
  Clone ID: LIB3039-007-Q1-E1-D2
ggagtgcagagagatggcttgcagacagttgtgggcttcaagagctgcttcctacctcaggatctccgtgtttcacagaagcttctctaacgttttgaatgatctgaagtatgctgattctcatgagtgggtgaaggttgatggaaattctgcaactgttggcataactgatcatgcccaagatcatttgggtgaggttgtgtatgttgaattgcctgaagtgggagccaccgtgacacaaggagaaggttttggtgcagctgaaagtgtgaaggcaactagtgatattaactctcctgtttcaggaaaagtggtcgaagttaatgaaaaacttaacagttctcctgctttggtcaacacaagcccttacaaagatggatggataatta

SEQ ID NO: 11641 - DNA, 398 bp, Glycine max
  Clone ID: LIB3039-007-Q1-E1-D3
gaggtgcaagagtttgttgtgagctataagctagtttatcgtgaggagaatatgaagttgtttgttttctttgttgctgcagtagttttggtagcatggccatgccatggcgcaggctaccaaaggttccctctccgaatgaaaactggctatggtgagcgttcttcggaggtaaaatgcgcaagttttaggcttgctgtggaagcacacaacatccgagcctttaaaaccattcctgaagagtgcgttgaaccaacaaaggactacattagtggcgaacaatttagatcagactctaaaacagttaaccaacaagctttcttttatgctagtgaacgcgaagtccatcacaacgacatatttatattcggcatagataacaccgtactctctaatat

SEQ ID NO: 11642 - DNA, 409 bp, Glycine max
  Clone ID: LIB3039-007-Q1-E1-D4
ggcacaagtgagtttgttgatcgagataactagaaacagtgtgatgaaaatgaaggtccttgttttcttcgttgctacaattttggtagcatggcaatgccatgcgtacgatatgttccctctccgaatgaacactggctatggtgcccgtactccggaggtgaaatgcgcaagttggaggcttgctgtggaagcacacaacatctttggctttgagaccattcctgaagagtgcgttgaagcaacaaatgaatacatccatggcgaacaatatagatcagactccaaaacagttaagcaacaagcttacttttatgccagagacctcgaagtccatcccaaggacacatttgtgttcagtatagatggcaccgtactctctaatattccatactacaaaaaacatgga

SEQ ID NO: 11643 - DNA, 404 bp, Glycine max
  Clone ID: LIB3039-007-Q1-E1-D5
agaaggggatagcgaaacagagagtggtttcagtgagtgatcggtgttcacttgatccttcataagtcgtcatcatcatcatcatcatcaccgttgattgaagaagatgccgatcagaaacatcgccatcggaaggcctgaagaggctactcaccccgacacgttgaaggcggggttggctgagttcatctccaccttgatcttcgtgttcgccggttcaggttccggcatcgcctacaacaagctcaccgacaacggcgccgccactcccgccggcctcatctccgcttccatcgcccatgctttcgccctcttcgtcgccgtctccgtcggcgccaacatctccggcggccacgtcaaccccgccgtcaccttcggcgccttcgtgggcggcaacatcacct

SEQ ID NO: 11644 - DNA, 396 bp, Glycine max; identical to SEQ ID NO: 8695
  Clone ID: LIB3039-007-Q1-E1-D6

SEQ ID NO: 11645 - DNA, 348 bp, Glycine max
  Clone ID: LIB3039-007-Q1-E1-D7
ggcacaagtgagtttgttgatcgagataactagaaacagtgtgatgaaaatgaaggtccttgttttcttcgttgctacaattttggtaacatggcaatgccatgcgtacgatatgttccctctccgaatgaacactggctatggtgcccgtactccggaggtgaaatgcgcaagttggaggcttgctgtggaagcacacaacatctttggctttgagaccattcctgaagactgcgttgaagcaacaaaggaatacatccatggcgaacaatatagatcatactccaaaacagttaaccaacaagcttacttttatgccagagacctcgaagtcgatcccatcgacac

SEQ ID NO: 11646 - DNA, 394 bp, Glycine max
  Clone ID: LIB3039-007-Q1-E1-D8
ggttctagtgtgtgattgtttgttgttgtaactcgttcttcttcttttgttgttctgtgtttgtgtttgttttttctctcacctgaaaatgtcttgctgcggtggtaactgtggttgcggaagctcctgcaagtgcggcaacggctgcggaggctgcaagatgtacccagacttgagctacactgagtcaaccaccaccgagaccttggtcatgggagtggcacctgttaaggctcaatttgagggtgctgaaatgggtgtgcccgctgagaacgatggctgcaaatgtggaccaaactgctcctgcaacccctgcacttgcaagtgaggtgttgggagagcaagcttcaagcagagatagcccttaattacgaataatgattaactattaatg

SEQ ID NO: 11647 - DNA, 368 bp, Glycine max
  unsure (1)..(368): unsure at all n locations
  Clone ID: LIB3039-007-Q1-E1-E1
gattggttagaagattagtctgtaaggaaggcaaagaaacaaagaagcgagacatgccaaacaagatcaaccaaccatttcctaactttgctccctcgtctttgttggattccgttttccaactctcaattccccaaatcttaattgctgcaatgcgttagcaaagtttcaatctttgccaaagggacgagaagaatcatggggagggacccatcttctgccaccgtcgaggtgcagattcatccgcgctgcgacnacancaccgtcaaccccggacggggcngaggcactctccgtcgccgccgagtccccctgccgtgcacgatcgcgacttcagcctcttcaagcgctggttcccatggctggtc

SEQ ID NO: 11648 - DNA, 375 bp, Glycine max
  Clone ID: LIB3039-007-Q1-E1-E10
gatagcgacacacacagctgctggctacggatacataaaatcgttcccagattcaaaacctgagatgcttttcttgagctggggtcgcccctctccccaagaccaaaagacttgcatcaacaagtcaggtactttcaactatgatgacaaatataaaggagctactgctaaatcagtggcttcccttaaagcagacgagggactctccaaagatggatttttactaaacgaggcgcgagttctggttggttctggtattgagacctttgaaaagggcaagagtgctcttagaagttggaggcattttggattgaattgggcatttgttgattcgaagacaccagtccaacaaggagtgaagttctgtgtttgtgt

SEQ ID NO: 11649 - DNA, 277 bp, Glycine max
  Clone ID: LIB3039-007-Q1-E1-E11
tcattgcctgatatccttgtcgcgacactaggtctggcatcacggcaataccatggcacatgcaacaacaagtcacgtcccttcatgtatgatgacaaatgtgaacgatctactgctagtatcaatggcatctcttaaggcatgcgagggactcatcaaacaatggattcttaaaaacaatgctcgagatctggttgaatctggtattgacaacattgatggcgacaagattacactaaacacttggacgcattttgaatatacttgcgcatatgct

SEQ ID NO: 11650 - DNA, 370 bp, Glycine max
  Clone ID: LIB3039-007-Q1-E1-E12
gacagctattcctcttaagcttgctactgaatttccacactggataccttaagtcttccgaattcgaacttaatttgcaagatggctaaagcaaaggctcagatcaacattgtggtggttggtcatgtggaccctgaggaggcaaccaccattaacgagctgaagaagcctgttgtggagaaagaagctccagggcatgccatatgagggcatgcacgtaaggactcggaggggaaccataaaattatgttaagaaaataatctggaaccctaatgtatcagtgtcatcatcagtgtgtagtttaagctaactttgctatggttacattctttgacatgagagtcgtgatgaacagtatcattctgaagt

SEQ ID NO: 11651 - DNA, 341 bp, Glycine max
  Clone ID: LIB3039-007-Q1-E1-E2
agggggcacacgtttgtggaggtagctagacgcagtaacatgacattccaagtgcttgtatttgtttgttgccacagttttggtcccacatgaatgccatggtccatattaccatcagttccttctccaactgaaaactgggtttggtgggcaatacatcaatgacgtggcatgtgccacttggaagcttggcgtgagagacacaaccgtagtcaagtcgcaagctgttcctgcagcttgctgagagtacatagctgactacgttctacgagaccaatagacatcacattccacgacagttaaccatgacgcttatatctatgctatatcctcatactcac

SEQ ID NO: 11652 - DNA, 139 bp, Glycine max
  Clone ID: LIB3039-007-Q1-E1-E3
acacagtatccgagtcttaaaaaccattcctgaagagctgcgagtacataactgtagacatactaagggatcacaatttatatcagtctccaacacagttaaccaacaagctttcctatgaaatatccctcaaaagcct

SEQ ID NO: 11653 - DNA, 216 bp, Glycine max
  Clone ID: LIB3039-007-Q1-E1-E4
ggcacaagtgagtttgttgatcgagataactacaaacagtgtgatgaaaatgaaggtccttgttttcttcgttgctacaattttggtagcatggcaattccatgcgtacgatatgttccctctccgaatgatcactggccatggtgtccgtaatccggacgtgaaatccgcaagttcgacgcctactgtagaaacagaccatgatctctggctttg

SEQ ID NO: 11654 - DNA, 402 bp, Glycine max
  Clone ID: LIB3039-007-Q1-E1-E5
gaaggtgcaagagtttgttgtgagctataagctagtttatcgtgaggagaatatgaagttgtttgttttctttgttgctgcagtagttttggtagcatggccatgccatggcgcaggctaccaaaggttccctctccgaatgaaaactggctatggtgagcgttcttcggaggtaaaatgcgcaagttttaggcttgctgtggaagcacacaacatccgagcctttaaaaccattcctgaagagtgcgttgaaccaacaaaggactacattaatggcgaacaatttagatcagactctaaaacagttaaccaacaagctttcttttatgctagtgaacgcgaagtccatcacaacgacatatttatattcggcatagataacaccgtactctctaatatccc

SEQ ID NO: 11655 - DNA, 393 bp, Glycine max
  Clone ID: LIB3039-007-Q1-E1-E6
ggagagaaactagggttagggtttaacttacaattgcgtgatcgagtccgattcgattgattcgcttctctcgcagacgaagtagaaacacgaaactcagaatccatggcgacgcgagcgacgacgaagcgaaaaccggtgttcgtgaaggtggatcagttaaaacctggcaccaacggccacacactgacggtgaacgtggtcagttccaagccggtgaagacggtgagcacccgcggcggtcgaccgacggtgctagccgcgcgcccgtcgcgcattgccgagtgcctcgtcggcgacgaaaccggaaccataatcttcgccgctcgcaacgaacaggtggatcatatgaatgctggcgcaactgtaattctgcgtaatgcaaagaatgac

SEQ ID NO: 11656 - DNA, 405 bp, Glycine max; identical to SEQ ID NO: 9625
  Clone ID: LIB3039-007-Q1-E1-E7

SEQ ID NO: 11657 - DNA, 408 bp, Glycine max
  Clone ID: LIB3039-007-Q1-E1-E8
gcttccatcggcgcggcacacacagacacacacatttcgtcggaatgggaagggtgattcgcgcacagcgtaagggtgcggggtcggtgttcaagtcccacacccaccaccgcaagggtccggcgaggttccgcagcctcgacttcggcgagcgcaacggctacctcaaaggggtcgtcaccgatatcatccacgaccctggtcgcggtgctcctctagccaacgtggcgttccgccaccccttccgctacaagaagcagatggggctcttcgtcgccgccgagggcctctacaccggccagttcatctactgcggcacgaaagcaacctcgtcgtcggcaacgtcattgccctccgattcatcccacgaagtgccgttatctgcaacgtcgagcaacacgttggcga

SEQ ID NO: 11658 - DNA, 401 bp, Glycine max
  unsure (1)..(401): unsure at all n locations
  Clone ID: LIB3039-007-Q1-E1-E9
agaacggaaaagcactggcgcagctaccctgaggcttctcttctcttctcttctctgtcgtgagtcaccatggtgagggctagtgtgctgaacgatgctctgaagagcatgtacaatgctgagaaaaggggaaagcgccaagtcatgattaggccatcctccaaagtcattatcaaattccttttggtgatgcaaaagcacggatacatcggagagtttgagtatgttgatgaccacagggctggtaaaatcgtggttgaattgaacggtagactgaacaagtgtggggttattagtccccgttttgatgtgggcgtcaaagagattgaaggttggactgctaggcttctcncctcaagacagtttgggtatattgtattgactacctctgctggcatcat

SEQ ID NO: 11659 - DNA, 389 bp, Glycine max
  Clone ID: LIB3039-007-Q1-E1-F1
gacacacagctattcctcttaagcttgctactgagtttccacactgcataccttaggtcttccgaattcgaagttaatttgcaagatggctaaggaaaaggctcagatcaacattgtggtggttggtcatgtggaccctgaggaggcaaccaccattaacgagctgaagaagcctgttgtggagaaagaagctccagggcatgccatatgagggcatgcacgtacggcctcggaggggaaccagaaaattatgttaacaaaataatctggaaccctaatgtatcagtgtcatcatcagtgtgtagtttaagctagctttgctatggttacgttctttgagatgagagtcttgatgaacagtaccattctgatgtattgctttccttgaa

SEQ ID NO: 11660 - DNA, 395 bp, Glycine max; identical to SEQ ID NO: 7929
  Clone ID: LIB3039-007-Q1-E1-F10

SEQ ID NO: 11661 - DNA, 415 bp, Glycine max
  Clone ID: LIB3039-007-Q1-E1-F11
aaaagacgacagaaggggaaaatgaaaatagtagaaaagaaggcattaggttaagagtgaaggcagtgagcgaaagagagcatagtaatacttactgagtgcttacagttgctgcgtcgcaaggtaccggcggcgacggagaactatcttctcaattttcgatcactgcattggttctgttgacaagggttttgttcttcctgacttgcatacttgatggcttcaaagttgcagaagttgcaggccacagcatctcaagcgtctcaatttgtatccagttgtggaactaactactacaagcaattgctggaacagaacaagcaacacattcaggagcctcctacagtagagaaatgcaacctgttggcaaagcaattgttttacactcgccttgctagtattccgagtcgtaatg

SEQ ID NO: 11662 - DNA, 348 bp, Glycine max
  Clone ID: LIB3039-007-Q1-E1-F12
gcacaagtttgttgagatagctagaagcaataagatgaaaatgaaagtgcttgttttgtttgttgctacagttttggtagcatatgaatgccatggctcagactaccagaagttccctctccaaatgaaaactgggtttggtgggcaatacagcaatgaggtggcatgtgccagttggaggcttggcgtggaagcaaacaacgtagtcaagtggcaaactgttcctgcagcttgcggagagtacatagctgactacgttctaggagaccaatatagatcagattccaaaacagttaaccaacaagcttaattctatgctaaatccctcaaactccacaacaaaagatg

SEQ ID NO: 11663 - DNA, 383 bp, Glycine max
  unsure (1)..(383): unsure at all n locations
  Clone ID: LIB3039-007-Q1-E1-F2
gaatagaaatagaactgtcttttcatatagatatcccttcaacacaacataggtcatcgaaaggatctcgaagacccaccaacgcacgaaagccgggatctttcagaaaatggattcctattcgaagggtgcataaccgcatggataagctcacactaacccgtcaatttgggatccaattcggttccttaggaggtatcgggaaggaattttggaatgtaataatatcgattcatacagatacagaagaaagggttctctattgattcanacgctctacctacgagatagggatagagaaagaggaaaaaaccgaaggatttcacatagtacttttggtcgaaaaatcgatctgatttttttcgtacttttcgctcaatgat

SEQ ID NO: 11664 - DNA, 403 bp, Glycine max
  unsure (1)..(403): unsure at all n locations
  Clone ID: LIB3039-007-Q1-E1-F3
gattgttggcttgtgctctgctcgtgcctctagggttatcatatctccatttccatttcctctctctcagtttccaagaatcttaagctatgggaaagtcttacccaaccgtgagcgctgattaccagaaggccgttgagaaggcgaagaagaagctcagaggcttcatcgctgagaagagatgcgctcctctaatgctccgtttggcatggcactctgctggaactcacgacgtgagctcgaagaccggtggtcncttcggaaccataaagcacccctccgaactcgctcacggcgctaacaacggtcttgacatcgctgttaggcttttggagccactcaaagcggagtttcctattttgagctacgccgatttctaccagttggctggcgttgttgccgt

SEQ ID NO: 11665 - DNA, 393 bp, Glycine max
  Clone ID: LIB3039-005-Q1-E1-F7
gacacaccgtttgttctattcttaactcaacttctgctacccactctcttcttccaagtccaaccacgcttttctctacagtcatgggcaaggtcaagatcggaatcaacggatttggaagaattggccgtttggttgccagagtcgctctgcaaagagacgatgtggagctcgttgccgttaacgaccctttcattaccaccgattacatgacatacatgtttaaatacgacagtgttcacggacactggaagcatcacgatgtcaccgttaaggacgagaagacccttctcttcggtgacaagccagtcactgtttttggacacaggaaccctgaagagatccatgggggtcaactggagctgatatcattgttgagtccaccggagtttt

SEQ ID NO: 11666 - DNA, 158 bp, Glycine max
  unsure (1)..(158): unsure at all n locations
  Clone ID: LIB3039-003-Q1-E1-G8
gaaggtgcaagagtttgttgtgagctataagctagtttatcgtgaggagaatatgaagttgtttgttttctttgttgctgcagtagttttggtagcatggccatgccatggcgcaggctaccaaaggttcnctctccgaatganaactggctatggtg

SEQ ID NO: 11667 - DNA, 387 bp, Glycine max
  Clone ID: LIB3039-003-Q1-E1-G9
caggcatcaggcaacttagtggagaaagcttgtatgagtattgggaaagattcaagaaattatgtgcaagctgccctcaccaccagatttcagagcaacttcttcttcaatatttctatgaggggcttagtaacatggagaggaaaacttgatgccttggtcaacctagtaactcagcttgccatgaatcagaaatctacacctgttgcaagagtatgtggtctatgttcttctgcagatcaccatttagatctttgtccttctttgtagtaatctggagtcaatgagcaacctgaagcttatgctgtaaacatttataatagacctccacaacagcaaaaccaacaatagcaaaatacttatgacctttcaagcaacagatacaat

SEQ ID NO: 11668 - DNA, 395 bp, Glycine max
  Clone ID: LIB3039-003-Q1-E1-H1
acttcgaatcagttcacgctgtcaaactctacaacaacatcaaggagcgctcgagtgcccaggggaattcacctttgccgatttcgtcacgccggatcctcatcgaaccaacgctcttctcaattttggtgcctatagggacgccaggttgaactgtcttggaaattgaggacgaagtgaatgcgatagaggcgcaacgaacagagttggaggagaataggatgttgcagaacattaggtagagcactgagttacattaacaataactgagacgacaaattaatcaagaccagcttggtgacaaaccaactcttgatatcattgaagaattaaaagcacttggtggagatattgttgtaccagaaagttatacaaaaacctggtactttaatttt

SEQ ID NO: 11669 - DNA, 361 bp, Glycine max
  Clone ID: LIB3039-003-Q1-E1-H10
ggcacaagtgagtttgttgatcgagataactagaaacagtgtgatgaaaatgaaagtccttgttttcttcgttgctacaattttggtaacaatggaatgccatgcgttacgatatgttctcctcccccaaatgaacactggctatggtgcccgtactccggaggtgaaatgcgcaagttggaggcttgctgtggaagcacacaacatctttggctttgagaccattcctgaagagtgcgttgaagcaacaaaggaatacatccatggcgaacaatatagattagactccaaaacagttaaccaacaagcttacttttatgccagagacctcgaagtccatcccaaggacacatttgtgttc

SEQ ID NO: 11670 - DNA, 386 bp, Glycine max
  Clone ID: LIB3039-003-Q1-E1-H11
gaaggtgcaagagtttgttgtgagctataagctagtttatcgtgaggagaatatgaagttgtttgttttctttgttgctgcagtagttttggtagcatggccatgccatggcgcaggctaccaaaggttccctctccgaatgaaaactggctatggtgagcgttcttcggaggtaaaatgcgcaagttttaggcttgctgtggaagcacacaacatccgagcctttaaaaccattcctgaagagtgcgttgaaccaacaaaggactacattaatggcgaacaatttagattagactctaaaacagttaaccaacaagctttcttttatgctagtgaacgcgaagtccatcacaacgacatatttatattcggcatagattacaccg

SEQ ID NO: 11671 - DNA, 383 bp, Glycine max
  Clone ID: LIB3039-003-Q1-E1-H12
ggcaatacaattgagttcaaacaaatcaaagccaagggcaacctcaacttccccaatggtctccccggtcccctaaccctctttttggtgccacttaccaaggtgaaatcgaacgatacgtttccttcaacctcaacaaattcaaacccattcaaaccaaacattatcctccagaaaaatcctagaatttaatccccgggggtgttacaacgcaccactagttggcaacaacggcgtgcccacctcgggatctctcggtcgtgccctttacgctgccccaatccagatttgggacagcgaaaccggcaaggttaccagctgggctacatcctttaaattcaacattttcgcacccattagatcaaactcaactgaagggcctg

SEQ ID NO: 11672 - DNA, 183 bp, Glycine max
  Clone ID: LIB3039-003-Q1-E1-H2
accaacgccagttcaacgccaccaccactaccgccaccgacaccgctaccggtaccgccaaaccctccgatcccaccggtatgaccgccgaggccaccaccaagtccaccacctccgccaaaaccaccacctattccggcaccagctcctccaaaaggatagcgcttgatctcgatgtccatt

SEQ ID NO: 11673 - DNA, 408 bp, Glycine max
  unsure (1)..(408): unsure at all n locations
  Clone ID: LIB3039-003-Q1-E1-H3
gcacaagtgagtttgttgatcgagataactagaaacagtgtgatgaaaatgaaggtccttgttttcttcgttgctacaattttggtagcatggcaatgccatgcgtacgatatgttccctctccgaatgaacactggctatggtgcccgtactccggaggtgaaatgcgcaagttggaggcttgctgtggaagcacacaacatctttggctttgagaccattcctgaagagtgcgttgaagcaacanaggaatacatccatggcgaacaatatagatcagactccaaaacagttaaccaacaagcttacttttatgccagagacctcgaagtccatcccaaggacacatttgtgttcagtatagatggcaccgtactctctaatattccatactacaaaanacatgga

SEQ ID NO: 11674 - DNA, 157 bp, Glycine max
  Clone ID: LIB3039-003-Q1-E1-H4
tacatccatggcgaacaatatagatagactcaaaacagttaaccaacaagcttacttttatgccagagacctcgaagtccatcccaaggacacatttgtgttcagtatagatggcaccgtactctctaatatttcatactacaaaaaacatggatat

SEQ ID NO: 11675 - DNA, 349 bp, Glycine max
  Clone ID: LIB3039-003-Q1-E1-H5
gtttgcaaattaagttcattttcctccctttcactctcgtagacatcacaaaccttccctccattcatcccacgcatggctgccatgaactctagcgtattggcctgtaactatgccatatcacgtgcagcgtgttcggagctcaatgggaatgtcacttccgtggcctatgttgcatgctctggctacaagttgccattgatcaaagctgaagccagagttccctaggcacatgaatctgaaggaggaaggataggtgcccttgtcctcttggaagctacccttttcacatctgcagcttccaattcttctgccaatgctgggattattgaacattaccttgagagga

SEQ ID NO: 11676 - DNA, 403 bp, Glycine max
  Clone ID: LIB3039-003-Q1-E1-H6
gattcgcagaactttgtttcccaatttccattgcctccgcttccacctcgcaaccatgatcatcccggagaagaaccgcaaggagatctgcaaatacctcttccaagagggagtttgcttcgcgaagaaggacttcaatttggccaagcaccctgagatcgacgtgccgaatctgcaggtgattaagctgatgcagagtttcaagtctcgcgagtacgtgagagaaacttttgcttggatgcactattactggttcctcaccaacgatggcatcgagtttctcagaacttaccttaaccttccttccgaaattgtccctgctactttgaagaagcaagcaaagccacctggcaggccctttggaggcccatccggtgatcgccctagaggtccaccacgcttt

SEQ ID NO: 11677 - DNA, 366 bp, Glycine max
  Clone ID: LIB3039-003-Q1-E1-H7
ggatgaatgtagaacgctgctgccgaaacccttcccgatccctaaggtaagtgagtaatcggtggttgagaatggtggagaaggcgaagggtaggaaggaggaggtggttaccagagagtacaccattaacctccacaagcgcctccatggctgcacatttaagaagaaagctcctaaagctattaaggagataaggaaatttgcccaaaaggccatggggaccaatgatgtgagggtggatgtgaagttgaacaagtttgtctggagccagggaatcaggagtgttccaaggaggattagggtaagaattgctcgcaagaggaatgacgatgaagatgccaaggaagagctatactcccttgtca

SEQ ID NO: 11678 - DNA, 270 bp, Glycine max
  Clone ID: LIB3039-003-Q1-E1-H8
ggtaataattcttataacacaacacaacccatggccaccacctccgcattcctcctccttcccctcctcctgctgctccacctcgccatcgccgctcacggcatcggcatcaactacggcacgctcggcgacaaccttccgccgcccgcggcggtggcgaacttcctgaagacgaagacgaccatcgaccgcgtgaagatctacgacgtgaacccggacatcctgcgggccttcgccggcagcgggatctccgtgacggtgaacggcccc

SEQ ID NO: 11679 - DNA, 363 bp, Glycine max
  Clone ID: LIB3039-003-Q1-E1-H9
gacaatcgaacgggaaaaggcgtcttcataaacgccgcccaaaacttctcatacccttttattcattccattcgtttctagggttttcttttctttgccgagaaaatgagagagtgcatttcgatccacattggccaggccggtatccaggttggaaacgcctgctgggaactctattgccttgaacacggcattcagcccgatggacagatgccgagtgacaagaccgttggcggaggagacgacgccttcaacacatttttcagcgagaccggcgccggaaagcacgtgccccgcgccgtcttcgtggatcttgaacccaccgtgatcgacgaagtccgaaccggtgcgtaccggcagctc

SEQ ID NO: 11680 - DNA, 369 bp, Glycine max
  Clone ID: LIB3039-004-Q1-E1-A1
ggttgctcacaccgtgttctctgccgcacgagataactaaggtttagaatctcgcagttacagaaaacatggggactgtggtgccaacctccgaagaagacgctgcactctccgtcgttcgattcgcctctgaacttgcctgggccgatgccggtcctgaggttgctgagccccaagttagcagactctgcacagaggctgaagagttcattgttatgggaaagtggttggagttagcatcattgatgattacctctgctgaattgattttctcaaaggtttctgaaacagatatatagtccatcttcactatgatctgcaatcttgttacaaagtacgataatccagatgaagtgatggagaatgtaa

SEQ ID NO: 11681 - DNA, 306 bp, Glycine max
  Clone ID: LIB3039-004-Q1-E1-A10
gaaggtgcaagagtttgttgtgagctataagctagtttatcgtgaggagaatatgaagttgtttgttttctttgttgctgcagtagttttggtagcatggccatgccatggcgcacgctaccaaaggttccctctccgaatgaaaactggctatggtgagcgttcttcggaggtaaaatgcgcaagttttaggcttgctgtggaagcacacaacatccgagcctttaaaaccattcctgaagagtgcgttgaaccaacaaaggactacattaatggcgaacaatttagatcagactctaaaacagt

SEQ ID NO: 11682 - DNA, 360 bp, Glycine max
  Clone ID: LIB3039-004-Q1-E1-A11
ggtgcacaagtgagtttgttgatcgagataactagaaacagtgtgatgaaaatgaaggtccttgtgttcttcgttgctacaattttggtagcatggcaatgccatgcgtacgatatgttccctctccgaatgaacactggctatggtgcccgtactccggacgtgaaatgcgcaagttggacgcttgctgtgggagcacacaacatctttggctttgagaccattcctgaagagtgcgttgaagcaacataggaatacatccatggcgaacaatatagattagactccaatacagttaaccaacaagcttacttttatgccagagacctcgaagtccatcccaaggacacatttgtgttc

SEQ ID NO: 11683 - DNA, 328 bp, Glycine max
  Clone ID: LIB3039-004-Q1-E1-A12
gggtgtcgcgtcagctagatgttcgacacgaatttctgcattttccttcttccatcggtccgtgacatatacacagacacatttcgtctgacagggaagggtgattcgcgcacagcgtacgggcgcggagtcagtgttcacgtcgcagacccatcatccgcaacggtccgtgcaagttctgcaggctcgatttcggcgaacacaacagctatctcataggggtcattactgatatcatccatgaccctgcacgcggtgatcttcaagccaaagtggcgttctgacactccatccgcgttaagcagcagacggacctctacgtcaccga

SEQ ID NO: 11684 - DNA, 300 bp, Glycine max
  Clone ID: LIB3039-004-Q1-E1-A2
aacaagaaaatttgactaacacaagaagagaaaacggtaatcgcacacattctttcattcatcgcaatggggaagcttctctgcgactcaaccaccgtcgccgaaccattccaaggttcgcccccggctgcgcttccgtggcgggatcccaaaccagaacctatcggaaccgtagatctcgtcgtttcggccaacgtcggtggcgggcccttcgccggcggcggctgggaagaggtcgtcggtctggaggagcagcagcggcgccacctccagaggctccacgccaatggagtgctctgg

SEQ ID NO: 11685 - DNA, 327 bp, Glycine max
  Clone ID: LIB3039-004-Q1-E1-A3
ccactcacgcgtccgacagctgccaaaagaagggggcacaagtgagtttgttgatcgagatagctacaaacagtgtgatgaaaatgaaagtccttgttttcttcgttgctacaattttggtagcatggcaatgccatgcgtacgatatgttccctctccgaatgaacactggctatggtgcccgtactccggaggtgaaatgcgcaagttggaagcttgctgtggaagcacacaacatcattggctttgacaccattcgtgaagagtgcgttgaatcaacaaaggaatacatccattgggaacaatacagattaaactccaaaacag

SEQ ID NO: 11686 - DNA, 403 bp, Glycine max
  Clone ID: LIB3039-004-Q1-E1-A4
gaaggtgcaagagtttgttgtgagctataagctagtttatcgtgaggagaatatgaacttgtttgttttctttgttgctgcagtagttttggtaacatggccatgccatggcgcatgctaccaaaggttccctctccgaatgaaaactggctatggtgagcgttcttcggaggtaaaatgcgcaagttttaggcttgctgtggaatcacacatcatccgagcctttaaaaccattcctgaagagtgcgttgaaccaacacaggactacattaatggcgaacactttagatcagactctaaaacagttaaccaacaagctttcttttatgctagtgaacgcgaggtccatcacaacgacatatttatattcggcatactatacaccgtactctctaatatccca

SEQ ID NO: 11687 - DNA, 322 bp, Glycine max
  Clone ID: LIB3039-004-Q1-E1-A5
gcacaagtgagtttgttgatcgacataactagaaacagtgtgatgaaaatgaacgtccttgttttcttcgttgctacaattttggtagcatggcaatgccatgcgtacgatatgttccctctccgaatgaacactggctatggtgcccgtactccggaggtgaaatgcgcaagttggaggcttgctgtggaagcacacaacatctttggctttgagaccattcctgaagagtgcgttgaagcaacaaatgaatacatccatggcgaacaatatagatcagactccagagcagttaaccaacaagcttacttttatgccagag

SEQ ID NO: 11688 - DNA, 390 bp, Glycine max
  Clone ID: LIB3039-004-Q1-E1-A6
ggggcacaagtgagtttgttgatcgagataactagaaacagtgtgatgaaaatgaacgtccttgttttcttcgttgctacaattttggtagcatggcaatgccatgcgtacgatatgttccctctccgaatgaacactggctatggtgcccgtactccggaggtgaaatgcgcaagttggaggcttgctgtggaagcacacaacatcgttggctttgagaccattcctgaatagtgcgttgaagcaacagaggaatacatccatggcgaacaatttttgataagactccagaacagttaaccaacatgcttacttttatgccagagacctcgaagtccatcccaaggacacatttgtgttcagtatagatggcaccgtactctctaatat

SEQ ID NO: 11689 - DNA, 351 bp, Glycine max
  Clone ID: LIB3039-004-Q1-E1-A7
gacacttcaatatcctcgattaacccttcttttctctctctctctctcgtgttctgagctgctataatcaatggtgaggaaaatatgccatgcttctttcaccatgtttgcaatgcttgttggcttgctctctcaaatccttgtcattcctgtaatatccaccactgttgcacatcataagaactactacaccccagatacacatgctggaagtctccccacaggctcacacaatagtagtcctccatctcatggtcatgggagctctccaacctcacatcacaatagtccaagtactccatcaacaccctcatgtggaaactgtggctcatcatccccacaacatcatga

SEQ ID NO: 11690 - DNA, 375 bp, Glycine max
  Clone ID: LIB3039-004-Q1-E1-A8
gacagcgagacagacatctcttccagaagcataaatggcattgcgtcatttacgaatcttccctcacacacttcctctaactctcactcccaaacccaaactcaataacagtaaccgtttttcgttcttcacttcctcactctctctctcttccaccacactcatggccactgctcacaaggtcctcgttcccatcgccgacggcaccgagcccatggaggccgtcatcatcatcgacgtcctccgccgctccggcgccgatgtcaccgtcgcttcctcctccgccaacctcgccgtccaagctctccacggcgtcaagatcatcgccgacgcctccgtctccgacgtcgccgccaccgcctttgacctcgtcgc

SEQ ID NO: 11691 - DNA, 377 bp, Glycine max
  unsure (1)..(377): unsure at all n locations
  Clone ID: LIB3039-004-Q1-E1-A9
cggggcacaagtttgttgagatagctagaagcaataagatgaaaatgacagtgcttgttttgtttgttgctacagttttggtagcatatgaatgccatggctcagactaccagaagttccctctccaaatgaaaactgggtttggtgggcaatacagcaatgaggtggcatgtgccagttggaggcttggcgtggaagcaaacaacgtagtcaagtggcaaactgttcctgcagcttgcggagagtacatagctgactacgttctacgagaccaatatagatcagattccaaaacagttaaccaacaagcttatttctatgctaaatcgctcaaactcaccaacanagatgtctttgtcttggacgttgacgacact

SEQ ID NO: 11692 - DNA, 361 bp, Glycine max
  Clone ID: LIB3039-004-Q1-E1-B1
ggaaaactaagtggtataagagctgaaaaaccctaataacaatgggaggaaaatgtccgcacaggaacgtgaagaagagaagatattctcacaagaccgcgcggcgatacaaatttgagctgaaaggggacgacatggtttatgcgcagctcaacaaacccgatcaagagagaccccctttacccgtcgacgaagatttgcctgagatgggccagtactattgccttcactgcgatcggtactttgccaatataactgtgagggatgagcactttaagaccaaacgacacaagaagcgtataaaacaaatgatgggtcctgcaccacatactcaacttgatgccgatttagcttctgggat

SEQ ID NO: 11693 - DNA, 353 bp, Glycine max
  unsure (1)..(353): unsure at all n locations
  Clone ID: LIB3039-004-Q1-E1-B10
ggcatcaattcaaaatatatcatcaattataagcatgggtttgtggaacacaacgaatgcagtgtcttgccgctttcacaagtttggtgatgaccaaaagaatctggtcttccaaggtgatgccacgtcttcttccaggggcatagaactcacaaagttagacggtggaggaaaaccagtgggtggcagtgtggggagagtgttatactcttctccagtgcacctttgggaaagctctacagtggtcgcaagctttgaaaccgacttcaccttttccatctcatcagactctactactccaggtgatggccttgccttcntcaatggcacatttgacactaaaatccctccaa

SEQ ID NO: 11694 - DNA, 383 bp, Glycine max
  unsure (1)..(383): unsure at all n locations
  Clone ID: LIB3039-004-Q1-E1-B11
gatactcttcattcttcactcttcactcttcactcccaaccctagccaaacgcaaaccattcattcattcagttcagtaactcacctcaccatggccgcatccattacattgtccaggctcgtctcttccaccctcaccactgcctctttcttcccacccataaccctgccttccaaactctcctctctccgactccccacccgccgccaccccaagccactcagattctcctcctccaccatcaccgccaccatctccgtcggcgacaagctctcggaggccaccttctcctacctggactcgtccggcgaggtgcagacgacgacggtgtcggaactgacgaaggggaagaaggcggtgctgttcgcggtcnccggcgctt

SEQ ID NO: 11695 - DNA, 286 bp, Glycine max
  Clone ID: LIB3039-004-Q1-E1-B12
gcacaagtgagtttgttgatccagataactagaaacagtgtgatgaaaatgaaggtccttgttttcttcgttgctacaattttggtagcatggcacatgccatgcgtacgatatgttccctctccgaatgaacactggatatggtgcacgtactccggaggtgaaatgcgcaagttggaggcttgctgtggaagcagacaacatctttggctttgagaccattcctgaagagtgccttcgaccaacacatgaatacatccatgcgcatcaagatagatcacactcc

SEQ ID NO: 11696 - DNA, 342 bp, Glycine max
  Clone ID: LIB3039-004-Q1-E1-B2
ggcacaagtttgttgagatagctagaagcaataagatgaaaatgaaagtgcttgttttgtttgttgctacaattttggtaagcaaataaatgcaatggtccaaacaaccaaaatttccccccccaaatgaaacctgggtttgggggccaatacaccactaatgtggtatgtgccactgtggagcttggcgtgaaagcatacaacgtagtcaagtggcacactgttcctgcatcttgcagagagtacatagctgactacgttctaggagaccaatacatatcatcttccaaaacagttaaccaacaagcttacttcgatgctaaatccctcacactcaccaac

SEQ ID NO: 11697 - DNA, 379 bp, Glycine max
  Clone ID: LIB3039-004-Q1-E1-B3
agaaggggaccacattccaaaacacaaacacatacattgtagtatcacttttgtctcggaatttgttcttttgagttatggcaagcttaaaggttgcatgtgtggttttgatgtgcatggctgtgatgagtgcaccaatgatggtgcaagccgtgtcatgcaatgatgtttctgtgaacctagcaccgtgcctatcttacctgatgcagggtggagatgttccagaatcgtgctgtagcggagtgaggaacattctgggttctgccagcaccacctttgacaaacaaatcgtgtgcaaatgtcttcagcaagctgctaataactatggcatcaacgacgaatacgctcaagcactccccgcccgctgcaatgtcagcgt

SEQ ID NO: 11698 - DNA, 287 bp, Glycine max
  Clone ID: LIB3039-004-Q1-E1-B5
aggggaacttctcaagttcatttctacaaatccctagctctgtcggatccgtcattagaaatggggtttcgggtaggagaccctgacctccgctctcactatcgtcactctctcgtggacatcacttccgctaatgtcatcttataagatgttatcaataatgggtgggaaaagctattgattaagtcagattgccaaaatgatgacaacattgctggggaatgtcatcagactgccgggcagtggaatggtgactctgatgacatatgtagtcacagcagtgaaga

SEQ ID NO: 11699 - DNA, 227 bp, Glycine max
  Clone ID: LIB3039-004-Q1-E1-B6
ggcacaagtgagtttgttgatcgagataactagaaacagtgtgatgaaaatgaaggtccttgttttcttcgttgctacaattttggtagcatggcaatgccatgcgtacgatatgttccctctccgaatgaacactggctatggtgcccgtactccggaggtgaaatgcgcaagttggaggcttgctgtggaagcacacaacatctttggctttgagaccattcctg

SEQ ID NO: 11700 - DNA, 351 bp, Glycine max
  Clone ID: LIB3039-004-Q1-E1-B7
gacattaagtagcgccattctgttgctactattgttcccacaaaaccaaaagccatcttcttcttccatgtcgagggcgcgaagctttgttctgtggcttcacggcctgggtgactctggtcccgccaacgaacccatcaaaaccttattcacttcttcccaattcagagacaccaaatggtccttcccttctgccccttccgcccctgtcacttgcaactatggttctgtaatgccttcatggtttgacattcttgagattcccgtggcagctgattctccatatgacgagagtagtttacttaaagctgttcgaaatgtgcatgctactatagacaaggaaatagctgc

SEQ ID NO: 11701 - DNA, 405 bp, Glycine max
  Clone ID: LIB3039-004-Q1-E1-B8
ggcatcaattcaaaatatatcatcaattataagcatgggtttgtggaacacaacgaatgcagtgtcttgccgctttcacaagtttggtgatgaccagaagaatctggtcttccaaggtgatgccacgtcttcttccaggggcatagaactcacaaagttagacggtggaggaaaaccagtgggtggcagtgtggggagagtgttatactcttctccagtgcacctttgggaaagctctacagtggtcgcaagctttgaaaccgacttcaccttttccatctcatcagactctactactccaggtgatggccttgccttcttcattgcaccatttgacactaaaatccctccaaactctggtgggagcaaccttggactcttcccatcagacaatgttgttgctgt

SEQ ID NO: 11702 - DNA, 372 bp, Glycine max
  Clone ID: LIB3039-004-Q1-E1-B9
tcaaagtagatcatcggggataacaaaggacatgtggcacacactcattgtctcgccgtgctgtgttcacacgtctcgtaatccctagcgttcttcgcgcttccgccgagtcgcgacatgctcatcgactggtccgacgctcaaaccgttagatagaggttgaagacggatgggtgctggtgctgggaggaagcaatcgacgaaacctgctgaaggattggaacaagctctacaataggtcgaaacgctttcttcggatttaagtttgacgatatcagaccagttcaagaacgaacattctaagaatagatctctccatgttgtcagttgagctggtggtgactcctggcactcgcgagctgatgcttaaaa

SEQ ID NO: 11703 - DNA, 379 bp, Glycine max
  unsure (1)..(379): unsure at all n locations
  Clone ID: LIB3039-004-Q1-E1-C1
gacacttcaaaatcctctagtaacccttcttttctctctctctctctcgtgttctgagctgctagaagcaatggagaggaaaagaagccatgcttctttcaccatgtttgcaatgcttgttggattgctctctcagagccttgtcattcctgtaatatccaccactgttgcagatcggaagaactactacaccccagatccacatgctggaagtccccccacaggtttctccgattctctgtgctcacacaatagtagtcctccatctcatggccatgggagctctccaccctcacatcacaatagtccaagtactccatcaacaccctcaggtggaaactgtggatcatcnaccccacaacatcatgattccaacacc

SEQ ID NO: 11704 - DNA, 387 bp, Glycine max
  Clone ID: LIB3039-004-Q1-E1-C10
aagacgacagaaggggaccaagtgaaccaatatagcccaagccctatacaaccaaaccctaacacacacccatttgattcagtttccatggctagcctcaaggttgcatttttggttgcagtgctctgcatggttgtggtgagtgcacccatggcacatgcagctatcacgtgcgggcaggtgacgaatagcctgatcaattgcatcggttacctccagaacggaggaacgccgccgtcgggatgctgcaacggagtgaagagcctcaatgccgccgccaagaccaccgccgaccgccagacggcgtgcaactgcctcaagtcggccgccagccaaatctccggcttcaaagccaacaacgccgcctcgctccccggcaaatgcgga

SEQ ID NO: 11705 - DNA, 367 bp, Glycine max
  Clone ID: LIB3039-004-Q1-E1-C11
ggcacaagtgagtttgttgatcgagataactagaaacagtgtgatgaaaatgaaggtccttgttttcttcgttgctacaattttggtagcatggcaatgccatgcgtacgatatgttccctctccgaatgaacactggctatggtgcccgtactccggaggtgaaatgcgcaagttggaggcttgctgtggaagcacacaacatctttggctttgagaccattcctgaagagtgcgttgaagcaacaaaggaatacatccatggcgaacaatatagattagactccaaaacagttaaccaacaagcttacttttatgccagagacctcgaagtccatcccaaggacacatttgtgttcagtatagat

SEQ ID NO: 11706 - DNA, 378 bp, Glycine max
  Clone ID: LIB3039-004-Q1-E1-C12
gcgaaaagacgacagaagggggcacaagtgagtttgttgatcgagataactagaaacagtgtgatgaaaatgaaggtccttgttttcttcgttgctacaattttggtagcatggcaatgccatgcgtacgatatgttccctctccgaatgaacactggctatggtgcccgtactccggaggtgaaatgcgcaagttggaggcttgctgtggaagcacacaacatctttggctttgagaccattcctgaagagtgcgttgaagcaacaaaggaatacatccatggcgaacaatatagatcagactccaaaacagttaaccaacaagcttacttttatgccagagacctcgaagtccatcccaaggacacatttgtgttc

SEQ ID NO: 11707 - DNA, 384 bp, Glycine max
  unsure (1)..(384): unsure at all n locations
  Clone ID: LIB3039-004-Q1-E1-C2
gattgttcaacgaagcaagatgcttagcaaccgcatatggcagaggagagctttgatctccgcccggaccttattttctggctctgcttctcactcttcatcatcttcccatgcgatctcgcttcgcttcgccaaagctaatgctccttcttcttcacatgtcattttcaattttgcacgtgtggacagatattggttttctactcaacccgccctagagcttcccgcgagcaagatcgtggacgtgccgttggcacaaactggtgaaggcatcgcagaatgtgagcttctcaaatggtatgtacaagagggggattatgttgaagactttcaaccactttgcgaagtccanagtgataaagctaccatagaaattactagtcg

SEQ ID NO: 11708 - DNA, 395 bp, Glycine max; identical to SEQ ID NO: 7929
  Clone ID: LIB3039-004-Q1-E1-C4

SEQ ID NO: 11709 - DNA, 356 bp, Glycine max; identical to SEQ ID NO: 7609
  Clone ID: LIB3039-004-Q1-E1-C5

SEQ ID NO: 11710 - DNA, 386 bp, Glycine max
  Clone ID: LIB3039-004-Q1-E1-C7
ggcacaagtttgttgagatagctagaagcaataagatgaaaatgaaagtgcttgttttgtttgttgctacagttttggtagcatatgaatgccatggctcagactaccagaagttccctctccaaatgaaaactgggtttggtgggcaatacagcaatgaggtggcatgtgccagttggaggcttggcgtggaagcaaacaacgtagtcaagtggcaaactgttcctgcagcttgcggagagtacatagctgactacgttctaggagaccaatatacatcagattccaaaacagttaaccaacaagcttatttctatgctaaatccctcaaactcaccaacaaagatgtctttgtcttggacgttgacgacactactccctccaat

SEQ ID NO: 11711 - DNA, 384 bp, Glycine max
  Clone ID: LIB3039-004-Q1-E1-C8
gattatatttgagttcaaacaaatcaaagccatggccacctccaacttctctattgttctctccgtctccctagccttctttttggtgctacttaccaaggcacactcgaccgataccgtttctttcaccttcaacaagttcaacccagtccaaccaaacattatgctccaaaaagatgctagtatttcatcctctggggtgttacaactcaccaaagttggcagcaacggcgtgcccacctcgggatctctcggtcgtgccctttacgctgccccaatccagatttgggacagcgaaaccggcaaggtagccagctgggctacatcctttaaattcaacattttcgcacccaacaaatcaaactcagctgacgggcttgcctt

SEQ ID NO: 11712 - DNA, 407 bp, Glycine max
  Clone ID: LIB3039-004-Q1-E1-C9
gggcacaagtgagtttgttgatcgagataactagaaacagtgtgatgaaaatgaaggtccttgttttcttcgttgctacaattttggtagcatggcaatgccatgcgtacgatatgttccctctccgaatgaacactggctatggtgcccgtactccggaggtgaaatgcgcaagttggaggcttgctgtggaagcacacaacatctttggctttgagaccattcctgaagagtgcgttgaagcaacaaaggaatacatccatggcgaacaatatagattagactccaaaacagttaaccaacaagcttacttttatgccagagacctcgaagtccatcccaaggacacatttgtgttcagtatagatggcaccgtactctctaatattccatactacaaaaaacat

SEQ ID NO: 11713 - DNA, 405 bp, Glycine max
  unsure (1)..(405): unsure at all n locations
  Clone ID: LIB3039-004-Q1-E1-D1
gagataggtttgtgatagtgattgcctccctctgctgccgtccctaatctgaaggctcccgccatctgcgatcggatttcatggctccaaagaaggacaaggctcccccaccttcatccaagcctgccaagtctggcggtggcaagcagaagaagaagaagtggagcaagggtaagcaaaaggaaaaggtgaataacatggtgctcttcgatcagggtacctatgacaagctcctctctgaggcacccaaatacaagctcattactccttccattctctctgaccgtttgaggattaatggatcacttgcaangaaggctattanggaattgatggctanaggttcaatcangatggtgttctgccatgcaagtcagcagatttacactagagctacaaacacct

SEQ ID NO: 11714 - DNA, 364 bp, Glycine max
  unsure (1)..(364): unsure at all n locations
  Clone ID: LIB3039-004-Q1-E1-D10
ggttccccatctctgccactgccatcagcattctcaacacctcctccctcactcactcatcaatggcatcaacaatatcagcaatggccatgatcaacgccaaatgcgtcaacccaaagttccccagccccaccaagctcgtaccatcaaaaccttcccttcaggtcaaccttccaaagggcctaatagcctcacccgataacaccaaactttccactgcgacagcaatcgcaggagcaatattcacaaccctcggaacctgcgacgccgctttcgccgttcaacaaatagccgacatagcagaatgcgacaaccgcggtctggcactgttgctgcccataattcctgcaatanggtgggttct

SEQ ID NO: 11715 - DNA, 361 bp, Glycine max
  Clone ID: LIB3039-004-Q1-E1-D11
caggaactagcagatatgatggcagagaaatcaaaagtcaaatggggtaattgcatgggatacatcatcctccctttctctattgttttgtataaagatccattggaatatgtacgtcatgctaaggccacaatagaccgaaagaagcactcattagaagcaatttgctcttacgcttgtgcaaagctggtactcaatttattaggtgtaaaggttgctgctgccataacacgaagagttctctttaacactactgtagccttctccaatgtgcctggtcctgtggaagaaattagcttctatggtcatcccgtggcatacattgctcctagtgtatatggacacccacttgcactgaaca

SEQ ID NO: 11716 - DNA, 356 bp, Glycine max
  Clone ID: LIB3039-004-Q1-E1-D12
ggcacaagtgagtttgttgatcgagataactagaaacagtgtgatgaaaatgaaggtccttgttttcttcgttgctacaattttggtagcatggcaatgccatgcgtacgatatgttccctctccgaatgaacactggctatggtgcccgtactccggaggtgaaatgcgcaagttggaggcttgctgtggaagcacacaacatctttggctttgagaccattcctgaagagtgcgttgaagcaacaaaggaatacatccatggcgaacaatatagattagactccaaaacagttaaccaacaagcttacttttatgccagagacctcgaagttcatcccaaggacacatttgtgt

SEQ ID NO: 11717 - DNA, 399 bp, Glycine max
  unsure (1)..(399): unsure at all n locations
  Clone ID: LIB3039-004-Q1-E1-D2
gaacacagttatccattcacatttcacagttagcacttagcagactctgctgcagtgaggtgaggggaggtttgtttgttgtttcgtttttcctttcctttccgccagaatccgttgagaatggcgttgccggtagtcgtcgatgcagagtacctcaaggaggtcgacaaggctcgccgcgatctccgcgcactcatcgctaacaggaactgcgctcctctcatgctccgattagcctggcacgatgccggaacttacgatgctaagaccaagaccggtggacctaacggttcgatccggaacgangaagagtattctcacggagccaataatggcttgaagaaagctattgatttctgccaggaagtgaaggcanaatatcctanaattacatatgca

SEQ ID NO: 11718 - DNA, 321 bp, Glycine max
  Clone ID: LIB3039-004-Q1-E1-D3
gattttattattgcttatatatacaacacaatattgtaaaaaaatacacatcataatattgtaagcaaactactccattttcattacattattatatttaagtttcgcataaaaaaaataaaccaagccattttaattggtttattcttttttttaaatcaacttcataccaactaatttgattaggttacaaagttttttttcttcttcacaaagtcaaacgtcaagacaagaagtaggtttgctatcaccatcagcctcgggtttacctcgtgaaatggaagaatcgagcacaaaaaagtccaaaacagtaccttgaag

SEQ ID NO: 11719 - DNA, 401 bp, Glycine max
  unsure (1)..(401): unsure at all n locations
  Clone ID: LIB3039-004-Q1-E1-D4
ggagagagagagaaggcaagatgtcgaagagaggacgcggtggttcggcggggaacaagttccggatgtcgctgggtctgccggtggcggcgacggtgaactgcgccgacaatacgggggcgaagaacctctacatcatatcggtgaaagggatcaaagggcgtttgaaccgtctcccctcggcttgcgttggcgacatggtgatggccaccgtgaagaaggggaaacccgatctgaggaagaaggttttgccagctgtcattgttcgccagcgcaagccatggcgccgaaaggacggcgtctacatgtatttcgaagataatgctggtgttattgtcaatcccaaaggagaaatgaaaggttctgctatcactggtcccattnggaaagagtgtgctgat

SEQ ID NO: 11720 - DNA, 376 bp, Glycine max
  Clone ID: LIB3039-004-Q1-E1-D5
gaggaaagaagagagagaacaaagcacttagtgctattcaataattacgaaaaaccaacagcgagtgttgtttttgtttggtccaggctggaccagggaatgaatagagatgagaggctttcggttgaagagaactgagttaagcggcgaagccaaacgcagaatcggcggcagaaattgccaccggaagcacgtcgaagacgggtgaaccaaacacaaaattccatccaccacttctcttttcaatccccaactcaaatctgtgaagaaaatctcaatttctaaattgtaattcttagcactactgctagtagtagtaaaaaaaaacaattagaaagtagtagagtgtttttttttccttttttcgtttggttta

SEQ ID NO: 11721 - DNA, 379 bp, Glycine max
  unsure (1)..(379): unsure at all n locations
  Clone ID: LIB3039-004-Q1-E1-D6
gatttccccattcccaaatttctcattctcccatttcctctcagaaccctcgatcactcccacgcgctcctatatcctctccttcaccgtcgctctctccaacgatcacaacaacatcgtcatcccatggcaaacgccgcatctggtatggcagtccatgatgactgcaagttaaggtttttggagctgaagacaaagaggacacaccgtttcatagtttttaagattgaggagcagcagaagcaggtcattgtggagaagcttggtgagccagcccaaggctatgaagatttcactgccagccttcctgctgatgagtgccgttatgctgtttatgattttgagtatctgactgaagggaatgtccctaanagcagaa

SEQ ID NO: 11722 - DNA, 385 bp, Glycine max
  unsure (1)..(385): unsure at all n locations
  Clone ID: LIB3039-004-Q1-E1-D7
ggcacaagtgagtttgttgatcgagataactagaaacagtgtgatgaaaatgaaggtccttgttttcttcgttgctacaattttggtagcatggcaatgccatgcgtacgatatgttccctctccgaatgaacactggctatggtgcccgtactccggaggtgaaatgcgcaagttggaggcttgctgtggaagcacacaacatctttggctttgagaccattcctgaagagtgcgttgaagcaacaaaggaatacatccatggcgaacaatatagatcagactccanaacagttaaccaacaagcttacttttatgccagagacctcgaagtccatcccaaggacacatttgtgttcagtatagatggcaccgtactctctaat

SEQ ID NO: 11723 - DNA, 361 bp, Glycine max
  Clone ID: LIB3039-004-Q1-E1-D8
gagagtggtggggtgtgcagaagagcgtcgcagttgtaaccctaatcagaagaagcgcagcttcaagcgagtgacagccaccagccatgggtcgtatgcacagccgcggtaagggtatatcctcttctgctttgccctacaaaaggacacctcctagctggctcaagatctcttcgcaagatgtcgaagaaaatatctgcaagtttgcgaagaaaggtttgaccccgtctcagattggtgtcattctcagagattctcacggtattgctcaggtcaatagcgtcactggcagcaaaatccttcgcatcctcaaagctcacggacttgcgcctgaaattccagaggatctgtaccatttgat

SEQ ID NO: 11724 - DNA, 389 bp, Glycine max
  Clone ID: LIB3039-004-Q1-E1-D9
cccacgcgtccgaagacgacagaaggggggggtgtgctgaccaatttcaggagttggctcaagtactccttggcttgttcgtatttcaacaatggctaagaaatctgtgaagtactatgtggttgacgcattcactgattcagcgtttaagggaaaccctgcagcagtgtgtttcttagaagaggagagggatgaagagtggttgcaagctgttgccaccgagttcaatgtccctgtcacctgttacttaactcgcattgccgagtcccatcacaaccttaactcgttccgtggaacctctaacattccacgttttcacctcagatggtttactcatactaatgaggttaaactttgtggccatgccacgttagcggctgcacacacac

SEQ ID NO: 11725 - DNA, 343 bp, Glycine max
  unsure (1)..(343): unsure at all n locations
  Clone ID: LIB3039-004-Q1-E1-E1
gggaagggangaggcattaagtgtataaagagcgaaagagagagagatggcgtcagggtggggaatcacaggaaacaaaggtcgctgctacgatttctggatggatttcagcgagtgcatgtctcgctgccgagagcccaaggactgtgctcttctccgcgaagactacctcgagtgcctccaccattccaaggagtttcaacgactaaaccgaatttacaaggaggagcagcgcaaactaagggctgcttccaggaaaggccacgaggatggggttaatgaacatcatcattagccactgaagtttattttcaatttaagcttctgaacaattacttttgat

SEQ ID NO: 11726 - DNA, 340 bp, Glycine max
  Clone ID: LIB3039-004-Q1-E1-E10
ggaaaagcccagaaaaaatctgagcgtgaacaagaactgaaaggacgatttgagcagagcataaaggaagctgctgacaaatatccaggtttgaacttgtatctcaagaacttggatgatacaatcagtgatgaaaaacttaaggaaatgtttgccgactatggtacaataacttcttgcaaggttatgcgagacccgactggaatcagcagaggatcaggatttgttgcattttcaactcctgaggaagcaactcgagctcttggtgagatgaatggtaaaatgtttgctggaaaacctctgtatgttgcccttgcacagagaaaagaagagagaagag

SEQ ID NO: 11727 - DNA, 315 bp, Glycine max
  Clone ID: LIB3039-004-Q1-E1-E11
ggcacaagtgagtttgttgatcgagataactagaaacagtgtgatgaaaatgaaggtccttgttttcttcgttgctacaattttggtagcatggcaatgccatgcgtacgatatgttccctctccgaatgaacactggctatggtgcccgtactccggaggtgaaatgcgcaagttggaggcttgctgtggaagcacacaacatctttggctttgagaccattcctgaagagtgcgttgaagcaacaaaggaatacatccatggcgaacaatatagatcagactccaaaacagttaaccaacaagcttactttta

SEQ ID NO: 11728 - DNA, 354 bp, Glycine max
  Clone ID: LIB3039-004-Q1-E1-E12
gacagctattcctcttaagcttgctactgagtttccacactgcataccttaggtcttccgaattcgaagttaatttgcaagatggctaaggaaaaggctcagatcaacattgtgggggttggtcatgtggaccctgaggaggcaaccaccattaacgagctgaagaagcctgttgtggagaaagaagctccagggcatgccatatgagggcatgcacgtacggcctcggaggggaaccagaaaattatgttaacaaaataatctggaaccctaatgtatcagtgtcatcatcagtgtgtagtttaagctagctttgctatggttacgttctttgagatgagagtcttgatgaac

SEQ ID NO: 11729 - DNA, 382 bp, Glycine max
  unsure (1)..(382): unsure at all n locations
  Clone ID: LIB3039-004-Q1-E1-E2
gaataaagtgaggttggtgcatgccgagtttatttggactgagccccattccagaagggtaaaagtcaaggtcaaggttcagaaggaggttctgaatggagcaatacttgaacagtcttatcctgtagagtatgttcaacaagagcatatgtgtgaatcctgttctaaggtccaggctaatcctgaccagtgggttgcttctgtgcaactcaggcaacacgcttctcacaggcgcactttcttttatttggagcagctgattctgaagcatggtgctgctgccactgctataagaatcaagcagatggaacaaggtattgacttccttttctctaatcgaagtcatggagtcaaatttgtggagtttatanggaaagttgct

SEQ ID NO: 11730 - DNA, 326 bp, Glycine max
  Clone ID: LIB3039-004-Q1-E1-E4
ggtacacagcctcaacaaccctaacgcgtgcagagcagagagagacgcagccatggggcgaagacccgcgaggtgttataggcaaattaagaacaaaccataccccaagtcacggttttgccgtggtgttcctgatcccaagatcaggatttacgatgttggtatgaagaagaagggtgttgatgagtttcctttctgtgtccatctggttagttgggagaaggaaaacgtttctagtgaggccctggaagctgctcgtattgcttgcaacaagtacatggccaaatttgctggaaaggatgctttccacttgagagtcagggtgc

SEQ ID NO: 11731 - DNA, 358 bp, Glycine max; identical to SEQ ID NO: 7611
  Clone ID: LIB3039-004-Q1-E1-E5

SEQ ID NO: 11732 - DNA, 397 bp, Glycine max; identical to SEQ ID NO: 7408
  Clone ID: LIB3039-004-Q1-E1-E6

SEQ ID NO: 11733 - DNA, 376 bp, Glycine max
  Clone ID: LIB3039-004-Q1-E1-E7
ggagctccttacgtaaattctccacgaagcaaccctgagcagtgaccataaccacagtctctcaagtctctagagagaagctaccagactccacaacacatacccaattagctaacccctctcacacttacagaccatgccaaacgcaaacatgcttctccttttcctcttccttctggcgctcttctcagccatgacaacaccgtcaacctccgcgatcgacaccttcatctttgccggctgctcccagcccaagttcacgccgggttccgcctacgataataccgtcaactcgctcctcacctctctcgtcaactccgccgccttcgccaactacaacaacttcaccgtctccgcctcctccgacgccgtctac

SEQ ID NO: 11734 - DNA, 400 bp, Glycine max; identical to SEQ ID NO: 9460
  Clone ID: LIB3039-004-Q1-E1-E8

SEQ ID NO: 11735 - DNA, 362 bp, Glycine max
  unsure (1)..(362): unsure at all n locations
  Clone ID: LIB3039-004-Q1-E1-E9
gtgagtcgagggtgttcaccacagtttacactcacgagagtacccattttctcttctcaatttctcaagtgtgccgagaaaatcatggtggacgcagcagaacgtagatacttggaggatgatgattcatctctcatgaaaactatcaagggcgcaacaactggtttagtggctggaactatctggggtactgtagttgccacctggtatgatgtcccccgtgtcgagagaaatgttgctcttccagggctgattaggactatcaggatgatgggcatctatggtttgacctttgctgccatangaggagtctacataagtgtagagcagttggtgcagaactataagatgaagatggattt

SEQ ID NO: 11736 - DNA, 353 bp, Glycine max
  Clone ID: LIB3039-004-Q1-E1-F1
gatgaaaatgaaagtgcttgttttgtttgtcgctacagttttggtaccatatgaatgccatggctcagactaccataagttccctctccaaatgaaaactgggtttggtgggcaatacagcaatgaggtggcatgtgccagttggaggcttggcgtggaagcaaacaacgtagtcaagtggcaaactgttcctgcagcttgcggaagattacatagctgactacgttctacgagaccaatatagatcagattccacaacagttaaccaacaagcttatttctatgctaaatccctcaaactcaccaacaaagatgtctttgtcttggacgttgacgacactactctctctaat

SEQ ID NO: 11737 - DNA, 350 bp, Glycine max
  Clone ID: LIB3039-004-Q1-E1-F10
ggatcctttgtattctattcttcaagattcaggtactgcgtttcggaagcagacacagatggctcgtacgaagcaaaccgctcgtaagtccacaggaggaaaggctcctaggaagcagcttgcaaccaaggctgcacgtaagtctgcaccaactactggtggtgtgaagaagccccaccgttatcgtcctggtaccgttgctcttcgtgagattaggaaataccagaagagtaccgagcttttgatccggaagctccccttccagaggctggttcgtgaaattgctcaggacttcaagactgatctgcgtttccagagccacgccgtgcttgcattgcaagaagctgctg

SEQ ID NO: 11738 - DNA, 323 bp, Glycine max
  Clone ID: LIB3039-004-Q1-E1-F11
ggcacaagtgagtttgttgatcgagataactagaaacagtgtgatgaaaatgaaggtccttgttttcttcgttgctacaattttggtagcatggcaatgccatgcgtacgatatgttccctctccgaatgaacactggctatggtgcccgtactccggaggtgaaatgcgcaagttggaggcttgctgtggaagcacacaacatctttggctttgagaccattcctgaagagtgcgttgaagcaacaaaggaatacatccatggcgaacaatatagatcagactccaaaacagttaaccaacaagcttacttttatgccagag

SEQ ID NO: 11739 - DNA, 346 bp, Glycine max
  unsure (1)..(346): unsure at all n locations
  Clone ID: LIB3039-004-Q1-E1-F12
ggagttcaaacaaatcaaagccatggccacctccaacttctctattgttctctccgtctccctagccttctttttggtgctacttaccaaggcacactcgaccgataccgtttctttcaccttcaacaagttcaacccagtccaaccaaacattatgctccaaaaagatgctggtatttcatcctctggggtgttacaactcaccaaagttggcagcaacggcgtgcccacctcgggatctctcggtcgtgccctttacgctgccccaatccagatttgggacagcgaaaccggcaaggtagccagctgggctacatcctttanattcaacatttttcgcaccaac

SEQ ID NO: 11740 - DNA, 399 bp, Glycine max; identical to SEQ ID NO: 8826
  Clone ID: LIB3039-004-Q1-E1-F2

SEQ ID NO: 11741 - DNA, 366 bp, Glycine max
  unsure (1)..(366): unsure at all n locations
  Clone ID: LIB3039-004-Q1-E1-F3
gagggtttttgagagttgcagtttgcactttgtaggatcatctcctagcattgatcgattgagatggcagacgaagctaacagaactgctttccttgaaattcaaagtcgcatgatcgatactactggaaaaataaaacaggtgcaaacccagatgcgttccaaagaagcagaaaaaaagcgtgcttttctgaccatggaggagctgaagcaagttcctgatgatacgaatgtttacaaatccattggaagaatgtntgtattggagaccaaggcaacattaatgaatgaacaggagaccaagtttaaggatggtgaagcttcaattactgcattacagagctcaaaagaatactttggaaaacag

SEQ ID NO: 11742 - DNA, 402 bp, Glycine max
  Clone ID: LIB3039-004-Q1-E1-F4
gaaggtgcaagagtttgttgtgagctataagctagtttatcgtgaggagaatatgaagttgtttgttttctttgttgctgcagtagttttggtagcatggccatgccatggcgcaggctaccaaaggttccctctccgaatgaaaactggctatggtgagcgttcttcggaggtaaaatgcgcaagttttaggcttgctgtggaagcacacaacatccgagcctttaaaaccattcctgaagagtgcgttgaaccagcataggactacattaatggcgaacactttagatcagactctaaaacagttaaccaacaagctttcttttatgctagtgaacgcgaagtccatcacaacgacatatttatattcggcatagataccaccgtactctctaatatccc

SEQ ID NO: 11743 - DNA, 370 bp, Glycine max
  Clone ID: LIB3039-004-Q1-E1-F5
ggccattgttgctgtcatcatccgcagctgctgttattcgcaccgcaaacaaacagtgagccatggccgtcggaaagaacaagcgcatctccaaagggaaaaagggtggtaagaagaaggcagctgatccctttgccaagaaggattggtatgacattaaggccccttctctttttcaagtgaaaaatgttggcaaaaccctcgtctctcgtacgcagggtaccaagattgcttctgaaggacttaaacatagagtgtttgaggtctccttggctgatcttcaaggggatgaggatcatgcattcaagaagattaggttgagagctgaagatgtgcaagggaagaatgtcctgacaaatttctggggaat

SEQ ID NO: 11744 - DNA, 402 bp, Glycine max
  unsure (1)..(402): unsure at all n locations
  Clone ID: LIB3039-004-Q1-E1-F6
ggagagtggagagagagagagaagtgagagtgtgagagggagcacagtgaagaagagaacgaaggaacgaagatggagactcctcctccgcaacaaggcgtggtgaagaagaaggagacaaggggccgaaaacccaagccgaaagacgaacacgccaaggcgttgaaggaagggagaaaaacacagcaacaacaacatgatcagcagcaacaacaacaacagcaacatcaaccttcggtggacgagaaatacacgcagtggaagtcncttgttcctgtcctctacgactggctcgccaaccacaacctcgtctggccctctctctcttgccggtggggccctcagcttgaacaagccacttacaagaatcgtcaaagactctacctttctgagcagactgat

SEQ ID NO: 11745 - DNA, 387 bp, Glycine max
  Clone ID: LIB3039-004-Q1-E1-F7
gcagcagaagaacaagtagttgagaactaagaaggagaagcaaatggcttcctcaatgatctcttccccagctgttaccactgtcaaccgtgccggtgccggcatggttgctccattcactggcctcaagtccatggctggcttccccaccagaaagaccaacaatgacattacctccattgctagcaacggtggaagagtgcaatgcatgcaggtgtggccaccagttggcaagaagaagtttgagactctttcctacctgccagaccttgatgatgcacaattggcaaaggaagtagaataccttcttaggaagggatggattccttgcttggaattcgagttggagcacggtttcgtgtaccgtgagcacaacaagtcaacaag

SEQ ID NO: 11746 - DNA, 358 bp, Glycine max; identical to SEQ ID NO: 7611
  Clone ID: LIB3039-004-Q1-E1-F8

SEQ ID NO: 11747 - DNA, 338 bp, Glycine max
  Clone ID: LIB3039-004-Q1-E1-F9
ggaagaggaatgagaaatagctaataagtgttaattggttgagcagggtattgtgttgtgtagctgaaggacatggagagaagcaatccggtgaggaagccacacacttcaactgcagatctgcttacgtggcctgaaactcccatttctgattccccagctcctccttcctccgccgttcgttctcaccagccgtcggatgggatcaggaaggtggtgtttggtggtcaggtcaccgatgaagaggtggagagcttaaataaaagaaagccttgttcggattataagatgaaggagataactggtagtggaatatttgtagccaatggagaagatga

SEQ ID NO: 11748 - DNA, 380 bp, Glycine max
  unsure (1)..(380): unsure at all n locations
  Clone ID: LIB3039-004-Q1-E1-G1
ggcagcaagaagaggaagcactgtgttcgacttcgtcaaaagcatcatgagccgctacgacagccgctccggcgacccagcttcctatcgtgatcggaggagtgattctgggctaggtgcacctacagggtttggtggctctgtacaacactcttcatcaaacaggagggattatgatgatggtgggtcaccaaagaggaacctcagtttggatggtttacctcattttgagaaaaacttctacattgagtcaccagctgtaagggcaatgacagatgctgaagttaatgagtatcggcagcagagggaaataactgttgaagggcgagatatcccgaaacctgtcanagactttcacgatgctggttttccagaatatg

SEQ ID NO: 11749 - DNA, 354 bp, Glycine max
  Clone ID: LIB3039-004-Q1-E1-G10
gggagctgggtttgttttcggcctttgatcttcgattctctctctttttctctcgcgaaaaccgtatcagcaatgtctggagaatcagccagcgctattcacaagggtcaagtcgatctcttagacttcattgactggtctggggttgaatgcctcaatcaaagctccacccactctctccccaatgctatcaaacagggttatagagaagacgatggtttgcatctggagagtgatgcagacgagcagcttttgctctatattcctttcactcaagtcgttaaactttattcctttgttatcaaaggtcctgaagaagaaggccccaagacagtgaagctcttttctaacaag

SEQ ID NO: 11750 - DNA, 347 bp, Glycine max
  Clone ID: LIB3039-004-Q1-E1-G11
gacagcactgcactcttcgcaacacagcaaaaaaagacaacccagagagcgcgtcttaataaacgctcttctctgaaaacccccatttcttttcttctttcttcttctctttcgcttcttcgatcttcgatcttcgtcgctgaaaatgagagagtgcatttcaatccacatcggccaggccgggattcaggttggaaacgcctgctgggagctttactgcctcgaacacggcattcagcctgatgggcagatgccaagtgacaagaccgttggtggaggtgatgatgctttcaacaccttcttcagtgaaactggggcaggaaagcacgtggcccgtgcgatttttg

SEQ ID NO: 11751 - DNA, 359 bp, Glycine max
  Clone ID: LIB3039-004-Q1-E1-G12
ggaagaagggaagatgaacttgagatggatggaagcggtgctgccgctgggaatcatagcgggaatgctctgcgtcatgggaaacgctcagtattacattcacaaatccgcgcatggcagacctaagcacatcgggaacgatatgtgggacgtggccatggaacgaagggacaagaagcttgtcgagcaagcctctccctccaattaacatcgttgttttgccaatgacattgtgaagaaaataaactgctcacctggatttacgactgtgttctagggaagcagggttaatcacaagaatcaaattccgtctgttttcttgtatgcaattcaacataagatttataaatatatctatg

SEQ ID NO: 11752 - DNA, 360 bp, Glycine max
  Clone ID: LIB3039-004-Q1-E1-G2
ggcacaagtgagtctgttgatcgagataactagaaacagtgtgatgaaaatgaaggtccttgttttcttcgttgctacaattttggtagcatggcaatgccatgcgtacgatatgttccctctccgaatgaacactggctatggtgcctgtactccggaggtgaaatgcgcaagttggaggcttgctgtggaagcacacaacatctttggctttgagaccattcctgaagagtgcgttgaagcaacaaaggaatacatccatggcgaacaatatagatcagactccaaaacagttaaccaacaagcttacttttatgccagagacctcgaagtccatcccaaggacacatttgtgttcag

SEQ ID NO: 11753 - DNA, 403 bp, Glycine max
  Clone ID: LIB3039-004-Q1-E1-G3
ggcaagagtttgttgtgagctataagctagcttatcgtgaggagaatatgaagttgtttgttttctttgttgctgcagtagttttggtagcatggccatgccatggcgcaggctaccaaaggttccctctccgaatgaaaactggctatggtgagcgttcttcggaggtaaaatgcgcaagttttaggcttgctgtggaagcacacaacatccgagcctttaaaaccattcctgaagagtgcgttgaaccaacaaaggactacattaatggcgaacaatttagatcagactctaaaacagttaaccaacaagctttcttttatgctagtgaacgcgaagtccatcacaacgacatatttatattcggcatagataacaccgtactctcctatatcccatacta

SEQ ID NO: 11754 - DNA, 345 bp, Glycine max
  Clone ID: LIB3039-004-Q1-E1-G4
ggtcgtcgaagcgcgagcaagcatcccaaaaccctagctcgcgttctgctttcgtcttttacatcagcaggatggagtctcaggtgaagcacgcacttgttgtcaaagttatgggtcgtactggatccagaggacaagtaacccaggttagagtgaaatttttggatgatcagaaccgtcacatcatgaggaatgtgaaaggacctgtgcgagaaggagacattctcaccctactcgagtctgaaagggaagcaagaagattgcgctagatggtttcttttggcttgcctccaaattccaacaaaacagtgtgattttgttgattttaatggtagttggtggatg

SEQ ID NO: 11755 - DNA, 396 bp, Glycine max
  Clone ID: LIB3039-004-Q1-E1-G5
ggcacaagtgagtttgttgatcgagataactagaaacagtgtgatgaaaatgaaggtccttgttttcttcgttgctacaattttggtagcatggcaatgccatgcgtacgatatgttccctctccgaatgaacactggctatggtgcccgtactccggaggtgaaatgcgcaagttggaggcttgctgtggaagcacacaacatctttggctttgagaccattcctgaagagtgcgttgaagcaacaaaggaatacatccatggcgaacaatatagatcagactccaaaacagttaaccaacaagcttacttttatgccagagacctcgaagtccatcccaaggacacatttgtgttcagtatagatggcaccgtactctctaataatcaatacta

SEQ ID NO: 11756 - DNA, 349 bp, Glycine max
  Clone ID: LIB3039-004-Q1-E1-G6
gattcactgtgtctgaaaatgaagaggagaaaaaagattagcgacggaggaaaacgacaaggtggaatagcgttgccgccgccgccaagaggccctccgcctcctctaccctctcgccctcgcctcgaacccgtcgatcgcgaaaagacatgtccgttactgctgcgagtgttcactaagattgggagtcaccattccatggaacactttgccgtcagaggcatagagcccaatgactaggttcagatttacacctggaacgacgctactctccgagatctcaccgatcttgtcatagaagttgctccggctgcaatgacatgaaacgccaaactcaccttcacctttg

SEQ ID NO: 11757 - DNA, 360 bp, Glycine max
  unsure (1)..(360): unsure at all n locations
  Clone ID: LIB3039-004-Q1-E1-G7
ggcacaagtgagtttgttgatcgagataactagaaacagtgtgatgaaaatgaaggtccttgttttcttcgttgctacaattttggtagcatggcaatgccatgcgtacgatatgttccctctccgaatgaacactggctatggtgcccgtactccggaggtgaaatgcgcaagttggaggcttgctgtggaagcacacaacatctttggctttgagaccattcctgaagagtgcgttgaagcaacaaaggaatacatccatggcgaacaatatagatcagactccaaaacagttaaccaacaagcttacttttatgccagagacctcgaagtccatcncaaggacacatttgtgttcag

SEQ ID NO: 11758 - DNA, 397 bp, Glycine max
  unsure (1)..(397): unsure at all n locations
  Clone ID: LIB3039-004-Q1-E1-G8
ggcacaagtgagtttgttgatcgagataactagaaacagtgtgatgaaaatgaaggtccttgttttcttcgttgctacaattttggtagcatggcaatgccatgcgtacgatatgttccctctccgaatgaacactggctatggtgcccgtactccggaggtgaaatgcgcaagttggaggcttgctgtggaagcacacaacatctttggctttgagaccattcctgaagagtgcgttgaagcaacaaaggaatacatccatggcgaacaatatagatcagactccanaacagttaaccaacaagcttacttttatgccagagacctcgaagtccatcccaaggacacatttgtgttcagtatagatggcaccgtactctctaatattccatactac

SEQ ID NO: 11759 - DNA, 397 bp, Glycine max
  Clone ID: LIB3039-004-Q1-E1-G9
gagagctgaggagaaattgggtgtagaaacagcgaaagagaaagagagagagagagagagatggcgtcgggctggggaattaccggaaacaaaggtcgctgctacgatttctggatggatttcagcgagtgcatgtctcgctgccgtgagcccaaggactgtgcttttctccgcgaagactacctcgagtgcctccaccattccaaagagtttcaacgacgaaaccggatttacaaggaggagcagcgcaaactaagggctgctaccaggaaaggccaggaggatggggttaatgaacatcatcattagaacctggagttaatttcaatctaagcttctgaacaattattttgataaaatgtttgtgatttgcttggatcggtattcctgcatgttc

SEQ ID NO: 11760 - DNA, 424 bp, Glycine max
  Clone ID: LIB3039-004-Q1-E1-H1
ctcacgggtcgacgcacgcctctaacagcagtcataatacaacagaaggggagaaggatggagaagaggttcacttcggataaaaaagtggaaacagtggaagcgaaggtgaaggaagttggagagaaattagggtttaggattgagatagggaagaacggtgctattgggttgggaaaggggaaggtgggtgttgtggttgaggtgtttgagattgtggctgacttgttgcttgtggcggtcaaagtggtggatggtgggctggagtttgaggagcttcattgggatgattggagaattggccttcaagatcttgttctctcatggcatgatgttggattggagctttagagaatacagtctaaggttttgtacagatggtcctagtagtcctttatgtttatgtgtttggttccttttgaat

SEQ ID NO: 11761 - DNA, 312 bp, Glycine max
  unsure (1)..(312): unsure at all n locations
  Clone ID: LIB3039-004-Q1-E1-H11
ggcacaagtgagtttgttgatcgagataactagaaacagtgtgatgaaaatgaaggtccttgttttcttcgttgctacaattttggtagcatggcaatgccatgcgtacgatatgttccctctccgaatgaacactggctatggtgcccgtactccggaggtgaaatgcgcaagttggaggcttgctgtggaagcgcacaacatctttggctttgagaccattcctgaagagtgcgttgaagcaacaaaggaatacatccatggcgaacaatatagatcagactccanaacagttaaccaacaagcttactt

SEQ ID NO: 11762 - DNA, 348 bp, Glycine max
  Clone ID: LIB3039-004-Q1-E1-H12
caacatatgtcatcgaaaggatctcgaagacccaccaacgcacgaaagccgggatctttcagaaaatggattcctattcgaagggtgcataaccgcatggataagctcacactaacccgtcaatttgggatccaattcggttccttaagaggtatcgggaaggaattttggaatgtaataatatcgattcatacagatacagaagaaagggttctctattgattcaaacgctctacctacgagatagggatagagaaagaggaaaaaaccgaggatttcacatagtacttttggtcgaaaaatcgatctgatttttttcgtacttttcgctcaatgatgaaatgggtc

SEQ ID NO: 11763 - DNA, 396 bp, Glycine max
  Clone ID: LIB3039-004-Q1-E1-H3
gactcacccaaaaccaacctactccaaggaagtcccctaatcagaaccagagatggacaccaaacccaccgagatcagcagcggcaagatgttcggaggttacaacaagagattcaagcatttcagccttaccctgggatgctccatgaacttccacatctacttccctccatctccttctccctctcacaaattccctgtgctgcactttctctctggcctcacttgcaccgacgagaacttcatattcaggtcgggtgctcagcgtgccgcttccgccgagggtgttgccttggttgcccccgacacttctccgagaggcttgaatgtggaaggagaagcagacagctgggaccttggagtaggtgcaggattttatctcaatggccacacaga

SEQ ID NO: 11764 - DNA, 289 bp, Glycine max
  Clone ID: LIB3039-004-Q1-E1-H4
ggctccgccatttttcgtagctgctgttcttgcgcgtgaacaagcctcaggtaagccaaaaccatggttaagcataacaatgttatcccaaacggacacttccgtaagcactggcagaactatgtgaagacttggttcaatcagccagcacggaagacaaggagacgattggctcgtcagaagaaagctgtgaagatattcgccagacctactgctggacctctcaggcccattgtacatggtcaaactttgacatacaacatgacagtgacacgtggaaggggatttt

SEQ ID NO: 11765 - DNA, 361 bp, Glycine max
  Clone ID: LIB3039-004-Q1-E1-H5
ggtgcacaagtgagtttgttgatcgagataactagaaacagtgtgatgaaaatgaaggtccttgttttcttcgttgctacaattttggtagcatggcaatgccatgcgtacgatatgttccctctccgaatgaacactggctatggtgcccgtactccggaggtgaaatgcgcaagttggaggcttgctgtggaagcacacaacatctttggctttgagaccattcctgaagagtgcgttgaagcaacaaaggaatacatccatggcgaacaatatagatcagactccaaaacagttaaccaacaagcttacttttatgccagagacctcgaagtccatcccaaggacacatttgtgttca

SEQ ID NO: 11766 - DNA, 386 bp, Glycine max
  Clone ID: LIB3039-004-Q1-E1-H6
ggaaacagagagtggtttcagtgagtgatcggtgttcacttgatccttcataagtcgtcatcatcatcatcatcatcaccgttgattgaagaagatgccgatcagaaacatcgccatcggaaggcctgaagaggctactcaccccgacacgttgaaggcggggttggctgagttcatctccaccttgatcttcgtgttcgccggttcaggttccggcatcgcctacaacaagctcaccgacaacggcgccgccactcccgccggcctcatctccgcttccatcgcccatgctttcgccctcttcgtcgccgtctccgtcggcgccaacatctccggcggccacgtcaaccccgccgtcaccttcggcgccttcgtgggcggcaaca

SEQ ID NO: 11767 - DNA, 400 bp, Glycine max
  unsure (1)..(400): unsure at all n locations
  Clone ID: LIB3039-004-Q1-E1-H7
gaaggtgcaagagtttgttgtgagctataagctagtttatcgtgaggagaatatgaagttgtttgttttctttgttgctgcagtagttttggtagcatggccatgccatggcgcaggctaccaaaggttccctctccgaatgaaaactggctatggtgagcgttcttcggaggtaaaatgcgcaagttttaggcttgctgtggaagcacacaacatccgagcctttaaaaccattcctgaagagtgcgttgaaccaacanaggactacattaatggcgaacaatttagatcagactctaaaacagttaaccaacaagctttcttttatgctagtgaacgcgaagtccatcacaacgacatatttatattcggcatagataacaccgtactctctaatatc

SEQ ID NO: 11768 - DNA, 380 bp, Glycine max
  Clone ID: LIB3039-004-Q1-E1-H8
gaaggtgcaagagtttgttgtgagctataagctagtttatcgtgaggagaatatgaagttgtttgttttctttgttgctgcagtagttttggtagcatggccatgccatggcgcaggctaccaaaggttccctctccgaatgaaaactggctatggtgagcgttcttcggaggtaaaatgcgcaagttttaggcttgctgtggaagcacacaacatccgagcctttaaaaccattcctgaagagtgcgttgaaccaacaaaggactacattaatggcgaacaatttaaatcagactctaaaacagttaaccaacaagctttcttttatgctagtgaacgcgaattcaatcacaacgacatatttatattcggcatagata

SEQ ID NO: 11769 - DNA, 337 bp, Glycine max
  Clone ID: LIB3039-004-Q1-E1-H9
ggccctttcgccgccttattctgattccagaaacatcttcaatcaatctcccctcgtctcctctcaatcaagtttgaagctgagaaataatcatggccggtggtgcgaatttcgtgcagagggttctctcttacgtggtgaatgaagtggttgtcaatggtcttgccaacagccctgcatttcagaggtttgcagtgaggacatcaaaaagaattggagatatttctaacaaagctgttcagaagaggcaggagctagctgagcagattaaggacatctcaaaaaatatggagtcattcaagaaccagtaattttggtattcttgctacattgctga

SEQ ID NO: 11770 - DNA, 304 bp, Glycine max
  Clone ID: LIB3039-005-Q1-E1-A1
ggtgcacaagtgagtttgttgatcgagataactagaaacagtgtgatgaaaatgaaggtccttgttttcttcgttgctacaattttggtagcatggcaatgccatgcgtacgatatgttccctctccgaatgaacactggctatggtgcccgtactccggaggtgaaatgcgcaagttggaggcttgctgtggaagcacacaacatctttggctttgagaccattcctgaagagtgcgttgaagcaacaaaggaatacatccatggcgaacaatatagatcagactccaaaacagttaaccaac

SEQ ID NO: 11771 - DNA, 388 bp, Glycine max
  unsure (1)..(388): unsure at all n locations
  Clone ID: LIB3039-005-Q1-E1-A2
gacggcactcgttttcgttctcgttctggtttatagatctttgcgaaggaggtttacagcgctcaaccaaagatgcagaacgaggaaggacagatcactgagctttacattcctaggaagtgctccgccacaaacagattgattaccgctaaggaccatgcttcggttcagatcaacattgggcatgtggatgagaatggcgtctacaatggccatttctccacttttgccctctgcggattcatccgtgctcaaggtgatgctgacagtgctctagaacgcttgtggcagaagaagaaagttgaagttaagcaacagtagacanccatgatagtttgttacttcgttatgtattaatttctactcttgctagagatatttgagtact

SEQ ID NO: 11772 - DNA, 400 bp, Glycine max
  unsure (1)..(400): unsure at all n locations
  Clone ID: LIB3039-005-Q1-E1-A3
ggcacaagtttgttgagatagctagaagcaataagatgaaaatgaaagtgcttgttttgtttgttgctacagttttggtagcatatgaatgccgtggctcagactaccagaagttccctctccaaatgaaaactgggtttggtgggcaatacagcaatgaggtggcatgtgccagttggaggcttggcgtggaagcaaacaacgtagtcaagtggcaaactgttcctgcagcttgcggagagtacatagctgactacgttctaggagaccaatatagatcagattccaaaacagttaaccaacaagcttatttctatgctaaatccctcanactcancaacaaagatgtctttgtctcggacgttgacgacactactctctctaatctccagtattttgc

SEQ ID NO: 11773 - DNA, 388 bp, Glycine max
  unsure (1)..(388): unsure at all n locations
  Clone ID: LIB3039-005-Q1-E1-A4
gattatatttgagttcaaacaaatcaaagccatggccacctccaacttctctattgttctctccgtctccctagccttctttttggtgctacttaccaaggcacactcgaccgataccgtttctttcaccttcaacaagttcaacccagtccaaccaaacattatgctccaaaaagatgctagtatttcatcctctggggtgttacaactcaccaaagttggcagcaacggcgtgcccacctcgggatctctcggtcgtgccctttacgctgccccaatccagatttgggacagcgaaaccggcaaggtagccagctgggctacatcctttaaattcaacattttcgcacccaacaaatcanactcagctgacgggcttgccttcttc

SEQ ID NO: 11774 - DNA, 395 bp, Glycine max
  Clone ID: LIB3039-005-Q1-E1-A5
ggtattccttacgctctctcactcacaaacacacactgaactaaaaaacatcaaaagagacatggctgagcaaaccttcatcatgatcaagcctgatggcgtccaaagaggccttattggcgagatcattagcagatttgagaagaaaggtttctacttgaaaggtttgaaacttgttgctgtggaccgtccttttgctgagaagcactatgctgatttgtctgccaagcctttctttagtggtttggtggattacattatctctggccctgttgttgccatgatctgggagggcaagaatgttgttacaactggccgaaagattatcggagccacaaacccagctcaatctgagcctggaactatccgtggtgacttttgcattgacattggaa

SEQ ID NO: 11775 - DNA, 404 bp, Glycine max
  unsure (1)..(404): unsure at all n locations
  Clone ID: LIB3039-005-Q1-E1-A6
ggcacaagtttgttgagatagctagaagcaataagatgaaaatgaaagtgcttgttttgtttgttgctacagttttggtagcatatgaatgccatggctcagactaccagaagttccctctccaaatgaaaactgggtttggtgggcaatacagcaatgaggtggcatgtgccagttggaggcttggcgtggaagcaaacaacgtagtcaagtggcaaactgttcctgcagcttgcggagagtacatagctgactacgttctangagaccaatatagatcagattccanaacagttaaccaacangcttatttctatgctaaatccctcaaactcaacaacanagatgtctttgtcttggacgttgacgacactactctctctaatctccattattttgctaac

SEQ ID NO: 11776 - DNA, 354 bp, Glycine max
  Clone ID: LIB3039-005-Q1-E1-A7
gacaagtgagtttgttgatcgagataactagaaacagtgtgatgaaaatgaaggtccttgttttcttcgttgctacaattttggtagcatggcaatgccatgcgtacgatatgttccctctccgaatgaacactggctatggtgcccgtactccggaggtgaaatgcgcaagttggaggcttgctgtggaagcacacaacatctttggctttgagaccattcctgaagagtgcgttgaagcaacataggaatacatccatggcgaacaatatagatcagactccaaaacagttaaccaacaagcttacttttatgccagagacctcgaagtccatcccaaggacacatttgtgt

SEQ ID NO: 11777 - DNA, 401 bp, Glycine max
  Clone ID: LIB3039-005-Q1-E1-A8
gatacaatagagaccagcttttgcttctttgtgaacatggagatgaggaaatcatgtggcttcttcgtcttgctcctcctccttgtctttgcttcccaggtggtggtgcagacggagggaagagtgtgtgagtcacaaagccacgggttccatggtttgtgtaatagagaccacaactgtgctttggtctgcaggaacgaaggtttctccggtggcaggtgcaaaggcttccgccgtcgctgcttttgcaccaggatttgttgagatctcatcagacactactcttgctatgcaaattaataaatcatagctaggccaaataaattgcatctactctttatccatttgggagctagctaccacaactaactcatacttggacattggattgcttccctttg

SEQ ID NO: 11778 - DNA, 254 bp, Glycine max
  Clone ID: LIB3039-005-Q1-E1-A9
ggcacaattgattttgttgatcaaaataactagaaacattgtgatgaaaatgaaggcccttgtttccttcgttgcaacaattttggaagcatggaaatgccatgcgtacaaaatgttccctctccgaatgaaaactggcaatggtgcccgtactccggaggtgaaatgcccaatttggaggcttgctgtggaagcacacaaaatctttggctttgagaccattcctgaaaattgcgttgaaccaacaaaggaat

SEQ ID NO: 11779 - DNA, 358 bp, Glycine max
  Clone ID: LIB3039-005-Q1-E1-B1
ggcacaagtgagtttgttgatcgagataactagaaacagtgtgatgaaaatgaaggtccttgttttcttcgttgctacaattttggtagcatggcaatgccatgcgtacgatatgttccctctccgaatgaacactggctatggtgcccgtactccggaggtgaaatgcgcaagttggaggcttgctgtggaagcacacaacatctttggctttgagaccattcctgaagagtgcgttgaagcaacaaaggaatacatccatggcgaacaatatagatcagactccacaacagttaaccaacaagcttacttttatgccagagacctcgaagtccatcccaaggacacatttgtgttc

SEQ ID NO: 11780 - DNA, 367 bp, Glycine max
  unsure (1)..(367): unsure at all n locations
  Clone ID: LIB3039-005-Q1-E1-B10
ggaaaacctggtcagacagaaattactctgaaagatgatcttcctgaaagggataggactgatctttacaagacatacttactttattgtctaactggtgaagtgacaagggttccatttggtgctcagatcactactaagaaggatgattctgagtatcttcttctaaatcagcttggtgggatcctgggattgagtagtcaagaaatagtggaagtgcacaggggtctagctgagcaggcttttangcaacaagctgaggtaattttagccgatggacagttgacaaaggccaaagtggagcagcttaataacctccagaaacaagtaggcttacctcaagaatatgctcaganaataatcaaga

SEQ ID NO: 11781 - DNA, 192 bp, Glycine max
  Clone ID: LIB3039-005-Q1-E1-B11
ccacggggaaaacctgatcacacagaaattactctgaaagatgatcttcctgaccaggatatgactgatctttacaagacatagggaccttactgtccaactggtgaactgacaacggttccatttggctgctcacatcactactaataaggatgattctgagtatcttcttcaaaatcagcttgctgggat

SEQ ID NO: 11782 - DNA, 386 bp, Glycine max
  unsure (1)..(386): unsure at all n locations
  Clone ID: LIB3039-005-Q1-E1-B12
ggcacaaatctcggaagcaaacgcagcattgggagatagaaagagagagagaaagagagagagagaaagacccttacccttctctatcgctcgctttcctttgacgcttctgacccttgctttgtctgcgtcttccttctttctttctttctttctctgtgtgtcgtaatggctctcccagactcttcttcccgtcgcaactccctgatcccctccttcatctactcctcttcctccaaaacgctccctctccaccacatgctcaacaccgcctccgctgccgccgccgccgctccctcnccgccgccggccaatctcgacgccggatcgcgtggcctcatgattcgctctcccagcgagtcacgcaagatcgagttgtactcccc

SEQ ID NO: 11783 - DNA, 406 bp, Glycine max
  unsure (1)..(406): unsure at all n locations
  Clone ID: LIB3039-005-Q1-E1-B2
ggcatcaattcaaaatatatcatcaattataagcatgggtttgtggaacacaacgaatgcagtgtcttgccgctttcacaagtttggtgatgaccaaaagaatctggtcttccaaggtgatgccacgtcttcttccaggggcatagaactcacaaagttagacggtggaggaaaaccagtgggtggcagtgtggggagagtgttatactcttctccagtgcacctttgggaaagctctacagtggtcgcaagctttgaaaccgacttcaccttttccatctcatcagactctactactccaggtgatggccttgccttcttcattgcaccatttgacactaaaatccctccaanactctggtgggagcaaccttggactcttcccatcagacaatgttgttgctgt

SEQ ID NO: 11784 - DNA, 356 bp, Glycine max
  Clone ID: LIB3039-005-Q1-E1-B3
ggcacactacggtactatagtatagtgtttacttacttaattactcagcactctcaaaaaaataaaaacttcttttataaattggaaaagggactcttcactcttctctttctctctctgcaatgtaggtcgtcggagaatggcaaagtgtcatcagaacaacgtcggatccatcgctcttgaccaccgccactccgccaaaaatgccaccgccgccggccacttccgcgtgctccgccgcttgatcttcgacgccgtcagctgcggcggcacctctcgctaccggtatcgccagcgcggtggcgatgtcagcgacggcggtgacttcagctcagcggcgtgccacacagagaaag

SEQ ID NO: 11785 - DNA, 403 bp, Glycine max
  unsure (1)..(403): unsure at all n locations
  Clone ID: LIB3039-005-Q1-E1-B4
gactccgaagtcaccctacaacaacacatacactcacacaataatggaaaaagggcaaagaaaaacaacaccactactactatgctctcacattgtggttctccatttgctctccctagtggccgagactagtgccaaggtttccgcggtgatcgtcttcggtgactcctccgtcgacgccggcaacaacaacttcatccccaccattgcacggagcaatttccagccatatgggcgtgactttgaaggtggaaaagccactgggaggttctgcaatgggagaatacctacggattttatatcagagtcttttgggctgaaaccttatgttgcagcatacttggatcctaagtatantatttcagattttgcaagtggggtcacttttgcttctgcagcaact

SEQ ID NO: 11786 - DNA, 400 bp, Glycine max
  Clone ID: LIB3039-005-Q1-E1-B5
gatatgttctctgtcaacacccttccctcccagttccctccgccatccccatgccgtcgccattgccgtctcaccgtcgtctgctcctccttccgccgccgcagtcgaagccgcagacgtcacaacaaagtatctcttcccaccaccacctccacctcttcatttgaaccgaagctcgaagccgttatcgacctcactcccctaaccgctttccaatctgaacttcgacggttcctatcttccggcaaagacgcttaccgagatttgcaaaccttggtcactctcgaccacaaccggaggcttgtcgtttcgtgtcgcccttccaccttgcatttcctcggaacttcggcggctttgaccttcctcgccttttctgtttcacggttttggctcaattgat

SEQ ID NO: 11787 - DNA, 113 bp, Glycine max
  Clone ID: LIB3039-005-Q1-E1-B6
acccacaagtcaatagggatgtgactacagacagaaagggattctctggcactctccttccctcccatttcaatcagccatcaccaagcgcttcccaatgccgtctcttcgct

SEQ ID NO: 11788 - DNA, 400 bp, Glycine max
  Clone ID: LIB3039-005-Q1-E1-B7
gggagctgggtttgttttcggcctttgatcttcgattctctctctttttctctcgcgaaaaccgtatcagcaatgtctggagaatcagccagcgctattcacaagggtcaagtcgatctcttagacttcattgactggtctggggttgaatgcctcaatcaaagctccacccactctctccccaatgctatcaaacagggttatagagaagacgatggtttgcatctggagagtgatgcagacgagcagcttttgctctatattcctttcactcaagtcgttaaactttattcctttgttatcaaaggtcctgaagaagaaggccccaagacagtgaagctcttttctaacaaggagcacatgggatttagtaatgtcaatgattttcccccaagtgatg

SEQ ID NO: 11789 - DNA, 397 bp, Glycine max
  Clone ID: LIB3039-005-Q1-E1-B8
gactcaccacttcaaaacactcataacacaaagcacaaagcaaagctcatccttgagttaaaaaatggcagcagcttcttccatggctctctcatccccatccttggctggcaaggccgtgaagctgggcccatcagccccagaagtgggaagggtgagcatgaggaagaccgtcaccaagcaggtctcctcaggaagcccatggtacggcccagaccgagtcaagtacttgggcccattctctggcgagcccccgtcctacctaaccggtgagttcccaggcgactacggctgggacactgctgggctttccgcagacccagaaaccttcgccaagaatcgtgaactcgaagtgatccactccaggtgggccatgctcggagccttgggctgcgtc

SEQ ID NO: 11790 - DNA, 390 bp, Glycine max
  Clone ID: LIB3039-005-Q1-E1-B9
ggttcccacaaagcaaggtatagctcaatggcatcatcatttgtgggtactttattacccaaccacttcacacaaaccaaacactcagctgttcctgcaagtagatcaggtgctccaagaaggaggagagtgcacttagcaacaacaagagcagagaccatgactactgtcatagaaaaactgggcattaagattgagaggaaccctcctgagtccaagctcactcaactgggtgttaggcaatggcccaaatggggttgccctccaagtaagttcccatggacatatgaagccaaagagacttgctatcttctggaaggaaaagtgaaggtctttcctaatgggtcgaatgagtcagttgaaattgctgctggtgacttggttgtgttt

SEQ ID NO: 11791 - DNA, 390 bp, Glycine max
  Clone ID: LIB3039-005-Q1-E1-C1
gatgtaagaaaacacaaacaacacaaaattcattgcacagtgttattttcagtatcggcatcatggctccaattgcagtgggagatgtcattccagacggcattttggcttacttggatgaagaaaacaaaccccaaactgtctctattcactctctcgccgccggcaagaaagtcatcatctttggggttcccggtgccttcactcctacatgcagcttgaagcacgtgcctggcttcattgagagagcagaagagctgaaaggaaagggtgtggacgaaataatctgtatcagcgtgaatgatccctttgtgatgaactcatgggccaaaacgttcccagagaacaagcatgttaagttccgtgctgatggtgcagccaaatacacca

SEQ ID NO: 11792 - DNA, 210 bp, Glycine max
  Clone ID: LIB3039-005-Q1-E1-C10
cgggctcctacagattcttcatcaactgctattttggatcggaacctcttctgcggcgtagcaatgggacactctcctctttggaaatctcgggccggaaaactaatgtcctggttctcgcacttccctcgtgtgttggaaaccccctagattgatcatgaactaacgccttatgtgccacatgcaatgcttcccttgcaatccctcgga

SEQ ID NO: 11793 - DNA, 268 bp, Glycine max
  Clone ID: LIB3039-005-Q1-E1-C11
ggtacgcagcttcatccctaacgcgtgcatagcagagtcagtcacagagacgcagccatggggcgggcacctgcgaggtgtgagatgcaagttaagaacaagccatacaccaagtcacgtttctgccgtggtgttcctgatcgcaagatcaagatttatgaagttggtatgaataagaaaggtgttgatgagtttcctttctgtgtctatctggctagttgggagaaagaaagtgtttcaagtgagggcctggcagctgctcgcattg

SEQ ID NO: 11794 - DNA, 241 bp, Glycine max
  Clone ID: LIB3039-005-Q1-E1-C12
ggtacgcaccttcatccataactcgtgcatactaaactcagttacagacacgcagccatggttcggggaccggccaggtatgacacgcaaattatttacaaaccataccccacgtcaattttctgccgtcctgttcctcatcccatgatcagtatttatgaagttggtatgaataagaaaggtgtagatgactttcctttctttctctatctggctcattgagagatagacatccatttca

SEQ ID NO: 11795 - DNA, 397 bp, Glycine max
  unsure (1)..(397): unsure at all n locations
  Clone ID: LIB3039-005-Q1-E1-C2
ggcacaagtgagtttgttgatcgagataactagaaacagtgtgatgaaaatgaaggtccttgttttcttcgttgctacaattttggtagcatggcaatgccatgcgtacgatatgttccctctccgaatgaacactggctatggtgcccgtactccggaggtgaaatgcgcaagttggaggcttgctgtggaagcacacaacatctttggctttgagaccattcctgaagagtgcgttgaagcaacanaggaatacatccatggcgaacaatatagatcagactccaaaacagttaaccaacaagcttacttttatgccagagacctcgaagtccatcccaaggacacatttgtgttcagtatagatggcaccgtactctctaatattccatactac

SEQ ID NO: 11796 - DNA, 400 bp, Glycine max
  Clone ID: LIB3039-005-Q1-E1-C3
gaaaaataaaatatcttgtcattcaattccactcacattcgccatatcgtcttctcccatggccgccaccgatgaatccctccgcaaatccctcgccgagaagcacgccgcagtggaagcccaaggcaacgccgtccgcgccctcaaggccgccaaagccgccaaacccgaaatcgacgccgcaatcgaagccctaaacgcgctgaagctcgaaaaaagctccatcgagcactccctcctcggcggctccgacagccgcgaggccttccgtcagtccgtggtgaacacccttgaacggcgcctcttctacatcccctccttcaagatctaccgcggcgtcgccggcctcttcgactacgggcctcccggctgctccgtcaagtccaacgtgctctcgttc

SEQ ID NO: 11797 - DNA, 397 bp, Glycine max; identical to SEQ ID NO: 7408
  Clone ID: LIB3039-005-Q1-E1-C4

SEQ ID NO: 11798 - DNA, 370 bp, Glycine max
  Clone ID: LIB3039-005-Q1-E1-C6
ataaggggatactattatcagtcattctcatctttctctcttctctctccacacaaaccctaattcacgaccctgttcccctctcgtatccgtcatgaaaggaggaaagtccaagaccgaatctaagagagccgatcccaaacttgctgtgaataagaagggagccgccaccatcgctatgaaacccgccggcaaggggaaggcatcgaaagaccctaacaagccaaagaggcctccaagtgctttcttcgttttcatggaggagttcaggaatgtattcaatacagaacatcgtgaaagcaaaccagtgtctgctgtgggcaaatctgctggagcaaaatggactactatttccgatgctgaaaaagca

SEQ ID NO: 11799 - DNA, 401 bp, Glycine max
  Clone ID: LIB3039-005-Q1-E1-C7
ggggcgaggtagccagagagtgatacaatacagagtgcgttgttgctccttcgccacaactccctgccaacatgggtatctccagagattctatgcacaagaggcgtgccactggtggcaagaagaaggcatggaggaagaagagaaagtatgagcttggtcgccagcctgctaacactaagctgtcaagcaacaagacagtcaggaggatccgggttagaggtggaaatgtgaagtggagggcactgagattggatactggaaattactcctggggaagtgaagctgtaactcgcaagactcgtatactagatgtggtttacaatgcctcaaacaacgagcttgtgcgtactcagactcttgtaaaaagtgctattgttcaagttgatgctgctccattc

SEQ ID NO: 11800 - DNA, 402 bp, Glycine max; identical to SEQ ID NO: 7940
  Clone ID: LIB3039-005-Q1-E1-C8

SEQ ID NO: 11801 - DNA, 211 bp, Glycine max
  Clone ID: LIB3039-005-Q1-E1-C9
gaaggtgcaagagtttgttgtgagctataagctagtttatcgtgaggagaatatgaagttgtttgttttcgttgttgctgcagtagttttggtagcatggccatgccatggcgcaggctaccaaaggttccctctccgaatgaaaactggctatggtgagcgttcttcggaggtaaaatgcgcaagttttaggcttgctgtggaagcacac

SEQ ID NO: 11802 - DNA, 408 bp, Glycine max
  Clone ID: LIB3039-005-Q1-E1-D1
ggactcacacattgcttctgctaaccctctctgggctctccactgaactgagtctgaagaggaaaacatttaactaactgcaatggctgcacgtgtggctgcaaggtacggatctagaaggctatttagcagtggttctggaaaaatactgagcgaggaggaaaaggctgcagaaaatgcttactttaagaaagctgagcaagagaagttggagaagcttgctcgcaagggtcctcaacccgaagcaagctcggggggttcagtaactgatgccaaacctagtagctcaagacatgctggaacaacagccgacagagtttcaactgacaagtaccggaattatgcagttgtagctggtactgtaacaattcttggggctttggggtggtaccttaaaggcactgcaaa

SEQ ID NO: 11803 - DNA, 359 bp, Glycine max
  unsure (1)..(359): unsure at all n locations
  Clone ID: LIB3039-005-Q1-E1-D10
gaaacacattaatgtttggctgtaacccagagctccttcgcctcatcgatagtttaaagtctcgttttgacaatggtgagggttagtgtgttgaatgatgctctgaagagcatgtacaacgccgagaagcgcgggaagcgccaggtcatgattaggccatcctccaaggtcatcataaaattcctattggtcatgcagaagcacgggtacattggtgagttcgagtatgttgatgaccacagggctgggaaaatcgtggttgaattgaatgggcggctgaataagtgtggggttattanccctcgctttgatgttggtgtcaaagagattgaaggttggactgcaagactactaccctc

SEQ ID NO: 11804 - DNA, 366 bp, Glycine max
  Clone ID: LIB3039-005-Q1-E1-D11
gaatcccaatcccatttcaacctctctttcttttcttctcgcagagcgaaatcccaatcccacacaaatggcatgctcagccacctctgcttctctcttctccgcaaaccccacacctctcttctctcccaaatcctccctctccctccctaacaactctctccacctcaaccctctccccacgcgcccttctctctccctcacgcgcccctcgcacactcgccgctccttcgtcgtcaaagcctcctccagcgagcttccgctagttggaaacaccgcaccggatttcgaagcagaggctgtgtttgaccaggagtttatcaacgtgaaactatctgattacattgggaaagaaatatgttgtgc

SEQ ID NO: 11805 - DNA, 320 bp, Glycine max
  Clone ID: LIB3039-005-Q1-E1-D12
gacacaatcacacaatacaaaatcccttcccttccacatacactcttctccaatctcaccccaaaaaaacttgcaacacaccaaaaaccatgcctgaggaatcagtctcatccacaccaacattcttgggcagcctgtacagctggttcacccccactgtcctcatcctcatcctccaactagtcattggcaccattttcatcatctcaaaccttgacaacacccacacacaccaacaccaagaatcacaacacgcacatgactttccacaccaccatcttcccagattcccttccatgctccaaagactcaaatccatc

SEQ ID NO: 11806 - DNA, 399 bp, Glycine max
  Clone ID: LIB3039-005-Q1-E1-D3
gatgagtatcgatggagaagaagatgggtgagctaaagtcaactttccttcctttcctttccactagtcacataatcccgcgagtggagatggccacactcttcgccttgcacgacgtctacgtcaccatcatcacgaacgcacataaagcgaccgttttccataagtccatcgatttacatgccagtcgcggtcgctccatcagaacgcacgttgtcaacttccccgccgcataagtgggtctccccgtatggatcgaagccttcaacgtcgatacgcctcaggaaatgacacccacaatctagatgggcctatcccttctccaataagtcatcgaaaaactcattcattacttgcagccggatttcaccgtcaccgacatgttccacgcttggagtg

SEQ ID NO: 11807 - DNA, 396 bp, Glycine max
  unsure (1)..(396): unsure at all n locations
  Clone ID: LIB3039-005-Q1-E1-D4
ggttctagtgtgtgattgtttgttgttgtaactcgttcttcttcttttgttgttctgtgtttgtgtttgttttttctctcacctgaaaatgtcttgctgcggtggtaactgtggttgcggaagctcctgcaagtgcggcaacggctgcggaggctgcaagatgtacccagacttgagctacactgagtcaaccaccaccgagaccttggtcatgggagtggcacctgttaaggctcaatttgagggtgctgaaatgggtgtgcccgctgagaacgatggctgcaaatgtggaccaaactgctcctgcaacncctgcacttgcaagtgaggtgttgggagagcaagcttcaagcagagatagcccttaaataggaataatgataaactattaatgtg

SEQ ID NO: 11808 - DNA, 396 bp, Glycine max; identical to SEQ ID NO: 8042
  Clone ID: LIB3039-005-Q1-E1-D5

SEQ ID NO: 11809 - DNA, 397 bp, Glycine max
  Clone ID: LIB3039-005-Q1-E1-D6
ggcacaagtgagtttgttgatcgagataactagaaacagtgtgatgaaaatgaaggtccttgttttcttcgttgctacaattttggtagcatggcaatgccatgcgtacgatatgttccctctccgaatgaacactggctatggtgcccgtactccggaggtgaaatgcgcaagttggaggcttgctgtggaagcacacaacatctttggctttgagaccattcctgaacagtgcgttgaagcaacaaaggaatacatccatggcgaacaatatagatcagactccaaaacagttaaccaacaagcttacttttatgccagagacctcgaagtccatcccaaggacacatttgtgttcagtatagatggcaccgtactctctaatattccatactac

SEQ ID NO: 11810 - DNA, 356 bp, Glycine max
  Clone ID: LIB3039-005-Q1-E1-D7
ggtgtcaactcgaactacaatggatccaacttgagctaaaaatacaaacaaattttgcagttgactcaaaaaataaatttggcccatgctgatccgagttaacccacctaaacaattacataacaaagccctaagtaacctaattttatttttttaagagtggctctctcgtcactccctctctgtcacggcgtcagcgtcattcactcactcactctcgagctcgacgccgcgactcactcaggcacagcgccacaaagatccactctccgcctcgatcccgcaccccactcataaacacagctcgccgaccgcgacgccgtgccactgcatttccgcgaacccgcgccgccgcg

SEQ ID NO: 11811 - DNA, 400 bp, Glycine max
  Clone ID: LIB3039-005-Q1-E1-D8
ggagttacagccgcagcttgaaacagagcagagcgaccttgaagagctatggctgtcggaaagaataagaggatttccaagggaaagaagggtggcaagaagaaagccgctgatccctttgccaagaaagactggtacgatatcaaggccccttccctcttccaggtcaagaatattggcaaaaccctcgtctctcgtacccagggaaccaagattgcatccgaaggactcaaacatcgggtttttgaggtctcattggctgatctccaaggggatgaagaccactccttcaagaagattcgtttgagagctgaggacgttcaagggaagaatgttctgacaaacttctggggaatggatttcacaactgacaagttgaggtctttggtgcgaaaatggc

SEQ ID NO: 11812 - DNA, 376 bp, Glycine max
  unsure (1)..(376): unsure at all n locations
  Clone ID: LIB3039-005-Q1-E1-D9
ggctcagatcgaagaagcaaaacatagccaaaactacagttctctcaatgaagctcccagcacattgttttctggcttcaacttttaagtcacttgtccgtttgacagtactattactagttgtttccagcaacaaaacaaagggtgccgtgaaacttccaccaaatatctcagttccagcagtgttggtatttggagattcgatcatggacactggcaacaacaacaacaacttgataacatcagctcggagcaacttcccaccatatggccaagattttaagggagggatcnctactggtcgattttgcaatggaaaggttccttcagatattccagtttaagaattaggcattaaagagtttctacccgcata

SEQ ID NO: 11813 - DNA, 382 bp, Glycine max
  Clone ID: LIB3039-005-Q1-E1-E1
gggcgactgaaaatgcgaaggtgtgaccgaaagagaagagatagcaatgtcagggctgaaggaattgctgaagaaagggttaggtttaggcgacatggcgttcaacgccggcggcggagccatcacctggttccccggccacatggccgccgccacacgcgccatccgccaccgcctcaaactcgccgacctcgtcatcgaagtccgcgacgctcgcattcccttctcctccgccaacgccgatctccagccccacctctccgccaaacgacgcctcctcgcactcaataaaaaaacctcgccagccctaacatcatgcataaatggacgcattattttgagagttgtaatcagaattgcgttgcgataaacgcgcacagca

SEQ ID NO: 11814 - DNA, 366 bp, Glycine max
  Clone ID: LIB3039-005-Q1-E1-E10
ggcagttcaattccaatatattccattctctctgtgtatttccctacctctcccttcaagatgcagatcttcgtcaagaccctcaccgggaagacgatcacccttgaggtggaaagctctgacaccatcgacaacgtcaaggccaagatccaggacaaggaaggaatccccccggaccagcaacgtctcattttcgccggaaagcaacttgaggacggccgtacccttgctgactacaacattcagaaggagagtactcctcagctcgtcctccgtctccgtggtggcatgcagatcttcgttaagacactcaacggcaagaccataaacctagaggttgaaagctccgacaccatcgataacgtc

SEQ ID NO: 11815 - DNA, 379 bp, Glycine max
  Clone ID: LIB3039-005-Q1-E1-E11
gggacgagtcaaacggcagcccaaacgacacagaatggggtattcggcagccgcgagatcatcttcttacagccactcgaaaatgaccaagagaaccaagaatgccggtattgttggaaaatacggcacccgagatggtgctagtttaaggaaacaaatcaagaagatggaagttagtcagcacagtaaattcttctgcgagttctgtggaaagtatgctgttaagaggaaggctgtgggtatttggggctgcaaagattgtggaaaagtgaaggctggaggtgcttacacattgaacactgccagtgctgtcactgtccggagcaccattcggaggctgagaaaacatactgaaagttgaaagcaatttaaacttttc

SEQ ID NO: 11816 - DNA, 394 bp, Glycine max
  unsure (1)..(394): unsure at all n locations
  Clone ID: LIB3039-005-Q1-E1-E2
ggcacaaaacaaaaccaccacactcttattgttttcttcatatcttccttgtcactgcccgtgtgtcgccgccatggccaccgtcaccacccaagcctccgccgcaattttccggccatgtacctcgaaatcgaggtttttgaccggctcttccggtaaacttaaccgggaagtgactatgcggccaatggggtgccctccttctgcctctttcaaggttgaagccaagaagggagagtggttacctggcttggcctcnccaacttacctcaatggcactcttcctggtgacaatggatttgaccctctggggctagctgaggacccagagaacttgaggtggtacgttcaagccgagcttgtgaatggacgttgggccatgttgggtgttgca

SEQ ID NO: 11817 - DNA, 367 bp, Glycine max
  Clone ID: LIB3039-005-Q1-E1-E3
ggttctagtgtgtgattgtttgttgttgtaactcgttcttcttcttctgttgttctgtgtttgtgtttgttttttctctcacctgaaaatgtcttgctgcggtggtaactgtggttgcggaagctcctgcaagtgcggcaacggctgcggaggctgcaagatgtacccagacttgagctacactgagtcaaccaccaccgagaccttggtcatgggagtggcacctgttaaggctcaatttgagggtgctgaaatgggtgtgcccgctgagaacgatggctgcaaatgtggaccaaactgctcctgcaacccctgcacttgcaagtgaggtgttgggagaagcagcttcaagcagagatagccctta

SEQ ID NO: 11818 - DNA, 218 bp, Glycine max
  Clone ID: LIB3039-005-Q1-E1-E4
gatctggcagcagaagaacaagtagttgagaactaagaaggagaagcaaatggcttcctcaatgatctcttccccagctgttaccactgtcaaccgtgccggtgccggcatggttgctccattcactggcctcaagtccatggctggcttccccaccagaaagaccaacaatgacattacctccattgctagcaacggtggaagagtgcaatgcatgc

SEQ ID NO: 11819 - DNA, 403 bp, Glycine max
  Clone ID: LIB3039-005-Q1-E1-E5
gattgtaaagcattcttcgcctttctctctcttctttttactctctctctgtctctctctacgctttctcgttcgagatccctcaagggatccactaactgaaggagaaatggggttgacattcaccaagcttttcagccggcttttcgccaagaaggaaatgcgaattctgatggtgggtctcgatgcagctggtaagaccaccatcctgtacaagctcaaacttggagagatcgttaccacaattcccaccattgggttcaatgtggagactgtggaatacaagaacattagtttcactgtctgggatgttggtggccacgacaagattcgtcgcttgtggatgcactacttccagaacacacagggtctcatttttgtggttgacagcaacgacagggac

SEQ ID NO: 11820 - DNA, 393 bp, Glycine max
  Clone ID: LIB3039-005-Q1-E1-E7
gacacttcaaaatcctctagtaacccttcttttctctctctctctctcgtgttctgagctgctagaagcaatggagaggaaaagaagccatgcttctttcaccatgtttgcaatgcttgttggattgctctctcagagccttgtcattcctgtaatatccaccactgttgcagatcagaagaactactacaccccagatccacatgctggaagtccccccacaggctcacacaatagtagtcctccatctcatggccatgggagctctccaccctcacatcacaatagtccaagtactccatcaacaccctcaggtggaaactgtggatcatcacccccacaacatcatgatccaacacgctcaactccatcaacaccatcaaaccctccctc

SEQ ID NO: 11821 - DNA, 394 bp, Glycine max
  Clone ID: LIB3039-005-Q1-E1-E8
gacagctattcctcttaagcttgctactgagtttccacactgcataccttaggtcttccgaattcgaagttaatttgcaagatggctaaggaaaaggctcagatcaacattgtggtggttggtcatgtggaccctgaggaggcaaccaccattaacgagctgaagaagcctgttgtggagaaagaagctccagggcatgccatatgagggcatgcacgtacggcctcggaggggaaccagaaaattatgttaacaaaataatctggaaccctaatgtatcagtgtcatcatcagtgtgtagtttaagctagctttgctatggttacgttctttgagatgagagtcttgatgaacagtaccattctgatgtattgctttccttgaaagttaatgc

SEQ ID NO: 11822 - DNA, 256 bp, Glycine max
  Clone ID: LIB3039-005-Q1-E1-F1
ggcacaagtgagtttgttgatcgagataactagaaacagtgtgatgaaaatgaaggtccttgttttcttcgttgctacaattttggtagcatggcaatgccatgcgtacgatatgttccctctccgaatgaacactggctatggtgcccgtactccggaggtgaaatgcgcaagttggaggcttgctgtggaagcacacaacatctttggcttttagaccattcctgaagagtgcgttgaagcaacaaaggaatac

SEQ ID NO: 11823 - DNA, 157 bp, Glycine max
  Clone ID: LIB3039-005-Q1-E1-F11
acaattacatacacagatatatcaccataaactcacgcacttcatctcaaggtcacctcaataacttctggcctcacttacacaaaacacttcccttacgagcccgcgaaatcataatcacacatccactatacgattcacagtttattaacctcat

SEQ ID NO: 11824 - DNA, 380 bp, Glycine max
  Clone ID: LIB3039-005-Q1-E1-F12
ggcacaagtgagtttgttgatcgagataactagaaacagtgtgtagcatgtgacagcccatgtggtcctcgtcgccacaatttcggtagcatggtaatgccatgcgtacgatatgttccctctccgaatgaacactggctatggtgcccgtactccggaggtgaaatgcgcaagttggaggcttgctgtggaagcacacaacatctttggctttgagaccattcctgaagagtgcgttgaagcaacaaaggaatacatccatggcgaacaatatagatcagactccaaaacagttaaccaacaagcttacttttatgccagagacctcgaagtccatcccatagacacatttgtgttcagtatagatggaaccgtactct

SEQ ID NO: 11825 - DNA, 361 bp, Glycine max
  unsure (1)..(361): unsure at all n locations
  Clone ID: LIB3039-005-Q1-E1-F2
gatcgaagcaaaaaatgaaaacccaaagtgcttctctcctctgtctttttctctctcttgctatccttttggctagtggcactgctgcaagtgcaactccaagaagcgcagtgccaagccaccatgtttcaacattcaacagaagcctttttccttccacttttctctttggaattggttcttctgcttaccaggcagaaggagcagcaagtgtagatgggagaggaccaagcatatgggacacctacactagacagcatactgaaaagatttgggatcatagcaccggtgacatgggagctgatttttatcatcgatacaagggtgacatanaaatagcgaaagaaattgggctggactc

SEQ ID NO: 11826 - DNA, 409 bp, Glycine max
  Clone ID: LIB3039-005-Q1-E1-F3
gaatgtgcaagagtttgttgtgagctataagctagtttatcgtgaggagaatatgaagttgtttgttttctttgttgctgcagtagttttggtagcatggccatgccatggcgcaggctaccaaaggttccctctccgaatgaaaactggctatggtgagcgttcttcggaggtaaaatgcgcaagttttaggcttgctgtggaagcacacaacatccgagcctttaaaaccattcctgaagagtgcgttgaaccaacaaaggactacattaatggcgaacaatttagatcagactctaaaacagttaaccaacaagctttcttttatgctagtgaacgcgaagtccatcacaacgacatatttatattcggcatagataacaccgtactctctaatatcgcatactag

SEQ ID NO: 11827 - DNA, 408 bp, Glycine max
  Clone ID: LIB3039-005-Q1-E1-F4
ggcacaagtgagtttgttgatcgagataactagaaacagtgtgatgaaaatgaaggtccttgttttcttcgttgctacaattttggtagcatggcaatgccatgcgtacgatatgttccctctccgaatgaacactggctatggtgcccgtactccggaggtgaaatgcgcaagttggaggcttgctgtggaagcacacaacatctttggctttgagaccattcctgaagagtgcgttgaagcaacaaaggaatacatccatggcgaacaatatagatcagactccaaaacagttaaccaacaagcttacttttatgccagagacctcgaagtccatcccaaggacacatttgtgttcagtatagatggcaccgtactctctaatatttcatactacaaagaacatgg

SEQ ID NO: 11828 - DNA, 397 bp, Glycine max; identical to SEQ ID NO: 7408
  Clone ID: LIB3039-005-Q1-E1-F5

SEQ ID NO: 11829 - DNA, 134 bp, Glycine max
  Clone ID: LIB3039-005-Q1-E1-F6
tcaaaccgctgcgagacaacgacagatcggggcacaactgagtttgtcgatctacatcactagacagactgtgactcacacgaacgtccctgttttcttcgttgcaaggggtctggtagagggccaatgcgagg

SEQ ID NO: 11830 - DNA, 211 bp, Glycine max
  Clone ID: LIB3039-003-Q1-E1-G7
gaagatttttcttgttcctttgttggtgggtttcctttccgcttcaggttcagcttcaacttcaaattctcagtgaaaccaattcagctgagtccaaatcccaaatccgaatcaaaatccgaagtgagatttgcgatggagaggcttcagcgaatgtttgcacgtgcatgtggagcgctagggcaccctcccccagattccccaactctcg

SEQ ID NO: 11831 - DNA, 215 bp, Glycine max
  Clone ID: LIB3039-001-Q1-E1-H8
cacgcatccgtaaagttccaagacgacagaaggggaaggtgcaatagtttggtgtgagctataagctagtttaacgttaggagaatatgaagtcgttggtttcctcggttgctgcagttagttaggaagcaattgcatgccatggcacatgttaccacacgttccctctccgaatgataactcgcgttggcgagcgttcttctgaggtaaaatgc

SEQ ID NO: 11832 - DNA, 387 bp, Glycine max
  unsure (1)..(387): unsure at all n locations
  Clone ID: LIB3039-001-Q1-E1-H9
gatgcacaagtttgttgagatagctagaagcaataagatgaaaatgaaagtgcttgttttgtttgttgctacagttttggtagcatatgaatgccatggcccagactaccagaagttccctctccaaatgaaaactgggtttggtgggcaatacagcaatgaggtggcatgtgccagttggaggcttggcgtggaagcaaacaacgtagtcaagtggcaaactgttcctgcagcttgcggagagtacatagctgactacgttctangagaccaatatagatcagattccaaaacagttaaccaacaagcttatttctatgctaaatccctcatactcaccaacagagatgtccttgtcctggacgttgacgacactactctctctaa

SEQ ID NO: 11833 - DNA, 262 bp, Glycine max
  Clone ID: LIB3039-002-Q1-E1-A1
ggcacaagtttgttgagatagctagaagcaataagatgaaaatgaaagtgcttgttttgtttgttgctacagttttggtagcatatgaatgccatggctcagactaccagaagttccctctccaaatgaaaactgggtttggtgggcaatacagcaatgaggtggcatgtgccaattggaggcttggcgtggaagcaaacaacatagtcaagtggcaaactgttcctgcagcttgcggagagtacatagctgactacgttct

SEQ ID NO: 11834 - DNA, 384 bp, Glycine max
  unsure (1)..(384): unsure at all n locations
  Clone ID: LIB3039-002-Q1-E1-A10
ggcacaagtttgttgagatagctagaagcaataagatgaaaatgaaagtgcttgttttgtttgttgctacagttttggtagcatatgaatgccatggctcagactaccagaagttccctctccaaatgaaaactgggtttggtgggcaatacagcaatgaggtggcatgtgccagttggaggcttggcgtggaagcaaacaacgtagtcaagtggcaaactgttcctgcagcttgcggagagtacatagctgactacgttctaggagaacaatatagatcagatttcaaaacagttaaacaacangcttaattctatgctanatccctcagactcaacaacaaagatgtccttgtcttggacgttgaccacactactctctcca

SEQ ID NO: 11835 - DNA, 351 bp, Glycine max
  Clone ID: LIB3039-002-Q1-E1-A11
ggcacaagtgaatttgttggtcgaaatatgtagaatcagtgtgagtgcttatgaacgtccttgttttctgcgttgctacaattttgggagcatgacactaccatgcttacgatatgtaccatctccgattctccactgcccatggtgaacgtactccggaggtgaattgctcaagttggaggcttgctgtggaagcacacatgatctttggctttgacaccattcctgaagagtgcgttcaatcaacaaaggtatacagccatcagcagcattatagatcagcatcctgaacagttaaatccaaggcttatttctatgccatagatctcgaagtccatcccaaggacacat

SEQ ID NO: 11836 - DNA, 405 bp, Glycine max
  unsure (1)..(405): unsure at all n locations
  Clone ID: LIB3039-002-Q1-E1-A12
ggcacaagtgagtttgttgatcgagataactagaaacagtgtgatgaaaatgaacgtccttgttttcttcgttgctacaattttggtagcatggcaatgccatgcgtacgatatgttccctctccgaatgaacactggctatggtgcccgtactccggaggtgaaatgcgcaagttggaggcttgctgtggaagcacacaacatctttggctttgagaccattcctgaagagtgcgttgaagcaacanaggaatacatccatggcgaacaatatagatcagactccanaacagttaaccaacaagcttacttttatgccagagacctcgaagtccatcccaaagacacatttgtgttcagtatagatggcaccgtactctctaatattccatactacaaaaaaca

SEQ ID NO: 11837 - DNA, 359 bp, Glycine max
  Clone ID: LIB3039-002-Q1-E1-A2
gacaggaaggatatttgataggcggaagcggagaaagggatggtgcagaagcagaaaacgacatatatgcagcgtcggtgtttttgtttcatgttttgactagcttgaaggctgactttcccaaggcgaagaagaagtaaggagagaaagagatggcagacgatctgtttgaaggattgccccctccttcctcaaacactcttcttcctcatcaacaacaacaactccaaccacaaccaattgttgttgctaccaacatcaacgacactgaatcctctgcagttccggctccaaagccaatcctcaaaagtgccctcaagcgcccaaccctactcaacctgacgaccaagctgcagcac

SEQ ID NO: 11838 - DNA, 241 bp, Glycine max
  Clone ID: LIB3039-002-Q1-E1-A3
gacacacagtctcttcttcttgcaattccttcctcgttatggagtcgcgagtgctgtcacgcgccggaaccttgtcctccctccctcacctccgcaagccgccgcgggaggccgtctccagcgcctccctcgtcgccgtgaaggccgtgggctccgtcgcggacggcggggacctgatttgggggaggcagctgcgcccggagctctgctcgccggtgctgaagaaagaggctgtcctcct

SEQ ID NO: 11839 - DNA, 355 bp, Glycine max
  Clone ID: LIB3039-002-Q1-E1-A4
gacttgcggctgcagtagagaagcactcttcgttcttcgactgtctacgatctgcgttctccgaattgtgaaaatgtcgctcggagaaactgcctgttcatacgcagctctcatccttcaatgaagatggaattagtgtaactgctgacaagatcagcaccttgttgaaaactgcaaaggttccagtagactcttagtggccaaccttgtttggcaaacttgctgagaagaaaaatcttggcgatttgatagcagatgcggcaggcggtggtgcaccagttgctgttgcagctgccccagttgctgctgctgctggtggtgctgctgccgcagctcagctgctgaagagaaaaag

SEQ ID NO: 11840 - DNA, 341 bp, Glycine max
  Clone ID: LIB3039-002-Q1-E1-A5
gaccacattccaaaacacaaacacatacattgtagtatcacttttgtctcggaatttgttcttttgagttatggcaagcttaaaggttgcatgtgtggttttgatgtgcatggctgtgatgagtgcaccaatgatggtgcaagccgtgtcatgcaatgatgtttctgtgaacctagcaccgtgcctatcttacctgatgcagggtggagatgttccagaatcgtgctgtagcggagtgaggaacattctgggttctgccagcaccacctttgacaaacaaaccgtgtgcaaatgtcttcagcaagctgctaaataactatggcatcaacgacgaatacgct

SEQ ID NO: 11841 - DNA, 395 bp, Glycine max
  Clone ID: LIB3039-002-Q1-E1-A6
ggaacctttgcattctattcattcaagattcagcaagtgcgttttggaagcagagaccgaaatacttcgagatggcccgtacaaagcaaactgctcgtaagtcaactggaggaaaagctcccaggaagcagcttgcaaccaaggctgcacgtaagtctgcaccaacaactggtggtgtgaagaagcctcatcgttatcgccctggaactgttgctcttcgtgagattaggaaataccagaagagcactgagctcctaatcaggaagcttcctttccagaggttggttcgtgaaattgcccaggatttcaagactgatctgcgtttccagagccatgctgtgcttgcattgcaagaggctgctgaggcataccttgttgggctctttgaggacact

SEQ ID NO: 11842 - DNA, 349 bp, Glycine max
  Clone ID: LIB3039-002-Q1-E1-A7
ggcacaagtgagtttgttgatcgagataactagaaacagtgtgatgaaaatgaaggtccttgttttcttcgttgctacaattttggtagcatggcaatgccatgcgtacgatatgttccctctccgaatgaacactggctatggtgcccgtactccggaggtgaaatgcgcaagttggaggcttgctgtggaagcacacaacatctttggctttgagaccattcctgaagagtgcgttgaagcaacaaaggaatacatccatggcgaagaatatagattagactccagaacagttaaccaacaagcttacttttatgccagagacctcgaagtccatcccaaggacaca

SEQ ID NO: 11843 - DNA, 437 bp, Glycine max
  Clone ID: LIB3039-002-Q1-E1-A8
ggctttttgcagtccctcctcgaatagcccagggcattattccaggggttacggctgaatcttatcaagaggacaacaaattatggaaaaagcatgttaacgcttacaaaagaatgaataaattgattggcactaccagatatcggaatgtgatggacatgaatgcaggccttggaggatttgcagctgtgcttgaatcacagaagtcttgggtgatgaatgttgtgcctacaattgctgagaacactttgggtgttgtctatgagagaggtctgatcggcatttatcatgactggtgcgaaggcttttcaacatatccaaggacatatgatcttattcatgctaatggtttattcagcttgtagcaggacaagtgcaacctagaagacatccttctagagatggatcgcatcctaaggcctgaaggaacaatcatc

SEQ ID NO: 11844 - DNA, 279 bp, Glycine max
  Clone ID: LIB3039-002-Q1-E1-A9
cgtccgtaaagctgcaaaaagaggggagcagggggcacatgtgaatttgtcgatcgcaataactagaatcagtgctgtcgcttatcagcgtccctgatttcttcgttgctagacttttggtagcatggcattgccatgcatacgatatgttccctctccgaatgaacactggctatggtgcccgtactccggaggtgaaatgcgcaagttggttgcatgctgtggaggcacacaacatctttggctttgacaccattcctgaagagtgccttgaatcaa

SEQ ID NO: 11845 - DNA, 238 bp, Glycine max
  Clone ID: LIB3039-002-Q1-E1-B1
gactctcctctgatatttctatattttggtgctctgtgtctctacgatcgggatccaaccgtccaaaatgttcggggcttgtgctgcttgttttcccaggttttagagctccaaaccttcagatccacctcattcgtctccagatcttccttccttgataacgttttcgggttcgagaacgcacttgtttggttgtcgtacgatagggagactacaccgagttcggtgatggttacgc

SEQ ID NO: 11846 - DNA, 322 bp, Glycine max
  Clone ID: LIB3039-002-Q1-E1-B10
gacacttcaaaatcctctggtaacccttattttatctattctctctctttcttttgtgttctaagcagctagaagcaatggagaggaaaagaagccatgcctctttcaccatgtttgcaatgcttgttggagtgatctctcagagccttgtcattcctgtagtatccaccactgttgaagatcagaagaactactacaccccagatccacatgctggaagtcccccctcaggctcacacagtagtactcctccatctcatgggcatggaagctctccaacctcacatcatcacagtagtccaagtactccatcaacaccctc

SEQ ID NO: 11847 - DNA, 159 bp, Glycine max
  Clone ID: LIB3039-002-Q1-E1-B11
acgggtccgtaaagatgacagaaagggaaagtggggaaatttgttgtgatctcaaagctagtttatcctgaggagaacatcaaagttgcttgtattccctgtagctacactaattatggtaacatggacatgcgaattggcatgctatcaatggctcac

SEQ ID NO: 11848 - DNA, 327 bp, Glycine max
  Clone ID: LIB3039-002-Q1-E1-B2
gatgccacaatggttgtccctcttaggcactttcttgttttctctctcaccctcatatccatcatcttccacacccatggagcgttctctgagcaatcaataatcaagttacccacagaccaaccaagggtagagaaactgacccacttgcattttttctaccacgacatcttagagggcaagaacatcacggtggtgaaaatcatcgagccatcagcgagcgaggttcgtgaagcaactgggtttggaaccactttcatgatggacaatgttttgaccgagggtcgagagctgagctcgaagcacgttggaagggctcaggggctg

SEQ ID NO: 11849 - DNA, 238 bp, Glycine max
  Clone ID: LIB3039-002-Q1-E1-B3
gagacacagctattcctcttaagcttgctactgagtttcgacactgcataccttacgtcttccgaattcgaagctaatttgcaagatggctaaggaaaaggctcagatcaacattgtggtggttggtcatgtggatcctgaggaggcaaccaccattaacgagctgaagaagcctgttgtggaggaagaagctcgagcgcatgccatatgagggcatgcacgtacggcctcggagggg

SEQ ID NO: 11850 - DNA, 274 bp, Glycine max
  Clone ID: LIB3039-002-Q1-E1-B4
gacacacactctgtcacgcacccaccattctactacactcctctctctcactctcactctctgctccgtgatagctgtaccacgtttttctctccatctcgaaacagcatctctgcctcagtcccaagccatcaccattctcatggctgctctagctctagcacttcttcttctggctttcaccggcacttcaagtggtacatggtgcgtttgcaaagatcgaagcgacgcgatcctgcagaagacgttagactatgcttgtggagctggtgct

SEQ ID NO: 11851 - DNA, 294 bp, Glycine max
  Clone ID: LIB3039-002-Q1-E1-B5
gacctccaaagttaagttagggtttttgggggtgaagttgcgcttccggcacttccacttccacttcttcatcaccatgagcaggtcaggccaaccaccggatttgaagaagtacatggacaagaagcttcagattaaactgaatggaaatcgcatgattgttggcactctccgtggctttgaccagtttatgaatttagttgttgacaacactgtggaagtgaatggcaatgagaagaatgacatacggatggtggtaatcagaggagatagtgtggtcactgttgaggcgct

SEQ ID NO: 11852 - DNA, 415 bp, Glycine max
  Clone ID: LIB3039-002-Q1-E1-B6
ggtgcacaagtgagtttgttgatcgagataactagaaacagtgtgatgaaaatgaaggtccttgttttcttcgttgctacaattttggtagcatggcaatgccatgcgtacgatatgttccctctccgaatgaacactggctatggtgcccgtactccggaggtgaaatgcgcaagttggaggcttgccgtggaagcacacaacatctttggctttgagaccattcctgaagagtgcgttgaagcaacagaggaatacatccatggcgaacaatatagattagactccagaacagttaaccaacaagcttacttttatgccagagacctcgaagtccatcccaaggacacatttgtgttcagtagagatggcaccgtactctctaatattccatactacaaaaaacatggatatg

SEQ ID NO: 11853 - DNA, 416 bp, Glycine max
  Clone ID: LIB3039-002-Q1-E1-B7
gagagtggtggagtgtgcagaagagcgtcgcagtcgcaaccctaatcagaagaagcgcagcttcaagcgagtgacagccaccagccatgggtcgtatgcacagccgcggtaagggtatatcctcgtctgctttgccctacaaaaggacacctcctagctggctcaagatctcttcgcaagatgtcgaagaagatatctgcaagtttgcgaagaaaggtttgaccccgtctcagattggtgtcattctcagagattctcacggtattgcgcaggtcaatagcgtcactggcagcaaaatccttcgcatcctcaaagctcacggacttgcgcctgaaattccagaggacctggtacagttgattgagaaggaagtttcatttaggaagcatcttgagaggaacaggaaggacaaggac

SEQ ID NO: 11854 - DNA, 408 bp, Glycine max
  unsure (1)..(408): unsure at all n locations
  Clone ID: LIB3039-002-Q1-E1-B8
atacaggtcccttgtagccacttgttctgtcttgaaaatccattttgcttcatttcattcctcacatttatttttcttccatggagaacttgttgggtctgctgagaattcatgttgaaaaaggtgtcaatcttgccatcagggatgtggtgagcagtgacccttatgttgtcatcaaaatgggcaagcagaagctgaagactcgggtagtcaataagaatctaaatcctgaatggaatgatgacttgaccttgtctatctctgagcctcatgctccaattcatctacatgtgtatgacaaggacacatttagcatggatgacaaaatgggggatgcagagtttttcatangtccatttattgaagcagtgaagatgcgcttatcaagtctccccaacaatactatag

SEQ ID NO: 11855 - DNA, 354 bp, Glycine max
  Clone ID: LIB3039-002-Q1-E1-B9
tgctgctacaagacgacaacagggggggaacgtgtaagagtttgttgtgagcgaataacgagtataacttgaggagaatacgaagttgttagcattctatggtgctgtggtagatttggggacattgccaattccactgagcatgctatctactgttacttccccgactgaacgcttgctatcgagaatcttcgcctatcgcatggctactatgttctaagcatgctgtgggaccataccatatacgagccttgtactacatcactgactaatttgttaagcccctcgtacgattacattaatgcagaatcactcatctcatgcaccgaaacattttacggacagtctttcttt

SEQ ID NO: 11856 - DNA, 384 bp, Glycine max
  unsure (1)..(384): unsure at all n locations
  Clone ID: LIB3039-002-Q1-E1-C10
ggatgcacaagtttgttgagatagctagaagcaataagatgaaaatgaaagtgcttgttttgtttgttgctacagttttggtagcatatgaatgccatggctcagactaccagaagttccctctccaaatgaaaactgggtttggtgggcaatacagcaatgaggtggcatgtgccagttggaggcttggcgtggaagcaaacaacgtagtcaagtggcaaactgttcctgcagcttgcggagagtacatagctgactacgttctangagaacaatatagatcagattccanaacagttaaccaacaagcttatttctatgctaaatccctcaaactcancaacaaagatgtctttgtcttggacgttgacgacactactctct

SEQ ID NO: 11857 - DNA, 94 bp, Glycine max
  Clone ID: LIB3039-002-Q1-E1-C11
aaaaggggcaattcaggggcacaaatgattctgttcgtcgaaataactcgttgtaatgtaatgaggataaaggacattgtgattcgtcgtctac

SEQ ID NO: 11858 - DNA, 337 bp, Glycine max
  unsure (1)..(337): unsure at all n locations
  Clone ID: LIB3039-002-Q1-E1-C12
gacttgtaataattcttataacacaacacaacccatggccaccacctccgcattcctcctccttcncctcctcctgctgctccacctcgccatcgccgctcacggcatcggcatcaactacggcacgctcggcgacaaccttccaccgcccgcggcggtggcgaacttcctgaagacgaagacgaccatcgaccgcgtgaagatctacgacgtgaacccggacatcctgcgggccttcgccggcagcggcatctccgtgacggtgaccgcccccaacggcgacatcgccgccttaaccaaaatcgactcggcgaggcattgggtggcgacgcacatc

SEQ ID NO: 11859 - DNA, 317 bp, Glycine max
  unsure (1)..(317): unsure at all n locations
  Clone ID: LIB3039-002-Q1-E1-C2
gacagcacagcactctttgcaacacaacaaaaaaagacaacacagagagaagcgtcgtaataaacgctcttctctgaaaaacctgatttcttctcttcttctcttctcgttcgtttcgatcttcgatctctgaaaatgagagagtgcatttcaatccacatcggtcaggccggtattcaggtcngaaacgcctgctgggagctctactgcctcgaacacggcattcagcctgatgggcagatgccaagtggtaagactgttggtggaggtgatgaggcgttcaggaccttcgtcagtgaagctggngctggaaagca

SEQ ID NO: 11860 - DNA, 283 bp, Glycine max
  Clone ID: LIB3039-002-Q1-E1-C3
ggagcaaaaccctaatccctatttttcttcctcagtagtgtcatttacgcttctcttctctgcagcaactatgcctaaccctaaggtcttcttcgacatgaccatcggcggtcaatctgctggccgcatcgtgatggagctctacgccgacgtcactccccgcaccgccgagaacttccgcgcgctttgcaccggcgagaaaggcctagggcggagcggcaagcccctccactacaagggctcgtccttccaccgcgtgatcccgagtttcatgtgtgagggt

SEQ ID NO: 11861 - DNA, 354 bp, Glycine max
  unsure (1)..(354): unsure at all n locations
  Clone ID: LIB3039-002-Q1-E1-C4
gaactaaaggagagtgcaattacgtagtgtgtgggagacaaagagagatggctaagtggtgtatgttggtgttggttcttgctcgagctctggctgtggccacaagtgccagagatgcacccgaagatgttggtctcaaggaccagaagaacttcatcagctatgctggagttggtggctattcaggaattggaagcaatggactaccttttggaggtgccggaatacgtggtggcaccaccgggatacgtggattgggaggattcngaagtcccattggcggtgggtactggtggcagtgttggangtggcgttggcggtggtaacatacctcatcccaccccttgagtgaat

SEQ ID NO: 11862 - DNA, 415 bp, Glycine max
  unsure (1)..(415): unsure at all n locations
  Clone ID: LIB3039-002-Q1-E1-C5
ggcacaagtgagtttgttgatcgagataactagaaacagtgtgatgaaaatgaaggtccttgttttcttcgttgctacaattttggtagcatggcaatgccatgcgtacgatatgttccctctccgaatgaacactggctatggtgcccgtactccggaggtgaaatgcgcaagttggaggcttgctgtggaagcacacaacatctttggctttgagaccattcctgaagagtgcgttgaagcaacanaggaatacatccatggcgagcagtatagatcagactccaaaacagttaaccaacaagcttacttttatgccagagacctcgaagtccatcccaaggacacatttgtgttcagtatagatggcaccgtactctctaatattccatactacaaaaaacatggatatggg

SEQ ID NO: 11863 - DNA, 425 bp, Glycine max
  Clone ID: LIB3039-002-Q1-E1-C6
ggctcaccacttcaaaacactcataacacaaagcacaaagcaaagctcatccttgagttaaaaaatggcagcagcttcttccatggctctctcatccccatccttggctggcaaggccgtgaagctgggcccatcagccccagaagtgggaagggtgagcatgaggaagaccgtcaccaagcaggtctcctcaggaagcccatggtacggcccagaccgagtcaagtacttgggcccattctctggcgagcccccgtcctacctaaccggtgagttcccaggcgactacggctgggacactgctgggctttccgcagacccagaaaccttcgccaagaaccgtgaactcgaagtgatccacgtcaggtgggccatgctcggagccttgggctgcgtcctcgcggagttgctgtcccgcaacgggg

SEQ ID NO: 11864 - DNA, 318 bp, Glycine max
  Clone ID: LIB3039-002-Q1-E1-C7
ggcacagcaaaacaattttcaaactcaattaccattccataacctaaatctcctctttgtttccgagtcagagagcaatggcacgtaccaagcaaaccgctcgcaagtccaccggcggaaaggcgccgaggaagcaattggcgactaaagccgctcgcaagtcagctccgggcaccggcggagtgaagaaggcccaacgcttcaggcccggaacggtggctctgagggagatcagaaagtaccagaagagcactgaacttctgatgcgaaaactcgcattccagaggcgcgtcagagaaatcgctcacgatttcaaaa

SEQ ID NO: 11865 - DNA, 349 bp, Glycine max
  Clone ID: LIB3039-002-Q1-E1-C8
ggggagaagaattaagcactcggttgcagaacagaacaaacttctttcactctttcgcttctgaatcttcaacaatggtgctcgaggcgacgatgatctgtatcgacaattctgaatggatgcgtaacggagattactctccttctcgatttcaagctcaagcagacgctgtcaatctcatatgcggtgctaaaacgcagtctaatccggaaaatacagtgggagttctcacaatggctgggaaaggcgttcgtgttttggttacgcctagcagtgatctgggcaagatcttaggctgcatgcatggactagatataaggtgtgagatgaacctagctgctggcattca

SEQ ID NO: 11866 - DNA, 220 bp, Glycine max
  Clone ID: LIB3039-002-Q1-E1-C9
aggggcacaagtgagtttgttgatcgacatatctagagacagtgtgatgaaaatgaaggtccttgttttcttcgttgctacaattttggtagcatggcaatgccatgcgtacgatatgttccctctcacgaatgaacactggctacagtgcccgtactccggaggtgaaatgcgcaagttggaggcttgctgtggaagcacacaacatctttggctttga

SEQ ID NO: 11867 - DNA, 101 bp, Glycine max
  Clone ID: LIB3039-002-Q1-E1-D1
tactgctgcgacgtcgacacacagcgggattcattccagacaccacccctcttctcatagcctgctcagttggcagcaggtactctcattcctctagcgga

SEQ ID NO: 11868 - DNA, 349 bp, Glycine max
  unsure (1)..(349): unsure at all n locations
  Clone ID: LIB3039-002-Q1-E1-D10
ggagctgaaatcgagaagaagaagaagaagaagatggagaagtatcagatctggagcaggagaatagcgttggcagcgtttgcgtttgctctgctgttccaatcggcctcagcagacgacgtcgttgtgctctctgaagataacttcgagaaggaagttggtcaggacagaggagctctcgttgagttctatgctccttggtgtggacactgcaaaaagcttgctccagaatatgaaaagcttggtagcagcttcaagaaagccaaatctgttttaattggcaaggttgactgtgatgagcataagagtttgtgcagcangtatggagtctcctgggtaccaacaattc

SEQ ID NO: 11869 - DNA, 380 bp, Glycine max
  Clone ID: LIB3039-002-Q1-E1-D11
cacgcgtccgaaaggagcaagaaaagggatcaatggggcaaatttttggtgatataactatacgcatgacgatgagaatgggagtgcttgtcatgattcagtgtgctacattttgggaataattggaatcccatttgctcacacgactaaaaattgcccctccatttaagggatttgtttggagggcaatacatcaataatgtggcatatgccatttgtacgtctcgcgtggaagcaaacaacgtactcaagtggaaaactgttcctgcatcttgcggagagtacatagttgactatgttctacgagaccaatatagatcagattccaaaacaattaaacagtaagcttagtttcatgccaaaacccttatgctcaccaa

SEQ ID NO: 11870 - DNA, 125 bp, Glycine max
  Clone ID: LIB3039-002-Q1-E1-D12
gacagcatatatatcaataatctattttatactatacctacattttgataactttccttgtagttgatagccatggctacccgtggaaagcttgaggttgacactgatgtcaagtccaatccaga

SEQ ID NO: 11871 - DNA, 268 bp, Glycine max
  Clone ID: LIB3039-002-Q1-E1-D2
ggtgttgtgaagttctaatgtcctaaaaaaactcttagctatgcctatgtcgctgtctctgtcaaccgtgcctgcgttcaattctctcacaatggctgaatcctgcgtcctatctctcccttccctcttcgacgccaaaaacaaaaccctttctctctcaattcccactaatcctctcaacctgcaattcccatgctgagactcttcgcgttttcccctcaccagcaagactacgcgccactcttctctcctcagattcatggctcag

SEQ ID NO: 11872 - DNA, 266 bp, Glycine max
  Clone ID: LIB3039-002-Q1-E1-D3
ggtgagttgagaggatcgtgagaggggcagtagccgagattccgtgagttgcagaaatgaagacgattctttccagcgagaccatgaacatcccggacggcgtgagcatcaaagttcatgccaaggtcagcgaagttgagggcccccgcggaaaattggtgcgagacttcaagcatttgaatctcgattttcagctgagtactgacgaaaacggtaaaagaaagctgaaaatcgacgcgtggtttggttctcgcaaaacatccgcc

SEQ ID NO: 11873 - DNA, 323 bp, Glycine max
  Clone ID: LIB3039-002-Q1-E1-D4
gaaaattacaaacaacaacgcagtcctctctctctctctccctctgctaatttaaactccgttttccatttccttttataggaaggaggaaggaacgaagctgaatctgaatctgaatcggaatcgctttgtctttgaaattcgcactctctctctctctctctctctctctctctctcgtgtctctatattgagccacttcgaatccgtcgcctcagctgcagatcacatcgagtttcacccgaatgctctttctggactcgatttagatcgaggtcgtcagagcctgatagtgtgggaggatatacatgaagaacgggata

SEQ ID NO: 11874 - DNA, 327 bp, Glycine max
  unsure (1)..(327): unsure at all n locations
  Clone ID: LIB3039-002-Q1-E1-D5
gagggtaagggatgtcgtcgattgtgaagaacagatactgggttctgaggcatggcaagagcattcccaacgagcgaggcatcatcgtttcctccatggagaacgggactcgccccgaattccaattggcctccgacggtgttcatcaagcacaactcgctgcacaatcattccaaaaggaactacaggctaataatatcccgcttgctaatgtacgcatttgctactcccccttttcaagaacaacccataccgctaacgttgtttcaactctcttgaatctcgcttttgatggacnccactgtaaggtcatccaagatcttcgag

SEQ ID NO: 11875 - DNA, 433 bp, Glycine max
  Clone ID: LIB3039-002-Q1-E1-D6
gagtgcacaagtgagtttgttgatcgagataactagaaacagtgtgatgaaaatgaaggtccttgttttcttcgttgctacaattttggtagcatggcaatgccatgcgtacgatatgttccctctccgaatgaacactggctatggtgcccgtactccggaggtgaaatgcgcaagttggaggcttgctgtggaagcacacaacatctttggctttgagaccattcctgaagagtgcgttgaagcaacacaggaatacatccatggcgagcagtatagatcagactccaaaacagttaaccaacaagcttacttttatgccagagacctcgaagtccatcccaaggacacatttgtgttcagtatacatggcaccgtactcgcgaatattccatacgacgtaaaacatggatatggggtggaaaaatttaac

SEQ ID NO: 11876 - DNA, 432 bp, Glycine max
  Clone ID: LIB3039-002-Q1-E1-D8
ggcacacaaaaggagcatcgagtaggtttcctactcccttctcatcgttggcaagatgagtgccatgaaattttgccgtgaatgcaataacattctgtaccctaaggaagacagagaccagaaagttcttctcttcgcttgccgcaactgcgaccatcaggaggttgctgataacttctgtgtgtataggaatgagatacatcactctgttggagagcgcactcaggtgttgcaggatgtcgctgcagatccaacgcttcctcgaagcaagtctgttcgctgcagtcaatgcaatcatggtgaagctgtctttttccaggcaactgccagaggggaagaaggaatgacactttttttcgtgtgctgcaacccaaactgtggacacagatggagagactgaaatttgtgcttcctcagattaaaggttcaata

SEQ ID NO: 11877 - DNA, 278 bp, Glycine max
  Clone ID: LIB3039-002-Q1-E1-D9
cgtacgcataagaagacagacggggaggggttcgcaggtggtaaatcacagaatccctgttagcactctcgtcgcgacgattccctgtgatctctcagtctgctcttgcagtggatcagacttcacatcacgattcaaaagccttggtcaatactcactcatgtctgttcctaatgatgataacttgtcatattcccagctttcatatgctatcttggatctccttgattccatcatagtctacgtggcatcagaatgtcacatactaccaacgctga

SEQ ID NO: 11878 - DNA, 261 bp, Glycine max
  Clone ID: LIB3039-002-Q1-E1-E1
gataataacacgcaattttcatttttctctctcccttagtcaaagggattcatcgttcttcttcccaggttatttagaaaagcaaaatggtgaagatttgctgcattggtgctggatatgtggggggtcctactatggcagtcattgcacttaagtgcccatccattgaagtcgctgttgttgatatctctaaatcccgcattgcagcctggaacagcgaacagcttcctatctatgaacctggccttgatggtgttgtga

SEQ ID NO: 11879 - DNA, 280 bp, Glycine max
  Clone ID: LIB3039-002-Q1-E1-E10
ggcattatatttgagttcaaacaaatcaaagccatggccacctccaacttctctattgttctctccgtctcactagccttctttttggtgctacttaccaaggcacactcgaccgataccgtttctttcaccttcaacaagttcaacccagtccaaccaaacattatgctccaaaaggatgctagtatttcatcccctggggtgttgcaactcaccaaatttggcaccaacggcttgccaacctcgggatctctcggtcgtgcccttaacgctgccccaa

SEQ ID NO: 11880 - DNA, 430 bp, Glycine max
  Clone ID: LIB3039-002-Q1-E1-E11
ccgaaagctgcaaaaaaagggccgaaggggataattgacttcaaacatatcacagccatggccacctccttcttctctactgatctcgctgtctctctacccttctttttggtgctacataacggggcacactccatagaaagtgtttctttcacgttcaacaacttcacaccgctcccctaatccataggttcataccaatttagaatttcaccgtcggaggagttacatctcatgacttttggaacaatcatgatgcctacctcgggatctctcggtcgtgccctttacgctgccccaatccatatttgggacagcgataccggcaaggtagccagctgggctacatcctttagattcaacattttcgcacgcatcagatctaactcagctgacgggcttgccttcctcctgggcaccgttcggtctc

SEQ ID NO: 11881 - DNA, 314 bp, Glycine max
  Clone ID: LIB3039-002-Q1-E1-E12
ggttttgattagggtttgtcattagcacttcttcttttcacactgccgctgcaacaatggcttcagagaagaaactttcgaacccaatgagggagataaaagtgcagaagctcgttctcaatatctctgttggcgagagtggagatcgtctcaccagagccgccaaggtgttggaacaacttagtggccaaaccccagtgttttccaaagcaaggtacactgttcgttcctttgggattagaagaaatgagaagattgcatgctatgtcactgtcagaggtgacaaggcaatgcaacttttggagagtggtttg

SEQ ID NO: 11882 - DNA, 270 bp, Glycine max
  Clone ID: LIB3039-002-Q1-E1-E2
gattacacacacacaaattacatatccccagtactctgagacagaagcattcaccctgactgtttccattgccaagttccactcccttcccctaagtattttccttctcttggccttcaacataaaacccctcctaacagcagtcacagaaccagtggttgaaacccatgggaaccctttggatccaatagtaaggtaccacatgtggccactttggactgatcaacgacgcctcacactacgccaacctaggaacattacatgccctct

SEQ ID NO: 11883 - DNA, 266 bp, Glycine max
  Clone ID: LIB3039-002-Q1-E1-E3
gaaggtgcaagagtttgttgtgagctataagctagtttatcgtgaggagaatatgaagttgtttgttttctttgttgctgcagtagttttggtagcatggccatgccatggcgcaggctaccaaaggttccctctccgaatgaaaactggctatggtgagcgttcttcggaggtaaaatgcgcaagttttaggcttgctgtggaagcacacaacatccgagcctttaaaaccattcctgaagagtgcgttgagccaacaaaggact

SEQ ID NO: 11884 - DNA, 292 bp, Glycine max
  Clone ID: LIB3039-002-Q1-E1-E5
gatctggcagcagaagaacaagtagttgagaactaagaaggagaagcaaatggcttcctcaatgatctcttccccagctgttaccactgtcaaccgtgccggtgccggcatggttgctccattcactggcctcaagtccatggctggcttccccaccagaaagaccaacaatgacattacctccattgctagcaacggtggaagagtgcaatgcatgcaggtgtggccaccagttggcaagaagaagtttgagactctttcctacctgccagaccttgatgatgcacaattg

SEQ ID NO: 11885 - DNA, 433 bp, Glycine max
  Clone ID: LIB3039-002-Q1-E1-E6
ggcacaagtttgttgagatagctagaagcaataagatgaaaatgaaagtgcttgttttgtttgttgctacagttttggtagcatatgaatgccatggctcagactaccagaagttccctctccaaatgaaaactgggtttggtgggcaatacagcaatgaggtggcatgtgccagttggaggcttggcgtggaagcaaacaacgtagtcaagtggcaaactgttcctgcagcttgcggagagtacatagctgactacgttctaggagaccagtagagatcagattccagaagagttaagcaacaggcttatttctatgctaaatccctcaaactcaccaacaaagatgtctttgtcttggacgttgacgacactactctctctaatctccagtaatttgctaaccatggatttggtgtggaacacacaatacg

SEQ ID NO: 11886 - DNA, 355 bp, Glycine max
  Clone ID: LIB3039-002-Q1-E1-E8
gggaagatgagagagataatggtcaaccaagcaacagcatgtgatttgaaagaattggtgcgcaagttcatccccgaaatgattggaaaggagattgagaaggcaacatctagcatctatcctctacagaatgtgttcattcgtaaagttaagatccttaaagctccaaagtttgatcttggaaaactgatggaggttcatggggattactctgaagatgttggtgccaaggtggacagacctgccgatgaaacattggctgaggaagccacggaggtagttggggcttgatctggctcataatgcatttttgttagtttagaagtcctgtgtctcttacaaatagtaattttca

SEQ ID NO: 11887 - DNA, 260 bp, Glycine max
  unsure (1)..(260): unsure at all n locations
  Clone ID: LIB3039-002-Q1-E1-E9
gaccgccgttctcatctctcttcccagccctcacctcagcgctgcatcttcatgtcgtctcatcacgtgcatatactagacatggaaaatgagtcgaggaggcggaatagcaccagcgaagggaaagaagaagggtgctacattcaccattgactgtgcaaagccagtggaagataagatcatggacattgcttctctcgaaaagtttcttcaagagacgatcaaggttggtggcanatctggtgctcttggtgacagta

SEQ ID NO: 11888 - DNA, 289 bp, Glycine max
  Clone ID: LIB3039-002-Q1-E1-F1
ggagagaatcttgtgcagcaacgcagtgttgtgagtgagttgggttttttctttggttttcctgagctgtgttttattctctttatctctctctctgccctctcatcttcgagctccgatggcgagcctgtggcgcgcggcgaccggcatgacggaaaacgccaccgattacgacggcgtcgagttctggtccaacgccgagcgcaccggctggctcaccaagcagggcgagtacatcaagacctggcgccgccgctggttcgtcctcaagcaagggaaggtcttctgg

SEQ ID NO: 11889 - DNA, 403 bp, Glycine max
  Clone ID: LIB3039-002-Q1-E1-F10
ggcacaagtgagtttgttgatcgagataactagaaacagtgtgatgaaaatgaaggtccttgttttcttcgttgctacaattttggtagcatggcaatgccatgcgtacgatatgttccctctccgaatgaacactggctatggtgcccgtactccggaggtgaaatgcgcaagttggaggcttgctgtggaagcacacaacatctttggctttgagaccattcctgaagagtgcgttgaagcaacaaaggaatacatccatggcgaacaatatagattagactccaaaacagttaaccaacaagcttactttttatgcagagacctcgaagttccatccaaagacacatttgtgttcagtttagatggcacgtactctcaataatccatactacaaaaaaca

SEQ ID NO: 11890 - DNA, 383 bp, Glycine max
  unsure (1)..(383): unsure at all n locations
  Clone ID: LIB3039-002-Q1-E1-F11
gatgcacaagtttgttgagatagctagaagcaataagatgaaaatgaaagtgcttgttttgtttgttgctacagttttggtagcatatgaatgccatggctcagactaccagaagttccctctccaaatgaaaactgggtttggtgggcaatacagcaatgaggtggcatgtgccagttggaggcttggcgtggaagcaaacaacgtagtcaagtggcaaactgttcctgcagcttgcggagagtacatagctgactacgttctangagaccaatatagatcagattccaaaacagttaaccaacaagcttatttctatgctaaatccctcaaactcaccaacaaagatgtctttgtcctggacgttgacgacactactctct

SEQ ID NO: 11891 - DNA, 412 bp, Glycine max
  unsure (1)..(412): unsure at all n locations
  Clone ID: LIB3039-002-Q1-E1-F12
ggcacaagtgagtttgttgatcgagataactagaaacagtgtgatgaaaatgaaggtccttgttttcttcgttgctacaattttggtagcatggcaatgccatgcgtacgatatgttccctctccgaatgaacactggctatggtgcccgtactccggaggtgaaatgcgcaagttggaggcttgctgtggaagcacacaacatctttggctttgagaccattcctgaagagtgcgttgaagcaacaaaggaatacatccatggcgaacaatatagattagactccaaaacagttaaccaacaagcttacttttatgccagagacctcgaagtccatcccaaggacacatttgtgttcagtatagatggcaacgtactctctaatattccatactacnaaaaacatggatat

SEQ ID NO: 11892 - DNA, 296 bp, Glycine max
  Clone ID: LIB3039-002-Q1-E1-F2
agacgacagaagggggcatcacacacaaacaaacactcccattttctctctttctctttctctccgaccgagcgagaccgagcgatccgatcctaaccccgcgatgctccgccgcgcaaccacctccctcatctccggcgcctcccgccgccgcctctccaccgacgtgccggcgacgccggcggcggattccgtcttcgcggaggcgtggaagaaagtgagccccaacatcgacccgccgaagacgccgctggcgtacatgaagccccgaccacccactccttcgactctcccct

SEQ ID NO: 11893 - DNA, 267 bp, Glycine max
  Clone ID: LIB3039-002-Q1-E1-F3
gatagcgaaacacagagtggtttcagtgagtgatcggtgttcacttgatccttcagaagtcgtcatcatcatcatcatcatcaccgttgattgaagaagatgccgatcagaaacatcgccatcggaaggcctgaagaggctactcaccccgacacgttgaaggcggggttggctgagttcatctccaccttgatcgtggtgttcgccggttcaggttccggcatcgcctacaacaagctcagcgacaacggcggcgcgactcccgcc

SEQ ID NO: 11894 - DNA, 206 bp, Glycine max
  Clone ID: LIB3039-002-Q1-E1-F4
gacagattaaaaccatagacgatacagaagttcatgaatgataggagttaaatgtctactacgagacatgtctcccttctgtccctttacctcatcctatctctaaattccctttacatgaccatggctgcaaggatcattccccagagtgctcctagcacagttacaaggcctcaatttctatcagaagctgaaacttaattgaa

SEQ ID NO: 11895 - DNA, 267 bp, Glycine max
  Clone ID: LIB3039-002-Q1-E1-F5
gactaattctcccaactcaatttttctctcaaccggcccaatttagcataagcccagcatggccaccgcaacagcagcagccacctcgtccttcatggggacgcgcctcctggaggcccactccggggcggggcgggtgcaggcccggttcgggtttggcaagaagaaagccgccgccccgaagaaagtttccagggggtcgggctctagctccgataggcccctgtggtatccgggcgccaaggcgcccgagtacctggatgggag

SEQ ID NO: 11896 - DNA, 419 bp, Glycine max
  Clone ID: LIB3039-002-Q1-E1-F6
ggcacaagtgagtttgttgatcgagataactagaaacagtgtgatgaaaatgaaggtccttgttttcctcgttgctacaattttggtagcatggcaatgccatgcgtacgatatgttccctctccgaatgaacactggctatggtgcccgtactccggaggtgaaatgcgcaagttggaggcttgctgtggaagcacacaacatctttggctttgagaccattcctgaagagtgcgttgaagcaacaaaggaatacatccatggcgaacaatatagatcagactccaaaacagttaaccaacaagcttacttttatgccagagacctcgaagtccatcccaaggacacatttgtgttcagtatagatggcaccgtactctctaatattccatactacaaaaaacatggatatggggggg

SEQ ID NO: 11897 - DNA, 268 bp, Glycine max
  Clone ID: LIB3039-002-Q1-E1-F7
ggcacaagtttgttgagatagctagaagcaataagatgaaaatgaaagtgcttgttttgtttgttgctacagttttggtagcatatgaatgccatggctcagactaccagaagttccctctccaaatgaaaactgggtttggtgggcaatacagcaatgaggtggcatgtgccagttggaggcttggcgtggaagcaaacaacgtagtcaagtggcaaactgttcctgcagcttgcggagagtacatagctgactacgttctaggaga

SEQ ID NO: 11898 - DNA, 422 bp, Glycine max
  Clone ID: LIB3039-002-Q1-E1-F8
gaagcacaacatctctatcgagtaaattaactatgaagcctagcctactattatccctttccttcctgcctctctttgctttcctggctctttcagaagatgttgaacaagttgtggacataagtggcaaccccattttcccaggtggcacatattacattatgccatcaacttggggcgctgccggtggtggattgaaactaggccggacaggaaactcaaactgcccagttactgttttgcaagattactcagaaatcttccgtggcacagcagtcaagttcagcatacctgggagaagccctggaatcatctttacaggtactccacttgaaatcgagttcgcagagaaaccttattgtgctgaatcctccaaatgggtggcgtgtgtggacaatgaaatccaaaaggcatgtgtgggt

SEQ ID NO: 11899 - DNA, 275 bp, Glycine max
  unsure (1)..(275): unsure at all n locations
  Clone ID: LIB3039-002-Q1-E1-F9
ggcacaagtgagtttgttgatcgagataactagaaacagtgtgatgaaaatgaaggtccttgttttcttcgttgctacaattttggtagcatggcaatgccatgcgtacgatatgttccctctccgaatgaacactggctatggtgcccgtactccggaggtgaaatgcgcaagttggaggcttgctgtggaagcacacaacatctttggctttgagaccattcctgaagagtgcgttgaagcaacanaggaatacatccatggcgaacaatata

SEQ ID NO: 11900 - DNA, 351 bp, Glycine max
  Clone ID: LIB3039-002-Q1-E1-G1
gatgctctctaatccgtatccgccgtcacgctcctttccaccacactctccgctctctcttgccgattaaccgtttctcctcctcctcctcctcctccgcctccgccgccgccgccgccgccatggttgctcacgcgaaggacgaggcgtaccttagcgcggcgattccgaagcgcgtccgtctcttcgagaccatccaggcggagcagcgcacgcagcgcctctcgctttcgccggatcctatcaaggtcagtctccccgacggcaacgtcagggacgcgaagaagtcgctctcgaccccgctcgacgtggcgcgcgaaatctcgaagaatttgggcaacagcgcgctca

SEQ ID NO: 11901 - DNA, 425 bp, Glycine max
  unsure (1)..(425): unsure at all n locations
  Clone ID: LIB3039-002-Q1-E1-G10
gtctcagaagatgaagcaggaaagagacttgctcaggttgtaagtgatccaagcctaacaaaatctggtgtttactggagctgaaacaaagcatcagcttcgtttgaaaaccagttgtctcaggaggccagtgatacagagaaggctcgtaagatctgggagattagtgagaaacttgttggttttgcctaagtgggaggagcctccaacatcccatgttgttctagagaccttgcacttgcatggaggaagaaaatgatgtctcaaaagagtggatagataacatcctatcattttgaatgcattgatgttgttttgttagctaggagcttctttgctttgatgtaaggtgtcaatggctttttgtgaatcaagactcaataaaatcattcagccatgtgggtgtggtgaagttgctcataana

SEQ ID NO: 11902 - DNA, 250 bp, Glycine max
  Clone ID: LIB3039-002-Q1-E1-G11
acgggcccggcaggctgacaacagtcggggtctcaggggattcggcaggtcttggacttgctcaggttgtctgtgctccacgctctgtcgtcatctggtgtttaatggagctgtcacaatgcatcagcttcctgtaggtaccagtctgtctcaggaggccagtgatacacagtatgctcgtaggatccgggagattagtgggagacttgttggttttgcctaagtgggacgaggctcccagatcccatgt

SEQ ID NO: 11903 - DNA, 219 bp, Glycine max
  Clone ID: LIB3039-002-Q1-E1-G12
ggcacaagtgagtttgttaattcaaaataactaaaaacattgtgataaaaataaaggtccttgtttccttcgttcctacaattttggtagcttggcaatgccatgcgtacgatatgttccctctccgaattaacactggctatggtgccggtatccgtgatgtgaaatgcgcaagttggaggcttgcggttgaagcatacaacatctttggctttgaga

SEQ ID NO: 11904 - DNA, 270 bp, Glycine max
  unsure (1)..(270): unsure at all n locations
  Clone ID: LIB3039-002-Q1-E1-G2
gaccaacacaaacaatagtgcatagcgtttttcattgtgcattattcaatggccagcacagcagctctatccggaaccatggtgagcacctccttcatgaggaagcaacctatgacgaccaagagcctaaagacattccccaacgctctttttggtctgaaaggtggacgaggtggtcgtgtaacttgcatggcctcgtacaaggtgaagctcataaccccagaaggagaagtggagtttgaatgcccagatgatgttttcnttgttgac

SEQ ID NO: 11905 - DNA, 353 bp, Glycine max
  Clone ID: LIB3039-002-Q1-E1-G3
ggcacaagtgagtttgttgatcgagataactagaaacagtgtgatgaaaatgaaggtccttgttttcttcgttgctacaattttggtagcatggcaatgccatgcgtacgatatgttccctctccgaatgaacactggctatggtgcccgtactccggaggtgaaatgcgcaagttggaggcttgctgtggaagcacacaacatctttggctttgagaccattcctgaagagtgcgttgaagcaacaaaggaatacatccatggcgaacaatatagatcagactccaagacagttaagcaacaagcttacttttatgccagagagctcgaagtccatcccaaggacacatttg

SEQ ID NO: 11906 - DNA, 278 bp, Glycine max
  Clone ID: LIB3039-002-Q1-E1-G4
gacacatgcccatcatcaaagtttcttcctttctctgctctttgtcttctctgacacatttggggccttgttgagtgtgtttttgcaagagggtatggcgaaggacgttgaggttgctgagcgtggctccttctctgggaaggactaccaggaccctccacgagcaccactcattgatgctgaggagctcacaaagtggtccttttacagggctcttattgctgagttcattgccactttgctcttcctctacattactgtgctcacagttatagggt

SEQ ID NO: 11907 - DNA, 432 bp, Glycine max
  Clone ID: LIB3039-002-Q1-E1-G5
ggcacaagtttgttgagatagctagaagcaataagatgaaaatgaaagtgcttgttttgtttgttgctacagttttggtagcatatgaatgccatggctcagactaccagaagttccctctccaaatgaaaactgggtttggtgggctatacatcagtgaggtggcatgtgccagttggaggcttggcgtggaagcaaacaacgtagtcaagtggcaaactgttcctgcagcttgcggagagtacatagctgactacgttctaggagaccaatatagatcagatccaaaacagttaacaaacaagcttagttccatgctaaatccctcatactcaacaacaaagatgtctttgtcgtggacgttgacgacactactctcgctaatctccagtattttgctaaccatggatttggtgtggaacacacaatacg

SEQ ID NO: 11908 - DNA, 410 bp, Glycine max
  Clone ID: LIB3039-002-Q1-E1-G6
ggtgtgtgcgttcctaacattattgtttcctaccaagttctctgtctggggagttcttagcaccaccaccagcttctgcagtagctttaagctacgaaagattttccttgaccatggggcaaaagcatttagtgacggtgttctgtttatgggctttaacatgttcccttcttccatctttctcctttggaattctgagaattggtttgaagaagagacctctagatcttgatagtattaatgctgctagaaaggcaagagaaggtctaagatctgtaagaccaatgatgggtgcacatgatcagtttattggtaagtcaaaaggtgaagatatagtacctttgaagaattatttggacgctcaatagtttggtgagattggaattgggaaaccccacagcccttcactg

SEQ ID NO: 11909 - DNA, 242 bp, Glycine max
  Clone ID: LIB3039-002-Q1-E1-G7
agacgtcagacaacgcgtcagaggggttcgacaaaactaccgttcgtattctggtgaggatgcgccctctgactggaacaaagcggcacataatggtgtatgcaacaatactaatggatctcaagcttggatgcattatacagatgacaaagataggcaaatctagagtcacggaactacacatatcgaacatcctagctggaaccatcgatcgtcgaacacatcagagctggagttcagca

SEQ ID NO: 11910 - DNA, 372 bp, Glycine max
  unsure (1)..(372): unsure at all n locations
  Clone ID: LIB3039-002-Q1-E1-G9
gatccataaccatggcgtctaactctgcttccgctctttacttccttttatgcctatcgcccatcactttgcttctttctgcgtttcgtgctcaagctcaatctcatgctccagctcccactttcaagtactgtgaaaagaatgcagactatgctgtgaaggtgagtggagtggaaatattgcctgaccccgtggagagaggagtgccattcacctttaagatcccagcttatactcctgaaccaattcanagcggggacttgttatatgaaatttcttatgctggaatagaagcacaacctgctacatttctccatgatctctgtganggaagcacatgcccagtacctgcaggcaactttgtgctcgttc

SEQ ID NO: 11911 - DNA, 314 bp, Glycine max
  Clone ID: LIB3039-002-Q1-E1-H1
ggtgagattacccatagatagagagcgcggcataacctaaacttacccttcttctctctgtgtgtgtgcgcatcaaacgcaaccagaagcagccatggccactgcaagaactgtgaaggacgtttctcctcatgagttcgtcaaagcttactcttctcacctcaagcgatctggcaagatggagctgccagagtggactgatattgtgaaaactgcaagatttaaggagttggctccttatgatcctgactggtactatgtcagagctgcttccatgggaagaaagatctacttgagaggaggacttggtgttg

SEQ ID NO: 11912 - DNA, 379 bp, Glycine max
  unsure (1)..(379): unsure at all n locations
  Clone ID: LIB3039-002-Q1-E1-H10
ggataagattctggtgttctttaagaagctgttgaatgagtggaagcaagagttgcgcgagatgcctgaggcggagaagcgcacggccaaggggaagtccatggttgccactttcaagcagtgtgcgcgttacttgaacccgctgtttaagttttgcangaagaaggttcttccggatgacattcgacaggcgttattgttgatggttgaatgctgtatgangcgagattatctggctgcaatggaccattatatcaagctggctatcgggaatgcaccctggcctattggtgtcactatggttggtattcacgaaagattctgcccgtaaaagatctacaccaacagtgttgctcacatcatgaatgatgagaccact

SEQ ID NO: 11913 - DNA, 291 bp, Glycine max
  Clone ID: LIB3039-002-Q1-E1-H11
agaaggggcacaagtgagtttgttgatcgagataactagaaacagtgtgatgaaaatgaaggtccttgttttcttcgttgctacaattttggtagcatggcaatgccatgcgtacgatatgttccctctccgaatgaacactggctatggtgcccgtactccggaggtgaaatgcgcaagttggaggcttgctgtggaagcacacaacatctttggctttgagaacattcctgaagagtgcgttgaatcaacataggaatacatccatggcgaagcatatagatcagactc

SEQ ID NO: 11914 - DNA, 369 bp, Glycine max
  unsure (1)..(369): unsure at all n locations
  Clone ID: LIB3039-002-Q1-E1-H12
gatcccattcccatttttccttccctccaaaatggaagagaaactaaagtacccctgtctctcttccttgttaaccctcttcctctgcatctccgccacttccactaacccacacaactcccaaacccaaacccttctcctccataccctccctgacccacccacactctcatggcccgaatccgccaccgtagaacccgacccggaacccaccacatccctctcccttcaccacatagacgcactctccttcaacaaaacccctttccaactcttccacctgagactcgaacgcgatgccgcaagggtcaaaacccctcaccacttagccgcagccacnaacaaaacccgaaccgccaaccccggggt

SEQ ID NO: 11915 - DNA, 307 bp, Glycine max
  Clone ID: LIB3039-002-Q1-E1-H2
gatccaaattcaagttcgcaccaaattttcctcccaaaatgtcaggccgtggaaaaggtgggaacggtttgggaaagggaggagctaagaggcacagaaaggttcttcgtgacaacattcaaggaatcacgaaacctgcgattcgtaggttagcgagaagaggtggcgtgaagaggatcagtggtttgatttacgaaggagaccagacgagttctgaagatattcttggagaacgtgattcgcgatgctgtaacctacactgagcacgctaggaggaaaagtgttactgctatggatgtcgtttatg

SEQ ID NO: 11916 - DNA, 253 bp, Glycine max
  Clone ID: LIB3039-002-Q1-E1-H3
gtcagccatttagctccataactgcagcattagggtttttcatctgcttcagtggcgaagggaacagggagttttggtcagagaaggaacaagactcatactctctgtgtgacgtgtggccgccgcagcttccatctccagaagagtcgttgcgccgcctgtgctttccccgccgcatgcattacgaaatatacctggggcgtcaaggcaatctgcagaaagaccacctgaactggcaggatgaggtacttgc

SEQ ID NO: 11917 - DNA, 56 bp, Glycine max
  Clone ID: LIB3039-002-Q1-E1-H4
tcatcgtgctgcgaaggagacaacaggggtgcatttagtttgttgatgatggtatt

SEQ ID NO: 11918 - DNA, 318 bp, Glycine max
  Clone ID: LIB3039-002-Q1-E1-H5
gaaggtgcaagagtttgttgtgagctataagctagtttatcgtgaggagaatatgaagttgtttgttttctttgttgctgcagtagttttggtagcatggccatgccatggcgcatgctaccaaaggttccctctccgaatgaaaactggctatggtgagcgttcttcggaggtaaaatgcgcaagttttaggcttgctgtggaagcacacaacatccgaacctttaaaaccattcctgaagagtgcgttgaaccaacaaaggactacattaatggcgaacaatttagatcagctctaaagaagttaaccaacaagct

SEQ ID NO: 11919 - DNA, 431 bp, Glycine max
  Clone ID: LIB3039-002-Q1-E1-H6
tactgggacttgtaataattcttatgacacatgataggccatgggcaccagctccgcattcctctctccttctgctcctcttgctgctccacctcgccatcgccgctcacggtatcagcatcagctacggcacgctcggcgacaaccttctaccgcccgcggctgtggcgaacttcctgaagatgaggaggatcatctacggcgtgacgatctacgacgtgaatccggacatcctgcaggccttcgccggcagctgcatctccatgacggtgagctgggctatcggtgagatcgccaccttatggactatcgactctgcgaggcagtgggtggccacgcagatcaaaccctttcaggctgggacaggggtaaatacatcctcgttcgcagcgaagtccccactggggcgacaccgacatgattcgcgggct

SEQ ID NO: 11920 - DNA, 242 bp, Glycine max
  Clone ID: LIB3039-002-Q1-E1-H7
gacagctattccgcgtaagcttgctactgagtttcgacactgcatggcttaggtcatcggaattcgaagctacgttgcaacatggctaatgaaaaggctcagatcaacattgtagtggttggccatgtggatcctgaggaggcaaccaccattaacgagctgaagaagcctgttgtggagaaagaatctcgagggcatgccagatgagggcatgcatgtacagactcggaggggaaccagag

SEQ ID NO: 11921 - DNA, 357 bp, Glycine max
  Clone ID: LIB3039-002-Q1-E1-H8
aggtgcatgtgtttatgatggcagataggtatcacaagcaatcagatgaaatatataaaaagttggatgcggtagtcagtcaactgaagctggttggctacacacccagtacttcgggcatattggttgatttagaagaggaagagaaaaaagaagtagttctttggcatagtgagaaattagcactgtgctacgggctaattggtgagagaaaagaatcatgcattcgcatagttaaaaatcttagaatatgtgaggactgtcattcctttatgaaattggtctcaaaggtgcaccgaatagagattgtcatgagagataggactaggtttcaccattttaatggtggaatatgtt

SEQ ID NO: 11922 - DNA, 305 bp, Glycine max
  unsure (1)..(305): unsure at all n locations
  Clone ID: LIB3039-002-Q1-E1-H9
ggcacaagtgagtttgttgatcgagataactagaaacagtgtgatgaaaatgaaggtccttgttttcttcgttgctacaattttggtagcatggcaatgccatgcgtacgatatgttccctctccgaatgaacactggctatggtgcccgtactccggaggtgaaatgcgcaagttggaggcttgctgtggaagcacacaacatctttggctttgagaccattcctgaagagtgcgttgaagcaacanaggaatacatccatggcgaacaatatagattagactccaaaacagttaaccaacaag

SEQ ID NO: 11923 - DNA, 417 bp, Glycine max
  Clone ID: LIB3039-003-Q1-E1-A1
ggcacaagtgagtttgttgatcgagataactagaaacagtgtgatgaaaatgaaggtccttgttttcttcgttgctacaattttggtagcatggcaatgccatgcgtacgatatgttccctctccgaatgaacactggctatggtgcccgtactccggaggtgaaatgcgcaagttggaggcttgctgtggaagcacacaacatctttggctttgagaccattcctgaagagtgcgttgaagcaacaaaggaatacatccatggcgaacaatatagatcagactccaaaacagttaaccaacaagcttacttttatgccagagacctcgaagtccatcccaaggacacatttgtgttcagtacagatggcaccgtactctctaatattccatactacaaaaaacatggatatggggt

SEQ ID NO: 11924 - DNA, 373 bp, Glycine max
  Clone ID: LIB3039-003-Q1-E1-A10
gcacaagtttgttgagatagctagaagcaatatgatgaaaatgaaagtgcttgttttgtttgttgctacagttttggtagcatatgaatgccatggctcagactaccagaagttccctctccaaatgaaaactgggtttggtgggcaatacagcaatgacgtggcatgtgccagttggaggcttggcgtggaagcaaacaacgtagtcaagtggcaaactgttcctgcagcttgcggagagtacatagctgactacgttctaggagaccaatatagatcagattccaaaacagttaaccatcaagcttatttctatgctaaatccctcaaactcaccaacaaagatgtctttgtcttggacgttgacgacact

SEQ ID NO: 11925 - DNA, 407 bp, Glycine max
  Clone ID: LIB3039-003-Q1-E1-A11
tcacggacccatccagtcgtgcagcgagacgacgacagaggggggaattgttccattttcatttctttcgcataagttgcaactacttcctcagaaaaaaagtttcgaagttaaggaaatccagagagacagaaatggccggtgacagtgcagctacatgcatagacatcctccttgccatcattctccctcctcttggagtctttctcaaatatggctgccaggtggagttctggatttgtttggtgctgaccctttttgggtatatacctggaattatctatgctgtctatgctatcaccaagtgatcaccctttaactttgtgtggacaataaacaaatgtcatgggcgtttctgtctttcaactcagatattagtgtttctttaatatatcgccaatgttgtc

SEQ ID NO: 11926 - DNA, 321 bp, Glycine max
  unsure (1)..(321): unsure at all n locations
  Clone ID: LIB3039-003-Q1-E1-A12
ggaaaattaatccttcaaagaaaaaaggagaatgcttagagagagaaccaaacaaaataatttcaatttcaaccttttttggagtaacacaaatggaaacacggtgagaacaatccccccaaatcaatgggcctaaaacccaaattccaacctgccctgtaaaaactggttgccgtcaccataatccaagggaagggtcattgggagctcgatgtgactacattggttcatccactaatctgattatggtggcttctacaaccctgatgctgtntgctggaaggtttggattggctccatcagcacacaggaaagccactg

SEQ ID NO: 11927 - DNA, 421 bp, Glycine max
  Clone ID: LIB3039-003-Q1-E1-A3
gggctccgccatttttcgtagctgctgttcttgcgcgtgaacaagcctcaggtaagccaaaaccatggttaagcataacaatgttatcccaaacggacacttccgtaagcactggcagaactatgtgaagacttggttcaatcagccagcacggaagacaatgagacgattggctcgtcagaagaaagctgtgaagatattccccagacctacggctggacctctcaggcccattgtacatggtcaaactttgaaatacaacatgaaagtgagacgtggaaggggattttctcttgaagaactcaaggcagcagggattcccaaaaagcttgcaccaaccatacgtattgctgttgatcatcgtcgcaagaaccgttctttggaaagtctgcaagctaatgtgcagaggctgaaaacatac

SEQ ID NO: 11928 - DNA, 411 bp, Glycine max
  Clone ID: LIB3039-003-Q1-E1-A4
cgggttccacatgatcagaacaaagctgggatcaagctgaactgggccattaggcggaaaattgctattggagctgctacgggattggcttttcttcaccacaactgtatcccccacatcattcatagagatatggagtcgagcaatgtgttacttgatgaaaacctggaagccagagtctctgattttggaatggctacgcttatgagtgctatggatacacatttgagtgtgagcacattggctggcacaccggggtatgttcctcgcgagtactatcagagcttcagatgctccacaaaaggtgatgtctacagttatggtgtggctttgttggagctgctaactgggaaaacgccaacggactcggctgattttggagataataatcctgttggatgggttaaacaa

SEQ ID NO: 11929 - DNA, 426 bp, Glycine max
  Clone ID: LIB3039-003-Q1-E1-A5
ggaacgaagaagccggtgtttctgccgtgggaattgatcatgatgttgccgctgaagtctcttatccgtttcaagactgtattcgtaggttcctgtaaggattttttacttttggactacaatcgaagctctttcatcttcaatccatctacaggacttcataaatttgtagattggtcacctatttccaataatatgggtggatatggttttggatatgacccatcaaccgatgactactcgctggttcaagcatctacaaataaaaatcctacaacttcaacctaaatgaacgcgtgtaatctgtttggagtaattctcactcagagctaatgcttggaaagaaattgagcctatccatttgtcttaccagggctgctctgatcgtgtagttttggactttgagttggtcttcaacggtgtcct

SEQ ID NO: 11930 - DNA, 381 bp, Glycine max
  Clone ID: LIB3039-003-Q1-E1-A6
ggcacaagtttgttgagatagctagaagcactaagatgaaaatgaaagtgcttgttttgtttgttgctacagttttggtagcatatgaatgccatggctcagactaccagaagttccctctccaaatgaaaactgggtttggtgggcaatacagcaatgatgtggcatgtgccagttggaggcttggcgtggaagcaaacaacgtagtcaagtggcacactgttcctgcagcttgcggatagtacatagctgactacgttctacgagaccaatatagatcagattccaaaacagttaaccaacaagcttatttctatgctaaatccctcagactcaccagcacagatgtctttgtcttggacgttgacgacactactctct

SEQ ID NO: 11931 - DNA, 60 bp, Glycine max
  Clone ID: LIB3039-003-Q1-E1-A7
cccacgcgtccgcccacgcgtccgcccacgcgtccgcccacgcgtccgcccacgcgtccg

SEQ ID NO: 11932 - DNA, 398 bp, Glycine max
  Clone ID: LIB3039-003-Q1-E1-A8
ggtccttctttgcgagattgaatcgtaagcagcggctaccctaatcctctcctcttcctctctactaatttcagctatggccgacgaagctgtggttgttccagatcccacccagatcgatgtcaagctctttaaccgctggagcttcgacgatattgagattactgacatttctctggctgattatatcggggtggcgacatccaagcacgccacgtatgtgcctcacaccgccggcaggtactcggtgaagcggttcaggaaggcgcaatgccccattgttgagaggctgagcaactctctcatgatgcacggtagaaacaatggcaagacactcttggctgttaggatcatcaaacatgctatggagattattcatttgttgactgaccagaacc

SEQ ID NO: 11933 - DNA, 421 bp, Glycine max
  Clone ID: LIB3039-003-Q1-E1-B1
gaaaacaccatcatctacaacgcctcgaatccacacagttctactctacgctctaaaccctctctctctctctctcgatctatcatggctttgcccaatcagcaaaccgtggattaccctagtttcaaactcgtcatcgtcggtgacggcggtacaggaaagacaacgttcgtgaaaaggcatcttaccggtgaattcgagaaaaaatacgaaccgaccattggagtggaggttcacccattggatttcttcacaaactgcggaaagattcgcttctactgttgggatactgctggacaagagaagtttggtggcctcagagatggatattatatccatgggcaatgtgcgattataatgtttgatgttactgcccgtctaacatacaaaaatgtcctacctggcacggggatctttgccg

SEQ ID NO: 11934 - DNA, 361 bp, Glycine max
  Clone ID: LIB3039-003-Q1-E1-B10
gaaggtgcaagagtttgttgtgagctataagctagtttatcgtgaggagaatatgaagttgtttgttttctttgttgctgcagtagttttggtagcatggccatgccatggcgcatgctaccaaaggttccctctccgaatgaaaactggctatggtgagcgttcttcggaggtaaaatgcgcaagttttaggcttgctgtggaagcacacaacatccgagcctttaaaaccattcctgaagagtgcgttgaaccaacaaaggactacattaatggcgaacaatttagattagactctaaaacagttaaccaacaagctttcttttatgctagtgaacgcgaagtccatcacaacgacata

SEQ ID NO: 11935 - DNA, 363 bp, Glycine max
  Clone ID: LIB3039-003-Q1-E1-B11
ggcacaagtgagtttgttgatcgagataactagaaacagtgtgatgaaaatgaaggtccttgttttcttcgttgctacaattttggtagcatggcaatgccatgcgtacgatatgttccctctccgaatgaacactggctatggtgcccgtactccggaggtgaaatgcgcaagttggaggcttgctgtggaagcacacaacatctttggctttgagaccattcctgaagagtgcgttgaagcaacaaaggaatacatccatggcgaacaatatagattagactccaaatcagttaaccaacaagcttacttttatgccagagacctcgaagtccatcccaaggacacatttgtgttcagtat

SEQ ID NO: 11936 - DNA, 354 bp, Glycine max
  Clone ID: LIB3039-003-Q1-E1-B12
aggggcacaagtgagtttggtgatcgagataactagaaacaatgtgatgaaaatgaaaggccttggtttcctcggtgccacaattttgggaacaagggaatgccaagcgtacgaaaagttccctcccccaatgaacaatgggtaaggggcccgttatcccgaaggtaaatgcccaagtttgaaggcttccgttgaaacaaaaaacaaccttgggctttgaaacaatccttaaaaattgcgttgaagcaccaaaggaatacatcaatggcgaacaatataaatcagactccaaaacagttaaccaacaagcttacttttatgccagagacctcgaagtccatcccaaggacacat

SEQ ID NO: 11937 - DNA, 389 bp, Glycine max
  Clone ID: LIB3039-003-Q1-E1-B2
ggctagagcatgatattgaacggcgagaatcaacactgttctaatctagacgcgcgtgactcacgctcactctcacgcatcatcgagggtttgcctgatcagctctcagtgtgatatgctagattcatcctcatggtcgtctgtgagtgcggtagtggagatagatcgttcgtgatttaggcagcttaccggtgacttcgaggaatcaatatgatgcgtgcagtggtgtggaggttcacccattggatctcttcactcactgcggataaattcgcttctcctgttgggatactgctggacaagacaagtttggtggcctcacagatggatattacatccatggccgttgtgcgattataatgtctgatcttattgcgcgtctaacagac

SEQ ID NO: 11938 - DNA, 444 bp, Glycine max
  Clone ID: LIB3039-003-Q1-E1-B3
ggcacaagtgagtttgttgatcgagataactagaaacagtgtgatgaaaatgaaggtccttgttttcttcgttgctacaattttggtagcatggcaatgccatgcgtgcgatatgttccctctccgaatgaacactggctatggtgcccgtactccggaggtgaaatgcgcaagttggaggcttgctgtggaagcacacaacatctttggctttgagaccattcctgaagagtgcgttgaagcaacaaaggaatacatccatggcgaacaatatagattagactccaaaacagttaaccaacaagcttacttttatgccagagacctcgaagtccatcccaaggacacatttgtgttcagtatagatggcaccgtactctctaatattccatactacaaaaaacatggatatgggggtgagaaatttaacttcgacttgtatga

SEQ ID NO: 11939 - DNA, 411 bp, Glycine max
  unsure (1)..(411): unsure at all n locations
  Clone ID: LIB3039-003-Q1-E1-B4
ggcacaagtgagtttgttgatcgagataactagaaacagtgtgatgaaaatgaacgtccttgttttcttcgttgctacaattttggtagcatggcaatgccatgcgtacgatatgttccctctccgaatgaacactggctatggtgcccgtactccggaggtgaaatgcgcaagtcgaaggcttgctgtggaagcacacaacatctttggctttgagaccattcctgaatagtgcgttgaagcaacagaggaatacatccatggcgaacaatatagattagactccacaacagttaaccaacaagcttacttttatgccagagacctcgaagtcatcncaaggacacatttgtgttcagtatagatggcaccgtactctctaatattccatactacananaacatggatat

SEQ ID NO: 11940 - DNA, 409 bp, Glycine max
  unsure (1)..(409): unsure at all n locations
  Clone ID: LIB3039-003-Q1-E1-B5
ggcacaagtgagtttgttgatcgagataactagaaacagtgtgatgaaaatgaaggtccttgttttcttcgttgctacaattttggtagcatggcaatgccatgcgtacgatatgttccctctccgaatgaacactggctatggtgcccgtactccggaggtgaaatgcgcaagttggaggcttgctgtggaagcacacaacatctttggctttgagaccattcctgaagagtgcgttgaagcaacaaaggaatacatccatggcgaacaatatagattagactccaaaacagttaaccaacaagcttacttttatgccagagacctcgaagtccatcccaaggacacatttgtgttcagtatagatggcaccgtactctctaatattccatactacaanaaacatgga

SEQ ID NO: 11941 - DNA, 383 bp, Glycine max
  unsure (1)..(383): unsure at all n locations
  Clone ID: LIB3039-003-Q1-E1-B6
gaagagagggcgaggaagccacatatagacacaatacagagtgagttgttgctccttcgccacaactctctgccaacatgggtatctccagagattctatgcacaagaggcgtgccactggtggcaagaagaaggcctggaggaaaaagagaaagtatgagcttggtcgccagcctgctaacactaagctgtcaagcaacaagacagtcaggaggatccgtgttagaggtggaaatgtgaaatggagggcattgagattggatactggaaattactcctggggaagtgaagctgtaactcgcaagactcgtgtactagatgtggtttacaatgcctcanacaatgagcttgtgcgtactcagactcttgtcaanagtgctatc

SEQ ID NO: 11942 - DNA, 399 bp, Glycine max
  Clone ID: LIB3039-003-Q1-E1-B7
ggtgcacaagtgagtttgttgatcgagataaccagaaacagtgtgatgaaaatgaaggtccttgttttcttcgttgctacaattttggtagcatggcaatgccatgcgtacgatatgttccctctccgaatgaacactggctatggtgcccgtactccggaggtgaaatgcgcaagttggaagcttgctgtggaagcacacaacatctttggctttgagaccattcctgaagagtgcgttgaagcaacaaaggaatacatccatggcgaacaatatagatcagactccaaaacagttaaccaacaagcttacttttatgccagagacctcgaagtccatcccaaggacacatttgtgttcagtatagatggcaccgtactctctaatattccatactac

SEQ ID NO: 11943 - DNA, 406 bp, Glycine max
  Clone ID: LIB3039-003-Q1-E1-B8
gaaggtgcatgagtttgttgtgagctataagctagtttatcgtgaggagaatatgaagttgtttgttctctttgttgctgcagtagttttggtagcatggccatgccatggcgcaggctaccaaaggttccctctccgaatgaaaactggctatggtgagcgttcttcggacgtaaaatgcgcaagttttaggcttgctgtggaagcacacaacatccgagcctttaaaaccattcctgaagagtgcgttgaaccaacacaggactacattaatggcgaacaatttagattagactctaaaacagttaaccaacaagctttcttttatgctagtgaacgcgaagtccatcacaacgacatatttatattcggcatagataacaccgtactctctaatatcccatac

SEQ ID NO: 11944 - DNA, 358 bp, Glycine max; identical to SEQ ID NO: 7611
  Clone ID: LIB3039-003-Q1-E1-B9

SEQ ID NO: 11945 - DNA, 435 bp, Glycine max
  Clone ID: LIB3039-003-Q1-E1-C1
gatgttgatgaggttgaggaactaagggataatgctgcagaggctcttgtcaattattatgtcgatccattgtatcatgatagcgtgtctgatgcgattaatgttccttcgttcagaaatatgcagaatagattaactcatattcgtgcatcgaatgagcacatggctagatccttgagaagaatgagtgttgagcagctcacttggaacccagatcttgcataatcatttgaagggtatgttttgatctcaaagcctttggaaagttgttttcagtctcttaacttttatcagttttacaccctagcatagatatatgttgtgatgagaattggtagaaggagatatatgttgatctttgctgtatatttgtagaagttacaaacacaaataaaaatgagtgagtagatagccttgtaattgtgggaaaatact

SEQ ID NO: 11946 - DNA, 371 bp, Glycine max
  Clone ID: LIB3039-003-Q1-E1-C10
ggcgacacgatgcataggcaatcccctgggttctccctctcccaagctccccaagctagaaacgctcgtcaccgacgaagacgatgctcccaaacctcaccgtctcagcctctccccgccgcctccaccgccgcacaagttcgtccacctcattcctgtcctcactctcctctgcttcttcgtcctctacctcttctcccacactccctctccatcagacttgaatcatttcaccggattcaaccgctcgccatcataccgtctagatttggcggagaagatcggcggcgacattggacaatacatggatgtaaaaggaagcgatgttttggcgatccgaagtttgcaacagattccgaaacctcgccctc

SEQ ID NO: 11947 - DNA, 368 bp, Glycine max
  unsure (1)..(368): unsure at all n locations
  Clone ID: LIB3039-003-Q1-E1-C11
gagagcaagcaaagcgggggagaaagagaggcagcanacaaaaacaatggcgacgtcgctctctgtttcgccatctctctctctcaacactctcttcatcgccaaagcgcttccactatctcgcccctcctttctctctctccctctccccaaatccctactctctctctccacgcgccgccgcaccttcatcgtccgcgccgaatcccaaaacggcgccgaccccgttcccgcccactacgacttcgacctcttcaccatcggcgcaggcagcggcggggtccgagccgctcgcttcgccgccaactacggcgcttctgtcgccatctgcgagcttcctttctccactatctcctccgaaaccaccg

SEQ ID NO: 11948 - DNA, 390 bp, Glycine max
  Clone ID: LIB3039-003-Q1-E1-C12
aaaaaaacaacaaaagggaaaggttcaaaatttggttgtaaccaaaaaccaatttaaccttgaggagaatataaatttgttggtttcctttgttgcggcattatttttggtatcatggcaatgcaatggcgcaggctacaaaaggttccctctccgaataaaaacgggctatggtaagcgttccttcggaggtaaaatgcgcaatttttaggcttgctgtggaagcacacaacatccgagcctttaaaaccattcctgaaaattgcgttgaaccaacaaaggactacattaatggcaaacaatttagattagactctaaaacagttaaccaacaagctttcttttatgctagtgaacgcgaagtccatcacaacgacatatttatattcg

SEQ ID NO: 11949 - DNA, 423 bp, Glycine max
  unsure (1)..(423): unsure at all n locations
  Clone ID: LIB3039-003-Q1-E1-C2
ccaaggctcctcctcgtgctgatgtagtgaaaggcttgaaaaatggtataatgttgaacctgttggggatgggtgctgctattcttgggatgcaagccacggttggattgttagttgctaaggctctcacttcctcggcaaacccgtattatcagggaatttctcccggtagcaccccagtgctcgcattggatgtatttttggtgcaggcttcagcgaacactattctttctcatttccttgggcttgttttctcactggagttgctgcgatcagtcacattaccaccttcagatgcaactccatttcncaaatttgcgtaatatgtgcctcgagactagataatgaaatcacacacccaaaaattgtccctcgtctcttgtggttatttgcttaattaattgtgttcagctttttgataca

SEQ ID NO: 11950 - DNA, 425 bp, Glycine max
  unsure (1)..(425): unsure at all n locations
  Clone ID: LIB3039-003-Q1-E1-C3
gaactcttcctctttttacttcccctatggctcgtcactccttgctcttagccctcctcctcttcgccgccgtggccgccgccgcgatggcggtggccgcgtccgacgccgacgacatcctgatccgtcaggtggtgccagatgttggcgaagccgaagaggaggacaacctgctgaacgccgagcaccacttcgcgagcttcaaggccaagttcgccaagacctacgccaccaaggaggagcacgatcatcgcttcggcgtcttcaagtccaacctccgcagagccaggctgcacgccaagctcgacccctccgccgtccacggcgtcaccaaattctccgattcaactccggccgagttccgccgccagttcctcggcctcaagccgctccgcttcncggcgcacgcncagaaggcgcccatc

SEQ ID NO: 11951 - DNA, 396 bp, Glycine max
  unsure (1)..(396): unsure at all n locations
  Clone ID: LIB3039-003-Q1-E1-C5
gaacctacgccgagtgaaaccccaatcccaatacactcccaactcacaaagccatgtctccaggtcctgttgtcgacgcttcccctgaggttgaagcagagcaacaacttccctccgtcgatgacgcaacccagttgaagaaatcccaaccgcaggaggatgatgctcccgttgtcgaggacgtgagggatgatgacaaggacgacgacgatgaggacgacgacgacgatgatgaagatgacaaggaagacgatgctctaggtggtgctgagggttcaaagcagagcagaagtgagaagaagagtcgaaaagcaatgttgaagctgggactaaaacctgtcaccggtgttagtagggtcacaatcaagagaacaaaanataatcttttcttcatct

SEQ ID NO: 11952 - DNA, 405 bp, Glycine max
  unsure (1)..(405): unsure at all n locations
  Clone ID: LIB3039-003-Q1-E1-C6
aaggaagaaaaaaagaaaaagaagatcaaggaagtgtcacatgaatggtccttggtgaacaagcagaagcctatttggatgaggaagcctgaggagatcacaaaagaggagtattctgctttctacaagagtcttaccaatgactgggaagagcatttggctgtcaagcacttctctgttgagggtcagttggagtttaaggctatactctttgttcccaagagggcaccttttgacctctttgacacaaggaagaagcctaacaacattaagctctatgtccgccgtgtctttattatggacaactgtgaggagttgattcctgagtatttgggctttgtcaagggtattgttgattctgaagatctcncactcaacatttcaagagaaatgttgcaacagaac

SEQ ID NO: 11953 - DNA, 423 bp, Glycine max
  Clone ID: LIB3039-003-Q1-E1-C7
ggaaattggaatgaataagaggagcagcagcagcagcagcagttcagtttttgaggcgaatggagtggaggaacctcaacaaccttcatcctgtgcagcagcagcacttgatgagttgcataaagagaaaaatgagaatggagaagaaaccctcgtgccttccaatccctatcccaatcttgacgatggcttctatgaaatcgaaaccatacgccgtaagaggctacgcaagggtcagctccagtacctaatcaaatggcgtggatggcctgagactgccaacacttgggaacctcttgaaaatctacagtccgttcctgatctcgttgatgcttttgaggacagcctcaagtctggaaaacatcagaagcgcaagcgcaagcatgtggatgtgcttcaactcaccctactcaagaagcgctc

SEQ ID NO: 11954 - DNA, 421 bp, Glycine max
  Clone ID: LIB3039-003-Q1-E1-C8
gacacttcaaaatcctctagtaacccttcttttctctctctctctctcgtgttctgagctgctagaagcaatggagaggaaaagaagccatgcttctttcaccatgtttgcaatgcttgttggattgctctctcagagccttgtcattcctgtaatatccaccactgttgcagatcagaagaactactacaccccagatccacatgctggaagtccccccacaggctcacacaatagtagtcctccatctcatggccatgggagctctccaccctcacatcacaatagtccaagtactccatcaacaccctcaggtggaaactgtggattatcacccccacaacatcatgatccaacaccctcaactccatcaacaccatcaaaccctccctcaagtggatactatggaggtagccctcca

SEQ ID NO: 11955 - DNA, 402 bp, Glycine max
  Clone ID: LIB3039-003-Q1-E1-C9
ggcacaagtgagtttgttgatcgagataactagaaacagtgtgatgaaaatgaaggtccttgttttcttcgttgctacaattttggtagcatggcaatgccatgcgtacgatatgttccctctccgaatgaacactggctatggtgcccgtactccggaggtgaaatgcgcaagttggaggcttgctgtggaagcacacaacatctttggctttgagaccattcctgaagagtgcgttgaagcaacaaaggaatacatccatggcgaacaatatagatcagactccaaaacagttaaccaacaagcttacttttatgccagagacctcgaagtccatcccaaggacacatttgtgttcagtatagatggcaccgtactctctaataatccatactacaaaaa

SEQ ID NO: 11956 - DNA, 387 bp, Glycine max
  Clone ID: LIB3039-003-Q1-E1-D1
ggatttggatttgggggaagaattagtagaagatgattttttgaggtgaatgggctggaggaatctcaacaaccttcatcctgtgaagcagcagcacatggagtagttgcatacagagacacataataatggagaagaaaccctcgtgacgtccaatccctatcccaatcttgacgattgcatctatgacatccaaaccagacgccgtaagaggctacgcaagggtcagctccagtacctaatcaaatgacgtcgatggtctgaaacggcgatgacatgggaacctcttgtaaatctacagtccgttcctgatctcgttgaatgcttttgaagacagcctcaaatctgggaagcatcacaggcgcaagcgcaagcatgtagatgtgc

SEQ ID NO: 11957 - DNA, 385 bp, Glycine max
  Clone ID: LIB3039-003-Q1-E1-D10
atatttgagtgcagggattgtagcaactatgccatctatcacaagctatctgaggcgtggattggggtggcactttcccaaagtggtaggttttgagctcttcacatccctggtgatggcttttataagctggcaactgtttgctgcatgtcagagaccttcagtgtgagaaacctcattacataatgatcgaatcctgcttaactattttctggctagagttttgatccagggtcatctgtttctttttgctgctgcaatgctgtttctttaaatttcaagaatgttttcttgcggtagaatgttggctgcaattcattagaaatttttgtttattcagaaaattagagatatttaccccgaacatctgggattgataggttgc

SEQ ID NO: 11958 - DNA, 365 bp, Glycine max; identical to SEQ ID NO: 9382
  Clone ID: LIB3039-003-Q1-E1-D11

SEQ ID NO: 11959 - DNA, 246 bp, Glycine max
  Clone ID: LIB3039-003-Q1-E1-D12
aaaaggggcacaagtgagtttggtgattgaaataactaaaaacaatgttatgaaaatgaaagtccttgttttcatcgttgccacaattttggtaacatggcaatgccaagcctacgataagttccctctccgaattaacactggctatggtgaccgtactccggaagttaaatgcccaagtttgaagcttgctgttgaaacacacaacaaccttggcttttaaaacaatcctgaaaaattccttta

SEQ ID NO: 11960 - DNA, 364 bp, Glycine max
  unsure (1)..(364): unsure at all n locations
  Clone ID: LIB3039-003-Q1-E1-D3
caacaaaaggggaaaattcaaattcccacccattgcttcgcctcacaacagcacctgcagcagcaatggctcccaaacaaggtggaaaggctccggctcttgccgctaagaagaagcctgagaaggtcacgaatccgttttcgagaacgtccaacaattcggaatccgagggcgttcctccgaaaagactactagttcgtaagtgccaaagaatgttcaaattcagaggaagaagaggattctgaagcagaggttgaangttcccccagctttgaaccagtttaccaaaactcttgacaaaaacctagcaacaagtctgttcaagttgcttctgaagtacangcccgangacaaagctgaaaag

SEQ ID NO: 11961 - DNA, 420 bp, Glycine max
  Clone ID: LIB3039-003-Q1-E1-D4
aaacacaaaggggactaggtttcagctgtcgcgttaatcgtaccgcctagcattgatttggaaaagtccaacttcaaggatgagtaagcttcagagtgatgctctaagagaagctatctcaggaatcatggctgattccaaggaaaagaacaggaaatttgtggagaccattgaactccaaattgggctgaaaaactatgatccccagaaggacaagcgttttagtggctctgttaagttgcctcacattcctcgccccaagatgaagatttgtatgcttggagatgcccaacacgttgaagacgctgagaagatacgattggactacatggatgttgaggccttgaagaagcttaacacaaacaagaaattggtgaaaaaactagccaagaaatatcatgcctttttggcctctgaagc

SEQ ID NO: 11962 - DNA, 405 bp, Glycine max
  unsure (1)..(405): unsure at all n locations
  Clone ID: LIB3039-003-Q1-E1-D5
ggcacaagtgagtttgttgatcgagataactagaaacagtgtgatgaaaatgaaggtccttgttttcttcgttgctacaattttggtagcatggcaatgccatgcgtacgatatgttccctctccgaatgaacactggctatggtgcccgtactccggaagtgaaatgcgcaagttggaggcttgctgtggaagcacacaacatctttggctttgagaccattcctgaagagtgcgttgaagcancaaaggaatacatccatggcgaacaatatagattagactccaaaacagttaaccaacaagcttacttttatgccagagacctcgaagtcaatcccaaggacacatttgtgttcagtatagatggcaccgtactctctaatattcatactacanaaaacat

SEQ ID NO: 11963 - DNA, 433 bp, Glycine max
  Clone ID: LIB3039-003-Q1-E1-D6
ggcacaagtgagtttgttgatcgagataactagaaacagtgtgatgaaaatgaaggtccttgttttcttcgttgctacaattttggtagcatggcaatgccatgcgtacgatatgttccctctccgaatgaacactggctatggtgcccgtactccggaggtgaaatgcgcaagttggaggcttgctgtggaagcacacaacatctttggctttgagaccattcctgaagagtgcgttgaagcaacaaaggaatacatccatggcgaacaatatagattagactccaaaacagttaaccaacaagcttacttttatgccagagacctcgaagtccatcccaaggacacatttgtgttcagtatagatggcaccgtactctctaatattccatactacaaaaaacatggatatggggtggagaaattaactcga

SEQ ID NO: 11964 - DNA, 428 bp, Glycine max
  unsure (1)..(428): unsure at all n locations
  Clone ID: LIB3039-003-Q1-E1-D7
acggaagacgacagaagtgaagagaagagaagagaagggatttggatctgaaaagagaagatggggggaggaatggaagcaaacaagaacaagttcatagaggattggggcactgccagagagaatctggagttcaatttccgttggactcgccgcaaccttgctcttgttggcatcttcggcatcgctattcccgtcctcgtctacaagggcatcgtccgtgaattccatatgcaagatgaagataatggtcggccgtacaggaagttcatgtgagagagtatggagagtcttttgtaataattcgtcaagttagaccttgatattatgaggctacaaaccatgtttttttttccttaattcgcanaggcttgcttgcttttaagtactctagaactatcanacctctccatgtttgcctgtcttca

SEQ ID NO: 11965 - DNA, 422 bp, Glycine max
  unsure (1)..(422): unsure at all n locations
  Clone ID: LIB3039-003-Q1-E1-D8
gaaggtgcaagagtttgttgtgagctataagctagtttatcgtgaggagaatatgaagttgtttgttttctttgttgctgcagtagttttggtagcatggccatgccatggcgcaggctaccaaaggttccctctccgaatgaaaactggctatggtgagcgttcttcggaggtaaaatgcgcaagttttaggcttgctgtggaagcacacaacatccgagcctttaaaaccattcctgaagagtgcgttgaaccaacaaaggactacattaatggcgaacaatttagatcagactctaaaacagttaaccaacaagctttcttttatgctagtgaacgcgaagtccatcacaacgacatatttatattcggcatagataacaccgtactctctaatatcncatactatganaaacatggat

SEQ ID NO: 11966 - DNA, 345 bp, Glycine max
  Clone ID: LIB3039-003-Q1-E1-D9
ggtccttcacattctcctctctgaattcctcttattcaggaatttggagagactgttgatatagaaaggtaggataaaccagtggccaaggaatatatggcgttttctatggttttcattgttagcaacattatgctgcttttcagttcagcatttgccaaaactgctagtcctccctctctgagcccaactccagcaccagccccggcacccgactacgtgaacctcaccgagttgctcagtgttgctggtccatttcacaccttccttggataccttgagtccaccaaagtgattgacactttccaaaaccaagccaacaacactgaagaaggaattaccatc

SEQ ID NO: 11967 - DNA, 424 bp, Glycine max
  unsure (1)..(424): unsure at all n locations
  Clone ID: LIB3039-003-Q1-E1-E1
gagagttaaaaaggttactactcagatttagcagagcgtagagctgagctgcgaaaacccccaactccaacctctgttcatcgtctaccgcgctttcttttcaaccagaactatgattaagctttttaaagtaaaggaaaagcagagagaacttgcagaaaatgcaagtggcggaccacctgttaagaagcaaagtgctggagagttgcgtcttcacaaagatataagtgagctgaatctaccaaaatcatgtaccatgcaattccccaatggcaaagatgatctgatgaactttgaagtttcaattcgacctgatgatggatattacttaggtggcacatttntgttttcctttcaagtgtctcncatctatccacacgaagcaccaaaggttaagtgtaagacaaaggtctatcatccaaat

SEQ ID NO: 11968 - DNA, 383 bp, Glycine max
  Clone ID: LIB3039-003-Q1-E1-E10
ggcacaagtttgttgagatagctagaagcaataagatgaaaatgaaagtgcttgttttgtttgttgctacagttttggtagcatatgaatgccatggctcagactacaagaagttccctctccaaatgaaaactgggtttggtgggcaatacagcaatgaggtggcatgtgccagttggaggcttggcgtggaagcaaacaacgtagtcaagtggcaaactgttcctgcagcttgcggagagtacatagctgactacgttctaggagaccaatatagatcagattccaaaacagttaaccaacaagcttatttctatgctaaatccctcaaactcaccaactaaagatgtcctttgtcctggacgttgacgacactactctct

SEQ ID NO: 11969 - DNA, 371 bp, Glycine max
  unsure (1)..(371): unsure at all n locations
  Clone ID: LIB3039-003-Q1-E1-E11
ggaatagcatcggcagcaccacaacactgtgccctctttctctctttccttcgcagaagccatggcctcatttgcacgtggagccgcatctttaacccgcattggtctttccacttccaagactccccttcaactcatccaccgccgtggcctcgccgatcaccatggccctcccaaagttgcctgctggaaagatccaatgagcccatctaaatggaaggaggagcactttgtgattgtctctttaactggttggggactactcatctatgggggatacaagttggccacaggaggcaagggcaagaaagaagaggaattggcaaaagcataacactgaggtttggagaatattaanaatacaaagtgtt

SEQ ID NO: 11970 - DNA, 377 bp, Glycine max
  Clone ID: LIB3039-003-Q1-E1-E12
agggaattgcgccggaattccagatctaagcgttttgccactctgcacaaaggcgactttcaaaaggatcgtttgggcttataaccgattaagggtttacaaacacaacgttttttgtgataccaagacatcagaaaaatacaaagtgatgtccaggagaccggggaacccctatagaaggttcggtgacagtggcggtggactgttctcgaaatctaggtcgccaccggttttgtctattgcgctcgtagttgtgggaggtttgtttctcgttggctatgtgtatagaggctcaagtggaattggaaaccgtatagaatctgttagcggggttgaaggtgattatttgtgcagtagagaagtccaacaagcaaatc

SEQ ID NO: 11971 - DNA, 207 bp, Glycine max
  Clone ID: LIB3039-003-Q1-E1-E2
ggcagccaaaagaaaacacaagggggtacacctccggctgctacaattcaaatctaccagtacgcatagctcaactgtcaagacatctcactccagcctcagttcatcgactagcgcgattacctttcaccaagcccgatgaatcagcctgttacaatcagaggaagacaaagtgaacctgcggaaaatgcaagtagaaggtcaact

SEQ ID NO: 11972 - DNA, 415 bp, Glycine max
  Clone ID: LIB3039-003-Q1-E1-E3
ggggcgaggtacccaaaaattgatacattacagagtgcgttgttgctccttcgccacaactccctgccaacatgggtatctccagagattctatgcacaagaggcgtgccactggtggcaagaagaaggcatggaggaagaagagaaagtatgagcttggtcgccagcctgctaacactaagctgtcaagcaacaagacagtcaggaggatccgggttagaggtggaaatgtgaagtggagggcactgagattggatactggaaattactcctggggaagtgaagctgtaactcgcaagactcgtatactagatgtggtttacaatgcctcaaacaacgagcttgtgcgtactcagactcttgtaaaaagtgctattgttcaggttgatgctgctccattcaaacagtggtacct

SEQ ID NO: 11973 - DNA, 342 bp, Glycine max
  Clone ID: LIB3039-003-Q1-E1-E4
aaaaacaaaaggggaattgaagaattaaagaaaaagagaccataaccgaaaaagaagaagaagaagaaagctagggtttttgcaattgcaacgatggcgcatcaaggagaaccggcaaacctgcaatggggaaagctggaggaggacaacggagaggatttggacttcctcctgccgccgcggcaggtgatagggcccgacgagaacgggataaagaaggtgatcgagtacaagttcgacgaggacgggaacaaggtaaagatcaccaccaccacacgcacgcgcaaactcgccaacgcgcgtctcaacaaacgcgccatcgagcgccgctcctggcccaaa

SEQ ID NO: 11974 - DNA, 361 bp, Glycine max
  unsure (1)..(361): unsure at all n locations
  Clone ID: LIB3039-003-Q1-E1-E5
gaaggtgcaagagtttgttgtgagctataagctagtttatcgtgaggagaatatgaagttgtttgttttctttgttgctgcagtagttttggtagcatggccatgccatggcgcaggctaccaaaggttccctctccgaatgaaaactggctatggtgagcgttcttcggaggtaaaatgcgcaagttttaggcttgctgtggaagcacacaacatccgagcctttaaaaccattcctgaagagtgcgttgaaccaacanaggactacattaatggcgaacaatttagatcagactctanaacagtttaacaacaggctttcttttatgctagtgaacgcgaagtccatcacaacgacata

SEQ ID NO: 11975 - DNA, 426 bp, Glycine max
  Clone ID: LIB3039-003-Q1-E1-E6
cgcgtccggagagtcggtccatgatgacattgcgggagtgcggaggagtcttgttgtcgaacatctgccccttctacagtcaagaggctgtgacgttgctggaactctcagttgtcactttaatattagtagtcttggaatgagaagtcgcaggggacaaaatgcactggcttagcattttggcagtctatagtgacctgtcttcggacgtgcaatgcacaagtttcaagcctactctgaaatcaagatgttcataacctgtatcaccattcgttaacactgcctataaccaactcaggactacatatagtggctagcaatttagatcagactcaagatcagttaaccaacaagctttcttattacggtactgaacgcgatgtccatcaaagcaacatatttacaatcggccatacataacatcgt

SEQ ID NO: 11976 - DNA, 358 bp, Glycine max
  Clone ID: LIB3039-003-Q1-E1-E7
ggccgcataccctagcgttcctgttattctattgtggctgaaacaaaacagtgttgaacggcgaggtagaacgacgacccccttctgcgttttgaccttcaatctcaatcatggccaaagctgaaggtggcaaggaaccaataaatgaacaagcagtagcaaatatgtatgctgcaatgaggtctgagctcaaccaaatttactccaaaataactgaactggagatggaagttagtgagcacacattggttaccaatgccattcaaccacttgaccaatctagacgatgctatcgtatgattggaggggtgcttgtggagagaacatcaaagaggtcttgcctgctgtgcagcgaaat

SEQ ID NO: 11977 - DNA, 354 bp, Glycine max
  unsure (1)..(354): unsure at all n locations
  Clone ID: LIB3039-003-Q1-E1-E8
ggaggcagacacaagagacagcagagcagagatctagcgtattctctcgctctttctttcactgtcacagagccacatccatgggcttcccagccaacggcgcctctgcggcccagcccctaaacttcctcatctacggccgcacgggctggattggcggcctcctcggctccctctgccgggcccagggcatctccttccattacggctcgggccgcctcgagaaccgggcctccctcgaaaccgacatagccctcctcaagccctcncacgtcttcaacgccgccggcgtcacgggccgccccaacgtcgactggtgcgagtcccacanagtcgagaacatccgaaacaacg

SEQ ID NO: 11978 - DNA, 323 bp, Glycine max
  Clone ID: LIB3039-003-Q1-E1-E9
gacacttcaaaatcctctggtaacccttattttagctattctctctcattcatttgtgtactaagcagctagaatcattggcaaggaaaagaagccatgcctctttcatcatgtttgcaatgcttgatggcgtgatcactcatagccttgacaatcctgtaatatccaccactgttgaagatcagattaactatctagactccagatccatatgctggaaatcccccctcatgctcatacagtactactcctcgatctcatggccatggaaactctccaccctcacatcatcacagtagtctaagtactccatcaacatcctc

SEQ ID NO: 11979 - DNA, 211 bp, Glycine max
  Clone ID: LIB3039-003-Q1-E1-F1
ggcacaagtgagtttgttgatcgagataactagaaacagtgtgatgaaaatgaaggtccttgttttcttcgttgctacaattttggtagcatggcaatgccatgcgtacgatatgttccctctccgaatgaacactggctatggtgcccgtactccggaggtgaaatgcgcaagttggaggcttgctgtggaagcacacaacatctttggc

SEQ ID NO: 11980 - DNA, 402 bp, Glycine max
  unsure (1)..(402): unsure at all n locations
  Clone ID: LIB3039-003-Q1-E1-F10
ggcacaagtgagtttgttgatcgagataactaaaaacaatgtgatgaaaattaaaggtccttgttttcctccgttgccaaaattttggtaacaatgcaatgccatgcgtacgatatgtccctctccgaatgaacactggctaatggtgccgtactccggaagtgaaatgcgcaagttggaggcttgctgtggaagcacacaacatctttggctttgagaccattcctgaagagtgcgttgaagcaacanaggaatacatccatggcgaacaatatagattagactccaaaacagttaaccaacaagcttacttttatgccagagacctcgaagtccatcccaaggacacatttgtgttcagtatagatggcaccgtactctctaatattccatactacaaaa

SEQ ID NO: 11981 - DNA, 356 bp, Glycine max
  unsure (1)..(356): unsure at all n locations
  Clone ID: LIB3039-003-Q1-E1-F11
ggcacaagtgagtttgttgatcgagataacaaganacagtgtgatgaaaatgaaggtccttgttttcttcgttgctacaattttggtagcatggcaatgccatgcgtacgatatgttccctctccgaatgaacactggctatggtgcccgtactccggaggtgaaatgcgcaagttggaggcttgctgtggaagcacacaacatctttggctttgagaccattcctgaagagtgcgttgaagcaacaaaggaatacatccatggcgaacaatatagattagactccaaaacagttaaccaacaagcttacttttatgccagagacctcgaagtccatcccaaggacacatttgtgt

SEQ ID NO: 11982 - DNA, 242 bp, Glycine max
  Clone ID: LIB3039-003-Q1-E1-F12
gaaccaatcaacattctactacagcctctctcaaactcagtctctgaaccgtgagaccttgattacgttcttccctccattttggaaccacagctctgccacagttccaatccattaccactcccaaggctgccctagctctagcacctcatcctccggccttcaacggcacttctagtgctacatggtgcgtttgccaagatcgaagccaatcgattcagtccaagacgttagactaagcc

SEQ ID NO: 11983 - DNA, 355 bp, Glycine max
  unsure (1)..(355): unsure at all n locations
  Clone ID: LIB3039-003-Q1-E1-F2
ggcacaagtgagtttgttgatcgagataacaagaaacagtgtgatgaaaatgaaggtccttgttttcttcgttgctacaattttggtagcatggcaatgccatgcgtacgatatgttccctctccgaatgaacactggctatggtgcccgtactccggaagtgaaatgcgcaagttggangcttgctgtggaagcacacaacatctttggctttgagaacattcctgaagagtgcgttgaagcancanaggaatacatccatggcgaacaatatagattagactccanaacagttaaccaacaagcttacttttaatgcagagaactcgaagttcatccaangacacatttgtgt

SEQ ID NO: 11984 - DNA, 304 bp, Glycine max
  unsure (1)..(304): unsure at all n locations
  Clone ID: LIB3039-003-Q1-E1-F3
ggagggcaaaggaaatggttcaccgtgccccatatccttcaaccctttggctattcttatccattaagtacatcttcacatattatcatgatacaccatcttctgctgcatcataagagttggatgttaagagcatggctgcacaagctcntgtctcatcatcatctcgtatcttcacagcggacgctgcacgagatagtcttggtgcaagatcactcgactctccatgttgattcaccacataagcgtccgtacatgttaaagcacctgctaacctgcctgtcaagcatcgatcagacaaacc

SEQ ID NO: 11985 - DNA, 316 bp, Glycine max
  Clone ID: LIB3039-003-Q1-E1-F4
ggatccatcagtcgtgctacgactgcaagacaacgagaggttgggatttgctgagcacttagcgtccatggttaacaaatctgcaattgtacttaatccctcttagtctcaaaaaatcctaagctctcgtcatctcgtaaactgcagtgttcgctcagtaaaagaaagacgtagcgaacgcttttgccaattccagcagcatcagtttcgcttcagacaattcgcgcgtcaatggcttcatctgccatcacatacgccgagacttaccattttctgttcactacgtgtggttccgtaagatctatagaacacccgt

SEQ ID NO: 11986 - DNA, 357 bp, Glycine max
  unsure (1)..(357): unsure at all n locations
  Clone ID: LIB3039-003-Q1-E1-F5
ggcacaagtttgttgagatagctagaagcaataagatgaaaatgaaagtgcttgttttgtttgttgctacagttttggtagcatatgaatgccatggctcagactaccagaagttccctctccaaatgaaaactgggtttggtgggcaatacagcaatgaggtggcatgtgccagttggaggcttggcgtggaagcaaacaacgtagtcaagtggcaaactgttcctgcagcttgcggagagtacatagctgactacgttctaggagaccaatatagatcagattccaaaacagttaaccaacaagcttatttctatgctaaatccctcaaactcaccancaaagatgtctttgtct

SEQ ID NO: 11987 - DNA, 423 bp, Glycine max
  Clone ID: LIB3039-003-Q1-E1-F7
gagacagggaactggagacagatatggattggcatcacggcacaaagccacttgttcctcggccagagaccttaagcttcttctacaactataactacaacagtccatatccaggagtggaagtgaaacaagcagcattgatggagacaggagaaaggtcagttccagcattaatggacagcagaaacaaagagaagaagaagcgattaacaaataaccagatagagttattggagaagagttttcaagaagagataaagttggaccctgaaaggaagatgaagctttccaaggagctaagccttcagcctcgccaaatcgctgtttggttccaaaatagacgaacaaggtggaagaccaagcagcttgagcacttgtacgatgtgcttaaacaccaatatgatgtcgtctccaacgaaaagc

SEQ ID NO: 11988 - DNA, 398 bp, Glycine max
  Clone ID: LIB3039-003-Q1-E1-F8
tcagtaaagctgcaacagcaagacaacgagagaatgggagtgaatgaataatgagcgtcattaatttacgattttgccactgttcccaactcctcctcctctcatgatacccgaagctctcttcttcctcgcaaactgcaatgttaactctgagaaagagatacctaacgaccccttttgccatttcctgcaaaacccgtttctcttcttcaattcgcgcgtccatggcttcaccctccatcacagacgccgaaacatagccgttttctgttctcttcgtgtgcctcggcaacatctgcagaagccccgctgctgaaggagtcttcactgacttagtcaacaaaagggacctcaattcgaagttcaaaatcgactctgctggcaccatcaattaccac

SEQ ID NO: 11989 - DNA, 366 bp, Glycine max
  Clone ID: LIB3039-003-Q1-E1-F9
gagaatttttgggggctatgacccttgttattccaattatgtagaagaatacttcaatagaaaagatgttcagtcatcttttcatgcagatactaaaagagacactaacgtagcatggaaggtttgcaagtggccttaagatatggatttatagtggagacgcagatggaagagtgccggtgataggaacacgatattgcgttgaggctctgggattacctttaaagtctaggtggcgaacttggtaccatgataatcaggttggaggaaggatagttgaatatgaagggttgacatatgtgacagtgagaggagcaggtcacttggtgccactgaacaagcctagtgaagctctctctctaattc

SEQ ID NO: 11990 - DNA, 385 bp, Glycine max
  Clone ID: LIB3039-003-Q1-E1-G1
gaccgttccatttctcaacaacttctgctacttcctactccaaccgcacttctgctccgcaattatcatgggcaaggtcaagatcggaatcaacggatttggaagaattggccgtttggtagccagagtggctctgcagagagacgatgttgaactcgttgccgttaacgaccctttcatcaccaccgattacatgacatacatgtttaaatacgacagtgttcatggacactggaagcatcacgatgtcaccgttaaggacgagaagacccttctcttcggtgacaagccagtcactatttttggacacagaaaccctgaagagattccatgggggtcaactggagctgacatcattgttgagtccaccggagttttcaccgat

SEQ ID NO: 11991 - DNA, 361 bp, Glycine max
  unsure (1)..(361): unsure at all n locations
  Clone ID: LIB3039-003-Q1-E1-G10
ggtgcacaagtgagtttgttgatcgagataactaaaaacagtgttgatgaaaatgaaggtccttgttttcttcgttgcaacaattttggtagcatggaaatgccatgcgtacaatatgttccctctccgaatgaaaactggctatggtgcccgtactccggaggtgaaatgcgcaatttggaggcttgctgtggaagcacacaacatctttggctttgaaaccattcctgaagagtgcgttgaagcaacanaggaatacatccatggcgaacaatatagattagactccaaaacagttaaccaacaagcttacttttatgccagagacctcgaagtccatcccaaggacacatttgtgttc

SEQ ID NO: 11992 - DNA, 357 bp, Glycine max
  unsure (1)..(357): unsure at all n locations
  Clone ID: LIB3039-003-Q1-E1-G11
ggttctagtgtgtgattgtttgttgttgtaactcgttcttcttcttttgttgttctgtgtttgtgtttgttttttctctcacctgaaaatgtcttgctgcggtggtaactgtggttgcggaagctcctgcaagtgcggcaacggctgcggatgctgcaagatgtacccagacttgagctacactgagtcaaccaccaccgagaccttggtcatgggagtggcacctgttaaggctcaatttgagggtgctgaaatgggtgtgcccgctgagaacgatggctgcaaatgtggaccaaactgctcctgcaacccctgcacttgcaagtgangtgttgggagagcaagcttcaagcagag

SEQ ID NO: 11993 - DNA, 349 bp, Glycine max
  Clone ID: LIB3039-003-Q1-E1-G12
gaaagcaaggtgtgatgtgttcttgaacatgttgctggtcagtgttggggttgtcatctcctcatatggggaaattcacttttaaaatagttggaaaagtttaccaggtcacaggaatatttgcagaacctttaaaactggccttaacgcaagttcttctgcaaaaaaaggggttgactctaaatcctattacaagcttatattacatagctccatgcatttttgtgtttctctttgtgccttggtacctactggaaaagcctgtaatggaagtttcgcagattcagtttaatttttggatcttcttgtccaacgctatatgtgctctagccttaaatttctccatttt

SEQ ID NO: 11994 - DNA, 386 bp, Glycine max
  Clone ID: LIB3039-003-Q1-E1-G2
gaaggtgcaagagtttgttgtgagctataagctagtttaacgtgaggagaatatgaagttgtttggtttccttggtgctgcagtagttttggtagcatgggcatgccatggcgcaggctacaaaaggttccctctccgaatgaaaactggctatggtgagcgttcttcggaggtaaaatgcgcaattttaaggcttgctgtggaagcacacaacatccgagcctttaaaacaattcctgaagattgcgttgaaccaacaaaggactacattaatggcgaacaatttagattagactctaaaacagttaaccaacaagctttcttttatgctagtgaacgcgaagtccatcacaacgacatatttatattcggcatagataacaccg

SEQ ID NO: 11995 - DNA, 385 bp, Glycine max
  unsure (1)..(385): unsure at all n locations
  Clone ID: LIB3039-003-Q1-E1-G4
ggtcagaattcttgaaacatacgggttggaggaggaagatgagactatgcctccaggggatgcttctcattcagggttcaactttggtagcagtgacgctcctgctgtgccgtccggtggattcaactttaattacaagatattcatgctctactggggagttttggttggtctatctgtgaagtcctcctttatgacacgacagcagttgggggacaagtcaacgtcttgtcattgtcctaatgtccttgggttgtacgaagtccagcaagtaaatacatggttgctggactgccttgggtttttgcaatgcctgatatttcatatctcatggtgtaaaatgctttgtggctatatttttttgcancgtagagaatactagagt

SEQ ID NO: 11996 - DNA, 397 bp, Glycine max; identical to SEQ ID NO: 7408
  Clone ID: LIB3039-003-Q1-E1-G5

SEQ ID NO: 11997 - DNA, 312 bp, Glycine max
  Clone ID: LIB3039-003-Q1-E1-G6
gattgagtacaacttcacattttagaagaataccccctcttttgctgcatcagaggagttgtaaattaagagcatggctgcacaagctcttgtatcatcatcttctcttaccttctcagcggaggctgcaagacaaagtcttggaccaagatcactccaatctccatttggcttctccagaaaagcctcctttcttgttaaggcagctgctaccccccctgtcaagcaaggattagacagacctttgtggtttgcatcaaagcaaagtctttcttacttggatggaagccttccgggtgactatggatttga

SEQ ID NO: 11998 - DNA, 302 bp, Glycine max
  Clone ID: LIB3039-001-Q1-E1-H7
ggcacaagtgagtttgttgatcgagataactagaaacagtgtgatgaaaatgaaggtccttgttttcttcgttgctaaaattttggtagcatggcaatgccatgcgtacgatatgttccctctccgaatgaacactggctatggtgcccgtactccggaagtgaaatgcgcaagttggaagcttgctgtggaaacacacaacatctttggctttgagaccattcctgaagagtgcgtttaagcaacaaaagaatacatccatggcgaacaatatagattagactccaaaacagttaaccaac

SEQ ID NO: 11999 - DNA, 267 bp, Glycine max
  Clone ID: LIB3039-001-Q1-E1-A1
ggctctgatcactcttttaccattattgacaatggtggtcgagtctctgccatgagacatgggaggaaagtgcccaaactcaacagaccccctgatcagcgccgcgcactcatccgaggccttacaactcagctccttaaatatggtcgcataaagaccaccagagcaagggccagtgcaattaggaagtttgttgataaaatgatcactttggcaaaggatggttctcttcataaaagaagacaagcccttgggttcatctatgag

SEQ ID NO: 12000 - DNA, 421 bp, Glycine max
  unsure (1)..(421): unsure at all n locations
  Clone ID: LIB3039-001-Q1-E1-A10
ggtgcaagagtttgttgtgagctataagctagtttatcgtgaggagaatatgaagttgtttgttttctttgttgctgcagtagttttggtagcatggccatgccatggcgcaggctaccaaaggttccctctccgaatgaaaactggctatggtgagcgttcttcggaggtaaaatgcgcaagttttaagcttgctgtggaatcacacaacatccgagcctttaaaaccattcctgaatagtgcgttgaaccaacaaaggactacattaatggcgaacaatttagatcagactctaaaacagttaaccaacaagctttcttttatgctagtgaacgcgaagtccatcacaacgacatatttatattcggcatagataacaccgtactctctaatatcncataccatgaaaaacatggatat

SEQ ID NO: 12001 - DNA, 261 bp, Glycine max
  Clone ID: LIB3039-001-Q1-E1-A11
ggcacaagtgagtttgttgatcgagataactagaatcagtgtgatgaatatgaacgtccttgatttcttcgttgctacaattttggtagcatggcaatgccatgcgtacgatatgttccctctccgaatgaacactggctatggtgcccgtactccggaggtgaaatgcgcaagttggatgcttgctgtggaggcacacaacatctttggctttgacaccattcctgaagagtgcgttgaatcaacaaaggaatacatcca

SEQ ID NO: 12002 - DNA, 266 bp, Glycine max
  Clone ID: LIB3039-001-Q1-E1-A12
gttgagagaacaaattgctgagggacaacctaggacacataggccttggaagaagataatggttattgtggaggggatatacagcatggaaggagagctttgcaaacttccagaggtcatagctgtatgtaaaaaatacaaggcttatacatatttggacgaagcacacagcattggagctgtgggcaagacaggaagaggtgtttgtgagctcttgggtgtggatactgctgatgttgacattatgatgggaacattcaccaaat

SEQ ID NO: 12003 - DNA, 356 bp, Glycine max
  Clone ID: LIB3039-001-Q1-E1-A2
ggcacaagtgagtttgttgatcgagataactagaaacagtgtgatgaaaatgaaggtccttgttttcttcgttgctacaattttggtagcatggcaatgccatgcgtacgatatgttccctctccgaatgaacactggctatggtgcccgtactccggaggtgaaatgcgcaagttggaggcttgctgtggaagcacacaacatctttggctttgagaccattcctgaagagtgcgttgaagcaacaaaggaatacatccatggcgaacaatatagatcagactccaaaacagttaaccaacaagcttacttttatgccagagacctcgaagtcgatcccaaggacaaatttgtgt

SEQ ID NO: 12004 - DNA, 405 bp, Glycine max
  Clone ID: LIB3039-001-Q1-E1-A4
ggcacaagtgagtttgttgatcgagataactagaaacagtgtgatgaaaatgaaggtccttgttttcttcgttgctacaattttggtagcatggcaatgccatgcgtacgatatgttccctctccgaatgaacactggctatggtgcccgtactccggaggtgaaatgcgcaagttggaggcttgctgtggaagcacacaacatctttggctttgagaccattcctgaagagtgcgttgaagcaacaaaggaatacatccatggcgaacaatatagatcagactccaaaacagttaaccaacaagcttacttttatgccagagacctcgaagtccatcccaaagacacatttgtgttcagtataaatggcaccgtactctctaatattccatactacaaaaaaca

SEQ ID NO: 12005 - DNA, 417 bp, Glycine max
  Clone ID: LIB3039-001-Q1-E1-A5
gctagtggcagtgaccaaactccatttctcactcgccgtcgtctcttccgtctagggtttctcctcttcacaaaaatggttgccgcaaaaaaaactaagaagacccatgagagcatcaacaacaggctcgctctcgtcatgaagagtggcaaattcaccctcggttacaagaccgttctcaaatctcttaggagctccaaagggaaattgattatcattgctaacaactgtccccctttgaggaagtcagagattgaatactatgctatgttggcaaaggttggggttcatcattacaatgggaacaatgtggatttgggcactgcatgtggcaaatattacagagtgtgctgccttagcattattgatcctggtgattcggatatcatcaagacactgcctggcgaacagtaaagt

SEQ ID NO: 12006 - DNA, 362 bp, Glycine max
  unsure (1)..(362): unsure at all n locations
  Clone ID: LIB3039-001-Q1-E1-A6
gacacaaactttattacagttgttgtattgtaattaagcaagaatattaggcaatggagtcttctagaacttcaactactcttgctctttttttaaccatcaatttgcttttctttgtcatggcaagtggctgctacacttgcacacagcctaagccaaaccctatcccattcccttaccctaaccctagtcctgccgcgaagagctgccccagggacgcacttaagctcggagtgtgcgcaaacgtgcttaatggaccaattggtgctattgtanggtcaccaccggaccacccatgttgctcagtgctagaagggcttcttgatcttgaagttgcggtttgcctctgcactgccatcaaa

SEQ ID NO: 12007 - DNA, 405 bp, Glycine max
  Clone ID: LIB3039-001-Q1-E1-A7
ggcacaagtgagtttgttgatcgagataactagaaacagtgtgatgaaaatgaaggtccttgttttcttcgttgctacaattttggtagcatggcaatgccatgcgtacgatatgttccctctccgaatgaacactggctatggtgcccgtactccggaggtgaaatgcgcaagttggaggcttgctgtggaagcacacaacatctttggctttgagaccattcctgaagagtgcgttgaagcaacaaaggaatacatccatggcgaacaatatagattagactccaaaacagttaaccaacaagcttacttttatgccagagacctcgaagtccatcccaaggacacatttgtgttcagtatagatggcaccgtactctctaatattccatactacaaaaaaca

SEQ ID NO: 12008 - DNA, 436 bp, Glycine max
  unsure (1)..(436): unsure at all n locations
  Clone ID: LIB3039-001-Q1-E1-A8
ggttttgtagttgcatgaatgaattttcaaagcacaagggtttatgctctctcttcttccacgtccacttcttacaacccctttccctctctccctcaatatataaactcttcactcacattcacagacccacttttcttgcaactcaaataagaccctgagtgagtgagccacttctctttttaaccctttttgccactgccccaacacaaaacaaaggcacaaaactggggaggcttgtgtgtgtgattgcagcagccatgggggtctcttctcagagcacccctttgtattgcccctcttgttcncgccacttccgtgctgctctcttttcttggtccttgttggctccctctcaatcacacctccccaggttctttttccttcaaagtggtcatcttttctccattgggtgttgtcttcttctttgccttgg

SEQ ID NO: 12009 - DNA, 125 bp, Glycine max
  Clone ID: LIB3039-001-Q1-E1-A9
cgtcgctaaagcaccacaaaaaggggagcagggggctcatctctatttgtcgaccgcaataactgtcaataatgcgtcgcttctctgcgtcattgatgtctacgccgctagacttcttcgaccat

SEQ ID NO: 12010 - DNA, 280 bp, Glycine max
  Clone ID: LIB3039-001-Q1-E1-B1
agggagctgaaagaagaaaaaatgtctggcgtgaagagagcactgaggcagttcaccttcggaaccggcaagaccgccggtcgcaactcggcggggcgcataacgtccttccaccgcggcggcggagccaagcgcttgcaacgaaccgtcgatcacaaacggaataccgcttcttctctcggcgtcgtcgaaaggatcgagtacgaccctaaccgctcctccaaaatccgcctcgttcgctggatcgaaagcgtccatcaccgtcgccgccgcgctgcct

SEQ ID NO: 12011 - DNA, 365 bp, Glycine max
  Clone ID: LIB3039-001-Q1-E1-B10
gaccacattccaaaacacaaacacatacattgtagtatcacttttgtctcggaatttgttcttttgagttatggcaagcttaaaggttgcatgtgtggttttgatgtgcatggctgtgatgagtgcaccaatgatggtgcaagccgtgtcatgcaatgatgtttctgtgaacctagcaccgtgcctatcttacctgatgcagggtggagatgttccagaatcgtgctgtagcggagtgaggaacattctgggttctgccagcaccacctttgacaaacaaaccgtgtgcaaatgtcttcagcaagctgctaataactatggcatcaacgacgaatacgctcaagcactccccgcccgctgcaatg

SEQ ID NO: 12012 - DNA, 395 bp, Glycine max
  Clone ID: LIB3039-001-Q1-E1-B11
gagcctcagcagaagcataacgaggagaagcagaacgagcaaaagcaatggcgccgaagaagccgagaaccacgacaaggaaccctgatttggttagggggattggcaagtattcgaggtcgcagatgtaccacaagaggggcatctgggccatcaacgccaaaagctgtggcgttttgctccgccacgatcccaagcccaagcccgaagccccggcccagaagccgcccatgttctaccccgcggacgatgttaagaagcccctcgtcagacaagcacaagcccaaacccgcgaaactcatggctagcattactctacggactgtgttgatcctgctgctgggaagttcaagggaaatacggttgttttcctgaagcagctcccatctggattg

SEQ ID NO: 12013 - DNA, 410 bp, Glycine max
  Clone ID: LIB3039-001-Q1-E1-B12
ggcacaagtgagtttgttgatcgagataactagaaacagtgtgatgaaaatgaaggtccttgttttcttcgttgctacaattttggtagcatggcaatgccatgcgtacgatatgttccctctccgaatgaacactggctatggtgcccgtactccggaggtgaaatgcgcaagttggaggcttgctgtggaagcacacaacatctttggctttgagaccattcctgaagagtgcgttgaagcaacaaaggaatacatccatggcgaacaatatagatcagactccaaaacagttaaccaacaagcttacttttatgccagagacctcgaagtccatcccaaggacacatttgtgttcagtatagatggcaccgtactctctaatattccatactacaaaaaacatggat

SEQ ID NO: 12014 - DNA, 434 bp, Glycine max
  Clone ID: LIB3039-001-Q1-E1-B2
gatcgtagcgccagactgagaggaagagagagggagattctttgtttgctaccttctctcggaaaaatggttacgttcaggtttcaccagtaccaggtggttgggagggctcttcccacggaagcagatcagcaccccaagatctaccgaatgaagctctgggccaccaacgaggttcgcgccaagtccaagttctggtattttctgaggaaactgaaaaaggtggagaagagcaatggccaagtgcttgccatcaacgagatttttgagaagaacccaaccaaaattaagaactatggtatatggttgcggtatcagagtaggactggttaccacaacatgtacaaggagtaccttgacaccactctaaacggtgcagttgagcgatgttccaatgaaatggcttctcgtcacagggtcaggagcccttgcat

SEQ ID NO: 12015 - DNA, 266 bp, Glycine max
  Clone ID: LIB3039-001-Q1-E1-B3
ggacgggaagaaacgcatcgagcgtggagaaagagaaggatgatgaggttaaggtggagtgtactcgtaatggtcacgttcgctgtttctctgttttggcttggacccctgcaagtcaaagcctctaattctgtttccgccttcgttcaaaacgccatctactccaacagaatcgccgttttctccaaatcctattgcccctactgtttgcgcgccaaacgcttgcttgctgaactcaatgaaaaaccttttgtggtggagctcga

SEQ ID NO: 12016 - DNA, 361 bp, Glycine max
  unsure (1)..(361): unsure at all n locations
  Clone ID: LIB3039-001-Q1-E1-B4
gaccacattccaaaacacanacacatacattgtagtatcacttttgtctcggaatttgttcttttgagttatggcaagcttaaaggttgcatgtgtggttttgatgtgcatggctgtgatgagtgcaccaatgatggtgcaagccgtgtcatgcaatgatgtttctgtgaacctagcaccgtgcctatcttacctgatgcaaggtggagatgttccagaatcgtgctgtagcggagtgaggaacattctgggttctgccagcaccacctttgacaaacaaaccgtgtgcaaatgtcttcagcaagctgctaataactatggcatcaacgacgaatacgctcaagcactccccgcccgctgc

SEQ ID NO: 12017 - DNA, 415 bp, Glycine max
  unsure (1)..(415): unsure at all n locations
  Clone ID: LIB3039-001-Q1-E1-B5
ggcacaagtgagtttgttgatcgagataactagaaacagtgtgatgaaaatgaaggtccttgttttcttcgttgctacaattttggtagcatggcaatgccatgcgtacgatatgttccctctccgaatgaacactggctatggtgcccgtactccggaggtgaaatgcgcaagttggaggcttgctgtggaagcacacaacatctttggctttgagaccattcctgaagagtgcgttgaagcaacaaaggaatacatccatggcgaacaatatagatcagactccanaacagttaaccaacaagcttacttttatgcccagagactcgaagtccatcccagggacacatttgtgttcagtatagatggcaacgtactctctaatattccatactacaaaaaacatggatattgg

SEQ ID NO: 12018 - DNA, 406 bp, Glycine max
  Clone ID: LIB3039-001-Q1-E1-B6
ggcacaagtgagtttgctgatcgagataactagaaacagtgtgatgaaaatgaaggtccttgttttcttcgttgctacaattttggtagcatggcaatgccatgcgtacgatatgttccctctccgaatgaacactggctatggtgcccgtactccggaggtgaaatgcgcaagttggaggcttgctgtggaagcacacaacatctttggctttgagaccattcctgaagagtgcgttgaagcaacaaaggaatacatccatggcgaacaatatagatcagactccaaaacagttaaccaacaagcttacttttatgccagagacctcgaagtccatcccaaggacacatttgtgttcagtatagatggcaccgtactctctaatattccatactacaaaaaacat

SEQ ID NO: 12019 - DNA, 404 bp, Glycine max
  unsure (1)..(404): unsure at all n locations
  Clone ID: LIB3039-001-Q1-E1-B7
ggcacaagtgagtttgttgatcgagataactagaaacagtgtgatgaaaatgaaggtccttgttttcttcgttgctacaattttggtagcatggcaatgccatgcgtacgatatgttccctctccgaatgaacactggctatggtgcccgtactccggaggtgaaatgcgcaagttggaggcttgctgtggaagcacacaacatctttggctttgagaacattcctgaagagtgcgttgaagcaacanaggaatacatccatggcgaacaatatagatcagactccaaaacagttaaccaacaagcttacttttatgccagagacctcgaagtccatcccaaggacacatttgtgttcagtatagatggcaccgtactctctaatattcatactacaaaaaaca

SEQ ID NO: 12020 - DNA, 397 bp, Glycine max
  Clone ID: LIB3039-001-Q1-E1-B8
ggaacttctcacgttcatttctacacatccctagctctgtcgttccgtcgttgacgatggcgtttcgggtgcgaagccctgacctccgctctctctttcttctctctctcttgtccatcgcttccgccaatgtcttcttcgaagagcgtttcgatgacgggtgggaaaatcgatgggttaaatcagattggaaaaaagatgagaacgtggctggggagtggaaccacacctctggtcaatggaatggagacgctaatgacaaaggtattcaaaccagtgaggattacagattctatgctatttcagctgagtaccctgaattcagcaacaagggtaagacactagtctttcaattttctgttaagcacgaacagaagcttgactgtggtggtggcta

SEQ ID NO: 12021 - DNA, 386 bp, Glycine max
  Clone ID: LIB3039-001-Q1-E1-B9
gacaacacagaagcggtaagaagaagaacgaagaacagttagcactagtttggcgtggtaattggtagagcgagaaacagagaaatggacgattacacgacggaaatgatggacctgaagacactggtcacgcgcactctcgagaagaaaggcgtcctcgccaggatccgtgccgagctcatggcgagtgtgttcgaagccatcgaagaggaagatcgtgtgattgacaaggaacaaggtctacctcctgcattgctaggtagttgcaacgatcgagctaagcagcttcacgcttctcctccagggagacttcttacggcaatgatatgtgaataccttgactgggcgcagctcagtcatacgctaaaagtttatcttccggaatg

SEQ ID NO: 12022 - DNA, 405 bp, Glycine max
  Clone ID: LIB3039-001-Q1-E1-C1
ggggaaaccctaattctgcgtggtgggtgaaaatggcggtacccttgctctccaagaggatcgtgaagaagcgcgtcaagaagtttatacgcccccagagtgatcgcaagatctccgtcaggccaagctggcgcagacccaagggtattgattctcgtgtcaggagaaagttcaaaggatgcactttgatgcccaacattggttatggctcagacaagaaaacccgccattatctaccaaatggtttcaagaaatttgtcgtgcacaatgtgaaagacctggaacttctcatgatgcataacaggacatactgtgctgagattgctcacaatgtatccacaaggaagaggaaagacatagttgagagagctgctcaccttgatgttgccttgacgaacaagacgg

SEQ ID NO: 12023 - DNA, 246 bp, Glycine max
  Clone ID: LIB3039-001-Q1-E1-C11
tccaggtctcccacacgtccgacaggagcaaaaagaggagcacaagtggcatagttgattttgatgatcaagataactgtagataatgttatgagtccttgtgtccttcgttgctacaattctagaatcatggtaacatgatacttacaagagtttcacacgttcactcacacacagtgatactgtgctacgtaccccgtacgtcagatgctgcaattgcaagcttgctgtttgatcacacaacat

SEQ ID NO: 12024 - DNA, 419 bp, Glycine max
  unsure (1)..(419): unsure at all n locations
  Clone ID: LIB3039-001-Q1-E1-C12
gaaggtgcaagagtttgttgtgagctataagctagtttatcgtgaggagaatatgaagttgtttgttttctttgttgctgcagtagttttggtagcatggccatgccatggcgcaggctaccaaaggttccctctccgaatgaaaactggctatggtgagcgttcttcggaggtaaaatgcgcaagttttaagcttgctgtggaagcacacaacatccgagcctttaaaaccattcctgaagagtgcgttgaaccaacaaaggactacattaatggcgaacaatttagattagactctaaaacagttaaccaacaagctttcttttatgctagtgaacgccaagttcatcacancgacatatttatattcggcatagataacaccgtactctctaatatcccatactatgaaaaacatg

SEQ ID NO: 12025 - DNA, 406 bp, Glycine max
  unsure (1)..(406): unsure at all n locations
  Clone ID: LIB3039-001-Q1-E1-C2
ggcacaagtgagtttgttgatcgagataactagaaacagtgtgatgaaaatgaaggtccttgttttcttcgttgctacaattttggtagcatggcaatgccatgcgtacgatatgttccctctccgaatgaacactggctatggtgcccgtactccggaggtgaaatgcgcaagttggaggcttgctgtggaagcacacaacatctttggctttgagaccattcctgaagagtgcgttgaagcaacaaaggaatacatccatggcgaacaatatagatcagactccaaaacagttaaccaacaagcttacttttatgccagagacctcgaagtccatcncaaggacacatttgtgttcagtatagatggcaccgtactctctaatattccatactacaaaaaacat

SEQ ID NO: 12026 - DNA, 360 bp, Glycine max
  Clone ID: LIB3039-001-Q1-E1-C3
gatagcgaaacagagagtggtttcagtgagtgatcggtgttcacttgatccttcataagtcgtcatcatcatcatcatcatcaccgttgattgaagaagatgccgatcagaaacatcgccatcggaaggcctgaagaggctactcaccccgacacgttgaaggcggggttggctgagttcatctccaccttgatcttcgtgttcgccggttcaggttccggcatcgcctacaacaagctcaccgacaacggcgccgccactcccgccggcctcatctccgcttccatcgcccatgctttcgccctcttcgtcgccgtctccgtcggcgccaacatctccggcggccacgtcaaccccgcc

SEQ ID NO: 12027 - DNA, 395 bp, Glycine max
  unsure (1)..(395): unsure at all n locations
  Clone ID: LIB3039-001-Q1-E1-C4
gataataagcttttttctctttctgtttgttcttcttccttattttcttccctagtcaaggagattcatctctgcaggttgttttagaaaagaaaaaatggtgaagatttgctgcattggtgctggatatgtggggggtccaacaatggcagtcattgctctgaagtgcccctccattgaagtggctgttgttgacatctccaaatcccggattgcagcatggaacagtgaccagcttcctatctatgagccaggccttgatggtgtggtgaagcaatgtcgtggcaaganacttttcttcagcactgatgttgagaaacatgtctatgaggcagacatagtgtttgtctctgtcaacaccccgaaaaaaaactcgcggtcttggagccggtaag

SEQ ID NO: 12028 - DNA, 435 bp, Glycine max
  Clone ID: LIB3039-001-Q1-E1-C5
gatcgtagcgccagactgagaggaagagagagggagattctttgtttgctaccttctctcggaaaaatggttacgttcaggtttcaccagtaccaggtggttgggagggctcttcccacggaagcagatcagcaccccaagatctaccgaatgaagctctgggccaccaacgaggttcgcgccaagtccaagttctggtattttctgaggaaactgaaaaaggtgaagaagagcaatggccaagtgcttgccatcaacgagatttttgagaagaacccaaccaaaattaagaactatggtatatggttgcggtatcagagtaggactggttaccacaacatgtacaaggagtaccgtgacaccactctaaacggtgcagttgacgcaatgtacaatgaaatggcttctcgtcacagggtcaggagcccttgcatc

SEQ ID NO: 12029 - DNA, 405 bp, Glycine max; identical to SEQ ID NO: 9625
  Clone ID: LIB3039-001-Q1-E1-C6

SEQ ID NO: 12030 - DNA, 433 bp, Glycine max
  Clone ID: LIB3039-001-Q1-E1-C7
gactaccaacaacactgccaccactaaagcactgacaactctccttcactccaccactcctcactcttctcattcagatctacccaacacacacacaccaaaaaataaaataaaaatgcaactccaacccactctctccactctctacctctcccttttgttaacaataacgttaacatctccaaccttggcagcacaaagcaagccgcaggatctggtccggtcctcgtgcgtgcacgcgcggtacccgcgtctgtgcctgcgcaccctctcgaactacccgggtcccgccaacacgccgttagacgtggccagggcagctttgagggtaagcctggcccacacgcgccgggcctccaaattcctccatgcactttctcatggaggcgctgccgccatgagcaagcgccagcgctccgcgctgcgcgactgt

SEQ ID NO: 12031 - DNA, 433 bp, Glycine max
  Clone ID: LIB3039-001-Q1-E1-C8
gaaattcacacacacatattctttgttgcaatatcacaaacacctcgtccgtcacaatgcaactagctgtggcggccaacgctgtcgtttcaccgtcgccgttccgacctcatccccttctccggtcatccttctccggcgtctccgttaagctcactccccaatccataacgttttcacgcttgaagcccctcaccgtcttcgccgccaccaagaaggccgtcgctgtcctcaaggggacctccgccgtcgaaggcgtcgccactctcatccaagaagacgatggcccgacgacagtttctgttagcatcactggccttactccggggcttcatggttttcacctacatgagtatggtgataccacaaatgggtgtatatcaacaggagcacattttaatcctaataacttgacacatggtgctcctgagga

SEQ ID NO: 12032 - DNA, 417 bp, Glycine max
  Clone ID: LIB3039-001-Q1-E1-C9
gacacagagagcggttctcatattttggagaatccgaaaaacacgttgacgaaggtcccattcccactaccgaagcaaattacgaagatgaagcagcagagagtggagtttatgggcatgggcatgggcatgggcatgggcctgggccttttggtggtgatgatggcatgtgggtctgcgagtggtgcggatgatttggcaaccaagtgttcagcggtgattcagaaggtaataacgtgtttggatttcgcgaaagggaaggaagaaacgccgaaaaagcaatgttgcgaaccaacaacgttcattaaggagaagaacccaaagtgcctctgctacatcattgaagagacccacaagggtagcccacaggttaaaagcttgggcattcaagaagccaagctgcttcagctcccttct

SEQ ID NO: 12033 - DNA, 429 bp, Glycine max
  unsure (1)..(429): unsure at all n locations
  Clone ID: LIB3039-001-Q1-E1-D1
ggcacaagtgagtttgttgatcgagataactagaaacagtgtgatgaaaatgaaggtccttgttttcttcgttgctacaattttggtagcatggcaatgccatgcgtacgatatgttccctctccgaatgaacactggctatggtgcccgtactccggaggtgaaatgcgcaagttggaggcttgctgtggaagcacacaacatctttggctttgagaccattcctgaagagtgcgttgaagcaacaaaggaatacatccatggcgaacaatatagatcagactccaaaacagttaaccaacangcttacttttatgccagagacctcgaagtcatcccaaggacacatttgtgttcagtatagatggcaccgtactctctaatattccatactacaaaaaacatgggtatggggtggagaaatttaac

SEQ ID NO: 12034 - DNA, 425 bp, Glycine max
  Clone ID: LIB3039-001-Q1-E1-D10
ggacaagccaatcctttgtgtaggtgctcaaccctagtaagccgcaatggtgaagtactcaagggagcctgacaatccaactaagtcttgcaaggctagaggcgccgaccttagggttcattttaagaacacaagggaaactgcctttgcaatcaggaagttgcccttggtcaaggctaaaaggtacttggaagatgttcttgcccacaagcaggcaattccattcagacgtttttgtcgaggtgttggaaggacagcccaggctaagaatagacactctaatggccaaggacggtggcctgtcaagtcagcaaaattcattcttgatttgctcaaaaatgctgagagcaatgctgaagtgaaaggtttggatgttgatgcactgtacatttcgcatatccaagtcaatcaagcacagaagcaaa

SEQ ID NO: 12035 - DNA, 393 bp, Glycine max
  Clone ID: LIB3039-001-Q1-E1-D11
ggcacaagtttgttgagatagctagaagcactaagatgaaaatgaaagtgcttgttttgtttgttgctacagttttggtagcatatgaatgccatggctcagactagcagaagttccctctccaaatgaaaactgggtttggtgggcaatacagcaatgaggtggcatgtgccagttggaggcttggcgtggaagcaaacaacgtactcaagtggcaaactgttcctgcagcttgcggagagtacatagctgactacgttctaggagaccaatatagatcagattccaaaacagttaaccaacaagcttatttctatgctaaatccctcaaactcaccaacagagatgtctttgtcttggacgttgacgacactactctctctaatctccagt

SEQ ID NO: 12036 - DNA, 419 bp, Glycine max
  Clone ID: LIB3039-001-Q1-E1-D12
ggcagtttcaaattttcttttccttcactttcccgagaaaaaaataacacttttcacgttcgtcactacgttctcacttcgatatggctcgtacgaagcaaaccgctcgcaagtccaccggtggcaaggcgccacgtaagcagctcgccaccaaggccgctcggaagtccgctccggcgaccggaggagtgaagaagccccaccgcttcaggccgggaaccgtggcgctgagggaaatcagaaagtaccagaagagcaccgagcttctcatcaggaagcttccatttcagaggctcgtgagagaaatcgcgcaggatttcaagaccgatttgcgtttccagagcagcgctgtttccgcgcttcaggaggctgctgaggcttacctcgttgggttgttcgaggacactaacctctgcgcg

SEQ ID NO: 12037 - DNA, 345 bp, Glycine max
  unsure (1)..(345): unsure at all n locations
  Clone ID: LIB3039-001-Q1-E1-D2
gatatccaaaggaacaaaaatattattaagatgatcaacattattggagcacttgttctactctttgcatttctcttcctcagttgtgtgtatgcacaagacacaacaacccttgtgcctgcaatcataacttttggtgattctgctgtggatgtagggaacaatgactatcttcccacccttttcaaggctgattaccctccttatgggagggactttgttaaccaccaacctactgggaggttttgcaatggcaaattagctactgatttcactgctgacacattgggtttcaagacctatgctccagcatatcttagcccacatgcatcanggaaaaacctc

SEQ ID NO: 12038 - DNA, 297 bp, Glycine max
  unsure (1)..(297): unsure at all n locations
  Clone ID: LIB3039-001-Q1-E1-D3
gctagctagggtttctgagtttatgtggttgcgcctctgcctgtaagagtgaaaaaaccttctcttttccttctctcaagtttcaagagatttcatcatggctccaaagaaggacaaggctccaccaccttcctccaagcccgccaaatctggcggtggcaagcagaagaagaagaagtggagcaagggaaagcaaaaggagaaggtgaacaatatggtgctgtttgatcagggcacctatggcaagctcctttctgaagctcncaaatacaagctcaacaatcccttcaatccccc

SEQ ID NO: 12039 - DNA, 396 bp, Glycine max
  unsure (1)..(396): unsure at all n locations
  Clone ID: LIB3039-001-Q1-E1-D4
gagtctctacctcaagccactctaaagaaaatggcggtgcctctactctcgaagaagatcgtgaagaagagggtgaagaagttcaagaggcctcagagtgacaggaaaatttctgtcaagacaaactggcgcagaccaaagggtatcgattcccgtgttaggagaaagttcaagggatgcactttgatgccaaacattggttatggttcagacaagaagacccgccactatctccctaatggttttaagaaatttgttgttcacaatgtgaaggacttggaactgctcatgatgcacaacaggacttactgtgctgagattgcccacaatatatccacaagaaagaggaaagatatagttgagagagccgcgcagcttgatgtttgtgtgacanac

SEQ ID NO: 12040 - DNA, 421 bp, Glycine max
  Clone ID: LIB3039-001-Q1-E1-D5
ggcacaagtgagtttgttgatcgagataactagaaacagtgtgatgaaaatgaaggtccttgttttcttcgttgctacaattttggtagcatggcaatgccatgcgtacgatatgttccctctccgaatgaacactggctatggtgcccgtactccggaggtgaaatgcgcaagttggaggcttgctgtggaagcacacaacatctttggctttgagaccattcctgaagagtgcgttgaagcaacaaaggaatacatccatggcgaacaatatagatcagactccaaaacagttaaccaacaagcttacttttatgccagagacctcgaagtccatcccaaggacacatttgtgttcagtatagatggcaccgtactctctaatattccatactacaaaaaacatggatatggggtggag

SEQ ID NO: 12041 - DNA, 414 bp, Glycine max
  Clone ID: LIB3039-001-Q1-E1-D6
gatcccaatcagaaaaagttagggtttgtaactttgtcttttgcttgcgaatctgaatcgaataataatcaatcaatcatcatgtcgtcggcgaagaagatcacactgaagagttcggacggcgaggctttcgaggtggacgaggcggtggcgctggagtctcagacgataaagcacatgatcgaggacgactgcgccgacagcggcatccctctgccgaacgtgacgagcaagatcctggcgaaggtgatcgagtactgcaagaagcacgtcgaggccgcgaatcccgaagacaaaccctccgaggacgatctcaaagcctgggacgccgatttcgtcaaggtcgaccaggccacgctcttcgatcttatcctggctgcgaactacttgaacatcaagagcctgctggacctt

SEQ ID NO: 12042 - DNA, 431 bp, Glycine max
  unsure (1)..(431): unsure at all n locations
  Clone ID: LIB3039-001-Q1-E1-D7
ggttctttgcgagatagaagagaaagccgtcgctatcctagtctcttcttcccctctacccatttcagtttcaggatggaatctcaggtgaagcacgcccttgttgtcaaagttatgggtcgtactgggtctagggggcaggtgactcaggttagagtgaagtttttggatgatcaaaaccgacacatcatgaggaacgtgaagggacccgtgagagaaggagacattctcaccctacttgagtctgaaagagaagcaagaaggttgcgctagaggatctcttcatggtttggctcaggacttaaacanaacatcgttgtttttgttgtatttaaaggatgtcaaatgttaattgtcaatgaactgaattatgcanctactatgtttgacattaagccattatgtttgtggctgagttatgactaaattta

SEQ ID NO: 12043 - DNA, 431 bp, Glycine max
  Clone ID: LIB3039-001-Q1-E1-D8
gacctatcaagttaatttgcgtctatattcattttggcatcgaggttgaatctcatcggagagagaaaaaccataaccatgtctggaagaggaaagggaggcaagggtctcggaaagggaggagcgaaacgacaccgtaaggttctgagggataacattcagggcataacgaagcccgcaattcgccgtctcgcgagacgtggcggcgtgaagcgtatcagtggtctcatctacgaagaaacccgcggtgttctcaagatcttcctcgagaacgtcattcgcgacgctgtcacctacgctgagcacgctcgccgcaagaccgtcactgccatggacgttgtttacgccctcaagaggcagggcaggaccctctacggtttcggcggttagagaattaccgatttctgcattgcgtcgtggattaaggtttc

SEQ ID NO: 12044 - DNA, 336 bp, Glycine max
  Clone ID: LIB3039-001-Q1-E1-D9
ggactgaagccagcgagtgatcgaacgagcgacgtaaggttttcgtgggacccccgtctctgcactcagttcgcgacaatcgggtccatcccggtataaggcgagttgagcgagttgactcagccgggcttcgactaattccaacgccaaacttccctcatgatcagctgcaccctcctctggaaggagctctccgaccacttcacctcgctcgagcatgacctcaaccacaaacgcgaaggcctcaaacgcaagattcgcaacctcgacaacactacttccgactccctccggctcctcgatcggcgcgaaaactccctcgacgccacgctccaa

SEQ ID NO: 12045 - DNA, 279 bp, Glycine max
  Clone ID: LIB3039-001-Q1-E1-E1
tgctccaagtggtggtgctggctctggtggcggtggtcctggttcagcaactgcaggtcaatctcctggtggagctgctggatatgggaatcaaggttatggatatggtgggtatggtggatatggtggaagtgatagttcttatgggaattctggtgcatatggtactgttggcggacgtactggaagtgctccaaacaataatgctagtgcttctggtggtagtgaactaacaagtagtggtggcagtggcaactatatgggtgggggctatgggga

SEQ ID NO: 12046 - DNA, 376 bp, Glycine max
  Clone ID: LIB3039-001-Q1-E1-E10
gactctgcagcagcacctttaaacgccgaaggttcatccaatctccgaaggccttcaccggattgcaaccatgtcgaggagaaaggttagagagccaaaggaggaaaacgtgactctgggcccagctgttagagatggtgaacatgtttttggagtcgctcgcatctttgcctccttcaatgacaccttcattcatgtcactgatctgtctgggagggaaacacttgtccgcatcactggcgggatgaaggttaaagctgacagagatgaatcatctccatatgctgctatgcttgctgcgcaggatgttgctgctagatgcaaggaactgggcataactgctcttcatatcaagctccgtgccacaggtggaaac

SEQ ID NO: 12047 - DNA, 289 bp, Glycine max
  Clone ID: LIB3039-001-Q1-E1-E11
gatatttgagttcaaacaaatcaaagccatggccacctccaacttctctattgttctctccgtctccctagccttctttttggtgctacttaccaaggcacactcgaccgataccgtttctttcagcttcaacaagttcaacccagtccaaccaaacattatgctccaaaatgatgctagtatttcatcctctggggtgttacaactcaccaatgttggcagcaacggcgtgcccacctcgggatctctcggtcgtgccctttacgctgcaccaatccatatttgggac

SEQ ID NO: 12048 - DNA, 418 bp, Glycine max
  Clone ID: LIB3039-001-Q1-E1-E12
gatcattcataatccatcaatcaagaaagaaacagaaacttttttctttgataaatttgttctttgttccgacaatgcgtccaccgcggaagagggtggatttctcgcgcggcgacaaggtggagatctgcagcaacgaggagggcttcctcggctcctactacccggccacggtcgtgtcgcgcctcgacaacggcctctacgtcgtacgctacgacacgctcctcgaggacgacgcctcgttccagcccctcaccgaaaccctatttccgaaagagctccgtccccatccgccacgtgtccccaggacccacttcgcgctccaccagtgcgtcgacgccttcgacaacgacggctggtggctcggccagatcaccggcaagaacgacggcgagcattactatgtttacttttccac

SEQ ID NO: 12049 - DNA, 425 bp, Glycine max
  Clone ID: LIB3039-001-Q1-E1-E2
gacccccaaactctgcatcggaagaaaccctagccactctcccggcgtcacgatgcagatcttcgtgaaaaccctaacgggtaaaacgatcacgttggaggtggagtcttcggacaccatcgacaacgtgaaggccaagatccaggacaaggaaggcatccctccggaccagcagcgcctcatcttcgccgggaagcagctggaggacggccgcaccctcgccgactacaacatccagaaggagtccacgcttcacctcgtcctccgcctccgtggcggcgccaagaagcgcaagaagaagacctacacaaagcccaagaagatcaagcacaagcacaagaaggtcaagctcggcattcttcagttctacaaggtcgacgattctggaaaagtccagaggctccgcaaggagtgccccaacgccg

SEQ ID NO: 12050 - DNA, 375 bp, Glycine max
  Clone ID: LIB3039-001-Q1-E1-E3
gacaacacaacgcaacacaacgcgcactctctcttttctctcttaacacaaaaaccctatcgttcttcgcggtttcgccgattctcgccatgccgaaagccaaatccgacgccaaagccgccgatagccggttgaagcgcaagggcgctggtgctggaaggaagcaatcgaagaaagctgctaaggatcctaacaagccaaagagacctccaagcgctttcttcgttttcatgtccgagttcagagagcagtttaagaaggagcatcctaacaacaaatccgtcgctgttgtcggtaaagctggtggtgacaaatggaaatccctgtctgatgctgaaaaggcccccttcgttgccacggccgaaaagaagaaac

SEQ ID NO: 12051 - DNA, 405 bp, Glycine max; identical to SEQ ID NO: 12007
  Clone ID: LIB3039-001-Q1-E1-E4

SEQ ID NO: 12052 - DNA, 354 bp, Glycine max
  Clone ID: LIB3039-001-Q1-E1-E5
ggttcaggatgaggataagccttttcctgagtttccctccttcatccccttccatggcagcaccttcactctcctccgctctcaactctctctcctccccctccctctctctctccttctccacctcctcccgccgcttctctctcctccctccaccctcacaccaaccctccaaacccctcttcctcaccctcaaatccaaaccctccgacgacattgacacatcgttcttcgacaacatcaacccgcaagacgacatcacattcaatcccccggagcccccggaagggttcgtggcgcctccctccttcgacgacggccctctggagaccgaggacgaaatcgccgccgcct

SEQ ID NO: 12053 - DNA, 432 bp, Glycine max
  Clone ID: LIB3039-001-Q1-E1-E6
ggcacaagtgagtttgttgatcgagataactagaaacagtgtgatgaaaatgaaggtccttgttttcttcgttgctacaattttggtagcatggcaatgccatgcgtacgatatgttccctctccgaatgaacactggctatggtgcccgtactccggaggtgaaatgcgcaagttggaggcttgctgtggaagcacacaacatctttggctttgagaccattcctgaagagtgcgttgaagcaacaaaggaatacatccatggcgaacaatatagatcagactccaaaacagttaaccaacaagcttacttttatgccagagacctcgaagtccatcccaaggacacatttgtgttcagtatagatggcaccgtactctctaatattccatactacaaaaaacatggataatggggtggagaaatttaact

SEQ ID NO: 12054 - DNA, 326 bp, Glycine max
  Clone ID: LIB3039-001-Q1-E1-E7
ggcacaagtgagtttgttgatcgagataactagaaacagtgtgatgaaaatgaaggtccttgttttcttcgttgctacaattttggtagcatggcaatgccatgcgtacgatatgttccctctccgaatgaacactggctatggtgcccgtactccggaggtgaaatgcgcaagttggaggcttgctgtggaagcacacaacatctttggctttgagaccattcctgaagagtgcgttgaagcaacaaaggaatacatccatggcgaacaatatagatcagactccaaaacagttaaccaacaagcttacttttatgccagagacc

SEQ ID NO: 12055 - DNA, 409 bp, Glycine max
  unsure (1)..(409): unsure at all n locations
  Clone ID: LIB3039-001-Q1-E1-E8
ggcgtgttttcatcattgtcgttctgaacggaaaagcactggcgcagctaccctgaggcttctcttctcttctcttctctgtcgtgagtcaccatggtgagggttagtgtgctgaacgatgctctgaagagcatgtacaatgctgagaaaaggggaaagcgccaagtcatgattaggccatcctccaaagtcattatcaaattccttttggtgatgcaaaagcacggatacatcggagagtttgagtatgttgatgaccacagggctggtaaaatcgtggttgaattgaacggtagactgaacaagtgtggggttattagtccccgttttgatgtgggcgtcaaagagattgaaggttggactgctaggcctctcccctcaagacagtttgggtatantgtattgacta

SEQ ID NO: 12056 - DNA, 331 bp, Glycine max
  Clone ID: LIB3039-001-Q1-E1-E9
aagggacgacagaaggggataaatcttttgaattgattgttgtaagactttgtaattgaggtgctgcaatggcttcaagtcaggaagaggtgactcttttgggagtaattggaagcccatttgcttgcagggtgaagattgcccttaagttgaagggagttgaatacaaatatgtggaagaaaatttggccaacaagagtgatttgcttctcaaatccaacccagttcacaagaaagttccagtttttattcacaatgagaagcccatagcagagtctcttgtgattgttgagtacattgatgagacatggaagaacaaccccatcttgcc

SEQ ID NO: 12057 - DNA, 367 bp, Glycine max
  Clone ID: LIB3039-001-Q1-E1-F1
gacggcactcgttttcgttctcgttctggtttatagatctttgcgaaggaggtttacagcgctcaaccaaagatgcagaacgaggaaggacagatcactgagctttacattcctaggaagtgctccgccacaaacagattgattaccgctaaggaccatgcttcggttcagatcaacattgggcatgtggatgagaatggcgtctacaatggccatttctccacttttgccctctgcggattcatccgtgctcaaggtgatgctgacagtgctctagaccgcttgtggcagaagaagaaagttgaagttaagcaacagtagacaccaatgatagtttgtaacttcgtaaggtataaattccaaccct

SEQ ID NO: 12058 - DNA, 420 bp, Glycine max
  Clone ID: LIB3039-001-Q1-E1-F10
ggacacaagctggggagttcttccacggagatcatcatcttcacttcaattcagtttactcatcgtgtgatttcatccaaagttagcaacatgagcttcttgaggccttctgcgttgtacaactttctgatcagttatcctgcgctgcgatggctgccatgtcagagttggggcttccttcgatggcccggccttgatgggttcttcaggcttttcgtggttgtgcttctgtggtctacactatccgagcttcgcttcataccctcatcttctatgtaccccacccttcgtgttggcgaccgaattattgtcgaaaaggcttcatattacatcaggagtccagctatacatgatattgtaacatttaaggatccaacacagtcctctggggaaaacacagatgctgtttttatcaagaga

SEQ ID NO: 12059 - DNA, 275 bp, Glycine max; identical to SEQ ID NO: 11899
  unsure (1)..(275): unsure at all n locations
  Clone ID: LIB3039-001-Q1-E1-F11

SEQ ID NO: 12060 - DNA, 418 bp, Glycine max
  unsure (1)..(418): unsure at all n locations
  Clone ID: LIB3039-001-Q1-E1-F12
ggttttcatcaatttcttatcttttctcattcccttctcttcttcctcaacacacacaaagtatctcttccaatttcaatttctcgtcgtccctcatcatggctcgtctcgcgatcgctgtcgccgccgtgctcctcgtggccctctccgcctccaccgcgacggcgcgtccctgcaggaccttcataatctcctcctactcgttccgcaaccctaactccaacaccttcgccaccatcaccgagatccgatccttcacccctctctacatcaccgacaaacccaccggcaaaccctcctcctcctacgacctcttcttcccccacgcgactcaactctctgagcccgagcgcgtgaacccacgcgctcccctagggttcgcctccgcgtacgatttctcctcnctccgcgaccgcac

SEQ ID NO: 12061 - DNA, 416 bp, Glycine max
  unsure (1)..(416): unsure at all n locations
  Clone ID: LIB3039-001-Q1-E1-F2
gagtgtctgctgccttccattcgttcacctcctcaacctctgcagcgccttcgatccagaaaacatgactaagagaacaaagaaggctggcattgttggaaaatacggtacccgttatggcgccagtctgcgtaagcagattaagaagatggaagttagtcaacacagcaagtttttctgtgaattttgtggaaagtatgctgtgaagaggaaagctgtgggaatatggggatgcaaggactgtggtaaagtgaaagctggcggtgcttacactttgaataccgcaagtgccgtgactgtacggagcaccatcangaagttgagggagcaaactgagagttaagcttttttgtttatgctatcaattactattagactttgcatgaagtgcctaatttgtantcactgaactgcac

SEQ ID NO: 12062 - DNA, 298 bp, Glycine max
  Clone ID: LIB3039-001-Q1-E1-F3
gaaacacacttctataatggatcggaaaagcctcctctccctcgcaatcatcgccattgtcgtcgccgccgtcggaggacagtctccagcggcgtcgcccaccacttctcctccggctgccaccaccactccctttgcatccccagccacagccccttctaagccaaaatcaccggcgccagttgcttctcccacgtcatcatctccaccagcttcgtcccccaatgctgcaaccgcaaccccacccgcttcatctcgcacagtagcatctcctccgtctaaagctgccgctccagct

SEQ ID NO: 12063 - DNA, 283 bp, Glycine max
  Clone ID: LIB3039-001-Q1-E1-F4
ggcacaagtgagtttgttgatcgagataactagaaacagtgtgatgaaaatgaaggtccttgttttcttcgttgctacaattttggtagcatggcaatgccatgcgtacgatatgttccctctccgaatgaacactggctatggtgcccgtactccggaggtgaaatgcgcaagttggaggcttgctgtggaagcacacaacatctttggctttgagaccattcctgaagagtgcgttgaagcaacaaaggaatacatccatggcgaacaatatagatcagac

SEQ ID NO: 12064 - DNA, 374 bp, Glycine max
  Clone ID: LIB3039-001-Q1-E1-F5
ggccacaatggttgtccctcttaggcactttcttgttttctctctcaccctcatatccatcatcttccacacccatggagcgttctctgagcaatcaataatcaagttacccacagaccaaccaagggtagagaaactgacccacttgcattttttctaccacgacatcttagagggcaagaacatcacggtggtgaaaatcatcgagccatcagcgagcgaggttcgtgaagcaactgggtttggaaccactttcatgatggacaatgttttgaccgagggtcaagagctgagctcgaagcacgttgggagggctcaagggctgtttggcttggcctctttggaggaccgtggaatggtgatgctcattaact

SEQ ID NO: 12065 - DNA, 407 bp, Glycine max
  unsure (1)..(407): unsure at all n locations
  Clone ID: LIB3039-001-Q1-E1-F6
ggcacaagtgagtttgttgatcgagataactagaaacagtgtgatgaaaatgaaggtccttgttttcttcgttgctacaattttggtagcatggcaatgccatgcgtacgatatgttccctctccgaatgaacactggctatggtgcccgtactccggaggtgaaatgcgcaagttggaggcttgctgtggaagcacacaacatctttggctttgagaccattcctgaagagtgcgttgaagcatcaaaggaatacatccatggcgaacaatatagatcagactccanaacagttaaccaacaagcttacttttatgccagagaactcgaagtccatcccaaggacacatttgtgttcagtatagatggcaccgtactctctaatattccatactacanaaaacatg

SEQ ID NO: 12066 - DNA, 413 bp, Glycine max
  unsure (1)..(413): unsure at all n locations
  Clone ID: LIB3039-001-Q1-E1-F7
gaatccggtagaaaagggttttatttctttttcctttcaattattttctctgtcttgtctttgttattcagttcggttgttgtgttgtgttgtgtgctgcaacacatccagaaacacaatcggtgtcgtgttgggttgggtttttttgttattaaaagaaaagaaaaggggggatggctcggagagcagaggaagagtacgattatctgttcaaggttgtactgatcggtgattctggtgttggaaaatccaatctcctgtcncgattcactcgcaacgagttttgcctcgaatccaagtccaccattggagtcgaattcgctactcgcactcttcaggtctttcttttcttcagatctgatcaagagatgtctggaattccaactttggatttcaacccctcgctcgcatca

SEQ ID NO: 12067 - DNA, 437 bp, Glycine max
  unsure (1)..(437): unsure at all n locations
  Clone ID: LIB3039-001-Q1-E1-F8
ggcacaagtttgttgagatagctagaagcaataagatgaaaatgaaagtgcttgttttgtttgttgctacagttttggtagcatatgaatgccatggctcagactaccagaagttccctctccaaatgaaaactgggtttggtgggcaatacagcaatgaggtggcatgtgccagttggaggcttggcgtggaagcaaacaacgtagtcaagtggcaaactgttcctgcagcttgcggagagtacatagctgactacgttctangagaacaatatagatcagattccanaacagttaaccaacaagcttaattctatgctaaatccctcaactcacaacanagatgtccttgtcctggacgttgaagacactactctctctaatctccagtattttgctaaacatggaatttggtgtggaaccacacaatacgacgg

SEQ ID NO: 12068 - DNA, 357 bp, Glycine max
  unsure (1)..(357): unsure at all n locations
  Clone ID: LIB3039-001-Q1-E1-F9
ggcacaagtgagtttgttgatcgagataactagaaacagtgtgatgaaaatgaaggtccttgttttcttcgttgctacaattttggtagcatggcaatgccatgcgtacgatatgttccctctccgaatgaacactggctatggtgcccgtactccggaggtgaaatgcgcaagttggaggcttgctgtggaagcacacaacatctttggctttgagaccattcatgaagagtgcgttgaagcaacaaaggaatacatccatggcgaacaatatagatcagactccanaacagttaaccaacaagcttacttttatgccagagacctcgaagtccatcccaaagacacatttgtgtt

SEQ ID NO: 12069 - DNA, 167 bp, Glycine max
  Clone ID: LIB3039-001-Q1-E1-G1
ggagtagcgatggagaagaagaagggtgagctaaagtcaattttccttcctttcctttccactagtcacataatcccgctagtggacatggccagactcttcgccttgcacgacgtcgacgtcaccatcaatcacaccgcacataacgccaccgttttcaaaaagtc

SEQ ID NO: 12070 - DNA, 417 bp, Glycine max
  Clone ID: LIB3039-001-Q1-E1-G10
gggtttagcctctcatagccatgagagactttatacttgaaagactaatacaagaaagggatggatgactagtagtaagaaagaaggaatgactaagaaagaggatttcctctaaaggatagacccaggccttggatagatttgagcctcaatatatttttcttttgcttcctcctccttatataggcactatgaagcttaattttcatgctaacttcgtgcttagtgtcggcttttgcgctaagcgcgcctttggacttcattatgggctttttcgcgcgctaagcctgagctgtacgctaagtgcggacacgcgctaagcgagctgtccacttcttcaatttcgcttcaaggctttttcgtctactttttgcctcaatttttcttcaaagcacttgaattcctcatctcttgact

SEQ ID NO: 12071 - DNA, 428 bp, Glycine max
  Clone ID: LIB3039-001-Q1-E1-G11
gacaacaaaatttgccaattgccatttcaatcctcagtttctttcttcaacgtttccatcatacacagatcccaatcctctctcaagccctaatttcccctcatttccatggccacagaagagcccactgtcgcggtggaacccgctcccgaacctgcctccgccgatcctctcccggaggagaaggaggagaccaaacctgaagccaaggctaagaaaaccaaggagcccaaacctaaaaaggtttccagacctcgcaaccctcccactcatccttcctacgaagagatggttaaagatgcaattacctcgctgaaggagaaaaccggttcgagccaatacgcgattgcgaagttcatcgaggagaagcacaagcagcttccaccgaacttcaagaagcttcttctctaccatttgaagaagctcgt

SEQ ID NO: 12072 - DNA, 411 bp, Glycine max
  unsure (1)..(411): unsure at all n locations
  Clone ID: LIB3039-001-Q1-E1-G12
ggcacaagtgagtttgttgatcgagataactagaaacagtgtgatgaaaatgaaggtccttgttttcttcgttgctacaattttggtagcatggcaatgccatgcgtacgatatgttccctctccgaatgaacactggctatggtgcccgtactccggaggtgaaatgcgcaagttggaggcttgctgtggaagcacacaacatctttggctttgagaccattcctgaagagtgcgttgaagcaacaaaggaatacatccatggcgaacaatatagattagactccaaaacagttaaccaacaagcttacttttatgtcagagacctcgaagtccatcccaaggacacatttgtgttcagtatagacggcaccgtactctctaatattccatactacaanaaacatggata

SEQ ID NO: 12073 - DNA, 268 bp, Glycine max
  Clone ID: LIB3039-001-Q1-E1-G2
gactacctcaaaaacaacactacaatagcataacccttcgaagtcgtcgtttatctctcctcgttcgcatcttcaccctttccctgtctctcagaaagatgaaggtggtcgctgcgtatctgctcgccgtcctcggtggcaacaacaccccctccaccgatgacatcaaggaaatcctcggctccgttggaatagaggcagatgaagataggattgaatcgttcttgtctgaagttaagggtaaggatatagttgagctaattgctgc

SEQ ID NO: 12074 - DNA, 202 bp, Glycine max
  Clone ID: LIB3039-001-Q1-E1-G3
cgacagaacgggcacaccaagtcctgcgcatcttccagacagcagcagcaacaacatacaaactctttctggattcagtttgtgatgtgaaactggcagtgactcttacatcaacactcgttctggcattgctattcgctgcttcagcttttgctgctcatcagcctagagtacctgaagcttacctccaaaatgggaactt

SEQ ID NO: 12075 - DNA, 413 bp, Glycine max
  unsure (1)..(413): unsure at all n locations
  Clone ID: LIB3039-001-Q1-E1-G4
agaagggcaagcaactaaaaaagggtgctaatgaagcgactaagacactgaacagaggcatttctgagttcgttgtgatggccgcagacactgagcctcttgagattcttctccatcttcctctccttgctgaggataagaatgttccctatgtattcgttccatcaaaacaagcacttgggcgagcatgtggagtcacacggccagtgattgcatgttctgtaacaactaatgaaggaagtcaactcaaatcccaaattcagcaactaaaggatgctattgagaagctgttaatttgaaaatttgatattcggcatgacgggcttcttgagaaggctttgactggacagatgttgtantcaacagacaaaggtgttttatgtgtaaacctacatttatatttacttttgccg

SEQ ID NO: 12076 - DNA, 290 bp, Glycine max
  unsure (1)..(290): unsure at all n locations
  Clone ID: LIB3039-001-Q1-E1-G5
aagacgacagaaggggaatcagaggaagagaagagacactgaggtcgttggcgagaatgggaagaaagaaggggtatgttgagttcgaggagtcgccgccggacgattttgatccggcgaatccgtacaaggacccggtggcgatgctggagatgagggagcacatcgtgagagagaagtggatccaaatcgagaaggccaagatcattanggagaagctccgctggtgctaccgcatcgaaggcgtcaaccacctccagaagtgccgccacctcgtcaaccagtatctc

SEQ ID NO: 12077 - DNA, 433 bp, Glycine max
  Clone ID: LIB3039-001-Q1-E1-G6
ggcacaagtgagtttgttgatcgagataactagaaacagtgtgatgaaaatgaaggtccttgttttcttcgttgctacaattttggtagcatggcaatgccatgcgtacgatatgttccctctccgaatgaacactggctatggtgcccgtactctggaggtgaaatgcgcaagttggaggcttgctgtggaagcacacaacatctttggctttgagaccattcctgaagagtgcgttgaagcaacaaaggaatacatccatggcgaacaatatagatcagactccagaacagttaaccaacaagcttacttttatgccagagacctcgaagtcgatcccaaggacacatttgtgttcagtatagatggcaccgtactctctaatattccgtactacaaaaaaacatggattatggggtggagaaatttaact

SEQ ID NO: 12078 - DNA, 344 bp, Glycine max
  Clone ID: LIB3039-001-Q1-E1-G7
gctcctttctcaagtagaattgttgattcgtagatcttctctcgcagtcccatccgaagcaagcaatacaccaaaacccaaataagacagaaaatttatttatttattcgtttttagaacaacaaaaaaaaaagtggtgagcgatatggaatttgacgagcacgaggaccaagaggaagaggaggaagaggaaatgggattctcagtggcggctgcgagttacgactcgctgggaaacgcggcggtgaggtctaaaatgagcggcggcgacggagttgctgtcaccgggaattctggtcggaaagggacgctgagatacagagaatgtcagaagaacaacgccg

SEQ ID NO: 12079 - DNA, 325 bp, Glycine max
  Clone ID: LIB3039-001-Q1-E1-G8
gacgttcacattcaggaatcgttttcttcagaaaatttgccatcgttgagggaagcgcgagagccttcgttgttcaagatgagagctaagtggaagaagaagcgcatgaggaggttgaagaggaagcgccgaaagatgagacaaagatctaagtaggtgcttgaacaaggagtggagatgatgtgcttttccatctgctaccagcttcatgacattttatgctgtcatggctcttatgatgatcttgaggtctagtggcgaggggagcttccatcttgactttaggttagctttactggtctaaagattgctgttttaagtgtgg

SEQ ID NO: 12080 - DNA, 366 bp, Glycine max
  Clone ID: LIB3039-001-Q1-E1-G9
gaccacattccaaaacacaaacacatacattgtagtatcacttttgtctcggaatttgttcctttgagttatggcaagcttaaaggttgcatgtgtggttttgatgtgcatggctgtgatgagtgcaccaatgatggtgcaagccgtgtcatgcaatgatgtttctgtgaacctagcaccgtgcctatcttacctgatgcagggtggagatgttccagaatcgtgctgtagcggagtgaggaacattctgggttctgccagcaccacctttgacaaacaaaccgtgtgcaaatgtcttcagcaagctgctaataactatggcatcaacgacgaatacgctcaggaactcccggcccgctgcaatgt

SEQ ID NO: 12081 - DNA, 408 bp, Glycine max
  unsure (1)..(408): unsure at all n locations
  Clone ID: LIB3039-001-Q1-E1-H1
gattatcattttcgaggaatacgaaagatcaatttaagggtaattgcactcanattaggaacaagggggaaaataatgtatgccagaaaggaagaaggggtgtcaattaatccaacattcaacgtttctgttatatttggcaaacgggatgagccaatgttagtagcatgtgcacgccagctgattgagcacatgagtttatctggctcctccaggccattggtgctctcacttggtcttaaagaccattctgtggaaacattgaaaggcattgtttctgctgtgatggacaatagcatgtggtgagaaattgctgatgaaatatcaaagtttgcagaactgccgtatagctcaaccttgtggagttgcattgatttttaattagtgtatgctgacaatttttcaacc

SEQ ID NO: 12082 - DNA, 407 bp, Glycine max
  unsure (1)..(407): unsure at all n locations
  Clone ID: LIB3039-001-Q1-E1-H10
ggcacaagtttgttgagatagctagaagcaataagatgaaaatgaaagtgcttgttttgtttgttgctacagttttggtagcatatgaatgccatggctcagactaccagaagttccctctccaaatgaaaactgggtttggtgggcaatacagcaatgaggtggcatgtgccagttggaggcttggcgtggaagcaaacaacgtagtcaagtggcaaactgttcctgcagcttgcggagagtacatagctgactacgttctaagagaccaatatagatcagattccaaaacagttaaccaacaagcttatttctatgctaaatccctcaaactcatcaacanagatgtctttgtcttggacgttgacgacactactctctctaatctccagtattttgctaaccat

SEQ ID NO: 12083 - DNA, 355 bp, Glycine max
  Clone ID: LIB3039-001-Q1-E1-H11
gcagcagcaactttaaacgccgaagaaagttcatccaatctccgaagcccttcagcgcattgcaaccatgtcgagaagaaaggttagagagccaaaggaagaaaacgtgactctgggcccagctgttaaagatggcgaacatgtctttggcgtcgctcgcatctttgcctccttcaatgatagcttcattcatgtcactgatctgtccgggagggaaacacttgtccgcatcacatgtggaatgaaggttaacgctgacagagatgaatcgtctccctatgctgctatgcatgctgcacaagacgttgctgccagatgcaaagaactgggcataactgctcttcagatcaagctc

SEQ ID NO: 12084 - DNA, 378 bp, Glycine max
  Clone ID: LIB3039-001-Q1-E1-H12
ggggtggttacctgcggtaatgttccactagagtcctcctttcagaaagttcctagatgtgtatatacatccacaagcttgtatgaatatcgaggatgggattcaaaagcagcaaacccaaaacatcgccgttttacatggggacttagagcagctgagagacatgtggtggacttctacatatctgatttccaatctggattgagagcattggttaaaacaggctatggtgcaagggtgactccttatgttgatgattccgttgttattgatgttaatccagccaatagagacatgtcccctgagtttcttcgatggttgggcgagagaaaactttctagcgatgaccgtataatgcaattaaaagaagggtacatc

SEQ ID NO: 12085 - DNA, 273 bp, Glycine max
  unsure (1)..(273): unsure at all n locations
  Clone ID: LIB3039-001-Q1-E1-H2
ggcacaagtgagtttgttgatcgagataactagaaacagtgtgatgaaaatgaaggtccttgttttcttcgttgctacaattttggtagcatggcaatgccatgcgtacgatatgttccctctccgaatgaacactggctatggtgcccgtactccggaggtgaaatgcgcaagttggaggcttgctgtggaagcacacaacatctttggctttgagaccattcctgaagagtgcgttgaagcaacanaggaatacatccatggcgaacaata

SEQ ID NO: 12086 - DNA, 304 bp, Glycine max
  unsure (1)..(304): unsure at all n locations
  Clone ID: LIB3039-001-Q1-E1-H3
ggagcaaaaccctaatccctatttttcttcctcagtagtgtcatttacgcttctcttctctgcagcaactatgcctaaccctaaggtcttcttcgacatgaccatcggcggtcaatctgctggccgcatcgtgatggagctctacgccgacgtcactccccgcaccgccgagaacttccgcgcgctttgcaccggcgagaagggcgtanggcggagcggcaagcccctccactacaagggctcgtccttccaccgcgtgattccgagtttcatgtgtcacggtggcgacttcaccgccggaaac

SEQ ID NO: 12087 - DNA, 329 bp, Glycine max
  unsure (1)..(329): unsure at all n locations
  Clone ID: LIB3039-001-Q1-E1-H4
tcagacagctgcaaaagacaacagaaggggagatttcgcgaaaaatatcacgtgctgacaacacggtatcgcaagtcaacctttccccaaaccgtcaattcaaattcccaaaatcttaaaccttcaaattcttcacctttccttcacttcagagagcgagtgtgagacagacaacanaacagaatgggtgtggtggtgatcgacggcagcaccgtgcgcgacttcgtgaacgacgaagcggccttcgcgaagagcgtggacgagcagttcggggtgctgggactcaacaacgacggcgtcctctcgcgctcggagctccgcacggcctt

SEQ ID NO: 12088 - DNA, 400 bp, Glycine max
  unsure (1)..(400): unsure at all n locations
  Clone ID: LIB3039-001-Q1-E1-H5
ggtaacagtgtgaaagagagggggtcccaagtggaatttattgtttctacctatcgcatgcatccgttttgttttctttttattttagatgtggtgttgtgaaatctaatggcatgcttagaaatgtacaacaactcagagcacaacaagaacaacaagggtgataatcatcaccatcatcatcaatgcgctccaatgagcccaagaatctctttctcaaatgattttgtggatgtgcaacaagccatgaagctgcaagaacaaagaggtgggtcatccagattagacacgccagtgtcttcagacttcgagttttcagtggcanactacaccatgatgagtgctgatgagcttttcttcaagggaaggttgatgtcgtccacttatgttaacacggaca

SEQ ID NO: 12089 - DNA, 265 bp, Glycine max
  Clone ID: LIB3039-001-Q1-E1-H6
gccacaacacagaacaaaaacagagaacaaatggaaacccttagccaacacaaccatcatggccacctctgctattcagcaatcagcattcactggtcaaactgctctgaagcagctcaatgagttcgtccgcaagaccggtggcgccggcaaaggtcgcactaacatgcgccgcaccgtcaagagtgctcctcagagcatttggtatggccctgaccgtcccaagtacttgggtccattctcggagcagattccatcatacctg

SEQ ID NO: 12090 - DNA, 444 bp, Glycine max
  Clone ID: LIB3039-001-Q1-E1-A3
agacgacagaagggagccatccatcattataatcatttggtgtgttttgccccattgattgcttgcacagtagccttggcttgattcttgttgatgcgtcctaattcacatgcatatttggaaatgattaaggcaattttgttcttataagcttctagccaaatggacttaccttgaattaattcctttgatagcccttttgagccttgtttccctttccttgttttgaagctcactacaagccttaagtgaaaaaccatgatattaccatatccttaaggaattttggagctttggaattgttttgggaataagttgtgggggtttttggttcattggacaacttggtttggtggctaagcttcaagaagtaatttgggccaaaactgatgtacaatgtaaaatggtttaatgttggacatgctgaatgaaatgttgtttctc

SEQ ID NO: 12091 - DNA, 246 bp, Glycine max
  Clone ID: LIB3039-002-Q1-E1-D7
gagtggtcgcaactgtaagtctgaacgtcgcagactacgacgacggtgacgaggacgaggagtccgttgccgcggtggagcctcctatggtttcgcaccaggcgcctcgtgtctgtacatccaacagggcagtcattacccccatcgaatcgcagaactgaacgaggcgaggtttcttgttccttcacgaatgggagcatgaggcaggagagcgagtggaatctcaccgaccttgacggtcgcgct

SEQ ID NO: 12092 - DNA, 159 bp, Glycine max
  Clone ID: LIB3039-003-Q1-E1-D2
ttccgggtcgccccacgcgtccgggatgcaaaaagaccacaaaaggtggcaaaaatttttttacggatttcacttcctacttgcacactgtatgacacaaccctgacaagattccttttgttccgaactctggttttcagggacacaccctcattgaaa

SEQ ID NO: 12093 - DNA, 460 bp, Glycine max
  unsure (1)..(460): unsure at all n locations
  Clone ID: LIB3039-003-Q1-E1-G3
gtcgaccacgcgtccgaaaaccaaagttattgataacaacttgaatcctacctggaatgagaaatttgagttgattgcagaagacaaggagacccaatcactaattcttgaggttcttgataaagacattggacaagataagcgattgggaatagcacagttaccccttattgatctagaaatacaaactgaaaaggagattgaattgaggctgctgccctcacttgatacactgaaggtgaaagataagaaggatcgangaaccttaacagtaaaggtcatgtattatcagtttaacaaggaagagcagctggttgcactaaangcagaaaagaagatactagaagaaaggaagaaactgaaagaagctggaatgatangaagcacgatggatgcactagatggagcagtatcagtggtaggctctggtgttggactggttggtactggtgttgttgcc

SEQ ID NO: 12094 - DNA, 360 bp, Glycine max
  Clone ID: LIB3039-004-Q1-E1-C3
agcaaggggaccttctaacgtgatcgcagtccagtcagcctccaattcgtgccactctctttacaatggccgttaccttctcatctctccacagagaatcaggtctcatgtctctcgaggacttcctctctggggaagtctacgtatctggggatcagttcacaaaggacgacatcaatgtgtcaggtgctgttttggagatgtcaggtgactcatttcccaatgctgccaagtgggactaagttgtctcaacacagcttgcagtaagcttcattggcaatgctcagcgggtgagattcactggaatggcatctgctccattcgaagctgctcctgtcaaagcggttgcctctgctgtcg

SEQ ID NO: 12095 - DNA, 291 bp, Glycine max
  Clone ID: LIB3039-004-Q1-E1-C6
gacattcacgttctctttaatgcatcatctcagcgcttcaaacgccaaccattcctcaaactcaaagtcttcacagagccatggggttgttgtgcataccaatatcatctagtgttcttcaaacattgttcctcttttgctctgcattctttgtttctcaagctcttggggccagaatcccacaaccacataagcctcttccgttcatttggcctctgtctgaaaattaatttgctttgctatgctttattattcgttgaacagatggcctgttctctaaaaaaaaaataa

SEQ ID NO: 12096 - DNA, 434 bp, Glycine max
  unsure (1)..(434): unsure at all n locations
  Clone ID: LIB3039-004-Q1-E1-E3
gggtcgacgcacgcgtccaaagtaaatcgataggggtcttgcaggggaaaaaaggcacgttcaaggcagctcgtgtgggagatcgtcaagatcaacaattccttcttggtcaagcagtttggaaggggcagccagagcgtcgaattcagcagagagagcaacaatctctacaacctcaattcgttcaagtactctggtttggcaaacaagaaaactgttactgttcagcctgagggcaaagatcaggctgtgttgttggctacaaccaagacaaagaagcataacaagcccgctgcattgctccacaaatctgtgatgaagaaggagttcacgangatggcanaagctgttgacaacgaggtggccaacaattactacaggcctgatctcaagaacgctgcccttgcaatgttgagtgcctgtcacagaagcct

SEQ ID NO: 12097 - DNA, 396 bp, Glycine max
  Clone ID: LIB3039-004-Q1-E1-H10
ccgggccgacccacgcgtccacccacgcgtccggaggcctccaagtgctttcttcgttttcatggaggagttcaggaaggtattcaacaaagaacatcctgaaaacaaagcagtgtctgctgtgggcaaagctgctggagcaaaatggaagaccatgtctgatgctgaaaaagcaccttatgtggcaaagtctgagaaaaggaaagtggagtacgagaagaacatgagagcctataacaagaaacaggcggaaggtcctactggtggggatgaagaagaatctgagaagtctgtatctgaggtgaatgatgaagatgatgatgaggaaggcagtggcgaggaagaggatgacgattagagaatggactgataattgcatttatgtaggttctgatg

SEQ ID NO: 12098 - DNA, 407 bp, Glycine max
  unsure (1)..(407): unsure at all n locations
  Clone ID: LIB3039-004-Q1-E1-H2
ctcacgggtcgacgcacgcgtctagactgagtcatgcaacaccaccgcatcctcttcgacaagtaccatcccggtttcttcggaaaggtgggtatgcgctacttccacaaactccgcaacaaattctactgccccatcgtcaacattgataagctatggtccctcctaccccaggaggccaaggacaaggccaccgccgacaaggcgccattgctcgatgtcacccagttcggttactttaaggttttgggtaaaggggttttgcctcagaaccagcctctggtcgtgaaggccaagcttgtttccaagatcgccgagaagaagatcaaggangccggtggagccgtcgttctcaccgcctgatttttttggggtaattttatttaaaaggattttgagatctgttg

SEQ ID NO: 12099 - DNA, 445 bp, Glycine max
  Clone ID: LIB3039-005-Q1-E1-C5
cccgggccgacccacgcgtcaggaagacgacagaaggggacacactagtaactaaacaccatcctttttttccggtgcgcgactccatctattattcatccacactccctcccttccagatccgatcctcgatggcggcggcgtcgcggaggctccgggacctgcagtccgaggccgggaacaagatctgcgttgactgctcccagaagaacccgcagtgggcctccgtctcctacggcgtcttcatgtgcctcgaatgctccggcaagcaccgtggcctcggcgtccacatctccttcgtccgatcggtcaccatggactcctggtccgacatccagatcaagaaaatggaagccggcggcaacgacaagctcaacgcattcctcgcacagtactccatccccaaagaaaccgacatcgttacgaagtacaacaccaacgccgc

SEQ ID NO: 12100 - DNA, 413 bp, Glycine max
  Clone ID: LIB3039-005-Q1-E1-F10
attcacgggtcgacgcacgcgtccactgatcacttatcagatacaattagttacacagatatatatgatatagctaaggaaattcttgaagggtcacctcaaaaccttctggagtcagtggcacaaaaaattgcagtgactactctgacaaatcataagcaaatatctgctgttcgagtgaaggttgaaaagcctcatgtggcagttcaaggtccacttgattacttaggcgttgagatacttagacgcagaagcgatttgtcagaatagaaatttcatagttttgttctctctggtttttgttgctctcattctgatttgtattgtttgttttcattgaatgtttcttcttgccattcagtttgataaatcgtcaagttcaatttgatataaaagtaactcctttcctgaac

SEQ ID NO: 12101 - DNA, 312 bp, Glycine max
  Clone ID: LIB3039-006-Q1-E1-A1
taccggtctagaattcccgggccgacccacgcgtcagactgcgggtgacgagcactgcttcagggtgaagcaccgaggccacttctcgacgctagacgtcctcgtgggagcctactagagcaccagacttccccctctcaattcatctctctctcgatttacattccagaggtaggaggggagagagagcaatgacagcaacaacagagagcgagaagaagaagcgagaagaggaagaggaaccagaacaagttgtgaacccgtggggaagtttcagccagaaggtgagatcgattacgacaaactcataga

SEQ ID NO: 12102 - DNA, 108 bp, Glycine max
  Clone ID: LIB3039-006-Q1-E1-A6
aaaagaactacggagggggaaccgttcagataatgttgtgcgtctttgtgaacatagtgatgaagtggtcgtgtggcttcatcatcatgctcttcagcattgtctgtg

SEQ ID NO: 12103 - DNA, 384 bp, Glycine max
  unsure (1)..(384): unsure at all n locations
  Clone ID: LIB3039-006-Q1-E1-B10
gaagacacattgattgcactaagggcatagaaatagacaatagaaggtggtttatgtttatccgcctccacttggatatctccgtcctctgtcccaaataacaaactaaactgctccaaaccaaacacaataatcaacataactcattttcgcagatctttctgttccttcaaaatgcaatcttccatttcactctcttcttcctacgctcccaccatttcgggaccacgccactcttttcccctctccggtcgcactctcgcgccttcgaatctccgtttctgcggcctccggcgacaggcattcacttccactcccctcaaccaccacttccgcctccgccgacgccgcctcncgcattccgccgccgtatccgccgcgctt

SEQ ID NO: 12104 - DNA, 172 bp, Glycine max
  Clone ID: LIB3039-006-Q1-E1-B5
ctggggagggggagggggaacattgaagaggatagagggcagcatcgccatgggattgagtattctgataagcacttccatttccactcggtaacgcttcctccgagtccaaacgcatgtttctcaagtcttgttcgttcatctttcgcctccatttcccccacagggtgtg

SEQ ID NO: 12105 - DNA, 291 bp, Glycine max
  Clone ID: LIB3039-006-Q1-E1-D5
gatgatgtagatagagaataaagagagaccagtgtgcagtgagaaagaggttgggcacttcttgtgtggctttgttttgttcgttgtgttggcatttgttgatgggtgaagagggagaagaggtgtcaagagataaggaacagcaacacatgggagtttatggaaatgagtggttgtttagtagtttctgtgcaaagtggcgcggtttaagacaccagaattcctgttcaatgcctccttttgagccaggcgattggggtcatcggaaaaggaaaaacggccgctctagag

SEQ ID NO: 12106 - DNA, 380 bp, Glycine max
  Clone ID: LIB3039-006-Q1-E1-D6
ggtaacggtcatgaattctcgggtcgacgcaagcgtgcgaaacggtgccaaaagacgagagaaggggacacttcaaaatcctgtagtaagccttcttttctctctctctctctcgtgttctgagctgctagaagcaatggagaggaaaagaagccatggttctttcagcatgtttgcaatgcttgttggattgctctctcagagccttgtcattcctgtaatatccacgactgttgcagatcagaagaactactacacgccagatccacatgctggaagtccccccacaggtttctccgattctctgtgctcacacaatagtagtcctccatctcatggccatgggagctctccagcctcacatcacaatagtccaagta

SEQ ID NO: 12107 - DNA, 240 bp, Glycine max
  Clone ID: LIB3039-006-Q1-E1-E10
gctgccagaagaccactgaaagggaagcaaaaccctaagccctctttcttcctcttcctcaatagtgcgattttcgattctcttccctgcatctatgcctaaccccaaggtcttcgtcgacatgaccatcggcggtcaatctaccggccgcatcgtgatcgaactctactccgatttaactctcatcaccgccgagaacttacgcgcgctctgcattttcaacaaaggcacctggcggat

SEQ ID NO: 12108 - DNA, 398 bp, Glycine max
  unsure (1)..(398): unsure at all n locations
  Clone ID: LIB3039-006-Q1-E1-H6
gtgcggtcaagaattcacgggtcgagggacccatcagacgtcgatacggatgccagaagacgagggagggggaattcacttgcggctgcagtagagaagcactcgtcgttcttcgactgtctacgatctgctttctctgaattgtgaaaatgtcgctcggagaaactgcttgttcatacgcagctctcatccttcatgaatatggaattaatgtaactgctgacacgatcagcagcttgttgaaaactgcaaaggttccagtagactcgtattggccaaccttgtttgctaaacttgctgagaagtaaaatcttggcgatttgatatcaaatgcggcatgcngtggtgcaacagttgctgtttcaactggcccaatttgctgtgctgctggtggttct

SEQ ID NO: 12109 - DNA, 205 bp, Glycine max
  Clone ID: LIB3039-007-Q1-E1-G5
cccacacgtccatacaggcgtcagtacagctgagaagggaacacatattggggaacatctcaactccatttctacacatccctagctctgtcgttccgtctttcgctactgttttccggatgtgcccgggggatgtctgatctctccatcgtctctctctctttttcatcgcttcttccagtgtcttctacgaattccgtttcga

SEQ ID NO: 12110 - DNA, 420 bp, Glycine max
  unsure (1)..(420): unsure at all n locations
  Clone ID: LIB3039-008-Q1-E1-A7
ggtcaggaattcccgggccgacccacgcgtccagacgacagaagggggaaccgaaacgaacctcaacaacgctgagcgcagaaaggggaaaaggggattagggtttaggaagcagcgacaacaatggatttcacagtggagaagaaggaatcagagaacaacgccgaaaatgctcacccaacaacgttagattcttcttctcaattggcatcggcacttgattccaacaacaaagaaatcgaagaacgacaagctcgtgaactcaaagccggacttcaccccctaaagcacaagtttgtcttctggtacactcgtcgaacacctgnagttcgaaatcaaacatcatatgaggacaacataaagaaaaattgttgatttagtacggttgaaggattttgggtctgctactgccatcttgct

SEQ ID NO: 12111 - DNA, 446 bp, Glycine max
  Clone ID: LIB3039-008-Q1-E1-C5
ttcccgggccgacccacacgtccatacgagacgacagaagggattgataagagtgtaaatggtgaacatcaagcagaagaaaatagtaatgacctcatatgggctgatccagtttcatgctgttatgcactgtatgcaaagttgaaccccgatacagttctcttgcagcaatcacctttagcccttgcaaaagctttaaagaactcggtggagttggatgggttaaaaaaggcacatattcgggatggtgcagcaattgtgcaataacctggccgggtggattagaagattcaaggtaattaaggagcttccgggtactttttggagaaaaggattctgtgaaaagggagatccatttgcaactctttaaaattgactgaggtgactgtaagtgaccagcttgaaggttttcgagcatcaaaagaggtcctaaagggtcacattgc

SEQ ID NO: 12112 - DNA, 308 bp, Glycine max
  Clone ID: LIB3039-008-Q1-E1-F1
cgcgtccatgaggagacgacagaaggggaaagtggggttgggtgtgatacacaagacattcgagcctaatgttgctctcttacaccaaccaagcacctctcactccttcatcttcgctttcagcacagtcgcaaattgcgcagcaggatatgcaaatctcttcgctcgtcaccagatcatccaaaatgatgaatcatgattccgaggactaacagcatcacattctccatgccaccgatgacgacgagatgttggacacgctgatgggaggtcacgacgactacggatcatcagttcaccatcaccaa

SEQ ID NO: 12113 - DNA, 408 bp, Glycine max
  unsure (1)..(408): unsure at all n locations
  Clone ID: LIB3039-008-Q1-E1-G3
agggggcaacttcaattgcaatcaaattagttcattctctttgcgcagttccctacctctcctttcaagaaattgttcagatccgttgataaaagccttattcgttgattctgtatggtatttcaagagatattgctcagatgcagatcttcgtcaagaccctcaccggaaagaccatcacccttgaggtggaaagctctgacaccatcgacaacgtcaaggccaagatccaggacaaggaaggaattcccccggatcagcaacgtctcatcttcgccggaaagcagctcgaggacggccgtaccctcgccgactacaacatccagnaaggagtcaaccttcaacttgtccttcgtctccgtggtggcatgcagatcttcgtcaagactctcactgggcaaaacataa

SEQ ID NO: 12114 - DNA, 176 bp, Glycine max
  Clone ID: LIB3039-009-Q1-E1-C4
agggacaagcccatgtgattgatgtcccattccaactcccataacatgaagacattacttgatgacgtcgttcctcatcatgctaatagacgagtcgtgggtaaatccatctcccagaacaagataccgcagtctcgctcgccgccagtgtgcacattctgtacaactcgctctcc

SEQ ID NO: 12115 - DNA, 419 bp, Glycine max
  Clone ID: LIB3039-009-Q1-E1-G5
gtaacggtcaggaattcccgggccgacccacgcgtccgaagacgacagaaggggacaacacaacagagaaagaaaagagtaagagtatgggaggctcatggtcatggcagctcacatgtgccctcttgctactcttctccgccgtagtcaccgccactgaccacattgtgggtgcgaatcgtgactggaaccctggctttaactacactctttgggccaacaaccacactttctatgttggcgatcttatctcattcaggtaccaaaagaaccaatacaatgtgtttgaggtgaaccaaactgggtatgacaactgcactacagaaggggcagtggggaattggagcagtgggaaggatttcataccccttaacaaggccaagagatattacttcatttgtggcaatgggcaatgcttc

SEQ ID NO: 12116 - DNA, 365 bp, Glycine max
  Clone ID: LIB3039-010-Q1-E1-D12
aggggcacacgtttgttgagatagcaacaagcaataacatgaaaatgacagtgcttgttttgtctgttgctacagttttggtcacaggggaaggccatggctcagactaccacaagttccctctccacatgaaaactgggtttggtgggcaatacagcaatgaggtggcatgtgccaattggatgcttggcgtggaagcaaacatcgtagtcacgtggcaaactgttcctgcagcttgcggaaagtacatagctgactacgttctaggagaccaatatacatcacattccaagacagttaaccaacatgcttatttctatgctaaatccctcaaactcaccaacaaagatgtccttgtcttggac

SEQ ID NO: 12117 - DNA, 372 bp, Glycine max
  Clone ID: LIB3039-010-Q1-E1-F8
gattttcattgggtgctgatcggaacaaccagggaatataagagagaataagatgggtttcagaatggaattcgcggagaacttggtattgaaattgatggaggatccgaaggaaagggatcggaggttccgggagcacgtttatacagtgaaggacaggtgcgagaagacgaaggagatgtggagctaccctatgcgaccctatgggttttggacattcgaacgccacaattctcagcttgcttgggatgcacagattagccaaatagctgggaggatggacccctatgatgatatcctccaacatttctctataccacctaagtgactgttgctgaacttgccacatccattgtatgtgaataaagatat

SEQ ID NO: 12118 - DNA, 398 bp, Glycine max
  Clone ID: LIB3039-010-Q1-E1-H5
gcgtcaagcggaagtaagatgacacaagacgacagaacggggtacacagttgaatttgttgatcgacataactagaatcagtgtgaagggcctttgtgtccttggtttcatcaattttaggggttgggaacatgcaaatgtcaaacatatgacatgttccctctccgatgtgagcactggctatggtagcccgtactccggaggtgaaatgcgcaagttggaggcttgctgtggaagcacacaagatctttgactttgcgaccattcctgacgtgtgcgttacagcagcatacgtatacatccatggcgaacaatatcgctcagactccataacagttaaccaacatgcttacgtttaagccagagacctcgaagtccatcacaatgacacatttgtg

SEQ ID NO: 12119 - DNA, 241 bp, Glycine max
  Clone ID: LIB3039-011-Q1-E1-E2
acgcgtccaacggaagccaaaagacggactaatgggattatatttgagttcatatatctcaaagccatgaccaactctaaagtctctaatggtcactccgtcaccctacccatcattttggtggggctgaccatggcatactccaccgataacgtctctttcaacttcaactggttcaatacattctaatcatacatttagctccataaataagcagtatcccatccactagggtattaca

SEQ ID NO: 12120 - DNA, 433 bp, Glycine max
  unsure (1)..(433): unsure at all n locations
  Clone ID: LIB3039-011-Q1-E1-E5
gaagacgacagaaggggagtgagaagaagagggggtcagagtgagaaagagaaagagagaattcgtaaaccctaatttcggaaagatcggcgatgactgcctccaaggatcgcgagaacttcgtctacatcgccaaactcgccgagcaggccgagcgttacgaagagatggtggaatcaatgaagaacgttgcgaatctcgacgttgaactgacggtggaggagcggaatttgctttctgttgggtacaagaatgtgattggtgctcgcagagcgtcctggaggatcctgtcttccattgagcagaaggaagaaacanaagggaacgagttgaatgcgaagcggattaaggagtacagacagaaggtttgaatggagctatcgaacatctgtaatgatgttatgagagtgattgatgagcaccttatcccttc

SEQ ID NO: 12121 - DNA, 298 bp, Glycine max
  Clone ID: LIB3039-012-Q1-E1-D12
aagcgtcagcaaaaccatacaatggggaggtaaatcagacagaacggggctcaaggttcttcgatcatcgagataacgaaagttaatgattagaatttggatgtccgagagatcaacagggcgttgaatcttgaaatgtttccaaagggaatgctcgtatcctttcgtgaaccagatgtttgtgttggcaagatacgggttctaattcggggtcaataaaattcctgcggctggaaatcatgggggtcatctcaaaagaaagggaaacgagtctttatcaataattcgaatggtcttc

SEQ ID NO: 12122 - DNA, 392 bp, Glycine max
  unsure (1)..(392): unsure at all n locations
  Clone ID: LIB3039-012-Q1-E1-E12
acccacgcgtccatgcgagangacaaaaaaagggggaacaatttggtggagaaacctaaaaccattaggatgaaattgaaattgctggttttgttggttgcaaaatttttggcaccatatgagggccatggcgcaaactaccaaaatttccccctcaaaatgaaaactgggtttggtgggcaaaaaagcattgaggtggcatttgccatttggaggcttggcttgaaatcaaacaccgtattcaattggaaaactgttcctgcaccttgcggcaattcaaaagctgactactttcaaggaaaccattataatttagattccaaaacatttaaccaacaggctaatttcaatgctaaatccctcaaattcaccagcaaagatttctttgtctt

SEQ ID NO: 12123 - DNA, 403 bp, Glycine max
  unsure (1)..(403): unsure at all n locations
  Clone ID: LIB3039-012-Q1-E1-E4
ggaaaaattaattttgttaatcaaaataactaaaaccattttaataaaaataaaggcccttgtttcctccgttgcaacaattttggaagcatggcattgcaatgcgtaacaatatgttcccctctcccaatgaacactggctatggtgcccgtactccggaggtgaaatgcgcaagttggaagcttgctgttgaagcacacaacatctttggctttgagaccattcctgaagagtgcgttgaagcaacaaaggaatacatccatggccaacaatatagatcagactccaaaacagttaaccaacaagcttacttttatgccagagacctcgaagtccatcccaaggacacatttgtgttcagtatagatggcaccgtactctctaatattccatacntacaaa

SEQ ID NO: 12124 - DNA, 454 bp, Glycine max
  Clone ID: LIB3039-013-Q1-E1-B10
gtctagaattcacgggccgacgcacgcgtccatgaaagatctctctgcatctccttcagccttttctgctaacccaaaatctaaagtgacaagtcctccatcactcactggaacttcaatctcattagtttcaattatacaggcaagaaataatgcccggatattgatctctggctcattgagcttgttcagcaaccgatttttcaggtcaggtgtgcagaaggctgggagtccaaccaaacatgagaagtcaggtaatgagcagttcttgaatgaacttagcaaatggattttccatgaacgaggtcacctcaaggcggtgaatgtgcaacaccacaaagttggggaagctaatgaaacagccatctatcggatcaatgataatttggaatactctgttgaagtttatgagtggtctgggacagcatgggaaccttacgtagctgatgatgtt

SEQ ID NO: 12125 - DNA, 222 bp, Glycine max
  Clone ID: LIB3039-013-Q1-E1-C11
gggtcgaccgacgcgtccacccacgagtccgcccacgcgtccgcccacgcgtccggcgataagacgacagatgggggcacatgtttgttgagatagctagaagcaatacgatgaaaacgacagtgcttgttttgtttgttgctacagttttggtagcatatgaatgccatggctcagactaccagaagttccctctccaattgaccactgggtttggtgggc

SEQ ID NO: 12126 - DNA, 54 bp, Glycine max
  Clone ID: LIB3039-013-Q1-E1-H6
aattcccgggtcgacccacacgtccaacggggtgcgaaaaaaccaccgaaaggg

SEQ ID NO: 12127 - DNA, 412 bp, Glycine max
  Clone ID: LIB3039-014-Q1-E1-C6
gaagacgacagaagggggacagcacagcacaacgttgcacctcaaaatagcaatggcagcgaaaacttcctctgaaactgaaaaagagtgttcctcctcacagtcactgaaaatttcaaaggatttaaactttcgacgtgtttctgagaccttagatctgttcagagcgatggggaccaatattatcgcaccggaaaatagcaacacgcatggcttcttcgacggcttccttcggagtttcataaagctcgatcacatccaacgcggtcgaatcgcctgcacccttctcgtcaaaggccccatctgtaatggttttggaacacttcatggaggggctattgggtcctttgttgtgattttgtctactgcttgtgctagaaccgtaactgctgagaacaaggaactttttctc

SEQ ID NO: 12128 - DNA, 335 bp, Glycine max
  Clone ID: LIB3039-014-Q1-E1-H10
ggagtcagattcgcacgcattgcttcgcctcacaacagcagctgcagcagcaatggctcccaaacgaggtggaaaggctccggctcttgccgctaagaagaagcctgagaaggtcacgaatccgttgttcgagaagcgtccgaagcagttcggaatcggaggggcgttgcctccgaagagagacttgactaggttcgtgaagtggccaaagaatgttcaaattcagaggaagaagaggattctgaagcagaggttgaaggttcccccatctttgaaccagtttaacaaaactcttgacaaaaacctagcaacaagtctgttcaagttgcttctga

SEQ ID NO: 12129 - DNA, 95 bp, Glycine max
  Clone ID: LIB3039-015-Q1-E1-B12
ggtcaggaatacccgggtcgaccaagccttcaacggatgcgtcagcacaacagtccgcggtggctcctgtatggcagatagaagcctacacaacg

SEQ ID NO: 12130 - DNA, 425 bp, Glycine max
  unsure (1)..(425): unsure at all n locations
  Clone ID: LIB3039-015-Q1-E1-H12
cgggtcgacgcacgcgtcagcccacgcgtccgaagacgacagaagggggcacaagtgagtttgttgatcgagataactagaaacagtgtgatgaaaatgaaggtccttgttttcttcgttgctacaattttggtagcatggcaatgccatgcgtacgatatgttccctctccgaatgaacactggctatggtgcccgtactccggaggtgaaatgcgcaagttggaggcttgctgtggaagcacacaacatctttggctttgagaccattcctgaagagtgcgttgaagcaacaaaggaatacatccatggcgaacaatatagatcagactccaaaacagttaaccaacaagcttacttttatgccagagacctcgaagtccatcncaaggacacatttgtgttcagtatagatggcaccgtact

SEQ ID NO: 12131 - DNA, 382 bp, Glycine max
  Clone ID: LIB3039-015-Q1-E1-H4
taacggtcagggattcccggctcgacccacgcgtacgaccacaaggggggacagaaggtaataggggttttgagtgccgcggtccacacactcttctctgcagcttttgcctacaactcccttcaccatggctgaacaaaccgagaaagcttttctgaagcaaccaaaagtgtttctcagcacaaagaagactgggaagggaaagaggcctggaaaaggtgggaaccgcttttggaagtccattgggcttggatttaagactcccagggaagccatcgaaggaacctatattgacaagaagtgccccttcactggcaatgtttccatccgtggccgtatcttggctggaacatgtcacagtgctaagatgaacaggactatt

SEQ ID NO: 12132 - DNA, 373 bp, Glycine max
  Clone ID: LIB3039-016-Q1-E1-C9
ggaatcaattgatgtcttgtccttctcctccctcagttcctcttcactccctttcattctccctcgcctcacacgcacacgcacacttgtcattctcaaaacacgcccaaattcgaatcaaattagggttagggtttccaactcccctcgaattatccctgtaatgcagtttaattcccgggtcctactaccatggagccatcagcaatgtacggacactcccagcccctgagcatgccctcgcagatcggcggcggcgaaagcgacgacggctccggaaacgagcacgccgtcgacggccaccaccaccacattcagtacgaaacgcacgcgctcgaggacggtgccgccgtcgtcgtcgaggatgttaact

SEQ ID NO: 12133 - DNA, 383 bp, Glycine max
  unsure (1)..(383): unsure at all n locations
  Clone ID: LIB3039-016-Q1-E1-F4
acacagacacaaattacatagcctcagtaatctgagagagaaacanaaacaatgaaggtttccattgccaagttccactcccttcccctatgttttttccttctcttggccttcaacacaaaacccctcctagcagcagaaccagagccagtggttgataagcaagggaaccctttggagccaggagtagggtactacgtgtggccactttgggctgatgaaggaggcctcacactatgccaaacaaggaacaagacatgccctctttatgttatccgtgacccttcattcattggcaccccagtttcattcttagcaccaggccttgaccatgttccaacactcactgatttaaccattgatttccctgtggtgacagtgtg

SEQ ID NO: 12134 - DNA, 315 bp, Glycine max
  Clone ID: LIB3039-016-Q1-E1-F9
ggagtcagattcgcacgcattgcttcgcctcacaacagcagctgcagcagcaatggctcccaaacgaggtggaaaggctccggctcttgccgctaagaagaagcctgagaaggtcacgaatccgttgttcgagaagcgtccgaagcagttcggaatcggaggggcgttgcctccgaagagagacttgactaggttcgtgaagtggccaaagaatgttcaaattcagaggaagaagaggattctgaagcagaggttgaaggttcccccagctttgaaccagtttaccaaaactcttgacaaaaacctagcaacaag

SEQ ID NO: 12135 - DNA, 375 bp, Glycine max
  Clone ID: LIB3039-017-Q1-E1-C6
cgcgtcaagttttcttcgttgctacaattttggtagcatggcaatgccatgcgtacgatatgttccctctccgaatgaacagtgggtatggtgcgagtactccggaggtgaaatgcgcaaggttggaggcttgctgtggaaacacacaacatctttggctttgagaccattcctgaagagtgcgttgaagcaacagaggaatacatccatggacaacaatatagatcagagtccaaaacagttaagcaacaagcttacttttatgccatagacctcgaagtccatcgcaaggacacatttgtgttcagtatatatggcaccgtactctctaatattcgatactaccaaaaacatggatatggggtggaaaaattt

SEQ ID NO: 12136 - DNA, 402 bp, Glycine max
  Clone ID: LIB3039-018-Q1-E1-A4
agacgacagaagggctcttggttggtgtattgaatgggtatggctgttgaaagcttttgcctttcttgtttgaatgattaaactagttctaatcgtttcagatgtttactgtgatggcattgggggggatcttatgattgtctgttgatgggttttgcagcttcaggcatattttcttgttcttgatgacattatggataactctcacacacgccgtggtcagccatgctggtttagagtgcccaaggtttgtagaaagaataacatgtgccattttgttatctttatgctactgttgcgataaagcaattatctccaatttaggtaagggtgtaggttggaatgatttcagccaatgatggagttctactaagaaaccatattccacgtttccttaaaaag

SEQ ID NO: 12137 - DNA, 433 bp, Glycine max
  Clone ID: LIB3039-018-Q1-E1-G5
ccgggccgacccaagcgtccaacgactcacacattgcatctgctaactctctctctctgcgctctccactgaaccgagtctgaaagaggagaagatttaactaactccaatggctgcacgtgcggctgcaaggtacggatccagaaggctatttagcagtggttctgggaaaatacttagcgaggaggaaaaagctgcagagaatgcttactttaagaaagctgagcaagagaagttggagaagcttgctcgcaagggtcctcaatcagaagcagtctcggggggttcagtaactgatgccaaaccaagtagctcaggacatactggaacatcagttgacagagtttcaactgacaagtaccggaattatgcacttgtaactggtactgtaacaatgcctggggccttggggtggtaccctaaaggcactgca

SEQ ID NO: 12138 - DNA, 397 bp, Glycine max
  Clone ID: LIB3039-018-Q1-E1-H6
tcccgggccgacccacgcgtcaggcatcagcgaaatctcctccaaattccacctcgaggtctttcaggaggccgaacttctcgttaacattaaagagcatgagcttgtccccgaacatcaggttctcactgacgccgagaagaaaaccttgcttgagagatacactgtcaaggaaactcagctacctaggattcaggtcacagttccggttgcaaaatattatggattgaagcgtggacaagttgtcaagattatccggccaagtgaaactgctggcagatatgttacataccgatttgttgtataagaatttgctttaacatatttggttatactgtcatagtgatggatagggatataaagccttctttttgcagggggggaactcttgatttac

SEQ ID NO: 12139 - DNA, 453 bp, Glycine max
  Clone ID: LIB3039-019-Q1-E1-A11
tacaggtcaggaattcccgggccgacccacgcgtcaaagacgacagaagggggcagtgatagcaaagagaagatcatttcataatcagactcacctaactccgccatggctgctgttccctctactttcgctctaaccaaatctgcattgtccataaacaagctggaccactctctggtcaagatcaaaccatacagcttctctctgaatctaaaccgtctagggaggatggaaacatctttaaccagaaggcctctaacaattcaagccacatatagtgatggtggaaggcccagcagtgctagtgtatttgttggtgggtttctcttgggaggattaatagttggcactcttggttgtgtgtatgcacctcaggtagtatttgttactgaaatgtactttttcaagtgctagatgttggtgttcgatgggatacattcagatattttgtgt

SEQ ID NO: 12140 - DNA, 445 bp, Glycine max
  Clone ID: LIB3039-021-Q1-E1-A3
cggtcaggaattcgcggctcgaccgatgcgacaatacgacagaaagggatctggcagcagaagaacaagtagttgagaactaagaaggagaagcaaatggcttcctcaatgatctcttccccagctgttaccactgtcaaccgtgccggtgccggcatggttgctccattcactggcctcaagtccatggctggcttccccaccagaaagaccaacaatgacattacctccattgctagcaacggtggaagagtgcaatgcatgcaggtgtggccaccagttggcaagaagaagtttgagactctttcctacctgccagaccttgatgatgcacaattggcaaaggaagtagaataccttcttaggaagggatggattccttgcctgggaatccaatttggagcacggtttcgtgtaccgtgagcacaacaggtcaccaggatac

SEQ ID NO: 12141 - DNA, 321 bp, Glycine max
  Clone ID: LIB3039-021-Q1-E1-A7
ggagtcagattcgcacgcattgcttcgcctcacaacagcagctgcagcagcaatggctcccaaacgaggtggaaaggctccggctcttgccgctaagaagaagcctgagaaggtcacgaatccgttgttcgagaagcgtccgaagcagttcggaatcggaggggcgttgcctccgaagagagacttgactaggttcgtgaagtggccaaagaatgttcaaattcagaggaagaagaggattctgaagcagaggttgaagggttccccagctttgaaccagttttacaaaactcttgacaaaaacctagcaacaagtcggtt

SEQ ID NO: 12142 - DNA, 444 bp, Glycine max
  unsure (1)..(444): unsure at all n locations
  Clone ID: LIB3039-021-Q1-E1-E4
attcncgggtagacccacgcgtcagactcaagcacaacatctctatcgagtaaattaactatgaagcctaacctactaatatccctttccttcctgcctctctttgctttcctggctctttcagaagatgttgaacaagttgtgggcataagtggcaaccccattttcccaggtggcacatattacattatgccatcaacttggggcgctgccggtggtggattgaaactaggccggacaggaaactcaaactgcccagttactgttttgcaagattactcagaaatcttccgtggcacaccagtcaaattcagcatacctgggataagccctggaatcatctttacaggtactccacttgaaatcgagttcgcagagaaaccttaatgtgctgaatcctccaaaatgggtggcgtttgtggacattgaaatccaaaaggcatg

SEQ ID NO: 12143 - DNA, 412 bp, Glycine max
  unsure (1)..(412): unsure at all n locations
  Clone ID: LIB3039-021-Q1-E1-F7
agaagacgacagaagggggagtgcatccaacacgttgcaaggaatttgaggagagtggagatccagaaaagcatttccaggctcttttgtctttagctaaagagggaattcagaaaggaaaggtggttgcaattggagaatgtggattggactatgacaggcttcatttttgcccagcagagattcaaaagaagtatttcgagaagcaatttgaattagcatatatcacaaaactgcctatgtttttgcacatgcgagcagctgctgcagatttctgtgaaatagtggagaaaaataaggacaggttcactgctggagtcacccattcatttactggtantatggatgaaatgcattaangcttcccccatttgataaaatgtacataggcataaatgggtgctctctgaaa

SEQ ID NO: 12144 - DNA, 446 bp, Glycine max
  unsure (1)..(446): unsure at all n locations
  Clone ID: LIB3039-021-Q1-E1-G1
attcncgggcagacccacgcgtcagtggcaattggaacacttgcattatgccacaataacattgagggcctcaaaagggtagttaaaatgaagggaagtttaactgccaaagtgattgaccgaactaacaacaaggctgatgtctaaggtgctttccttgattttgcttccatgttggagtccaaggttgacaaaaatgattccaatgcaactaaagcattgagcaagctggaagctatacagaaaacttgcagagaatctggtctcttgagtaaaaggaaatcttacattgtgaaggatgaaagtggatatggctcaaccatgattaacgtactggtcatcatggtttccatcattttttcttatctgtctgctagccaccaaaataactaatcaacaagcaatgccttcttgcctttccgaacattgatatcatgcctcgttca

SEQ ID NO: 12145 - DNA, 420 bp, Glycine max
  Clone ID: LIB3039-021-Q1-E1-G11
tatggtctagcattcccgggccaacccacgcgtcaatgtaatcctgattgccacccggaggatattgaggccaccaaagaaaggttctgctgttcagcgtccccgcacccgaacactcactgctgtacacgaggcaatgctggaagatattgtattgcctgctgagattgttggaaagcgtgttaggtataaaattgatggttccaagattatgaaggtctttttggaccccaaggagcgaaacaacaccgagtacaaattggagacttttgctgcagtatacaggaaactttcgggcaaagatattgtgtttgagtatcctaccaccgaggcttaggttctatttgttagctttgcatttgtttctgaattatatatggtggatgctggttttgttaagttggctttaattctggattt

SEQ ID NO: 12146 - DNA, 457 bp, Glycine max
  Clone ID: LIB3039-021-Q1-E1-H5
ggtaccggtcaggaattcccgggccgacccacgcgtcagagacgacagaaggggatcatcacaaatatggaagaagaagctcctccagtgccacctgcaccgcccatagtggccatgctgccatcccctggcatgggccacctaatcccaatgatcgagttcgccaagcgagcggtgcgctaccataacctggccgtcaccttcgtcatccccactgacggcccaccttctaaagcccaaaaggccgtcttccaggccctcccggactccatttcccacaccttcctccctccggtcaatctctccgactttccaccgggcaccaaaattgaaaccctgatctcccacaccgtcctcctctccctcccttccctccgccaagccttccactccctctcctccacattaaaccttggcggccgtcgtcgtcgacctcttcgccaccgacgccttcgac

SEQ ID NO: 12147 - DNA, 250 bp, Glycine max
  Clone ID: LIB3039-022-Q1-E1-E10
cgggtgccaaaaaaacacaaaaagggagactcaattcattatcatcatctgcgtcaacgtcgcttctcttctctcatacggttatggttttgttcacgtcactgcgttcccagtccttctaattcaatggctcagcaatatgctgagaatggtacgtccgacattgctgctgctgagttctctctgtgtcaccttcaagctgcactacctcatcgaaactcgtaatccgaactacgccgattctgttcta

SEQ ID NO: 12148 - DNA, 397 bp, Glycine max
  Clone ID: LIB3039-023-Q1-E1-A3
gggtcgactcagtcgtgagtacagatgcaaacagaaggggatagcgaaacagagagtggtttcagtgagtgatcggtgttcagttgatccttcataagtcgtcatcatcatcatcatcatcaccgttgattgaagaagatgccgatcagaaacatcgccatcggaaggcctgaagaggctactcaccccgacacgttgaaggcggggttggctgagttcatctccaccttgatcttcgtgttcgccggttcaggttccggcatcgcctacaacaagctcaccgacaacggcgccgccactcccgccggcctcatctccgcttccatcgcccatgctttcgccctcttcgtcgccgtctccgtcggcgccaacatctccggggggcacgttaaccccg

SEQ ID NO: 12149 - DNA, 224 bp, Glycine max
  Clone ID: LIB3039-023-Q1-E1-E2
tcgtaagtgacgatgcgaaggggcaacagtttgttgcgttagcaacatcaactctaacgcgtgtataacagattcagatacatgtagccacccatgtggcagcaacctgcaacgtgtgatcagaatattaaaaatatccactccccatgtcaactgtctgccgtggtcttcataatcccgaggtgacaagtgcaaattttaggcttaacatgaaagctgtcaac

SEQ ID NO: 12150 - DNA, 436 bp, Glycine max
  Clone ID: LIB3039-023-Q1-E1-H2
ggtcgacgcacgcgtcagagacgacagaagggggtgattttacacaaggaaatggaatgggtggagaatcaatttacggagagaagtttgctgatgagaacttcaagttaaagcatactggaccaggacttctatcaatggcaaatgctggtcctaataccaatggttcacaatttttcattacaactgtgacaactagctggttggacggaaggcatgttgtttttggtaaagttctttctggaatggatgttgtttacaagattgaagctgaaggaacacaaagtggcattcccaagagcaaggttgtgattgttgacagtggtgaactccctctataattgtacttcttgattctcaatcaggacttgttgaaggtgttcccagttttcatttcaattccatctacgagactacttatcctttataagcatgt

SEQ ID NO: 12151 - DNA, 389 bp, Glycine max
  Clone ID: LIB3039-024-Q1-E1-B1
ggagtcagattcgcacgcattgcttcgcctcacaacagcagctgcagcagcaatggctcccaaacgaggtggaaaggctccggctcttgccgctaagaagaagcctgagaaggtcacgaatccgttgttcgagaagcgtccgaagcagttcggaatcggaagggcgttgcctccgatgagagacttgactaggttcgtgaagttgccaacgaatgttcaaattcagaggaagaatatgattctgaagcacaggttgaaggttcccccagctttgaaccagtttaccaaaactcttgacataaacctagcaacaagtctgttcaagttgcatctgaagtgcatgcccgaggacaaagctgaaatcaatgagatgctcttgaaaaaggctc

SEQ ID NO: 12152 - DNA, 246 bp, Glycine max
  Clone ID: LIB3039-025-Q1-E1-H12
cggtcaggccttcccggctcgacacacgcgtcaggtgctgtgacagctgatatggttatgctttctacagatgaaccagagaagaagaaaaaagcagcaagtaacggaaatggcggttctcagaatggtaactcaatgcactatgggaccctggttggggaagtgaaagctaatttgaagaaaggtattggagcgaatgaattgctgtcccaacctttaacacatcctggaactgctcaagaaaag

SEQ ID NO: 12153 - DNA, 481 bp, Glycine max
  unsure (1)..(481): unsure at all n locations
  Clone ID: LIB3039-026-Q1-E1-D4
acgccgccatgtaccggtcaggaattcccaggtcgaccacgcgtcaaacggtgccaaaaaaccaacaaaagggaaaaacaaccttaggtaactaaagaaacaaaggaattaaaaaatcctccggaaacccaacttacaaaaaaaaggttccaaccccaaccgcaacaaattccaacttccaagcccctcccaagaaacaagttttccagaaaaaatttttccaagttttttcctaaaaaggttaaaaattaatnaaggaattgggttcaaaggtgggcctgttctacangagacgcgtgttgagtattttagacggaacgattttgtgagcttcttgaaaaaccatccggagctcaaagacgtcctagaatcagataggaatttggaaacagaggagattgccaacattctactcgcaaaaaatcttttagtgcgctgtgatcgtgttgtgaaaactgttcgtcctgngaagaaaaagctg

SEQ ID NO: 12154 - DNA, 369 bp, Glycine max
  Clone ID: LIB3039-026-Q1-E1-F11
ggaatcaaagtcaagttaaagggcaaaacctgataaccgcaaaattaaaaattgaaaattaaaatttaaaacagatgttgaaagtaaagtcggtggtatgattcatcattctctttcagtttttggcattgaagaatctgagatcggaaaattcacctctccaacccccaatcccatcgttgcaaatgatccgattcattctgttgcagaacaggcagggcaagacccgtcttgccaaatactacgttcctctcgaggattccgagaagcacaaggtggaatacgaggttcaccgcctcgtcgtaaacagagaccctaaatacacaaatttcgtcgagtttcgtacgcacaagataatatacaggcgat

SEQ ID NO: 12155 - DNA, 373 bp, Glycine max
  Clone ID: LIB3039-026-Q1-E1-G11
gagggcactcgttttcgttctcgtccaggtctaaacatctttgcgaacgacgttcacagcgctcacccctacatgcagaacgatgaaggacagatcactgagctttacattcctaggaactgctccgcgcacaacacattgattaccgctaaagatcaagcctcggttcagatcaacattgggcatctcgaagaaaatggagtcgacaatggacaattctcgacatttgccctctgccgattcagccgtgctcaaggtgatactgacagtgctcgacaccgcttgtggcacatcaagacagttgaagttaagcagcagtagacacccacgatagcatgtaacatcgtgaggtatgcatttccactcttgctac

SEQ ID NO: 12156 - DNA, 401 bp, Glycine max
  Clone ID: LIB3039-026-Q1-E1-G3
agggggacaagtgaatttggtgatcgagataaccagaaacagtgtgatgaaaatgaaaggccctggtttcctcggtgccacaaatttgggaacaaggcaatgccatgcctacgaaaagttccctccccgaatgaacactgggcaaggtgcccgtactccggaagggaaatgcccaagttggaaggcttgccgttgaagcacacaacatctttggctttgagaacattcctgaagagtgcgttgaagcaacaaaggaatacatccatggcgaacaatatagatcagactccaaaacagttaaccaacaagcttacttttatgccagagacctcgaagtcgatcccaaggacacatttgtgttcagtatagatggcaccgtactctctaatattccatactac

SEQ ID NO: 12157 - DNA, 430 bp, Glycine max
  Clone ID: LIB3039-027-Q1-E1-B7
accggtccaagaattcccgggccgacccacgcgtcagagacgacataaggggagctctcacacttgcgattggaggaactcgagatcagcagaccctaacacacactctctgtcgctcttcgaatctgaattttttttccatcttctccacgatcattgcgattgagattgagagtaaccctaacacacaacgaagtacatacacacacactcactcactctgttgcgatttctactttggattcaatgggtatgaatggtgcctctcgcaatcattcacgcaagccaggcttctcttcgccatggagccaaattgtctctgcagcagcacctcactcctcctcaacgccgtctgaagactctgacaacgtgtgcgggagcaatgcagacaccggtaataaggctgcgtgtattaaaccctcgactggcg

SEQ ID NO: 12158 - DNA, 464 bp, Glycine max
  Clone ID: LIB3039-027-Q1-E1-C12
taccggtctatgattcccgggtccacccacgcgtccagaacgggttggcaaaaagacaacagaaggggactcaccacttcaaaacactcataacacaaagcacaaagcagagctcatccttgagttaaaaaatggcagcagcttcttccatggctctctcatccccatccttggctggcaaggccgtgaagctgggcccatcagccccagaagtgggaagggtgagcatgaggaagaccgtcaccaagcaggtctcctcaggaagcccatggtacggcccagaccgagtcaagtacttgggcccattctctggcgagcccccgtcctacctaaccggtgagttcccaggcgactacggctgggacactgctgggctttccgcagacccagaaaccttcgccaagaaccgtgaactcgaagtgatccactccaggtgggccatgctcggagccttgggctgcgtc

SEQ ID NO: 12159 - DNA, 413 bp, Glycine max
  Clone ID: LIB3039-027-Q1-E1-F11
aagacgacagaaggggacgactacggggcaggagatagatgtattgtatcaaaaggtggacaacatcaacgatctgaaaggtttcaattgggaatctgatgtaggctttggaggttcttctacttcccaggatgctttcaatttatcaattataccacaccacagaggattccagtgattgagtgagtggatatgaatatggaaggaccttatgatttatcacgcaatggagaagctggtaacaaaagccttcagatcattaaatactctccttataaaccctgcaccatgatatcatcatcaccttggtttgatctaagagtgttttatgtgagagtgtgtggcattcaggttgatgaatcaccccagagtttctctctctcaatcatattcctcttagtcctgataccctt

SEQ ID NO: 12160 - DNA, 331 bp, Glycine max
  unsure (1)..(331): unsure at all n locations
  Clone ID: LIB3039-027-Q1-E1-H8
ggaaaacaaaacaatccttggaacaaaacaaanaaagacaacacaaagaaaaacgtcttaataaacggtcttctctgaaaaacctgatttcttctcttcttctcttctctttcgtttcgatcttcgatctctgaaaatgagagagtgcatttcaatccacatcggtcaggccggtattcaggtcggaaacgcctgctgggagctctactgcctcgaacacggcattcagcctgatgggcagatgccaagtgataagactgttggtggacgtgatgatgctttcaacaccttcttcagtgaaactggggctggaaagcacgtgcctcgtgcg

SEQ ID NO: 12161 - DNA, 401 bp, Glycine max
  Clone ID: LIB3039-028-Q1-E1-B2
gtacggtctagaattcacgggccgacccacgcgtcagaagcttctgcttttgtgatggaactagagagctgagaggcctaaacctctgtttgctctctcaccctttttggtgcagatcttgaacttgagctgcattttcatagaaaaccagcaccaagaaatggaacataccatgttacctgccattggatctgttttccctcgtggtgtctttgccgcactcttgctcatgttactgttttctttctccacattcacttctatagaagcctatgatccacttgatcctaccggaaatataacaatcaagtgggatgtcattagctggactccagatggctatgttgctgttgtcacaatgtacaactttcaacaatatcgccacattcaggcccccggat

SEQ ID NO: 12162 - DNA, 410 bp, Glycine max
  Clone ID: LIB3039-028-Q1-E1-C1
cggtctagaattcacgggccgacgcacgcgtcagatgtataagcatggacttctagcatactattgtttgattaaccaagttcttccatattggttgaggaagcctcgagtcaatatttagtttttgctgccatctgtgggtttctgatggatgatgccgggcatcgtgaaaatggaaggcacaaagcagcagatcaatataaatctgctcagggacagtggttgatgcaacatcagccttccatgaagcagattatggcaattatggctgaaagagatgtagccattcaagaaagaaatctggccatttccgagaaaaaagcagcatatgctgagcgcgatatggcattcatgcagcgagatgctgcaattgctgaacgtaataatgcaattttggaacgagataatgc

SEQ ID NO: 12163 - DNA, 328 bp, Glycine max
  Clone ID: LIB3039-029-Q1-E1-D3
acgcgtcagaggcagcataggaacgggcagctgcagtgaatgcatctacaggttaagagagtctgggatgtcatctgttctgttggatgtgagaccatgggacgattatactgacatgcataagcacgaccaaacagtgtgatctgtgcaaatggaacggttgctttggggtgcatccatacttgtacctgttgggtactgtatcaagagactgcatgttatgcttactattgtggatgacctagtttctgttgctactcttattgaggaacatctcacagtttagcccatcaatgaatatgtccatagttgtgacattgtggacttc

SEQ ID NO: 12164 - DNA, 454 bp, Glycine max
  Clone ID: LIB3039-029-Q1-E1-F11
ggtctagaattaacgggccgacgcacgcgtccagtggtatccatccgcgcatattctcatttcaatttgcatttgcatttgcgtttcatttggcgttttgtttcattctggaagcttcgttcgggcatcaatggcgtccttcgatgaagctcctcccggaaactccaataacagggataagatcttcaaaatcaagtgcgctcaatgggacaccgtcgacaaaggtgccgggcacaaataaggacccaatctgaatggtttgtttggaagacaatctggtagaactcctggaaattcctattctactgctaacaaaaacatggccgtgatttgggaggaaaagaccctctatgattacttgctcaaccccaaaaagtatattctaggaacgaagatggtatttcctggtcttaagaaacctcatgaacgtgcagatcatagtgcataacttaaa

SEQ ID NO: 12165 - DNA, 330 bp, Glycine max
  Clone ID: LIB3039-029-Q1-E1-H3
ctaaagtatggaacaagggcgcataatttattaaagccacgaaagagaaaacaacatagtgaagtctcttacatgacttgttgacacacagctgaaacaacataaagtgaagctagtgcccctatttgaacgcatcttattacatatagatagataggagcaagtgagtttgttgatcgagataactagaaacagtgtgatgaaaatgaaggtccttgttttcttcgttgctacaattttggtagcatggcaatgccatgcgtacgatatgttccctctccgaatgaacactggctatggtgcccgtactccggaggtgaaatgcgcaag

SEQ ID NO: 12166 - DNA, 431 bp, Glycine max
  Clone ID: LIB3039-030-Q1-E1-H10
ccgggtcgacccaagcgtccgaagacgacagaaggggacaactatatgtgtgacattgaatacataattgctaggcatctctgaaatcaggcaagtgaaaaccaaaaataaaatggtctcacagacagttgaactcttaaagaatgagattcctctggagcaggaatcagtggttttagctgaagatgctgtaaatggtctcgttcttgtggacatcataaatggcttttgcacagttggtgctggaaatctggctccaagagaatccaatacgcagatttcgggaatgatcagtgaatcagcaaggctggctagagtgttctgtgagaagaatttgccggttatggctttcctggattctcaccatcctaacaagccagaggacccttatccccctcactgtattgttggctctgatgaatcaaatctgg

SEQ ID NO: 12167 - DNA, 278 bp, Glycine max
  Clone ID: LIB3039-031-Q1-E1-H11
agacgtcagacagacggcatcaggggaacagaaagtgctgcatcagtgcgttcgctcatgattaggattagcgacagtgtccttgatttcaacgtcgatgctctctccgttgatagcattttggtcgcagtggaatcacacccacactagatggtcactcttcggaggcctcatgccctcaggtgcttctatgttccgatgtgaagtgtgcagcttttacgcacactgtgtaggaacatcagaccattgatgctgagaccattcttgaagagtgtgtt

SEQ ID NO: 12168 - DNA, 378 bp, Glycine max
  Clone ID: LIB3039-032-Q1-E1-B5
gaatctaccgttgggtcaactcataacctccatttcgaaaggcatcctcgacgtcaatttcgaacccagcgatgcacataagtctcgagcactgcccatctatgtctctgttggttagagtgaatatggtctcaggatgccagacacggtcttcgaacagattatgtgccacacgccactgttttccacagcatcatacacagtgcgtacatttgagattagtataaatgcgacaatggccagcgatatcactgtcatcagtaagacagcattgcagcttatggaaagtggctcgacggtgacagaatattcacttcttatgaagaacttcagtgagactggatgccacggctgtgatatgcaggtgcataccgagtt

SEQ ID NO: 12169 - DNA, 439 bp, Glycine max
  unsure (1)..(439): unsure at all n locations
  Clone ID: LIB3039-033-Q1-E1-B11
attcaagggccgaccgacgcgtccaacggctgcaaaaaaacccaaaagggaataaaatttaattccaacaaatccaaaccaatggcaacttcaaactccccaatggtcccccccttctcccaaccctcctttttggggcaacttaccaaggcaaactcaaccgataccgtttctttcaccttcaacaagttaaacccagtccaaccaaacattatgctccaaaaagatgctagtatttcatcctctggggtgttacaactcaccaaagttggcagcaacggcgtgcccacctcgggatctctcggtcgtgccctttacgctgcnccaatccagatttgggacagcgaaaccggcaaggtagccagctgggctacatcctttaaattcaacattttcgcacccaacaaatcaaactcagctgacgggcttgccttcttct

SEQ ID NO: 12170 - DNA, 360 bp, Glycine max
  Clone ID: LIB3039-033-Q1-E1-E9
aggcaaaagaccaaaaaaagggaacaaaaatcaattttttaactgaaatttcctcaacctcccccggttccccaaagaaacctggattaacctgtaacaatctcccaaggacaaaatgaaggtggatcttccgggatttctggccaagtccatttgggatgagggtcgggattgcacttgctgaaaagggtatcgaatatgagtacaaagaagaggacttgaggaacaagagtcctcttctcttacaaatgaacccggttcacaagaagattccggttctcatccacaatggcaaacccatttccgaatccctcattgctgttcagtacattgacgaggtttggaatgacagaaatccct

SEQ ID NO: 12171 - DNA, 60 bp, Glycine max
  Clone ID: LIB3039-034-Q1-E1-C3
ggtcaggaattcccgggccgacccacgcgtggaatcgaaaagaacgacagaaaggggaac

SEQ ID NO: 12172 - DNA, 332 bp, Glycine max
  Clone ID: LIB3039-035-Q1-E1-F8
aattcccgggccgacccacgcgtcagtccaggcgtcagacggctgcaaaaagagaaatgaaggggacaacacaaatcatcaacatcgaccaagagttaggcttatgcaccagatccatcatgggcacctctgctattcagctctcagcaatcactggtcaaactgcgctgaagcatctcaatgagttcgtccgcatcatcggtggcaccggcaagagtcgcactataatacgacggcaggtcaagagtgcgcctcatagcattcggtaaggctctgaccgtccgatgtacttgggtctattcgcggaacatattccatcacacctgatcgga

SEQ ID NO: 12173 - DNA, 403 bp, Glycine max
  Clone ID: LIB3039-035-Q1-E1-G1
ggtcaagaataccgggtcgagccacgcgtccagtttacgcattgaacgaaaattagggtttgtactgtagcaggaagaagcagcaatggcgccgcagagaacacgtaatgttagcagaaaccctgaattgataacgggaatcggaaagtactcgaggtcgcacatgtaccacaagaggggcatttgggctatcaaggccaaaaacggtggcgttttacctcgccacgaccctaaacccaagcctgaagctcctgctgaaaaaccacccaaattttacccagctgatgatatcaacaagccccttgtcaacaaccacataccgataccagctaagctcagggctaacactactctcgggacagtgttgattcgtcttgccggtagatttaacggaaacagggta

SEQ ID NO: 12174 - DNA, 445 bp, Glycine max
  Clone ID: LIB3039-035-Q1-E1-G6
tcccgggccgacccacgcgtcagaagacgacagaaggggtctctttttgctgtgggaagaggaaccctagctagggtttggaagaagctgatccgagaagatggtgcagcgtctcacctaccgcaaacgccacagctatgctaccaaatccaaccagcacagagtcgtcaagactcccggtggcaagcttgtttatcagaccacgaagaagagggccagcggacccaagtgccctgtcactggaaagaggattcaagggattccacatttaaggccagcagagtataatagatcaaggttacacagaaaccgaaggactgtgaaccgtgcatatggtggtgtgttgtctggcagtgctgttagagaaagaatcattcgagctttcttggttgaagagcaaaagattgtgaaaaaggtcttgaagatccaaaagacaaaggaaaaa

SEQ ID NO: 12175 - DNA, 373 bp, Glycine max
  unsure (1)..(373): unsure at all n locations
  Clone ID: LIB3039-036-Q1-E1-A1
tcccgggccaaccaagccttcattacggttgcaaaagaacacaaaaagggttggaatttggattgctcgttaacattgtgggagtttcgtatccttacgcgaggttcttccacgaagtggacgaagggcttctcaacaaccttattaaggttaacgttgttggaaccactaaggtcacgcaagctgttctgccagggatgctcangagaaagaagggggcgattgttaacattggttctggagctgctattgttattccttctgatcctctttatgctgtttatgccgccaccaaagcgtacatcgaccagttttcgagatgtctctatgttgaatacaagaagagtgggattgacgttcagtgtcagattcc

SEQ ID NO: 12176 - DNA, 436 bp, Glycine max
  Clone ID: LIB3039-036-Q1-E1-A3
tcccgggccgacccacgagtcagtcggatacgacaacagaagggggaaaagttgatttggttgttcaaaataactagaaccattgtgatgaaaatgaaggcccttgttttcttcgttgctacaattttggtaccatggaaatgccatgcgtacaatatgttccctctccgaatgaacactggctatggtgcccgtactccggaggtgaaatgcgcaagttggaggcttgctgtggaagcacacaacatctttggctttgagaccattcctgaagagtgcgttgaagcaacaaaggaatacgtccatggcgaacaatatagatcagactccaaaacagttaaccaacaagcttacttttatgccagagacctcgaagtccatcccaaggacacatttgtgttcagtatagatggcaccgtactctctaatattccaa

SEQ ID NO: 12177 - DNA, 440 bp, Glycine max
  Clone ID: LIB3039-036-Q1-E1-B5
aattcccgggccgacccacgacgtcagtgtaatcctgattgccacccggaggatattgaggccaccaaagaaaggttctgctgttcagcgtccccgcacccgaacactcactgctgtacacgaggcaatgctggaagatattgtattgcctgctgagattgttggaaagcgtgttaggtataaaattgatggttccaagattatgaaggtctttttggaccccaaggagcgaaacaacaccgagtacaaattggagacttttgctgcagtatacaggaaactttcgggcaaagatattgtgtttgagtatcctaccaccgaggcttaggttctatttgttagctttgcatttgtttctgaattatatatggtggatgctggttttgttaagttggctttaattctggattttctttaagggtggtacttatagaaaatac

SEQ ID NO: 12178 - DNA, 380 bp, Glycine max
  Clone ID: LIB3039-036-Q1-E1-H10
ggttgaatgtataacgctgctgccgaaacccttcccaatccctaaagtaagtgagtcctcggtggctgcgaatcgtggagaatgctaacggtacgaaggaagacgtggttaccatacagtccaccattaacctccacaaacgcctccactggctgcacatttaagaatacagctcctaaagctatgcaggagatacagaaatttgcccataacgccatggggaccaatgatgttacggtggatgtgaagttgaacacatttgtctggagccatagaatcaagactcttccacagatgattaaggtactaactgctcgcccgaggaatgacaattacaatgccaaggaagatctatactcacttgtcaccgttgttgagac

SEQ ID NO: 12179 - DNA, 417 bp, Glycine max
  Clone ID: LIB3039-037-Q1-E1-F12
attctagggccgacccacgcgtccagagagagagagagaaatggagaagacaggagtgttatcggcgaaggaggcattcgagaagcttgaaaaggtgggagaagggacatatgggaaggtgtacagagcaagagagaaggcaactgggaagatcgtggctctgaagaagactcgtctccacgaggacgaagaaggtgtccctcccaccactctccgtgaggtttccattctgcgaatgctctctcgcgatccccatgtcgttaggttaatggatgtcaaacaaggtcagaacaaggaagggaagacagtgctctacttggtatttgagtacatggacaccgatctcaagaaattcatacgctctttccgtcaatctggggaaaccattcctccccatatcatcaaaagcttgatgta

SEQ ID NO: 12180 - DNA, 473 bp, Glycine max
  unsure (1)..(473): unsure at all n locations
  Clone ID: LIB3039-038-Q1-E1-A10
gtaacggtctagaattcccgggccgacccacgcgtcaaggaagtcgccgtttgttttcttttcgttcgcatcttctctctctctcagaaagatgaaggtggtcgccgcgtatttgctcgccgtcctcggtggcaacaacagcccctccgccgatgtcatcaaggaaatccttggctccgttggagtagaagcagatgaagataggattgaatcgtttttgtctgaagttaagggtaaggatatagttgagcttattgctgccggtagggaaaagttggccacggttccttctggtggtggtggtgccgttgccgtcgccgcagctcctgngggaggtgctgctgctgctgctcctgctgctgaggcaaagaaggangaaaaggtggangagaaagaagaatctgatgatgatatgggtttcagtctcttcgattaattggtgtagtctattcagcttttttgttcagaacata

SEQ ID NO: 12181 - DNA, 290 bp, Glycine max
  Clone ID: LIB3039-038-Q1-E1-D9
gacccacgcgtccacccacgcgtccgcccacgcgtccgcccacgcgtccgcccacgcgtccgcccacgcgtccgcccacgcgtccgcccacgcgtccgcggacgcgtgggcggacgcgtgggcggacgcaagatcagacgagggggaggtagaggatgaagccgcggaggagggagacggagagaagtagaggattgagacgcatattcacggagatgatggatgtgggcctcagtgcgaagaggatggtttgacgctctgttgtaaagatgcgaatcagtgaggtggag

SEQ ID NO: 12182 - DNA, 371 bp, Glycine max
  Clone ID: LIB3039-038-Q1-E1-E1
gtcaagaattcacgggtcgacgcacgcgtccaatggcgtggatgatgccaaatatcccggtggaagctatggaaggggttacccaggtcatggtggtggcggttatcctggccatggcggtggcggttatcctggccatggaggtggtggtggctatcctggtcatggtggtggccaccctgttcatagtggctgctatgctggtcgtggtggtggatactgtacgcatggctgtttccgtgtgccggacatacaactgatgttgcataaggtgatgccatgacgctggggaagctgttgctgcagaaactcaagatgagactcacgattaatacgatgcagttctacttaattagtacctttgatatttt

SEQ ID NO: 12183 - DNA, 341 bp, Glycine max
  Clone ID: LIB3039-038-Q1-E1-E4
gggccgacgcacgcgtccaggcagccaaagaaaagaaaatcctcaattttctgagcagccaaacactctctctctgtctctcgaaaattctcagtttgcagagaaaatctgaatcatgtcgtggcaagcgtatgtcgacgatgaccttctgtgtgacatcgaaggtaaccacctcactcacgctgctatcatcgggcaagacgggagcgtttgggctcagagtaccgacttccctcagttcaaacctgaggagataactgccatcatgaatgactttaatgagcctggattacttgttccaactggattgtaactcggtgggaccaaatatatggtcatcc

SEQ ID NO: 12184 - DNA, 337 bp, Glycine max
  Clone ID: LIB3039-038-Q1-E1-E5
attcccgggccgacccacacgtccaactgtgttgtgccagcaaatggagtgtctgtgttaccagactcattgccatatacagagtctgcaattctaggatgtgctgtttttactgcttacggcgctatggctcatgcagctcaagtgcgtcctggtgattctgttgctgttattggaactggaggtgttggttctagttgtttacagatagctagagcctttggtgcctcagatataattgctgtggatgtacgggatgaaaagctacagaaagcaaagacatttggtgctactcacactgtaaattcagcaaaggaagatcccattgaaaagatac

SEQ ID NO: 12185 - DNA, 454 bp, Glycine max
  Clone ID: LIB3039-038-Q1-E1-F9
ccgggtcgacccaagcgtcaaaagacgacagaaggggacagctattcctcttaagcttgctactgagtttccacactgcataccttaggtcttccgaattcgaagttaatttgcaagatggctaaggaaaaggctcagatcaacattgtggtggttggtcatgtggaccctgaggaggcagccaccattaacgagctgaagaagcctgttgtggagaaagaagctccagggcatgccatatgagggcatgcacgtacggcctcggaggggaaccagaaaattatgttaacaaaataatctggaaccctaatgtatcagtgtcatcatcagtgtgtagtttaagctagctttgctatggttacgttctttgagatgagagtcttgatgaacagtaccattctgatgtattgctttccttgaaagttaatgcatgcttcttatcttctgtctagct

SEQ ID NO: 12186 - DNA, 325 bp, Glycine max
  Clone ID: LIB3039-039-Q1-E1-A3
gtacgcctcaggaattccaggctcgaccgacccgtccgttgcgaaacgacaacacaacggggcggaggtaactttgctgattgagacaactattatcagtgtgagtttgatgaacgtccttgatttcttcgcttgcagcattcaggtatcagggcaaggccatgcgtatcagatcttccactcgtcaagtgaacactgcttcaaggggccagtacaccagaagttaaatgcgcaagttggaagcatgctgtggcagtatacaggaactttgactttcatatcaatcctgactattgcattgatccaaaataggcatacatccatg

SEQ ID NO: 12187 - DNA, 469 bp, Glycine max
  Clone ID: LIB3039-039-Q1-E1-D2
acgcggctaggtacgcgtctaggaattcaggctcgacccacgcgtacggatagatagctccttcaattagggtttttgtgatctgcaagctacgatgggtaagggaacggggagtttcggtaagagaaggaacaagacccacaccctctgtgtgaggtgtggccgccgcagtttccacctccagaagagtcgttgcgccgcgtgcgctttccccgctgcgcgcaccaggaaatataactggagcgtgaaggccattaggagaaagaccaccggaactggaaggatgaggtacttgcgtaacgtgccccgtagatttaagagtggcttcagagacggtaccgaagctgcacccaggaagagaggagctgctgcctctacctaagctttgaataatagcaatttttgctgggtcagtgaattatataagatttaatgtttctaggttgatgccgagctctttgggacacgt

SEQ ID NO: 12188 - DNA, 413 bp, Glycine max
  Clone ID: LIB3039-039-Q1-E1-G8
gcattcccggctcgacacacgcgtaagacacacaagttcattcacagagagatagaatcactgaagagcttcaatggcggtttctctctctgttactcctctttctctctccaattcttctccttctctatcttccaagccaaagtttccatctttgtgctttctctctggcaacaacaccttgagggtcaaatgcccaaaaccttcgcactcaacaactgttgttcatgttgctccagaagcgttggattcttcacctgatcccttagacccacctccagaaacccttgatgatgactctgacgccaccacctttgaagttggtgacctggggactcctagcacttcggcaattagcattggtggcgatgcagatacaatgggaccaaagcacaaagattagaatcaagctt

SEQ ID NO: 12189 - DNA, 364 bp, Glycine max
  Clone ID: LIB3039-040-Q1-E1-B2
cggctcgagccacgcgtcagatgattatgggaggtggaaggtgtactagaaggtaaaagcatggtgcatgaagtggatttgaggttttggtttatatatgagtacagaggtgcacccctttggaattaaactggtcaccttcatcaatcttgtcactgtcaaccagtattgaagggggaaccaaatggttggtcaacaagttaaaaggaaagatgcaaaaggcattaacagagttgctaaaggagtatgatctacccatatgaatctttcctcgcgatgcgacaaactacgaatttaacgaagagacaggaaagcttgttgtttacattcctcaagtgtgtgaggttggctacagggattcgtc

SEQ ID NO: 12190 - DNA, 422 bp, Glycine max
  Clone ID: LIB3039-040-Q1-E1-C2
ggctcgagccacgcgtcaggacagaaggggacttcagagttaagttgagaacataccaatctacaataaacgatgattctcattatctccctcattttttctcttctctctttctcccatgcttctgtcctagatttctgtgttgcagattatgcaggtcctattggacctgcaggatattcctgcaagaagccttcaaaggtcacagcagatgattttgcttacagtggccttggcattgctggtaacacctcaaacattatcaaagctgcagtgacccctgcatttgatgctcagtttgctggtctcaacggtcttggcatttccgcagcacgtttggacttagcagcaggtggagttataccacttcacactcatcctggagcttcagaattacttgttgtaattgaagggagcatcct

SEQ ID NO: 12191 - DNA, 425 bp, Glycine max
  unsure (1)..(425): unsure at all n locations
  Clone ID: LIB3039-040-Q1-E1-D6
ccggctcgacccacgcgtacgacgcgagaagagacagaagggggcacaagtttgttgagatagctagaagcaataagatgaaaatgaaagtgcttgttttgtttgttgctacagttttggtagcatatgaatgccatggctcagactaccagaagttccctctccaaatgaaaactgggtttggtgggcaatacagcaatgaggtggcatgtgccagttggaggcttggcgtggaagcaaacaacgtagtcaagtggcaaactgttcctgcagcttgcggagagtacatagctgactacgttctaggagaccaatatagatcagattccaaaacagttaaccaacaagcttatttctatgctaaatccctcaaactcaacaacanagatgtctttgtcttggacgttgacgacactactctctct

SEQ ID NO: 12192 - DNA, 410 bp, Glycine max
  Clone ID: LIB3039-040-Q1-E1-E12
ctcccgggctgacccacgcgtcagggggtgctgtgagtgagacaccgatagatagagagcgcggcataacctaaacctatctttcttctctctctgtgtgtgcgcttcaacggcaaccagaagcagccatggccactgcaaggactgtgaaggatgtttcacctcatgagttcgttaaggcgtactcctctcacctcaagcgatccggcaagatggagctgccagagtggactgatattgtgaaaactgcaagatttaaggagttggctccttatgatcctgactggtactatgtcagagctgcttccatggcaagaaagatctacttgagaggaggacttggtgttggtgcctttcagaggatttatggtgggagcaacaggaatgggaatccgcctcctcatttttgc

SEQ ID NO: 12193 - DNA, 368 bp, Glycine max
  Clone ID: LIB3039-040-Q1-E1-E3
acgcgtcaggccgcacagattccgtccggggaacgtagcgctccgcgagattcggaagtaccagaagagcacggaacttctgatccggaagctcccgttccagcgattggtccgtgagatcgcgcaggacttcaagaccgaccttcgatttcagagctccgccgtcttcgccctccaggaagccgccgaggcctacttggttggtctcttcgaagacaccaatctctgcgctattcacgccaagcgtgtcactatcatgcccaaggatattcaactcgctaggcgtattatgggcgagcgcgcttaaatctaattattgattctctgtatagacgatttcaatttcaagcgttcttagttagaacttt

SEQ ID NO: 12194 - DNA, 360 bp, Glycine max
  Clone ID: LIB3039-040-Q1-E1-F12
gaccaacgcgtcagcccacgcgtccgacgacagaagggctccgatcaagtgacacacgatacgaacaaaagctgatccatccagtcaacaatggaggaagttcaagagtctcaaacccaatcatcgctcggtcaagaagaggaaaatgaagtgattactgaaagttcagcatttgttaagggggaaccggcaccagaattcagtagtaaccccccaaaagttgattctgaagttgaggtccttcatgagaaggtcagcaaacaaatcattaacgaacgtcatggccagaaaccttccaaatattcaacttgcttcttccattacagggcgtgggctgagaaatcacaacacaagtttgaa

SEQ ID NO: 12195 - DNA, 432 bp, Glycine max
  Clone ID: LIB3039-040-Q1-E1-F8
aattcccggctcgacccacgcgtacggcgtttcactcggatcgcgcattcacaaataaggttgaagaggtcactgccggaagaagggagcaacaccatctttcattttccggcgatctcttgtttcttccatcatcaccgttttccggcgatccctaatcctcgcaaacagaaatgacgacatcaaggcgccttgcggacaggaaggtggagaagtttgagaagaacatcacaaaaagaggatttgtgccagacactaccactaagaagggaaaagactaccctgttggcccagtgctgctcggtttcttcgtctttgttgtcattggatcatctctcttccagataatcaggacagcaacgagtggaagcaatgccttaaatggaccttggttttggattttgtgtcatcttctctttcttagcctcctcg

SEQ ID NO: 12196 - DNA, 388 bp, Glycine max
  Clone ID: LIB3039-041-Q1-E1-A4
aattcctggtcgacccaggcgtcagggggctgtctttcacgaaactgttcagccggctctttgcgaagaaggagatgcgtattcttatggtgggtctcgacgccgccggtaagaccaccattcactacaaactcaagctaggagagatcgtcataaccattcccaccattgggtttaatgttgaaactgtggaagacaacaacatcagcttcactgtctgggatgttggtggccaggacaagatccgtcctctgtggagacactacttccaaaatacccaagggcttatctttgtggttgatacccatgaccgggatcgtgtggttgaaactagggatcagctgcacacgatgttgaattaggatgacttgagaaacgctgtgccctc

SEQ ID NO: 12197 - DNA, 233 bp, Glycine max
  Clone ID: LIB3039-041-Q1-E1-B5
aagacgacagaagggggatgtgagagaaaaaggaggaacgcagaccgaggcgtttccagttcgaaaggtgaggaggaagtgtacgagttgtcgtcgttgcaactaatttaggtgcatgactggttgggacctacaattcgttcgatctccggtagctctgtgtgaacggtctctatacgcgggacgtgcactgcacccgttggaagcttgctctcggaccaactgcatctttg

SEQ ID NO: 12198 - DNA, 291 bp, Glycine max
  Clone ID: LIB3039-041-Q1-E1-E5
gtgatacgacaagagaacggaggggagcttagtttgaacatatatcatcacttacaatcaggggtttgtggaacacatcgaatgcagtgtcttgccgcgttcaaagttttggtgatgaccaggataatctggacttccaaggtgatgccacgtcgtcggtccacgggcataaaaatcacaatgttagatggtgtaggaaaagcactgggtggcactgtggggacagtgttatactcctctccagtgcaactttgggaaggctctacagtggtcacaggctttgaaacctac

SEQ ID NO: 12199 - DNA, 382 bp, Glycine max
  Clone ID: LIB3039-043-Q1-E1-C8
aattcccggctcgacccacacgtcagaagacgagagaagggggcgtacacagcctcaacaaccctaacgcgtgcagagcagagagagacgcagccatggggcgaagacccgcgaggtgttataggcaaattaagaacaaaccataccccaagtcacggttttgccgtggtgttcctgatcccaagatcaggatttacgatgttggtatgaagaagaacggtgttgatgagtttcctttctgtgtccatctggttagttgggagaaggaaaacgtttctagtgaggccctggaagctgctcgtattgcttgcaacaagtacatggccaaatttgctggaaaggatgctttccacttgagagtcagggtgcacccattccatgt

SEQ ID NO: 12200 - DNA, 374 bp, Glycine max
  Clone ID: LIB3039-043-Q1-E1-D9
cattcccgggccgacacacgcgtcaggcgaaacagagagtgatttcagtgagtgatcggtgttcacttgatctcatcataatcgtcagcgtcaattgaagaagatgccgatcagaaacatcgccgtcggaaggcctgaagaggcgactcaccccgacacgttgaaggcggctttggctgagttcatctcaaccttcatcttcgtgttcgccggctcaggctccggcatcgcctacaacaagctcaccgacaacggcgctgccacccctgccggcctcatctccgcctccatcgcccatgcattcgccctcttcgtcgccgtctccgtcggcgccaacatctccggcggccacgtcaaccccgccgtcaccttcg

SEQ ID NO: 12201 - DNA, 262 bp, Glycine max
  Clone ID: LIB3039-044-Q1-E1-A9
gggaaaagttcttcattaagacgatggcttgctatttgcactgatgatttaattgggaatgggaagtaccaaacaacttctaatcttctgcgcaagtatcttggagattttctaattgcttcatatttaaatgttgttgaagagtctggttatgatgagagacatgcaaaggaaattgagagagctgttcttttgcaaactcttgattgtttctggagagatcatcttgtaaacatgaataggctcagctctgcggtgaaca

SEQ ID NO: 12202 - DNA, 394 bp, Glycine max
  Clone ID: LIB3039-044-Q1-E1-C10
aattcccgggtcgacacacgcgtcagggctgcacgacagaagggtggatgtagcattgatcaaggtgaaccacataattttgtgtgttctttctctcctttcttctctttcaattctgctacaattttgtgtgtatgacatttatggtctattgcattttctgctactttcttgtttgttcttcatcacttccataacacttataatgtgtgcatgtgacagaagaatttccacttggccgacccttggcttgcggcaacatgaaacaacaaaaatgtaacttgagttacatttcatgggaccatagctgaatcaccccctggaaatagactcctttaaccattcagctaaatgaaaatgaaaaccactgctcaaggtacagtcacaccaatca

SEQ ID NO: 12203 - DNA, 427 bp, Glycine max
  Clone ID: LIB3039-044-Q1-E1-D7
agacgacagaagggggtgagttgtaattaagcacactatttccacccacaccacaagctccttatcgtgtttgcattgcagagagagagaatggcgaccacacccggtttgtgtggcagtgtgttgttgagcacctcgttcctgaggaagcaggcaatggcatcagtgaacatgagaatgctgaaggctaatgctggtgtttttggcttaaagggagggcgtggagggcgtgtgagtgcgatggcaagttacaatgtgaagctgataaccccagaaggagaacaagaatttgaatgcccagatgatgttttcattcttgaaaaggctgaggaatttggcattgaccttccctactcatgcaaggctggtgcctgctcttcctgtgccggcaaagttgtttctggcaaagtcgaccaatctgatggta

SEQ ID NO: 12204 - DNA, 321 bp, Glycine max
  Clone ID: LIB3039-044-Q1-E1-F10
accggtaacgcattcccgtctcgacacacgcgtcagtcgggtggcaaaaaaacaccagaggggattcattcaccagttatcaaaggtcgcatatgcacgtggagacgtatctctaagtcgcattcggaccacgtcttcaaatacgcaccatcaactaatacacagtggtgttcacggccatgagcatgggcatcgcaatggtccttggcgttttggcggaattaaccgttctaggttcaaggattggaattttggatttgccacttaattgtccagggggcattcaaccggtggggcattctttgggttccccgaaggcaa

SEQ ID NO: 12205 - DNA, 344 bp, Glycine max
  Clone ID: LIB3039-045-Q1-E1-E5
aattcccggctcgacccacgacgtcacgtcaagtcagagaacagaattgtgcccgatggtgtgaatgcaaagcttcttgggtgccatggaccattggccaatcgtgaacctggaagagcctttttggatactgctactagttcttagtctgtcttttaatttggaaatactagacttttggataacattagttttgcaagagtgaatttgagttattttgtcagcacattccatttacttaaattttgtttgcgaacctcttcgatttggttattttaatgttatattctggtatgatgcacaacttctccttattactattgatattctattttccgtctctc

SEQ ID NO: 12206 - DNA, 439 bp, Glycine max
  unsure (1)..(439): unsure at all n locations
  Clone ID: LIB3039-045-Q1-E1-E6
cggctcgacccacacgtacgacgacagaaggggagcctcagcagaagcagaacgaggagaagcagaaggagcaaaagcaatggcgccgaagaagccgagaaccacgacaaggaaccctgatttggttagggggattggcaagtattcgaggtcgcagatgtaccacaagaggggcatctgggccatcaaggccaaaaacggtggcgttttgccccgccacgatcccaagcccaagcccgaggccccggcccagaagccgcccaagttctaccccgcggacgatgttaagaagcccctcgtcaacaagcacaagcccaaacccgcgaaactcagggctagcattactccagggactgtgttgatcctgcttgctgggaggttcaanggaaaaaagggttgtttccctgaagcagctcccatctggattgcttcttgtaac

SEQ ID NO: 12207 - DNA, 380 bp, Glycine max
  Clone ID: LIB3039-045-Q1-E1-E7
aagtcccggctcgacccacacgtcaggacacaacaattccatggctaaacctaacaccttaatccccttgagtccctaaatcccacggtcttcccaaccttaaaatcctgaggtctcagggttcccccttgcagtcccgggctatctgtttatctctctccctgtctaagttccctttaactgtcgccacaagattgaatcgtgaaatgggttggaaagcagctgataaactcattaggcactggaaagttctcagaggggataatgttatgataataaggggtaaagataacggacagactgggaatattaagcgtgtcattcgcactcagaatcgtgtcattgttgacggtaaaaatctggtgaaaaagcatatcaag

SEQ ID NO: 12208 - DNA, 343 bp, Glycine max
  Clone ID: LIB3039-045-Q1-E1-H3
atcgagcggccacattcatattttccttcgtttcctttcattttccctcactttctcgctccccaaacgctcctctctctcctccaatggccgatcagctcaccgacgacgagatcgccgagttcaaggaggccttcagcctcttcgacagtgacggcgatggttgcattactaccaaggaacttgggactgttatgaggtcacttggtcaaaactcaactgaggcagaactgcaggatatgataaacgaggttgatgctgatggcaccggaatcatcgatttcccagagttcctcaacctgatggctcgcaagatgaaagacaccgactcagaggatgagct

SEQ ID NO: 12209 - DNA, 369 bp, Glycine max
  Clone ID: LIB3039-046-Q1-E1-A10
ccggctcgacccaagcgtcagtccagccgtcagtacagcagcgaaagggacaccgcaggtgaaaacctcaatatcctaaatcggatgaagacaaaacctacattttccggccttaccgtacactagattcacacggatgaatgtaggtcgcatcaagttcagactcagtcacgtccaattcaacaggtgctccagctgtggcattagcagttccactgacatagtcatcaaggcgttccaggatgagtacattgttaatcaggctccagtcggagatgtgcaggcaccttgtgtcaatcaacactatactcatcgcaaacgctcagtacatatgcaatcctgtgtttcttgtactaacgacgctcatgt

SEQ ID NO: 12210 - DNA, 322 bp, Glycine max
  unsure (1)..(322): unsure at all n locations
  Clone ID: LIB3039-046-Q1-E1-B5
tcccggctcgacccaagcgtacgacgctcacctaagtttcaatttcaatcccttttctttttccgttacaaaataattcaaaattccctccctcatttacccttgtttgtgtaaagtagtagcagagtgagactaggtatcatcgatggcagggtacaagggcgatgacgaatacgattacctcttcaagctggttctcatcggcgattccggtgtcggcaagtccaacctgctttcgcgcttcacgaggaacgagttcaatttggagtccaagtccaccatnagggttgagttcgccaccaagagcttggacatcgatgct

SEQ ID NO: 12211 - DNA, 425 bp, Glycine max
  Clone ID: LIB3039-046-Q1-E1-C12
ccggctcgacccaagcgtaagaagacgacagaaggggagtacagaagacgcagttctcaccatttccctctcgattgtgagacttgatgttgttaactgaacttttctgagcaagaatgtctgggcgtggaaagggaggcaagggtttgggaaagggaggagcgacacgacaccgtaaggtgctgcgcgataacattcacggaatcaccaagcccgcgattcggcgtttggctcgtatgggtggcgtgaagcgtatcagtggtctcatctacgaagagacacgtggcgtgctcaagatgacagaagggggtgcacaagtgagtttgttgatcgagatatctagaaccagtgtgatgaacatgaacgtccctgttatcttcgttgctacaaatttggtagcatggcaatgacatgcgtacgatatg

SEQ ID NO: 12212 - DNA, 296 bp, Glycine max
  Clone ID: LIB3039-046-Q1-E1-E10
agggaaagtgcaggaggtagatgagagcaatcatcgaattaaacgtgaggagaatatgaagttgtctgttctcattgttgccgcatcacttatggtaccaaggtcatgtcatcgttcatgctatcattcgcttcctcgctgatcgataatcggctatggtgatcgtacatcggatgtcaaatgagatcgtttaaggcttgatgtaggttcacacaacatgcgagcatttataatgattcctgaacagtacgtagactgatcagcagactacattattggcgaacattttagatcag

SEQ ID NO: 12213 - DNA, 414 bp, Glycine max
  Clone ID: LIB3039-047-Q1-E1-B9
tcgacccaggcgtcagcgggaagacgacagaagggggtagtggtaactcttgtcaatctttccactttgacattgccgacgcctccagataaacaaccttaactttcccacaacaccacccatcattctttttctctctctagatttcatttagttgttgctgtcttcttctgtttgtgtgtgccaacacagagcgaaaaacatggctctgaaccaatcaaaagccgtgttgttgagggtgagtttggtggtggtggcgctcttcatagcagggtacatagtgggtccccctctctactggcatttcgttgaaggtttggctgcggtcaaccactcttcttctacttgtgccccctgcatctgcgattgctcttcacaacccattctttctattccacaaggactgagcaacac

SEQ ID NO: 12214 - DNA, 406 bp, Glycine max
  Clone ID: LIB3039-047-Q1-E1-C4
aaaagggggacaagttagtttggtgattcagataactagaaacaatgtgatgaaaatgaaaggccttggtttcctcgttgctacaattttggtagcatggcaatgccatgcgtacgatatgttccctctccgaatgaacactggctatggtgcccgtactccggaagtgaaatgcgcaagttggaggcttgctgtggaagcacacaacatctttggctttgagaccattcctgaagagtgcgttgaagcaacaaaggaatacatccatggcgaacaatatagatcagactccaaaacagttaaccaacaagcttacttttatgccagagacctcgaagtccatcccagggacacatttgtgttcagtatagatggcacgtactctctaatattccatactacaaaa

SEQ ID NO: 12215 - DNA, 396 bp, Glycine max
  Clone ID: LIB3039-047-Q1-E1-D2
gcagtttcaaattttcttttccttcactttcccgagaaaaaaataacacttttcactttcttcactacgttctcacttcgatatggctcgtacgaagcaaaccgctcgcaagtccaccggtggcaaggcgccacgtaagcagctcgccaccaaggccgctcggaagtccgctccggcgaccggaggagtgaagaagccccaccgcttcaggccgggaaccgtggcgctgagggaaatcagaaagtaccagaagagcaccgagcttctcatcaggaagcttccatttcagaggctcgtgagagaaatcgcgcatgatttcaagaccgatttgcgtttccagagcagcgctgtttccgcgcttcaagaggctgctgaggcttacctcgttgggttgtt

SEQ ID NO: 12216 - DNA, 278 bp, Glycine max
  Clone ID: LIB3039-047-Q1-E1-H5
ttacagaaggatacagctgggagaagagataaattgggaaagtgcaatagtttgttgtaatctataagctattttagcctgtggagactacgaagctgtatgttttctatgatgctgcagtaattctgtgaacatgtgcattctatggctcacgatagcatatgttccctctccgcatgaagtctggttatcatgatcgttgttcgcaggtaaaatgcacaagttctatgcttgctgtacaatcccagaacattggatcctttaaagccattcctgaa

SEQ ID NO: 12217 - DNA, 291 bp, Glycine max
  Clone ID: LIB3039-048-Q1-E1-B10
cggtcaggcattcccgggccgacacacgcgtcaaatgcccaatgaacctgatctggaatttggtattccttctaagtacagctacatgacggtatgtgccccttcatgtcatgactgttccaccttgcgtgcttggtgggaagaagatgaataaaaaagactcaggtttttcaaaattgtaatggattccgataatttgccgcccgattcaatgtgttcaaaaatttgtacatttgttccaagacaacattttgaagccccaacaatgttggcaatcctccctcctcaaga

SEQ ID NO: 12218 - DNA, 367 bp, Glycine max
  Clone ID: LIB3039-048-Q1-E1-D8
aattcccgggctcgagcacgcgtcaggacgacagaaggggacacttcaaaatcctctattaacccttcttttctctctctctctctcgtgttctgagctgctagaagcaatggagaggaaaagaagccatgcttctttcaccatgtttgcaatgcttgttggattgctctctcagagccttgtcattcctgtaatatccaccactgttgcagatcagaagaactattacacgccagatccacatgctggaagtctccccacatgctcacacaatagtagtcctcgatctcatggccatgggagctctctaccctcagatcacaatagtccaagtactccatcaatacgctcaggtggaaactgtgga

SEQ ID NO: 12219 - DNA, 414 bp, Glycine max
  unsure (1)..(414): unsure at all n locations
  Clone ID: LIB3039-049-Q1-E1-G5
acagaaggggacagcatatatatcaataatctattttatactatacctacattttgataattttctttgtagttgatagccatggctacccgtggaaagcttgaggttgacattgatctcaagtccaacgcagacaagtactggcaaacccttaggaattctactgaaatattccctaaggccttcccacatgattacaaaagcattgaggttcttgagggtgatggcaagtctcctggttctatccgccacataagttatggtgaaggttcaccacttgtgaaatcatcctttgagaagattgaggctgttgatgangaaaagaaggtantgtcgtacactatcattgatggggaactcctcnagcactacannacattcaagggagacatttcagtgactccaattggcgat

SEQ ID NO: 12220 - DNA, 380 bp, Glycine max
  Clone ID: LIB3039-050-Q1-E1-C5
gtcgtgtcatgttaacaatattgccatggataaagaggtgaggaagcatcattaaaggagagggtctattcttagcttgatgcatcatattttgtgtgggggccagacagttagaaaggcatttcttgcgtttggctatccgtggttcatctatatcttcttagtaggttgtttgtagcaagggagtgattgtgatgatctctttttcctccattttctttttgtatttttaaagtttatatttgaaggattttttccccttggaacattgaatcattgatgttaatagtcatatgtatcaagaaatcttatattattgttaaaaaaaaaacctggaacagaaaaaaaaaagcggccgctctagaggattcaagcttacg

SEQ ID NO: 12221 - DNA, 163 bp, Glycine max
  Clone ID: LIB3039-051-Q1-E1-B8
aattcccgggctcgacccacgacagtcagcccacgcgctcagtaacgatgacgagaagacaacagtaaggggcacaattgagtttgttgatcgaaatgtctagaaacagtgtgacgatgatgactgtccttgtattctttcgtgcaacaagtttggtcacatg

SEQ ID NO: 12222 - DNA, 298 bp, Glycine max
  Clone ID: LIB3039-051-Q1-E1-E9
ccacgcgtcaggacgacagaagggggagctggtattcaaggaggacggacaggaatacgcgcaggttctccgaatgctcggaaacggtcgctgcgaagcgatgtgcatcgacggcaccaagcgcctctgccacatccgcggcaagatgcacaagaaggtctggatcgccgccggcgacatcatcctcgtcggcctccgcggctaccaggacgacaaggctgacgtcatcctcaagtacatgcccgatgaggcccgcctcctcaaggcctacggcgagcttcccgacaccaccaggctc

SEQ ID NO: 12223 - DNA, 311 bp, Glycine max
  Clone ID: LIB3039-051-Q1-E1-G7
ggtaccttcaaattcacatttactccttattctggttcgaggcacgagctacggtgtatttatggtctcctttctcactgcaacatcgatcgcgaaatgcaggctatgtcatcgttcacaggccggaacgatttccggctccacttcgcgttcttcgtcggtctacaatccactcttccaagtctcactcgtgacacatttcacgttttcgctctgagacgcgttccacatactgatctcactcatcatcagcacactaccgaggttctcacaatgaatcatctgtctcagaaattcgtcaaggtcctgac

SEQ ID NO: 12224 - DNA, 391 bp, Glycine max
  Clone ID: LIB3039-052-Q1-E1-B10
gacccacgcatcagacggctgacgacagaaggggagggttacacgccgcattgctctcagcttcacaacaccatggaccacgttagggaaacctctgcttgggtagctagccgctcctcccacgttctcgttgactctgcaggaattgagaaagtggtgagcaccattgattccattcccaaggttgagtgggatttcgaagggattcactactttgataatggaccactcaccgttcagtacctgtttgtgttggacgctttaaatttttgcttctggcctgataaggatttgaattatgatgatttggcatctgggccaaaggcaactcttcaaaatgataaatctgcatttgatgctgatcgtctgcaaaagtacactggtccaaaac

SEQ ID NO: 12225 - DNA, 383 bp, Glycine max
  unsure (1)..(383): unsure at all n locations
  Clone ID: LIB3039-052-Q1-E1-F1
agggaataaaatttgagtcaaacaaattcaagccaagggcaactccaacttccccaatggtccccccggccccccaaccctccttttgggggctacttaacaggcacactcgnacgataccgtttctttcaccttcaacaagttcaacccagtccaaccaaacattatgctccaaaaagatgctagtatttcatcctctggggtgttacaactcaccaaagttggcagcaacggcgtgcccacctcgggatctctcggtcgtgccctttacgctgccccaatccagatttgggacagcgaaaccggcaaggtagccagctgggctacatcctttaaattcaacattttcngcaccaacanatcaaactcacctgacggccttg

SEQ ID NO: 12226 - DNA, 293 bp, Glycine max
  Clone ID: LIB3039-052-Q1-E1-H9
ggagagtcagattcgcacgcattgcttcgcctcacaacagcagctgcagcagcaatggctcccaaacgaggtggaaaggctccggctcttgccgctaagaagaagcctgagaaggtcacgaatccgttgttcgagaagcgtccgaagcagttcggaatcggaggggcgttgcctccgaagagagacttgactaggttcgtgaagtggccaaagaatgttcaaattcagaggaagaagaggattctgaagcagaggttgaaggttcccccagccttgaaccaatttaccaaaac

SEQ ID NO: 12227 - DNA, 385 bp, Glycine max
  Clone ID: LIB3039-053-Q1-E1-A9
aattccgggccgacccacgcgtcaggagaggaccacaaaaaggggagcgtgctctgagcaatcaataatcaagttacccacagaccaaccaagggtatagaaactgacccacttgcattttttctaccacgacatcttaaagggcaagaacatcacggtggtgaaaatcatcgagccatcagcgatcgacgttcgtgaagcaactgggtttggaaccactttcatgatggacaatgttctgaccgagggtccaaatctgatctcgaagcacgttgggagggctcacgggctgtttggcttggcctctttggaggaccgtggcatggtgatgctcactaacttggctttcagtgagggtgagtatgctggcatcactctcagcatg

SEQ ID NO: 12228 - DNA, 307 bp, Glycine max
  Clone ID: LIB3039-053-Q1-E1-B12
aattctaggctcgaccgacgcgtcagtagcgaaaagacgacagaaggggggaatagttttttatctcacatccgtgctgtagatggcattttccatgttttacgtgcatttgaggatccggacattattcacgttgatgatactgttgacccagtcagggatttagaggtcattactgaagaattgcggctgaaggatattgaattcatggaaagaaagatagaagatattgagaaaagcatgaagaggagcaatgacaaacagttaaaaatcgagcttgaatgttgtcaaagggtgaaggcattgc

SEQ ID NO: 12229 - DNA, 324 bp, Glycine max
  Clone ID: LIB3039-053-Q1-E1-B7
acccacgcgtcaggctgggatcactttcaacacattgaggcacataatcttataaagtggactgcattgaccaataataacgtgatctccttccttcacacggggaagcaggtgatatatgagcaggaatgttggcgtgccttttctcgtacctctggtacttcatgataaaatggagataattcctccgaacaataatagtcctgttcatcttagcactgtgacatgttccacccaatatatggtcaccgtttgcaacattgtcagcgaaggggcagttcgtgtcaccgtaggtgccttcgaaggcttccctaggatcgataa

SEQ ID NO: 12230 - DNA, 389 bp, Glycine max
  Clone ID: LIB3039-053-Q1-E1-G11
tagccgtcaggaattcacggctcgacgcacgcgtcaggtttaattcaaagaatagattggatccaaccaaactgcactttttagttataactaagaaaatgtgcataatcccgcgaattacttctgaaaattacttctgaattaatgaaattttttcaataatttaagaaaaaatatttaagaactatagcatttcgcgatttattggtaatccactttgattctctattaaccaataattttggactattaccatggttaaagtgaatagtttgaagtctagacgcagtgtagtactctttctaccactatgttaatacagaaatgaaatggtttcgataaaattattagatttttttttcgatatagaacactcatgtcgataaaat

SEQ ID NO: 12231 - DNA, 436 bp, Glycine max
  Clone ID: LIB3039-053-Q1-E1-G3
cgcgtcaatacaactgcgagaaagacaaaaaaagggggcacaattaattttgttgttcacaataacaagaaacagtgtgatgaaaatgaacgtccttgttttcttcgttgctacaattttggtagcatggcaatgccatgcgtacgatatgttccctctccgaatgaacactggctatggtgcccgtactccggaggtgaaatgcgcaagttggaagcttgctgtggaagcacacaacatctttggctttgagaccattcctgaagagtgcgttgaagcaacaaaggaatacatccatggcgaacaatatagatcagactccaaaacagttaaccaacaagcttacttttatgccagagacctcgaaattcaatcacagggacaaatttgtgttcagtatagatggcaccgtactctctaatattccatactacaa

SEQ ID NO: 12232 - DNA, 421 bp, Glycine max
  Clone ID: LIB3039-053-Q1-E1-H10
cgacacacgcgtcagaaaaataagacagaaaggggcacaagtgagtttgttgatcgagataactagaaacagtgtgatgaaaatgaaggtccttgttttcttcgttgctacaattttggtagcatggcaatgccatgcgtacgatatgttccctctccgaatgaacactggctatggtgcccgtactccggaggtgaaatgcgcaagttggaggcttgctgtggaagcacacaacatctttggctttgagaccattcctgaagagtgcgttgaagcaacaaaggaatacatccatggcgaacaatatagatcagactccaaaacagttaaccaacaagcttacttttatgccagagacctccaaggtccatcccaaggacacatttgtgttcagtatagatggcaccgtactctctaatat

SEQ ID NO: 12233 - DNA, 372 bp, Glycine max
  Clone ID: LIB3039-054-Q1-E1-D1
gccacgcgtcaacggcagcgagacgacagaagggggtattccttacgctctctcactcacaaacacacactgaactaaaaaacatcaaaagagacatggctgagcaaaccttcatcatgatcaagcctgatggcgtccaaagaggccttattggcgagatcattagcagatttgagaagaaaggtttctacttgaaaggtttgaaacttgttactgtggaccgtccttttgctgagaagcactatgctgatttgtctgccaagcctttctttagtggtttggtggattacattatctctgggcctgttgttgccatgatctgggacggcaaaaatgttgttaaaactgggccgagagattatccggggccac

SEQ ID NO: 12234 - DNA, 371 bp, Glycine max
  Clone ID: LIB3039-054-Q1-E1-E10
gacaacacaacgcaacacaacgcgcactctctcttttctctcttaacacaaaaaccctatcgttcttcgcggtttcgccgattctcgccatgccgaaagccaaatccgacgccaaagccgccgatagccggttgaagcgcaagggcgctggtgctggaaggaagcaatcgaagaaagctgctaaggatcctaacaagccaaagagacctccaagcgctttcttcgttttcatgtccgagttcagagagcagtttaagaaggagcatcctaacaacatatccgtcgctgttgtcggtaaagctggtggtgacaaatggaaatcgctgtctgatgctgataaggcccccttcgttgccacggccgaaaagaag

SEQ ID NO: 12235 - DNA, 514 bp, Glycine max
  Clone ID: LIB3039-003-Q1-E1-F7.F1
gctagaacactataatattaattaagctgagtactcacagagttcaagttcaaagttgtggaagattaatcagggataatattaattaataactaataaggcacagcaggccagtgacagtgaggaggcagtaaaacagtggtgttataatcctccacagtgaaagaacagtagccttgatctgcaacgtgctcaatgttactctttcctcttagagttagaccctctgacgtgctttctactgtttcttcccctgatatttctgtataacagccaaatgtttgcttcccaaaaccttgctctttacttagcattgccttcaacttcataacctcttcttgaagcttttgcttttcgttggagacgacatcatattggtgtttaagacatcgtacaagtgctcaagctgcttggtcttccaccttgttcgtctattttggaccaaacagcgatttggcgaggctgaaggcctagctccctggaaagcttcatcttcctttcaggggtcaacttt

SEQ ID NO: 12236 - DNA, 474 bp, Glycine max
  Clone ID: LIB3039-003-Q1-E1-F7.F2
gctagaacactataatattaattaagctgagtactcacagagttcaagttcaaagttgtggaagattaatcagggataatattaattaataactaataaggcacagcaggccagtgacagtgaggaggcagtaaaacagtggtgttataatcctccacagtgaaagaacagtagccttgatctgcaacgtgctcaatgttactctttcctcttagagttagaccctctgacgtgctttctactgtttcttcccctgatatttctgtataacagccaaatgtttgcttcccaaaaccttgctctttacttagcattgccttcaacttcataacctcttcttgaagcttttgcttttcgttggagacgacatcatattggtgtttaagcacatcgtacaagtgctcaagctgcttggtcttccaccttgttcgtctattttggaaccaaacagcgatttggcgaggctgaaggcct

SEQ ID NO: 12237 - DNA, 399 bp, Glycine max
  Clone ID: LIB3039-011-Q1-E1-A9.F2
ggaaaaaaaaacttgcacttaacagaaactttgatttcgatctccttacaagttacaatgaagatacagatttaacatgaaggaaacaatacattttcgaattaaccataccaatttacattgctctctggtcacactcgaaaaagaaaatgaaaacctgagctctcatcctttaaactgccactccctacggcacatggggcaatgcgcttgtgatgtctgagaattcacccatttcaggatacagtgcagatgaaatgcgtgattgcatacaccccaaatcagtgggcagtcatctccaggaagtttgcagtcaggacaacattcatcaaaggccatcctacaaatcccacaggtttcatcctgggcatcccaagtccatgaagcaacagcatgcca

SEQ ID NO: 12238 - DNA, 590 bp, Glycine max
  Clone ID: LIB3039-017-Q1-E1-D3.F1
aataatgtggattcaaacgtgaattaggccacagattttggtcaaattccaagacttctccacctgattctagattttggttaaatttgactttttatttatttttggcactaaaaaagattcaaaggacatagctaggaagaagttacgtgtcaataacagcaattgctgctccctaacgagtctcttaattctttgtctcatgttccaaagtgtaaaaaagagtcaaaagatcacgccaactaaatctttcaggtactcattgtaacaagtttttccatgctccataatcatatatacgatgtgccagaaaattatgacatattcacccccttctatctttgttccaatctgaggtatcagaaaaatgaaattgagtttaaaaaaccaacaagagaaaaggctaattaaactcaccagaacttatactgccaccagcaccaccacatcccataaactcatcctgagagcgagctctttgaaggtcttgttcaaggtgtgtgagctttaatctacttgactctagttgctgcacataagcctttttcctgagacggcttttccttgcagcttctctgttttgagctaac

SEQ ID NO: 12239 - DNA, 521 bp, Glycine max
  Clone ID: LIB3039-017-Q1-E1-D3.F2
aataatgtggattcaaacgtgaattaggccacagattttggtcaaattccaagacttctccacctgattctagattttggttaaatttgactttttatttatttttggcactaaaaaagattcaaaggacatagctaggaagaagttacgtgtcaataacagcaattgctgctccctaacgagtctcttaattctttgtctcatgttccaaagtgtaaaaaagagtcaaaagatcacgccaactaaatctttcaggtactcattgtaacaagtttttccatgctccataatcatatatacgatgtgccagaaaattatgacatattcacccccttctatctttgttccaatctgaggtatcagaaaaatgaaattgagtttaaaaaaccaacaagagaaaaggctaattaaactcaccagaacttatactgccaccagcaccaccacattccataaactcatcctgagagcgagctctttgaaggtcttgttcaaggtgtgtgagctttaatctacttgac

SEQ ID NO: 12240 - DNA, 532 bp, Glycine max
  Clone ID: LIB3039-030-Q1-E1-F11.F1
gcgaaaatgacaaaaggaatgtattatttctctgaaacaaacaaacgtactacatatgataacatggtagctagctaggaaaattgttcacttataactaactaattaagcatgccattccaataatccttattctcctcgaagttcacatgcaagttcaccgccgctaaatcttcattggaatcaaaatcgttttcgaaacccaccatattattgacattgctagagagatgcgtaaatgtgacattattattgttgctattattatcatcatcataataaccagcacctcttaatgcctcaacagccaccataatatcaccgtcatcgtcttgcaaacatgaaatcgtgtcgtacattattgtcttctcatcagtttcaacttgttcttcttcattgttgtgtttggtgaagtacctccacgagtcactaccaccaccattcacggtttcaattgcaccctcactacttgttgttcctaaacttttggtaataatgaactcatccaggggtggttggagggagtaaatag

SEQ ID NO: 12241 - DNA, 491 bp, Glycine max
  unsure (1)..(491): unsure at all n locations
  Clone ID: LIB3039-030-Q1-E1-F11.F2
gcgaagaatgacaaaaggaatgtattatttctctgaaacaaacaaacgtactacatatgataacatggtagctagctaggaaaattgttcacttataactaactaattaagcatgccattccaataatccttattctcctcgaagttcacatgcaagttcaccgccgctaaatcttcattggaatcaaaatcgttttcgaaacccaccatattattgacattgctagagagatgcgtaaatgtgacattattattgttgctattattatcatcatcataataaccagcaccttttaatgcctcaacagccaccataatatcaccgtcatcgtcttgcaaacatgaaatcgtgtcgtacattattgtcttctcatcagtttcaacttgttcttcttcattgntgngtttggngaagtacctccacgagtcactaccaccaccattcacggtttcaattgcaccctcactacttgttgttcctaaacttttgg

SEQ ID NO: 12242 - DNA, 536 bp, Glycine max
  Clone ID: LIB3039-003-Q1-E1-D1.F2
ggtaaatccaacacaaataatgaaaaatctcgccataataatatttgtgtctctctcttgtacatgttagtcgataataatgagaggatagaacgggatgtagaataattagattaaagaggtttgcaaagatttgaaatacaatttcctagtcatgttcatggctctaattcttggttgtcttagtatgaagtcatgcaggcaggcatttgaaacaattggtctaatggttatatcgtcatacactaaccaaaaaagtattacccttcacgatccgctgcgtctacaaaactacattgttatcaccaacagcaaacacaggaagccccttcattaccctgttcagtcacggtgtaggagtataccggggatgcatctcatagaaattgatcagcagaagaggattgtatgccttgagatatctgttgtccaccatcacttctgttccatcagacctcatagccataaaggtgactaaaacatcgtgcatgttgtcagataaagaagctgaatagcctattggcttgataatcttg

SEQ ID NO: 12243 - DNA, 491 bp, Glycine max
  Clone ID: LIB3039-007-Q1-E1-G9.F2
gaagaacaaaagcgataatttcattggtaaagcgttaacattacagaattctcaaaaaaaaccgcaattcaatctaactaagaacgcttgaaattatctatacaaaaggacagggattaggtttaagcgcgttcgcccctaatgcgcctggcgaactgaatgtccttgggcatgatagtaacacgcttggcatgaatggcgcaaaggttcgtgttttcgaagagaccgaccaagtaagcctcggcggcctcctggagcgcggagacggcggagctttggaaccggaggtcggtcttgaagtcctgcgcgatctcgcggaccaagcgctggaacggaagcttccggatgagtagctccgtgctcttctgatacttccggatctcgcgcagcgccacggttcccggcctgaatctgtgcggctttttcaccccgccggtcgccggagccgacttgcgagccgccttagtcgccagctgcttccgcggcgcctt

SEQ ID NO: 12244 - DNA, 457 bp, Glycine max
  Clone ID: LIB3039-012-Q1-E1-E7.F2
gcaacaatcaaagtagcttggaattattatatcaaatacgtgattaattgttgcgagcaacatttaactaagatacatttaatcacaccgaaacaacaaagactagagagtttctgaaacagaaactaatacaataacaggctcacatgagtggaacccgagtcacactcgctttcttttattttaatgataacgataacaagtgttacagcatacgttgcctcattatcccgcggaagaaattggcaaagctacccgctcctttaaaacttgatggagtcgcagttggtggatcggctgatcttgtaagggacgctgacattgcagcgggcggggagtgcctgagcgtattcgtcgttgatgccatagttattagcagcttgctgaaaacatttgcacacggtttgtttgtcaaaggtggtgctggcagaacccaaaatgttcctcactccgctac

SEQ ID NO: 12245 - DNA, 61 bp, Glycine max
  Clone ID: LIB3039-015-Q1-E1-B9.F1
cttgcctgtttgcttttttttctttgcttttttttcctttttttctttcttcttttttttt

SEQ ID NO: 12246 - DNA, 527 bp, Glycine max
  Clone ID: LIB3039-015-Q1-E1-B9.F2
ctaaatatggaacaagggcagaaagatttattaaagccgcgtaagagacaacaagtaggtacgtggagtgtcttaggtgacttacccacataacataaagtgacattaacaaacatagctaatgctcctatttgaatagtgcatatcagcataccttattacatatagataggagcaaactctagctagattgttgagagaggtgaaggtactactcaatgtagtacatgggattaggaagcttaaaggtcctgctttcgcctctgtggtctccaagcagatcgctccattggtctccaatgattccaacaattctgtatccctgcctcaacagattctctctcattgctgatttgtatgaaagtgcatttggagtgataagatgtggatccttgagaattaactgctcccatgtgtggaagccagccttctttaggtttgcttctgttacggccattttgtcaagatatcttcctgacaagaatacaatcttgaagccaagagacaacagcttgttgtaattttta

SEQ ID NO: 12247 - DNA, 120 bp, Glycine max
  Clone ID: LIB3039-015-Q1-E1-B9.R1
agaaattccagggaagaacaagagatcgtaaggaagagaagaagaagacagaagagggaaggagaaagaatttgctacagagatataagctagtttataccagaggagaatatcaagttg

SEQ ID NO: 12248 - DNA, 520 bp, Glycine max
  Clone ID: LIB3039-023-Q1-E1-D9.F2
gctatcatcaccgcaggatatataaaattagagaattatctcgtttttcaacataaactcagttgtgcagatccatatgggaatatacctgatgaaataagatgaatcttacaataaagaggcatttgaagaaaacacgaattacaataagcagtaacctaattttaatgtcaaatgacacgaaaccctaaacttaagctctctcgcctctgattctgcgagcgagttgaatgtccttgggcataatggtaactcgcttagcgtgaatagcgcagaggttagtgtcctcaaagagtccaacgagataagcctccgcggcttcctgaagagccgaaacggcgctgctctgaaagcggagatcggttttgaaatcctgagcgatttctctgacgagcctctggaatgggagttttcggatcagaagttcggtgctcttctggtactttcgaatctccctcagagccaccgttcctggcctgaagcggtggggcttcttcactccgccggtcgccggggctga

SEQ ID NO: 12249 - DNA, 402 bp, Glycine max
  Clone ID: LIB3039-023-Q1-E1-D9.R1
cggggatagcaaaatcgtttctccaatttaatcaccatatgtacaacccaattcccttcgtcgttttcgattaagagagcaatggcacgtaccaagcaaaccgctcgcaagtccaccggagaaaaggatccgaggaagcaattggaaaccaaagccgctcgcaagtcagcccaggagaaaggcggagtgaagaagccccaccgcttcaggacaggaaaggtggatctgaaggagattcgaaagtaccagaagagcacagaacttctgatccgaaaactcccattccagaggctcgtcaggaaaatcgctcaggatttcaaaaaagatctccgctttcagagaagagaagtttacgtcattcaggaaaaagaggaggttaaactcgttggaatctttgaggaa

SEQ ID NO: 12250 - DNA, 538 bp, Glycine max
  unsure (1)..(538): unsure at all n locations
  Clone ID: LIB3039-003-Q1-E1-D1.R2
gngaaattgcaatgaagaagaggagcagcagcagcagcagcagttcagtttttgaggcgaatggagtggaggaacctcaacaaccttcatcctgtgttgcagcagcacttgatgagttgcataaagagaaaaatgagaatggagaagaaaccctcgtgccttccaatccctatcccaatcttgacgatggcttctatgaaatcgaaaccatacgccgtaagaggctacgcaagggtcagctccagtacctaatcaaatggcgtggatggcctgagactgccaacacttgggaacctcttgaaaatctacagtccgttcctgatctcgttgatgcttttgaggacagcctcaagtctggaaaacatcagaagcgcaagcgcaagcatgtggatgtgcttcaactcaccctactcaagaagcgctccgaacgttctaccacttcttacagccttagacatttcccacctctaactcccactaatgcaaatgattatgatccaaagctcagtgaacttaaggcaccaacacacactgggga

SEQ ID NO: 12251 - DNA, 558 bp, Glycine max
  Clone ID: LIB3039-007-Q1-E1-G9.R2
ccagcgtccgtctgcgagagccgacagaggggaggaacaagaagcgaaaattaacaaataatttgtactttcatcaaaacaaaatcccgttgtatttttctcagatggctcgaacgaagcaaactgcccgcaagtccaccggcggcaaggcgccgcggaagcagctggcgactaaggcggctcgcaagtcggctccggcgaccggcggcgtgaagaagccgcacagattcaggccgggaaccgtggcgctgcgcgagatccggaagtatcagaagagcacggagctactcatccggaagcttccgttccagcgcttggtccgcgagatcgcgcaggacttcaagaccgacctccggttccagagctccgccgtctccgcgctccaggaggccgccgaggcttacttggtcggtctcttcgaagacacgaacctctgcgccattcatgccaagcgtgttactatcatgcccaaggacattcagttcgccaggcgcattaggggcgaacgcgcttaaacctaatccctgtccttttgtatagataatttcaagcgttctt

SEQ ID NO: 12252 - DNA, 504 bp, Glycine max
  Clone ID: LIB3039-012-Q1-E1-E7.R2
gaccacattccaaaacacaaacacatacattgtagtatcacttttgtctcggaatttgttcttttgagttatggcaagcttaaaggttgcatgtgtggttttgatgtgcatggctgtgatgagtgcaccaatgatggtgcaagccgtgtcatgcaatgatgtttctgtgaacctagcaccgtgcctatcttacctgatgcagggtggagatgttccagaatcgtgctgtagcggagtgaggaacattctgggttctgccagcaccacctttgacaaacaaaccgtgtgcaaatgtcttcagcaagctgctaataactatggcatcaacgacgaatacgctcaggcactccccgcccgctgcaatgtcagcgtcccttacaagatcagccgatccaccaactgcgactccatcaagttctaaaggagcgggtagctttgccaatttcttccgcgggataatgaggcaacgtatgctgtaacacttgttatcgttatcattaaaat

SEQ ID NO: 12253 - DNA, 519 bp, Glycine max
  unsure (1)..(519): unsure at all n locations
  Clone ID: LIB3039-015-Q1-E1-B9.R2
gaaggtgcaagagtttgttgtgagctataagctagtttatcgtgaggagaatatgaagttgtttgttttctttgttgctgcagcagttttggtagcatggccatgccatggcgcaggctaccaaaggttccctctccgaatgaaaactggctatggtgagcgttcttcggaggtaaaatgcgcaagttttaggcttgctgtggaagcacacaacatccgagcctttaaaaccattcctgaagagtgcgttgaaccaacaaaggactacattaatggcgaacaatttagatcagactctaaaacagttaaccaacaagctttcttttatgctagtgaacgcgaagtccatcacaacgacatatttatattcggcatagataacaccgtactctctaatatcccatactatgaaaaacatggatatggggtgngaggaatttaatgaaaccttatatgatgaatgggttaacaagggcgacgcaccggcattgccagagactcttaaaaattacaacaagc

SEQ ID NO: 12254 - DNA, 513 bp, Glycine max
  unsure (1)..(513): unsure at all n locations
  Clone ID: LIB3039-023-Q1-E1-D9.R2
gatagcaaaatcgtttctccaatttaatcaccattgtacaacccaattcccttcgtcgttttcgattaagagagcaatggcacgtaccaatcaaaccgctcgcaagtccaccggaggaaaggctccgaggaagcaattggcaaccaaagccgctcgcaagtcagccccggcgaccggcggagtgaagaagccccaccgcttcaggccaggaacggtggctctgagggagattcgaaagtaccagaagagcaccgaacttctgatccgaaaactcccattccagaggctcgtcagagaaatcgctcaggatttcaaaaccgatctccgctttcagagcagcgccgtttcggctcttcaggaagccgcggaggcttatctcgttggactctttgaggacactaacctctgcgctattcacgctaagcgagttaccattatgcccaaggacattcaactcgctcgcagaatcagaggcgagagagcttaagtttagggttntcgtgtcatttgaca

SEQ ID NO: 12255 - DNA, 426 bp, Glycine max
  unsure (1)..(426): unsure at all n locations
  Clone ID: LIB3039-003-Q1-E1-F7.R1
gagacagggaactggngacagatatggattggcatcacggcacaaagcacttgttcctcggccagagaccttaagcttcttctacaactataactacaacagtccatatccaggagtggaagtgaacaagcagcattgatggagacaggagaagggtcagttccagcattaatggacagcagaaacaaagagaagaagaagcgattaacaaataaccagatagagttattggagaggagttttcaggaggagataaagttggaccctgaaagaaggatgaagctttccagggagctaggccttccagctcgccaaatcgctgtttggttccaaaatagacgaacaaggtggaacaccaagcagcttgagcacttttacgatgtgcttaaacaccaatatggtgtcgtctccaacgaaaagcaaaag

SEQ ID NO: 12256 - DNA, 422 bp, Glycine max
  Clone ID: LIB3039-003-Q1-E1-F7.R2
gagacagggaactggagacagatatggattggcatcacggcacaaagccacttgttcctcggccagagaccttaagcttcttctacaactataactacaacagtccatatccaggagtggaagtgaaacaagcagcattgatggagacaggagaagggtcagttccagcattaatggacagcagaaacaaagagaagaagaagcgattaacaaataaccagatagagttattggagaggagttttcaggaggagataaagttggaccctgaaaggaagatgaagctttccagggagctaggccttcagcctcgccaaatcgctgtttggttccaaaatagacgaacaaggtggaagaccaagcagcttgagcacttgtacgatgtgcttaaacaccaatatgatgtcgtctccaacgaaaag

SEQ ID NO: 12257 - DNA, 570 bp, Glycine max
  Clone ID: LIB3039-011-Q1-E1-A9.R1
aacttcgaattcaaactcatactctggccgaatttctggatgtttatattaccatatctgttgaataattaagatggcatgctgttgcttcatggacttgggatgccagaatgaacctgagggatttgtaggatggcctttgatggatgttgtcctgactgcaaacttcctgaaaatgactgcccactgaaattgaggtgtatgcaatcacgcatttcaactgcactgtatcctgaaatgggtgaattctcaaacatcacaagcgaattgccccaatatgccataggaaagtggcaattataaaggataagagctcaggaattcaaatatcatttatcaaatagagacagagaacaatgaaaattagaaatagttaattcaaagaaaaataaatatcaacatatataatctaaaaacatcaaagtaacttaaaaagaaatcgaaaacaaaaaatcaaataaatgaaaaaaatatttataccaaaaaaaaaaaaaaaaaaaaaaaaaaaaaaaaacaaaaataaaaaaaaaaaaaaaaaaaaaaaaaaaaccacaacaaagaaaaacaaaa

SEQ ID NO: 12258 - DNA, 472 bp, Glycine max
  Clone ID: LIB3039-011-Q1-E1-A9.R2
aacttcgaattcaaactcatactctggccgaagtttctggatgtttatattaccatatctgttgaataattaagatggcatgctgttgcttcatggacttgggatgcccaggatgaaacctgtgggatttgtaggatggcctttgatggatgttgtcctgactgcaaacttcctggagatgactgcccactgatttggggtgtatgcaatcacgcatttcatctgcactgtatcctgaaatgggtgaattctcagacatcacaagcgcattgccccatgtgccgtagggagtggcagtttaaaggatgagagctcaggttttcattttctttttcgagtgtgaccagagagcaatgtaaattggtatggttaattcgaagatgtattgcttccttcatgttaaatctgtatcttcattgtaacttggaaggagatcgaaatcaaagtttctgttaagtgcaagtttattttt

SEQ ID NO: 12259 - DNA, 547 bp, Glycine max
  Clone ID: LIB3039-017-Q1-E1-D3.R1
agacaaaaaacttgtgtgcctttctcccaagttaattgtgtggaggagttacaaatctttctaaaccacagtgcaatacaccaaaacaatggcagataaagatgctttttgctacccttatcatgttcatgattgcacatcaccacaagagaatttgcccaataaagggccttttcattcagaaatgcttcccaaaaattctaggaaaggagctggttacacatcagagaagccacttgatgcaaagacactgagacgtttagctcaaaacagagaagctgcaaggaaaagccgtctcaggaaaaaggcttatgtgcagaactagagtcaagtagattaaagctcacacaccttgaacaagaccttcaaagagctcgctctcaggatgagtttatgggatgtggtggtgctggtggcagtataagttctggtgagtttaattagccttttctcttgttggttttttaaactcaatttcatttttctgatacctcagatttgaacaaagatagaaggggttgaatatgtcaaaattttctggcacatc

SEQ ID NO: 12260 - DNA, 489 bp, Glycine max
  Clone ID: LIB3039-017-Q1-E1-D3.R2
agacaaaaacttgtgtgcctttctcccaagttaattgtgtggaggagttacaaatctttctaaaccacagtgcaatacaccaaaacaatggcagataaagatgctttttgctacccttatcatgttcatgattgcacatcaccacaagagaatttgcccaataaagggccttttcattcagaaatgcttcccaaaaattctaggaaaggagctggttacacatcagagaagccacttgatgcaaagacactgagacgtttagctcaaaacagagaagctgcaaggaaaagccgtctcaggaaaaaggcttatgtgcagcaactagagtcaagtagattaaagctcacacaccttgaacaagaccttcaaagagctcgctctcaggatgagtttatgggatgtggtggtgctggtggcagtataagttctggtgagtttaattagccttttctcttgttggttttttaaactcaatttcatttttctgat

SEQ ID NO: 12261 - DNA, 445 bp, Glycine max
  Clone ID: LIB3039-030-Q1-E1-F11.R1
ggaactctcgcaagcttgttttcttgccttctttttctcttattctctactacaacattttttttgtgtgaaatttctctacaactaaatttccatataggctgcaaaccctcatcaacctacaattagtttgttacatatatagctaggttgaacaatatgggaaggtcaccatgctgtgagaagacagggctaaagaaagggccatggacaccggatgaagaccaaaagctcattgctttcatcgaaaagcatggccatggaagctggcgtgcattgcctgcaaaagctaggcttagaagatgtggaaagagttgcagacttagatggtcgaattatctccgacctgatataaaacgaggaaagttcagcttgcaggaagagcaaaccattattcaacttcatgcccttctaggaaacaggtggtcagccatagcattctcac

SEQ ID NO: 12262 - DNA, 448 bp, Glycine max
  Clone ID: LIB3039-030-Q1-E1-F11.R2
ggaactctcgcaagcttgttttcttgccttctttttctcttattctctactacaacattttttttgtgtgaaatttctctacaactaaatttccatataggctgcaagaccctcatcaacctacaattagtttgttacatatatagctaggttgaacaatatgggaaggtcaccatgctgtgagaagacagggctaaagaaagggccatggacaccggaggaagaccaaaagctcattgctttcatcgaaaagcatggccatggaagctggcgtgcattgcctgcaaaagctaggcttagaagatgtggaaagagttgcagacttagatggtcgaattatctccgacctgatataaaacgaggaaagttcagcttgcaggaagagcaaaccattattcaacttcatgcccttctaggaaacaggtggtcagccatagcatctcacttg

SEQ ID NO: 12263 - DNA, 523 bp, Glycine max
  Clone ID: LIB3039-044-Q1-E1-H1.R4
atgtcgggtcgcggaagggtgggaagggtttaggaaagggaggagcaaagaggcatcgcaaggtgctccgcgacaatatccagggaatcacgaagcccgcgattcggagactggcgagaagaggtggcgtgaagagaatcagtggtttgatctacgaagagaccaggggcgtgctcaagatctttctcgagaacgtgattcgcgatgccgtgacgtacacggagcacgctaggagaaagacagtgacggccatggatgtcgtttacgctctcaagaggcagggaaggactctctatggtttcggaggctgagggtttggccttctttggtggctttggtttgtgtaaatggaaggaatttgtgttttgtagtgattatatatgtacttggattatcttctgctcggtacatgctcaaggttcttctgttttttttttttaattctactagtaattgcatcctaattgttttgaattgaagtaaatttagtgaatgatgaatgttggatgttctatttcgcaaa

SEQ ID NO: 12264 - DNA, 408 bp, Glycine max
  unsure (1)..(408): unsure at all n locations
  Clone ID: LIB3039-047-Q1-E1-H1.R3
tgggnnaatcatgaaagcttcatcaacgacatcttcgagaagcttgctcaggaatcttccagacttgcccgctacaacaagaagcccaccatcacttcaagggagatccagaccgcggtcaggcttgtgctgcccggtgaactggccaagcacgccgtttctgagggtaccaaggccgtcaccaagttcaccagctcttgaacaaaatatcttaactttgcttacctcgctcttgttttgcttcatgtgtatctgttagatctagcgaccctatgtttaggtttgaactggtagctttttggtttttaatttgtaagtgaagaattaggattgggttgatcctctgtgtatggaattggtagaattgatcatataggagcaatttgataaaaggaatggttgtttact

SEQ ID NO: 12265 - DNA, 498 bp, Glycine max
  Clone ID: LIB3039-029-Q1-E1-B7.R2
gattggtaccgcgaaacgcacatttcactattcattctcgtttccctttcgactgtgattgtttgttaactgaacttttcgagcaaaatgtctggacgtggaaaggggggcaagggtttgggaaagggaggagcgaaacgacaccgtaaggtgttgcgcgataacattcagggaatcaccaagcctgcgattcggcgtttggctcgcaggggtggtgtgaagcgtatcagtggtctcatctacgaggagacacgtggcgtgctcaagatctttctggagaacgtgattcgtgacgccgttacctacactgagcacgctaggagaaagaccgttacggcaatggatatggtttatgctctcaagagacaaggaagaaccctctacggatttggaggctagtttgttttttttttttttttttaatttttattgttaggtttcgtttgttttggaggtttatgtgggatgtaagagacccttgctattagggagataggg

SEQ ID NO: 12266 - DNA, 192 bp, Glycine max
  unsure (1)..(192): unsure at all n locations
  Clone ID: LIB3039-003-Q1-E1-F7.F3
tgtttctggctggtccattaatgctggnactgacccttctcctgtctccatcaatgctgcttgtttcacttccactcctggntatggactgttgtagttatagttgtangaagaagcttaaggtctctggccgaggaacaagtggctttgtgccgtgatgccaatccatatctgtctccagttccctgtctc

SEQ ID NO: 12267 - DNA, 364 bp, Glycine max
  Clone ID: LIB3039-003-Q1-E1-F7.R3
cttcagtagcggttatgagttgaagcatgctaataaaggcaggttttgggaagcaaactttggctgctatacagaatatcaggggaagaacagtcgaaagcacgtcagagggtctaactctaagaggaaagagtaacattgagcacgttgcagatcaaggctactgttctttcactgtggaggattataacaccactgttttactgcctcctcactgtcactggcctgctgtgccttattagttattaattaatattatccctgattaatcttccacaactttgaacttgaactctgtgagtactcagcttaattaatattatagtgttctagcagaaataaagagggaaaaggagaaggaaat

SEQ ID NO: 12268 - DNA, 448 bp, Glycine max
  Clone ID: LIB3039-011-Q1-E1-A9.TG
actttgatttcgatctccttacaagttacaatggaagaacagatttaacatgaaggaaacaatacatcttcgaattaaccataccaatttacattgctctctggtgcacactcgaaaaagaaaatgaaaacctgagctctcatcctttaaactgccactccctacggcacatggggcaatgcgcttgtgatgtctgagaattcacccatttcaggatacagtgcagatgaaatgcgtgattgcatacaccccaaatcagtgggcagtcatctccaggaagtttgcagtcaggacaacatccatcaaaggccatcctacaaatcccacaggtttcatcctgggcatcccaagtccatgaagcaacagcatgccatcttaattattcaacagatatggtaatatagacatccagaaacttcggccagagtatgagtttgaattcgaagtt

SEQ ID NO: 12269 - DNA, 321 bp, Glycine max
  unsure (1)..(321): unsure at all n locations
  Clone ID: LIB3039-030-Q1-E1-F11.F3
ccaggtggttggnagggagtaatagttctcattgattaacccaggtggtcggttgagaccatagcgttagagttattgttattattattcatttgcacgctctcggggaagcacaaagtggatgttggagactctaggtcatcatttngaaagcatcatggcatacatgctacgcacatgcatggttttcttcttgtcgtttagtgatgagtatttgttaatgttgttgttgttgtttgaccatgaactttgccacgctttgagcacgtcgaggcacggtggtagtgagtgttgtttttgttgtaggggtgtgattttgtt

SEQ ID NO: 12270 - DNA, 268 bp, Glycine max
  unsure (1)..(268): unsure at all n locations
  Clone ID: LIB3039-030-Q1-E1-F11.F4
ttccatggccatgcctnntttcgatgaaagcaatgagcttttggtcttcctccggtgtccatggccctttctttagccctgtcttctcacagcatggtgaccttcccatattgttcaacctagctatatatgtaacaaactaattgtaggttgatgagggtcttgcagcctatatggaaatttagttgtagagaaatttcacacaaaaaaaagttgtagtagagaataagagaaaaagaaggcaagaaaacaagcttgcgagagttcc

SEQ ID NO: 12271 - DNA, 439 bp, Glycine max
  unsure (1)..(439): unsure at all n locations
  Clone ID: LIB3039-030-Q1-E1-F11.R3
tggtggtagtgactcgtggnggtacttcaccaacacagcatgnaanaanaacagttgaaactgatgagnaanacaataatgtacgacacgatttcatgtttgcaagacgatgacggtgatattatggtggctgttgaggcattaagaggtgctggttattatgatgatgataataatagcaacaataataatgtcacatttacgcatctctctagcaatgtcaataatatggtgggtttcgaaaacgattttgattccaatgaagatttagcggcggtgaacttgcatgtgaacttcgaggagaataaggattattggaatggcatgcttaattagttagttataagtgaacaattttcctagctagctaccatgttatcatatgtagtacgtttgtttgtttcagagaaataatacattccttttgtcattcttcgca

SEQ ID NO: 12272 - DNA, 626 bp, Glycine max
  unsure (1)..(626): unsure at all n locations
  Clone ID: LIB3039-030-Q1-E1-F11.R4
ccttctagnaaaaggtggtcagccatagcatctcacttgcccaananaacagacaatgagatcaagaactactggaacacccacctcaagaagaggctggacaaaatgggcatagacctaacaacccacaagccaaaaaatgagtccctagcctactccaaancggctcgaaccttggccacatggctcagtgggagagtgctcggctcgaagccgaagccagactcgtaagagaatccaaactacaagaacaacaaaacaacctcggacctatgtcctctccttcctcaacacaaattacgaggctcgttctcaacaaaatcacacccctacaacaaaaacaacactcactaccaccgtgcctcgacgtgctcaaagcgtggcaaagttcatggtcaaacaacaacaacaacattaacaaatactcatcactaaacgacaagaagaaaaccatgcatgtgcgtagcatgtatgccatgatgctttcaaatgatgacctagagtctccaacatccactttgtgcttccccgagagcgtgcaaatgaataataataacaataactctaacgctatggtctcaaccgaccaccttgggttaatcaatgagaactatttactccctcca

SEQ ID NO: 12273 - DNA, 583 bp, Glycine max
  Clone ID: LIB3039-044-Q1-E1-H1.TA
aattttattttaattaaaaaaataggggggcatttctttttggatttaaaaaaaaaaaaaaagaaccctttgccttttcccggccgaaaaatattccaaggcctattttattacttcaaaaaacaaaattctttcctttttcccaacccaaaccccccaaaaagaggggaacccctaaccccccaaaacctaaaagagggccttccttcccctttggggggggaaacaaaatccttggccggcctgggttttttctaaaggggccccgggtccgtacggggtttcgaaaaaaatttttttgaaaaaaattttgccccccccccggcttttttttaaaaaaaacaacgatttttttttagcccccccttttttcccgggttccaaaaagggggcttggggattccctggtattggggggggggacccttcgaaggccctttttttcttccttttcttaaacccttcccaccctttccgggacccgcaatggtggtggttttttttggtggaaacttaaaaaaaaaagaaatttgggaataagggtttttgttttaagaaacccctcttttgggttttttcaaac

SEQ ID NO: 12274 - DNA, 649 bp, Glycine max
  Clone ID: LIB3039-030-Q1-E1-F11.F5
ctggcttcggcttcgagccgagcactctcccactgagccatgtggccaaggttcgagccgtctttggagtaggctagggactcattttttggcttgtgggttgttaggtctatgcccattttgtccagcctcttcttgaggtgggtgttccagtagttcttgatctcattgtctgttctcttgggcaagtgagatgctatggctgaccacctgtttcctagaagggcatgaagttgaataatggtttgctcttcctgcaagctgaactttcctcgttttatatcaggtcggagataattcgaccatctaagtctgcaactctttccacatcttctaagcctagcttttgcaggcaatgcacgccagcttccatggccatgcttttcgatgaaagcaatgagcttttggtcttcctccggtgtccatggccctttctttagccctgtcttctcacagcatggtgaccttcccatattgttcaacctagctatatatgtaacaaactaattgtaggttgatgagggtcttgcagcctatatggaaatttagttgtagagaaatttcacacaaaaaaaatgttgtagtagagaataagagaaaaagaagcaagaaaacaagctgcgagagttccccctctgtcgtctttcgc

SEQ ID NO: 12275 - DNA, 187 bp, Glycine max
  Clone ID: LIB3039-044-Q1-E1-H1.F5
actaacctgtgtgccattcacgccaagcgtgtaaccattatgcccaaggatattcagctggcaagaaggattcgtggtgagcgtgcttgagttggtggttggaaagatgaagatgattggtggctgcggttggtgtttttgtttttcagattcctttttttattcaatagatggggttgttagggag

SEQ ID NO: 12276 - DNA, 488 bp, Glycine max
  Clone ID: LIB3039-029-Q1-E1-B7.F1
aaacagaaaaacaagaatctgacattagcaacatattgtgatacaattacaagcttggcagcaatatagctcaatacattacatgttatagaaacccttatacctaaaacaccaccagcaacttactacaccaaatccttgcaatttttttccctatctccctaatagcaagggtctcttacatcccacataaacctccaaaacaaacgaaacctaacaataaaaattaaaaaaaaaaaaaaaaaacaaactagcctccaaatccgtagagggttcttccttgtctcttgagagcataaaccatatccattgccgtaacggtctttctcctagcgtgctcagtgtaggtaacggcgtcacgaatcacgttctccagaaagatcttgagcacgccacgtgtctcctcgtagatgagaccactgatacgcttcacaccacccctgggggccaaacgccgaatcgcaggcttgggtgattccctgaatgtt

SEQ ID NO: 12277 - DNA, 236 bp, Glycine max
  Clone ID: LIB3039-029-Q1-E1-B7.R1
cacccccctacccctccccaccaccccaccccccccacccccccacccccccctccacccccaccccccccccccccccccccccccccccaactccccacccccccaccccccccccctcccctccccacgccccaccccccccccccccccacccccccccgcccccccacccgccccaccccccacgcccccaccccccaccccacccccccccccacctcaccccccccccc

SEQ ID NO: 12278 - DNA, 577 bp, Glycine max
  Clone ID: LIB3039-046-Q1-E1-H12-r3
tctacaaactaatttttaagaaaagaaatcacagaaaaccctagatctgcaacacaaccgcctaacaaaccctaattcaagagctggtaaacttggtaaccgccttggtcccttcagaaacggcgtgtttggccaattcaccagggagcacgagacgcacggcggtctggatctccctcgaggtgatggtgggcttcttgttgtagcgagccaaacgcgacgcttcctgggcgagcttctcgaagatgtcgttgatgaagctgttcatgatgcccatggccttgctggaaataccaatgtcggggtgaacctgcttgaggaccttgaagatgtagatcttgtaggtctccacgctcttcttcgtgcgcttcttcttcttctcgctccctccttccttcgagatcttcttctccgccttcggcttcttctccgccggtgccttctccgccgctggcttcttctccgccggcttcttctctgcctttgccggagccattaggaaaatcagagacttcgaaaaaaggttttggctatgctttcgtgttggtaatgagggtgagtgctatgaaatgcgatc

SEQ ID NO: 12279 - DNA, 507 bp, Glycine max
  Clone ID: LIB3039-046-Q1-E1-H12-r4
ccctaattaagagctggtaaacttggtaaccgccttggtcccttcagaaacggcgtgtttggccaattcaccagggagcacgagacgcacggcggtctggatctccctcgaggtgatggtgggcttcttgttgtagcgagccaaacgcgacgcttcctgggcgagcttctcgaagatgtcgttgatgaagctgttcatgatgcccatggccttgctggaaataccaatgtcggggtgaacctgcttgaggaccttgaagatgtagatcttgtaggtctccacgctcttcttcgtgcgcttcttcttcttctcgctccctccttccttcgagatcttcttctccgccttcggcttcttctccgccggtgccttctccgccgctggcttcttctccgccggcttcttctctgcctttgccggagccattaggaaaatcagagacttcgaaaaaaggttttggctatgctttcgtgttggtaatgagggtgagtgctatgaaatgcgatc

SEQ ID NO: 12280 - DNA, 414 bp, Glycine max
  unsure (1)..(414): unsure at all n locations
  Clone ID: LIB3039-046-Q1-E1-H12-r5
cggcctggntctccctcgggtgatggtgggcttcttgttgtagcgagccaaacgcgacgcttcctgggcgagcttctcgaagatgtcgttgatgaagctgttcatgatgcccatggccttgctggaaataccaatgtcggggtgaacctgcttgaggaccttgaagatgtagatcttgtaggtctccacgctcttcttcgtgcgcttcttcttcttctcgctccctccttccttcgagatcttcttctccgccttcggcttcttctccgccggtgccttctccgccgctggcttcttctccgccggcttcttctctgcctttgccggagccattaggaaaatcagagacttcgaaaaaaggttttggctatgctttcgtgttggtaatgagggtgagtgctatgaaatgcgatc

SEQ ID NO: 12281 - DNA, 263 bp, Glycine max
  Clone ID: LIB3039-046-Q1-E1-H12-r6
gcttgggaccttgaagagtagatcttgtaggtctccacgctcttcttcgtgcgcttcttcttcttctcgctccctccttccttcgagatcttcttctccgccttcggcttcttctccgccggtgccttctccgccgctggcttcttctccgccggcttcttctctgcctttgccggagccattaggaaaatcagagacttcgaaaaaaggttttggctatgctttcgtgttggtaatgagggtgagtgctatgaaatgcgatc

SEQ ID NO: 12282 - DNA, 178 bp, Glycine max
  Clone ID: LIB3039-029-Q1-E1-B7.F4
agccggagatcgtcgtaacatagcagcactacgttactactcgagcgggatacgacattctcagagctcaggtgtcttgaacttagccaccgtctgcaattttttatcgagagcgttgatttcgacgaatcttcttcttcaggattcggtaggagacctttttttttctggaaccaaa

SEQ ID NO: 12283 - DNA, 217 bp, Glycine max
  Clone ID: LIB3039-005-Q1-E1-C6-F1A
tttgtgttgttgggttgttggttttttgtgtagcagaaagcgaattgtaacgcagttatagggatgcagacgtagccagatttcaacaggaaaacgctaaagcaaagtgaaaaggctacaggagagagacaccccttaacgaaagagttgtatgtagaaggacgagtagagaactccgttcgttgaactattcactgtttggaaagacaaccagttt

SEQ ID NO: 12284 - DNA, 440 bp, Glycine max
  Clone ID: LIB3039-026-Q1-E1-H1-F1A
cgaatcaccattagctcaagtcactgttctctttggtagtaattagcaagaataaccaagacaaagcctcataataagcaagctaccactacttaattttacaaagaaattaaattgacccaatatctaagaccacacccaccatcacttcgacaagagtagatcactacatttgacatcaattaggaagaaagaaagaaaccattctatgactcaacactgacttctgtcaactgaggcttcactttgggaggcctgcctctaggccttccagtggagacggcggtgggagacggcacggccggtgagcgagcaaccttcttaggccttcctcttggcctgccagtggcaggggtggccttagccttaggggacttaggaggggcattagggtcttttgggggacgaccccttggcctttggagggggaccacaacagt

SEQ ID NO: 12285 - DNA, 240 bp, Glycine max
  Clone ID: LIB3039-046-Q1-E1-H12-F1A
gccccaaagggacccccccttaaaaaacggtccagatccttacacccacaaaccaattttaaaggaaaggaaccccgggaaacccccaggttggaaaaaaaacggcctaaaaacccccattccaggggggggaaaactgggaaaccgcctggggcccgtcaaaaagggggggttgggccaattccccggggggcccggagcccgggggggcggggtcccccccggggggaggggggggcc

SEQ ID NO: 12286 - DNA, 506 bp, Glycine max
  Clone ID: LIB3039-050-Q1-E1-G12-F2A
ggggaagtagacttttgctagtacctagtatttcaatcaaccccttgcttcgcttacatcattgtagataaaaggtatacataccggtatgggattgcatgaaaattcaatccttttttgcttacacatatatagttaattatcacttaattataaggagatcatgtccactaggaaacacgcaatgcaaaaatgaatggcaaatatatgagagtcaaactgagactattattgtcatacattaagtttcttcatctccctccttattgcattggctctcactaagctcccaatggtgttaatggccaatttcagaccctccaatggattgccaggcaccaccgtcttgtacaaatagctatcaaaggtcatcttctgcacatactcatcagcacacatctccacaaacgcttcccttgcagggttggacctataaaacaccttctgaagaatatccaagaccttgtaagttggccaataagtcttgtcccacttctccaagtact

SEQ ID NO: 12287 - DNA, 599 bp, Glycine max
  unsure (1)..(599): unsure at all n locations
  Clone ID: LIB3039-050-Q1-E1-G12-R2A
gactcgccactcgtaacaatgaactccatagccttcaaatccttcgtcgggctgcgccagtcctcggcggaggcgcccacatttcgctgcccagtcccgccccgccactccccaccgcaaattccgcgtcgtggccggaaaattcagccccaggctgaacggccggaacctccgcgtggcggtggtgggcggcggtcccgccggaggagccgccgcggagacgctggcgaagggcggcgtggagacgttcctgatcgagcgaaaaatggacaactgcaagccgtgcggcggcgccatcccgctgtgcatggtgggggagttcgaccttccgctggacatcatcgaccggcgcgtgacgaagatgaagatgatatcgccgtcgaacgtggcggtggacatcgggaggacgctgaagccgcacgagtacatcggcatggtgcggcgcgaggtgctcgacgcttacctaagggaccgcgccaaggagaacggcgccaacgtcatcaacggcttgttcttgaaaatggatattcctaangataataactccccctacgttctgcattactctagctacgacgggaaaaccaatggagctggtg

SEQ ID NO: 12288 - DNA, 419 bp, Glycine max
  Clone ID: LIB3040-052-Q1-E1-B5
gacagtgttcacagacactggaagcagcacgatgtcaccgttaaggacgagaagacccttctcttcggtgacaaggcagtcactgtttttggacacagaaaccctgaagagatcccatgggggtcaactggagctgacatcattgttgagtccaccggagttttcaccgataaggacaaagctgccgcacatttgaagggtggtgccaagaaggttattatttctgcccccagtaaggatgcccccatgtttgttgttggtgttaatgagcacgagtacaagccagagcttgatactatttccaacgctagctgcacaatcaactgccttgctccactccccaaggttatcaatgacaggtttggcattgttgacggtttgatgacaacggttcattccatcactgccacccagaagac

SEQ ID NO: 12289 - DNA, 404 bp, Glycine max
  Clone ID: LIB3040-061-Q1-E11-B6
gattgttggcttgtgctctgctcgtgcctctagggttatcatatctccatttccatttcctctctctcagtttccaagaatcttaagctatgggaaagtcttacccaaccgtgagcgctgattaccagaaggccgttgagaaggcgaagaagaagctcagaggcttcatcgctgagaagagatgcgttcctctaatgctccgtttggcatggcactctgctagaacttacgacgtgagctcgaagaccggtggtcccttcggaaccataaagcacccctccgaactcgctcacggcgctaacaacggtcttgacatcgctgttaggcttttggagccactcaaagcggagtttcctattttgagctacgccgatttctaccagttggctggcgttgttgccgtt

SEQ ID NO: 12290 - DNA, 370 bp, Glycine max
  unsure (1)..(370): unsure at all n locations
  Clone ID: LIB3040-061-Q1-E11-B7
ggagtgagacaccgatagatagagagcgcggcataacctaaacctatctttcttctctctctgtgtgtgcgcttcaacggcaaccagaagcagccatggccactgcaaggactgtgaaggatgtttcacctcatgagttcgttaaggcgtactcctctcacctcaagcgatccggcaagatggagctgccagagtggactgatattgtgaaaactgcaagatttaaggagttggctccttatgatcctgactggtactatgtcagagctgcttccatggcaagaaagatctacttgagaggaggacttggtgttggtgcctttcagaggatttatggtgggagcaagaggaatggtantcgccctcctca

SEQ ID NO: 12291 - DNA, 393 bp, Glycine max
  unsure (1)..(393): unsure at all n locations
  Clone ID: LIB3040-061-Q1-E11-B8
gaaaccacaaaatttatgtagctgatcaatctctttctctctctatctgtctcttccatggaatggtagatttgaggtgaaaaggttccacattggtcaggttccgatctcacaatggggaagtcaccaggaaaatggatcaaaactgtattgtttgggaaaaagtcatccaaatcaaatatttcaaaaggcagagagaagcttgttaatcaagaagaaggagttgtagttacctccaaggtgctagaaactggtttggctttagaaccaacctccgatactattgccagacatgaggaagacctagagctggaaaatgaagaagcagaaaatgttaaaacttgggaatcaaganatagacacagtgggatcaattaatgaagatgctgcact

SEQ ID NO: 12292 - DNA, 363 bp, Glycine max
  unsure (1)..(363): unsure at all n locations
  Clone ID: LIB3040-061-Q1-E11-C2
agggggtccgataatttcctttcctcctcctccccccttcgtctccccccccctcctaatccctttctctccgaatcccacgtcctagatccgttgttctcttcncacagttctcactgaatcaggatccattttgataccaagttgctgttgaatatcgagtttgctctttagagatctgtttccctctagacaacggtctgtgtgacctgttattttagttgaatcgaagccgcgaccaaatcttcctgatctttgcctgaggtgatggcatcggcgggtgtagcacctgcttctggagtaagagatgtgaatgcaaattcggttgctgttgaaaggttgcctgatgagatgaatggcatg

SEQ ID NO: 12293 - DNA, 331 bp, Glycine max
  Clone ID: LIB3040-061-Q1-E11-C3
gaccacgtgaaccaatatatcccaagccctatacaaccataccctaacacatacccatttgattcagtttccatggctagcctcaacgttgcatttttggctgcagtgctctgcatggttgtggctagtgcacccatggcacatgcacctatcacgtgcgggcaggtgaccaatatcctgatcaattgcatcggttacctccagaacggacgaacgccgccgtcgggatgctgcaactgagtcaataacctcaatgccaccgccaacactaacgccgaccgccagaccgcgtgcaactgcctcaagtcggtctccagcccaatctccggct

SEQ ID NO: 12294 - DNA, 367 bp, Glycine max
  unsure (1)..(367): unsure at all n locations
  Clone ID: LIB3040-061-Q1-E11-C5
ggcccttctagctttttcccagtccaagcagcttccaattcgtgccactctcttcaaaatggccgttaccttctcaaatctccacacagaatcaggtctcaagtccctcgacgacttcctctctgggaaggtctacgtttctggggatcagttcacaaaggacgacatcaaagtgtatggtgctgttttggagaagccaggtgactcttttcccaatgctgccaagtggtacgaggttgtctcatctcagcttgctgcaagcttccccggcaatgctcaaggggtgagattcagtggcaaagcttctgctccagcggaggctgctcctgcgataccggatgcttctgctgctgaanatgatgatgac

SEQ ID NO: 12295 - DNA, 386 bp, Glycine max
  unsure (1)..(386): unsure at all n locations
  Clone ID: LIB3040-061-Q1-E11-C6
gatagtattatcattcattctcatctttctctcttctctctccacccaaaccctaactcccgaccctgttcccctctcgtatccgtcatgaaaggaggaaagtccaagaccgaatctaagagagccgatcccaaacttgctgtgaataagaagggagccgccaccaaggctaggaaacccgccggcaaggggaaggcagcgaaagaccctaacaagccaaagaggcctccaagtgctttcttcgttttcatggaggagttcaggaaggtattcaacanagaacatcctgaaaacaaagcagtgtctgctgtgggcaaagctgctggagcaaaatggaagaccatgtctgatgctgaaaaagcaccttatgtggcaaagtctgagaa

SEQ ID NO: 12296 - DNA, 316 bp, Glycine max
  Clone ID: LIB3040-061-Q1-E11-C7
gattcttccgacgaagaaacacgatcgtatcgtatcaccggaaattctgactctcacagatttctgggagcgacaattgcaactccgattcgacttgaaaagagggaggaaggtgaaaaagattggcaaattataagaatactttaagatgtcagcgcttttcaatttcaattcatttcaaaccgtgatacttcgggaaatatttgcctgcacttatttcaagatgcattttccggatatccttgaccagaaaactgggtctcgtggtctcttctggagggcagcaagaatatgtgaacttaaacccatgggtatc

SEQ ID NO: 12297 - DNA, 399 bp, Glycine max
  Clone ID: LIB3040-061-Q1-E11-C8
gagggttttgcgctgttgttgctgctcatcctccgtaacctccgagctctgcaccgaagaacgaagccatggggaagacacatggaatgggatctgctcgcaagctcaagtcccaccgcaggaggcaaaggtgggctgacaagtcatacaagaaatcacatcttggaaatgaatggaagaaaccttttgctggttcatcccatgccaagggaattgtccttgaaaagataggtattgaggctaagcagcccaactctgccattcgtaagtgtgccagggttcaacttatcaagaatgggaagaagattgccgcttttgtccctaatgacggttgcttgaactacattgaagagaatgacgaagtcttgattgctggatttggacgaaaaggtcatgctg

SEQ ID NO: 12298 - DNA, 395 bp, Glycine max
  unsure (1)..(395): unsure at all n locations
  Clone ID: LIB3040-061-Q1-E11-D1
gatccaaattcaagttcgcaccaaattttcctcccaaaatgtcaggccgtggaaaaggtgggaagggtttgggaaagggaggagctaagaggcacagaaaggttcttcgtgacaacattcaaggaatcacgaaacctgcgattcgtaggttagcgagaagaggtggcgtgaagaggatcagtggtttgatttacgaggaaaccagaggagttctgaagatattcttggagaacgtgattcgcgatgctgtaacctacactgagcacgctaggaggaaaactgttactgctatggatgtcgtttatgctctcaagagacagggaaggaccctctatggctttggaggctaaagaatagaatctttaggtttaatgactgtgttgcangataaaaca

SEQ ID NO: 12299 - DNA, 405 bp, Glycine max
  Clone ID: LIB3040-061-Q1-E11-D2
gagggtttggttattagggttttcgctcaccggtgtgcagtcgagcccccgaagaaaaagcgaaaatgccgtcgcacaagacattcagaatcaagaagaagttggcgaagaagatgaggcagaacaggcctatcccctactggatccgcatgtggaccgacaacaccatcaggtacaacgcgaagcgccgtcactggcgtcgcaccaagcttggattctgaggtgcttgctttgcctcggttctgtttatccaattaattagtgttttattttcttgagccaaaaacaatgctttggagattttaatattttgcattttgttccaagactatattgtgtaaggaacttattgtagttcagactaatggtggtgttggtcacctttttttaaaagtattttgcaaa

SEQ ID NO: 12300 - DNA, 344 bp, Glycine max
  Clone ID: LIB3040-061-Q1-E11-D3
gaagaagccaaagagtgagaggtttgagaagctggaggctctaagcaggcgcctgaggctttgccttctaaagggatcaacccatggaaggcacaagtcaacttagacacacctcttccttctttgtatcatatcacccatccatcgtctaattctaatgttttattttacaacactgtttctaggtagttcttcacattcaactttctttttaggttttgcctaacattggctttgatttccctgctctcattattatttcatacttatgaaggtgactcatcacattgatgtgcaggtatcagatacaatacgtgtatccaatatatagataagattattcg

SEQ ID NO: 12301 - DNA, 403 bp, Glycine max
  unsure (1)..(403): unsure at all n locations
  Clone ID: LIB3040-061-Q1-E11-D4
tgggacagagagagaggttttgatgcaacgctgtcactgagaaaggatctctatctacgaaggagcggaataaaacccttctctctgtgattaagagaatggcttcagatcggaaacttcacacttttgaggaggtggcaaagcacaaccagaccaaggattgctggctcatcatttctggcaaggtgtatgatgtcacccctttcatggaggatcatcccggangtgatgaggttttgttatctgcaacagggaaagatgcaaccaatgactttgaagatgtggggcacagtgattctgctagagatatgatggaaaaatactacattggtgagattgatgcatcaaccgtcncactaaaacggacctacattccaactcagcaagctcagtacaatcctga

SEQ ID NO: 12302 - DNA, 334 bp, Glycine max
  Clone ID: LIB3040-061-Q1-E11-D5
gaattcacttgcggctgcagtagagaagcactcttcgttcttcgactgtctacgatctgctttctctgaattgtgaaaatgtcgctcggagaaactgcttgttcatacgcagctctcatccttcatgaagatggaattagtgtaactgctgacaagatcagcaccttgttgaaaactgcaaaggttcaattagactcttattggccaaccttgtttgctaaacttgctgaaaagaaaaatcttggcgatttgataccaaatgcggaaggcggtggtgcacaatttgctgttgcagctgcccaatttgctgctgctgctggtggtgctgctgccg

SEQ ID NO: 12303 - DNA, 349 bp, Glycine max
  Clone ID: LIB3040-061-Q1-E11-D6
tatgggtcttttgataagccctctgagaagaagaaggggtacttgcttcccaggcccaagatggttaactctgatcttgccaggattattaattctgacgaggttcagtctgttgtgaggcccattaagaaggatgtgaagaaggccacgctgaagaagaaccctcttaagaacctgaactctatgctgaagctgaatccttatgccaagactgctaagaggatggctcttcttgctgaagctcagcgcgttaaggccaagaaggagaagctcgacaagaagaggaagactgtctctaaggaagaagcttctgccatcaagtctgctgggaaagcatggtatcacacta

SEQ ID NO: 12304 - DNA, 399 bp, Glycine max
  Clone ID: LIB3040-061-Q1-E11-D7
ggtgtgtgcgttcctaacattattgtttcctaccaagttctctgtctggggagttcttagcaccaccaccagcttctgcagtagctttaagctacgaaagattttccttgaccatggggcaaaagcatttagtgacggtgttctgtttatgggctttaacatgttcccttcttccatctttctcctttggaattctgagaattggtttgaagaagagacctctagatcttgatagtattaatgctgctagaaaggcaagagaaggtctaagatctgtaagaccaatgatgggtgcacatgatcagtttattggtaagtcaaaaggtgaagatatagtacctttgaagaattatttggacgctcaatattttggtgagattggaattggcacacccccac

SEQ ID NO: 12305 - DNA, 131 bp, Glycine max
  Clone ID: LIB3040-061-Q1-E11-D8
gttcgatgttggattttcccaaacattttaagaagaaatgtgatgtgtaatgggtctgtaatgacctttgaaaataagtttggtttgtgttgaactctattgtcccattaatgttactactgtttgttaac

SEQ ID NO: 12306 - DNA, 348 bp, Glycine max
  unsure (1)..(348): unsure at all n locations
  Clone ID: LIB3040-061-Q1-E11-E1
caaaaaaacaacaaaagggggcaacccttgaaacaaaccccaactcaaccaccaaaccactctctctgctcctcctctacctttcaagtttttaaagtattaagatggcagagacattcctatttacctcagagtcagtgaacgaaggacaccctgacaagctctgcgaccaaatctccgatgctgtcctcgacgcttgccttgaacaggacccagacagcaaggttgcctgcgaaacatgcaccaagaccaacttggtcatggtcttcggagagataccaccaangccaacgttgactacgagaagatcgtgcgtgacacctgcangaacatcggcttcgtctcaaa

SEQ ID NO: 12307 - DNA, 400 bp, Glycine max
  unsure (1)..(400): unsure at all n locations
  Clone ID: LIB3040-061-Q1-E11-E3
aaaataaattgatacacaccacatttccccaaagtaatttattaattaataaataaatggcggcggcggcggcattgacggtgcaactcccacctaggattccgaccgccaacaacgttacccgctgctctgctttgccntctctgcctcctcgcggcaacaacactaaaaccactttgctcttatcttccctcaaccacttctcagtgtcccgaaaatcttctctgcttcagaccagagcttcttcagaggaatcatcctcagtagatgccaatgaggtgttcacagatttgaaggaaaagtgggatgctcttgaaaacaagtccacagtacttttttatggtggtggggctttagttgctgtttggctatcgtcgattcctgtgagcgccatcaactc

SEQ ID NO: 12308 - DNA, 389 bp, Glycine max
  Clone ID: LIB3040-061-Q1-E11-E4
ggtcacaaccctactctcaacacactgcagcgagaaccaaagaaaaaaaaagcttcttccattttccgaaatcgaagcattatggttagggttttttccgatctgagaaattcgcggcccaatggcggaggaaccggagagcaccgtcaccaccggcgccgccgacgaatcgctgctcgataagatcaccgagaagcttcacggccacgattcttcgtcctcttcatctcccgactccgactccgactccgaaaaaaccgttacttcctccgttaaggataaggtttttcgcctcttcggaagggagagacccgttcactccgttttcggcgccggaaaacctgctgatgtgttattgtggacgaacaagaaaatttctgctggcatgc

SEQ ID NO: 12309 - DNA, 364 bp, Glycine max
  Clone ID: LIB3040-061-Q1-E11-E5
gaagttcttcagcgaccaagaccagatcgacttcatcgattccttccagaagtgtctcttcgagaacacgcacggcgtcgaggccacggaggccaacaaactcaaaatctacggcaaggatttcgcggcgtgggcaaaacccgaaaccgccgatgattccatgtgggaggacgcagaggaagccttcaccaaaagccccacactggttaggtcaaaccaagacctaaaagaagagttcgaagaagcttccaacggtggaattcagagccttgctttgggtgctttggacaacagtttcctggtgagtgaaaatgggattcacggttgtgaagaatttcgcacatgggattcatgggaagggtgc

SEQ ID NO: 12310 - DNA, 334 bp, Glycine max
  Clone ID: LIB3040-061-Q1-E11-E6
gagacctcaggtcaggcggggctacccgctgagtttaagcatatcaataagcgaagaaaaaaaaaaaaaaaaaaaaaaaaaaaaaaacgggcgctccaaaagattcaagcttaagtaagccttcaagcgaatttaaaactcctccaaaatgtcaaccaaattcaattcaatggccgtccttttacaacgtccttaatgggaaaaaccttgcgttaaccaacttaatccccttgcaacaaaatcccctttccccaactggcgttataaccaagaaggccgcaacgattgcccttcccaacaatttcccaacctgaatggccaatgggaacccccc

SEQ ID NO: 12311 - DNA, 385 bp, Glycine max
  Clone ID: LIB3040-061-Q1-E11-E7
gacttgttcgcgctctctctctctctgtctttgttaaccctctcggcctctgtgtgttgtgttgtgaatcgagattcaacacttcaactcggcccattgggattttcagggtacaatggcttccaacatctcgccctctgcctttgataaagaacagatatttggaatggctgaaaaggagatggaatatagggtcgaattattcaacaagatgacccagacctgtttcaataagtgtgttgacaataggtacaaggagtctgagctaaatatgggtgaaaatagttgcattgaccgctgtgtttcaaaatattggcatgtgactaatctaattggtcagctgcttggttctgggaagcctccaatgtaatccaagtgttttgta

SEQ ID NO: 12312 - DNA, 386 bp, Glycine max
  unsure (1)..(386): unsure at all n locations
  Clone ID: LIB3040-061-Q1-E11-E8
gacacaattcaataccatttatcaactcactcatcaatctcgtttgttctcactaactattacttcatcatgtcgtcgagcacagttggtcaagtcatcaaatgcaaagctgcggtttcatgggaggcagggaagccacttgtgattgaagaagtagaggtggcaccaccacaagctggtgaagtgcgtttgaagatcctctacacctctctttgccacactgatgtttacttctgggaagccaagggccaaactccattgtttcctcgtatatttggtcatgaagctggagggattgtggagagcgtaggtgagggtgtgactcatctcaaaccaggggaccatgccctcncagtgtttnacggggagtgtggagaatgccctca

SEQ ID NO: 12313 - DNA, 380 bp, Glycine max
  unsure (1)..(380): unsure at all n locations
  Clone ID: LIB3040-061-Q1-E11-F2
gcgtacacagcctcaacaaccctaacgcctgcagagcagagagagacgcagccatggggcgaagacccgcgaggtgttataggcaaattaagaacaaaccataccccaagtcacggttttgccgtggtgttcctgatcccaagatcaggatttacgatgttggtatgaagaagaagggtgttgatgagtttcctttctgtgtccatctggttagttgggagaaggaaaacgtttctagtgaggccctggaagctgctcgtattgcttgcaacaagtacatggccaaatttgctggaaaggatgctttccacttgagagtcanggtgcacccattccatgttcttaagatcaacaagatgctttcgtgtgctggagctgat

SEQ ID NO: 12314 - DNA, 52 bp, Glycine max
  Clone ID: LIB3040-061-Q1-E11-F3
gaagtccgtcctttcttttgttaaacaggctggctgtgacttcggctccccc

SEQ ID NO: 12315 - DNA, 339 bp, Glycine max
  Clone ID: LIB3040-061-Q1-E11-F4
gacagcgaaacagagagtgatttcagtgagtgatcggtgttcacttgatctcatcataatcgtcagcgtcaattgaagaagatgccgatcagaaacatcgccgtcggaaggcctgaagaggcgactcaccccgacacgttgaaggcggctttggctgagttcatctcaaccttcatcttcgtgttcgccggctcaggctccggcatcgcctacaacaagctcaccgacaacggcgctgccacccctgccggcctcatctccgcctccatcgcccatgcattcgccctcttcgtcgccgtctccgtcggcgccaacatctccggcggccacgtcaacccg

SEQ ID NO: 12316 - DNA, 350 bp, Glycine max
  Clone ID: LIB3040-061-Q1-E11-F5
gacagccacaacactttccacttgtctccgaattagttatcttgagaaacattattcccattgctatatattatggctagcatgaaggttacatgggtggttgtgatcatgtgcatggccgtggtgggtgcaccgatgatggcgcaagccatgacatgcaatgatgtgacggtgaacatggcacagtgcctatcctacctgatgcagggaggaacaccttcaacactctgctgtcaccaacgttgacaaacaaactgtgtgcaactggtctcaagcggatgctgccaggtaaaacatcaatgaccagtatgctcaggaattccctggtttctgcaaggtcaatgtccctt

SEQ ID NO: 12317 - DNA, 353 bp, Glycine max
  Clone ID: LIB3040-061-Q1-E11-F6
gaccgttccatttctcaacaacttctgctacttcctactccaaccgcacttctgctccgcaattatcatgggcaaggtcaagatcggaatcaacggatttggaagaattggccgtttggtagccagagtggctctgcagagagacgatgttgaactcgttgccgttaacgaccctttcatcaccaccgattacatgacatacatgtttaaatacgacagtgttcacggacactggaagcatcacgatgtcaccgttaaggacgagaagacccttctcttcggtgacaagccagtcactgtttttggacacaggaaccctgaagagatccatgggggtcaactggagctgacat

SEQ ID NO: 12318 - DNA, 359 bp, Glycine max
  Clone ID: LIB3040-061-Q1-E11-F8
aacttggtatatccactatatgaccattaactaaaacatgtctatggttaattaattggcgtgcttgaggaatagtcgcagccatacccaaccgaaaaagtatgttatccaagcgcatttcaagtagttgtaataaaacctgaccagttgatcctttagcttttccggcgatacgaacgtatttaagcaattgtcgttctgtaagaccataatgaaaacgcaatttttgtttttcttctaaacgaatacgatattgagattttttactggagcgcgattgatttctaagttcgcttttgactgttggccttttactagttagtcctggtaaagaccccagacgacgtatttttttgaaa

SEQ ID NO: 12319 - DNA, 198 bp, Glycine max
  Clone ID: LIB3040-061-Q1-E11-G2
ataagaattaattttactccacaaaatcacggtgttatcatgaaaaagtagaagtaattatttgttattttgtttttatcatgaaagttttattgattgtttatcaccaaattttaaccaagcacactatgaatctcgtaaagtccaaaatgactatggctaaggaccatcttaacgaattaaaagacttccaagtat

SEQ ID NO: 12320 - DNA, 336 bp, Glycine max
  Clone ID: LIB3040-061-Q1-E11-G4
gacctaaaaattgtaccgatatggcttcacttgtgtgtctccttttttccttgcatttcatggttatcatgtcaggttccttaccagcaaatagtgaagtgtttacaaaagagtctcctatgtctctatccacaaaacccgtggaaagactcacccaactccacttttatttccataacaacaaaatgggggaacacccgactgctatgaaaattgttgagcctcctaaggcgtccatttctggttttgggactatttacatgatggatgaccctctaaccgaaggaccaagtccaacttcaaagcttgttggaagatgtcagggaatatatgctg

SEQ ID NO: 12321 - DNA, 374 bp, Glycine max
  Clone ID: LIB3040-061-Q1-E11-G5
ggtggtggggtgtgcagaagagcgtcgcagttgtaaccctaatcagaagaagcgcagcttcaagcgagtgacagccaccagccatgggtcgtatgcacagccgcggtaagggtatatcctcttctgctttgccctacaaaaggacacctcctagctggctcaagatctcttcgcaagatgtcgaagaaaatatctgcaagtttgcgaagaaaggtttgaccccgtctcagattggtgtcattctcagagattctcacggtattgctcaggtcaatagcgtcactggcagcaaaatccttcgcatcctcaaagctcacggacttgcgcctgaaattccagaggatctgtaccatttgattaagaaggcagtttca

SEQ ID NO: 12322 - DNA, 359 bp, Glycine max
  Clone ID: LIB3040-061-Q1-E11-G6
gacattcatattttcctttcgtttcctttcattttccctcactttctcgctccccaaacgcccctctctctcctccaatggccgaccagctcaccgacgaccagatcgccgagttcaaggaggccttcagcctcttcgacaaggacggcgatggttgcattactaccaaggaacttgggactgttatgaggtcacttggtcaaaacccaactgaggcagaactgcaggatatgataaacgaggttgatgctgatggcaacggaaccatcgatttcccagagttcctcaacctgatggctcgcaagatgaaagacaccgactcagaggaggagcttaaggaggctttccgtgtgtttgac

SEQ ID NO: 12323 - DNA, 79 bp, Glycine max
  Clone ID: LIB3040-061-Q1-E11-G8
gccggtttcccgaacgatttgatggtttggaatgcatttcccaagcaacgagtcttcggttcgaaaccagcagagagac

SEQ ID NO: 12324 - DNA, 378 bp, Glycine max
  Clone ID: LIB3040-061-Q1-E11-H2
gatcatcatcaacaacaagcagatcaacctctctctctctctcaaccataatagtcatgggtttgaaggaggattttgagcagtatgctgagaaagcaaagactttgccaccgactcaatcaaacgaagacttgcttatcctttatggattgtacaaacaggccaccgttggacctgtcaacaccagccgtcctggaatgttcaacatgagggacagagctaaatgggatgcatggaaggctgttgaagggaaatccaaggacgaagcaatgggtgattacatcattaaggtgaaacagctgctggaagcagctggcttgcctgcttgataacattgtcatgcccttgcttctgaatctgtgctagaagttcacaaca

SEQ ID NO: 12325 - DNA, 168 bp, Glycine max
  Clone ID: LIB3040-061-Q1-E11-H3
caaaaaaacaacagaaggggactcattcatacaatagagaccagcttttgcttctttgtgaacatggagatgaggaaatcatgtggcttcttcttcttgctcctcctccttgtctttgcttcccaggtggtggtgcaaacggagggaaaaatgtgtgagtcacaaagc

SEQ ID NO: 12326 - DNA, 266 bp, Glycine max
  unsure (1)..(266): unsure at all n locations
  Clone ID: LIB3040-061-Q1-E11-H4
cgtgacggcttcacgttgtcacagtcatcatctcttgcggctacggttttagcgcagcttcttctagatttaaggaagatgggtaaggaaaaggttcacatcagtattgtggtcattggccatgtcgactctgggaaatccactaccactggtcacctgatttacaagcttggaggcattgacaagcgtgttattgagaggtttgagaangaagctgctgagatgaacaagaggtctttcaagtatgcctgggtgctggacaaact

SEQ ID NO: 12327 - DNA, 321 bp, Glycine max
  Clone ID: LIB3040-061-Q1-E11-H5
ggttgttgttgtattgcagtaagtaacagcgaacgaagaagaagaagaagaagaagaagaagaacgcagaagccacgatgagtggcagagccatgatctcctgtttccctcctccttcaacaactccatgctctgcccccattccactctggcgccgaaaccacctcctccatgcaactcctccaccttcgctacacctcctctcgcggcggagccacctcgttgccggcggaaggagggtgtgggtgaatgtgaagtccgagaagaacttatccgaatcccccaagtacgaggatgatgtcgtggttcagaagaagaaga

SEQ ID NO: 12328 - DNA, 361 bp, Glycine max
  Clone ID: LIB3040-061-Q1-E11-H6
gaccctacgtacagatgactcatcattttcttctgggagcaactaaatggttctgacctgatggcaaatcagaacaaaacattagctctagcttcagtccaacaacataaacacattattcagactcttcactccatttttttttataaaagttggccaagaataatatgcatctcttgcttccttttcgcttttatactcactttttggtagttgagtcttcaagatgcattcttcctgagatattcagcttcgacatctcacgtatcactgtgattggttttgtctaatgtgattgctgctccaccagcagcttttctagacacagctaattcttgccagatgctaacgtcacagtata

SEQ ID NO: 12329 - DNA, 350 bp, Glycine max
  Clone ID: LIB3040-061-Q1-E11-H8
gagggtttcacgttttcatgtgaaaatggattgagaatctctttctatttttatattttctttcgggtcaattagggttttttctggcgtgattctgaaagcttggatctggatatcttctttgcttctttgctatggaagactcagattcagttgctacgctgatagattccacaacttctaagatacagcagctgcaaaaggcatttgctgaacttgaaagttaccgagctgttactctgaacttgaaatggaaagaactcgaggaacattttcatggtctggagaaatccttgaagaggcgctttcatgaattggaagaccaggaaaaagagtttgagaacaaaaca

SEQ ID NO: 12330 - DNA, 373 bp, Glycine max
  unsure (1)..(373): unsure at all n locations
  Clone ID: LIB3040-061-Q1-E11-B5
tttattttgatttttcttagtttcactggcaattgacaccataccatanaactatactaccgtatggttgtttcaagtgacagtgaacttggattcttaagggttcggagcanattttattaatgaaaaaaaaatgtaattcanaagagagattttactataaataactaatttttttactgaaaataaattaaccacaaagttgttaaatacactagtatcattcataaaaaaaacaatttaccctaaagtaagatttgacttttttttagttaatattgtttggccctcctattgtttagagctttaattcctgatatggtatggaagcagacaatggtaaaagccctttcctttttgcaaccacttcatt

SEQ ID NO: 12331 - DNA, 280 bp, Glycine max
  Clone ID: LIB3040-059-Q1-E1-B5
gagagtgatccttctacactaactaaagccgagcagcgagagagagaaaccctatcagaaatgccggctggtcacggtttgagatcccgcaccagagattccgtctctcgtcccttcaggaagaagggtaccatcgtcctcaccacatatctcagaacctaccacgtctgcgattatgtcgacatcaaggttaacggcgccatccacaaaggaatgcctcacaagttctaccatggccgcaccggtcgcgtctggaatgtcaccaaacgtgctgttgggg

SEQ ID NO: 12332 - DNA, 313 bp, Glycine max
  unsure (1)..(313): unsure at all n locations
  Clone ID: LIB3040-059-Q1-E1-B6
gagggtttggttattagggttttcgctgaccggtgcgcagtcgagcctccagaagacgaatcgaaaatgccgtcgcacaagacattcagaatcaagaagaagttggcgaagaagatgaggcagaacaggcccattccctactggatccgcatgaggaccgataacaccatcaggtacaacgcgaagcgccgtcactggcgtcgcaccaagcttggattctgaggtgtatgctctgcctaggttcaatttatccaattaattagtgttttattttcttgaggcanaaacaatgttttgagtttttaatattttc

SEQ ID NO: 12333 - DNA, 349 bp, Glycine max
  Clone ID: LIB3040-059-Q1-E1-B8
ggaggctgagttctgtaattgtgttttggctgtggacaatggctctgtcttctgggcttttcttgtgttcttcttcccgtgttctcccaccaccagaaacccacactttcatgaggaccaggccttcttctgctgccttgcgcaccatttccgttagctgttgcaccgtctctcagtcgtctaagccagcccgcaaaatccgtggtatcatgaaaccccgcaaagtctcccccgagatggaagacctcgtcggcgctcccgagatggctcgaacccaagtcctcaaacggatttgggcttacattaaggacaacaatcttcaggaccctacagacaaggggactataaa

SEQ ID NO: 12334 - DNA, 319 bp, Glycine max
  Clone ID: LIB3040-059-Q1-E1-C1
ggttctagtgtgtgattgtttgttgttgtaactcgttcttcttcttttgttgttctgtgtttgtgtttgtttttttctctcacctgaaaatgtcttgctgcggtggtaactgtggttgcggaagctcctgcaagtgcggcaacggctgcggaggctgcaagatgtacccagacttgagctacactgagtcaaccaccaccgagaccttggtcatgggagtggcacctgttaaggctcaatttgagggtgctgaaatgggtgtgcccgctgagaacgatggctgcaaatgtggaccaaactgctcctgcaacccctgcac

SEQ ID NO: 12335 - DNA, 356 bp, Glycine max
  Clone ID: LIB3040-059-Q1-E1-C10
ggccgaaaagtagtaccaagatggcttcagttgtgtatctcctctttggcttccatctcattgttatcatgtcaagttccttacccgcaactagtgaagtgtttgcaaaacagtatccatccacagaacccgtggaagaaaaactcacccaactccacttctatttccataacaacataacgggggaacacccaactgctatgaaaactgttttgcctcctaaggggtccattcatggttttggggctacttacatgatggatgaccctctaactgaaggaccaagtccaacttcaaagcttgtgggaagatctcaaggaatatacgctttggcttcacaacatgagcctgggttg

SEQ ID NO: 12336 - DNA, 322 bp, Glycine max
  Clone ID: LIB3040-059-Q1-E1-C11
gactccaaagcttatttgttgctttgtgcttaatggaagggccttgagcttttctttctctctttctttgctctcttttcttttaggtttccactctctctcacacacacactctgcaataatctctcttctcttcttcagtctctcaactactgcctaaccaaaccttccatttccgcaagcagtttcttaaatttggagtctgatgtctccgccactgctggttactgaagaagacgaaggacagagcaatgcctcgatggtagcatctgcatcttcatcctcctcggagtgtttcaccctaaatgaagctagattgaaa

SEQ ID NO: 12337 - DNA, 75 bp, Glycine max
  Clone ID: LIB3040-059-Q1-E1-C12
ctggaatctcttggttatgtgctcatgtacttcttaagaggaagtcttccctggcagggactgaaggctggcacc

SEQ ID NO: 12338 - DNA, 337 bp, Glycine max
  Clone ID: LIB3040-059-Q1-E1-C2
gatggtttggttattagggttttcgctgaccggtgcgcagtcgagcctccagaagacgaatcgaaaatgccgtcgcacaagacattcagaatcaagaagaagttggcgaagaagatgaggcagaacaggcccattccctactggatccgcatgaggaccgataacaccatcaggtacaacgcgaagcgccgtcactggcgtcgcaccaagcttggattctgaggtgtatgctctgcctaggttcaatttatccaattaattagtgttttattttcttgaggcaaaaacaatgttttgagtttttaatattttccatttgttcgaagactatattgtg

SEQ ID NO: 12339 - DNA, 357 bp, Glycine max
  Clone ID: LIB3040-059-Q1-E1-C3
gaatttgtggtcgacaaagaagctgcaatggtttcacagaccatacataacatgcttacttctccagggagtttcgctgagaggcagcacggcgaagttacctttcctgagatcagcaccaccattctcgagaagatttgccagtacttttattggcatctccaattcgccagtgggaaggagacggaatttcccattgaacctgaattaactctggagctaatgatggctgccaattacctccatacatagcattttgacttccccaagggtgatagttcttcggccacataatggaactattgcctagttgggcattcaaagggaaatcagcgtattagtgttgccactgaaact

SEQ ID NO: 12340 - DNA, 381 bp, Glycine max
  Clone ID: LIB3040-059-Q1-E1-C4
gggttctgcaaaaagcagccaaaaccctatccgacatcctcgtatgccctctctctaagcaacctttgaggtattgtcaggaatcaaattccctaatcagtgatgctattggcgttgccttccctataaaaaatgggataccatgcttggttctaagagatgggaaggtactcgaggaggaagatgcttcaaaacctgatcatgatatcaatttatctgcagtgaatgaagagaatcgatgaagaagtgcgtaatatgtagtgtaagatgtttggacttcaatttttatgatcaactgtctgtgtaacttggggggtgtggaatgttgtgtaattaagaatttaccctgtttaaaactttggtaaaaaaacctttcttttt

SEQ ID NO: 12341 - DNA, 367 bp, Glycine max
  Clone ID: LIB3040-059-Q1-E1-C6
gatcacatacaacactctctccaaagttcaaattaagactgaggggtgagaaagagagaattgatatgggtgccggtctagttgcgttcctcttaatggttcttgtgcaattggtctatgcagtgatgaacattacttcaaagcttgcaatagaatctggaatgagccctcttgtccttgttgcttatcgacaactctttgctactgtgtccattgctcactttgcttattggctcgagtggaatacgcttcccaggattacacagcgtcttatgattcagatattattttcgtccctgaccggagttacaggaaatcagatgctttattttgtggggctgaaatattcatccgctacaattgcatg

SEQ ID NO: 12342 - DNA, 313 bp, Glycine max
  Clone ID: LIB3040-059-Q1-E1-C8
gaaaagaagaaaaaaaaaagggaatcaacaaaaagaggaacaacagcaatatcaaacatgtcctcctcatccacttccttttcaccggaccaacaacacctctctccctccgaccagctctgctatgtccattgcaacttctgtgacactgtcctcgcggtgagtgttccttgcaccagcttgttcaagaatgtcactgtgagatgtggtcattgcaccaaccttctctcagtcaacatgcgtggactgcttcttccaagtgccaatcagcttcaccttggccacactttcttcactcctcaaaatcttatgg

SEQ ID NO: 12343 - DNA, 352 bp, Glycine max
  Clone ID: LIB3040-059-Q1-E1-D1
agggctgaacgaaagaagatattaagggttttgagtgccgtgcggcgatcctagcactctcttctgcagctttcgccgacagcttcattcaccatggctgagcaaaccgagaaggcttttttgaaacaaccaaaagtgtttctcagctcgaagaaaactgggaagggaaagagacccggaaagggtgggaaccgcttttggaaatccattgggcttggatttaagactcccagggaagccatcgaaggaacctacattgacaagaagtgccccttcactggcaatgtttctatccgtggccgtatcttggctggaacatgtcacagtgctaagatgaacaggactattattg

SEQ ID NO: 12344 - DNA, 136 bp, Glycine max
  Clone ID: LIB3040-059-Q1-E1-D10
gttaataagtaaggagcaagttatcaaaaaatttcctttgaatgacaaaggtgtatgcattagagttaggtagaaaaattcacatgattaaagtgtttgagtagaaagaaatctgcaatgaaactaaattccaatc

SEQ ID NO: 12345 - DNA, 81 bp, Glycine max
  Clone ID: LIB3040-059-Q1-E1-D2
ggatagttcctggatggaggcttggttggtttgttacaaatgatccatctggcacttttagaaatccaaaggtagatgagt

SEQ ID NO: 12346 - DNA, 363 bp, Glycine max
  Clone ID: LIB3040-059-Q1-E1-D5
gttcccaacaaaacactcactatcataagggaaaattgcctaaaattattacacacaaatggaagtagggtgacctattggaggctcccaacttacttccaatgaaaggcctttttgttacaaaatttgaaagcaaaacaaattgccaattacaaaattacaaaaacaaaaagtcctcaattgtggtggctattctctctttattgtttcactcaatttggagtgcttcttagtccaatagctcttatggtggttggccccttgcttcttgactcaaattcttcaagatatggcaccaatcctcctttccaattccctatatggcaactcacaagcaaggaaacaaagagacaagcaataatc

SEQ ID NO: 12347 - DNA, 331 bp, Glycine max
  Clone ID: LIB3040-059-Q1-E1-D7
gagaatagagagctcctccaattagggtttttgtgatctgcagctacgatgggtaagggaacggggagtttcggtaagaggaggaacaagacccacaccctctgtgtgaggtgtggccgccgcagcttccacctccagaagagtcgttgctctgcgtgcgcttaccccgctgcgcgcaccaggaaatataactggagcgtgaaggccattacgagaaagaccaccggaactggaaggatgaggtacttgcgtaacgtgcctcgcagattcaagagcggcttcagagagggtaccgaagctgcacccatgaagagaggagctgctgcctctg

SEQ ID NO: 12348 - DNA, 345 bp, Glycine max
  Clone ID: LIB3040-059-Q1-E1-D8
ggttctagtgtgtgattgtttgttgttgtaactcgttcttcttcttttgttgttctgtgtttgtgtatgttttttctctcacctgaaaatgtcttgctgcggtggtaactgtggttgcggaagctcctgcaagtgcggcaacggctgcggaggctgcaagatgtacccagacttgagctacactgagtcaaccaccaccgagaccttggtcatgggagtggcacctgttaaggctcaatttgagggtgctgaaatgggtgtgcccgctgagaacgatggctgcaaatgtggaccaaactgctcctgcaacccctgcacttgcaagtgaggtgttgggatagcaag

SEQ ID NO: 12349 - DNA, 383 bp, Glycine max
  Clone ID: LIB3040-059-Q1-E1-D9
ttatgtccacatgtcttcgccccacgtttcatactagaaataaacaaatcaattatagtagtaatcaagttttaatgtctccatattttgccttcaagattttaaaaagattatgacagtagtacgttcttgttaacaaagtactactagtagtataaacatttaaagtatttttcaattaattaatcacatatgaaatggaataaaatgaatttagtgtaggattaagtcaaactatttattctagtcttaaaacagactactaataaccttatccagtcagtcataactcgtactaacaattaaagtacagtaaaagctagtcaaatttaaagagatcatttataatcctattctatgagctataacgattaatagccaaa

SEQ ID NO: 12350 - DNA, 142 bp, Glycine max
  Clone ID: LIB3040-059-Q1-E1-E1
gatccaaattcaagttcgcaccaaattttcctcccaaaatgtcaggccgtggaaaaggtgggaagggtttgggaaacggacgagctaagacgcacagaaaggttcttcgtgacaacattcaaggaatcacgaaacctgcgat

SEQ ID NO: 12351 - DNA, 365 bp, Glycine max
  Clone ID: LIB3040-059-Q1-E1-E10
gatccacatcctccacagcacaactccactcttagctgccattggtttttcttcttccatttctcttcctttctaagcttttttcgattacccatttggagattctgtcctaatggctcttgctccttccaaagtttcctccttttccgggttttctcccaaacccagtgttggggatgctctgaaaaacccaacttgctctgtttctctgagctttgcgaatgtgaaacttggaagcagaaaccttagggtttgtgcctcaactgtgcctctctcaggggtgattttcgaacccttcgacgaggttaagaaaggtgaacttgctgttccaacggctccccaagtctcgcttgctcgtcagaact

SEQ ID NO: 12352 - DNA, 212 bp, Glycine max
  Clone ID: LIB3040-059-Q1-E1-E11
gaccgtttcggttaacactttccaatacaataatcactaactgaatattcgatcggagatgtctgccgccgccgaagaagctaacgctcccgccgtcgaaaagccggttgaggaggtgaaggcgccgaaccccgcgaaggagaagaaacctaaggctccgaaggaaaagaagccaaaacaggccagaacagcttcacatcctccatattttc

SEQ ID NO: 12353 - DNA, 368 bp, Glycine max
  Clone ID: LIB3040-059-Q1-E1-E12
ggtctcgtggaagtgtaagcaagcaaaaccctagcggcgcctgctttctttgttcgtgttttgcatcaggatggagtctcaggtgaagcacgcacttgttgtcaaagttatgggtcgtactggatccagaggacaagtgacccaggttagagtgaagtttttggatgatcagaaccgtcacatcatgaggaatgtgaaaggacctgtgagagaaggagacattctcaccctactcgagtctgaaagggaagcaagaagattgcgctagatggtctcttttttttggcttgcctccaaattcgaacaaaagcaatatttttcttgatatttatggtagttagtcggtgctaaaggggttatagcaccct

SEQ ID NO: 12354 - DNA, 302 bp, Glycine max
  Clone ID: LIB3040-059-Q1-E1-E2
gaacccattcgcttacgaacaaccatactctctaaaaaattgatggtctcaccgacgagcgagtggcataatcgaaggccatgatcggcggtacaaacatgttcatcttcagatccatcctcgacacaccactcaagcaactcatcggtgatcacatttctgagctcactcgcgaatactgtctcagattcctcaagaaaccagggatgctcaggccatcctgcaagatatcgcatgtcatccaacatgtcatttcactgaaaacgctactgaggaacttctgataatgatactcctcttcc

SEQ ID NO: 12355 - DNA, 359 bp, Glycine max
  Clone ID: LIB3040-059-Q1-E1-E3
ggattttcgttctctgcgttttctttcatcgtcgtcttcaagactgcgacgacgatccaagtgatggacactcgtcgcgatggaacgtgtagctgaatccgagcgaactctgtacccatacgtgactggatcctctgtagtcgctatcaaatacaaagatgggattctaatggccgctgacatgggaggttcgtatggatctaccctgcggtacaagagtgttgagcgtatcaagcctattggaaagcattctcttcttggtgctagcggggagataagtgactttcaggagattctgcgttaccttgatgagcttatcctatatgacaacatgtgggatgatgggaaatttctagggc

SEQ ID NO: 12356 - DNA, 348 bp, Glycine max
  Clone ID: LIB3040-059-Q1-E1-E4
gagagagggtctgtggaaaccgagaaacaaagcagggataggaagaaggaaaaatggaaaagtatttcggaaacgcttatcgtggcgacccgggagtgccccattcggacccggatcgcttcgtcaacatatgggtcggatccgctgccttcgctgttctcacatatttcaatccctacatgtggcagctctctaatcagttcaattggcatgacaaagcaatgctatatgagcaatatcactggaaacaggcaaggaagaagaatcagccatatgagttcatgtggaacaagacctgggacaagaaccaccgggaacattactactacaactggcctatttactttc

SEQ ID NO: 12357 - DNA, 291 bp, Glycine max
  Clone ID: LIB3040-059-Q1-E1-E5
ggcccaggtaaaaaaaccaaaaaaccaaaaccataagggaacacagcggcggtaacagaagaacaagcagagaatgggtccagtgagaacgaagaccgtgaagaaatcctctccgcacgtgatatagcgtcactactcgcgcatgaccctggacttccacacgaacaagaaacttctggaggaaatggcgataatcccgtctaaaaggctcaagaacaagatctccgggttctcgacacacctgatgaaacgcatccacaacggccctgtgcgccgcatctccctcaagct

SEQ ID NO: 12358 - DNA, 359 bp, Glycine max
  Clone ID: LIB3040-059-Q1-E1-E6
gaccaacacttgtagccacaaatccaaattatagtaatatttcatgcttctctatcactcttgtcaaattccacaaaaaccaagtactacaagggaagaagaacttagctacaagctaaggaaggatcaaagagaatggctcaagcaatggcatcaatgactagcttacgtggttcctctcaggctgtgttggaaggtagccttggctccacacgcttgaatgtggggagtggaagcagggtggcctcagtcacacgtgcagggttcacagttagagcacagcaacaacaagtgaatggtggtgaggtacaaagtagccgtacggcagtgcttccacttgttgctgctggtttgaccac

SEQ ID NO: 12359 - DNA, 60 bp, Glycine max
  Clone ID: LIB3040-059-Q1-E1-E7
atatgtgtatatctgtattatattcgttgttctggttgttgtttgtattttgttttgtac

SEQ ID NO: 12360 - DNA, 293 bp, Glycine max
  unsure (1)..(293): unsure at all n locations
  Clone ID: LIB3040-059-Q1-E1-E8
ggctttcagttggcgcgggtgaggtagaacccttccactgtggtgactctgcgatgggtgcctacaagtatgtttcagagctatggcgcaagaagcagtctgatgtcatgcgcttcttgcagcgggtgaagtgctgggagtataagcagcaaccttccattgttcgtttgacaaggtctacccgccctgacaaggctcgtcgcttgggcttcaaggctaagcanggctatgtgatttaccgtgttcgtgttaggaagggtggccgaaagagaccagttcccaaatgtattgtt

SEQ ID NO: 12361 - DNA, 361 bp, Glycine max
  Clone ID: LIB3040-059-Q1-E1-F1
gaatagaaatagaactgtcttttcatatagatatcccttcaacacaacataggtcatcgaaaggatctcgaagacccaccaacgcacgaaagccgggatctttcagaaaatggattcctattcgaagggtgcataaccgcatggataagctcacactaacccgtcaatttgggatccaattcggttccttaggaggtatcgggaaggaattttggaatgtaataatatcgattcatacagatacagaagaaagggttctctattgattcaaacgctctacctacgagatagggatagagaaagaggaaaaaaccgaggatttcacatagtacttttggtcgaaaaatcgatctgatttttt

SEQ ID NO: 12362 - DNA, 364 bp, Glycine max
  Clone ID: LIB3040-059-Q1-E1-F10
gaggtttttagggtttacactgaggaggcacaccttcaggagcagtcatggttctcaaaaccgagctgtgccgattcagcggtgccaagatctacccagggaaaggcatcagatttgttcgtggtgattctcaggttttcctgtttgctaactcaaaatgtaagaggtatttccacaacaggttgaagccgtcaaagctcacgtggactgcaatgtaccgaaagcagcataagaaggatattgctcaagaagctgtgaagaagagaagacgtgctaccaaaaaaccttactctaggtctattgttggtgctactttagaagttatccagaaaaagagaaccgagaagccagaagttcgagatgc

SEQ ID NO: 12363 - DNA, 290 bp, Glycine max
  Clone ID: LIB3040-059-Q1-E1-F12
gacttcacaacgcaaactgcgtcattgcatcattgcagatatcattaacccttctaccttcagattcgcgggaagatggcatcacctcacgctaatgtgacatcagttgtttagaacagtggtcaacgtgtttctcaatcgagatttgcatgctcttcattcttgtctgggttcgatgttgttggtcatgcatcaagtgcttggaagaaggaacttgtcacatcttcgatttccatggtgcctagagccacactaacatttgatcccccaactaccacttcagagcatac

SEQ ID NO: 12364 - DNA, 400 bp, Glycine max
  unsure (1)..(400): unsure at all n locations
  Clone ID: LIB3040-059-Q1-E1-F2
gacttctcttcacacctttgttcactcttcttctcttgcggctagggttttagcgcagcttcttctagatttaaggaagatgggtaaggaaaaggttcacatcagtattgtggtcattggccatgtcgactctgggaaatccactaccactggtcacctgatttacaagcttggaggcattgacaagcgtgttattgagaggtttgagaaggaagctgctgagatgaacaagaggtctttcaagtatgcctgcgtgctggacaaacttaaggctgagcgtgaaagaggaatcaccattgatattgctttgtggaagtttgaaacaacaaagtattattgcacagttattgatgcgcctggacatanggatttcattaagaatatgattactgggacatcc

SEQ ID NO: 12365 - DNA, 404 bp, Glycine max
  Clone ID: LIB3040-059-Q1-E1-F3
ggacatcacatttcgttgcgcctttgatctctgtccccgctgcgtctctcgtaatcatgcctaagcaaatccacgagattaaggatttccttctcactgccagaaggaaggatgcgaggtcagtgaagatcaagaggagcagagatgtggttaagttcaaggtcagatgctccaagtacctctacacactttgtgtgtttgacccagagaaagctgataaattgaagcaatctcttcctccaggtttgagtgttcaagacctgtaaaggtactgggcgagagatcaagaagaagcaattcattgattcttctgaagtttgattctctgtagttgaagcttgagatttttgtcagttggtcttttattatagattattgctaagacatggttgtttttatctgtt

SEQ ID NO: 12366 - DNA, 354 bp, Glycine max
  Clone ID: LIB3040-059-Q1-E1-F4
gaaccatttctttctttcggatttctgtttctctgtcttcattttagtttttacggctagaagaatgtccagctcatcggaatatttggtattttccggccaccacccggcgaactctccggcggaaaagtccactttctctcagacttgtagtctattgagccaatacatcaaggaaaagggtaccttcggagaccttaccctcgggatgacttgcactgccgaaacaaacggttcccctgagacatcgtgtcactctgcaacaaccatggagttgtttcccacgatcatcacgcatcggaacccaactactgtggatttcctatctccccagactgcttatcctcaccactc

SEQ ID NO: 12367 - DNA, 52 bp, Glycine max
  Clone ID: LIB3040-059-Q1-E1-F5
gaagtccgtcctttcttttgttaaacaggctggctgtgacttcggctcccac

SEQ ID NO: 12368 - DNA, 322 bp, Glycine max
  Clone ID: LIB3040-059-Q1-E1-F7
gacaacttcaatccctcttttgctttaccaaattccattttccaattcaaaaccctaactccgttcgaagcaccaaatcgtgatggcaccaaaggcagagaagaagccagcagagaagaagcctgtggaggagaagaaatcgacggtgggagacaaggctccggcggagaagaagccaaaggccggaaagaagcttccgaaggagggaggcgccggcggagaaggtaagaagaagaagagaaacaagaagagcgtggagacatacaagatctacatcttcaaggttctgaagcaggttcaccctgacattggtatctcaagc

SEQ ID NO: 12369 - DNA, 250 bp, Glycine max
  Clone ID: LIB3040-059-Q1-E1-F8
gaagatttgtgagagaaagggagaaagggtgtgagaatggagagcaaagaggaagatgtaagggttggagcaactaagttctcagaaaggcaaccaattggtacagcagctcagggtgacaaggactacaaagaaccacccccagcacctttgtttgagcctggtgagctaaagtcatggtccttctacagagctggaattgctgagtttgtggccactttcctgttcctctacattaccatcttaactg

SEQ ID NO: 12370 - DNA, 337 bp, Glycine max
  Clone ID: LIB3040-059-Q1-E1-F9
gactccatcctccgcttcgtgacttgcagcaattcccaatggcttccgtttccaagctctcaacgccaaatccacttgcttccttatcagaagcgcttcgcccccgagattctcgcttcctcaccttcaaaccttcttccatcgcttttaatcacaaaactaacctatccgcttccctccgatccattcactcgctccctcttaaaacctccttacggatcaaatgctcccaaacagatgggaatggaagtcctgcaaagaggacagtgcttcatgatctttatgagaaagaagggcagagtccatggtatgataatctctgcagacctgttacaga

SEQ ID NO: 12371 - DNA, 383 bp, Glycine max
  unsure (1)..(383): unsure at all n locations
  Clone ID: LIB3040-059-Q1-E1-G1
ggtgaacaagcctcaggtaagccaaagccatggttaagcataacaatgttatccccaacggacacttccgtaagcactggcagaactatgtgaagacctggttcaatcagccagcacggaagacaagaagacggttggctcgtcagaagaaagctgtgaagattttccccagacctacagctggacctcttagacccattgtacatggtcaaactttgaaatacaacatgaaagtgagagctggaaggggattttcccttgaagaactcaaggcagcagggattcccaaaaagcttgcaccaacaattggtattgctgttgatcatcgccgcaagaaccgttctttggaaagtctgcaggctaatgtgcanaggctgaaaaca

SEQ ID NO: 12372 - DNA, 305 bp, Glycine max
  unsure (1)..(305): unsure at all n locations
  Clone ID: LIB3040-059-Q1-E1-G10
gacttctcttcacacctttgttcactcttcttctcttgcggctagggttttagcgcagcttcttctagatttaaggaagatgggtaaggaaaaggttcacatcagtattgtggtcattggccatgtcgactctgggaaatccactaccactggtcacctgatttacaagcttggaggcattgacaagcgtgttattgagaggtttgagaaggaagctgctgagatgaacaagaggtctttcaagtatgcctgngtgctggacaaacttaaggctgagcctgaaagaggaatcaccattgatattg

SEQ ID NO: 12373 - DNA, 366 bp, Glycine max
  Clone ID: LIB3040-059-Q1-E1-G11
gtcttagatttggcttgtgaacatggaatctttgtgaaacatgagggaagctactttattgaaggtaacagttttgatagtagagaagcagctgaactgtttttggctcaaaatcatgctgtttgtgacaaggtggttaaggatatgagaagactttatttttaaaatcaggtggaccttacatcttcctataaacttgctcagcatggtttcactaggccaaatctctttcaatggtatatatggcaaactttatgtaattgagcattgccaacattttttatcatcaaggcattaatattgtcttctatgggtaccaagtatcaaccattctttagatgagcttgtggcatttgaagttacaag

SEQ ID NO: 12374 - DNA, 300 bp, Glycine max
  Clone ID: LIB3040-059-Q1-E1-G2
gattgtgcgacacgtttttacaagtgattggtatccatacacatcatcaccactacagattactccatatttccttccacaaccctgtaatcacctgcctcattgtcacaccaccacctacaagaagactgttggctcgtcaaaaaaacagtggtcacaatatgctccaaacctacatactgcgtgtcttaaactcattgtacatcgacaatcgttgctatattccattcacgtgacatctggtaagagattttcgactgagaaactcctggcatcacggaatctcaacaagcttgcacc

SEQ ID NO: 12375 - DNA, 347 bp, Glycine max
  Clone ID: LIB3040-059-Q1-E1-G3
gaatcgcaagtcgtctgtcccgcaggtgcagacgacctgtcttcatagccaaacaacctcaaaaacattcaacaacgttcactattaattcatcataaaataaaaacaagtttcgattttttatctttgttttgtttctgatccattcatggaggtgccgagttcctgggatgctcttcgcaaacaggcgagaaaacttgaagctcagttggatgagcagatgaattcttatcgtaaattggtttctgctaatgtttctacaaaagctgacattgcagagagtgatctagggtcttggattgagcgtttactaaagcaactccaacaagtaaacacacagatgcaag

SEQ ID NO: 12376 - DNA, 262 bp, Glycine max
  Clone ID: LIB3040-059-Q1-E1-G4
gacttctcttcacacctttgttcactcttcttctcttgcggctagggttttagcgcagcttcttctagatttaaggaagatgggtaaggaaaaggttcacatcagtattgtggtcattggccatgtcgactctgggaaatccactaccactggtcacctgatttacaagcttggaggcattgacaagcgtgttattgagaggtttgagaaggaagctgctgagatgaacaagaggtctttcaagtatgcctgggtgctggac

SEQ ID NO: 12377 - DNA, 372 bp, Glycine max
  Clone ID: LIB3040-059-Q1-E1-G5
gacccacagggaggcgaacagagaaactcagagacccgaaggcagatttcaagatgaagttcaacattgcgaatcccaccaccggttgtcagaagaagctggagatcgatgatgacctgaagctgcgagcattttgggacaagaggatctcacaagaggttgttggtgatgctctgggtgaggaattcaaaggttatgtcttcaaaattactggaggttgcgacaagcagggatttccaatgaagcaaggagtgttgacccctggtcgtgttcgcctcttgctgcatagaggaactccttgtttccgtggttacggaaggcgcaatggagagcgtaggaggaagtctgttcgtgggtgcattgtcaaccctg

SEQ ID NO: 12378 - DNA, 338 bp, Glycine max
  Clone ID: LIB3040-059-Q1-E1-G6
gaaccattcaaacgcacactctctctcaccaaagccttcctagaacgaaaaaaaaaagaagagcaattttccctcaccaaagaagaagaagcaaacaatggccgatcaacttaccgatgaacagatctccgagttcaaggaagccttcagcttgttcgacaaggacggcgatggttgcatcacaaccaaggagcttggaactgttatgcgttcattggggcaaaacccaactgaggcagagctccaggacatgatcaatgaagtggatgctgatgggaatggtaccattgacttccctgagttcctaaatctcatggccaagaagatgaaggacactg

SEQ ID NO: 12379 - DNA, 367 bp, Glycine max
  Clone ID: LIB3040-059-Q1-E1-G7
ggctcttggctgatatttcctgataagtggacagacgcttaaacagagaaactaacacagatttgcatgcatggggaaaataacgcacattgtagtaattcccagtgcagggtacagccacttcgttcccgttatccacttctcaaagagacttgttgagcttcacccagaaattcacgtcacatgcatcattcccattctggggtctctcccaagtgctgcaaaacccattctccaaacccttccacagaacatcaacacggttttccttccaccggtgaaccctaatgacctaccacaaggtgttcccgtagttgtccaaattcagctagcaatggctcactccatgccctcaattcaacaaaac

SEQ ID NO: 12380 - DNA, 375 bp, Glycine max
  Clone ID: LIB3040-059-Q1-E1-G9
ggtccaaaatcctcactccagccacacgcctcagtagaccatggcctcattgggtgggttacaaaatctaagcggcatcaattttcttatcaaaaaagagggtccaaaagtcaatgcgaagttcgagctgaagccgccaccatatccactgaatggtttggagccggtgatgagccagcagacacttgagtttcattgggggaaacaccacaagacatatgtggaaaatctgaaaaaacaaattgttgggacagagcttgatgggaaatcactagaagagattatagtgacatcatataataagggtgacattcttccagctttcaacaatgcagcacaggtatggaaccatgacttcttctgggagtgcatgaa

SEQ ID NO: 12381 - DNA, 260 bp, Glycine max
  unsure (1)..(260): unsure at all n locations
  Clone ID: LIB3040-059-Q1-E1-H1
gaaggcggtgttactccttctctcgttgattcggatctagagtcttttttcactcttcagttctcgttgttgttcttcgctttcctgaaactagggttttcaatttcgattcattcgttaataattaaagatgtttgggagggcaccgaagaagagcgataatacgaggtactacgagatcctcggcgtctcgaagaacgcttcgcangatgatctgaagaaggcttacaagaaagccgccatcaagaatcaccctgaca

SEQ ID NO: 12382 - DNA, 246 bp, Glycine max
  Clone ID: LIB3040-059-Q1-E1-H10
gacttcccagttgctacctcaacgtccccaacactgtgttcctgttcttcttcttcgatggcggcaacctcaacatcactggcttctcaactctacattggcctgcgccgcccatgcctcaagcttgattctttcaattctcaatctttctctgtcttcgaccccaatcttcgcctatccctctctcctcccagaccctcacgcgccatcgtcgccatggcaggcaccggcaagttctttgttggc

SEQ ID NO: 12383 - DNA, 366 bp, Glycine max
  Clone ID: LIB3040-059-Q1-E1-H11
aagcctgccgagaaaaccctagttcgcttgcagtcacacaagaggccaatcctattcatagctcgagatgggtgaagaagtgaaggtagttgttccagaatcagtgttgaagaagcgcaagagggaggaggaatgggcgttggccaagaagcaagaactcgatgctgccaagaagaagagagccgagagccgcaaactcatctacaacagagctaagcagtacgctaaggagtacgatcaccaggagaaggaattgattcggttgaaacgcgaggccaagctgaaaggtggtttctatgtggatccagaggctaagctgttgtttaatattcgcattcgtggtattaatgccatgggacccaaatc

SEQ ID NO: 12384 - DNA, 284 bp, Glycine max
  Clone ID: LIB3040-059-Q1-E1-H12
ggcagtttcaggttttcttttccttcactttcacgagaaatgaaataccacttttcagtttcttcactacgttctcacttcgatatggctcgtacgaagcaaaccgctcgcaagtccaccggtggcaaggcgccacgtaagcagctcgccaccaaggccgctcggaagtctgctccggcgaccggaggagtgaagaagccccaccgcttcaagccgggaaacgtggcgctgatggaaatcagaatgtactagacgagcaccgagcttctcatcaggaagcttcc

SEQ ID NO: 12385 - DNA, 333 bp, Glycine max
  Clone ID: LIB3040-059-Q1-E1-H2
gactccgcagctgcagcactcaaaaccctagagaggacgagagagcgtgcaactttcggcaaccacagaccatgacattcaaacgcaggaatggaggtcgcaacaaacacggccgctgccatgtcaaattcatccgatgctccaactgcggaaaatgctgccccaaggacaaggccatcaagaggtttttggttaggaacattgttgaacaggctgcagtcagagatgtgcaggaagcttgtgtctatgaacaatatacacttccaaaactctatgtgaagatgcagtactgtgtatcctgtgctatccactctcatgttgtgagggttcgat

SEQ ID NO: 12386 - DNA, 360 bp, Glycine max
  Clone ID: LIB3040-059-Q1-E1-H3
ggacgagagagagagagagagagatggacgagaagacggagaaggtgaagtctgatgcagttcagataattgaagcgtttgaggttctgccaaagctcgtggttttcgatctcgattacactctctggcctttctactgtgagtgtcgatcgaagcgcgagattccttctctgtatccccacgccaaatgcataatgttagctctcaaagagaaaggcatcgacatttccatcgcttctcgctcgccaacggcagacatcgcaaccgctttcctcaacaaattgaacctcagcccaatgttcgtctcacaggaaatatattccagttggacatataacaccgatcattttcagaggattc

SEQ ID NO: 12387 - DNA, 283 bp, Glycine max
  Clone ID: LIB3040-059-Q1-E1-H4
gagaaaagaaagaggaaaccctatctggataggtcaaacatcatcatgtcggacgaagagcaccatttcgagtccaaagcagacaccggtgcctccaaaacctaccctcagcaagccggtaccattcgcaagaacggctacatcgtcatcaaaggacgcccctgcaaggttgtggaagtttcgacttccaaaactggaaagcactgtcacgccaagtggcacattgttggaattgacattttcactgccaagaaacttgtggatattgtgccctcttctcaca

SEQ ID NO: 12388 - DNA, 126 bp, Glycine max
  Clone ID: LIB3040-059-Q1-E1-H5
ttctttcaattcaattgggtatatgagtttcagtttgtgtaaagcatttttaacaatgttcttaatgaattcggcctcgctcctagtataaaaatggtaagaacattaaaggaaagaatgtatcac

SEQ ID NO: 12389 - DNA, 340 bp, Glycine max
  Clone ID: LIB3040-059-Q1-E1-H6
gtcatttcaccgatttttattccgtgtttcaaaagagggactcctattttgtttcagacaaagttttgttgcaaagcaaaaaactacgaggagctttcctccatacgaatccaaggaggagagaggagacacagacacaaaggaaacggaaaaagcaacacacacaaaaaaggtctgtgcctcctcttatatgtaatagatagtttctgaaacataagaaaacaataaaatagaaataaaaggaccacatggattatgaaaacaacagttggatttgggagggggtaaactactacccgcgtgtgtttggtggtctaatggttacagcagccttgctggg

SEQ ID NO: 12390 - DNA, 335 bp, Glycine max
  Clone ID: LIB3040-059-Q1-E1-H7
gcgcattgaacgaaaattagggtttgtactgtagcaggaacgagcagcaatggcgccgaaggtaacacgcaaggttagcagaaaccccgaattgataaggggaattggaaagtactcgaggtcgcagatgtaccacaagaggggcatttgggctatcaaggccaaaaatggtggcgttttacctcgccacgatcctaaacccaaacctgaaacacccgctgaaaaaccacccaaattttaccctgctgatgatatcaagaagccccttgtcaacaagcacaaagccaaacacgctaagctcatggctaacattactccgggaacagtgttgattc

SEQ ID NO: 12391 - DNA, 273 bp, Glycine max
  Clone ID: LIB3040-059-Q1-E1-H8
gacaccatccacgactcttctgagttccagcacagcaggctcttcatttctcggacactttcgtttcattcaccgttaatgtcaccagatttcacacattgggacttcccggaactcatacattccactaggatcactttccgagccattctccgcgtcatgctcatcatcctcatgttcaacctgctcttcactcatggcgggcttccatgggcctgggcacgggccatacacatcatacctggcccagtatctgaccagttccggatcatt

SEQ ID NO: 12392 - DNA, 333 bp, Glycine max
  Clone ID: LIB3040-060-Q1-E1-A1
gctctctctttgccggtgccacaatccctctctctccgacgtacatttccatctttttagggtttcatttcatggactccgattcctggatttccacgcgcctctcttcctcttcacgccgccaccattatcgatctgatctgtacgcggaggagagtgaagggaacgatgatttcagggcggagtttctatgccctttctgcgccgaggattacgacgtcgtttccctctgttgccacattgacgaccaccaccctatccaagccaaaaacggggtgtgtcccatttgtgggaagaaggtgggagtggatctcgttggacattttactacac

SEQ ID NO: 12393 - DNA, 157 bp, Glycine max
  Clone ID: LIB3040-060-Q1-E1-A12
gagcaacatggtgaagctggtggagagatttacttgccagaagcttacgttagaaccaagaggactacttaatggagcatatcagttggaaaaacttgtagctagcttcccaactggcttatctgagtgtggagaagcatttacaagccttaagagt

SEQ ID NO: 12394 - DNA, 279 bp, Glycine max
  Clone ID: LIB3040-060-Q1-E1-A2
gagcaacatggtgaagctggtggagagatttacttgccagaagcttacgttagaaccaagaggactacttaatggagcaaatcagttggaagaacttgtagctagcttcccaactggcttatctgagtgtggagaagcattatcaagccttaggagtaggagaacgagtactgtttgtgatgaatgtctatggtttaagaaatctgtctttagtcaacttgtgtgttttgttattcagttctcagcaataaactgctctggcaatctagtttcatgttc

SEQ ID NO: 12395 - DNA, 295 bp, Glycine max
  Clone ID: LIB3040-060-Q1-E1-A4
cggcaaaccttacatttatcataccttgaacaatatacaaatcagaagattatttattattgcacttctttaaacttttattcttaattttctaaagaaacgcctttttataaataaaaaaatcaattattgaaatttctaaagtgttttaggtaatcttttttcaagggtaaaaaaataatcagatttatgctttttagtagcaaatatgacctgctgttctggaaattcagtttttgtagaagaaagatatcaattttcttctttttactatcctccattttgtttaacattt

SEQ ID NO: 12396 - DNA, 287 bp, Glycine max
  Clone ID: LIB3040-060-Q1-E1-A5
gagtttcagccgcagcttgccccacagcattgcgaccattatcagctatggctgtctgtaagattagacgatctccaaaggaaacatgggtggcactatgacatccgctgatccctttgccaagagagactggtacgatatcaaggctccatcgctcttcgacgtcaagaatattggcaaaaccctcgtctctcgtacacagtgaaccataattgcatcagaacgactcaaacatccagtttttgaggtcacattggctgatctccaaggggatgaagaccactcct

SEQ ID NO: 12397 - DNA, 297 bp, Glycine max
  Clone ID: LIB3040-060-Q1-E1-A6
gaacagagcaggcgaagggccgaccctctactactactcacacggccttccttcgcgtatattcagactcaccagatcgtacacccgcagatgcacgacgcataagcgcacgcgactgcgacagatggagcgttgctaagaatgagatgaactatttacacaccatcatacacatgttgagaaagcttccgttcccgcgcagcggtcgctccaaaggatctcaccctaagtccgcgtgcatgctacgtcgcatcgctcctcgcgtgtgacatacactcaaggcaatggccgtcgttt

SEQ ID NO: 12398 - DNA, 336 bp, Glycine max
  Clone ID: LIB3040-060-Q1-E1-A9
ggtaactcgcatcggattgccccattttgccacctctatctgtctgcaaccggtgacgttgttagagagagaaagaaaaaaaatggtgaaaggaagaagcgaaatggatggcgtagaagtacctgaagccatgatagatactctcaaccgtactttggagagccttcaacaactcgagacacagttaccccaatttctctctctccgaccctgattttctcgctgaattaccactcgttgaacgcgctcactcactcttctccctcgccaaactcacctctaccctcttctcattgaagttgaggtgtagaggtgttaacccaaatggccaccctg

SEQ ID NO: 12399 - DNA, 349 bp, Glycine max
  Clone ID: LIB3040-060-Q1-E1-B1
gtacaccgactcaaccggagcatacacaatgtacgtggatgaggatcacgcagatcagatctgcagtgccaagctcgtaagcagccctcaccctcaatgcaaggaagtcaccccaggccgcgacgaagccgtcgtgattctcacccgctacaacggcattgcctccgacgataggttcgccaatgccatgggcttcatgtctcaggaggttgcttctggctgtgctgagatcctcaggcaataccaggagttcgacaatgagaattaattacgtaattaatttcagtatattattaatctacttcctaatgtctcctgatgtggagtgttatctcgacattttcatatt

SEQ ID NO: 12400 - DNA, 218 bp, Glycine max
  Clone ID: LIB3040-060-Q1-E1-B10
ggaatagcatcggcagcaccacaacactgtgccctctttctctctttccttcgcagaagccatggcctcatttgcacgtggagccgcatctttaacccgcattggtcgttccacctccaagactccccttcaactcatccaacgccgtgggctcgccgatcagcatggcacggcccaagttgcctgccgggaagatcaagttcgcccatcccaatgga

SEQ ID NO: 12401 - DNA, 347 bp, Glycine max
  Clone ID: LIB3040-060-Q1-E1-B11
gacagcactgcactcttcgcaacacaacaaaaaaagacaacccagagagcgcgtcttaataaacgctcttctctgaaaacccccatttcttttcttctttcttcttctctttcgcttcttcgatcttcgatcttcgtcgctgaaaatgagagagtgcatttcaatccacatcggccaggccgggattcaggttggaaacgcctgctgggagctttactgcctcgaacacggcattcagcctgatgggcagatgccaagtgacaagaccgttggtggaggtgatgatgctttcaacaccttcttcagtgaaactggggcaagaaagcccgtgccccgtgcgatttttg

SEQ ID NO: 12402 - DNA, 378 bp, Glycine max
  Clone ID: LIB3040-060-Q1-E1-B12
gatcgctctcacacctgtgattattcctcttttaacaatccacacccaaattctagggttccgaaatggacgctggcggaaagatcaagaagggcgccggaggtagaaagggcggcggcccaaagaagaagccggtttcaaggtccgtcaaagccggtctccaattccccgtcggaagaattggccgttatttgaagaaaggaaggtacgctcagcgtgtcggtaccggtgctcccgtatacttggctgcagttctcgaatacctagctgccgaggtgcttgagttggctgggaatgccgcacgttacaacaagaagaacacgattattccaagacacgtgcttttggcagttaagaaacattgagaattggggaaaa

SEQ ID NO: 12403 - DNA, 338 bp, Glycine max
  Clone ID: LIB3040-060-Q1-E1-B2
tgtgtgtttgtctattgattacattcatagttagaagtatcttttctacatacacatggcacctacacctcgcacacacattgagatattaggccctatgtccgggtctatgtgagccataaggagtggaggttgatctgtggtcatgctgggtcttcgactcgcttgatgatagtgaagcctcatctagagttttcttcttttggtgatgcattgtacttgatagtccctatccccacaatgtattacctaagaggatgatatctctagaagccagtaaagttacatgaaaccacccttgggaattattgcttgaagtggacttttggattctttcc

SEQ ID NO: 12404 - DNA, 341 bp, Glycine max
  Clone ID: LIB3040-060-Q1-E1-B4
ggcgttccgtcaccttctgtcagcgcgactctctttccttccctctttttccgaatctgaatcgaaaatggcttcggagactgatacgtttgcatttcaggccgaaattaaccagctcctcagtctaaccatcaacaccttctacagcaacaaggagatctttcttcgtgagctcatcagcaatgcctctgatgctttggacaagattcgatttgagagtcttacatacaagagcaagcttgatgctcagccagagttgttcattcacattattcctgacatgaccaacaacacattgtctatcattgacagtggtattggcatgactaaggccgatttgg

SEQ ID NO: 12405 - DNA, 344 bp, Glycine max
  Clone ID: LIB3040-060-Q1-E1-B5
gaattcacttgcggctgcagcagagaagcactcatcattcttcgtttgtctaagatccgccttctctgaattgtaaaaatgtcgctcggagaaactgcttgttcatacgcagctctcatccttcatgaagatggaatcagtgtaactgccgacaagatcagcaccttgttggaaactgcaaaggttcaagtagatacctattggccaaccttatttgctaaacttgctgagaagaaaaatcttggcgatttgatagccaatgcagcaggcggtggtgcaccagttgctgttgcagctgcccctgttgctgcctcaggtggtggtggtgctgctgctgcggcccc

SEQ ID NO: 12406 - DNA, 251 bp, Glycine max
  Clone ID: LIB3040-060-Q1-E1-B9
cgtcagtcggtggcaagacgacaacagggcggcatgtctgtttatggacaaaatctctatatggtctcatacaagcacctcgccgctctctatgattcatgcttgagtcaggctttctccgacggtctttctctgctattgtgtcttccaagttctattcaattgccgtcctttttcacagtcttgactgggaaacccctggcgtttcccaacttattcgccttgcaccgcatccccctttgatcagctgg

SEQ ID NO: 12407 - DNA, 390 bp, Glycine max
  Clone ID: LIB3040-060-Q1-E1-C11
ggttctgcttcttcttttcccttccacacaaatacatcacatcattgccattgctctctctctctctctctctctcgtgcggacacaatttttgatggggatatacctcagcactcccaaaacagagaaggcctctgaagatggtgagaacgacaagcttcgcttcggtttgtcttccatgcagggctggcgtgcttccatggaagatgctcatgcagctcatccatatttggacgagtctacgtcatactttggtgtttatgacggccatggaggcaaagcagtttcaaaattctgtgccaagtatctacaccagcaagtgcttaagagtgaagcttacttagctggagaattaggcacatctttacagaaatcttttctcagaatgga

SEQ ID NO: 12408 - DNA, 339 bp, Glycine max
  Clone ID: LIB3040-060-Q1-E1-C2
gatccaaatccaccccaacacaaatcttagccgccattgatttttcctcttccatttctcttactttctcagcctttttcgattacccatttggttatttcgccctaatggctcttgctccatccaaagtttccaccttttctggtttttctcccaaacccagtgttgggggtgctcagaaaaacccaacttgctctgtttctctgagctttttgaatgagaaacttggaagcagaaaccttagggtttgtgcctcaacggtgcctctcactggggtgatttttgaaccgtttgaggaggttaagaagagcgagcttgctgttccaactgctccccaag

SEQ ID NO: 12409 - DNA, 341 bp, Glycine max
  Clone ID: LIB3040-060-Q1-E1-C3
tagggaacacttggagaaaaggactaggagcagagaatgaagacataggaggttgtgaattgtcattgtcaatcacattgccacaaccccatccttcctcacagaaaagtaatacttcttcagtcagtgagaccagtgaggcattttcattgtgccctgagtttagcaacaacgttatcatgggctgttctagttcttccaatgtcccaaaaacaattaatttggacctttctttggccatttgaatgttagtattaaggactaatttactcgatctaattactctattcattttagaggaatcaaatcagatattaacatgtcaagaaatgtgctatcta

SEQ ID NO: 12410 - DNA, 317 bp, Glycine max
  Clone ID: LIB3040-060-Q1-E1-C4
cagggagtgagagagagagaaggcaagatgtcgaagagaggacgcggtggttcggcggggaacaagttccggatgtcgctgggtctgccggtggcggcgacggtgaactgcgccgacaatacgggggcgaagaacctctacatcatatcggtgaaagggatcaaagggcgtttgaaccgtctcccctcggcttgcgttggcgacatggtgatggccaccgtgaagaaggggaaacccgatctgaggaagaaggttttgccagctgtcattgttcgccagcgcaagccatggcgccgaaaggacggcgtctacatgta

SEQ ID NO: 12411 - DNA, 340 bp, Glycine max
  Clone ID: LIB3040-060-Q1-E1-C5
gattgttggcttgtgctctgctcgtgcctctagggttatcatatctccatttccatttcctctctctcagtttccaagaatcttaagctatgggaaagtcttacccaaccgtgagtgctgattaccagaaggccgttgagaaggcgaagaagaagctcagaggcttcatcgctgagaagagatgcgctcctctaatgctccgtttggcatggcactctgctggaacttacgacgtgagctcgaagaccggtggtcccttcggaaccataaagcacccctccgaactcgctcacggcgctaacaacggtcttgacatcgctgttaggcttttggagccact

SEQ ID NO: 12412 - DNA, 348 bp, Glycine max
  Clone ID: LIB3040-060-Q1-E1-C6
gatttaaatattccaggttcgtccttgactctacaacattccattttcataggaaaagccaaaactgaagctcgaggaagataactacgatgaaacaagaggaatggatgattacgacagcgttgctatcgttgctgtttgtttcatcttttccgccgttgagttacggagttgttcctcctcgtactctgctcaataagctgtcggagggcaaatatctcaacactcaggagctctggttcgaccaaaccctcgatcacttctctccctatgatcaccgacaattccggcaacgttactatgagtttctagactatttccggattcccgatggaacaatttttttgg

SEQ ID NO: 12413 - DNA, 352 bp, Glycine max
  Clone ID: LIB3040-060-Q1-E1-C7
gacagcaaaacaattttcaaactcaattaccattccataacctaaatctcctctttgtttccgagtcagagagcaatggcacgtaccaagcaaaccgctcgcaagtccaccggcggaaaggcgccgaggaagcaattggcgactaaagccgctcgcaagtcagctccggccaccggcggagtgaagaagccccaccgcttcaggcccggaacggtggctctgagggagatcagaaagtaccagaagagcactgaacttctgatccgaaaactcccattccagaggctcgtcagagaaatcgctcaggatttcaaaacagatcttcgtttccagagcagcgctgtttctgcgc

SEQ ID NO: 12414 - DNA, 338 bp, Glycine max
  Clone ID: LIB3040-060-Q1-E1-C8
ggtgcgtaattgcatttggtagttttgtttgactctctttgttgttggcaccttccaattcttctaatcttctgcgtttatctctcttttcttcttcatttccgcagcatagagagagatagaaagcgaaagaaacctaacacaatggcgtcttcgatcgcagctggtgctggatccaccgatcccacagctgccagaagaaacactaagcgacccaagtattcaaagtttactcagcaagaacttccagcgtgtaagccaattctcacgccacgagcggttatttcggcattcttgcttgtcagcattgtattcgttcctattggagttgcttcact

SEQ ID NO: 12415 - DNA, 361 bp, Glycine max
  Clone ID: LIB3040-060-Q1-E1-D1
ggggcgaggtagccagagagtgatacaatacagagtgcgttgttgctccttcgccacaactccctgccaacatgggtatctccagagattctatgcacaagaagcgtgccactggtggcaagaagaaggcatggaggaagaagagaaagtatgagcttggtcgccagcctgctaacactaagctgtcaagcaacaagacagtcaggaggatccgggttagaggtggaaatgtgaagtggagggcactgagattggatactggaaattactcctggggaagtgaagctgtaactcgcaagactcgtatactagatgtggtttacaatgcctcaaacaacgagcttgtgcgtactcagactct

SEQ ID NO: 12416 - DNA, 354 bp, Glycine max
  Clone ID: LIB3040-060-Q1-E1-D11
ggttccaatttgcgtgagaacgaaaaaagaaaaaaaaaaccctaacgcactcgagaccctgagatttttcatcttcgtttctcattctctttttgatcatggacgtcggggtgcggcagatcttcaacaagttcgacaagaacggcgacggaaaaatctcggtaacggagctgaaggacatgctcgcggccctcggatccaaaacgacggacgaggagttgaaacgcatgatggaggagctcgaccagaacggcgacggtttcatcgacctcaaggagttcgcggattttcactgcaatggcggtgccggaaaagacgactccaacgagctccgcgacgcgttcgatctctacg

SEQ ID NO: 12417 - DNA, 324 bp, Glycine max
  Clone ID: LIB3040-060-Q1-E1-D2
gaacactgatataaagtgaaaatcattgtctcatcacagtagtactcacactatacggtggcggaaccagagaaaaccaaccagaccgattactcttgaggaaacaaaaatctaagatgagccgccatccttctgtcaaatgggctcagacgtctgatgtactctacttaacagttgagctgcctgatgctcaggatgttaagctcaaactggagccagaaggaaaattttacttctctgcaactgctggtgcagagaaaattccttatgaggttgacattgatctgtttgacaagattgatgtaaataatagcaaagctagtg

SEQ ID NO: 12418 - DNA, 358 bp, Glycine max
  Clone ID: LIB3040-060-Q1-E1-D3
gacgacaatgacgaccaagaaaatgatgctcctgaccggggttaccaccaacaacaaccaaaattattaagaaaaaaggtatgttcaaccttgttgttagccttaccaattacataacgactcaaacgacgactcagacgacgacgaagatgaagacgacgaggacgaggaggagcaaggggaagaggaggatttgggaacagagtaccttatccgccctttagaaactgctgaggaggaggaagcatcaagtgattttgaaccagaggagaatggtgaggaggaggaagaagatgttgacgacgaggactgtgagaaggctgaggctccaccgaaaaggacagaggtcagataaaga

SEQ ID NO: 12419 - DNA, 334 bp, Glycine max
  Clone ID: LIB3040-060-Q1-E1-D5
gacatcacgacatcacatcgcagagaagaacagagagagatccatccatcaattccaatggccgatcagctcaccgacgaacagatctccgagttcaaggaagccttcagcctcttcgacaaggacggggatggttgtattaccaccaaggaacttgggaccgtgatgcggtcacttggccagaacccaactgaggcagagctgcaggacatgataaatgaggttgatgctgatgggaatggtaccattgatttcccagaattcctgaatctcatggctcgcaagatgaaagacactgattcagaggaggagctgaaggaggctttccgcgtgt

SEQ ID NO: 12420 - DNA, 237 bp, Glycine max
  Clone ID: LIB3040-060-Q1-E1-D6
gaaaattctgagaatgaatcagaacgtgaggatggcaacacgagcagtgaatcatcagatgagaatatagaacatggtttttctgaagatgatgctgatccattatatgatgaggattttgatgaatatgaaggtgctcatagtgatgatgttgagcatatggatgatgaaaattgggggtggtcgtaccgatgaagttggctttagttttacttttgcaaaatgtaaacctgatgg

SEQ ID NO: 12421 - DNA, 173 bp, Glycine max
  Clone ID: LIB3040-060-Q1-E1-D7
ttcccgcctcgacacacgcgtacgcccacgcgtccgccgactccaaacgaccgacagggagtgacatcagagaaagtgagaacagggtctaacaactggtgatgtcattgatggctacagaggacgatagtgcggtgaacgagcctttggatctcattacgctcagcctcgac

SEQ ID NO: 12422 - DNA, 311 bp, Glycine max
  Clone ID: LIB3040-060-Q1-E1-D8
agaaagctgcgaaagagcagaagaaggctgaggcgcgcaagtgagtttcctggaaaatgtcatgccaccaaaaatttgctccaattagtaaggtggaacggttgctcctactacacttaaaacattatgtccatttggctttatattatggtattaccacaccaagctggtaacatgtaatgcaattatattttcatattctgtggtttaaaatcgtgattatatataaacgtttttaaaaaaaaaaaaaaaaaaaaaaaaaaaaaaaaaaaaacaaaaaaaaaaaaacaaaacaaaacaaaacaagaaaa

SEQ ID NO: 12423 - DNA, 397 bp, Glycine max
  Clone ID: LIB3040-060-Q1-E1-D9
gcaccgcttgagcagacttaacaacagcacaaagcgggttactgtctgttcaagctaccatctctctctctctttcttagtgccttcttgccagaagttaaaatggcccaagaaactttcctattcacatctgaatcagtgaacgaggggcaccctgacaagctctgtgaccagatctccgatgctgtgctcgatgcatgcttggagcatgaccctgacagcaaggttgcctgtgaaacctgcaccaagaccaacatggtgatggttttcggagagatcacaaccaaggccaacgtggactatgagaagattgtgcgtgacacatgcacgaacattggttttgtctctgatgatgttggtcttgatgctgacaactgcaaaggtctcgttaacattg

SEQ ID NO: 12424 - DNA, 359 bp, Glycine max
  Clone ID: LIB3040-060-Q1-E1-E1
ggcaccgcttgagcagacttaacaacagcacaaagcgggttactgtctgttcaagctaccatctctctctctctttcttagtgcctccttgccagaagttaaaatggcccaagaaactttcctattcacatctgaatcagtgaacgaggggcaccctgacaagctctgtgaccagatctccgatgctgtgctcgatgcatgcttggagcaggaccctgacagcaaggttgcctgtgaaacctgcaccaagaccaacatggtgatggttttcggagagatcacaaccaaggccaacgtggactatgagaagattgtgcgtgacacatgcaagaacattggttttgtctctgatgatgttg

SEQ ID NO: 12425 - DNA, 322 bp, Glycine max
  Clone ID: LIB3040-060-Q1-E1-E10
gattcttctcaaagtcatataaatagactcctttgtgacacattataaataatcctcaggtttccccacgtttcctctgtcacgaggaacagcgcagaacctaaccctcacgaaaacccctttcgattccgataactctcgttgtgccgaaaccctaaccttaaccgggttttctcgttggttgggattgaattggcatcggagggaggcgatcgattggaaaattggtagtagtagtttagcgttgaagaacgatgtctgctgctgtgtgcggaagcacgagatctttcttcgaagagcttcctccttctccgccactctc

SEQ ID NO: 12426 - DNA, 363 bp, Glycine max
  Clone ID: LIB3040-060-Q1-E1-E11
gatctcagtctctacctcaaaccactccagaaaaaatggcagtgcctcttctctcgaagaagatcgtgaagaagaggctgaagaagttcaagaggcctcaaagtgacaggaagatttctgtgaagacaaactggcgcagaccaaagggtatcgattcccgtgttaggagaaagttcaagggatgcactttgatgccgaacattggttatgcttcagacaagaagacccgccactatctcccgaatggtttcaagaaatttgttgttcacaatgtgaaggatttggaactgctcatgatgcacaacaggacttactgtgctgagattgccacaatataccacaggaaagaaaaagatatagtcg

SEQ ID NO: 12427 - DNA, 355 bp, Glycine max
  unsure (1)..(355): unsure at all n locations
  Clone ID: LIB3040-060-Q1-E1-E12
gccgccatttttcgtagctgctgttcttgcgcgtgaacaagcctcaggtaagccaaaaccatggttaagcataacaatgttatcccaaacggacacttccgtaagcactggcagaactatgtgaagacttggttcaatcagccagcacggaagacaaggagacgattggctcgtcagaagaaagctgtgaagatattccccagacctacggctggacctctcaggcccattgtacatggtcaaactttgaaatacaacatgaaagtgagaggtggaaggggattttctcttgaagaactcaaggcagcagggattcccaaaaagcttgcancaaccataggtattgctgttgatc

SEQ ID NO: 12428 - DNA, 315 bp, Glycine max
  Clone ID: LIB3040-060-Q1-E1-E3
gatagcaaaacttcagcaacccttttgcatctgatctaagaatcccaacctcaaatacccattttttgtcatttcatgatctaggttatagttcgtgaaaatgacgaggatgacccgtgattttggggatactatgcaaaaagatgcagtgccggcggtgtcggctgatataatatttgcttctcttcggtttcctaattacaaaatcggagttaacaatcagatcatggagacaaaggatagtccaaaagtgctatctatgaaggaggttgttgcgcgagagactgcacagctgttggaccagcagaaacgtct

SEQ ID NO: 12429 - DNA, 339 bp, Glycine max
  Clone ID: LIB3040-060-Q1-E1-E4
gacggcactcgttttcgttctcgttctggtttatagatctttgcgaaggaggtttacagcgctcaaccaaagatgcagaacgaggaaggacagatcactgagctttacattcctaggaagtgctccgccacaaacagattgattaccgctaaggaccatgcttcggttcagatcaacattgggcatgtggatgagaatggcgtctacaatggccatttctccacttttgccctctgcggattcatccgtgctcagggtgatgctgacagtgctctagaccgcttgtggcagaagaagaaagttgaagttaagcaacagtagacacccatgatagtttgt

SEQ ID NO: 12430 - DNA, 57 bp, Glycine max
  Clone ID: LIB3040-060-Q1-E1-E5
gtggaagttgatgaagatacagctgaagacaaaaaggatgatcaagatgataagact

SEQ ID NO: 12431 - DNA, 331 bp, Glycine max
  Clone ID: LIB3040-060-Q1-E1-E6
ggtgcctggccatccggtttcccagatctgctccttcctcaccccacagaagtcagttgaagagcatgggtcgtggagttagcagtggtggtggtcaaagttccttgggttatctttttggcagtggagaggcccctgccgcaaaaccggcaacaaacaatgccccagcccaacctgaagtgcaggctgtaaataatgcgcctccttcaaaagcatctcctcctactaaaacaatagaccctaacaaggctgctggtataaacagtcattctactgatggccagaacaccggcaacttcatcacggaccgaccctcaaccaaggtccatgc

SEQ ID NO: 12432 - DNA, 357 bp, Glycine max
  Clone ID: LIB3040-060-Q1-E1-E7
gagtgccagacgcagtgactaaaccaaacctctcactcgccgtcgtagggtttctcctttcgtttagcaacaacaacaatggttgcagccaagaaaaccaagaagacccatgagagcatcaacaacaggctcgctcttgtcatgaagagtggaaaattcaccctcggttacaagacggttctcaaatcacttaggagctccaaagggaaattgattatcattgctaacaactgcccccctttgaggaaatcagagattgaatactatgctatgttggccaaggttggagttcatcattacaatgggaacaatgtggatttgggcactgcatgtggaaaatattacagagtgtgctgc

SEQ ID NO: 12433 - DNA, 292 bp, Glycine max
  Clone ID: LIB3040-060-Q1-E1-E8
ggattttcatcagttgagttgagagaaggaaagggaaaatgggtaaggatctgagcgaggaacaagtgtcttccatgaaggaagccttctctctattcgacactgacggagacggtcggatcgctccgtcggagctggggatcctgatgaggtctctgggaggtaacccgacgcaggcccaactcaaagccatcgtggctgaagagaacctcacggcccccttcgacttcccccgattcctcgatctaatggccaaacacattaaacccgaacccttcgattgccaactccg

SEQ ID NO: 12434 - DNA, 376 bp, Glycine max
  Clone ID: LIB3040-060-Q1-E1-E9
gatgcatcccaacggctagcccattcaatttgaatcggggagacagaaagaatagggcaaattttcgattttgattttccaaccaaaaaatccagggtttaccctcacaccccactccctccaaagcgtttgcaattcatcgttctcttaaaaaagttttcaattgaaacactgattttgaattcgaggtttgagttagttctcagaaagaattgcagcaatggatctccctcgagacgttgacgactacatcaaacaaaccctcgacgatacattaggtattcccgtatcgtcgaaaaccctagaatccaaacttcgagcttcccaagactcgcaatggcgcctcccccaacgcctcctttcccttctcacccaa

SEQ ID NO: 12435 - DNA, 276 bp, Glycine max
  unsure (1)..(276): unsure at all n locations
  Clone ID: LIB3040-060-Q1-E1-F1
gccgctctctgagaaaaacagatagtgtgggagagagaagagcggaagagaaaatgacgaccaggttcaagaagaacaggaagaagagaggtcacgtcagcgccggacacggccgtatcggaaagcaccgcaagcatcccggaggtcgcggtaacgccggtggcatgcatcaccaccgtatcctcttcgacaagtaccatcctggtttcttcgggaaggtangcatgcgctacttccacaaacttcgcaacaaattctacaatccgatcatcaaca

SEQ ID NO: 12436 - DNA, 347 bp, Glycine max
  Clone ID: LIB3040-060-Q1-E1-F10
gacagcactgcactcttcgcaacacaacaaaaaaagacaacccagagagcgcgtcttaataaacgctcttctctgaaaacccccatttcttttcttctttcttcttctctttcgcttcttcgatcttcgatcttcgtcgctgaaaatgagagagtgcatttcaatccacatcggccaggccgggattcaggttggaaacgcctgctgggagctttactgcctcgaacacggcattcagcctgatgggcagatgccaagtgacaagaccgttggtggaggtgatgatgctttcaacaccttcttcagtgaaactggggcatgaaagcacgtgccccgtgcgaattttg

SEQ ID NO: 12437 - DNA, 151 bp, Glycine max
  Clone ID: LIB3040-060-Q1-E1-F11
ggagatctcagattgcaattgcctcttctcttctcccagaatcggtgtaggttacaggtttaagggttttgttttcatttaggtcactaatccgatatcatgaagctcgatacgactagtctcgaatccttttccacactgattgcacctc

SEQ ID NO: 12438 - DNA, 150 bp, Glycine max
  Clone ID: LIB3040-060-Q1-E1-F12
tcagctatttaagtgagcagatactagttgttgcttgagtgtaatatgtagggtacaaaacccattgaggaaaaatataacacatcatgcaatctagtgtttaatattttatcttatgattaaaaattaatagcggttttcatttcttcc

SEQ ID NO: 12439 - DNA, 347 bp, Glycine max
  Clone ID: LIB3040-060-Q1-E1-F2
ggaagaagtgcccaaggaagctcgttctttcgtcgtcgtcacaagtcataactcgcaaaccacaatgcctaagcagatccacgagattaaggattttcttctgacggcgcggaggaaggatgcgaggtcggtgaaaatcaagaggagcagggatgtcgttaagtttaaggttcgatgctccaagtacttgtacacgctttgtgtcgttgaccctgagaaagccgataagttgaagcaatctcttcctcccggtttgagtgttcaagacctgtagagctgttgagtgtggcagcatgcgtttgtttctccttttgttacctgatgctctagaatttgttgcttggttt

SEQ ID NO: 12440 - DNA, 54 bp, Glycine max
  Clone ID: LIB3040-060-Q1-E1-F3
tacattctttccttgaaaaataaaataaaataaaatgaacttaatcattgttat

SEQ ID NO: 12441 - DNA, 198 bp, Glycine max
  Clone ID: LIB3040-060-Q1-E1-F4
aaccccttgaaatggtcttttccgcttttattggttaagtgtatatttctaaaaagcctaaaatcaatatgtaactttgttacctctttcaaaaataaagaaatcattaatggtccaatgccttaatgttttctcacttttcaaaagaatcgaaagattgtctaatggtccaacgccttaaatgacctttcattcaat

SEQ ID NO: 12442 - DNA, 322 bp, Glycine max
  Clone ID: LIB3040-060-Q1-E1-F6
ggaataccaaggtagttcgttggtcactacctgctcatagcgacacacacagctgctggctacggatacataaaatcgttcccagattcaaaacctgagatgcttttcttgagctggggtcgcccctctccccaagaccaaaagacttgcatcaacaagtcaggtactttcaactatgatgacaaatataaaggagctactgctaaatcagtggcttcccttaaagcagacgagggactctccaaagatggatttttactaaacgaggcgcgagttctggttggttctggtattgagacctttgaaaagggcaagagtgctc

SEQ ID NO: 12443 - DNA, 334 bp, Glycine max
  Clone ID: LIB3040-060-Q1-E1-F7
ggaaacagagagtgatttcagtgagtgatcggtgttcacttgatctcatcataatcgtcagcgtcaattgaagaagatgccgatcagaaacatcgccgtcggaaggcctgaagaggcgactcaccccgacacgttgaaggcggctttggctgagttcatctcaaccttcatcttcgtgttcgccggctcaggctccggcatcgcctacaacaagctcaccgacaacggcgctgccacccctgccggcctcatctccgcctccatcgcccatgcattcgccctcttcgtcgccgtctccgtcggcgccaacatctccggcggccacgtcaacccc

SEQ ID NO: 12444 - DNA, 274 bp, Glycine max
  Clone ID: LIB3040-060-Q1-E1-F9
gattgttggcttgtgctctgctcgtgcctctatggttatcatatctccatttccatttcctctctctcagtttccaagaatcttatgctatgggaaagtcttacccaaccgtgagcgctgattaccagaatgccgttgagaaggcgacgaagaagctcagaagcttcatcgctgagaagagatgcactcctctaatgctccgtttggcatggcactctgctggaacttatcgacgtgagctcgaagaccggtggtcccttcggaaccataaagc

SEQ ID NO: 12445 - DNA, 204 bp, Glycine max
  Clone ID: LIB3040-060-Q1-E1-G1
gatgtttttttattaagaggttcttattttggtcaatctgtataggtaagtggaggcagcagagaagtattaatggtagggtaagtaatagtgttacttaatgtgacagttacaactaagtgaacagagtttaatttaagctgaagcgatcttgcttgccaaattgaacttctagtataattttaagaatttagtatgttactt

SEQ ID NO: 12446 - DNA, 379 bp, Glycine max
  Clone ID: LIB3040-060-Q1-E1-G10
gattgttggcttgtgctctgctcgtgcctctagggttatcatatctccatttccatttcctctctctcagtttccaagaatcttaagctatgggaaagtcttacccaaccgtgagcgctgattaccagaaggccgttgagaaggcgaagaagaagctcagaggcttcatcgctgagaagagatgcgctcctctaatgctccgtttggcatggcactctgctggaacttacgacgtgagctcgaagaccggtggtcccttcggaaccataaagcacccctccgaactcgctcacggcgctaacaacggtcttgacatcgctgttatgcttttggagccactcaaagcggagttttccagtttgagctacgccgatttcta

SEQ ID NO: 12447 - DNA, 369 bp, Glycine max
  Clone ID: LIB3040-060-Q1-E1-G11
ggggtacatacattttatggcttgaaaatatcattctccattccagtccactgcgagcaacactaccaaatcgccatggcaacactcacacagcgaacagtggcatcttccattttccattcccacacactcccacgcaaaccatgcttcttcctccgctttcgctttccctccactttctgcaacttcacattttccccttccaatttcgccgtgaaatcttcttcgcgcctcgccgtcatctccgcttcatcttcctccgagcaccaccacaactcctcctcatctccagacatcgccgtccttctcgaagtcgacggggttcttatggactcgcaccgcgtcggaaatcgcctcgccttcaataaa

SEQ ID NO: 12448 - DNA, 321 bp, Glycine max
  Clone ID: LIB3040-060-Q1-E1-G12
gacaactcaaactgcttcattgcataattgcagataagatcaacccttctaccttcagattcgcgggaagatggcatcacttcatgctaatgtgacatcagttgtttacaacagtggcaaccgtgtttctcaatcgaaatttgcaagctcttccttcttgtctgggttcgatgttgttggtcgtgcttcaagtgcttggcataaggaacttgtcccatcttccatttccttggtgcctatagccaccctaacatttgattccccaactaccaattcagacatatacaagcattagaagcacactcttgaccctgcttctcc

SEQ ID NO: 12449 - DNA, 352 bp, Glycine max
  Clone ID: LIB3040-060-Q1-E1-G2
agaaggcagttcttgaggcagagaaagaggaaaagagtgtgttgccccagcagaagaaagatgaccagaaaactgtggacgctgcagtgttaaaagccattgagagtgtgccagacttgaagtcctatttgggtgccaggttttctctgaaggccggggtgaaaccacatgagctagtcttctagaggaaagaggggtgttactcttgtttttgatatcgtgtttgtttattgatgctggttcttatagttgccctcttataacattcttgttagcagacaaatgaagaacctaaaattttgttagtcaaattgtgacgcgtgctctttacattttgttgaatggtgtgaat

SEQ ID NO: 12450 - DNA, 53 bp, Glycine max
  Clone ID: LIB3040-060-Q1-E1-G3
gaaccaagtttgcttgcgtgtatattcattttagcatcaaggttgaatctcat

SEQ ID NO: 12451 - DNA, 231 bp, Glycine max
  Clone ID: LIB3040-060-Q1-E1-G4
tctttctcaaatcgccctatcttcaaaatttcaaggttatcactctaaagacagatttttttcttaaatgactgtggctatggctgtttggagtgctggtcttcacttcagtgctgctacgaagcctcatagtagcttgaggcctttggagaaaatcatttgcactgcccctttcttcaaggcctcatctgggtttgctgctactaagccattctgcatccttaacacaac

SEQ ID NO: 12452 - DNA, 342 bp, Glycine max
  Clone ID: LIB3040-060-Q1-E1-G5
ggttctagtgtgtgattgtttgttgttgtaactcgttcttcttcttttgttgttctgtgtttgtgtttgttttttctctcacctgaaaatgtcttgctgcggtggtaactgtggttgcggaagctcctgcaagtgcggcaacggctgcggaggctgcaagatgtacccagacttgagctacactgagtcaaccaccaccgagaccttggtcatgggagtggcacctgttaaggctcaatttgagggtgctgaaatgggtgtgcccgctgagaacgatggctgcaaatgtggaccaaactgctcctgcaacccctgcacttgcaagtgaggtgttgggagagc

SEQ ID NO: 12453 - DNA, 218 bp, Glycine max
  Clone ID: LIB3040-060-Q1-E1-G6
ggctactggatttcagcctcaaatattcttgatattcctcagtagaaaatcttggcttggtccctcatggacctagatagagggggtgtgttgaaggtcgcacatggcggagatataaggttgacttggtgctaaagagcgaagggagggagggataagtcttgggtttgaatcctcccactaacaaaaaccaacaaattaacaactaacatttgccg

SEQ ID NO: 12454 - DNA, 336 bp, Glycine max
  Clone ID: LIB3040-060-Q1-E1-G7
gagcgccaatgtttttttcagaggagtttcatcttgtaatcaaaagagtttatcttatagtaagaaatcgatgtcttactccattttaaggaacaaaacaagagaacaatagcctgacaaagggtttagccataaaatcgaatccatcattgatttgagatattgataaggtgaatactcatttctcgtcaatgctaggcataatgcgggtatagggacctaaaaaagattatcttttcttcctatcttatgaactttaaggtgtatgaagtgtcatttcctatcttagattttaattttagtacgtagataaagagtcatttaacttaagttgat

SEQ ID NO: 12455 - DNA, 384 bp, Glycine max
  Clone ID: LIB3040-060-Q1-E1-G9
gcagcagcatttgaactctactatcgttttctccgttctttctcaaagccgcactcaactttctaaaaccaaatcggtttgaatcctcatttcccgcctctcactggaaagcagcaaaatcacctttctctactatctatctgttccttttgtactctgagtgggtagaagtcatggtaaggctcactgctgacttgatttggaaaagccctcatttcttcaacacgattaaagagcgtgagttagatctcagaggcaacaagatagctgtaattgaaaacttgggtgctactgaggaccaatttgacacaatagacttatctgacaatgagattgttaaacttgaaaatgtaccatatcttaaccggttgggcacaatgctca

SEQ ID NO: 12456 - DNA, 272 bp, Glycine max
  Clone ID: LIB3040-060-Q1-E1-H1
ggtgctctgctcgtgcctctagggttatcatttctccatttccattttctctctcacttttcaagaatcgtaagctatgggaaagtcttacccaactgtgagtgctgattaccagaaggccgttgagaaggcgaagaagaagctcagaggcttcatcgctgagaagagatgcgctcctctaatgctccgtttggcatggcactctgctggaacctttgacaagggcacgaagaccggtggacccttcggaaccatcaagcaccctgccgaac

SEQ ID NO: 12457 - DNA, 370 bp, Glycine max
  Clone ID: LIB3040-060-Q1-E1-H11
ggaagttcgggagatggattttctttataaggtgattgatgaaacattgcgtgtgattacattctcactagtggtctttcgggaggcaaaaactgatgttaatatcaatggatacacagttccaaaaggttggaaagtgcttgtgtggttcagatcagttcaccttgatcctgaaatatttcctgatccaaaggaatttaaccctaatagatggaataaagagcacaaggctggagaattccttccctttggaggaggaagtagattgtgtcctgggaatgatcttgccaagatggaaatagcagtttttcttcaccatttccttctgaattaccgatttgaacagcataatccctatttgccctgtgag

SEQ ID NO: 12458 - DNA, 257 bp, Glycine max
  Clone ID: LIB3040-060-Q1-E1-H12
caagaccagaaggggaaggcaagggaaaggccccttgtggttcctcctggccttcgccggtcccccggttccccgttttggggtcaaaacggaacccaagtccggaatccaaacaattttaaccacccaaggtggaaagcctaaccctttgacaaaccccagttctgataacaaggattccaacaaaattgaggtggttacaatccagaatacaaaggacaaggaaaagggcctaaaggctttgaacgcaaaggcgc

SEQ ID NO: 12459 - DNA, 300 bp, Glycine max
  unsure (1)..(300): unsure at all n locations
  Clone ID: LIB3040-060-Q1-E1-H2
aaatgtctggtcgtggaaagggtggaaagggtttgggaaagggaagtgccaagangcacaagaaggttcttcgtgacaacatccagggcatcacgaaacctgcgattcgtangttagcgagaagaggtggcgtgaagaggatcagtggtttgatctacgaggaaaccagaggagttctgaagatattcttggagaacgtgattcgcgatgctgtgacctacactgagcacgctaggaggaagacggttactgctatggatgttgtttatgctcctaaaaagcaaggaaaggaccctctat

SEQ ID NO: 12460 - DNA, 310 bp, Glycine max
  Clone ID: LIB3040-060-Q1-E1-H4
ggggaagggtaaggctgcttggaaccaaaacaaaggaggcgataccagaagaagccttcttattaaaggcccttctcggaaaaaccggatttcttcccttcttcccttctctttcgtttcaatcttcgatccctgaaaatgaaagagtgcatttcaatccacatcggtcatgccggtattcaggtcgggaacgcctgctgggagtctctgtaggcaattcagtcacatttagcatgatgggtacattcttggatgttcttatgttgagggacagtaagacacgcattatgtttacaacagtgaaactggg

SEQ ID NO: 12461 - DNA, 204 bp, Glycine max
  Clone ID: LIB3040-060-Q1-E1-H8
gttttaccatgtgatttatcgtagaatctcagttgagcttactgatgaaatgcaaggtgtcccgcttcttgtagcattttggtattcatggtcatgttagcagaataggcataattcttgtaagcaattcagtcacatttggcattagcttttctttcttggatgttcttataagcatatctcatttaagcaagcattatgttt

SEQ ID NO: 12462 - DNA, 323 bp, Glycine max
  Clone ID: LIB3040-060-Q1-E1-H9
atgctgaagcctttgctgtgctgcagtatatgaaagaaaacaacattgaacctgatgtagttacttataccacactaatgaaagctttgattcgtgttgaaaagttccaaaaggttccagctgtgtatgaagaaatggtcgcatctgggtgcactcctgatcgaaaagctagagcaatgctgcggtctgctcttagatacatgaagcagacactaaaatcatagttaaattatcaagcacattctttcatgaagacagaacagaatcacatttgctcaccttacatggttataattctgaagcaagtgctttggggcagtatg

SEQ ID NO: 12463 - DNA, 342 bp, Glycine max
  Clone ID: LIB3040-061-Q1-E1-A10
aacttttagataagtgcttttatttaagttctccggtagctgggatgcataaattgagtttagcttacacaagaaattcatttcactttctattcttattttctactcttataagtacttacataaaagtttatcacgtcataacacatgaccaaactttacctctgttctgtttgtcaatagcatgaatgatgtcaaagtcaacgaaatcagagggcttgattggcctcgaaatagaagttatctgaatctcacgcctttttgaagctgccctcattcacgaatacgcttcatttcccttcgagaatcacacactcaacacctcccatgaatggtaaaaat

SEQ ID NO: 12464 - DNA, 353 bp, Glycine max
  unsure (1)..(353): unsure at all n locations
  Clone ID: LIB3040-061-Q1-E1-A11
gactcacaccaaaatttgccaattgccatttcaatccccagtttcttcttcaacgtcccctnacgaagaagttccaattccccctcccaagttcaaaacctaaatccctcaatcccaagggctcaggagaggccaatggcgcggggggaaccggtcccgaaactggcaacggcgagcctcccccggaggagaaagaggagcccaaacctgaagccaaggctatgaaaaccaaggaacccaaacctaaaaaggtttccagaccacgcaaccctcccactcatccttcctacgaggagatgattaaagacgcaattacctcgctgaaggagaaaaccggttcgagccaacacgcg

SEQ ID NO: 12465 - DNA, 382 bp, Glycine max
  Clone ID: LIB3040-061-Q1-E1-B10
gacacagagcaatattcattcatttagattcatcaaaagcttataacaacaattaaacatgagtgcagccagcagagcttggattgtggcatcaagcattggagcagtggaggcattgaaggatcaattgggggtgtgcaggtggaatcatgcattgaggtcactgcagcagcatgccaagagcaacattagatcctacactcaggccaaaaccttgtcgtctgctacttctgctgctgtctccaataaggtcaagaggaccaacgaggagtccatgacgaaagtcatggacttgagctgttggggtcccaatacttcaaggttttagtgtgtggactagtccaactgcattcatcattgtgctgcaaggtttatgaagatt

SEQ ID NO: 12466 - DNA, 257 bp, Glycine max
  Clone ID: LIB3040-061-Q1-E1-B11
gagacctcaggtcaagccgggctacccgctgagtttaagcatagcagtataaaataaaaggtaaaaaaaatccgaaccgccactcgatacgatcatagcttacctttgctttcatgtcacatcatatctcttctaatatgtcaacttaattcacttcacttccccttactttaaaacgtcgtgaactggaataaccttaccttacccaaattaattgcctttcaacacaatttcctttacccaacttgtattataac

SEQ ID NO: 12467 - DNA, 355 bp, Glycine max
  Clone ID: LIB3040-061-Q1-E1-B12
gggtgtggtagtgtggcagcgacacgtatcaacttcaataatcgcatcgcagaagcagtttccggtgcatctcatcgtctccgaaaatgaacgacgcagatgtctcgaagcaaatccagcagatggtgcggttcatccgccaggaagctgaggaaaaggccaacgagatctctgtctccgccgaagaggaattcaatatcgagaagctgcagttggtcgaagccgacaagaagaagatcaggcaagaatacgaacgcaaagagcgccaagttgaaattcgcaagaagattgagtactcaatgcagctgaatgcttctcggattaaagttcttcaagctcaagatgacgtgattag

SEQ ID NO: 12468 - DNA, 215 bp, Glycine max
  Clone ID: LIB3040-061-Q1-E1-B9
attggaatgtgcacacactgcacaatatgggaaataaaaaaaacaaaaataaaaactgaagccattcaactcatgtaatagcacagttgcttccgattagatgcagttatcctggttagtggttagcattccgtaaagtaaccaaaacatgtttgggatgtgccttactaatctatatgggtgatttcagctgtctgatgtggatacttgtttac

SEQ ID NO: 12469 - DNA, 325 bp, Glycine max
  Clone ID: LIB3040-061-Q1-E1-C10
gattgttggcttgtgctctgctcgtgcctctagggttatcatatctccatttccatttcctctctctcagtttccaagaatcttaagctatgggaaagtcttacccaaccgtgagcgctgattaccagaaggccgttgagaaggcgaagaagaagctcagaggcttcatcgctgagaagagatgcgctcctctaatgctccgtttggcatggcactctgctggaacttacgacgtgagctcgaagaacggtggtcccttcggaaccataaagcacccctccgaactcgctcacggcgctaacaacggtctttacatcgctgttaa

SEQ ID NO: 12470 - DNA, 375 bp, Glycine max
  Clone ID: LIB3040-061-Q1-E1-C11
gaattttgttgccaaagttaaaatggaaatagtagtgagaaaggaccaggttgaggcagtaattgacaaaattatcgaggaggcaaggactggggagattggtgatggcaaaattttcttgatccccgtctcagatgttataagaattcgaacaggtgagcgtggggagcaggcagagaggatgactgggggccgaagtgatatgctatctgctgtatgactgattggaacgaaagatcagcatttgtaatctggttccccttacctttcccctttttcccctgtggaaaaatgaatgcattacgatgctgtatgcttcatatgtttttgcactatatgtcggaagatgtatgacagacagtattgaaagggcac

SEQ ID NO: 12471 - DNA, 375 bp, Glycine max
  unsure (1)..(375): unsure at all n locations
  Clone ID: LIB3040-061-Q1-E1-C12
gacacaaactttattacagttgttgtattgtaattaagcaagaatattaggcaatggagtcttctagaacttcaactactcttgctctttttttaaccatcaatttgcttttctttgtcatggcaagtggctgctacacttgcacacagcctaagccaaaccctatcccattcccttaccctaaccctagtcctgccgcgaagagctgccccagggacgcacttaagctcggagtgtgcgcaaacgtgcttaatggaccaattggtgctattgtanggtcaccaccggaccacccatgttgctcagtgctagaagggcttcttgatcttgaagttgcggtttgcctctgcactgccatcaaagccaacattcttg

SEQ ID NO: 12472 - DNA, 394 bp, Glycine max
  Clone ID: LIB3040-061-Q1-E1-C9
ttcttttcaattataaacgatggaatcgtccatttcgatatataaaaaataatcgatttgaaaatgtcgtaaaaaatgaaatttcagaatttttttttcatacatgtcaaagtgatggaaaagaaagaatatcttttatgtatccaccaaatttatcaacttttcataaaatgatggaaaccaaattttatctcttcacaaaagataaaatttcctatgatgaattgtctaattattggagctatactaatgaagaaaaaagaaacaaattgagcaatgaatttgtaaatagggcaaaagtaatggataaggaattaatttctctggatatattagaaaaccgaattcgattgtctaatgatgaaactaaaacaaaatatttaactaaaatata

SEQ ID NO: 12473 - DNA, 379 bp, Glycine max
  Clone ID: LIB3040-061-Q1-E1-D10
ggtctccctcatttgttcactttctctctctaaatccctaaaccagatctcgcactcgcgctttctctctctaggattcgacaatggcggccgctccctcgcctcgcgaagagaacgtgtacatggcgaagctcgccgagcaggccgagcgctacgaagagatggtggagttcatggagaaggtctccgccgccgccgacaacgaggagctcaccgtcgaggagaggaacctcctctccgtcgcgtacaagaacgtgatcggagcgcgccgcgcctcgtggcgcatcatctcctcgatcgagcagaaggaggagagccgcggcaacgaggaccacgtctccgtcatccgcgactaccgattcaagatcgagtccgagct

SEQ ID NO: 12474 - DNA, 328 bp, Glycine max
  Clone ID: LIB3040-061-Q1-E1-D11
gatagtgggttaagcctcgcttctaacgtcaccgactcagttgttgtcagcgagtgagtgagtcgcttctctgcagcaacaaggtttagccactccaaacagacgagaaatgggtcgtggggtcagtgctggtggtggtcagagttccttaggttatctctttggcagtggggtgcctgccagcagtgcaaacagtcagcctgcaaatggtgctcgcgctcaaaatgctagtgctccttcaccaccagtcgataagcaaagtccagcaccagcaccagcaccagcaccagcacctgcatcatcaccaattgataagcaaattccaact

SEQ ID NO: 12475 - DNA, 356 bp, Glycine max
  Clone ID: LIB3040-061-Q1-E1-E10
ggagaacacaaacagcagcgtcttggtttgtgagagagacagaggcacagagagaaaatggtttcggggtcaggaatctgcgcgaagagggtagttgtggacgcgcggcaccacatgctggggaggctggcatcgatcgtggcgaaggaacttctgaatgggcagaaggtggtggtggtgcgctgcgaggagatttgcatctccggtgggctcgtcaggcagaagatgaagtacttgcgtttcctccgcaagcgcgtgaacaccaagccctctcacggccccatccatttccgtgcacccggcaagatcttctggcgcaccgttcgtgggatgatacaacacaaaacaaaccccgg

SEQ ID NO: 12476 - DNA, 200 bp, Glycine max
  Clone ID: LIB3040-061-Q1-E1-E12
gactcactcatacaataaagaacaacttttggctccttggtgacaatggaaataaggaatccaggtggcttctcctcctggccctcctccctggccttggcttccaagttggtgttgcaaacggaggaaaaattttttaattcaaaaggcaacggttccaagggttggggtataaaaaacaacactggtccttgggccgg

SEQ ID NO: 12477 - DNA, 390 bp, Glycine max
  unsure (1)..(390): unsure at all n locations
  Clone ID: LIB3040-061-Q1-E1-F10
gatacctaaaaattgtaccgatatggcttcacttgtgtgtctccttttttccttgcatttcatggttatcatgtcaggttccttaccagcaaatagtgaagtgtttacaaaagagtctcctatgtctctatccacaaaacccgtggaaagactcacccaactccacttttatttccataacaacaaaatgggggaacacncgactgctatgaaaattgttgagcctcctaaggcgtccatttctggttttgggactatttacatgatggatgaccctctaaccgaaggaccaagtccaacttcaaagcttgttggaagatgtcagggaatatatgctgaggcttcgcaacatgaacctgcgatactcatggtaacgaatttgtccttcac

SEQ ID NO: 12478 - DNA, 220 bp, Glycine max
  Clone ID: LIB3040-061-Q1-E1-F11
gaaggatcagcagggagaattaggtttttagggtttacaccgagcagccacacctcccgcagcagccatggttctcaaaactgaactatgccgattcagtggtgccaagatctacccaggaaagggcatcagatttgttcgtggtgattctcaggttttcctgtttgcaaactcaaaatgtaagaggtatttccacaatcgcctgaagccttcaaagctc

SEQ ID NO: 12479 - DNA, 391 bp, Glycine max
  Clone ID: LIB3040-061-Q1-E1-F12
ggtgagtgaaagaccacaaacaacaaggttggttcaacttgtgtgaagggattggtacatggataatcttggaggttctagtcgtatgaaagcaattgaggagcttcttagagggcgtgattctgcacaacaacttaagagtgtcatcaatgggacctatgatgatggatcagacatcccatttgctcaacaacttgtgatagaggtgctcatgtccttcataaactccctcgtgttcttgcataacaaccccacttctgaatcacatcatgtcttcaatgttcaagtatgggactctcgcaagtctgatgactctcaagagagcatttgcaaaagctccaccattaacgaaccaagatggtgctacacaagaagaagaactgaacaaaca

SEQ ID NO: 12480 - DNA, 380 bp, Glycine max
  Clone ID: LIB3040-061-Q1-E1-F9
tataacattaagttaaatatcaaatttgtttaattatcaaattttgtaaataaattaatgtataaaaaattctaaataaattataattaaaaaaattcaaaacatacggattgccaatctgtatgttttgaaaagaaaatacgcacatcttcttctccggtgatgaaaaactatcgaacttcatcttatatccgtaaacaacgcacatacaccactggcgataacatactcacaaaaggacgctagtgaaagcaagttacgattagggagtgcagttttacgaaaaaaaggtgctgcagaaattaaaaagctaatttgctatttataactgaaaataccgaacaggacattttcgatattttgaaaaattgttgggtgta

SEQ ID NO: 12481 - DNA, 386 bp, Glycine max
  Clone ID: LIB3040-061-Q1-E1-G11
gaggaagggaggaggcattaggtgtagaaagagcgaaagagagagagatggcgtcggggtggggaatcacaggaaacaaaggtcgctgctacgatttctggatggatttcagcgagtgcatgtctcgctgccgagagcccaaggactgtgctcttctccgcgaagactacctcgagtgcctccaccattccaaggagtttcaacgacgaaaccgaatttacaaggaggagcagcgcaaactaagggctgcttccaggaaaggccaggaggatggggttaatgaacatcatcattagcacctgaagttaattttcaatttaagcttctgaacaattatttttgataaaacgtttgtgatttgcttggatcggtattcctgcatgttc

SEQ ID NO: 12482 - DNA, 366 bp, Glycine max
  unsure (1)..(366): unsure at all n locations
  Clone ID: LIB3040-061-Q1-E1-G12
atctagttcatggcctattagaagtagaaggcgctctggtgggatcctcacgtacagaaaaagattgcagtcagtttgataaggatcgagtgacattgcttcttcggtccgaaccaaggaatcccttaaatatgattcaaaatggatcttattctatcgttgatcagagatttctctatgaaaaatatgaatcggagtttgaagaaggggggggagtcctcgacccacaacagatagaggaggatttttttcaatcacatcgtttgggctcctagaatatggagcccttggggctttctattttattgtattganaggcccaatgaattgggatttccctattgggccaagtcatttcgggacaag

SEQ ID NO: 12483 - DNA, 169 bp, Glycine max
  unsure (1)..(169): unsure at all n locations
  Clone ID: LIB3040-061-Q1-E1-H10
ggttggcagtggaaaatggcgcagcttccgtgcgactccgatggcgtctgcatgctctgcaaactcaaacccagtccctcccaaaccctctcctgtggaacgtgtgccactccctggcancttccgtgtctcccttcgccccctctctccctctctgactcccattggg

SEQ ID NO: 12484 - DNA, 369 bp, Glycine max
  Clone ID: LIB3040-061-Q1-E1-H11
gcccccattacgcacttttcatccttcgatgatacacttagttgcttccaattaagatggttctgctagagaagctctgggatgatgttgtggctggccctcaacctgagcgtggacttggtaagctcagtaaactcaccaccctcaaaactattgatgaatgagaaagtagcaagctgcagaagacgttgtcgatgccgtcgacaccaataaccccgatgactccgacgactccaacgataccgggatcggaccgtaaagctgacaacgtttggaagagcgtcttccatcctgtgagcaactccgccacaaagaccatcggtgctcagatgtttgacaatacacttctcaacactcccactgtctatg

SEQ ID NO: 12485 - DNA, 371 bp, Glycine max
  Clone ID: LIB3040-061-Q1-E1-H12
ggggtaggagaatatattattggccgtttgtaggtctggcaggcttggtgattcttaccagaaagtgaattcaggtcttgatttgtagtcagaaatgcttgtacaatttgaaaaggtcaagcatgtctggtggctttaacttggtgccttcattgaatccggatctacttctgtagcatatataattatacacgttcatttgtcaagtattagactgaatcagttcatagttttcaagtgtagtcaaggatgagatctgctgcaaacttcttattgttcattactgctccttgcaagaacagatgttctttcctgtgacattcatttgctgaaactttattctgctattcttgttgccatttttttaaaag

SEQ ID NO: 12486 - DNA, 342 bp, Glycine max
  Clone ID: LIB3040-061-Q1-E11-A1
gtacggtctagaatcccgggtccaaccaagcctccaaacggcggaaaaaaccaacaaaagggaaaaccaaaccaaaaattggttcattaattgttcggggtcaactgttcctcaaaaatccgtcatcatcatcatcaatcatcaacgttgattgaagaagatgccgatcagaaacatcgccatcggaaggcctgaaaaggctactcaccccgacacgttgaaggccgggttggctgagttcatctccaccttgatcttcctgttcgcccgttcaagttccggcatcgcctacaacaagctcaccgacaacggcgccgccaatcccggcggcctcaactccgc

SEQ ID NO: 12487 - DNA, 286 bp, Glycine max
  Clone ID: LIB3040-061-Q1-E11-A2
aaatcatttaaacacatgttgtttttgtatgcgcacttccaagtgcgcaagtcattgtacaagaacaacagtgcaatgtgtttgaccctatttaaacttcatggttgcgaattgaaggagatttgatttacgggaggagagctctctagggttgaggggaaggctatgaagctcttccccttgctctccatggcttccctaacatttctcatcaactctttcatctatttgcatattttcctcgtgtggttatgtaattggatttatccatttgggggttgatgta

SEQ ID NO: 12488 - DNA, 222 bp, Glycine max
  Clone ID: LIB3040-061-Q1-E11-A4
gaaggctttgcatttcatttgagagagagagcgtcttacctttccattatcaaaatggctgtttccgctatcacaggagccaagctaaccctaaggataaggttggcgatacctccttcctctcccaagcgctctcgaaccgtcgcaatggccgtatccgtcgaccccaagaccgacaacaaactcaatcctaccaagtccgaagaagctttcgctgctgcc

SEQ ID NO: 12489 - DNA, 367 bp, Glycine max
  unsure (1)..(367): unsure at all n locations
  Clone ID: LIB3040-061-Q1-E11-A5
gattgttggcttgtgctctgctcgtgcctctanggttatcatatctccatttccatttcctctctctcagtttccaagaatcttaagctatgggaaagtcttacccaaccgtgagcgctgattaccagaaggccgttganaaagcgaagaagaatctcaaaaggttcaacccctaaaaaaaaatgccctcctctaatgctccgtttggcatggcactctgctggaacttacgacgtgagctcgaagaccggtggtcccttcggaaccataaagcatccctccgaactcgctcacggcgctaacaacggtcttgacatcgctgttaggcttttggagccactcaaagcggagtttcctattttgagct

SEQ ID NO: 12490 - DNA, 397 bp, Glycine max
  Clone ID: LIB3040-061-Q1-E11-A6
cgggcccaaccaagcctccaacgggtggcaaaagacgacagaaggggataggtgtgagaaaacgacagaaggggtgggtcacattatcacgaaagtgtaatttgtgataatcacaagaatccacgatgacgttttctgcgaatcagtcagaatgcctgcagtctcgtcagattattagaggatgttctgagcagaatcaaagattccttcgtgagactttctccacgatcgttagattacactccacttatttggtcagttttaagttatgggtgaggtagagtatattaaagtttgatgcgttgttaaaccattagttatttcaggggacgccgtttgtcgcgtaagttttggaaattatgtatcttgtggtgggattatccgtatctaaaacaat

SEQ ID NO: 12491 - DNA, 311 bp, Glycine max
  Clone ID: LIB3040-061-Q1-E11-A7
aatcatcaaaaacagccacagcacagcacaggcctcatcagttttgtgttgctgttcctgaaacatacacagatcaggtagcaggaggaggaggagttgcactttgctcaactctcctcactcttttcttctaacagatagatagatagatacaatattgagaaaaaaaaagggttcctgaaacttaatccccttcttctaaaccctctcaagctacccctaagttctgcaactcattcactactaggatatttgctgatgttgctggtgacattacaattgtcgttgatggcgagtcttttcttctgcat

SEQ ID NO: 12492 - DNA, 387 bp, Glycine max
  Clone ID: LIB3040-061-Q1-E11-B4
gccgctgagctccctttctcctcggtccacagagacaaaatgtaagacaggtgccaacagttcatcacgaaagaaaggactagctgagccgagatcactaactaaaacgaatttaatactaatcgaaaatactaatagaatagaaatagaactgtcttttcatatagatatcccttcaacacaacataggtcatcgaaaggatctcgaagacccaccaacgcacgaaagccgggatctttcagaaaatggattcctattcgaagggtgcataaccgcatggataagctcacactaacccgtcaatttgggatccaattcggttccttaagaggtatcgggaaggaattttggaatgtaataatatcgattcatacagatacagaaga

SEQ ID NO: 12493 - DNA, 334 bp, Glycine max
  Clone ID: LIB3040-059-Q1-E1-B4
ggaatgttttttttattattgtgttgtttgtttggtttaattcttttgaaccccaatcatctaaacatgacattttcttcataatttctgaaccctggaggcttcagtttactgttgattttcgtgttatgcttctaccaatgccataagcttgaagcaggaactaaatatggctgacttgttggaatggtcaaagcaagataagaaacgaatgcttcatgtcgtctaccgtgttggtgaccttgatcgcaccatcaaattttacacagaatgtttaggaatgaagcttttgaggcaaagagatatcccagaggagaaatatgctaatgctttt

SEQ ID NO: 12494 - DNA, 339 bp, Glycine max
  Clone ID: LIB3040-057-Q1-E1-B3
cacgcgtcaatccaggcgtcagaagatacataggggagaggagggggttagtgtggtagcttcactaagtcgaaaagtctctcgatagataaatggcatcaaatcgccggcttcatttgagaggtcaactttccgttcatgtctcgatctccgttgttcatccagtcacgggtgtcatctccacacaggctcggtcgccgttcagtgtcgctgccagtaaatctcgctcgcgaatccagactcaggtatccctttgaattgaccgtttgtgtgcaatccatgcaaccgtaccacaacgctcctgcttctgatgtgatgacttcgatgccaaccttctcg

SEQ ID NO: 12495 - DNA, 58 bp, Glycine max
  Clone ID: LIB3040-057-Q1-E1-B4
ggagacctcaggtcaggcggggctacccgctgagtttaagcatatcaataagcggagc

SEQ ID NO: 12496 - DNA, 391 bp, Glycine max
  Clone ID: LIB3040-057-Q1-E1-B5
gatgccgaaaagtagtaccaagatggcttcagttgtgtatctcctctttggcttccatctcattgttatcatgtcaagttccttacccgcaactagtgaagtgtttgcaaaacagtatccatccacagaacccgtggaagaaaaactcacccaactccacttctatttccataacaacataacgggggaacacccaactgctatgaaaactgttttgcctcctaaggggtccattcatggttttggggctacttacatgatggatgaccctctaactgaaggaccaagtccaacttcaaagcttgtgggaagatctcagggaatatacgctttggcttcacaacatgagcctgggttgctcatggtgacaaattttctcttcactttgggc

SEQ ID NO: 12497 - DNA, 395 bp, Glycine max
  Clone ID: LIB3040-057-Q1-E1-B6
gactcaccacttcaaaacactcataacacaaagcacaaagcaaagctcatccttgagttaaaaaatggcagcagcttcttccatggctctctcatccccatccttggctggcaaggccgtgaagctgggcccatcagccccagaagtgggaagggtgagcatgaggaagaccgtcaccaagcaggtctcctcaggaagcccatggtacggcccagaccgagtcaagtacttgggcccattctctggcgagcccccgtcctacctaaccggtgagttcccaggcgactacggctgggacactgctgggctttccgcagacccagaaaccttcgccaagaaccgtgaactcgaagtgatccactccaggtgggccatgctcggagccttgggctgcg

SEQ ID NO: 12498 - DNA, 386 bp, Glycine max
  Clone ID: LIB3040-057-Q1-E1-B7
ggaggaactggttctggacttggttcccttctgttggagcgtctctccgttgattatggcaagaaatccaagcttggtttcactgtctacccctcccctcaggtctccacctccgttgttgagccatacaacagtgtcctctccacccactctctcttggagcacaccgatgttgctgtccttttggataatgaagccatctatgacatctgtaggcgctcccttgacattgaacgtcctacctacaccaacctcaaccgtcttgtttctcatgtgatttcttcattgactacttccctgaggtttgatggggccctgaatgtggatgtgactgaattccagaacaacttggtcccatatccgagaatccatttcatgctttcctc

SEQ ID NO: 12499 - DNA, 291 bp, Glycine max
  unsure (1)..(291): unsure at all n locations
  Clone ID: LIB3040-057-Q1-E1-B9
gtaaattttacagctcttagagaaattaagctgctaaaagagctcaaagatccaaacattgttgaattgattgatgcattcccacataaagggaatctgcatcttgtttttgaattcatggagacggacctagaagccgtcatacgagaccgaaatatttttctttcaccatctgatacaaaatcctacctgcaaatgacactaaaaggtcttgcttattgccacaagaaatgggttttgcatanggacatgaagccaaataatttattgataggatctaatggacagctg

SEQ ID NO: 12500 - DNA, 359 bp, Glycine max
  Clone ID: LIB3040-057-Q1-E1-C1
gatgccgaaaagtaataccaagatggcttcagttgtgtatctcctctttggcttccatctcattgttatcatgtcaagttccttacccgcaactaatgaagtgtttgcaaaacagtatccatccacagaacccgtggaagaaaaactcacccaactccacttctatttccataacaacataaccggggaacacccaactgctatgaaaactgttttgcctcctaaggggtccattcatggttttggggctacttacatgatggatgaccctctaactgaaggaccaagtccaacttcaaagcttgtgggaagatctcagggaatatacgctttggcttcacaacatgagcctgggttgc

SEQ ID NO: 12501 - DNA, 129 bp, Glycine max
  Clone ID: LIB3040-057-Q1-E1-C10
gtacgtccgcgacacagcaaccaccttctgcgtacctcgtttgccgccgccgaccaccacaacgcaccttcaccttcacctcacctaaccgttcacaacgaaccaacaaacctgagacaatgccgcacg

SEQ ID NO: 12502 - DNA, 305 bp, Glycine max
  Clone ID: LIB3040-057-Q1-E1-C11
gattcacaactttacccactcttcattctagcaattcgaattcccaatccaaaaccctaataccttcaaagaacctagtagtgaatcagtgatggcacctaaggcagagaagaagccagcggagaagaagccggtggaggagaagaagtcgacggtgggagacaaggctccggcggagaagaagccgaaggccggaaagaagcttccgaaggagggaggagccggcggagaaggggggaagaagaaaaagaggaacaagaagagcgtggagacatacaagatatacatattcaaggttctgaagc

SEQ ID NO: 12503 - DNA, 387 bp, Glycine max
  Clone ID: LIB3040-057-Q1-E1-C12
gacttcacaactcaaactgcttcattgcataattgcagataagatcaacccttctaccttcagattcgcgggaagatggcatcacttcatgctaatgtgacatcagttgtttacaacagtggcaaccgtgtttctcaatcgaaatttgcaagctcttccttcttgtctgggttcgatgttgttggtcgtgcttcaagtgcttggaagaaggaacttgtcccatcttccatttccttggtgcctagagccaccctaacatttgatcccccaactaccaattcagacataaccaagcaaaagaagcacactcttgaccctgcttctccagattttcctcctcctccctcaatttgagcattgctttcaaaagagcaccaacgaacacag

SEQ ID NO: 12504 - DNA, 77 bp, Glycine max
  Clone ID: LIB3040-057-Q1-E1-C2
gccggtttcccgaacgatttgatggtttggaatgcatttcccaagcaacgagtcttcggttcgaaaccagcagagag

SEQ ID NO: 12505 - DNA, 180 bp, Glycine max
  Clone ID: LIB3040-057-Q1-E1-C3
tctcatgcccagcactggaccaagcgggaagcgcagctgggggatagcctagtatcctttaaactcccagaaattattactgttgtgtctttaaagtaaatatcggatgcctcatctaccctaaagggggttcgagtaagcgaacgccaacccgtagagagcgcatacttgtgtcttccc

SEQ ID NO: 12506 - DNA, 393 bp, Glycine max
  unsure (1)..(393): unsure at all n locations
  Clone ID: LIB3040-057-Q1-E1-C4
gacagatactctttacaattgcttgaacctctcagaagcaaatgaggattattcacagcctcgcatgtttggttctcaccttcatctccttcaatccttgtaaagcagaacaagcacaaactattttgaattccctcagcattgaccaaatcctacagaaaatatatgaatggggaaatggtgcacaagggttccaagaaggccagattcaaatttcaggccctatagtggtggcaggagtgctgtgtttcatagcttcttcaatatctagtgctggtggaattggtggtggtggacttttcttaccaatattaactattgtggctggcctagacctcaaaacagcttcaagtttgtcagctttcatggtcacagganggtcaattgcaaatg

SEQ ID NO: 12507 - DNA, 388 bp, Glycine max
  Clone ID: LIB3040-057-Q1-E1-C5
ggagaaagaaagaaaagatgggaatgacaccgaaaatagctccttcgatgctctcttccgacttcgccaatttggcttccgaggctcagcgcatgctccacttcggcgccgattggctccacatggacatcatggatgggcattttgtccccaatttaactattggcgctccagttattgaaagtttgagaaagcacacaaaggcatatttggattgtcaccttatggttacaaatcctcttgattatgttgaacccttggcaaaagctggtgcttctggttttacatttcacgtagagacatcaaaagataactggaaagaacttatccaaagaatcaagtcacatggcatgattcctggtgtagcattaaagcctgggacccccgt

SEQ ID NO: 12508 - DNA, 377 bp, Glycine max
  Clone ID: LIB3040-057-Q1-E1-C7
gaaatttgtgagaatcaagataggttgagtgttcaagatgaattatgtgacaacgcaagtgataaatcattgatcttgctgaagtctgctgataattttgacttgcgaaatgaattaaatattgaagatagggagtctaataaatctgacagccaagtgaatggaagccctgacgttattgataaactgagttataattctgaatcatgtaatgactcaagtgacacttcagaatcatgtgataaagataaagtatttaccaatagtggggagtctagtagtgactcacttgatgttgctgaaattcttagaaagctaagtagtaagtttaattttccccatgaaaaaaattggtgaagcaaggaaaaataagtttt

SEQ ID NO: 12509 - DNA, 390 bp, Glycine max
  Clone ID: LIB3040-057-Q1-E1-C8
gagaatcaatctctccctttcacctttcttcatagcctaccacttttctgctttcatctactctcacttctcttcacacactgagacacacagagagagaaaaataaagggtgtgatgggtgtcttactgagtgttttctttttataatgaacaaagaactgcacaccctcttcttcaccgaagaagaagatggcaattcagcaccacaatgaccaactagagcataatgaaaatgtctcatctgtccttgatgccctttactgtgacgaaggaaagtgggaagaggaagaggaggagaaagaagaagaagaagatgaaggtgaaaatgaaagtgaagtgacaacaaacactgcaacttgtcttttccctctgctcttgttggagcaaga

SEQ ID NO: 12510 - DNA, 303 bp, Glycine max
  Clone ID: LIB3040-057-Q1-E1-C9
gatcctcatttttctgatccttctctacacacgccccaggaccactgggctccattatattatcagttattcaacgtggcaatagcttattgggcatttcatgaacgagataagattacatggtcctactaccacaatgccctagtttgtgatttacgttccatatattcatcctttggttcattctttggttcagtattcagattacattgcaaaaatggcatcattcaccatgacagcttccatccttggcagcccagccgtcaccaaccggtcggcagtagcaacgcagaggagatcact

SEQ ID NO: 12511 - DNA, 326 bp, Glycine max
  Clone ID: LIB3040-057-Q1-E1-D10
ggggtcaccgattgatacacccttcttcgttcctcactcaccagccacagattctctcttctctattcagtaaacggctgttttgtatacgagctgtcccggtctcagcctctacatcccaaaacatcaaaacaactggttgggctccttgtatggcttcttcctcagttggtagaagagctacatattcaacacaatctgtatcgacaaatgagccagttgtatctgtagattggctttatgataacctgaaggagccagatatcaaggtactagatgcttcgtggtacatgccggatgagcagaggaatccaattcaagaatat

SEQ ID NO: 12512 - DNA, 266 bp, Glycine max
  Clone ID: LIB3040-057-Q1-E1-D11
gaaataaattaaaactaaaggaaaggccacatctaacgaggagcacacatcttagagaagaaatgaagcccatctttgccttgttcgtagtcttgtcgcttctcctggttgccaacatcaacttaagccatgcaagaaaagacctgggggaatattggaagaaaatgatgaatgacgaacccatgcctgaagcaattaaagatcttattcaagatcaacaggtacaagatgcaacagcagatcattttataaggtacttcgatatg

SEQ ID NO: 12513 - DNA, 330 bp, Glycine max
  Clone ID: LIB3040-057-Q1-E1-D12
gggacttggtcgtcaacacagtctaattaatatctttttgctccttcgcttatgaatcttcttcttcttcttcttgttcctgcaacgcactgaattcgatcaatcaatccatcttcaattgctttgtttcgatcggaggaaaatggccgatcagttatcgaagggagaggaattcgagaaaaaggctgagaagaagctcaacggttgaggcttgtttggctccaagtatgaagatgccgccgatctcttcgataaagccgccaattgcttcaagctcgccaaatcatgggacaaggctggagcgacatacctgaagttggcaagttgtca

SEQ ID NO: 12514 - DNA, 390 bp, Glycine max
  unsure (1)..(390): unsure at all n locations
  Clone ID: LIB3040-057-Q1-E1-D3
ggacaaccagcaagtgagacattttttttttctcttttctcttaagccatataccactttggtcatactcataatcctttttcttcattttcactaagtccaccaacaccaagtcatggctcaaagacagatctttgctcatgtggtgattttgttgcttatggtcttagttggagccaggtttgctaaagcagaaggaggaggagaagctgctgataggattttggaactccctggtcagccaaaagtgtcatttcagcagttttctggctatgttactgttaacaaggttgctggtagagctctcttttactggctcactgaagctgcccaaaatcctctcaccaaacctttggtcatttggctcaatggaggtccangatgttcatc

SEQ ID NO: 12515 - DNA, 144 bp, Glycine max
  Clone ID: LIB3040-057-Q1-E1-D4
aatgcatatcgaccaaaacaactacaacaaccaacaaggagtttagccaaaacaaaacgaagattaatgtgtgaagaaaaaaacaacgaacgaaagaaaaagtaaacatggataagattagaattttaataattatgttggatg

SEQ ID NO: 12516 - DNA, 379 bp, Glycine max
  Clone ID: LIB3040-057-Q1-E1-D5
gtgaacatgtgtgcacagaaccgaataactgctgaaattcatcccacagaatctgccaactccgaaatgaagttatcatccggagaacatcccgggaagaaacacatcattttgaacatcaggagcaggtttgaagagttcctctccaagcctcaaccagtagagcctttttcatataaaaatcttgctgcagtttcaccttcaacaccttctaaatcctatgaaatgaggcaaattcctggcttgaattctaggaagttctcgaaggagaacgattacgagtattccgtcagggtagtcaaatggttagagcatcaagggcatatagatgaaatcttcagagtaaggtttctcacttggttcagcctcaaggctactc

SEQ ID NO: 12517 - DNA, 247 bp, Glycine max
  unsure (1)..(247): unsure at all n locations
  Clone ID: LIB3040-057-Q1-E1-D6
gcacttcaattgcaatcaaatgagttcattctctttgcgcagttccctacctctcctttcaagatgcagatcttcgtcaagaccctcaccggaaagaccatcaccctttaggtggaaagctctgacnacatcgacaacgtcaaggccaagattcacgacaaggaacgaattcccccgggataacaacgtctcatcgttcgcggaaagcagctcgaggacgggcggtacctcgccgactacaacatcc

SEQ ID NO: 12518 - DNA, 363 bp, Glycine max
  Clone ID: LIB3040-057-Q1-E1-D7
ggaagactatatcccccttcggtggaggctcaagccagacagcgtgcgatctctgcgacggacgcccaaaaggatttacgcatatctgaacgtacctgcgacgtcgacgcgcggcaaaaatgacagtcagattcacttcagcggccgtcgtgtcacaacgtcataaaggggatcatcctgatctttggcgccataaactccttgcaacgtatcgcacttgcgtgagcaggagttggaggaaagtggccagcatcaatgtgatttctcagcatatgcgtctcctgaagggctacatgggaggctcgctgtgtctgagcattgatcgctgacgttacgctgtgtactcggatcgtgaccgctttc

SEQ ID NO: 12519 - DNA, 293 bp, Glycine max
  Clone ID: LIB3040-057-Q1-E1-D8
ggagtgatccttctacactaactaaagccgagcagcgagagagagaaaccctagcaaaaatgccggctggtcacggtttgagatcccgcaccagagattccttctctcgtcccttcaggaagaagggtaccatcgccctcaccacatacctcagaacctaccacgtcggcgattatgtcgacgtcaaggttaacggcgccgtccacaagggaatgcctcacaagttctaccatggccgcaccggtcgcgtctggaatgtcaccaaacgtgctgttggggtcgaagtcaacaag

SEQ ID NO: 12520 - DNA, 348 bp, Glycine max
  Clone ID: LIB3040-057-Q1-E1-D9
gacccaagcgtcagtaggtgcgagaaaacaacacaaagggagttctcttcacacctttgttcactcttcttctcttgcggctacggttttagcgcagcttcttctacatttaaggaagatgggtaacgaaaatgttcacatcagtattgtggtcattggccatgtcgactctgggaaatccactaccactggtcacctgatttacaagcttggaggcattgacaagcgtgttattgacaggtttgagaaggaagctgctgacatgaacaagaggtctttcaagtatgcctgggtgctggacaaacttaaggctgatcgtgaaagaggaatcaccattgagattgcttt

SEQ ID NO: 12521 - DNA, 396 bp, Glycine max
  Clone ID: LIB3040-057-Q1-E1-E1
tggggaatcccattttaattctcaagtccaagcttgggagacagagaaagagaaagagaatggacgccattgattctgtgttcgatccgctgagagaattcgcaacggacagcgtgaggctcgtgaggcgctgccacaaagccgatcgcaaagaattctccaaggttgccgtccgtactgcaattggtttcgtcgtgatgggattcgtcggtttcgtcgtgaagctcattttcattccaattaacaacatcatcatcggatctggttaaattaagggaactactatcgccaaagtaattcaagttgtcaagcataaggaggcagacagatttccctcatcaatagatcattctatgccaccaatcttagatccattttcacttttgtcattttcct

SEQ ID NO: 12522 - DNA, 354 bp, Glycine max
  Clone ID: LIB3040-057-Q1-E1-E11
ggaacgaactaaggcatcgttttcatttttgttttttgttttttgttttttgaaaaagggtcttccccgccaccaaaccctagctagcgctggaaaaatgccgagggaaatcatcactctccaggttggccaatgtgggaatcagatcggcatggagttctggaagcagctctgcctcgaacacggcatcagcaaagaaggcatcctcgaagacttcgccactcaggggggtgaccgtaaagacgtgttcttctaccaagctgatgaccagcattatataccacgggctctcctgattgacttggagccaagagtgattaatggaattcaaaataattactaaccgaatcctca

SEQ ID NO: 12523 - DNA, 331 bp, Glycine max
  Clone ID: LIB3040-057-Q1-E1-E12
ggtgtagtataggattctcttctttattccttttgtaatttcattcattcttaatctttgtgaaaaataatgttcatcgagaattttaaggttgagtgtcctaatgtgaagtacaccgagactgagattcagtccgtgtacaactacgaaaccaccgaacttgttcacgagaacaggaatggcacctatcagtggattgtcaaacccaaatctgtcaaatacgaatttaaaaccaacatccatgttcctaaattaggggtaatgcttgtgggttggggtggaaacaacggctcaacactcaccggtggtgttattgctaaccgagagggca

SEQ ID NO: 12524 - DNA, 283 bp, Glycine max
  Clone ID: LIB3040-057-Q1-E1-E2
attccgaatcgacccacgcctccatccggtcgtaagagaacacctcagggggaatactgagtgacaacggtaagttaattcatcagtgaccacggtagcgtagctgatcgatctgcattagatctctccggtatctgaagcgacagacttcaatcggagatctgcatgcatggcccgagtcaccagattcccattctccaacacatccttcaggatccgttcggtctgaccattcgtctgatcggatcaggagtcgtcgatttcggcggtaggctaattttca

SEQ ID NO: 12525 - DNA, 362 bp, Glycine max
  Clone ID: LIB3040-057-Q1-E1-E4
tcattgggtttcatctgatggtgtttctgtggagttggatgagtttcttaagctttctatggagatgaagaagccactgtcttgcaaggctgtgcctaaggtttctgtttacgtttatgtgtgttgttgggttgagttggtttggtttgtctgcttacgtttgtggatgttgttcccaaggctgtgcctagggtttctgtttaggtttatgtgtgttgtttggtttgtctgtttacgtttatggatgttgtttggttgagttggtttggtttgtgttaactgctaagtttagttcaagaaaagtatggtttagagcacctttttactaatcgctaagggttgttattccgtgtacggtttgt

SEQ ID NO: 12526 - DNA, 370 bp, Glycine max
  Clone ID: LIB3040-057-Q1-E1-E5
ggagaccgcgaagaagaagatggagatgtatcagatctggagcaggagaatagcgttgggagcgttcgcgtttgttctgcttttcctatcggcctcagcatacgacgtcgttgtgctctctgagtataacttcgagaaggaggttggtcaggacagaggagctctcgttgagttcgatgctccttggtgtggacactgcaagaagcttgctccagaatatgaaaagcttggtagcagcttcaagagagccaaatctgttttaatcggcaaggttgactgtgatgagcacaagagtttgtgcagcatatatggagtctctgggtacccaacaattcagtggtttccaaaaagatctcttgaacccaaaaag

SEQ ID NO: 12527 - DNA, 401 bp, Glycine max
  Clone ID: LIB3040-057-Q1-E1-E6
gagcaaatagaagagcaaagagagtgagaaaagaaggaagaagaagaagaagagatggcaaatgaactacccgtcaaagcttttggttgggctgcttcagacacttctggcacccttgccccttttcatttctccagaagggaaaatggcgtcgatgacgtcactctcaagattctcttctgcggggtttgccactctgatctccacactctcaaaaacgactggggtttcaccacctaccctgtcgttcctgggcatgaaattgttggtgttgtgacagaagttggaaacaatgtgaaaaacttcaaagtgggtgataaagttggagttggtgtgatagtggagtcttgcaaggaatgtgaaaattgccaacaggatctggagaattactgtccccgccc

SEQ ID NO: 12528 - DNA, 366 bp, Glycine max
  Clone ID: LIB3040-057-Q1-E1-E8
ggcaaaagccctctcttacttccatacgcggcggcttcttcttccgtttttgtctatcggcgtgaacaatggcgacttacgctgcgatgaagcccacaaagcccggcttggtagagccccaagagcacattcacatgataaggataaccctttcctccaagcatgtcaagaatctcgacaaggtttgtgcggacatggttcccggtgtaaaggacatgcgccgcagggttaaaggacctgtcacgatgcacacaacagttcttctcatcacgaccaggacatccccttgtagtgaatgtagcaacatatgggacagattttaacttcgtgtgcaaattagagtgattgacctctacagtttcccac

SEQ ID NO: 12529 - DNA, 132 bp, Glycine max
  Clone ID: LIB3040-057-Q1-E1-E9
tccaccatgtggtgttcttctatgcacttgctaattcactaggaaaaaaacattataagcctaacccaccatctcactgcatacacacaacaataatgcaaaccccacaacaaagttcatcgaatcaacccc

SEQ ID NO: 12530 - DNA, 354 bp, Glycine max
  Clone ID: LIB3040-057-Q1-E1-F1
gaattcattttgaattgacaccgcggagagtttgcagctgcatcatcgatcatcgtcacctcatggacggacaccattcacaagacccgaagcacagccctgctgacatgactgcctttgtgcaaaatcttctccagcagatgcaacataggttccagacaatgtccgactccattgttacaaagattgatgatatgggaagtcgcataaatgagttggaacaaagcatcaatgacctaagagcagagatgggagtggagtcctctccatcacctgcgacccctgctaagccaacagaggaaatcaccatagaagagggttcagcttaagtggcgtgttctgatttcagttgct

SEQ ID NO: 12531 - DNA, 325 bp, Glycine max
  Clone ID: LIB3040-057-Q1-E1-F10
gattggacacattcttcagcgactgcgtttttggatcggaacctcttctgcggcgtagcaatgggacactccaacgtttggaactctcacccaaaaaactacggtcctggttctcgcacttgccgtgtgtgtgggaatccacatggactgatcaggaagtatggccttatgtgctgcaggcagtgcttccgtagcaatgccaaggaaattggtttcatcaagtatcgctaaaagagcagttgtcaactacggaccaatattgtgttctggcactaagatgttttgaggatgttatgtttgaagaaacttgagactttcctttttc

SEQ ID NO: 12532 - DNA, 153 bp, Glycine max
  Clone ID: LIB3040-057-Q1-E1-F11
gacagaagcacaccacaggaactagaaaatccatacaatcttcaccaccagaaagaaaataatggcaatggccagtgcaacaactctagccacaatcactgttgtggcagctagccccagtgttggcagcataaggagtgggaagatgaatgt

SEQ ID NO: 12533 - DNA, 322 bp, Glycine max
  Clone ID: LIB3040-057-Q1-E1-F12
ggtctagcccgccgagaaaaccctaattcgctcgcagtcacccaagaggcgaatccttaccattgctcgagatgggtgaagaagtgaaggccgtggttccagagtctgttttgaagaagcagaagagagaggaggaatgggcgttggccaagaagcaagacctcgaggctgcgaagaagaagagagccgagagccgcaaactcatctacaacagagctaagcagtacgctaaggagtacgatcaccaggagaaggaattgattcggttgaaacgcgaggccaagctgaaaggtggattctatgtcgatccagaggctaagct

SEQ ID NO: 12534 - DNA, 385 bp, Glycine max
  Clone ID: LIB3040-057-Q1-E1-F2
gagcaacagcagcattcactgaaagcactcagtagggtttgcggtttcagagtttgtgacgcacgcatccatggccaccaccaccaacgccgccgcagccccgccgcgccagctctcccagaaggaagccgacatccagatgatgttagccgccgacgtccacctcggcaccaaaaactgcgacttccaaatggaacgttacatcttcaagcgccgcaacgacgggatttacattattaaccttgggaagacatgggagaagcttcagttagcagctagggttattgttgcaattgagaaccctcaggatatcattgttcaatccgcaaggccttatggtcaaagagcggttctgaagtttgctcagtacactggtgctcatgct

SEQ ID NO: 12535 - DNA, 371 bp, Glycine max
  Clone ID: LIB3040-057-Q1-E1-F3
gaagcaaaaccctaatccctctttcttcctcttcctcagtactgcgattttcgattctcttctctgcaactatgcctaaccctaaggtcttcttcgacatgaccatcggcggtcaacctgccggccgcatcgtgatggagctctacgccgacgtgactccgagcaccgccgagaacttccgcgcgctctgcaccggcgagaatggcgccgggcggagcggcaagccgctccactacaaaggctcgtccttccaccgcgtgatcccgaacttcatgtgccagggcggcgacttcaccgccggatacggcaccggaggcgagtcgatctacggcgccaagttcgccgacgagaacttcgtgaagaagcacact

SEQ ID NO: 12536 - DNA, 391 bp, Glycine max
  Clone ID: LIB3040-057-Q1-E1-F5
gaagcaaaaccctaatccctctttcttcctcttcctcagtagtgcgattttcgattctcttctctgcaactatgcctaaccctaaggtcttcttcgacatgaccatcggcggtcaacctgccggccgcatcgtgatggagctctacgccgacgtgactccgagcaccgccgagaacttccgcgcgctctgcaccggcgagaagggcgccgggcggagcggcaagcccctccactacaaaggctcgtccttccaccgcgtgatcccgaacttcatgtgccagggcggcgacttcaccgccggaaacggcaccggaggcgagtcgatctacggcgccaagttcgccgacgagaacttcgtgaagaagcacactggtcccgggatcctctccat

SEQ ID NO: 12537 - DNA, 401 bp, Glycine max
  Clone ID: LIB3040-057-Q1-E1-F6
gaggtattggtgggtgaaatcaaaaaccctagccctcactctcatcactttttttgagctatgtttcaagagagttagttagggataatagggcagggaagaataagagggatgtacaaagaacgagagcgagttggtgtttctgtttccgcttccaaatcggaggatcggaagcgaatcaacgacgttctcgataagcacttggaacgatcctctccttccacttctcgccccatcacctccgcctccaagaattccaacctccaagtggaggaatctgaaacggagagtgaagagtctgatgttagtggctctgatggggatgacacctcttggatctcgtggttctgtaatctcagagggaatgagttcttttgtgaggtggatgatgattacataca

SEQ ID NO: 12538 - DNA, 96 bp, Glycine max
  Clone ID: LIB3040-057-Q1-E1-F7
gaagggggcagaaaagtagtaccaagatggcttcagttgtgtatctcctccttggcttccatcacattggaatcacgtcacgttccctacgcgcaa

SEQ ID NO: 12539 - DNA, 299 bp, Glycine max
  Clone ID: LIB3040-057-Q1-E1-F9
gatcactagaagtgttggatgcatttctatttctaactaattattgtgcttattattattgttgagaaagaaaagaatggcaagttaataaaattctttgagttgaacacaggggccaagattccttctgttgggttaggcacttggcaagctgagcctggtgttgtagccaaagctgtcaccacagccattctggttggatacaggcatattgattgtgctcaagcgtataacaatcaagcagagattggttctgctcttaagaagctttttgatgatggtgtggtgaagcgtgagga

SEQ ID NO: 12540 - DNA, 383 bp, Glycine max
  Clone ID: LIB3040-057-Q1-E1-G1
gacatgcccatcatcaaagtttcttcctttctctgctctttgtcttctctgacacatttggggccttgttgagtgtgtttttgcaagagggtatggcgaaggacgttgaggttgctgagcgtggctccttctctgggaaggactaccaggaccctccaccagcaccactcattgatgctgaggagctcacaaagtggtccttttacagggctcttattgctgagttcattgccactttgctcttcctctacattactgtgctcacagttatagggtacaagcaccagacggatcatgctgatgcgtgtggtggggttggcattcttggcattgcatgggcctttggtggcatgatcttcatccttgtctactgcactgctggg

SEQ ID NO: 12541 - DNA, 291 bp, Glycine max
  Clone ID: LIB3040-057-Q1-E1-G10
gaacatgccgaaaagtagtaccaagatggcttcagttgtgtatctcctctttggcttccatctcattgttatcatgtcaagttccttacccgcaactagtgaagtgtttgcaaaacagtatccatccacagaacccgtggaagaaaaactcacccaactccacttctatttccataacaacataacgggggaacacccaactgctatgaaaactgttttgcctcctaaggggtccattcatggttttggggctacttacatgatggatgaccctctaactgaaggaccaag

SEQ ID NO: 12542 - DNA, 63 bp, Glycine max
  Clone ID: LIB3040-057-Q1-E1-G12
agtcaattcgaatgaaaagaaaaaggttaagcatcaacacacacaacaaataagttgtatgtt

SEQ ID NO: 12543 - DNA, 348 bp, Glycine max
  Clone ID: LIB3040-057-Q1-E1-G2
gaaactacatttcaatctttaaagtttaaacaattctgcccggtggggcacttaaggtaggcgatcaaaccaagcgtgcacagctaaaccctaacgttagggtttaaatgtcctctcaattccctccaccgagaaagcatctttctctaaattgaatgatttcgtgtgtattattctctcaagattggtgttggtgaaattttgttgttctctgttcaatcgggccttattgctcactgcgccttcaaatccatggtcgtcagtttaccatggatccctgtcatcacattgaacatcaagaagacgagtgggacactgatggacttgtgattccaagtttgggaattg

SEQ ID NO: 12544 - DNA, 373 bp, Glycine max
  Clone ID: LIB3040-057-Q1-E1-G3
gctcttctctcgcgtcgctccgcaccagtttcaccgcacgaatatcttgttgtttggagcgatccgagaaaaactctgtaaacatgttggtttaccaggacctccttacaggtgatgagcttctctctgactccttccgttacaaggaaattgagaatggaatgctgtgggaagttgaggggaagtgggttgttaaaggagcagttgatgtagacattggtgcaaacccttctgctgagggtggaggagaagatgagggagttgatgatgcagctgttaaggttgttgacattgttgacacattcagacttcaggagcaacccgcattcgataagaagcagtttgttaccttcatgaagaggtttatcaagaa

SEQ ID NO: 12545 - DNA, 207 bp, Glycine max
  Clone ID: LIB3040-057-Q1-E1-G4
gctgtgggaccacgttggggtcagttagatttcactccctcaattttcaacactgtcgcacagtgggaatcttcgtgtgcgcaatctgctgaagctttcaaatatactcccgcacgtttcggttcatatgtacgcgctgtttcctcaacagtgtgtgcctctatctcttctttgaaggaattcatctgtattatttgttaaatgatt

SEQ ID NO: 12546 - DNA, 371 bp, Glycine max
  Clone ID: LIB3040-057-Q1-E1-G5
ggttgtcaagcctgccgagaaaaccctagttcgcttgcagtcacacaagaggccaatcctattcatagctcgagatgggtgaagaagtgaaggtagttgttccagaatcagtgttgaagaagcgcaagagggaggaggaatgggcgttggccaagaagcaagaactcgatgctgccaagaagaagagagccgagagccgcaaactcatctacaacagagctaagcagtacgctaaggagtacgatcaccaggagaaggaattgattcggttgaaacgcgaggccaagctgaaaggtggtttctatgtggatccagaggctaagctgttgtttattattcgcattcgtggtattaatgccatggaacccaaa

SEQ ID NO: 12547 - DNA, 392 bp, Glycine max
  Clone ID: LIB3040-057-Q1-E1-G6
gagtctcagcttcacattttaaccctaggatcctttctcctctcatccacctgaagcaaaaaatgagccggccaatggaggaagataatgaggaagaggagttcaacaccgaaccgctatttgtactcatgatgagtgttaaaaataatactcaggtactgataaattgtcagaacaacaaaaagcttctgggtcgtgtaagggcttttgacaggaactgcaacatggttcttgaaaatgtcagggagatatggactgaggtgccaaagactggtaaaggaaagaaaaacgcctagccagtcaacagggatagattcatcagcaaaatgtttctccgtggagattctgtcaccattgttcttaagaaccccaaatgagattctcttatcaac

SEQ ID NO: 12548 - DNA, 382 bp, Glycine max
  Clone ID: LIB3040-057-Q1-E1-G8
ggctgtgagtgagacaccgatagatagagagcgcggcatagcctagacctatctttcttctctctctgtgtgtgcgcttcaacggcaaccagaagcagccatggccactgcaaggactgtgaaggatgtttcacctcatgagttcgttaaggcgtactcctctcacctcaagcgatccggcaagatggagctgccagagtggactgatattgtgaaaactgcaagatttaaggagttggctccttatgatcctgactggtactatgtcagagctgcttccatggcaagaaagatctacttgagaggaggacttggtgttggtgcctttcagaggatttatggtgggagcaagaggaatggtagtcgccctcctcatttttgc

SEQ ID NO: 12549 - DNA, 323 bp, Glycine max
  unsure (1)..(323): unsure at all n locations
  Clone ID: LIB3040-057-Q1-E1-G9
ggacggttaaagctttctcatggctactacctttaccctcgcaacgctgtcactaccgtcgtcttctcgtgtttccattggcggagctccgattcgccaccaccgttctccgaaccggatcgggttgttgccgcctctcaaatgctcctctttggagccggaaaccgccccgcctcctcccttcgactggactcgcaagttgatcgccggtgtcgccggcgtcggattcctcganacctcgtnactcacttaccttaaactcaacggcgcagacgccttttgccccgtcggcggcggcacctgctctaaaatactcgacagtg

SEQ ID NO: 12550 - DNA, 343 bp, Glycine max
  Clone ID: LIB3040-057-Q1-E1-H1
gagggttttactttagacccgtcgtggagcaaaactttacattttgagaccgcaaaatgtctgaagtgaatgcgacccctgaaattcctcaaagcaacaccatctacatcaacaacctcaacgagaaaattaagattgatgagttgaagaagtctctgaacgctgttttcactcagttcgggaagatacttgaggtgttagctttcaaaaccctaaagcacaaaggtcaagcttgggtggtctttgaagatgcctcttctgcttccaacgccctaaggcaaatgcaaggtttccccttctatgataagcccatgagaatacagtatgcaaagaccaaatccga

SEQ ID NO: 12551 - DNA, 369 bp, Glycine max
  Clone ID: LIB3040-057-Q1-E1-H10
caacataggtcatcgaaaggatctcgaagacccaccaacgcacgaaagccgggatctttcagaaaatggattcctattcgaagggtgcataaccgcatggataagctcacactaacccgtcaatttgggatccaattcggttccttaggaggtatcgggaaggaattttggaatgtaataatatcgattcatacagatacagaagaaagggttctctattgattcaaacgctctacctacgagatagggatagagaaagaggaaaaaaccgaggatttcacatagtacttttggtcgaaaaatcgatctgaattttttccgtactttccgctcaatgatgaaatgggtcagattctacagggacaaacc

SEQ ID NO: 12552 - DNA, 303 bp, Glycine max
  Clone ID: LIB3040-057-Q1-E1-H11
gagggcgaggaagccacatagagacacaatacagagtgagttgttgctccttcgccacaactctctgccaacatgggtatctccagagattctatgcacaagaggcgtgccactggtggcaagaagaaggcctggaggaaaaagagaaagtatgagcttggccgccagcctgctaacactaagctgtcaagcaacaagacagtcaggaggatccgtgttagaggtggaaatgtgaaatggagggcattgagattggatactggaaattactcctggggaagtgaagctgttactcgcaagact

SEQ ID NO: 12553 - DNA, 394 bp, Glycine max
  Clone ID: LIB3040-057-Q1-E1-H12
gaatgtagaaaacattgtcagagaagcagtcaaaaagaagtttcatcaaacatttgttacggtccctgccaccattcgtctcttcttccatgattgcttcgtgcagggctgtgatgcctcggttttggttgcatccacaaaaaacaacaaagcagagaaggatcaccctgataatctttcactagctggagatgggtttgatacagtgattaaagcaaaagaagcagtggatgcagttccattgtgcaggaacaaagtttcatgtgctgatattttagctatggcaacccgtgatgttattgcactggctggtgggcctttctacgaggtttgatttggaaaaatttgatgggctaagatctaaatcttcagatgtaaataggaggctgcctca

SEQ ID NO: 12554 - DNA, 373 bp, Glycine max
  Clone ID: LIB3040-057-Q1-E1-H3
ggagcgagagaagttattagggtttttgagtgcggcggtccaaacactcttctctgcagcttttgcctacaactcccttcaccatggctgaacaaaccgagaaagcttttctgaagcaaccaaaagtgtttctcagcacaaagaagactgggaagggaaagagacctggaaaaggtgggaaccgcttttggaagtccattgggcttggatttaagactcccagggaagccatcgaaggaacctatattgacaagaagtgccccttcactggcaatgtttccatccgtggccgtatcttggctggaacatgtcacagtgctaagatgaacaggactattattgttagaaggaattatctccattttatcaagaa

SEQ ID NO: 12555 - DNA, 360 bp, Glycine max
  Clone ID: LIB3040-057-Q1-E1-H5
gagggttttgtgctgttgtcgctgctcatcctccataacctccgagctctacaccgaagaacgaagccatggggaagacacatggaatgggagctgctcgcaagctcaagtctcaccgcaggaggcaaaggtgggctgataagtcatacaagaaatcccatcttgggaatgaatggaagaaaccttttgccggttcatcccatgccaagggaattgtccttgaaaagataggtattgaagctaagcagcccaactctgctattcgtaagtgtgccagagttcaacttatcaagaatgggaagaaaattgcagcttttgtccctaatgatggttgcttgaactacattgaagagaatgacg

SEQ ID NO: 12556 - DNA, 334 bp, Glycine max
  Clone ID: LIB3040-057-Q1-E1-H9
gactcctctcttccaagttctctctctctgtgtatattcaaatccatactatcactttcgcatcggtacttctcttttcattgtcgcgcagacacaaatcagtaccatacgaagcccgacactacgtgaattaagcatgtcgggcagaaaggaaacggttttggaccttgcaaagtttgtagacaaaggcgttcaagttaagcttactggtggcagacaagtgacagggactctgaaagggtatgatcagttgcttaaccttgtcctagatgaagctgtagagtttttaagagatcctgatgatcccctcaaaactaccgattagaccagaaat

SEQ ID NO: 12557 - DNA, 155 bp, Glycine max
  Clone ID: LIB3040-058-Q1-E1-A1
gatacaaggagagaaaaaaaagtgtgttccagagaagcatttcccattaaagtatattatgtcttcaccaaagaaccaccctcaagttagaagcatctctttgctgtagctgtagccaatagtaatacccttccagctggtatacgtaccctcca

SEQ ID NO: 12558 - DNA, 55 bp, Glycine max
  Clone ID: LIB3040-058-Q1-E1-A10
gacaccgtcggcatcagttggaattttcgtggacgtagctgttaccgggttcact

SEQ ID NO: 12559 - DNA, 401 bp, Glycine max
  unsure (1)..(401): unsure at all n locations
  Clone ID: LIB3040-058-Q1-E1-A11
ggttccagtgtgtgattggtttgatgtttgtaactccgttccttcatccttttgttgatcggtgtatgtgtgtgttttttctctcacctgaaaatgtcttgctgcggtggtaactgtggttgcggaagctcctgcaagtgcggcaacagctgcggaagctgcaagatgtacccagacttgagctacactgagtcaaccaccatcgagaccttggtcatgggagtggcacctgttaaggctcaatttgagggtgctgaaatgggtgtgcccgctgagaacgatggctgcaaatgtggaccaaactgctcctgcaacccctgcacttgcaagtgaggtgttgggagagcaagcttcaagcagagatagcccttaattangaataatgataaactattaatgtg

SEQ ID NO: 12560 - DNA, 388 bp, Glycine max
  unsure (1)..(388): unsure at all n locations
  Clone ID: LIB3040-058-Q1-E1-A12
gggagcgagagcgagaaacagaaacctatttttattttctctcttcatatcacttagactgagactggatgcttctgtatccatcatattatatgatgattattgaattgattatgcgttcagatttcacttcaggatcactttgacagtttgacttgtccggcaccaacttctggtattactattgtctgagttctcaggagttctttcacagaaggtagatgggttctagaatcccatctcataagcttagcaatggcctctacgtatcaggacggccggagcagcccaaagaaagaactccaacaatgacatcaacagccgtgccatataccggtggagacataaaaaagtctggagaattggggaagatgtttgatantcctgt

SEQ ID NO: 12561 - DNA, 146 bp, Glycine max
  unsure (1)..(146): unsure at all n locations
  Clone ID: LIB3040-058-Q1-E1-A3
aatatgacaaagaaattaaaattggtatcaagattttcgtcccttagttagtcactctcttttgacttccatttgaacttttgcataattgtatgtatgtgtnccaatccttttttaacgatatcctcaagttatcaacaatgggc

SEQ ID NO: 12562 - DNA, 312 bp, Glycine max
  Clone ID: LIB3040-058-Q1-E1-A4
gataccatagaagaagcacattggagaagcattatcactacgagcagcaacaactactctcagctgaaatggcctcttcagtgatggcatctgtggccctcaaacctgcccctttcactgttgagaagtcctcagtgagaggccttccctctctctcaaggaactcttcttcattcagagttgtggccagtggcaagaagattaagactgacaaaccttatggcattaatggtggcatggctttgaaggaatgaactgattcatctggcaagaaaaggaaaggaaagggtgtttaccagtctgtagacaaat

SEQ ID NO: 12563 - DNA, 258 bp, Glycine max
  Clone ID: LIB3040-058-Q1-E1-A5
ggtgttcggagagagacagatttgtgtgttgagcgcatagaacgatgagtttggttggtagaggagcaagttttgcattgtagtagttgtagcaatagccacacaacaaaagaaaacaaaaaaccaagtcttcgtcatcttcgtatgcagagatttttcttcaacatgatgatgatgattagtttatttaccaaacaatgattgccttgccttccttcgtgagatactggtagcaatttcaaaccttttcgagtaacc

SEQ ID NO: 12564 - DNA, 378 bp, Glycine max
  Clone ID: LIB3040-058-Q1-E1-A6
aatgcagacatacgtcaggatggggcgtcactcttcaaagaggtcataactgaactcgctgactgaaactcgcacgcattaaggttttgcagtgatggcactgtccaaccgcgtccgatcgggaatctctctcttcaccaaatccacgttcctcacttccgagcgatccactctccaacgattcctcgttgccccttccatttccttcgcctccagaaattacgccaacgtgccggggcaaaatgaaaacacagttaacgtcacactggctttgtatggacgttcaggaaactatgcctctgctttgtatattgcatctgtgaaagctaatgcagtggcaaaggttgagtctgagcttccgcaatttgttgacgctgt

SEQ ID NO: 12565 - DNA, 239 bp, Glycine max
  Clone ID: LIB3040-058-Q1-E1-A7
cggggaagagagagagagagagagagagagtcctgaaacttgggtgcgattccttcactcacaacaacaacacatcactatggctcttctgagtcgagcctcttcacgcttccctcagctggtttcccctcaaagggtagtttcactccacacaacgctcccatctctgaacgcatccccatccacagccacgcctacaccatatgccccgccaccgcctccgtccgcttcctctcccg

SEQ ID NO: 12566 - DNA, 386 bp, Glycine max
  unsure (1)..(386): unsure at all n locations
  Clone ID: LIB3040-058-Q1-E1-A9
ggtccctactcagttcacagagaaagatggctgcggaaaacgttgtagagttcacagacttacccgtcaagagacctagagaagaagaagaagaagaacaaaccaatggagtctccaacgacgccgtttcaacgctacccaatgaccctcaataccctggtatctctgctgttattcccggttggttctcagaaatcagcccaatgtggcctgnggaggcgcactccttgaaggtggaaaagattttgtttcaagggaagtctgactatcagaatgtcatggtcttccagtcatcaacatatggcaaggttcttgttttggatggagtcattcagctcacagaaagggatgagtgtgcctaccaagagatgatcactcatcttcct

SEQ ID NO: 12567 - DNA, 249 bp, Glycine max
  unsure (1)..(249): unsure at all n locations
  Clone ID: LIB3040-058-Q1-E1-B1
aaacaacaaaagggggtgttaatccaaccaaccaattataacaaaaaattcttcttcaaatccttcttcttctggtcctggttccatctgtgacgagcatcatggcctcgagagcagtgctattgttggctatgtgtgtgcttccggccatggttgtggccattcgcccagcanagaaccctttttgcgtgaagggtcgcgtctactgtgacccttgccgtgctggttttgagacctcagcaaccacct

SEQ ID NO: 12568 - DNA, 296 bp, Glycine max
  Clone ID: LIB3040-058-Q1-E1-B10
ggtggtagtggggtaacgatacgtaataagttctatcattgaggaagtttcctgtgcatcgtctccgaaaatgaacgacgcagatgtctcaaagcaaatccagcagatggtgcagttcatccgccaggaagctgaggaaaaggccaacgagatctctgtctccgccgaagaggaattcaatatcgagaagctgcagttggtcgaagccgacaagaagaagatcaggcaagaatacgaacgcaaagagcgccaagttgaaattcgcaagaagattgagtactcgatgcaactaaatg

SEQ ID NO: 12569 - DNA, 362 bp, Glycine max
  Clone ID: LIB3040-058-Q1-E1-B12
gacctaaaaattgtaccgatatggcttcacttgtgtgtctccttttttccttgcatttcatggttatcatgtcaggttccttaccagcaaatagtgaagtgtttacaaaagagtctcctatgtctctatccacaaaacccgtggaaagactcacccaactccacttttatttccataacaacaaaatgggggaacacccgactgctatgaaaattgttgagcctcctaaggcgtccatttctggttttgggactatttacatgatggatgaccctctaaccgaaggaccaagtccaacttcaaagcttgttggaagatgtcagggaatatatgctgaggcttcgcaacatgaacctgcgata

SEQ ID NO: 12570 - DNA, 369 bp, Glycine max
  Clone ID: LIB3040-058-Q1-E1-B2
gatgtcaatcttcaattcaaatccctaatgtcaatcattctcacgaaccttcccaacgcgtcctcgtttcatccgaaacctaaacctaagccctctcatcatcacccacagatggctctcagtcagtctgcagtaattgtagcgcggacaatttgcttgaggaatctgttgcgaatggcagcgtcttctgaagagcgatccagtggaggaagtcaagttatcactgagaaaagcgatggtgtcagagtcctggagaatgtgaaagacgataataagaatgagttcgatgatacggtgattgaagacgcgtaagaagaagagttgtctgaagatggacagggtctgtcatatgatttgatggattagctc

SEQ ID NO: 12571 - DNA, 351 bp, Glycine max
  Clone ID: LIB3040-058-Q1-E1-B3
tgggatttccagacgcggcggcttcttcttccgtttttgtctatcggcgtgaacaatggcgacttacgctgcgatgaagcccacaaagcccggcttggaggagccccaggagcagatccacaagataaggatcaccctttcctccaagcacgtcaaaaacctcgagaaggtttgtgccgacttggttcgcggtgcaaatgacaagcgcctcacggttaagggacctgtcaggatgcccactaatgttcttctcatcacttacaggaagtccccttgtggtgaaggtaccaacacatgggacagatttgaacttcgtgtgcacaagagagtgattgacctctacagttcccc

SEQ ID NO: 12572 - DNA, 359 bp, Glycine max
  Clone ID: LIB3040-058-Q1-E1-B4
gatagtattatcattcattctcatctttctctcttctctctccacccaaaccctaactcccgaccctgttcccctctcgtatccgtcatgaaaggaggaaagtccaagaccgaatctaagagagccgatcccaaacttgctgtgaataagaagggagccgccaccaaggctaggaaacccgccggcaaagggaaagcagcgaaagaccctaacaagccaaagaagcctccaagtgctttcttcgttttcatggaggagttcaggaaggtattcaacaaggaacatcccgacaacaaagcagtgtctgctgtgggcaaagctgctggagcaaaatggaagacgatgtctgatgctgaaaa

SEQ ID NO: 12573 - DNA, 374 bp, Glycine max
  unsure (1)..(374): unsure at all n locations
  Clone ID: LIB3040-058-Q1-E1-B6
ggcgtacacagcctcaacaaccctaacgcgtgcagagcagagagagacgcagccatggggcgaagacccgcgaggtgttataggcaaattaagaacaaaccataccccaagtcacggttttgccgtggtgttcctgatcccaagatcaggatttacgatgttggtatgaagaagaagggtgttgatgagtttcctttctgtgtccatctggttagttgggagaaggaaaacgtttctagtgaggccctggaagctgctcgtattgcttgcaacaagtacatggccaaatttgctggaaaggatgctttccacttgagagtcagggtgcacccattccatgttcttaggatcaacangatgctttcgtgtgctgg

SEQ ID NO: 12574 - DNA, 369 bp, Glycine max
  Clone ID: LIB3040-058-Q1-E1-B7
gagttacatcctatgttagtgttactcttccgtcaaacaccacataatcctttcctgcatttcacggtttttcttcaacactctcagtctcgttttcttcatctttttcttctttgttccactggaaaaagaagtaccttacttgtgaagtgggatttagagcttaatctgaagttgggttttgcttcccttgtccaaattccatggctttaatcttctttacttgttttcccttactcgatttcacatggcatttcaaccccgctctggagctgatagtgaagttgcaggaagctctatacaaaattcagagcattggtcagaggcttatacataccaccaaataattgaagaatgccggttatgaag

SEQ ID NO: 12575 - DNA, 337 bp, Glycine max
  Clone ID: LIB3040-058-Q1-E1-B8
ccggtatcgctgctacactaccatataacggtacagctgccatacgacaatataagggttctgctgcaaaactccaactcacgggtacggctgcaatattcctccttatgggtctggctccgaaattaccacacttggttattgctgctataacacgacatctggttacggctgctacatcactactcaaggttacagctgctaaatcactcacatacgggtactgctgcaaacaatttgacatagggttacatgcgaactcaatggacgtattttacttacccagcttccacaactgcaaaatcaccacctttttcattctgaaaaaaatatcacc

SEQ ID NO: 12576 - DNA, 310 bp, Glycine max
  Clone ID: LIB3040-058-Q1-E1-B9
gaattacaagcataagaaccatgtttttagtaatttataatttacaagtaacatatcggttgtctctctaaaaaaaaaaaaaaggaaaaaaaggaaaaaaaagaacaaaacaaaaaagaaaaaaagcagaccaaaagaaaagagaaaaaagagaaagaatgaaacttaacgaccagagcacaaaagcaaaaaaaaaaagggggggccccaaagggttaaaggctaagtcaccgtgccatggaaagtaaagcccctccaaaggggccccccaacgtacgtaacgggggcgcatttttaaaaaccgtggagg

SEQ ID NO: 12577 - DNA, 257 bp, Glycine max
  Clone ID: LIB3040-058-Q1-E1-C1
taccgctgcaagaagactacataacgggacgggacattgtttttctgttccacttctaagatctctttcacgtcagtctcacacgtgaaacacatccttgttctgaaaatatatgctcgtcctagttccactgcgcatctggctcatgtttaacttgcatttttgaattatggccagttttaccccgcaatggtgtttctggcaaccttcaaaattagtttggtgcttcctcacaacatgggtttggtccttatgtg

SEQ ID NO: 12578 - DNA, 101 bp, Glycine max
  Clone ID: LIB3040-058-Q1-E1-C10
atcatattctacgtagcatccatactgtatattaattatcttaaatttctttatatgcttcaagtgttagatgcaaacttaatgaatatgtttacgtgttt

SEQ ID NO: 12579 - DNA, 345 bp, Glycine max
  unsure (1)..(345): unsure at all n locations
  Clone ID: LIB3040-058-Q1-E1-C11
aggggaattttttcaacccgttccccggaaaatttaaattgaactttcccccccccaaaaaaaaaaactaacaattggtcccccaaaaggaaaaaaaaaaccccccggaaaaaaaacccggaagaaaaaggcccaaccggaaaaaaaacccaaaggcggggaaaaaaaatatccaaaggaaggaggaaccgaaaaaaaaaaaaaaaagaacaaaaaagagctttgagacctacaagatctacatcntcaaggtgttgaagcaagtgcaccccgacatcgggatctcaaagcaagctatggggatcatgaacagtttcataaacgacatcttcgagaagctcgccc

SEQ ID NO: 12580 - DNA, 362 bp, Glycine max
  Clone ID: LIB3040-058-Q1-E1-C12
gactcaccacttcaaaacactcataacacaaagcacaaagcaaagctcatccttgagttaaaaaatggcagcagcttcttccatggctctctcatccccatccttggctggcaaggccgtgaagctgggcccatcagccccagaagtgggaagggtgagcatgaggaagaccgtcaccaagcaggtctcctcaggaagcccatggtacggcccagaccgagtcaagtacttgggcccattctctggcgagcccccgtcctacctaaccggtgagttcccaggcgactacggctgggacactgctgggctttccgcagacccagaaaccttcgccaagaaccgtgaactcgaagtgattcact

SEQ ID NO: 12581 - DNA, 375 bp, Glycine max
  Clone ID: LIB3040-058-Q1-E1-C2
gattcccaaaatttctcattctccctttcctctccgaaccctcgatcactctcacgcgctcctatattcgctcctcaacggtcgctctctcgaacaaccacaacaccatcttcatcacatggcaaacgcagcatcgggtatggcagtccaggaggacggcaagttgaggtttttggagctgaaggcaaaaaggacacacggttacagagtttttaagatggaggagcaccagagccgggtcattgtggagaaccttggagagcgtgcacagcgctatgaagatttcagtgccagccttcctgctgacgagtgccgttatgctgtatatgattttgagtatctgactgaggggaatgtccctaaaagcagaatttt

SEQ ID NO: 12582 - DNA, 326 bp, Glycine max
  Clone ID: LIB3040-058-Q1-E1-C3
gaaaacaaaaaccaatgagtcatggccaaaccaagaagccacaagcagacggtgaacccaccgaatgcggcgacgttttcggtgtctccaccgccgcggagcctcacgctgcgccggtggtgtccgccggtatcggttcggctgccatagatggcgaccccataaccatcggagaagctctggaagcggcggcaatatcgatcggggataaaccagtggaccaaaatgacgccgatgcgattggcgtcgcggagattagggccaccggagagaataaggtgaggtccggtggggtgggtgaaaccgcacaagaagcagctactttc

SEQ ID NO: 12583 - DNA, 343 bp, Glycine max
  Clone ID: LIB3040-058-Q1-E1-C4
gactgactcactcttgttttcgcttcgctactcatcatcctaagaagtaccaggaagaaacaaacaatgtttctcaaagtccatctgcactggaatgtcatcatcgctgctgaaaatctgcaaccggaatgtctgatgcttcataaggcaatcattgtccgccttctgagtgactttgctgtgaacaaggccaccaaagatctgggatactttcttgcagtgaccacactggagaaaatatgggaaggaaaggtcagacaacatactggggatgtgcgcttccctgtggtttttaatgccatcaccttcaagtttttcaagggagagatattacatggtgttg

SEQ ID NO: 12584 - DNA, 367 bp, Glycine max
  Clone ID: LIB3040-058-Q1-E1-C5
gttctttgcgagatagaagagaaagccgtcgctatcctagtctcttcttcccctctacccatttcagtttcaggatggaatctcaggtgaagcacgcccttgttgtcaaagttatgggtcgtactgggtctagggggcaggtgactcaggttagagtgaagtttttggatgatcaaaaccgacacatcatgaggaacgtgaagggacccgtgagagaaggagacattctcaccctacttgagtctgaaagagaagcaagaaggttgcgctagaggatctcttcatggtttggctcaggacttaaacaaaacatcgttgtttttgttgtagttaaaggatgtcaaatgttaattgtcatggacctgaa

SEQ ID NO: 12585 - DNA, 337 bp, Glycine max
  Clone ID: LIB3040-058-Q1-E1-C6
ggaagaggatgtgagcataatggggtctgatttgcggttggcaactttcgggtctggaagaagagtgtgtcctgtgaaggcccttggtttggcctcggttcatctttggctcgctcagttgcttcaaaattttcattgggtttcagctgatggtgtttctgtggaattggatgagtttctcaagctttctatggatatgaagaagccactgtcttgcaaggctgtgcctatggtttctgtttaggtttatgtgtgtagttgggttgatgtggtttggtttgtctgtataggtttatggatgttcttcggatgagttggtttggtttgtgctatttgc

SEQ ID NO: 12586 - DNA, 323 bp, Glycine max
  Clone ID: LIB3040-058-Q1-E1-C9
aatggaagtagggtgatctattggaggctccgaacatacatccaatgaaagacctttttgttacaaaatttgaaagcaaagcaaatttccaattacaaaaatcacaaaaaaaagtcctcaattgtggtggctattctctctttggtgtttcactcaatttcgagtgtttcttagtccaatatctcttaaggtggttggccccttgcttcttgactcaaattcttcaaggtatgacaccaatcctcctttccaattccctatatggcaactcacaggcaatgaaacaaagagacaagcaataaccaaaaaaaaaagattctgac

SEQ ID NO: 12587 - DNA, 337 bp, Glycine max
  unsure (1)..(337): unsure at all n locations
  Clone ID: LIB3040-058-Q1-E1-D1
gaacatgccgaaaagtagtaccaagatggcttcagttgtgtatctcctctttggcttccatctcattgttatcatgtcaagttccttacccgcaactagtgaagtgtttgcaaaacagtatccatccacagaacccgtggaagaaaaactcacccaactccacttctatttccataacaacataacgggggaacacccaactgctatgaaaactgttttgcctcctaaggggtccattcatggttttggggctacttacatgatggatgaccctctaactgaaggaccaagtccaacttcaaagcttgtgggaagatctcanggaatatacgctttg

SEQ ID NO: 12588 - DNA, 386 bp, Glycine max
  Clone ID: LIB3040-058-Q1-E1-D4
catccaatgactatacattcattatatttttgtgtaaatagaggaaaaactcgatggaaaaatggtggtttaattctatgttgtttaataggaagttagaatacaggtgtgaattaagtaaatcaatggatagtcttggtcctattgaaaataccagtctaagggaagaccctaaaattttaaccgatatagaaaaaaaaattcacagggatttggattatttagaaatggaaggttttttttctagcgatctgaatactgtttctaagaatgatgatgatcattacatgtatgagactcaatttagttttaacaataatattactagtttcattgatagttgcattgagagtttcaatttaggtgatattgacaaatacaatgat

SEQ ID NO: 12589 - DNA, 350 bp, Glycine max
  Clone ID: LIB3040-058-Q1-E1-D5
gtcatccaactctctaaacaacacattaacctttctcattccccatctcctcaccttattcagccactgctaatttctagggttccgaaatggacgctggcggaaagatcaagaagggcgccggaggaagaaagggcggcggccctaagaagaagccggtttcaaggtccgtcaaggccggtctccaattccccgtcggaagaattggccgttatttgaagaaaggaaggtacgcccagcgtgtcggtaccggtgctcccgtttacttggccgcagttctcgagtacctagctgctgaggtgcttgagttggctgggaatgctgcacgtgacaacaagaagaacaggatt

SEQ ID NO: 12590 - DNA, 355 bp, Glycine max
  Clone ID: LIB3040-058-Q1-E1-D6
gatccgcatctctatgtttgggtgataggatacaacagcttcttcacctccgaagccgtatatcttagcttagcttagcaggggcaaagcaatggcttcgtcttccctcacttcagttcctctctcctcttcttccctcaatattccactttcttcctccaaaccttcctctagctttttatcttctccaattcccgcattctctcgcactcccaaaaccctgtttgccgaatcaaaatcccacttttacccaaagagaaacgataatgggttttccatcagagcccaaaccctagacttctcggattcattcttcgaaaggggtttccgctccgaagacgaaccctcttccccc

SEQ ID NO: 12591 - DNA, 356 bp, Glycine max
  Clone ID: LIB3040-058-Q1-E1-D7
ggccgttgtttcatggaccagaacaacgcctcatagctcctttctcatttcacacacacaaagaaccttgagacatcatgaagattccaagttccaagcaactggttgtgggatttgcacttggaaatgaaggatatgcaacgttggagagctgaagaggatgctttactacgcgcatatgtcaaacagtatggtcctagggaatggaatctggtgtctcagcgcatgaacacacctcttaacagggatgccaagtcatgcttagaaaggtggaagaactacctcaagcccggcattaagaaaggatctcttacagaggaagagcagcgtctagtcatcaaccttcaagcaacaca

SEQ ID NO: 12592 - DNA, 54 bp, Glycine max
  Clone ID: LIB3040-058-Q1-E1-D9
agcgaaaagacgacagaagggatccaatgattccaaaggtacaaactttatgcc

SEQ ID NO: 12593 - DNA, 374 bp, Glycine max
  Clone ID: LIB3040-058-Q1-E1-E1
ggctttgcttttaacgttaacctgcaattgcataaactttcaataactcagtgctcacacttcaattacaagctttggtttttcacttcacgcttgaaacccaatggcagcctcagctttctccaacacattggtttctcccatttctcttccatccaaacccaaacccaaagccatttccttgcaacccaaatttccacttgtcaaattccccaaccccagatcccatcccttgtcgaggaaaacgacgtcgctcaccacgttttgttcctccgatgctgccaatgctcctcaacatgacaccccaattgaattaaggtatcccgcattcccaaccgtcatggacatcaaccagattcgtgacattttgcccc

SEQ ID NO: 12594 - DNA, 366 bp, Glycine max
  Clone ID: LIB3040-058-Q1-E1-E10
gagcacaacgcaacacaacgcgcactctctcttttctctccttaacacaaaaaccctatcgttcttcgcggtttcgccgattctcgccatgccgaaagccaaatccgacgccaaagccgccgatagccggttgaagcgcaagggcgctggtgctggaaggaagcaatcgaagaaagctgctaaggatcctaacaagccaaagagacctccaagcgctttcttcgttttcatgtccgagttcagagagcagtttaagaaggagcatcctaacaacaaatccgtcgctgttgtcggtaaagctggtggtgacacatggaaatcgctgtctgatgctgaaaaggccccttcgttgccacggccgaaaag

SEQ ID NO: 12595 - DNA, 385 bp, Glycine max
  Clone ID: LIB3040-058-Q1-E1-E12
ggaacttcactgggaaatttgattgttctgtcaataaaacggtgccgttgaggttggagatggaggaaccgctacaagaagagcatgctcctcccaacaagcactttaaatcttcatccgcttcacaagatgagcaatgggatgcttcaaacggtgcatcaacttccagttctccctcccagtacaatatacttgatgagcctaaccctctgggcttacgtctgaagaaaaacccttcgcttttagatttgatacaaatgaagctttctcaagggaatgtgattattgcaaatacacaagatgaaaattttataagctctggattgaaaaaggagagtcggggtgctgctgcatcaggttctgtggagaagcttaaggcttcaaa

SEQ ID NO: 12596 - DNA, 303 bp, Glycine max
  Clone ID: LIB3040-058-Q1-E1-E3
gattttattcggcgagtgtcatttccttcccttccctcacgatctgaggaagacaccaatcttctctccacgcccttcttgggtaaccgtctgaagtgcagcaatggcagatggattgcattcgcagcatccatcggtagttcagaagttatctggacagtcttatcttgtgtccaggcttgctcctaatcactccaaaaactgttctaccactggtaattacctcaatggaagtttgcagtcctcaaggttggttccaatcacggcacacgcgccggctgagaaaggggtgtccggaatttt

SEQ ID NO: 12597 - DNA, 364 bp, Glycine max
  Clone ID: LIB3040-058-Q1-E1-E4
caaaaggggaaaaacaagtgaatagatgaatttgccgttaatttatttatccctctcttaaccatcgttgttcataatcacttacacatcataggttctctctctagggtttgatcatactcaagggtttaagccattgaaaaaaggaatgcataggcaaagcctcctctaaacaagcgaatcgataagctcgataacgtcttcagctgctctttctgcaatcattgcaacaacgtctaatgccgccttgacatgaataacttcataagggaagctatttgccggatatgccaagacagctttagcactaccatcacagctttatcatagccaatagacatatacaatgagtggattgattaat

SEQ ID NO: 12598 - DNA, 389 bp, Glycine max
  Clone ID: LIB3040-058-Q1-E1-E7
gacacacacttgcccatcatcaaagtttcttcctttctctgctctttgtcttctctgacacatttggggccttgttgagtgtgtttttgcaagagggtatggcgaaggacgttgaggttgctgagcgtggctccttctctgggaatgactaccatgaccctccaccagcagcactcattgatgctgaggagctcacagagtggtccttttacagggctcttattgctgagttcattgccactttgctcttcctctacattactgtgctcacacttatagggtacaagcaccagacggatcatgctgatgcgtgtggtggggttggcattcttggcattgcatgggcctttggtggcatgatcttcatccttgtccactgcactgctggg

SEQ ID NO: 12599 - DNA, 331 bp, Glycine max
  Clone ID: LIB3040-058-Q1-E1-E8
gagcaacatggtgaagctggtggagagatttacttgccagaagcttacgttagaaccaagaggactacttaatggagcaaatcagttggaagaacttgtagctagcttcccaactggcttatctgagtgtggagaagcattatcaagccttaggagtaggagaacgagtactgtttgtgatgaatgtctatggtttaagaaatctgtctttagtcaacttgtgtgttttgttattcagttctcagcaataaactgctctggcaatctagtttcatgttcaatgccatctttatcttttgggctaaaaaaataaacaaaccgagaaatgaag

SEQ ID NO: 12600 - DNA, 372 bp, Glycine max
  Clone ID: LIB3040-058-Q1-E1-E9
gagtaagagaaagaatcgaggttgaaatgaaggtagctcccatcgtggtgttcttgttcagagatacagagggtttcgcctccaccatctcacaagcttttcgccccaagccttcctcctccttcacgcgccaagaggactcctttgagctctccttggaggcttatggaatcaaacacctcaaagcatctgggagcgtttctcacttcgttgatgatcacggcgcttacaaggtgacaattgtggctatggagcattatgagccaccggtactatcttgtgctcttaatgagttaccaaccttttttctaattggacaagctagtcaatatttggacaataaatccaccaagcaacaggagatacttcatg

SEQ ID NO: 12601 - DNA, 387 bp, Glycine max
  unsure (1)..(387): unsure at all n locations
  Clone ID: LIB3040-058-Q1-E1-F1
ggttctagtgtgtgattgtttgttgttgtaactcgttcttcttcttttgttgttctgtgtttgtgtttgttttttctctcacctgaaaatgtcttgctgcggtggtaactgtggttgcggaagctcctgcaagtgcggcaacggctgcggaggctgcaagatgtacccagacttgagctacactgagtcaaccaccaccgagaccttggtcatgggagtggcacctgttaaggctcaatttgagggtgctgaaatgggtgtgcccgctgagaacgatggctgcaaatgtggaccaaactgctcctgcaacccctgcacttgcaagtgangtgttgggagagcaagcttcaagcagagatagcccttaattangaataaatgataact

SEQ ID NO: 12602 - DNA, 384 bp, Glycine max
  unsure (1)..(384): unsure at all n locations
  Clone ID: LIB3040-058-Q1-E1-F10
ggacagacacgaacacgatggttgaaatttggagcaaagcacgtgtttgtgtgtgaccttctctctctctaaactccgatggctttctctgcaatcactaccttgccctctcctcaatttctccgccttcctcaatcttcaccctctcttcgattttcaccgccaattctcaaacgccccaaacccctctccattcgatcagtttcaatccccgctgcaccagcatctggttctctggcccctgcagtttcacttacggataatgcgctgaagcacttgaataagatgaggtctgaacgaaatcaagatttatgtttaagaatacgtgtcaaacanggacggtgctctggtatgtcatacacaatggattttgaagacagggct

SEQ ID NO: 12603 - DNA, 391 bp, Glycine max
  Clone ID: LIB3040-058-Q1-E1-F11
gaaatcaagttgaaccccctccggacctttgacaacacaagaaactaaaactttcccctccggctcaaatcataacacagaaagttcccattaatttccaagcactttcccccccctcaacccctcaaagcctcaaaagctgcaatctttcttcttccttgtttttttttcctggctctccgttgaaccttccatgtttcccagccccttttgattgttttccactagaagcagtgttttctgttaatagttaggaggttctaatggctgtgctgatgatttttcacatgtttgctgcaatagctttgcctgcttatggagatgctttcatcggtgtcaacattggtacagatgccaccaacatgccaagtccaacagaggttgttgccct

SEQ ID NO: 12604 - DNA, 291 bp, Glycine max
  Clone ID: LIB3040-058-Q1-E1-F12
aggcggatataacccataaaggtttgcccgttctttgtacataaacccttgtgatactttcacgcagtttcagtagctcttccgcttccaagataaagtctcccgtttgtgcctcataaaaagaactagcgggttggtggatcattaccctgattttataacttaataagtatttcccttatcttgataaagattttgataatgacttctcctatattggtaaagattatccttattcccaaataaaggtaaaaaggataaatacacgtgacgggagagacagtggccaaa

SEQ ID NO: 12605 - DNA, 339 bp, Glycine max; identical to SEQ ID NO: 12408
  Clone ID: LIB3040-058-Q1-E1-F2

SEQ ID NO: 12606 - DNA, 277 bp, Glycine max
  Clone ID: LIB3040-058-Q1-E1-F3
ggtaaagagatagatgaagcaagcaagcgatttgtgaaagcgttgaccagaaagtgtgaactacaaagtgtaggaatgagcatataccaccagatacctgcgttgattctggattcttgaagccattccttctattttctggtgacagcttcgtcttgtgctatactatataacaactcaccctctctccttacctcttcattcccaacacaaaacactctctcctccttcaaccaacccctggtcactaccaaccaagtgtcccccctcctctccc

SEQ ID NO: 12607 - DNA, 319 bp, Glycine max
  Clone ID: LIB3040-058-Q1-E1-F4
aaagggaaaatcaaccaatccaaaatggcctcccaacaatccccaatttaaaaaggctccttaacaaaagaaaaatggctcaagtttgtttgctcttggtggggcttctcacaatgttctcctctgcctatggctatggatatggtggtggctgggttaatgcacatgccaccttctatggaggaagtgatgcctcaggaacaatgggtggggcatgtggatatggcaacctctacagccaagggtatggaacaaacactgctgctttgagcactgctttgttcaaaaatggtcttagttgtggctcatgctatgaaat

SEQ ID NO: 12608 - DNA, 336 bp, Glycine max
  Clone ID: LIB3040-058-Q1-E1-F5
gactcaacatttgcatttcctcttcatatacagtacacacttcagctggtggtagcctggtacatagtgtgcttctaaaatgaagaacaaaaggaagactttacaattgctgcggctcatggctgcaacccccttttgcatgccaattgtgtcgtatccggttccaaaggtcaacattcaggaccatctcaccaatatttctgacctggtaaagggtccaattagagggcttttgccatttgtggattgtggagagaggtgcagggtgaggtacattttgcactcagggcaaaatttgtgcaagagagtttgcgagacattctgtctgatgtacat

SEQ ID NO: 12609 - DNA, 368 bp, Glycine max
  Clone ID: LIB3040-058-Q1-E1-F6
gacactttccgtgtaaacagaacagagcaacactgaacaatggcgcaaccttcctcctcctcgaagcctgttgtccctctcctgaaggacgagctggacatcgtgatcccgacaatccgaaacctcgacttcctcgagatgtggcggcccttcttcgaaccttaccacctcatcatcgtgcaggacggagaccccaacaggaccatcaatgtccccgaaggcttcgattatgaactctacaaccgcaacgacatcaatcgcatcctcggacccaaagcctcctgcatctcgtttaaggattctgcgtgtcgctgctttggttacatggtctccaagaagaagtacatctacaccatcgatgacgactg

SEQ ID NO: 12610 - DNA, 134 bp, Glycine max
  Clone ID: LIB3040-058-Q1-E1-F7
taacgggagcaccaaccataacgacttttcttggtcgctacttcgcatttccgttctttgcatttcacgggctacgaaaaacgacgtccttttcccaattttccccggcgaacgggaaatggtggaacccgtgg

SEQ ID NO: 12611 - DNA, 375 bp, Glycine max
  Clone ID: LIB3040-058-Q1-E1-F8
gacttgcggctgcagtagagaagcactcttcgttcttcgactgtctacgatctgctttctctgaattgtgaaaatgtcgctcggagaaactgcttgttcatacgcagctctcatccttcatgaagatggaattagtgtaactgctgacaagatcagcaccttgttgaaaactgcaaaggttccagtagactcttattggccaaccttgtttgctaaacttgctgagaagaaaaatcttggcgatttgatagcaaatgcggcaggcggtggtgcaccagttgctgttgcagctgccccagttgctgctgctgctggtggtgctgctgccgcagctccagctgctgaggagaaaaagaaggaagaaccggaagaaga

SEQ ID NO: 12612 - DNA, 385 bp, Glycine max
  Clone ID: LIB3040-058-Q1-E1-F9
actcacaactccataacacaaggcagaaagcaagctcatcctagagttttaaaaatggcagcagcctcctccatggctctctcttccccatccttggctggcaaggccgtgaagctgggcccatcagcccccgaagtcgggagggtcagcatgaggaagaccgtcaccaagcaggcctcctccggaagcccatggtacggcccagaccgcgtcaagtacttgggcccattctctggcgagcccccgtcctacctcactggcgagttcccaggtgactacggctgggacactgctgggctttcggccgacccagaaaccttcgccagaaaccgtgagctcgaagtgatccactccaggtgggccatgctcggggccttgggctgcg

SEQ ID NO: 12613 - DNA, 342 bp, Glycine max
  Clone ID: LIB3040-058-Q1-E1-G1
gggaagcgaaagaggaatcagaaccgtggaatgtgagaagccccagggcacacagctactacaaaaacccgacctatttcatttcacgtgttgtctagcccgccgagaaaaccctaattcgctcgcagtcacccaagaggcgaatccttaccattgctcgagatgggtgaagaagtgaaggccgtggttccagagtctgttttgaagaagcagaagagagatgaggaatgggcgttggccaagaagcaagacctcgaggctgcgaagaagaagagagccgagagccgcaaactcatctacaacagagctaagcagtacgctaaggagtacgatcaccaggag

SEQ ID NO: 12614 - DNA, 392 bp, Glycine max
  Clone ID: LIB3040-058-Q1-E1-G11
ggctgacaagccaatcctttgtgtaggtgctcaaccctagtaagccgcaatggtgaagtactcaagggagcctgacaatccaactaagtcttgcaaggctagaggcgccgaccttagggttcattttaagaacacaagggaaactgcctttgcaatcaggaagttgcccttggtcaaggctaaaaggtacttggaatatgttcttgcccacaagcaggcaattccattcagacgtttttgtcgaggtgttggaaggacagcccaggctaagaatagacactctaatggccaatgacggtggcctgtcaagtcagcaaaattcattcttgatttgctcaaaaatgctgagagcaatgctgaagtgaaacgtttggatgttgatgcactgtaca

SEQ ID NO: 12615 - DNA, 368 bp, Glycine max
  Clone ID: LIB3040-058-Q1-E1-G12
ggttgatataaacttcagacagagcgagttgttgtaaagctagccttgttgcagccatggccacccacgcggctctagcttctacaaggatccccactaacaccaagttcccatccaaggcttcacactctttcccaacccaatgcgcctcaaagagacttgaggtgacagaattctctgggctaagatccacttcatgtgtgacatatgctaacgatgctagagaatcttccttttttgatcttgtagcttcccaactcactcccaagaccaatggatcatcaactcctgtgaggggagagacagtggccaagttgaacgtggcaatcaatggtttcggacgcattggtataaacttccatcgctgc

SEQ ID NO: 12616 - DNA, 79 bp, Glycine max
  Clone ID: LIB3040-058-Q1-E1-G2
aaaacacaaaggtacgctcaaaaacacagaggggaatagggctacataagaaacaaaagtggaaagtttttattgggtc

SEQ ID NO: 12617 - DNA, 385 bp, Glycine max
  Clone ID: LIB3040-058-Q1-E1-G3
gagagtggtggagtgtgcaaaagagcgtcgtagtcgcaaccctaatcagaggaagcgcagcttcaagcgagtgacagccaccagccatgggtcgtatgcacagccgccgtaaagggtaaacctccttcggcttggcccaacaaaagggaactcctaacctggtccagatatccttcgcagatattcaagagaaaatacctgcaatttggcgagaaaagggttagaccctgtcacagatgggtgtcattcacagagattcacagggtattgcacaggtcaatagcgtcactggcagcaaaatctttcgcatcctcaaagctcacggatttgcgcctgaaattccagacgacctgtaccatttgattaagaagcagtttcaattagg

SEQ ID NO: 12618 - DNA, 174 bp, Glycine max
  Clone ID: LIB3040-058-Q1-E1-G4
caaaagaccacagaagggggaatttaaaagattctgaaaaggggaattacccaaaatcccttaattgcaaaaatgaagaacaatccttccaaccagaacaagaacaacccggaccggcttaacaacaaaattcaagccaaaggcaaccaaatttaagggcccccccggaaaatt

SEQ ID NO: 12619 - DNA, 261 bp, Glycine max
  Clone ID: LIB3040-058-Q1-E1-G5
aggggggccaggtattgaaatactgctacaatacagattgcgttgttgctccgtcgccacaagtccctgccatgcatgggtatctccagagattctatgcacaacatgcgtgctgactggtggcaagaatagcgcatgcatgaacaagagaaagtatgagcttggtcgccagcctgctaacaatacactgtcaagcaaccagacagtcaggacgattcgggtgacaagtggaaatgtgaattgcatggcactgatattgga

SEQ ID NO: 12620 - DNA, 115 bp, Glycine max
  Clone ID: LIB3040-058-Q1-E1-G7
agggacacatcaaaatccgccaatatacctgcttttctcactctcacgcactcgtgttcagatacgatacaaacccaggataggacaagaagccatgcttctttcaccatgtttg

SEQ ID NO: 12621 - DNA, 368 bp, Glycine max
  Clone ID: LIB3040-058-Q1-E1-G9
ggtctcactctcacttttgatttttttgccctaaaaccctcgctgccgtcgtggtggccgcccaagaaaagagaatagagagcgcaaacgagtcttcatcttcgactcaccatgaagctcgtcaggtttttaatgaagttgaacaatgaaaccgtgtcaattgagctcaagaatggcactattgttcatggcaccattacaggtgttgatatcagtatgaacacacatttgaaaacagttaaactaactctgaaagggaaaaatccagtgactctggatcatctcagtgtgaggggtaacaacatccgttactacattcttcctgacagcttgaatctcgagaccctgcttgtggaagagacacctaa

SEQ ID NO: 12622 - DNA, 345 bp, Glycine max
  unsure (1)..(345): unsure at all n locations
  Clone ID: LIB3040-058-Q1-E1-H1
gatgccgaaaagtagtaccaagatggcttcagttgtgtatctcctctttggcttccatctcattgttatcatgtcaagttccttacccgcaactagtgaagtgtttgcaaaacagtatccatccacagaacccgtggaagaaaaactcacccaactccacttctatttccataacaacataacgggggaacacccaactgctatgaaaactgttttgcctcctaaggggtccattcatggttttggggctacttacatgatggatgaccctctaactgaaggaccaagtccaacttcaaagcttgtgggaagatctcanggaatatacgctttggcttcacaaca

SEQ ID NO: 12623 - DNA, 364 bp, Glycine max
  Clone ID: LIB3040-058-Q1-E1-H11
agggagcattcatcacaagcctctctctatattccattgccacccagttttgaatatatttttattccttctttgtttcttcacgttcgtccatacacataaccatgtcgtctcagactgttgtcctcaaagttggtatgtcatgtcaagggtgtgctggagcagtgaacatggttttgggaaaaatggaacgtgttgagtcatttgacattgatctgaaggagcagaaggtgacagtgaaaggaaatgtggagccagatgaagttctgcaagccgtttccaaatctgggaagaagactgcattctgggtggatgaagcaccagagtctaaaaacaagcctttatacagtgcacctgttgcctc

SEQ ID NO: 12624 - DNA, 401 bp, Glycine max
  Clone ID: LIB3040-058-Q1-E1-H12
ggaatagagagctcctccaattagggtttttgtgatctgcagctacgatgggtaagggaacggggagtttcggtaagaggaggaacaagacccacaccctctgtgtgaggtgtggccgccgcagcttccacctccagaagagtcgttgctctgcgtgcgcttaccccgctgcgcgcaccaggaaatataactggagcgtgaaggccattaggagaaagaccaccggaactggaaggatgaggtacttgcgtaacgtgcctcgcagattcaagagcggcttcagagaaggtaccgaagctgcacccaggaagagaagagctgctgcctctgcctaagctttgaatgaatgacagcaatttttgctgggtcagtgaattataggagttaatgtatctgtgttg

SEQ ID NO: 12625 - DNA, 352 bp, Glycine max
  Clone ID: LIB3040-058-Q1-E1-H2
gacacttcagaatcctctggtaacccttattttatctattctctctctttcttttgtgttctaagcagctagaagcaatggagaggaaaagaagccatgcctctttcaccatgtttgcaatgcttgttggagtgatctctcagagccttgtcattcctgtagtatccaccactgttgaagatcagaagaactactacaccccagatccacatgctggaagtctcccctcaggtttctccgattctctgtgctcacacagtagtactcctccatctcatggccatggaagctctccaccctcacatcatcacagtagtccaagtactccatcaaaaacctcatgtggaaactg

SEQ ID NO: 12626 - DNA, 413 bp, Glycine max
  Clone ID: LIB3040-058-Q1-E1-H3
gggggtggccctgtagttgaatttggttgttgttcccaaatccaaatccaaatcctggatcaaagctgaaacatttagcgtcctcaggaaatgctcgtgatctcggttttgcagtccctcacatcgctctgcagattcgagatccgtcacagattgcaccatgcagaaagcaaatctgataagaagaagaagaatatgtatatggcatatgggtggcctcaagtcatccctctggagcaaggactgtgtccctctgcacagaagattgtgtacctcaaaatcatcaatcgcacgttgctcgttgtctcacccactcactttgaactctggagcacttcccaagtacatggatccgtgcaagatgttgatgttacccgttgtgtgaatgagttccgtgtaaaatttttggccct

SEQ ID NO: 12627 - DNA, 334 bp, Glycine max
  Clone ID: LIB3040-058-Q1-E1-H5
gggggagaaggacttgacattgttgtagtgatgatctgtgaacatttccggtattcaccactctccttcttatctttttcttctcctccttcaactcgttaccatctctatataccttcttcttcttcttcttccttttctgtgtcttgctctctcatggagaatcaggagacccacaacaaccaaggccgcagcaaattcgtggactttccgttcgtttcatctgcccagaacaatcttatggttgatctcgtctcaacgcttgagaatcgctttcacactcagcttcttccttgcacactcccctctgatgttcagtattatcaaagccaaa

SEQ ID NO: 12628 - DNA, 325 bp, Glycine max
  Clone ID: LIB3040-058-Q1-E1-H6
gacacaaactttattacagttgttgtattgtaattaagcaagaatattaggcaatggagtcttctagaacttcaactactcttgctctttttttaaccatcaatttgcttttctttgtcatggcaagtggctgctacacttgcacacagcctaagccaaaccctatcccattcccttaccctaaccctagtcctgccgcgaagagctgccccagggacgcacttaagctcggagtgtgcgcaaacgtgcttaatggaccaattggtgctattgtagggtcaccaccggaccacccatgttgctcagtgctagaagggcttcttga

SEQ ID NO: 12629 - DNA, 362 bp, Glycine max
  Clone ID: LIB3040-058-Q1-E1-H8
aacagaactactatttagaagtgtttgtacatcttagtaggttgagtattcagcagtttatactcggaactttttcaaataaatgttttcatttacgttcttgaatgtagtatactttttacgttttgaagataacggagttttttttaagtgtttttgtgaagtaattttgttttgacattcattgtattaccacaatttgttgtttttgatttcaacagccgagccttttacttccacaagatcgggatttcatggccagaaccactattcatcatgattcgttccagacaacatactgaatgcttttttgtacataatttccgtcagatagctcgtaggaattggcacaatacaggaat

SEQ ID NO: 12630 - DNA, 367 bp, Glycine max
  Clone ID: LIB3040-058-Q1-E1-H9
ggtttgttgttgtaactcgttcttcttcttttgttgttctgtgtttgtgtttgttttttctctcacctgaaaatgtcttgctgcggtggtaactgtggttgcggaagctcctgcaagtgcggcaacggctgcggaggctgcaagatgtacccagacttgagctacactgagtcaaccaccaccgagaccttggtcatgggagtggcacctgttaaggctcaatttgagggtgctgaaatgggtgtgcccgctgagaacgatggctgcaaatgtggaccaaactgctcctgcaacccctgcacttgcaagtgaggtgttgggagagcaagcttcaagcagagatacccttaattaggaataatgataa

SEQ ID NO: 12631 - DNA, 370 bp, Glycine max
  Clone ID: LIB3040-059-Q1-E1-A1
ggcccaaattttttcatagcattttcagaggaacaatggcgggtagggtttcgacgtgcttcttcttcgtgtttgctctttctctccttcttccttttcagatctccgctgaggaatcatcggagaaagagttcgtactcacattggatcactctaactttcacgacactgtcagcaagcacgatttcatcgtcgtcgagttctacgctccatggtgtggccactgtaagaagcttgctcccgagtatgagaaagctgcttctatcttgagtagtcatgatcctccggttgttttggctaaaattgatgccaatgaggagaagaacaaagaccttgcatctcaatatgatgttgggggatacccaacaat

SEQ ID NO: 12632 - DNA, 390 bp, Glycine max
  Clone ID: LIB3040-059-Q1-E1-A10
ggtgcctggccatccggtttcccagatctgctccttcctcaccccacagaagtcagttgaagagcatgggtcgtggagttagcagtggtggtggtcaaagttccttgggttatctttttggcagtggagaggcccctgccgcaaaaccggcaacaaacaatgccccagcccaacctgaagtgcaggctgtaaataatgcgcctccttcaaaagcatctcctcctactaaaacaatagaccctaacaaggctgctggtataaacagtcattctactgatggccagaacaccggcaacttcatcacggaccgaccctcaaccaacgtccatgctgcccctggtggtggttcttctctgagttatctctttggtggacctggagaggggaaat

SEQ ID NO: 12633 - DNA, 389 bp, Glycine max
  Clone ID: LIB3040-059-Q1-E1-A11
ggtgctctgctcgtgcctctacggttatcagttctccatttccattttctctctcacttttcaagaatcgtaagctatgggaaagtcttacccaactgtgagtgctgattaccagaaggccgttgagaaggcgaagaagaagctcagaggcttcatcgctgagaagagatgcgctcctctaatgctccgtttggcatggcactctgctggaacctttgacaagggcgcgaagaccggtggacccttcggaaccatcaagcaccctgccgaactggctcacagcgctaacaacggtcttgacatcgctgttaggcttttggagccactcaaggcggagttccctattttgagctacgccgaattccaccagttggccggcgttgttgccg

SEQ ID NO: 12634 - DNA, 389 bp, Glycine max
  Clone ID: LIB3040-059-Q1-E1-A12
gatgccgaaaagtactaccaagatggcttcagttgtgtatctcctctttggcttccatctcattgttatcatgtcaagttccttacccgcaactagtgaagtgtttgcaaaacagtagccatccacagaacccgtggaagaaaaactcacccaactccacttctatttccataacaacataacgggggaacacccaactgctatgaaaactgttttgcctcctaaggggtccattcatggttttggggctacttacatgatggatgaccctctaactgaaggaccaagtccaacttcaaagcttgtgggaagatctcagggaatatacgctttggcttcacaacatgaacctgggttgctcatggtgacaaattttcccttcaatttgg

SEQ ID NO: 12635 - DNA, 301 bp, Glycine max
  unsure (1)..(301): unsure at all n locations
  Clone ID: LIB3040-059-Q1-E1-A2
tttggacctacaacactctcgaaccccctcttgtgtgttgtagccgcccccgtgaccatcaatggcggaaactgctgtcgacaaatcncaatctctcgctgaggaatattatgtgaaggataagcaaacagctgtagttgaaaaacctgttgaggtcaaagaagttgaaaacccagangaagctgcttctgaagaacccgttgctgagaaaactgtggaagaaacaactcctgttgcccctgcagttgctcaagaaagcagtgaagttcaccctcctcctgctgaagaaagcactgaagag

SEQ ID NO: 12636 - DNA, 216 bp, Glycine max
  Clone ID: LIB3040-059-Q1-E1-A3
agacgacagaaagggagaacacttgcgcgctgcaggatccaagctcgcatcagtcatcgtgtgtcgaacatcaggcctctctgaagtgttaaaatgtcgccctgagaaaatgcgtgttcatatgcagctctcaaccttcatgaagatggtaacaatgttactgttgacgagaatcgcaccttggtgagaaatgcaaatgttcaagtcgatacctat

SEQ ID NO: 12637 - DNA, 359 bp, Glycine max
  unsure (1)..(359): unsure at all n locations
  Clone ID: LIB3040-059-Q1-E1-A4
gaaagtggacagaagagagcgtcctagtcgcaaccctaataagaagaaccacagcttcaagcgagtgacatccaccagccatgggtcgtatgcacagccgcggtaagggtatatcctcttctgctttgccctacaaaaggacaccccctagctggctcaagatctcttcgcaagatgtggaagaaaatatctgcaagtttgcgaagaagggtttgaccccgtctcagattggtgtcattcttcgagattctcacggtattactcaggtcaacagcgtcactggcagcaaaatccttcgcatcctcaaagctcacgggcttgcgcctgaaattccagangatctttaccatttgattaag

SEQ ID NO: 12638 - DNA, 347 bp, Glycine max
  Clone ID: LIB3040-059-Q1-E1-A5
gaatcctcagaatcagcttcagcctttctctctaactccctcactcacactcacagttaagcaatggcggggaaaggaggaaaggggcttcttgtagcgaaaaccaccgcggctaacaaggacaaagacaaggacaagaagagacctatttctcgttcatctcgtgccggaatccagtttcctgtgggacgtatccataggcagctgaaacaaagggtccaagctaatggacgtgttggtgccactgctgccgtatacttagcctcaattcttgagtatcttactgctgaagttcttgaacttgctgggaatgcaagcaaggatctgaaggtgaaaaggataacacc

SEQ ID NO: 12639 - DNA, 348 bp, Glycine max
  Clone ID: LIB3040-059-Q1-E1-A6
gaaactcgttctagtgtgtgattgtttgttgttgtaactcgttcttcttcttttgttgttctgtgtttgtgtatgttttttctctcacctgaaaatgtcttgctgcggtggtaactgtggttgcggaagctcctgcaagtgcagcaacggctgcggaggctgcaagatgtacccagacttgagttacactgagtcaaccaccaccgagaccttggtcatgggagtggcacctgttaaggctcaatttgagggtgctgaaatgggtgtgcccgctgagaacgatggctgcaaatgtggaccaaactgctcctgcaacccctgcacttgcaagtgaagtgttgggagagc

SEQ ID NO: 12640 - DNA, 399 bp, Glycine max
  Clone ID: LIB3040-059-Q1-E1-A8
ggtgttccaaaacggaacccccccggccctggtccaaacctggccgccgtcatcgacgagaaggaacaaatttgaatttgaagaaagatgggagagaggaaggtgttgaacaagtattacccaccggactttgatccgtcgaagcttcccagagcaagaaggccaaagaaccaccagatcaaggtccgcatgatgcttccaatgagcattcgatgcaacacttgtggtaattacatctacaagggacccaagttcaattccagaagggaagatgttattggcgacacatatctgggaattcaaatattcaggttctactttaaatgcactaagtgctcagctgaggttaccatgaagactgatccgcagaattcggattacatcgttgaatccggggcc

SEQ ID NO: 12641 - DNA, 370 bp, Glycine max
  Clone ID: LIB3040-059-Q1-E1-A9
ggcgactgagaagtgcgacgctgctgcaaagtgcaagcggatttggtcttcttctttactcccaatcatttctctgtgcaaggataagtgtgttatctatctaataacacaagatgtcagctgggcctggacttgaatctctagtagatcagacaatttcagtcattacaaatgatggacgaaatatagtgggaatcctgaaaggttttgaccaggcaacaaatattattcttgatgagtcccatgaacgggtttattctacaaaggaacgtgtgcaacaacttgttcttggtttgtacatcatcaggggttaaaatataagtgttgttggtgaactggatgaaaaactagattccaatcaggatttgtc

SEQ ID NO: 12642 - DNA, 220 bp, Glycine max
  unsure (1)..(220): unsure at all n locations
  Clone ID: LIB3040-059-Q1-E1-B1
caccttcctcgttctcattctcctcgctctcggcatcctctccattcccagctcctcgcgcggcaatttgcccaaacctaacgatctcgcatccatcgctcgcaacacaatcgagacttccgacagtgacgagaggggggagcagtgggttgaagtagtgtcgtgggggcccagagcctttgtttatcacaattttctgaccaaggangaatgcgaatat

SEQ ID NO: 12643 - DNA, 292 bp, Glycine max
  Clone ID: LIB3040-059-Q1-E1-B11
gacagtaatgatggtcacgtctcaccttccgagacccttttcttgaaggaaactctactccaccaaaaccttgccttttcttggtgaagaagaacaagaagaaaaataccaataataacaacaacaataataataaatatattattgttgttattgttattaaaaattatgacggaagtgcttcagttgccttcatcctcaagctgttcgcgtcggccatgtggtggtctcacacccaatgatgggtcgcacccgattccccttattaacgctcccactgtggaagaacaac

SEQ ID NO: 12644 - DNA, 347 bp, Glycine max
  Clone ID: LIB3040-059-Q1-E1-B12
ggaaacgagggtaaggtcacgttgtgttgcgtcgtgtcgtgcgctgttcctctgtccgtcgtttttgttttcagaccaaaccctagctccgcatcgcaaccatgtcgaccaagcaaggtggaaaagctaagcctttgaagaaacccaagtctgataagaaggattacgacgaggttgacatggctaacattcagaataaaaaggaagatgagaatgcgctaaatgagttgaaagccaaggcgcaacagaagggaagctttggaggttctgggctcaagaaaagtggaaagaaataagggctctttatcatgattgtatacatccaatattgagccctgtaatttatt

SEQ ID NO: 12645 - DNA, 343 bp, Glycine max
  Clone ID: LIB3040-059-Q1-E1-B3
gattgttggcttgtgctctgctcgtgcctctagggttatcatatctccatttccatttcctctctctcagtttccaagaatcttaagctatgggaaagtcttacccaaccgtgagcgctgattaccagaaggccgttgagaaggcgaagaagaagctcagaggcttcatcgctgagaagagatgcgctcctctaatgctccgtttggcatggcactctgctggaacttacgacgtgagctcgaagaccggtggtcccttcggaaccataaagcacccctccgaactcgctcacggcgctaacaacggtcttgacatcgctgttaggcttttggagccactcaa

SEQ ID NO: 12646 - DNA, 156 bp, Glycine max
  Clone ID: LIB3040-055-Q1-E1-A3
ggggtctagttagagtgaatccatgaccgtgaccatggcggctgcgtttacaagtacaagtgcaacactgagactgtcaaatgttggagagagcagaggtttgcagctgcgtaagtgtaaccctaatcctaataagctgaaggttatgggggggtt

SEQ ID NO: 12647 - DNA, 285 bp, Glycine max
  Clone ID: LIB3040-055-Q1-E1-A4
gatcgtagcgccagactgagaggaagagagagggagattctttgtttgctaccttctctcggaaaaatggttacgttcaggtttcaccagtaccaggtggttgggagggctcttcccacggaagcagatcagcaccccaagatctaccgaatgaagctctgggccaccaacgaggttcgcgccaagtctaagttctggtattttttgaggaagctgaagaaggtgaagaagagcaatggtcaagttcttgctatcaacgagatttttgagaagaacccaaccaag

SEQ ID NO: 12648 - DNA, 326 bp, Glycine max
  Clone ID: LIB3040-055-Q1-E1-A5
gactgcgaaccagtagggactcccattccgactcttagccgccgatctctcagggcttgcatcttctcaggtaagctgtgaagatgtacacatcaaggaagaaaatccacaaggataatgatgctgaaccaactgaatttgaagagtcagttggacaggcattgtttgatctggaaaataacaatcaggagctttaaagtgacctgaaggatttatacataaactcagccgtgcaagttgatgtttctggaaaccgcaacgctgttgttattcatgtcccttacagattaaggaaacgtttccgtaagattcatgttaagcttgtc

SEQ ID NO: 12649 - DNA, 331 bp, Glycine max
  Clone ID: LIB3040-055-Q1-E1-A6
gatagctgagagagaaaggaaaggttaactaagaagcaatacttcaatggccacccttgttgttcataaccaaacttcttctgctcaagatgctgaggctctccaacaggctttcaaaggatggggggctgatgacaaggccattatagcaatactgggtcacagaaatgttcatcagaggcaagaaatcagaaaagcttatgaggagatttaccaagaggatctcatcaaacgccttgagtccgagatctctggtgactttgagagagctatgtaccggtggatgttgcagcctgcggatcgtgatgctgttttggtgaatgtggcaatc

SEQ ID NO: 12650 - DNA, 330 bp, Glycine max
  Clone ID: LIB3040-055-Q1-E1-A8
gattcattccccttatctttctctcttctctctccccgcccaaaccctaactccctaccctattccgctttctctcatccatcatgaaaggaggaaagtccaagaccgaatctaagagagccgatgccaaacttgctgtgaataagaagggcgccgccaccaagactaggaaacccgccggaaaggggaaggcagcgaaagatcctaacaagccaaagaggcctccaagtgctttcttcgttttcatggaggaattcaggaaggtgttcaacaaggaacatcccgacaacaaagcagtgtctgctgtgggcaaagctgctggagcaaaat

SEQ ID NO: 12651 - DNA, 64 bp, Glycine max
  Clone ID: LIB3040-055-Q1-E1-B10
taagagagaaggataaaaaatatagagagagagaaaaaaaaaggaaagatggtgcaggagagag

SEQ ID NO: 12652 - DNA, 279 bp, Glycine max; identical to SEQ ID NO: 12394
  Clone ID: LIB3040-055-Q1-E1-B11

SEQ ID NO: 12653 - DNA, 353 bp, Glycine max
  Clone ID: LIB3040-055-Q1-E1-B12
ggactccctctattattatcattattcttgcggtcttcatctctccaatatctctgcacacacaaaaacagagtttaactaggaatcaaccaaaatggacaaagttaacaccaccaacaacagcaacagcaacagcaacagcaacagcaacaacaactgtgggttcatgtcgtgcgacaaactggaccgagtggccaactgggtcggcgccaacgttgcctctgctttctttgcatccttggagcggtgctcttgcatcaacctcagcatcaaagacaacgaagatgacaccaacaacgatgatcgccctctcttcctctctcaacccactactcctttttcctccaactcca

SEQ ID NO: 12654 - DNA, 271 bp, Glycine max
  Clone ID: LIB3040-055-Q1-E1-B2
ggtatttcatttcatttccctccccccactcccaccgccaacgccaaacaaaccctaaatctctctcgtcttcttcttcttcttcctccttcaaccatgagagagatcctgcacgttcagggaggccaatgcggtaaccaaatcggttccaagttctgggaggtgatatgcgacgagcacggcatcgatcctaccggaaagtacaacgacgaaggcaacagcggcatccaactcgagaggatcaatgtctattacaatgaggcctctggcg

SEQ ID NO: 12655 - DNA, 118 bp, Glycine max
  Clone ID: LIB3040-055-Q1-E1-B3
aaccaccagctgaacatgatttcaatctgagtaaatgtataccactaccctcaacttgtgtacagattctccccacgggatgaggaaaatcatgtaaattcaatatatttttttttcc

SEQ ID NO: 12656 - DNA, 311 bp, Glycine max
  Clone ID: LIB3040-055-Q1-E1-B5
gtgaattaagtaaatcaatggatagtcttggtcctattgaaaataccagtctaagggaagaccctaaaattttaaccgatatagaaaaaaaaattcacagggatttggattatttagaaatggaaggttttttttctagcgatctgaatactgtttctaagaatgatgatgatcattacatgtatgagactcaatttagttttaacaataatattactagtttcattgatagttgcattgagagtttcaatttaggtgatattgacaaatacaatgatatttatttttatagttacatttttttgaagggc

SEQ ID NO: 12657 - DNA, 376 bp, Glycine max
  Clone ID: LIB3040-055-Q1-E1-B6
agacgacagaaggggattgttggcttgtgctctgctcgtgcctctagggttatcatatctccatttccatttcctctctctcagtttccaagaatcttaagctatgggaaagtcttacccaaccgtgagcgctgattaccagaaggccgttgagaaggcgaagaagaagctcagaggcttcatcgctgagaagagatgcgctcctctaatgctccgtttggcatggcactctgctggaacttacgacgtgagctcgaagaccggtggtcccttcggaaccataaagcacccctccgaactcgctcacggcgctaacaacggtcttgacatcgctgttaagcttttggagccactcaaagccgaatttcctaatttg

SEQ ID NO: 12658 - DNA, 346 bp, Glycine max
  Clone ID: LIB3040-055-Q1-E1-B7
ggcccaaattttttcatagcattttcagaggaacaatggcgggtagggtttcgacgtgcttcttcttcgtgtttgctctttctctccttcttccttttcagatctccgctgaggaatcatcggagaaagagttcgtactcacattggatcactctaactttcacgacactgtcagcaagcacgatttcatcgtcgtcgagttctacgctccatggtgtggccactgtaagaagcttgctcccgagtatgagaaagctgcttctatcttgagtagtcatgatcctccggttgttttggctaaaattgatgccaatgaggagaagaacaaagaccttgcatctcaata

SEQ ID NO: 12659 - DNA, 322 bp, Glycine max
  Clone ID: LIB3040-055-Q1-E1-B9
gacaacacagactcacacaaagagttacaagagaaatcatcatggcatcagcagcatctgggtttgtgttgtcacttaatgttgcagctgccaccacaaactcaagggtggtcatgttcaacaccaagaacaacacttctaggtttgttgtaaaggcttcagatgagcctgcagcggcggcacccgccaccgccacacccccagctgaagctgaagctaaaccaaagccaccacctattggccccaagagaggtgctaaggtgaagattcttaggaaggaatcttactggtacaaaggcaccggttcagtggttgctgttga

SEQ ID NO: 12660 - DNA, 309 bp, Glycine max
  unsure (1)..(309): unsure at all n locations
  Clone ID: LIB3040-055-Q1-E1-C1
ggtggttcttgtttgcgagatagaagcgtaagcagcggctaccctaacctcgtcttcctctctactaatttcagctatggccgacgaagctgtggttgttccagatcccacccagatcgatgtcaagctctttaaccgctggagcttcgaggatattgaggttactgacatttcactggctgattacattggagttgcggcatccaagcacgccacatatgttcctcacaccgccggaaggtactccgtgaagcggttcaagaaggcgcagtgccccattgttgaaaggctcancaactctctcatgat

SEQ ID NO: 12661 - DNA, 262 bp, Glycine max
  unsure (1)..(262): unsure at all n locations
  Clone ID: LIB3040-055-Q1-E1-C10
ggtttagaacanacataagtacattatctaaaaaacatttaaccaacagacacactaacgtactaaagtgatttatgattatgaagaaatgccttttttattatgtaaatgccaattcgttatggacaatttggcatggagtttaccctttcttgtaaatgttactttttgtaggaaatgggaattctcaaaattaatgaacctgcgttggattttgatctgcaacagttcttttcgtgttatttgacacatgcaaaggaat

SEQ ID NO: 12662 - DNA, 329 bp, Glycine max
  Clone ID: LIB3040-055-Q1-E1-C11
gacatctctctatcttctcaatcttcatctccaacaagtgtttctgtaaccatggcatccaccactctatcccctacaaccccttctcagctatgctcaggaaagagtgggattttcagtccctcacaggcacttcttgtgaagccagtgaagaggcagatgatggggaagagcaagggaatgagaattgcatgccaagccaccagcattcctgctgatagagtccctgacatgggcaaaagacagctcatgaatctgcttcttcttggtgccatttcactcccctctgctggaatgcttattccctacacctacttttttgtccctcc

SEQ ID NO: 12663 - DNA, 328 bp, Glycine max
  Clone ID: LIB3040-055-Q1-E1-C12
gagatctgctgcttctcattgttgaaaagaaaccctagcaagtggagcaatggcagacgttgaagtcgatgtggcggcagcagcagcagcagggctgccgaagaagagaacgttcaagaagttcagttttcgaggcgtggatctcgatgcacttctcgacatgtccaccgatgaactcgtcaagatgttcagtgcccgcgctcgtagaaggttccagagaggcctcaccagaaagcccatggccttgatcaagaagctccgtaaagcgaaaagggaagctccaccaggtgagaagccagaaccagtacgcacccacctccgcaacatg

SEQ ID NO: 12664 - DNA, 253 bp, Glycine max
  Clone ID: LIB3040-055-Q1-E1-C2
aggtgattttgagcattacatcttctaaatttgcattatattactctttttttattattattttagtggtttgtcttctgaacgggtagttctcagcctccttgcctgcttgaggcactttatagacttgtaaagaaaggtcaagttaatgaaacaagtttgcttaaaaaaagagaatcgaaaaaaaaaaaaaaaaaaaaaaaaaaaaaaaaaaaaaaaaaaaaaaaaaaaaaaaaaaaaaaaacacccaagg

SEQ ID NO: 12665 - DNA, 327 bp, Glycine max
  Clone ID: LIB3040-055-Q1-E1-C3
ggggtacactcaccacacactacacactagtttgtgtttttcgcgccactcagttattcatttagaaagctactgctgagttcacaagtttctcaagcttgatggggacacaaaagtctaatatgtttgatgcacctttcaaatacatggtgcctgaagataaggaaattcccgacagacctttgccatcacattggactccttctatgcaggcatataacacttctgggtctactccaactccctttttaaatcaacaggcagctggttctcacatgcctctctacatgtgggtaaatcaggtaaacaacacactacctcaatccg

SEQ ID NO: 12666 - DNA, 305 bp, Glycine max
  Clone ID: LIB3040-055-Q1-E1-C4
ggcagcgcttgagaccaagccccactcaaccaccacaccactctctctgctcttcttctacctttcaagtttttaaagtattaagatggcagagacattcctatttacctcagagtcagtgaacgagggacaccctgacaagctctgcgaccaaatctccgatgctgtcctcgacgcttgccttgaacaggacccagacagcaaggttgcctgcgaaacatgcaccaagaccaacttggtcatggtcttcggagagatcaccaccaaggccaacgttgactacgagaagatcgtgcgtgacacct

SEQ ID NO: 12667 - DNA, 122 bp, Glycine max
  Clone ID: LIB3040-055-Q1-E1-C5
gaagaagggttcgtagacagcccgaaagaaggtcctctcttcgtattctatagaaagacgaaatagcgtaagagaagaaagtagaaaggatttggattcgaggcttgctaggtgaagtcaac

SEQ ID NO: 12668 - DNA, 326 bp, Glycine max
  Clone ID: LIB3040-055-Q1-E1-C6
tccctatacttctttctctttctctctcactcagatttgtaaccattgcaattcgcaattccatctatcttctcttctcctccttatatattccactccgctgggtaccctctcccccttattcctcacttctcttctcttctcttctcttcgagggtacccctcctcgcagatccgatccgcacccttcactaaacccattattattgattattgattgataataacatttgggtttcattttcattccaagttgttgcatttttcaacatgtctttagctcactgctgaaccccttttctttctttctttgcccccttttgtcc

SEQ ID NO: 12669 - DNA, 276 bp, Glycine max
  Clone ID: LIB3040-055-Q1-E1-C7
gatagcaaaatcgtttctccaatttaatcaccattgtacaacccaattcccttcgtcgttttcgattaagagagcaatggcacgtaccaagcaaaccgctcgcaagtccaccggaggaaaggctccgaggaagcaattggcaaccaaagccgctcgcaagtcagccccggcgaccggcggagtgaagaagccccaccgcttcaggccaggaacggtggctctgaaggagattccaaagtaccagaagagcaccgaacttccgattcgaaaactccc

SEQ ID NO: 12670 - DNA, 318 bp, Glycine max
  Clone ID: LIB3040-055-Q1-E1-C8
ggttctagtgtgtgattgtttgttgttgtaactcgttcttcttcttttgttgttctgtgtttgtgtttgttttttctctcacctgaaaatgtcttgctgcggtggtaactgtggttgcggaagctcctgcaagtgcggcaacggctgcggaggctgcaagatgtacccagacttgagctacactgagtcaaccaccaccgagaccttggtcatgggagtggcacctgttaaggctcaatttgagggtgctgaaatgggtgtgcccgctgagaacgatggctgcaaatgtggaccaaactgctcctgcaacccctgcac

SEQ ID NO: 12671 - DNA, 213 bp, Glycine max
  unsure (1)..(213): unsure at all n locations
  Clone ID: LIB3040-055-Q1-E1-D1
aaaaaaacaacaaaaggaaaaatacaaggtgaagtcaatcatgtccttcaactaacttgatggcaaggccaanatataacagttatagaaaaaaaaaggctattatgcttaaaaaaaaaaaaaagaagaatattacgaaactgtaaaataaagctcaaacaaagcaagttcaaccacaaaccagacttttaataaataacgtatattttctcc

SEQ ID NO: 12672 - DNA, 319 bp, Glycine max
  Clone ID: LIB3040-055-Q1-E1-D11
gactgccgcggaaacagaacagggactcactctcttcgcagcggcactctcggtggctttcatcttctcggggtgagttgtcaagatgtacacatcgaggaagaaaattcacaaggataaggatgctgagccaactgaatttgaggaatcagttggacaggcattgtttgatctagaaaataccaacaatgagctgaaaagtgatctgaaagatttatacataaactcagctgtccaaattgatgtttctggcaaccgaaaggctgtggttatccatgtcccctacagactaaggaaaggattccggaagattcatgtc

SEQ ID NO: 12673 - DNA, 296 bp, Glycine max
  Clone ID: LIB3040-055-Q1-E1-D12
gtggaacacacctgacacctgatccgcgagcgagggtttgtgaagatgacgacgattcgcaggttttgctgcaacgatcttcttcgctttgccgccgtcaatctcgaccatctcaccgaaacagtaagcgtttttttgtcctttttccatttgatactgaatctgactgtgtattcgcttaattgcttcattggtttagttcaacatgtccttctacatgacctatcttgcaagatggcctgactatttccacgttgccgaaggccctggaaatcgaatcatgggttacagtgagt

SEQ ID NO: 12674 - DNA, 279 bp, Glycine max
  Clone ID: LIB3040-055-Q1-E1-D4
agcaacatggtgaagctggtggagagatttacttgccagaagcttacgttagaaccaagaggactacttaatggagcaaatcagttggaagaacttgtagctagcttcccaactggcttatctgagtgtggagaagcattatcaagccttaggagtaggagaacgagtactgtttgtgatgaatgtctatggtttaagaaatctgtctttagtcaacttgtgtgtttcgttattcagttctcagcaataaactgctctggcaatctagtttcatgttcc

SEQ ID NO: 12675 - DNA, 336 bp, Glycine max
  Clone ID: LIB3040-055-Q1-E1-D5
ggttgtgtgagtgaagaagcagagggagtagcggcattaaaaatgtagatcttcgtgaaaactctgacagggaagactataaccctcgaggtcgagagcagcgacaccatcgacaatgtcaaggccaagattcaagacaaggaaggcattcctccggatcagcagcgtttgattttcgccggaaagcagcttgaagatggaaggaccctggccgattacaacatccagaaggaatcaacccttcatctcgtcctcaggcttcgtggtggcatcattgagccttccctcatggctttggctcgcaaatacaaccatgacaagatgatttgccgcaag

SEQ ID NO: 12676 - DNA, 250 bp, Glycine max
  Clone ID: LIB3040-055-Q1-E1-D6
gagtcacagtagggttaccttgcctcgcaaacgcagttgctttgctttgcaggtcgcaaaacgccacccttctctctctctctctcgtgatcctatctatctgtctatcatttaatttaatttcattctcttcctatcgaatctctctgcaacaccagcatccctgcatcaatgggcgcttctctgccccccaaggaggccaacctcttcaagcttattgtcaaatcatatgaaaccaaacaatattaaa

SEQ ID NO: 12677 - DNA, 337 bp, Glycine max
  Clone ID: LIB3040-055-Q1-E1-D7
ggcagtgtgtgctactttccattcgttcaccgccccaatctctgcagcgccttcgatctagaaaacatgactaagagaacaaagaaggctggcattgttggaaaatacggtacccgttatggtgccagtctgcgaaagcagattaagaagatggaagttagtcagcacagcaaatttttctgtgaattttgtgggaagtatgctgtgaagaggaaagctgtaggaatatggggatgcaaggactgtggtaaagtgaaagcaggcggtgcttatactttgaataccgcaagtgctgtgacggtacggagcaccatcaggaagttgaaggaacaaactg

SEQ ID NO: 12678 - DNA, 298 bp, Glycine max
  Clone ID: LIB3040-055-Q1-E1-D8
gattttgatagggtttataggaaaagcagcatacccgagttcacaaacactgaacgccgctgctccgtagtttcgatcgacgcattcttcacttcaagatatcacagtgtctatagcgcacagcctcactactccactctcttcttcttcctctgctttcttagctccttcttccttcaattgcaggggacaggtttcgttgcctgtgaagagcgtgagcatttgcaaatgcgttgccacacccgaagctgagactgcctacaagacaggggtcaatcgcaatccagatatggggaaa

SEQ ID NO: 12679 - DNA, 102 bp, Glycine max
  Clone ID: LIB3040-055-Q1-E1-D9
gacgccgttagacgtaacggcgggaggtacggtggtggtgttgttgccttggttttgagtttggtttttgggttaccgttaatgctttgatgtgagttaatt

SEQ ID NO: 12680 - DNA, 300 bp, Glycine max
  Clone ID: LIB3040-055-Q1-E1-E1
gacaaacagcagcgtcttggtttgtgagagagacagaggcacagagagaaaatggtttcggggtcaggaatctgcgcgaagagggtagttgtggacgcgcggcaccacatgctggggaggctggcatcgatcgtggcgaaggaacttctgaatgggcagaaggtggtggtggtgcgctgcgaggagatttgcatctccggtgggctcgtcaggcagaagatgaagtacttgcgtttcctccgcaagcgcatgaacaccaagccctctcacggccccatccatttccgtgcacccggcaag

SEQ ID NO: 12681 - DNA, 299 bp, Glycine max
  Clone ID: LIB3040-055-Q1-E1-E11
gaaagtgttgaatttacagtgtagtagtaaagtgagtagagaaatcgaagttgaaaagataatagatagtaacagcatcattcatcactcatcagagatggctaccgttgaaagtagaagcaaatcagtggtattggctctctccaagtacctatcattggatcctagtgttgttccagccgatacttcagacagtgatattaagagtctttacctgaacatcatagcggtatcaggacatggggttaatcactctgatgaggtgttgaagtgggtagcatttgcagaagccttccctg

SEQ ID NO: 12682 - DNA, 309 bp, Glycine max
  Clone ID: LIB3040-055-Q1-E1-E2
gacgttcacattcaggaatcgttttcttcagaaatttgccatcgttgagagaagcgtgagagccttagtcgttcaagatgagagctaagtggaagaagaagcgcatgaggaggttgaagaggaagcgccgaaagatgagacaaagatctaagtaggtgcttgagcaggagttgagatgagctttccatctgctaccagcctcatgacattttaggctgttatggctcttatgatcttgaggtctagtcgctaggggagcttcactcttgacttagtttgctttactggtcctggtcctggtccaagact

SEQ ID NO: 12683 - DNA, 344 bp, Glycine max
  Clone ID: LIB3040-055-Q1-E1-E3
ttctccactagtttccattacactccatacgcattttactaatccaaacaatgaaacataatgccattccattccatcatctaccaccaatccaaatataaccaaaagtatgaaatccacttaaagagcgaagttataaccacattaaaaatcgtaatagaataatatgcacacacacacataacaaatcatggaactattaaaatctcaaccatgaactttaaaactaacaaccataattccatattttatcctctaaaagtctaaagcacactcttaaaatcagatgaaccaaaccatccaagcaatgtcgcaaaaacctctaaaattaaacaagtcctccc

SEQ ID NO: 12684 - DNA, 271 bp, Glycine max
  Clone ID: LIB3040-055-Q1-E1-E4
gacaccgcaaactctctctgtaaagtgcaaagcctctattttttcttgtgaatttgaaggacgatgagttccacagaggtcgcagccacaacgaagaagggtggaagagggaaacccaagaccacaaagtccgtttcccgttcctccaaagccggccttcagttccccgtcggccgcgtcgctcgctacctcaaggccggtcgctatgcccagcgcgttggttccggttcccctgtttacctatctgcggttctcgaataccttgccgctg

SEQ ID NO: 12685 - DNA, 356 bp, Glycine max
  Clone ID: LIB3040-055-Q1-E1-E5
gattctcccacaacacaacaccttttccttttcccttccgttggtgccattcgtgcagcaccggatcctctcatttctccggcgataactctcccttttccggcgaattcaccgcttcctcgatatgaatcccgagtatgactatctgttcaagctccttctgattggagactctggtgttggtaaatcatgccttcttctaagatttgctgatgattcatacattgagagctacataagcaccatcggagttgattttaaaattcgcactgttgagcaggatgggaagacaattaaactacagatttgggatactgctggacaagaacgatttaagacaataactagtaactact

SEQ ID NO: 12686 - DNA, 307 bp, Glycine max
  Clone ID: LIB3040-055-Q1-E1-E6
gactcatctcttacaacgaaaccctcttcatcttgttctatctgtgacgagcatcatggcctcaagagcagtgttattgttggctatgtgtgtgcttccggcgatggttgtggccattcgcccagcaaagaaccctttttgcgtgaagggtcgtgtctactgtgacccttgccgtgctggttttgagacctcagctaccacctacattgctggtgctgagattatgttgcaatgcaagagcagggttagcaacgaggttgtgtacacgaagaaggggtacaccgactcaaccggagcatacacaatg

SEQ ID NO: 12687 - DNA, 308 bp, Glycine max
  Clone ID: LIB3040-055-Q1-E1-E8
gacacgttaacatatccaacccatttcatcgctcttcacataaacttcaagcgagcaaacaaacaactagcaagggaagaaagaaactacagaaaagaaatggcttccacttctgcagtttcaatggctatgccagtaacttatgctagccagaagagggtggtgcctagctcggatgcattcttcaagccactgcctctacggtcttccaaggcagtgacagcatcaaaactcaatggaaggtttcaagtgagggcctccatgaaggagaaagttgtgacggggctcaacgcagctgcattgacagc

SEQ ID NO: 12688 - DNA, 320 bp, Glycine max
  Clone ID: LIB3040-055-Q1-E1-E9
gactcactcatacaatagagaccagcttttgcttctttgtgaacatggagatgaggaaatcatgtggcttcttcttcttgctcctcctccttgtctttgcttcccaagtggtggtgcagacagagggaagagtgtgtgagtcacaaagccacgggttccatggtttgtgtaatagagaccacaactgtgctttggtctgcaggaacgaaggtttctccggtggcaggtgcaaaggcttccgccgccgctgcttttgcaccaggatttgttgagatctcatcaaacactactcttgccatgcaaattaataaatcatagct

SEQ ID NO: 12689 - DNA, 291 bp, Glycine max
  Clone ID: LIB3040-055-Q1-E1-F1
gagggagagagaaaaaggagaaccttcttttctctgtttttttgttgttattcttcttccagacctaaagacccaaagcaccgattctgatttcaagaattacatcatcatatcaagaaaaccttggaactacacaaaaatggtgtcggcgaacaaggagatggtcgtgcactgctttgacaccctcctcgctcactacaacagcacggaagcacctcctcctgccttcgatcaggctcaacatccattgtttgttacatggaagaaagtggtgaatggtggagatcctcg

SEQ ID NO: 12690 - DNA, 342 bp, Glycine max
  Clone ID: LIB3040-055-Q1-E1-F10
gcacaccaagtcctgctcttcttccagagcaacaacaaacaaaccctttctttctggcttcagtttttgcagtgaaaatggcggtgactttaacatcaaccctctttatggctttgctatttgctgcttcagcttttgctgctcttcagcctagagtacctgaagcttaccttcaaaatggaaactttgaggagcagccaaaccccaaaaacctccagaaaacaaagctcatggggaaatattctttgcccaaatgggaagtcaatggtctggttgagtatgtctctgggggtccccaacctggaggcatgttcttcccagtgactcatggaatccatgctg

SEQ ID NO: 12691 - DNA, 298 bp, Glycine max
  Clone ID: LIB3040-055-Q1-E1-F11
ggtgattgagtttggctgtcataatctctctctcatccgaaaatgtcactcaccttgcaaactccgccttctacaactctctcttctgcatctcccattcacagaacaataacaagatacaccacattctccttctcgcttcgtcctccaacaactcttcacttcaatccccacaggtccctccctctaattcgcgcttccaattcttctatcaatgccgcttcgaccactgaactggacgctgtgtccgccttcagcgagatcgttcccgacaccgtcgttttcgatgatttcgaaa

SEQ ID NO: 12692 - DNA, 387 bp, Glycine max
  Clone ID: LIB3040-055-Q1-E1-F12
cccgggctcaaccaagccttaataacggttgcaaaaagacaacagaaggggtctgttaacaggcttcgctatcatttttcggagcaatctgcttctgcatcaaggaaggacatcttgttcttcactatcaactagtatgttgtcaggtgaagatggtgtcactgcagttcaaccagctgctgctgctgctatcataccagacgaactagtggatatcatgactgtcttacatcttgtgatcagaacatcgctggattatggtgggttgtctcgtcgtcatcatggtggtgcaataattaatgagcatcatgctgcacaccgctgtcttcctgcagaatactgtgaccatgctgacgatgttcaactgaataacgccctttgtgcaca

SEQ ID NO: 12693 - DNA, 77 bp, Glycine max
  Clone ID: LIB3040-055-Q1-E1-F2
gtcagcttttgcctttgatacagtgccactgcattattaaacatttgaacgaattggtagatcatctttagatcccc

SEQ ID NO: 12694 - DNA, 307 bp, Glycine max
  Clone ID: LIB3040-055-Q1-E1-F4
gggcatagcaaaatcgtttctccaatttaatcgccattgtacaacccaattcccttcgtcgttttcgattaagagagcaatggcacgtaccaagcaaaccgctcgcaagtccaccggaggaaaggctccgaggaagcaattggcaaccaaagccgctcgcaagtcagccccggcgaccggcggagtgaagaagccccaccgcttcaggccaggaacggtggctctgagggagattcgaaagtaccagaagagcaccgaacttctgatccgaaaactcccattccagaggctcgtcagagaaatcgct

SEQ ID NO: 12695 - DNA, 335 bp, Glycine max
  Clone ID: LIB3040-055-Q1-E1-F5
gacacgcattcctcgattggaagactggcctgttatgcccgtggaacgcattggtttcatgcttatgccgcatgggtttttcaattgctcgcctgctgtagatgttccacctaacccaagtgatttggatgacaaagagaatggcttgccagccaagcctattcagaatgggctaattgccaagctttgaaaggataaaaaatgaggatctgccactttacgtggttatgttcaaattattaaattttcaatactattgtttgggctggtgttcaaaccttagctggataattaagaaacgcctatattgtagaaaaaaaaaaaggtgcaagaag

SEQ ID NO: 12696 - DNA, 314 bp, Glycine max
  Clone ID: LIB3040-055-Q1-E1-F6
gaattccaatatattccattctctctgtgtatttccctacctctcccttcaagatgcagatcttcgtcaagaccctcaccggcaagaccatcacccttgaggtggaaagctctgacaccatcgacaacgtcaaggccaagatccaggacaaggaaggaatccccccggaccagcaacgtctcattttcgccggaaagcaacttgaggacggccgtacccttgctgactacaacattcagaaggagagtactcttcacctcgtcctccgtctccgtggtggcatgcagatcttcgttaagacactcaccggcaag

SEQ ID NO: 12697 - DNA, 347 bp, Glycine max
  Clone ID: LIB3040-055-Q1-E1-F7
gattggaatgtggaaagagtctccgcagtcctcaccagaagcaaaaagactgggttttggcgttaacctaagcgaagagagagagaggttgaagaaggtgaattgaatggcttcctcatcctcttatcctcggacggaaggtgaagaagagtatgggtctgaatcgggatgggtggatgctcgaagttggtgcgatcacctggcatcatccttatcggaggatctagggcagattccggggcctgatactccgtgccagacctgccaacacccaactgaaaactggttgtgtctgtcctgtaagcaggtcctctgtaaccgttttgtgaacaagcacatgctccaac

SEQ ID NO: 12698 - DNA, 240 bp, Glycine max
  Clone ID: LIB3040-055-Q1-E1-F8
gcacttcaattgcaatcaaattagttcattctctttgcgcagttccctacctctcctttcaagatgcagatcttcgtcaagaccctcaccggaaagaccatcacccttgaggtggaaagctctgacaccatcgacaacgtcaaggccaagatccaggacaaggaaggaattccccggattagcaacgtctcatcttcgccggaaagcagctcgaggacgggcggtacctcgccgactaca

SEQ ID NO: 12699 - DNA, 289 bp, Glycine max
  Clone ID: LIB3040-055-Q1-E1-G1
ggtcaagcctgccgagaaaaccctagttcgcttgcagtcacacaagaggccaatcctattcacagctcgagatgggtgaagaagtgaaggtagttgttccagaatcagtgttgaagaagcgcaagagggaggaggaatgggcgttggccaagaagcaagaactcgatgctgccaagaagaagagagccgagagccgcaaactcatctacaacagagctaagcagtacgctaaggagtacgatcaccaggagaaggaattgattcggttgaaacgcgaggccaagctgaa

SEQ ID NO: 12700 - DNA, 364 bp, Glycine max
  Clone ID: LIB3040-055-Q1-E1-G10
gaccgccgttctcatctctcttcccagccctcacctcaacgctgcatcttcacgtcgtctcacgaggtgcatatagtagagagggaaaatgagtcgaggaggcgcagtagcagcagcgaagggaaagaagaagggtgctacattcaccattgactgtgcaaagccagtggaagataagatcatggacattgcttctctcgaaaagtttcttcaagagaggatcaaggttggtggcaaagctggtgctcttggtgacagtatcactgttacccgcgagaagaccaagatcattgtcacctctgacagtaacttttccaaacggtatttgaagtacttgacgaagaagtacttggaagaacacaat

SEQ ID NO: 12701 - DNA, 320 bp, Glycine max
  Clone ID: LIB3040-055-Q1-E1-G11
gagcgaaacagagagtggtttcagtgagtgatcggtgttcacttgatccttcataagtcgtcatcatcatcatcatcatcaccgttgattgaagaagatgccgatcagaaacatcgccatcggaaggcctgaagaggctactcaccccgacacgttgaaggcggggttggctgagttcatctccaccttgatcttcgtgttcgccggttcaggttccggcatcgcctacaacaagctcaccgacaacggcgccgccactcccgccggcctcatctccgcttccatcgcccatgctttcgccctcttcgtcgccgtctccg

SEQ ID NO: 12702 - DNA, 298 bp, Glycine max
  unsure (1)..(298): unsure at all n locations
  Clone ID: LIB3040-055-Q1-E1-G2
gctcttcacacctttgttcactcttcttctcttgcggctagggttttagcgcagcttcttctagatttaaggaagatgggtaaggaaaaggttcacatcagtattgtggtcattggccatgtcgactctgggaaatccactaccactggtcacctgatttacaagcttggaggcattgacaagcgtgttattgagaggtttgagaaggaagctgctgagatgaacaagaggtctttcaagtatgcctgngtgctggacaaacttaaggctgagcgttaaagaggaatcaccattgata

SEQ ID NO: 12703 - DNA, 310 bp, Glycine max
  Clone ID: LIB3040-055-Q1-E1-G3
ggccattgttgttgctattatcatccgcagctgcttttattcgcaccgcaaacagtgagccatggccgtcggaaagaacaagcgcatctccaaggggaagaagggtggcaagaagaaggcagctgatccctttgccaagaaggattggtatgacattaaggctccttctgtttttcaagtgaaaaatgttggcaaaaccctcgtctctcgtactcagggtaccaagattgcttctgaaggactcaagcatagagtgtttgaggtctccttggctgatcttcaaggggatgaggatcatgcattcaagaag

SEQ ID NO: 12704 - DNA, 275 bp, Glycine max
  Clone ID: LIB3040-055-Q1-E1-G5
gaaaatagagaaaacacaaaaagttctgttctttttcccacccaattcagttttctcaaatggctcgtacgaagcaaacggctcgcaagtccaccggcggcaaggcgccacgtaagcagctggccaccaaggcggctcgtaagtctgctccggctaccggcggcgtgaagaagccgcacagattccgtccgggaaccgtaacgctccgcgagatccggaagtaccaagaagagcacggaacttctgatcgggaagctcccgttccagcgattggt

SEQ ID NO: 12705 - DNA, 318 bp, Glycine max
  Clone ID: LIB3040-055-Q1-E1-G6
gaaaaccgagtgagtgtgagcgttaactacaacgcaatggtttacataacttcgtgggatgaattcgtggagcgatccgttcagttgttccgtgccgatcctgattctacgcggtatgtgatgaagtaccggcattgtgatggcaagttggtactcaaggtcactgataataggcagtgtctgaagtataagacagaccaagcacaagaagccaagaagatggtaaaactcactaatatattctttactttgatggctcggggaccagaagtggatccatcagaagtcactgggaaagaaccactggatacacatacg

SEQ ID NO: 12706 - DNA, 307 bp, Glycine max
  Clone ID: LIB3040-055-Q1-E1-G7
ggatccttctacactaactaaagccgagcagcgagagagagaaaccctagcaaaaatgccggctggtcacggtttgagatcccgcaccagagattccttctctcgtcccttcaggaagaagggtaccatcgccctcaccacatacctcagaacctaccacgtcggcgattatgtcgacgtcaaggttaacggcgccgtccacaagggaatgcctcacaagttctaccatggccgcaccggtcgcgtctggaatgtcaccaaacgtgctgttggggtcgaagtcaacaagcaagtcggcaacagaatc

SEQ ID NO: 12707 - DNA, 314 bp, Glycine max
  Clone ID: LIB3040-055-Q1-E1-G8
ggcgaaacagagagtgatttcagtgagtgatcggtgttcacttgatctcatcataatcgtcagcgtcaattgaagaagatgccgatcagaaacatcgccgtcggaaggcctgaagaggcgactcaccccgacacgttgaaggcggctttggctgagttcatctcaaccttcatcttcgtgttcgccggctcaggctccggcatcgcctacaacaagctcaccgacaacggcgctgccacccctgccggcctcatctccgcctccatcgcccatgcattcgccctcgtcgtcgccgtctccgtcggcgccaacat

SEQ ID NO: 12708 - DNA, 310 bp, Glycine max
  Clone ID: LIB3040-055-Q1-E1-H1
gggtgctggtggtgcagaaagggccattttctgaatgcgctctatctatctcttccgatctggctactaaccctaacccgcttcgaaccgtggcttcctcggcctcgcagaacctctctcgaagaaaatcttcttcttcgtcttcgttttctcaacaaacttccgggtcgacccggatcgtttaccgcgaacctcggatcccatcggaatccaattttccgatctggcggcagaactggttcatcgcattgctcttcctcatggctctcggattcttcgccctcgctctcttcctcgtcaacactttcga

SEQ ID NO: 12709 - DNA, 322 bp, Glycine max
  Clone ID: LIB3040-055-Q1-E1-H11
gatgaaattgacttctttgggttcggcggtaccctacacttagttgttgtgttgctgtgcacccggtgagcggtgacctcttccgctttgatcttcttctgtccaggctggttacttgggtcaaagatttctggcatctctgtcatggcaactagacttcagtttgagaataattgtgaagttggagtcttctcaaaacttaccaatgcctattgtttggttgctattggaggttccgaaaacttctacagtgcatttgaggctgagttagcagatgttatccctgtggtcaagacctccattggtggcactcgtattgttg

SEQ ID NO: 12710 - DNA, 386 bp, Glycine max
  unsure (1)..(386): unsure at all n locations
  Clone ID: LIB3040-055-Q1-E1-H12
aattcgccgctcgacccactcaataacggtgccaaaagaacaacagaaggggatccaaattcaatttcgcaccaaattttcctcccaaaatgtcaggccttggaaaaggtgggaagggtttgggaaagggaggagctaagaggcacagaaaggttcttcgtgacaacattcaaggaatcacgaaacctgcgattcgtaggttagcgagaagaggtggcgtgaagaggatcagtggtttgatttacgaggaaaccagaggagttctgaagatattcttggagaacgtgattcgcgatgctgtaacctacactgagcacgctaggaggaaaactgttactgctatggatgtcgtttatgctctcaagagacanggaaggaccctctat

SEQ ID NO: 12711 - DNA, 272 bp, Glycine max
  Clone ID: LIB3040-055-Q1-E1-H2
ggccgaaaagtagtaccaagatggcttcagttgtgtatctcctctttggcttccatctcattgttatcatgtcaagttccttacccgcaactagtgaagtgtttgcaaaacagtatccatccacagaacccgtggaagaaaaactcacccaactccacttctatttccataacaacataacgggggaacacccaactgctatgaaaactgttttgcctcctaaggggtccattcatggttttggggctacttacatgatggatgaccctcta

SEQ ID NO: 12712 - DNA, 326 bp, Glycine max
  Clone ID: LIB3040-055-Q1-E1-H4
ggaggtttctcaaaatctcaataatccctttgttgaaaccaaaacgacgacgcgtcacttcactttcatgtatctgcgtgtctcgtcgtttctacttgctgttgctgttgctgttgttgattagcctcattcactcactcactcactcactcactcgctcgcaaccacaaccttggatttcaattttttttcattcatggcttcgaccaccacctcctccctctgcacgtggctcgtcgctgcttgcatgtcagtcacgtgcgacgccgaccgcaccagaacccctcacgcaatcttccgctcctccaaaaagtctcgcaagtctc

SEQ ID NO: 12713 - DNA, 338 bp, Glycine max
  Clone ID: LIB3040-055-Q1-E1-H6
ggccgttttcttcttcatcatagtcgtggccgtgtcgcagcaaaaccaaaccacatattaacttgtttgctctaagtcatggctctgatcttgcacgcaaccaaagcaaacaagaatgctttcaagactctgattgcggcagagtacagtggcgtccaagtggaattggcccctaatttcgagatgggtgtctctaatagaactcctgaattccttaaaatgaatcccataggaaaggttcctgtcttggaaacgcccgatggtccagtctttgagagcaatgccattgctcgttacgttgctcgactcaagggtgacaacgctttgttctcatcttc

SEQ ID NO: 12714 - DNA, 341 bp, Glycine max
  Clone ID: LIB3040-055-Q1-E1-H7
gaccgtgcgctagttctgagtattctgatcgctccctgagagagctcgtcgcggcggttgcagaagaagattgcaagatgaagttcaacatcgcgaatcccaccactggatgccagaagaagctcgagatcgacgacgatctgaaactgcgagcattttgggacaagaggatctcacaggaggtcatcggagatgcactcggtgaggaatttaagggctatgtcttcaaaattaccggaggttgtgacaaacaaggatttccaatgaagcagggagtgctgactcctggtcgtgttagacttttgcttcacaggggaactccttgcttccgtggatatgga

SEQ ID NO: 12715 - DNA, 358 bp, Glycine max
  Clone ID: LIB3040-055-Q1-E1-H8
gaaattaaatcgttcaacactggaactctttgatataatatagaaagagacagagagagagagacagacaagaagaacaaagatgcaatcttcaaaggagaagctgaaaaacatgaccagtgctgccaaggagcaagtcgacatctataaagcaaaaatagacgagaaggtcagcttttccatctctatacatccatatatttttgttccattatacaatgattcatttgtggcgtagctaggcatcaatatcatgaagttagaatcgtgatatatatttatatatgtatgtaacctcttcaacaagtttttttttttttttatgtcaaagcttgtcaaaattaatattatataattt

SEQ ID NO: 12716 - DNA, 68 bp, Glycine max
  Clone ID: LIB3040-055-Q1-E1-H9
aaccaagccttcataacggctgcaaaaaaacaacaaaagggctaaatgaattattgtttttcattaac

SEQ ID NO: 12717 - DNA, 384 bp, Glycine max
  Clone ID: LIB3040-056-Q1-E1-A1
gggcaaagtgagagtcagagatggtagctattggctttggagcccctccttctccacttccgtttcatcttcgcctggcttcctctccttctcctttggccttcccaataatccacaaattccaaaacgcaggcaagtcagtgataacaatctgttcaaagaaaaatgcaaaatcaagggtggtcactctctgctctgcacctgtgcaagagcaggaggttagtgatattactttgagagagagaagtgtttcggttgtcctattggctggagggcaaggcaagaggatgggagctagcatgccaaagcagtatcttcctctttttggtcaacccattgctttgtatagtttccacactttttttcacctggttcaagtcaaag

SEQ ID NO: 12718 - DNA, 64 bp, Glycine max
  Clone ID: LIB3040-056-Q1-E1-A10
gagaacaacataacataagaaaaacacacacacaaacaccctttgagttcattaacctcttcag

SEQ ID NO: 12719 - DNA, 69 bp, Glycine max
  Clone ID: LIB3040-056-Q1-E1-A11
gaacagcgctcagatcagaatgagataaattatttgatgaagtgttttgctgaagaaaaggctgcttag

SEQ ID NO: 12720 - DNA, 360 bp, Glycine max
  Clone ID: LIB3040-056-Q1-E1-A12
gactgccgcggaaacagaacagggactcactctcttcgcagcggcactctcggtggctttcatcttctcggggtgagttgtcaagatgtacacatcgaggaagaaaattcacaaggataaggatgctgagccaactgaatttgaggaatcagttggacaggcattgtttgatctagaaaataccaacaatgagctgaaaagtgatctgaaagatttatacataaactcagctgtccaaattgatgtttctggcaaccgaaaggctgtggttatccatgtcccctacagactaaggaaaggattccggaagattcatgtcaggcttgtgagagaacttgagaaaaagtttagtggaaaaag

SEQ ID NO: 12721 - DNA, 380 bp, Glycine max
  Clone ID: LIB3040-056-Q1-E1-A3
cgtaacgctttcgagacgtttccgtgagcaatttcatgaagattttccgtagttcttcgttcgttcttcgttcttcaaccggtaagttttcgaatccgtgactttcaattcatttcttgttttgtttgctttcatctttatttcgttcactttcggttttattttcttccttttttaacgagctttaactgatcgtttaagccgttatctcgcctaaagaatgataaaatgaattccaaccgatcatttgcgttgtaatctcgtttaatcactgttaaagcaaaatctaaccgatcgatcacattgtaaccacggttaaaccaaaaaaggcaaaataataataaaataatcaaaatatctttgaataaaataatcaaaaa

SEQ ID NO: 12722 - DNA, 337 bp, Glycine max
  unsure (1)..(337): unsure at all n locations
  Clone ID: LIB3040-056-Q1-E1-A4
ggagagtagaaacaaaaagaaaaaaaacattgtaagcgctgtaacagcaggtttcggaggcttttggggtagccgacgagacacagtggattccttaattctccatggatatggagatgaaagaaggtgaagcccccgtgttgtggttcgaaacccctgactctgtctgtcgtcgacaccagtttgaacccgatggtcaactctccgtagtgattgtcgatgattccaggcccttataccaaagggtggctggatctttcatgaataaatttttcccctcgggggagagtagaaacannnnannnnnnnnnnnnnnnnaaaaaaaagcggccgctct

SEQ ID NO: 12723 - DNA, 389 bp, Glycine max
  Clone ID: LIB3040-056-Q1-E1-A5
aggagtgtaggagtggctcttggtttgcacttgggtggtacctttctctctactacttgtgttgtgttgtgtgtgtgggggttcagttcagcctttgattccgatggatcttcacggaaacccccacaattctgggatgaagaaacgaaagccggagcaggatactttgatcagtgatcatggaaattctgtgagtgtgggagagtcatctgggagtggcgatctctgcaagagttctacctcaggatcactgaattcaaacaatcaaaatggttccaattctgatatttcatgtcatgatgatgaggatatgattgatgatgatgcagatatgattgacgatgacggagatgaagatgctgattatgcttttgattacaatgaagatg

SEQ ID NO: 12724 - DNA, 388 bp, Glycine max
  Clone ID: LIB3040-056-Q1-E1-A6
gaccacaccgagtcgcagaaaaagaaaaaagcgatcatagtttcacttcggccttatccagtttagggtttcggttctctaccctatctttcacgtatcgaaaccttaaatttacgatcaggtctgagcaatctggttggtagaacctttggtcttagtgagtcaagttttatgtctgaattagacgatcaaattcctactgccttcgatccttttgctgatgcaaatgctgatgactcgggtgctgggtcaaaggagtatgtgcatattcgtgtacagcagcgaaatggtaggaaaagcctgacaaccgttcagggattgaaaaaggaattcagctataacaagatacttaaagacgtcaagaaagagttctgttgcaatggaacag

SEQ ID NO: 12725 - DNA, 151 bp, Glycine max
  Clone ID: LIB3040-056-Q1-E1-A7
taccggtgccaaaagaccaccgaaaggtaccggttccagaagaccacagaaagataccggtgccaaaagaccacagaaaggtaccggtgccaaaagaccaccgaaagggtaacggttccggataccacccgaagggaattcttttcctccc

SEQ ID NO: 12726 - DNA, 333 bp, Glycine max
  Clone ID: LIB3040-056-Q1-E1-A9
gacacagaacaaaaacaaagaaaaaaaaaaacccttagccaacacaaccatcatggccacctctgctattcagcaatcagcattcactggtcaaactgctctgaagcagctcaatgagttcgtccgcaagaccggtggcgccggcaaaggtcgcactaacatgcgccgcaccgtcaagagtgctcctcagagcatttggtatggccctgaccgtcccaagtacttgggtccattctcggagcagattccatcatacctgaccggagaattccctggtgactacggatgggacactgctggattatcagctgacccggaaaccttcgccaggaa

SEQ ID NO: 12727 - DNA, 283 bp, Glycine max
  Clone ID: LIB3040-056-Q1-E1-B1
agggctatagctcagttaggtagagcacctcgtttacacgagcgccaatgtttttttcagaggagtttcatcttgtaatcaaaagagtttatcttatagtaagaaatcgatgtcttactccattttaaggaacaaaacaagagaacaatagcctgacaaagggtttagccataaaatcgaatccatcattgatttgagatattgataaggtgaatactcatttctcgtcaatgctaagcataatgcgggtataaggacctaaaaaagattatcttttcttcct

SEQ ID NO: 12728 - DNA, 342 bp, Glycine max
  Clone ID: LIB3040-056-Q1-E1-B10
ggggttttctccttcttctcctccctctgcctgcagcggtgcaacctatcagcctccaaatccaatggcttcagagaagaaactgtcgaacccaatgagggagatgaaggtgcagaagctcgttctcaatatctctgttggagagagtggagatcgtctcaccagagccgccaaggtgttggaacagcttagtggccaaaccccagtgttttccaaagcaaggtacactgttcgttcctttgggattagaagaaatgagaagattgcatgctatgtcactgtcagaggtgacaaggcgatgcaacttttggagagtggtttgaaggtgaaggaatatgaact

SEQ ID NO: 12729 - DNA, 336 bp, Glycine max
  Clone ID: LIB3040-056-Q1-E1-B11
ggtgccccatatcttccaccctttggctattcctaaccattgagtacaacttcacattttagaagaataccccctcttttgctgcatcagaggagttgtaaattaagagcatggctgcacaagctcttgtatcatcatcttctcttaccttctcagcggaggctgcaagacaaagtcttggaccaagatcactccaatctccatttggcttctccagaaaagcctcctttcttgttaaggcagctgctaccccccctgtcaagcaaggatcagacagacctttgtggtttgcatcaaagcaaagtctttcttacttggatggcagccttccgggtg

SEQ ID NO: 12730 - DNA, 366 bp, Glycine max
  Clone ID: LIB3040-056-Q1-E1-B2
gggagatttgatgatgtcaccagtaaccaaaggccttcttgctagaactagaaggggtggtggtgcggtgttaccacctgggggtaaaaatcgaccaaagattctagacatgcccttgaaggatgtcggtcctatccagaacaagcttccaatgcttattgatgagaagatcaactcagcttgaaggattcaaaggacttttgttcaacatgataattcatttgacagtggttcaaagggagtttaaagatgatgatgtaataacaataacatcacacagagagagaaagagagagtttatctccttgttcccatgttaaacaactctgttctgagattataagcttatgaagtttgtgatgctca

SEQ ID NO: 12731 - DNA, 368 bp, Glycine max
  Clone ID: LIB3040-056-Q1-E1-B3
gaatattaaacatcgaatctttgttcaattgcgaggcaaagcaagcaaagcacaacacaagatggggatacttagtccagaacagctccgattcttcaactctcaaggttatcttgtgattgaatctttcgcatgtagcgatgagattgagtccatgatgaagaggatggagcagtcggtagatgactttgacccttcttccaccgcctctattttctccaccaagaaccagcaacagtcgactgataattactttttcgacagcgccgagaggatttctttcttcttcgaggagaaagcatttggtaatgatgctcttcatgagattgagccagcattcaaaaagttttcttcctctgagaaagttt

SEQ ID NO: 12732 - DNA, 346 bp, Glycine max
  Clone ID: LIB3040-056-Q1-E1-B4
ggtcgtaaccctaaaatcagaaccagtggcactgacacaaaaaatatctgttcctctcgatcgaactcactcagtcatttccctctctgcgcgcgcgcttctcattcacagtcacagttcatggcggaggaagaagttgtggcacccgctgctagccccgttccctctgataacaaacgcaagctcgaagatctgcaacccgaaaacaccgaatctaatgccaactccatctccatctccgacgccgagaacgccgatgccgcggtttccgccgagaccgagaacaagcgcctccgcctcgacgaccaccaggatggcctcgctaataatacaaatgggcatcaag

SEQ ID NO: 12733 - DNA, 357 bp, Glycine max
  Clone ID: LIB3040-056-Q1-E1-B5
ggccgaaaagtattacgaagatggcttcagttgtgtagcgcctctttggcttccaactcaatggtatcaagtcaaattccttacccgcaactagtgaagtgtttgcaaaacagtagccatccacagaacccgtggaagaaaaactcagccaactccagttcgatttccataacaacataaccggggaacacccaactgccatgaacactgttttgcctcctaaagggtccattcatggttttggggctacttacatgatggatgacactctaaactgaacgatcaagtcgaacttcaaagcatgtgggaagatctcacggaagatacgctttggcttcacaacatgatcctgagttg

SEQ ID NO: 12734 - DNA, 365 bp, Glycine max
  Clone ID: LIB3040-056-Q1-E1-B7
gagagtggtggagtgtgcaaaagagcgtcgtagtcgcaaccctaatcagaagaagcgcagcttcaagcgagtgacagccaccagccatgggtcgtatgcacagccgcggtaagggtatatcctcttctgctttgccctacaaaaggacacctcctagctggctcaagatctcttcgcaagatgtcgaagaaaatatctgcaagtttgcgaagaaaggtttgaccccgtctcagattggtgtcattctcagagattctcacggtattgctcaggtcaatagcgtcactggcagcaaaatccttcgcatcctcaaagctcacggacttgcgcctgaaattccagaggacctgtaccatttgattaag

SEQ ID NO: 12735 - DNA, 370 bp, Glycine max
  Clone ID: LIB3040-056-Q1-E1-B8
gatgccgaaaagtagtaccaagatggcttcagttgtgtatctcctctttggcttccatctcattgttatcatgtcaagttccttacccgcaactagtgaagtgtttgcaaaacagtatccatccacagaacccgtggaagaaaaactcacccaactccacttctatttccataacaacataacgggggaacacccaactgctatgaaaactgttttgcctcctaaggggtccattcatggttttggggctacttacatgatggatgaccctctaactgaaggaccaagtccaacttcaaagcttgtgggaagatctcagggaatatacgctttggcttcacaacatgagcctgggttgctcatggtgaca

SEQ ID NO: 12736 - DNA, 318 bp, Glycine max
  Clone ID: LIB3040-056-Q1-E1-C1
ggtagttctaacttctaagcccttgcccaatgctcaacgaggcttaaaccctttcggcggcagcgaaaaaagtctccccgcccccaaacccaaacaatgatgaagaagaaacaatggttcagaagacccgttgtcataaaaaagccgaagcaaccgcaagagcaacccagcgttgatcctaatacgggaaagaaaatccccaaaagtttcgtgttttcgcgatgcaaattgccggctcctctcaaacagcttcagatggacctcagaaagttgatgcttccataaactgctctcagccttagggaaaagaaactgaat

SEQ ID NO: 12737 - DNA, 372 bp, Glycine max
  Clone ID: LIB3040-056-Q1-E1-C10
gataacagacctaatcaatcagtcatacgaatttccagaatacaaattcacactctctttggctctggtgttgtgttgtgttgaggtacttgagaagagaaaatggtgtcgtcgcaggttgtgaatacgtacccgttgtcgagctacacgttcggcacgaaggagcccaagatggagaaggatacctccgtcgcggatcgtctcgctcgcatgaaagtcaactatatgaaggagggaatgaggaccagtgtggaaggaattttactggtacaagagcacaatcatcctcatatacttcttctgcaaattggaaacacattctgcaaactcccaggtggtcgtctcaaaccaggagagaatgaaaatgagggc

SEQ ID NO: 12738 - DNA, 321 bp, Glycine max
  unsure (1)..(321): unsure at all n locations
  Clone ID: LIB3040-056-Q1-E1-C11
ggctccgccatttttcgtagctgctgttcttgcgcgtgaacaagcctcagccaaaaccatggttaagcataacaatgttatcccaaacggacacttccgtaagcactggcagaactatgtgaagacttggttcaatcagccagcacggaagacaaggagacgattggctcgtcagaagaaagctgtgaagatattccccagacctacggctggacctctcaggcccattgtacatggtcaaactttgaaatacaacatgaaagtgagaggtggaaggggattttctcttgaagaactcaaggcagcanggattcccaaaaa

SEQ ID NO: 12739 - DNA, 293 bp, Glycine max
  Clone ID: LIB3040-056-Q1-E1-C12
gactcatgggctgcgtctcctcaaaacacatcaagaaagaccttaagcaagaagaagtcattgccaccaatggcggcagttacgtgaaccacgtcgtatccctcacttcctccacctatggagcactcatgttggacaaggagaaggagcaacaccaacttcaactccccgtcgaagaatccaaaacatctccacctcggattcgcgaagaacccgaagttatcaacgcttgggaactcatggagggtctcgaagagggagtgcccatttcaaacaaccccatgaaaatcccc

SEQ ID NO: 12740 - DNA, 304 bp, Glycine max
  Clone ID: LIB3040-056-Q1-E1-C2
agggagcaacatggtgaagctggtggagagatttacttgccataagcttacgttagaaccaagaggactacttaatggagcaaatcagttggaagaacttgtagctagcttcccaactggcttatctgagtgtggagaagcattatcaagccttaggagtaggagaacgagtactgtttgtgatgaatgtctatggtttaagaaatctgtctttagtcaacttgtgtgttttgttattcagttctcagcaataaactgctctggcaaaaaaaaaaaaaacaaacaaacaaaaaaagcggccgct

SEQ ID NO: 12741 - DNA, 322 bp, Glycine max
  Clone ID: LIB3040-056-Q1-E1-C3
ggaacctttgcattctattcattcaagattcagcaagtgcgttttggaagcagagaccgaaatacttcgagatggcccgtacaaagcaaactgctcgtaagtcaactggaggaaaagctcccaggaagcagcttgcaaccaaggctgcacgtaagtctgcaccaacaactggtggtgtgaagaagcctcatcgttatcgccctggaactgttgctcttcgtgagattaggaaataccagaagagcactgagctcctaatcaggaagcttcctttccagaggttggttcgtgaaattgcccaggatttcaagactgatctgcg

SEQ ID NO: 12742 - DNA, 324 bp, Glycine max
  Clone ID: LIB3040-056-Q1-E1-C4
gattcacacaactaactaagaaagtcttccatagccccccaaaaatgaagagcaccatcttctttgctctctttctcttttgtgccttcaccacctcatacctaccttcagccatcgctgatttcgtgctcgataatgaaggtaaccctcttgaaaatggtggcacatattatatcttgtcagacataacagcatttggtggaataagagcagccccaacgggaaatgaaagatgccctctcactgtggtgcaatctcgcaatgagctcgacaaagggattggaacaatcatctcgttcccatatcgaatccgttttatcgccg

SEQ ID NO: 12743 - DNA, 385 bp, Glycine max
  Clone ID: LIB3040-056-Q1-E1-C5
gaactacttttccctccaatttcgcttcaccacacatgcatggattctttgattttcatcttctctcgcgttttctgattctgatcttaggatagttgttaacagagtgatttgggagcttttgatatgtcgagtggatccgtgagacgggtttcccgtcaagatatccagctggtgcaaaatctcatagaacgatgtctacaactgtatatgagccagaaagaagttgtggaaacactattagctcaagcaaaaatagagcctggtttcactgaactagtttggcaaaagcttgaagaagaaaatgaagaattcttcaaggcttattatgcaagattggttttgaagcagcaaataatgcaattcaacaaattgctggattagc

SEQ ID NO: 12744 - DNA, 361 bp, Glycine max
  Clone ID: LIB3040-056-Q1-E1-C6
gagcgaaacagagagtgatttcagtgagtgatcggtgttcacttgatctcatcataatcgtcagcgtcaattgaagaagatgccgatcagaaacatcgccgtcggaaggcctgaagaggcgactcaccccgacacgttgaaggcggctttggctgagttcatctcaaccttcatcttcgtgttcgccggctcaggctccggcatcgcctacaacaagctcaccgacaacggcgctgccacccctgccggcctcatctccgcctccatcgcccatgcattcgccctcttcgtcgccgtctccgtcggcgccaacatctccggcggccacggtcaaccccgccgtcaccttcggcgccttcgt

SEQ ID NO: 12745 - DNA, 379 bp, Glycine max
  Clone ID: LIB3040-056-Q1-E1-C7
gacccccaaactctgcatcggaagaaaccctagccactctcccggcgtcacgatgcagatcttcgtgaaaaccctaacgggtaaaacgatcacgttggaggtggagtcttcggacaccatcgacaacgtgaaggccaagatccaggacaaggaaggcatccctccggaccagcagcgcctcatcttcgccgggaagcagctggaggacggccgcaccctcgccgactacaacatccagaaggagtccacgcttcacctcgtcctccgcctccgtggcggcgccaagaagcgcaagaagaagacctacaccaagcccaagaagattaagcacaagcacaagaaggtcaagctcggcattcttcagttctacaaggtcgac

SEQ ID NO: 12746 - DNA, 77 bp, Glycine max; identical to SEQ ID NO: 12504
  Clone ID: LIB3040-056-Q1-E1-C9

SEQ ID NO: 12747 - DNA, 346 bp, Glycine max
  Clone ID: LIB3040-056-Q1-E1-D1
gagaactctgtaagcggatctcctttagtcctttgtctccgttccgtcgtcaaccctacctttggatctgcgtttggccttcaggttttgaagtccgaaggacgaagaagaagagattcctgacagcgtaatcatgtttggtgtcataaggcgaagggttgcctctggcagcccgtctccttggttgctaggtcagtcagctcagaaaatccggtctggcccatcagtttctgctagagcttcttccattgtggaaaaagagattgtatttcgttcaggcggatgtggatttgtccagaacttcagtcatataactcctgtaagctggattaattcaaagcctatg

SEQ ID NO: 12748 - DNA, 272 bp, Glycine max
  Clone ID: LIB3040-056-Q1-E1-D10
gagggttgtaacagtgtgaaagagagggggtcccaagtggaatttattgtttctacctatcgcatgcatccgttttgttttctttttattttagatgtggtgttgtgaaatctaatggcatgcttagaaatgtacaacaactcagagcacaacaagaacaacaagggtgataatcatcaccatcatcatcaatgcgctccaatgagcccaagaatctctttctcaaatgattttgtggatgtgcaacaagccatgaagctgcaagaacaaag

SEQ ID NO: 12749 - DNA, 317 bp, Glycine max
  unsure (1)..(317): unsure at all n locations
  Clone ID: LIB3040-056-Q1-E1-D12
gagcaacatggtgaagctggtggagagatttacttgccagaagcttacgttagaaccaagaggactacttaatggagcaaatcagttggaagaacttgtagctagcttcccaactggcttatctgagtgtggagaagcattatcaagccttaggagtaggagaacgagtactgtttgtgatgaatgtctatggtttaagaaatctgtctttagtcaacttgtgtgttttgttattcagttctcagcaataaactgctctggcaatctagtttcatgtacaaaagacatcngtaagtgaacaaaaaaaaaagcggccg

SEQ ID NO: 12750 - DNA, 372 bp, Glycine max
  Clone ID: LIB3040-056-Q1-E1-D3
gaagagtgatccttctacactaactaaagccgagcagcgagagagagaaaccctagcaaaaatgccggctggtcacggtttgagatcccgcaccagagattccttctctcgtcccttcaggaagaagggtaccatcgccctcaccacatacctcagaacctaccacgtcggcgattatgtcgacgtcaaggttaacggcgccgtccacaagggaatgcctcacaagttctaccatggccgcaccggtcgcgtctggaatgtcaccaaacgtgctgttggggtcgaagtcaacaagcaggtcggcaacagaatcataaggaagaggattcacgtgcgtgtggagcatgttatgccatcaaggtgcactgagga

SEQ ID NO: 12751 - DNA, 369 bp, Glycine max
  Clone ID: LIB3040-056-Q1-E1-D4
agaccacgcgtccgagccactctgtcttctctgcagcaactatgcctaaccctaaggtcttcttcgacatgaccatcggcggtcaatctgctggccgcatcgtgatggagctctacgccgacgtcactccccgcaccgccgagaacttccgcgcgctttgcaccggcgagaagggcgtagggcggagcggcaagcccctccactacaagggctcgtccttccaccgcgtgatcccgagtttcatgtgtcagggtggcgacttcaccgccggaaacggaaccggcggcgagtcgatttatggcgccaagttcgccgacgagaacttcgtgaagaagcacaccggtcccggcatcctctccatggcgaacg

SEQ ID NO: 12752 - DNA, 57 bp, Glycine max
  Clone ID: LIB3040-056-Q1-E1-D5
gagacctcaggtcaggcggggctacccgctgagtttaagcatatcaataagcggagg

SEQ ID NO: 12753 - DNA, 222 bp, Glycine max
  Clone ID: LIB3040-056-Q1-E1-D6
ggcccttctagctttttcccagtccaagcagcctccaattcgtgccactctcttcaaaatggccgttaccttctcaaatctccacacagaatcaggtctcaagtccctcgacgacttcctctctgggaaggtctacgtttctggggatcagttcacaaaggacgacatcaaagtgtatggtgctgttttggagaagccaagtgactcttttcccaatgctgc

SEQ ID NO: 12754 - DNA, 386 bp, Glycine max
  Clone ID: LIB3040-056-Q1-E1-D7
gatgccgaaaagtagtaccaagatggcttcagttgtgtatctcctctttggcttccatctcattgttatcatgtcaagttccttacccgcaactagtgaagtgtttgcaaaacagtatccatccacagaacccgtggaagaaaaactcacccaactccacttctatttccataacaacataacgggggaacacccaactgctatgaaaactgttttgcctcctaaggggtccattcatggttttggggctacttacatgatggatgaccctctaactgaaggaccaagtccaacttcaaagcttgtgggaagatctcagggaatatacgctttggcttcacaacatgagcctgggttgctcatggtgacaaaatttctcttcactt

SEQ ID NO: 12755 - DNA, 365 bp, Glycine max
  Clone ID: LIB3040-056-Q1-E1-D8
atttgtccagactttaacaaatctttgtttatggggagccaaccatgtttgtttgacatagtcaacaaacattggccatggtgagcaagcaatttcaaacttcataaggcagtcattaaactcttgctcaaaaggacaatcctccagactctcctatgcttccatgacataatctcatacattttttttttacccacaagagttttacattttgtcgtcacattcttattaatgtgaaaccgacacaacaggttggttgactcaaggaaaatagtttttactacattcatcaatgctgaatctttgtcggtaacaataacttgagggattgtatcacgtctcagaaaattacctcgaaaccgttc

SEQ ID NO: 12756 - DNA, 261 bp, Glycine max
  Clone ID: LIB3040-056-Q1-E1-D9
ggcacttgccatgcgttttacaatttacatcacatttcgttgcgcctttgatctctgtccccgctgcgtctctcgtaatcatgcctaagcaaatccacgagattaaggatttccttctcactgccagaaggaaggatgcgaggtcagtgaagatcaagaggagcagagatgtggttaagttcaaggtcagatgctccaagtacctctacacactttgtgtgtttgacccagagaaagctgataaattgaagcaatctcttc

SEQ ID NO: 12757 - DNA, 340 bp, Glycine max
  Clone ID: LIB3040-056-Q1-E1-E1
agcaacatggtgaagctggtggagagatttacttgccagaagcttacgttagaaccaagaggactacttaatggagcaaatcagttggaagaacttgtagctagcttcccaactggcttaactgagtgtggagaagcattatcaagccttaggagtaggagaacgagtactgtttgtgatgaatgtccatggtttaagaaatctgtccttagtcaacttgtgtgttttggtaatcaattctcaacaataaactgctctggcaatccagtttcatgttcaaaaaaggaaacttacaagatgggaaggccatcaacagaattgaccaactcgaacttcaaaa

SEQ ID NO: 12758 - DNA, 334 bp, Glycine max
  Clone ID: LIB3040-056-Q1-E1-E11
gatctggcagcagaagaacaagtagttgagaactaagaaggagaagcaaatggcttcctcaatgatctcttccccagctgttaccactgtcaaccgtgccggtgccggcatggttgctccattcactggcctcaagtccatggctggcttccccaccagaaagaccaacaatgacattacctccattgctagcaacggtggaagagtgcaatgcatgcaggtgtggccaccagttggcaagaagaagtttgagactctttcctacctgccagaccttgatgatgcacaattggcaaaggaagtagaataccttcttacgaagggatggattcct

SEQ ID NO: 12759 - DNA, 341 bp, Glycine max
  Clone ID: LIB3040-056-Q1-E1-E12
ggactcgcagttgtattgttgaacaagggtttctctgtctgcttcttcactttctctcgtttcaatcgaaaccaaaacaaaaacatgggcagaaaattcttcgtcggtggcaactggaaatgcaatgggaccactgaggaggtaaagaagattgttactactttgaatgaggctaaagtccctggagaagatgtcgtagaagttgttgtgagccctccttttgtgttccttcctgttgtaaaaagtttgctgcgccctgatttccatgtttcggcacaaaactgttgggttcgcaaaggtggtgcttataccggtgaggttagtgctgaaatgcttgttaa

SEQ ID NO: 12760 - DNA, 303 bp, Glycine max
  Clone ID: LIB3040-056-Q1-E1-E2
gagcgccaatgtttttttcagaggagtttcatcttgtaatcaaaagagtttatcttatagtaagaaatcgatgtcttactccattttaaggaacaaaacaagagaacaatagcctgacaaagggtttagccataaaatcgaatccatcattgatttgagatattgataaggtgaatactcatttctcgtcaatgctaggcataatgcgggtatagggacctaaaaaagattatcttttcttcctatcttatgaactttaaggtgtatgaagtgtcatttcctatcttagattttaattttagt

SEQ ID NO: 12761 - DNA, 315 bp, Glycine max
  Clone ID: LIB3040-056-Q1-E1-E3
gctctctcaatcacttcacgcacactgtcacaggtgtagcggcgaaactgaggtcgtagaaagaatggcgaaaacgacgtcgttgttgctctttacactgctcctcttcggaaccttagctctcatccaggcgaagaaatcgaaggaggatttgaaggaagtgacccacaaggtttactttgatgttgagattaatggaaaagaagcaagtcgtattgtgatgggtctttttggaaaggctgttccaaaaactgcagaaaactttcgagctctttgcactggggaaaagggaactggtaaaagtggcaagcctct

SEQ ID NO: 12762 - DNA, 355 bp, Glycine max
  Clone ID: LIB3040-056-Q1-E1-E5
ggtttaggttttcttagtcagacttaccccttgctaccaacactgagcttaaccgagcttcgcaaagatgaatcgggaaaagttaatgaagatggccggttcggttagaactggaggaaagggtactgtgagaagaaagaagaaggctgtccacaagacaacaaccacagatgacaaaaggcttcagagcaccctgaagagaataggggtgaatgccatccctgctattgaagaggtcaatatctttaaggatgacgtagttatccagtttctaaatcccaaagttcaagcatccattgctgctaatacttgggttgtcagtggttcaccgcaaacaaagaagttgcaggatata

SEQ ID NO: 12763 - DNA, 333 bp, Glycine max
  Clone ID: LIB3040-056-Q1-E1-E6
gaaggatcagcagggagaattaggtttttagggtttacaccgagcagccacacctcccgcagcagccatggttctcaaaactgaactatgccgattcagtggtgccaagatctacccaggaaagggcatcagatttgttcgtggtgattctcaggttttcctgtttgcaaactcaaaatgtaagaggtatttccacaatcgcctgaagccttcaaagctcacctggactgcaatgtacagaaagcaacacaaaaaggacattgctcaagaagctgtgaggaagaggagacgtgctgccaaaaagccttactctaggtccattgttggtgcgac

SEQ ID NO: 12764 - DNA, 364 bp, Glycine max
  Clone ID: LIB3040-056-Q1-E1-E7
ggaggtagccagagagtgatacaatacagagtgcgttgttgctccttcgccacaactccctgccaacatgggtatctccagagattctatgcacaagaggcgtgccactggtggcaagaagaaggcatggaggaagaagagaaagtatgagcttggtcgccagcctgctaacactaagctgtcaagcaacaagacagtcaggaggatccgggttagaggtggaaatgtgaagtggagggcactgagattggatactggaaattactcctggggaagtgaagctgtaactcgcaagactcgtatactagatgtggtttacaatgcctcaaacaacgagcttgtgcgtactcagactcttgtaaaa

SEQ ID NO: 12765 - DNA, 352 bp, Glycine max
  Clone ID: LIB3040-056-Q1-E1-E8
gaaacccatctctctttcatccctccaatcttcatcctgtgaaaaccgcgaacgaatcaacaaatgggtggttgcgtgttgaagctagtagattccgttctgttcctgttcttcctcctaatagcggtggtggctcctctgatcgacgctcaaacctgtcttcctctctcttacttccccgacatcatcgtccaactcaaggaacagtacaccaatgattactgcgattaccttgtcgcagaaaatccgcacttttttgtacgccttgtttggcttgagcttctcttccaatggccccttgcactcctcaacctctacaccatgctcacttccaggccttggttcaacaaca

SEQ ID NO: 12766 - DNA, 353 bp, Glycine max
  Clone ID: LIB3040-056-Q1-E1-F1
ggcagtttcaaattttcttttccttcactttcccgagaaaaaaataacacttttcactttcttcactacgttctcacttcgatatggctcgtacgaagcaaaccgctcgcaagtccaccggtggcaaggcgccacgtaagcagctcgccaccaaggccgctcggaagtccgctccggcgaccggaggagtgaagaagccccaccgcttcaggccgggaaccgtggcgctgagggaaatcagaaagtaccagaagagcaccgagcttctcatcaggaagcttccatttcagaggctcgtgagagaaatcgcgcaggatttcaagaccgatttgcgtttccagagcagcgctgtt

SEQ ID NO: 12767 - DNA, 332 bp, Glycine max
  Clone ID: LIB3040-056-Q1-E1-F10
ggccattgttgttgctattatcatccgcagctgcttttattcgcaccgcaaacagtgagccatggccgtcggaaagaacaagcgcatctccaaggggaagaagggtggcaagaagaaggcagctgatccctttgccaagaaggattggtatgacattaaggctccttctgtttttcaagtgaaaaatgttggcaaaaccctcgtctctcgtactcagggtaccaagattgcttctgaaggactcaagcatagagtgtttgaggtctccttggctgatcttcaaggggatgaggatcatgcattcaagaagattaggttgagagctgaagatg

SEQ ID NO: 12768 - DNA, 340 bp, Glycine max
  Clone ID: LIB3040-056-Q1-E1-F11
gacagtatactatcacattcgcttcggtacttctctcttcattgtcgcagacacaaagcagcactaaaggaagcccttcactacgccgattaagcatgtcaggcagaaaagaaacggttttggaccttgcaaagtttgtagacaaaggcgttcaagttaagcttactggtggaagacaagtgacagggactctgaaagggtatgatcaattgcttaaccttgtcctacatgaagctgtagagtttttaagagatcctgatgatcctctcaaaactactgaccagaccagaaatcttggcttaattgtttgtaaaggaactgctgtgatgcctgtgtcccc

SEQ ID NO: 12769 - DNA, 343 bp, Glycine max
  Clone ID: LIB3040-056-Q1-E1-F12
gagagaaagagagagaaagatgtcgaagcgtggtcgtggtggttcggcggggaacaagttccgcatgtcgctgggtcttccagtggcggcgacggtgaactgcgccgacaacacgggggcgaagaacctctacatcatttcggtgaaagggatcaaaggccgtttgaaccgtcttccctcggcctgcgttggcgacatggtgatggccaccgtgaagaagggaaaacccgatctgaggaagaaggtcttgccagctgtcatcgttcgccagcgcaagccatggcgccgaaaggacggcgtctacatgtacttcgaagatgatgctggtgttattgtcaatccc

SEQ ID NO: 12770 - DNA, 354 bp, Glycine max
  Clone ID: LIB3040-056-Q1-E1-F2
ggtaccattaaattaacaccgaaatcgccgaatacgactaaaatcaaaatcacaacactgatcctttcatttgcaaattgcaaatgcagaaaggaaaagcggattctatctccatcatcagctcccttcctgaagatgttgccctcaaaattgcttcgctacttcaggtgcgggatttgtgtgccttaggttgttgttcgatgttctggaaggaactctgcttctcagattgcatttgggagtctcttgtcagaaacagatggccctcactctcttccttccatttcccttcttcttcttccactcattctcccagtttcgagaaattgtttgtttggaaaattgggttacaga

SEQ ID NO: 12771 - DNA, 388 bp, Glycine max
  Clone ID: LIB3040-056-Q1-E1-F5
ggttctagtgtgtgattgtttgttgttgtaactcgttcttcttcttttgttgttctgtgtttgtgtttgttttttctctcacctgaaaatgtcttgctgcggtggtaactgtggttgcggaagcgcctgcaagtgcggcaacggctgcggaggctgcaagatgtacccagacttgagctacaccgagtcaaccaccaccgagaccttggtcatgggagtggcaccagttaaggctcaattcgagagtgctgaaatgggtgttcccgctgagaacgatggctgcaaatgtggagctaactgcacctgcaacccctgcacttgcaagtgaggtgttggagagctaaagcttcaagcagaaatggcccttagacataatgataaaaactat

SEQ ID NO: 12772 - DNA, 377 bp, Glycine max
  unsure (1)..(377): unsure at all n locations
  Clone ID: LIB3040-056-Q1-E1-F6
ggagatagagagggtttgttttgttcttattgtttgtgtgattgagaagaagagagcgtgaaggagaagaagagagaggaatgggttcaccgacatcaaggattgtgttccgtattgtggtggtggcgcttctgcttcttcttctcttctacattggtcgccctctgtattggaaaatctccgccaccgtccacgacatccgcaacaacaagcaaactgtcagacaaggtctttcccaaatcgtcattgaggctcagaaatcggtcggttggtatcacgatgagtccgactcangggttcgtgctaactaccgaaaactgcttcttcataagcccatttccacagtttttgcttaattatagttagataaatacatg

SEQ ID NO: 12773 - DNA, 352 bp, Glycine max
  Clone ID: LIB3040-056-Q1-E1-F8
gagccacagctctcctctcactttcacttctacgtccctggctctgttccgtctatgatcatggcgtttagggtgctaaaccctgacctccgctttcgcattcatctctctctcttgtccatcacttccgccaaggtcatcttcgaggagcgtttcgatcaccgatggggaaatcgtagggtataagtcagattggagcaaagatgacaccctggctggggagtggaaacatacctctggccaatggaatggagacgctaacgacaaaggtattcataccagtgaggattacagattctacgctatttcagctcagtaccctgaaatcagcaatcaggataagacactagtc

SEQ ID NO: 12774 - DNA, 349 bp, Glycine max
  Clone ID: LIB3040-056-Q1-E1-F9
gaatgtagttcaaaaacacaacagaatgtgaaggctgtttttgatgcagccatcaaggtagttctccagcccccaaagcagaagaaaaagaagagaaagggacaaaaggcctgttccattttgtgatcttcagttcttaatatagtagtttgtggaggatgacatgactgtagtcttcatcattctatatcttatactatttccaacctagatgaaggaatcatcatgtccaactgaccgcatcaaggttcgctcataagcatcgagctatctgtctaattgtctctggctgtaggatctgtacagtcgtaatttcaatatgttcggtgtgcacacaacacttgcgtta

SEQ ID NO: 12775 - DNA, 336 bp, Glycine max
  Clone ID: LIB3040-056-Q1-E1-G1
gacacacactctgtcacgcacccaccattctactacactcctctctctcactctcactctctgctccgtgatagctgtaccacgtttttctctccatctcgaaacaccatctctgcctcagtcccaacccatcaccattctcatggctgctctagctctagcacttcttcttctggctttcaccggcacttcaagtgctacatggtgcgtttgcaaggatggaagcgacgcgatcctgcagaagacgttagactatgcttgtggagctggtgctgactgtaaccctcttcacctaaacgggccttgttttcagcccaacaccgtcaaggcccactg

SEQ ID NO: 12776 - DNA, 77 bp, Glycine max
  Clone ID: LIB3040-056-Q1-E1-G10
gactcttctccacttctcaaactttgtaacttcaaaacatactcctctgttctctctgtttctcttcaatcttcctg

SEQ ID NO: 12777 - DNA, 355 bp, Glycine max
  Clone ID: LIB3040-056-Q1-E1-G12
gtagtaatagttcttatctgtgaatcttgtgttctcatgttctgctttcactgatcaagctttttactcaattattgaagccacgtgatagaatttaacataaattgaagtggggtctgttatagtaccatatctgcttttctacacaatgtgacaacaggaactttcacatgtcacaattgtagattaagcactcatgcagtccacctttcccaaatgatagctccctagctagtggcagcatctcaacttaaattcggtcatatagatgttgatatatatggcaactccatcaagtgtaaagtctttcaatataaaataaaatactatgtaatttcttttgtttcaacttttt

SEQ ID NO: 12778 - DNA, 383 bp, Glycine max
  Clone ID: LIB3040-056-Q1-E1-G2
caacgggattttttttttacattcctacaaacgaaacttgattttgcgtaacacaaaacaaacaacaacaaaaacacaaaaaacacaccaacaccaaccaaaaaacacaacccaaaaaaaacacaaaacaacaccaacaaccaacacacaaacacacacaaccaccacaccacaatcgggcacaccacaaccacaccacacaccaacccacacaaaaacccgccccccccaaaagacccacccccaacccccacccccaaccaaaccccaacccccccccaaacccccccccaacacccaccccgggcccccccttaaacccaaccccacccgggaaacaccccggcccatccccaacaaaacccccctccacacaaaacccc

SEQ ID NO: 12779 - DNA, 339 bp, Glycine max
  unsure (1)..(339): unsure at all n locations
  Clone ID: LIB3040-056-Q1-E1-G4
ggccgaaaagtagtaccaagatggcttcagttgtgtatctcctctttggcttccatctcattgttatcatgtcaagttccttacccgcaactagtgaagtgtttgcaaaacagtatccatccacagaacccgtggaagaaaaactcacccaactccacttctatttccataacaacataacgggggaacacccaactgctatgaaaactgttttgcctcctaaggggtccattcatggttttggggctacttacatgatggatgaccctctaactgaatgaccaagtccaacttcaaagcttgtgggaagatctcanggaatatacgctttggcttcac

SEQ ID NO: 12780 - DNA, 386 bp, Glycine max
  Clone ID: LIB3040-056-Q1-E1-G5
aagaaggcgtcttcataaacgcctttcttctccgtttccgtttcctcgttcgaattcgctttttgatctgcgaaaatgagagagtgcatctcgatccacattggtcaggctggtatccaggtcggaaatgcttgctgggagctctactgcctcgagcacggcatcgggcccgatgggcaaatgccaagtgacaagacagttggcggtggtgatgatgctttcaatactttcttcagcgagactggtgctggaaagcacgtgccacgtgcagtgtttgtagatcttgagcccactgttattgatgaggtgagaaccggaacttaccgccagcttttccacccagagcagctcatcagcggcaaaaaagatgccgccaacaactttgc

SEQ ID NO: 12781 - DNA, 339 bp, Glycine max
  Clone ID: LIB3040-056-Q1-E1-G6
gatagtagatattcattccccttatctttctctcttctctctccccgcccaaaccctaactccctaccctattccgctttctctcatccatcatgaaaggaggaaagtccaagaccgaatctaagagagccgatgccaaacttgctgtgaataagaagggcgccgccaccaagactaggaaacccgccggaaaggggaaggcagcgaaagatcctaacaagccatttaggcctccaagtgctttcttcgttttcatggaggaattcaggaaggtgttcaacaaggaacatcccgacaacaaagcaatgtctgctgtgggcaaacctgctggagcaaaat

SEQ ID NO: 12782 - DNA, 357 bp, Glycine max
  Clone ID: LIB3040-056-Q1-E1-G7
ggccagtgccattcccttcacaccattctcacaaaacaactttcaaactctgagaaagaatggctgccaacacattgatgagtactgctatctcagccttcccatctctcctttcttcctcaaaatccagatttgccaccgcagttcctctttctagctttggtgtcaccaatgcctcttcttctcgcttttctatgagtgctgactggatgccaggccagcctagacctccttaccttgatggttcagcacctggtgacttaggattcgaccctcttcgtcttggtgaagtaccagagaatcttgagaggttcaaagagtcagaactcattcactgcagatgggccatgcttgctg

SEQ ID NO: 12783 - DNA, 336 bp, Glycine max
  Clone ID: LIB3040-056-Q1-E1-G8
ggaagttagtaaggtttttgagtgcagtggtccaaacactcttctctgcagcttttgcctacagctcccttcaccatggctgaacagaccgagaaagcttttctgaagcaaccaaaagtgtttctcagcacaaagaagactgggaagggaaagagacctggaaaaggtgggaaccgcttttggaagtccattgggcttggatttaagactcccagggaagccatcgaaggaacctatattgacaagaagtgccccttcactggtaatgtttccatccgtggccgtatcttggctggaacatgtcacagtgctaagatgaacatgactattattgtt

SEQ ID NO: 12784 - DNA, 337 bp, Glycine max
  Clone ID: LIB3040-056-Q1-E1-G9
ggcgtacacagcctcaacaaccctaacgcgtgcagagcagagagagacgcagccatggggcgaagacccgcgaggtgttataggcaaattaagaacaaaccataccccaagtcacggttttgccgtggtgttcctgatcccaagatcaggatttacgatgttggtatgaagaagaagggtgttgatgagtttcctttctgtgtccatctggttagttgggagaaggaaaacgtttctagtgaggccctggaagctgctcgtattgcttgcaacaagtacatggccaaatttgctggaaaggatgctttccacttgagagtcaaggtgcacccattcc

SEQ ID NO: 12785 - DNA, 379 bp, Glycine max
  Clone ID: LIB3040-056-Q1-E1-H1
gactcaccacttcaaaacactcataacacaaagcacaaagcaaagctcatccttgagttaaaaaatggcagcagcttcttccatggctctctcatccccatccttggctggcaaggccgtgaagctgggcccatcagccccagaagtgggaagggtgagcatgaggaagaccgtcaccaagcaggtctcctcaggaagcccatggtacggcccagaccgagtcaagtacttgggcccattctctggcgagcccccgtcctacctaaccggtgagttcccaagcgactacggctgggacactgctgggctttccgcagaaccagaaacctttcccaaagaaccgtgaactcgaagtgattcactccaggtgggccatgct

SEQ ID NO: 12786 - DNA, 383 bp, Glycine max
  Clone ID: LIB3040-056-Q1-E1-H11
gcggctcgaaccactcatcagaccactcgtcagcgcagccatccgtacagatgcggggaagacattgaggtcctggtgttaggaggtaacctacaggtactggtgctatagcagtacacacggtgatcggctcacttcctctgctttcatcatcatctgtctaagttggttacttgcgtcatcgcattcaggcatctctgtcacgatacatctccatcaatttgtgaatacctatactttagtgtcttcacacaccttattctcgtcaatcgattggttgctatctggatgttccgaaatcttctacagtgcatttgatgctgagttaacacaggttatccctgtgatcaagagatccattggtggcactcgtattggaggtc

SEQ ID NO: 12787 - DNA, 303 bp, Glycine max
  Clone ID: LIB3040-056-Q1-E1-H2
gactcaccacttcaaaacactcataacacaaagcacaaagcaaagctcatccttgagttaaaaaatggcagcagcttcttccatggctctctcatccccatccttggctggcaaggccgttaagctgggcccatcaaccccagaagtgggaagggtgagcatgaggaagaccgtcaccaagcaggtctcctcaagaagcccatggtacggcccagaccgagtcaagtacttgggcccattctctggcgaacccccgtcctacctaaccggtgagttcccaagcgactacggctgggacactgc

SEQ ID NO: 12788 - DNA, 316 bp, Glycine max
  Clone ID: LIB3040-056-Q1-E1-H3
tcagtggttcaataaatatttaactctatattaaaattgaaaaatgatatttaatgcgataaaataattaaattttatgatatacatgcttatggttcatatttgcatttttcttcttcttcttttttgtatatacgaatgaacaaatatgattggaacatgacagtagaaaaaccatatatgagatagcgtgagagagttcaacctgcaaaatttttattattttatatattattttgcattacactttatttaacattatttccattttatcccaaaccactccaaaaaaacaaagccattgactactacaatt

SEQ ID NO: 12789 - DNA, 102 bp, Glycine max
  Clone ID: LIB3040-056-Q1-E1-H4
cccgggcccaaccaagcgtcagaccaagcctccgcccaagcctccgtaacggtgccaaaaaaacacaaaaaggaaaaaaaggttgaataatggtgccaatgg

SEQ ID NO: 12790 - DNA, 391 bp, Glycine max
  Clone ID: LIB3040-056-Q1-E1-H5
ggtgtagtataggattctcttctttattccttttgtaatttcattcattcttaatctttgtgaaaaataatgttcatcgagaattttaaggttgagtgtcctaatgtgaagtacaccgagactgagattcagtccgtgtacaactacgaaaccaccgaacttgttcacgagaacaggaatggcacctatcagtggattgtcaaacccaaatctgtcaaatacgaatttaaaaccaacatccatgttcctaaattaggggtaatgcttgtgggttggggtggaaacaacggctcaaccctcaccggtggtgttattgctaaccgagagggcatttcatgggctacaaaggacaagattcaacaagccaattactttggtccctcacccaaac

SEQ ID NO: 12791 - DNA, 302 bp, Glycine max
  unsure (1)..(302): unsure at all n locations
  Clone ID: LIB3040-056-Q1-E1-H6
gatgtcatagtattatcattcattctcatctttctctcttctctctccacccaaaccctaactcccgaccctgttcccctctcgtatccgtcatgaaaggaggaaagtccaagaccgaatctaagagagccgatcccaaacttgctgtgaataagaagggagccgccaccaaggctaggaaacccgccggcaaggggaaggcagcgaaagaccctaacaagccaaagaggcctccaagtgctttcttcgttttcatggaggagttcaggaaggtattcaacanagaacatcctgaaaacaaa

SEQ ID NO: 12792 - DNA, 362 bp, Glycine max
  Clone ID: LIB3040-056-Q1-E1-H7
gtcttcatcgtagcgccagactgagaggaagagagagggagattctttgtttgctaccttctctcggaaaaatgtttcaccagtaccaggtggttgggagggctcttcccacggaagcagatcagcaccccaagatctaccgaatgaagctctgggccaccaacgaggttcgcgccaagtccaagttctggtattttctgaggaaactgaaaaaggtgaagaagagcaatggccaagtgcttgccatcaacgagatttttgagaagaacccaaccaaaattaagaactatggtatatggttgcggtatcagagtacgactggttaccacaacatgtacaaggagtaccgtgacaccactcta

SEQ ID NO: 12793 - DNA, 317 bp, Glycine max
  Clone ID: LIB3040-056-Q1-E1-H8
gagcgaaacagagagtgatttcagtgagtgatcggtgttcacttgatctcatcataatcgtcagcgtcaattgaagaagatgccgatcagaaacatcgccgtcggaaggcctgaagaggcgactcaccccgacacgttgaaggcggctttggctgagttcatctcaaccttcatcttcgggttcgccggctcaagctccggcatcgcctacaacaagctcaccgacaacggcgctgccacccctgccggtctcatctccgcctccatcgcccatgcattcgcactcttcgtcgccgtctccgtcggcgccaacatct

SEQ ID NO: 12794 - DNA, 359 bp, Glycine max
  Clone ID: LIB3040-057-Q1-E1-A1
agcgaaacagagagtgatttcagtgagtgatcggtgttcacttgatctcatcataatcgtcagcgtcaattgaagaagatgccgatcagaaacatcgccgtcggaaggcctgaagaggcgactcaccccgacacgttgaaggcggctttggctgagttcatctcaaccttcatcttcgtgttcgccggctcaggctccggcatcgcctacaacaagctcaccgacaacggcgctgccacccctgccggcctcatctccgcctccatcgcccatgcattcgccctcttcgtcgccgtctccgtcggcgccaacatctccggcggccacgtcaaccccgccgtcaccttcggcgccttcgt

SEQ ID NO: 12795 - DNA, 330 bp, Glycine max
  Clone ID: LIB3040-057-Q1-E1-A10
gatacctaaaatttgtaccgatatggcctcacttgtgtgtctccttttttccttgcatttcatggttatcatgtcaggttccttaccagcaaataatgaagtgtttacaaaagagtctcctatgtctctatccacataacccgtggaaagactcacccagctcgacttttatttccataacaacaaaatgggggaacacccgactgctatgagaattgttgagcctcctaaggcgtccatttctggttttgggactatttacatgatggatgactctctaaccgaacgaccaagtccaacttcaaagcttgttggaaaatgtcatggaat

SEQ ID NO: 12796 - DNA, 327 bp, Glycine max
  Clone ID: LIB3040-057-Q1-E1-A11
ggtcagcttcataataaagatgacaatgaagctggttttggtagttgttgttgaagttgcatgcttagtttctgggatcttgtcctttggatctgagacactctctgagctttctttcttagaaaatgatgtcgtctcaacaacaagaccttcctcttcatctcaacttcaacctcaacctcaacctcaacctcttatggtggacctcactctcattcatgaagctgattctaaaggagctgtctgtttggatggaacggtgcctggataccatttggatcgtggatttggatctggtgcagatagttggcttattcatttggaagg

SEQ ID NO: 12797 - DNA, 311 bp, Glycine max
  Clone ID: LIB3040-057-Q1-E1-A12
cgggatccacatcctccacaacacaactccactcttaactgccattggtttttcttcatccatttctcttcccttctaagcttttttcgaataaccatttggagattctgtcctaatggctcttgctccatctaaagtttcctccttttccgggttatctcacacacccagtgttggggatgctctgaaaaaaccaacttgctcagtgactcagatctttgcgaatgttacacttggatgcataaaccttaaggtttgtgcactcaactgttcctctctcaagggtgattttcgaaaccttctaggaggtt

SEQ ID NO: 12798 - DNA, 363 bp, Glycine max
  unsure (1)..(363): unsure at all n locations
  Clone ID: LIB3040-057-Q1-E1-A2
gaccgcgcaccacactgagaggaagagggagtgagagagagtgttcttcgtttgctaccttctcccagaaatggttacgttcaggtttcgccagtaccaggtggtcgggagggctctcccaacggaagcagatcagcatccgaagatctaccgaatgaagctctgggccaccaacgaggttcgcgccaagtctaagttctggtattttttgaggaagctgaagaaggtgaagaagagcaatggtcaagttcttgctatcaacgagatttttgagaagaacccaaccaagattaagaactacgggatatggttgcggtatcagagtaggactggttaccacancatgtacaaaggagtacgcga

SEQ ID NO: 12799 - DNA, 77 bp, Glycine max
  Clone ID: LIB3040-057-Q1-E1-A3
cacgcgtcaataagactacaaaagggttcttaaaacagaaaaaccaaaaaacaataaaaggaggaagaatgagctgc

SEQ ID NO: 12800 - DNA, 63 bp, Glycine max
  Clone ID: LIB3040-057-Q1-E1-A4
atatcaaccaaaaaataatctcaatcaacatggatcacaaaaaaaatttaatcgatatcaacc

SEQ ID NO: 12801 - DNA, 382 bp, Glycine max
  Clone ID: LIB3040-057-Q1-E1-A5
ggtcgttcttctccatttgtctgagaaattcgtgaaggaacctcactctgttgctgcattcccccatggcttctggttcagattttgcgttagcggtttcttctgaactcgagtcagttttgaggctggagactgttaactactttgttacgaggaggccatggcttgatctttatggagttaacgtgagacctgttgcgccagttgggagtgctagtaggaggccttatgtggatcctgcacttatacatcgttccttacctgatgagctgctttttgaggtttttgctcgaatgactccatatgacttggggagggcatcttgtgtatgtcgaaaatggaagtacacaattcgtaaccctgtattttggcgcaatgcatg

SEQ ID NO: 12802 - DNA, 372 bp, Glycine max
  Clone ID: LIB3040-057-Q1-E1-A8
gactcactcatacaatagagaccagcttttgcttctttgtgaacatggagatgaggaaatcatgtggcttcttcttcttgctcctcctccttgtctttgcttcccaggtggtggtgcatacggagggaagagtgtgtgagtcacaaagccacgggttccatggtttgtgtaatagagaccacaactgtgctttggtctgcaggaacgaaggtttctccggtggcaggtgcaaaggcttccgccgccgctgcttttgcaccaggatttgttgagatctcatcaaacactactcttgccatgcaaattaataaatcatagctatgccaaataaattgcatctactctttatccatttgggagctagctaccaca

SEQ ID NO: 12803 - DNA, 268 bp, Glycine max
  Clone ID: LIB3040-057-Q1-E1-A9
gataccatagaataagcacaaagagaagcattagcactaggagcagcaacaactagtctcagctgaaatggcctcttcagtgatggcatctgtggccctcaaacctgcccctttcactgttgagaagtcctcagtgagaggccttccctctctctcaaggaactcttcttcattcagagttgtggccagtggcaacaagatcaagactgacaaaccttatggaattaatggtggcatggctttgagggatggaactgatgcatccggc

SEQ ID NO: 12804 - DNA, 371 bp, Glycine max
  Clone ID: LIB3040-057-Q1-E1-B1
gattctgaaaaagccgtagtttcgttggaaagggtctcgtttttcctacttcaaaggtttcttcttcgtatttctcgtaaatttctctctcaacctcctcaaaggaaaaaagaaaaggcatatagttatatggataacaaatcaccgagcaaggagtccaaggaggtgacacgagagtcgcttattgctatttctaactctttacctgataagactctggaatcaacttctgccttagagagcaagaaatcagacggggttatgataccaaaccgtgatcaagatgacaagtttaggtctgaactgatttcaatttcttatgctgaatcccctgatgacaaaatctgatctgttcacgtgtaactcctgga

SEQ ID NO: 12805 - DNA, 321 bp, Glycine max
  Clone ID: LIB3040-057-Q1-E1-B10
ggcagttcaattccaatatattccattctctctgtgtatttccctacctctcccttcaagatgcagatcttcgtcaagaccctcaccggcaagaccatcacccttgaggtggaaagctctgacaccatcgacaacgtcaaggccaagatccaggacaaggaaggaatccccccggaccagcaacgtctcattttcgccggaaagcaacttgaggacggccgtacccttgctgactacaacattcagaaggagagtactcttcacctcgtcctccgtctccgtggtggcatgcagatcttcgttaagacactcaccggcaag

SEQ ID NO: 12806 - DNA, 314 bp, Glycine max
  Clone ID: LIB3040-057-Q1-E1-B12
ggacacaaactttattacagttgttgtattgtaattaagcaagaatattaggcaatggagtcttctagaacttcaactactcttgctctttttttaaccatcaatttgcttttctttgtcatggcaagtggctgctacacttgcacacagcctaagccaaaccctatcccattcccttaccctaaccctagtcctgccgcgaagagctgccccagggacgcacttaagctcggagtgtgcgcaaacgtgcttaatggaccaattggtgctattgtagggtcaccaccggaccacccatgttgctcagtgctaga

SEQ ID NO: 12807 - DNA, 314 bp, Glycine max
  Clone ID: LIB3040-055-Q1-E1-A2
ggggaaaatttgtcaaataaattcatctaaccccaaacaaaaccctagcacacttttatcgcttagtggcagcagcagtggcggcaagcaactccatccgcaatgggaatcgatttgaaggcaggaggtaagtccaagaagaccaagcgaaccgcccccaaatccgatgatatctacctcaagcttctcgtcaagctgtaccgttttcttgttcggaggactgggagtaacttcaatgctgttgtcctcaagcgccttttcatgagcaaggtcaacaagcccccgctatccctctctagattgatccgttacac

SEQ ID NO: 12808 - DNA, 364 bp, Glycine max
  Clone ID: LIB3040-052-Q1-E1-E12
gacttctcttcacacctttgttcactcttcttctcttgcggctagggttttagcgcagcttcttctagatttaaggaagatgggtaaggaaaaggttcacatcagtattgtggtcattggccatgtcgactctgggaaatccactaccactggtcacctgatttacaagcttggaggcattgacaagcgtgttattgagaggtttgagaaggaagctgctgagatgaacaagaggtctttcaagtatgcctgggtgctggacaaacttaaggctgagcgtgaaagaggaatcaccattgatattgctttgtggaagtttgaaacaacaaagtattattgcacagttattgatgcgcctggacat

SEQ ID NO: 12809 - DNA, 369 bp, Glycine max
  Clone ID: LIB3040-052-Q1-E1-E2
gaatcatatatcatttcatttcttttttctcgtccatccgtaaccatgtctcagactgttgtcctcaaagttggtatgtcatgtgaaggatgtgttggagcagtgaagagagttttaggaaaattggatggtgtggaatcatatgacattgatttgaaggaacagaaggtggtactgaagggaaatgtccagccagacacagttcttgcgaccgtttccaaaactgggaagaagactaccttctgggaaggtgaaacagcagcatccgaaactagcacagcaactgcctagaacatttcgctctattatgtgcagaagaagtagctgcgtaaatcaaatactattttatggacctgaaataacgatggg

SEQ ID NO: 12810 - DNA, 376 bp, Glycine max
  Clone ID: LIB3040-052-Q1-E1-E3
cacgggagagcgagctagagagagagagagagagagaaagagaagagagagaagcagcgattcatcacaatgggtaaggttcacggatctctcgcacgtgcgggtaaagtgagaggacaaactcccaaagtggcgaagcaagacaagaagaaaaagccacgcggacgcgctcacaagagaatgcaatacaaccgccgattcgtcaccgccgtggtgggattcggaaagaagcgtggaccaaactcctcggagaagtgagggaggcgtgttgaagatcatggtttttcttagtttgtgaaatgtatcacttgttttgatttgattgatgaactcaaacctttatgatagttcttattatggttcactgaaggagttt

SEQ ID NO: 12811 - DNA, 61 bp, Glycine max
  Clone ID: LIB3040-052-Q1-E1-E4
cactcttctatcatgttccccaaattcaactccctggccatcgttttataacctcgttact

SEQ ID NO: 12812 - DNA, 334 bp, Glycine max
  Clone ID: LIB3040-052-Q1-E1-E5
ggctgacaagccaatcctttgtgtaggtgctcaaccctagtaagccgcaatggtgaagtactcaagggagcctgacaatccaactaagtcttgcaaggctagaggcgccgaccttagggttcattttaagaacacaagggaaactgcctttgcaatcacgaagttgcccttggtcaaggctaaaaggtacttggaacatgttcttgcccacaagcaggcaattccattcagacgtttttgtccaggtgttggaaggacagcccacgctaagaatagacactctaatggccaaggacggtcgcctgtcaagtcaacaaaattcattcctgatttg

SEQ ID NO: 12813 - DNA, 388 bp, Glycine max
  Clone ID: LIB3040-052-Q1-E1-E7
gattcttattcattcactctgctccctcactccaactttcaaaaccctaatttcttcctcgaaatcttctcctcccttccgcgatttcatttccactgctttttccttcgcttggccgtagtcgcttcaattgcgaattccgtcacattctttgtgcagatggcaggggcggataatggtgacggcaacgggagtgaaagggaattagcgggaaatagcgataacggttctgtggaagttgcagaggcttctgttagtgatagtggttgtgaagggaacgacagcgtttcttacgcgaacgtcttgcgttcgaggaacaagtctgttgaagcgcttgctatctacgagcgcgtgttggacagtgatggtgcagatgtagaggggctca

SEQ ID NO: 12814 - DNA, 395 bp, Glycine max
  Clone ID: LIB3040-052-Q1-E1-E8
gaaacatcatcatgtcggacgaagagcaccatttcgagtccaaggcagacgccggtgcctccaaaacctaccctcagcaagccggtaccattcgcaagaacggctacatcgtcatcaaaggacgcccctgcaaggttgtggaagtttcgacttccaaaactggaaagcacggtcacgccaagtgccactttgttggaattgatattttcactgccaagaaacttgaggatattgtgccctcttctcacaactgtgatgttcctcatgtgaatcgtactgattaccagctcattgatattgctgaggatggatttttgagtctgcttactgaaaatgggaacaccaaggatgacctcaagcttcccactgatgagagtctgctcactcagataaag

SEQ ID NO: 12815 - DNA, 374 bp, Glycine max
  Clone ID: LIB3040-052-Q1-E1-E9
aggggactcactcatacaataaagaacagcttttgcttctttgtgaacatggagatgaggaaatcatgtggcttcttcgtcatgctcctcctccttgtctttgcttctcaagtggtggtgcagacggagggaagaatgtgtgagtcacaaagccacgggttccaagggttgtgtaaaagagaccacaaatgtgcgttgggctgcacgaaagaaagtgtctcccgtgtcacatgtacaagggttctcccccgcggggtttttgcaacaatattttttgatatctcatcaaacactactcttgccaagcaatttaataaatcatagctaggccaaataaattgcatctactctttatccatttgggagcctactac

SEQ ID NO: 12816 - DNA, 382 bp, Glycine max
  Clone ID: LIB3040-052-Q1-E1-F1
ggttggcccaacttggcaaagcaatggctctttctgtatcccttatgcaactcagttgcgtctctcttcttcacaataatccctcatcatcatcatcaccggtgacccttttgcccaaatccctctttccttgtggaatttccctgaaactgaaagggttggttttttggagtaaaagtagttcagtgtgtggaagaagaagagtgggagttgggagtatcagtgtgaatgcctctttggttgaggctccagttttgtgggctggaaggctatgcatcttctatgccctcctcaaggctggcttggctggatctcaagccaacccacttgtctcagatttggaaattggggatactaatgatgaatctgctcctggtgctgc

SEQ ID NO: 12817 - DNA, 313 bp, Glycine max
  Clone ID: LIB3040-052-Q1-E1-F11
ggatcctttgtattctattcttcaagattcaggtactgcgtttcggaagcaggtaccaaagtagtccttcgagacacagatggctcgtacgaagcaaaccgctcgtaagtccacaggaggaaaggctcctaagaagcagcttgcaaccaaggctgcacgtaagtctgcaccaactactggtggtgtgaagaagccccaccgttatcgtcctggtaccgttgctcttcgtgagattaggaaataccagaagagtaccgagcttttgatccggaagctccccttccagaggctggttcgtgaaattgctcaggac

SEQ ID NO: 12818 - DNA, 317 bp, Glycine max
  Clone ID: LIB3040-052-Q1-E1-F12
tgcgacattcaccattgactgcgccaagccagtggaggacaagatcatggacatcgcgtctctcgagaagttccttcaagagaggattaacgttggtggcaaggccggtgctctcgccgacaccatcaccgtcacacgtgagaagaccaaaatcatagttacttcagacagcaacttctccaaacggtatctcaagtacttgactaagaagtacttgaagaagcacaatgtgcgggactggctcagagtgattgcttctaacacagatagaagcatttatgaattgaggtacttcaacattgctgagaatgaaggag

SEQ ID NO: 12819 - DNA, 419 bp, Glycine max
  Clone ID: LIB3040-052-Q1-E1-F2
gagtgttgttatttgaggatgacaggaaaaaaatgcagtagaaggacctagatgggtgattttgatttttgatgataattgttgcattcatcatcaatgctgattgatattcctggcatcctcaaataacaacactctgtatttgcagcagagaataatagcaacccagcaacacagtttcattaactgtttgtattttgacaagattttgcctatttatcatatgcacgtttgtagtttttagtttctaaatccctcaatcattttaagtttgtttatctaaaaaagcactggatgggaaaaggaaaaatggctttccaaactcacttgttccgttcaaccatgatcacaaaactcttacttgttaccgttgtcatgtgcaactgtttaaaatgagtatctccaatgaaaatttcttc

SEQ ID NO: 12820 - DNA, 385 bp, Glycine max
  Clone ID: LIB3040-052-Q1-E1-F3
gattttcgcggcgcacagcagaactctgcttcatcggaatccgatcgcacgcgccgtcaccatggtgaacgttccgaaaacaaagaagacatactgcaagagtaaggagtgcaggaagcacacgctgcacaaggttacccaatacaagaagggtaaggatagcattgctgcccaaggaaaacgccgttatgatcgcaaacaatccggttatggtggacaaactaagcccgtcttccacaagaaggctaaaaccaccaagaagattgttctgaggttgcaatgccagcgttgcaagcatgtctcccaacacgctattaagaggtgcaagcactttgagattggtggtgacaagaacggcaagggaacatcactcctctagtttgag

SEQ ID NO: 12821 - DNA, 273 bp, Glycine max
  Clone ID: LIB3040-052-Q1-E1-F4
tgggactccgcagctgcagcactcaaaaccctagagaggacgagagagcgtgcaactttcggcaaccacagaccatgacattcaagcgcaggaatggaggtcgcaacaaacacggccgcgggcatgtcaaagtcatccgatgctccaactgcggaaaatgctgccccaaggacaaaggcatcaagaggtttttggttaggaacattgttaaacacgctgcagtccgagatgtgcaagaaacttgtgtctatgaacaatatacacgtccaaaac

SEQ ID NO: 12822 - DNA, 248 bp, Glycine max
  Clone ID: LIB3040-052-Q1-E1-F5
ggaacttctcacgttcatttctacacatccctagctctgtcgttccgtcgttgacgatggcgtttcgggtgcgaagccctgacctccgctctctctttcttctctctctcttgtccatcgcttccgccaatgtcttcttcgaggagcgtttcgatgaccggtgggaaaatcgatgggttaaatcacattggagagcagatgagaacgtggctggggagtggaaccacacctctggtcaatggaatgga

SEQ ID NO: 12823 - DNA, 373 bp, Glycine max
  Clone ID: LIB3040-052-Q1-E1-F8
gagtctcaacacagaagcagaaggaggagaagcagaaagaggagacgaagcaatggcgccgaagaagccccgaaccacgtcgaggaaccctgatttggtcaggggaattggcaaatattcgaggtcgcagatgtaccacaagaggggcatctgggccatcaaggccaaaaacggcggtgttttgcccctccacgatcccaagcccaaacccgaggccccggcccagaagccgcccaagttctacccggccgatgacgtgaagaagcccctcgtcaacaagcacaagcccaagcccgcgaaactcacggctagcattactccagggactgttctgatcctgcctgctgggaggttcaacggaaagacggttgtt

SEQ ID NO: 12824 - DNA, 113 bp, Glycine max
  Clone ID: LIB3040-052-Q1-E1-G1
gttataactttgacatcaatgtccatttggccaggcattagttcaataaatccatcttgcttatgtattctaacatttgttgtctttttttcagatttctttctattgaagtt

SEQ ID NO: 12825 - DNA, 303 bp, Glycine max
  unsure (1)..(303): unsure at all n locations
  Clone ID: LIB3040-052-Q1-E1-G10
ggtgtccactacggtctttaagggggtacaggaagtanaaccctacatgtagactagaagattaggacaaaaaatattaaggaaaataatactaaaccgtagagaaaagggacacgtcctcgaaaaccacgtcacctggtagaatctgaaagtgtgaagagtgaagatggccgaagaaaaagaatcaacgtcaattcctcttagtcaaagggaaaatgcatctcgcgacgattccgaagacccagccaagtctccaccaagctcgcccaactcctccactcgcaaagcttgctgctttgttct

SEQ ID NO: 12826 - DNA, 365 bp, Glycine max
  Clone ID: LIB3040-052-Q1-E1-G11
ggtacgcaccttcatccctaacgcgtgcataccagagtcacagacagagacgcagccatggggcggagacctgcgaagtgttataggcaaattaagaacaagccataccccaagtcacgtttccgcccttgtgttcctgatcccaagattaagatttaagatgttggtatgaagaaggaaggtgttgatgaatttcctttccgtgtccatctggttaattgggagaaagaaaatgtttctaatgaggccctggaaactgctcgtattgcctgcaacaaatacatggccaaatttgctcgaaaagatactttccacattagagtcacggtgcacccattccatgttcttatgatcaacaagatgct

SEQ ID NO: 12827 - DNA, 304 bp, Glycine max
  unsure (1)..(304): unsure at all n locations
  Clone ID: LIB3040-052-Q1-E1-G12
ggtttgattatggtttgtcattagcacttcatcttttcacactgccgctgcanaaatggcttcagagaagaaactttcgaacccagtgagggagataaaagtgcagaagctcgttctcaatatctctgttggcgagagttgagatcgtcacaacatatccgccaaggtgttggaacaacgtagtggccaaatcccagtgttttccaaagcatggtaaactgttcgttccattgggattagaataaatgacaagaatgcatgctaagtcactgtcacaagttaataggcaatgttacttttggag

SEQ ID NO: 12828 - DNA, 131 bp, Glycine max
  Clone ID: LIB3040-052-Q1-E1-G3
gattggtaccgctaaacgcacatttcactattcaatctcgtttccctttccactgtgaatgtttgttaactgaacttttcgagcaaaatgtcaggacgcgtaaaggggggcaacggttttggaaaaggagg

SEQ ID NO: 12829 - DNA, 268 bp, Glycine max
  Clone ID: LIB3040-052-Q1-E1-G5
atattagcatgaactctaatatcatggttgtactctttgtaaccgttcaacttcacatttaagctagtaattggtgctttttctattgtacagtcgattagacatttctcatgaactcattacatgaagtttgatgtgagtttctggatgttgttatcacataatacgtcactgatgatgatattagcatctaaatccgtgattcaattgccatattgaatttcactgcagtatatgtatttgccgacccagatgaatagtgtcacta

SEQ ID NO: 12830 - DNA, 298 bp, Glycine max
  Clone ID: LIB3040-052-Q1-E1-G6
gatggtggatttggggagggtgaagaggagttgtcatctgaagatggaggtggatatggcaacaattccaacaacaagagcaactcaaagaaggcacccgaaggtggcgcaggaggggcacaagagaatggggaagaggatgaagatgaagatggtgatgatcaagatgacgacgatgaggatgacgatgatgatgacgaagaggacgaggcacgtgaagaagacgatgaagatggtgctgaggatgaggagaatgaagatgacgaggaagatgaggaagcattgcagcccccaaaac

SEQ ID NO: 12831 - DNA, 369 bp, Glycine max
  Clone ID: LIB3040-052-Q1-E1-G7
ggtacgcagcttcatccctaacgcgtgcatagcagagtcagagacagagacgcagccatggggcggagacctgcgaggtgttataggcaaattaagaacaagccataccccaagtcacgtttctgccgtggtgttcctgatcccaagatcaggatttatgatgttggtatgaagaagaagggtgttgatgagtttcctttctgtgtccatctggttagttgggagaaggaaaatgtttcaagtgaggccttggaagctgctcgcattgcttgcaacaagtacatggccaaatttgctggaaaggatgctttccacttgagagtcaaggtgcagccattccatgttcttacgattaacaagatgctttcg

SEQ ID NO: 12832 - DNA, 340 bp, Glycine max
  Clone ID: LIB3040-052-Q1-E1-G9
cgagagacgacaaaagggggtgctttcttgaagcatttggaattctctcgattagctatgacgtaaaaagaacggtcaggagagatagagagggaacaagaatgagtgtatcagtgactgtgatgaccttcaatcaccatgatgaggagccgcaacacagtcacgattcgtgggagaagatataggatatgtgcaaaggcgtgtttagcagttactcaaccatcatcctcagtatccataatggagtgaatgcacaattggattttctctagcaaggtttgccagtttacaatcaaattgggatatcactggaagggccctacgacactactgaacagca

SEQ ID NO: 12833 - DNA, 371 bp, Glycine max
  Clone ID: LIB3040-052-Q1-E1-H10
gacaacacaacacaacgcgcactctctctttttctctctgttttttgttctctcttcgcttaaaccctatcgttcttctcgttttcgccgattctcgccatgccgaaagctaaatccgacgccaaagccgccgatagcaggttgaagcggaagggcgctggtgctgggaggaagcaatcgaggaaagctgctaaggaccctaacaagccgaagagacctccaagcgctttcttcgttttcatgtccgagttcagagagcagttcaagaaggagcatcctaacaacaaatccgtcgctgttgtcggcaaagctggtggtgaaaaatggaaatcgctatctgatgctgaaaaggcccctttcgttgctactgc

SEQ ID NO: 12834 - DNA, 276 bp, Glycine max
  Clone ID: LIB3040-052-Q1-E1-H11
gaaaagtttgaggagagagagagagagagagatggaggagaagacggagaaggtgaagtctgaggcagttcagataattgaagcgtttgaggttctgccaaagctcgtggttttcgatctcgattacactctctggcctttctactgtgagtgtcgatcgaagcgcgagattccttctctgtatccccacgccaaaggcatattgttagctctcaaagagaaaggcatcgacattgccatcgcttctcgctcgccaacggcagacatcgcaaccgc

SEQ ID NO: 12835 - DNA, 259 bp, Glycine max
  Clone ID: LIB3040-052-Q1-E1-H12
gggttgcctgatgaggttaaaaaaagataaagatacaaaaaaaaaaaaaaaaagataaagatacaaaaaaaaaacaaaaaagataaggataaaaaaaaacaaaaaaaaaaaaaaaacttagaagaaaaaaaaaaaaaaaaaaaaaaaagggggccccccaaaagtgttaagtctaatttacctttgattgcaatttcaaaccccttcaaaagggcccccaaatttcatttctggggcctccttttaaaaacttcttaac

SEQ ID NO: 12836 - DNA, 358 bp, Glycine max
  Clone ID: LIB3040-052-Q1-E1-H5
gaatttaattagaatcgtttaatgtcaaaaaaaaaaaaaaaaaaaaaaaaaaaaaaaaaaaaaaaaaaaaaaaaaaaaaaaaaaaaaccaaaaaaaaacaaaaaaaaaaaaaaaaaaaaaaaaaaaaaccggccgcccaaaaggatcaaacctaacgtacccttccatgcaacttcaaaccccttcaaaagtgtcaccaaaatccaattcacgggccgtcctttaacaacctcctaacgggaaaaaccctgccgtaaccaaatttaaccaccttgaaaaaaacccccctttcccaaacacggcataaaaccaaaaaggccacaaccaatcccccttcccaaacaattcccaacccaaa

SEQ ID NO: 12837 - DNA, 290 bp, Glycine max
  Clone ID: LIB3040-052-Q1-E1-H6
gattccattacagaagaagaagaagaagaaaagagaagaagcttcttcttggttaccttgacagacagagagtggagcaaacgacaaatcagcgagttggaacattttgtgtttggtggagatgcctattcggagcttggtagaagtggagccaccaagcccactgagatacttgatcggcgccgccgttatgatgatcggagttgtgttaccagtcggttacatgatgttccgtaacaagcgcgtcccctcctcttccctctactccaaacagacgaacaatgttttga

SEQ ID NO: 12838 - DNA, 385 bp, Glycine max
  Clone ID: LIB3040-052-Q1-E1-H7
gtgtgagagagcgagcgagcgagcagtttcaaagagaggatttgggattgggaaggcgagggattgcgctgcgtctcttcctcttctctttcgattcatccctcattcataatcttccaatccaacaacctcagcctcacactcacacatacacacatctgaacgcgtatcgtccctcccatggcttcaaagcgcatcctcaaggagctcaaggacttgcagaaagacccatcaacttcttgcagcgctggtccagtatctgaggacatgttccattggcaagcaacgattatgggtcctgctgatagtccttatgctggacgtgtattcctagtcactattcactttcctccggattaacctttcaaacctcccaaggttgcct

SEQ ID NO: 12839 - DNA, 343 bp, Glycine max
  Clone ID: LIB3040-052-Q1-E1-H8
ggaagttattagggtttttgagtgcggcggtccaaacactcttctctgcagcttttgcctacaactcccttcaccatggctgaacaaaccgagaaagcttttctgaagcaaccaaaagtgtttctcagcacaaagaagactgggaagggaaagagacctggaaaaggtgggaaccgcttttggaagtccattgggcttggatttaagactcccagggaagccatcgaaggaacctatattgacaagaagtgccccttcactggcaatgtttccatccgtggccgtatcttggctggaacatgtcacagtgccaagatgaacaagactattattgttagaagga

SEQ ID NO: 12840 - DNA, 176 bp, Glycine max
  Clone ID: LIB3040-052-Q1-E1-H9
gacgtcacgatgtgcatgtcagagtgtgtattagagtacaagccgcatttgatcgcagtgtgttaggatgagtaacaccatcagggactctagctgaagtgggagacgtgattccagaccgcactgtcgccaacctggctcacgccaacagcacccaagtcgtcaccattcaggct

SEQ ID NO: 12841 - DNA, 329 bp, Glycine max
  Clone ID: LIB3040-053-Q1-E1-A1
gctcgtctcgtggaagtgtaagcaagcaaaaccctagcggcgcctgctttctttgttcgtgttttgcatcaggatggagtctcaggtgaagcacgcacttgttgtcaaagttatgggtcgtactggatccagaggacaagtgacccaggttagagtgaagtttttggatgatcagaaccgtcacatcatgaggaatgtgaaaggacctgtgagagaaggagacattctcaccctactcgagtctgacagggaagcaagaagattgcgctagatggtctctttttttggcttgcctccaaattccaacaaaagcaatatttttcttgata

SEQ ID NO: 12842 - DNA, 342 bp, Glycine max
  Clone ID: LIB3040-053-Q1-E1-A10
gattcctcaagaactagggtttgcagtcactgctctgtttcaccgagtttgggcgtttaggtcagaaccaaatcgtgttctcttccattggcaaacatggcaactcaaatgagcaagaagagaaagtttgttgcggacggagtgttctttgccgaactgaacgaggttctgacacgtgaattggcggaggacggttactccggcgtcgaagttagggttacgccgatgcgcaccgagatcatcatcagagccaccagaacccaagccgttctaggtgagaagggaaggagaattagggaacttacctcagtggtgcagaagaggttcaaattccccgaaaac

SEQ ID NO: 12843 - DNA, 408 bp, Glycine max
  unsure (1)..(408): unsure at all n locations
  Clone ID: LIB3040-053-Q1-E1-A11
tcacggactcgatcccacgcagtaagtccgtatgcgatacaacgagacgacagggaagggacatcacantttcgattgcgcctctgtgtctctgtcactggctgcgtctctccgtaaccaaatgcgctaagcaaatccatcgagattaagggatttccnttctcaactggctagaagggaaggacgcaaggggtcggtgaagatcatagaggagcaagagatgtttggttaagttcaaggggtcagatgctcgnaagtacctcctacacaaactttgtgtgtttgaccccagagaaagctgataaattgaagcaatctcttcctccaggtttgagtgttcaagaccttgtaaagtacaaggcgagagaccaagaagaagcaattcattgattcctctgaacttcgttt

SEQ ID NO: 12844 - DNA, 374 bp, Glycine max
  Clone ID: LIB3040-053-Q1-E1-A12
gaagcagagccgaagcggaacgcttgctagcgatcggcgagaagctgcttcagagccgcgatctgagcagctcgcgcgacttcgccatcctcgcccaggaagccgagccgctcctcgaaggctccgaccagatcctggccatcgtcgaagtcctcctcgccgccgagaagccaatcaccaacgaccacctcgattggtacgctattctccaggtcgatcgcacgtgccaggacctcgatctcatcaaaaaacagtaccgtagactcggtcttcttcttcaccccgacaagaaccctttctccctcgccgaccacgccttcaagctcgtctccgatgcctgggccgtgctttccgacccggtccagaaagcgatt

SEQ ID NO: 12845 - DNA, 285 bp, Glycine max
  Clone ID: LIB3040-053-Q1-E1-A2
gacagctcttggctttagcaaattccaattcccaattcccaattcgaaacccttagtcctttcaaagaaccaaattgagtgatcgtgatggcaccaaaggcagagaagaagccagcggagaagaagcccgcggaggagaagaagtcgacggtgggagacaaggctccggcggagaagaagccaaaggccggaaagaagcttccgaaggagggaggcgccggcggagaagggaagaagaagaagagaaacaagaagagcgtggagacatacaagatctacatcttc

SEQ ID NO: 12846 - DNA, 322 bp, Glycine max
  Clone ID: LIB3040-053-Q1-E1-A4
ggttctaaggggtgattgtttgttgttgtaactcgttcttcatcatttgttgttctgtgtttgtgtttgttttttctctcacctgaaaatgtcttgctgcggtggtaactgtggttgcggaagctcctgcaagtgcggcaactgctgccgaggctgcaagatgtacccaaacttgagctacactgagtcaaccaccaccgagaccttggtcatgggagtggcacctgttaaggctcaatttgagggtgctgaaatgggtgtgcccgctgagaacgatggctgcaaatgtggaccaaactgctcctgcaacccctgcacttgc

SEQ ID NO: 12847 - DNA, 367 bp, Glycine max
  Clone ID: LIB3040-053-Q1-E1-A6
ccaggcgtcagacagctacaaaagggggacacaaaggggtctcgtggaagtgtaagcaagcaaaaccctaacggcgcctgctttcattgtacgtgttttgcagcaggatggagtcacatgtgaagcacgcacttgttgtcaaagttatgggtcgtactggatgtataagacaagtcgaacaggttagagtgaagtttttggacgatcagaagcctcacatcatgacgaatgtgaaaagacctgtgagagaaggatacattctcatcctacgcgagtctgaaaaggaagcacgaagattgcgctagatggtctctcttttttggcttgcctccaaattcgaacaaaatcaatatttttcttgatattt

SEQ ID NO: 12848 - DNA, 347 bp, Glycine max
  Clone ID: LIB3040-053-Q1-E1-A7
gaagtcttatccattcatttcatccatccagcacgcgcacttcctttggagtctctgcctgaagatggcaagccttcagttaacaacaacacccttcactcttttgagacaacaaaggcagcaccccacaaagaagaagtccactgcttctcagctgaaccctcctcggccacgtcgcctcagagtgagtgtgaggtcctataaagtggtgattgagcacgatggagagtccactgaggtggaggttgaacctgacgagaccattctgtcaaaggcattggactctggcttgtctgtgcctcatgattgcaagcttggagtctgcatgacatgccctgctcgcctca

SEQ ID NO: 12849 - DNA, 351 bp, Glycine max
  Clone ID: LIB3040-053-Q1-E1-A8
ggtggtcgtcgaagcgcgagcaagcatcccaaaaccctagctcgcgttctgctttcgtcttttacatcaggatggagtctcaggtgaagcacgcacttgttgtcaaagttatgggtcgtactggatccagaggacaagtaacccaggttagagtgaaatttttggatgatcagaaccgtcacatcatgaggaatgtgaaaggacctgtgcgagaaggagacattctcaccctactcgagtctgaaagggaagcaagaagattgcgctagatggtttcttttggcttgcctccaaattcgaacaaaacagtgtgattttgttgattttaatggtagttggtggatgtcaaaa

SEQ ID NO: 12850 - DNA, 305 bp, Glycine max
  Clone ID: LIB3040-053-Q1-E1-B1
gaacagcgaaacagagagtgatttcagtgagtgatcggtgttcacttgatctcatcataatcgtcagcgtcaattgaagaagatgccgatcagaaacatcgccgtcggaaggcctgaagaggcgactcaccccgacacgttgaaggcggctttggctgagttcatctcaaccttcatcttcgtgttcgccggctcaggctccggcatcgcctacaacaagctcaccgacaacggcgctgccacccctgccggcctcatctccgcctccatcgcccatgcattcgccctcttcgtcgccgtctccg

SEQ ID NO: 12851 - DNA, 85 bp, Glycine max
  Clone ID: LIB3040-053-Q1-E1-B11
gagaatagagttgttcccgttgactggctttttattgtgctgtttgctcatgaataaggaccatgttttagaaatcatatttgcc

SEQ ID NO: 12852 - DNA, 387 bp, Glycine max
  unsure (1)..(387): unsure at all n locations
  Clone ID: LIB3040-053-Q1-E1-B12
ggttctagtgtgtgattgtttgttgttgtaactcgttcttcttcttttgttgttctgtgtttgtgtttgttttttctctcacctgaaaatgtcttgctgcggtggtaactgtggttgcggaagctcctgcaagtgcggcaacggctgcggaggctgcaagatgtacccagacttgagctacactgagtcaaccaccaccgagaccttggtcatgggagtggcacctgttaaggctcaatttgagggtgctgaaatgggtgtgcccgctgagaacgatggctgcaaatgtggaccaaactgctcctgcaacccctgcacttgcaagtgaagtgttgggagagcaagcttcaagcagagatagcccttaattangaataatgataaact

SEQ ID NO: 12853 - DNA, 345 bp, Glycine max
  Clone ID: LIB3040-053-Q1-E1-B2
ggaaagcagtgaccacggagagagagagagaggttttgacgcaacacactttcactgagaaaggatctctatctaccaaggagcagaataaaacccttctctctggtaagtgaataagagaatggcttcagatcggaaacttcacactttcgaggaggtggcaaagcacgaccagaccaaggattgctggctcatcatttctggcaaggtgtatgatgtcacccctttcatggaggatcatcccggaggtgatgaggttttgttatctgcaacagggaaagatgcaaccaatgattttgaagatgttggacacagtgattctgctagagatatgatggaaaaata

SEQ ID NO: 12854 - DNA, 320 bp, Glycine max
  Clone ID: LIB3040-053-Q1-E1-B4
gtatactacggttaagttgggtaaccttgctccggaggcaactcaacttgatctccatcaccacttccattctcttggagctggagtgattgaagaagttcgtgtccagcgtgataaagggtttggttttgtgaggtacagtactcatgctgaagcagctctagccattcagatgggaaatgcccagtctcttctctgtggaaaacaaattaagtgctcttgggggaacaagcccactccagccggaactgcttcaaatctccttcccccaactgcagctgcatccttgcctggcctctctgcaactgattttttggtgt

SEQ ID NO: 12855 - DNA, 352 bp, Glycine max
  unsure (1)..(352): unsure at all n locations
  Clone ID: LIB3040-053-Q1-E1-B7
tttcgtgagtctcgtatctctaaaagctcattaaacccaaggcccttcctaggtgagtctcatttctccaaaggctcgaaaaatccaaggcacgtccttaatagtcctcacaaaaaccaaggatgaacacttcctttgtccaaagcttgttaaacccaaggtccggccttggaatacaagaaaccgaaggtccagccttggtaagcgctcctacaaaaacccaaggtacacccttggtaagctctctcctttagaactacaacaaggatagtcaaaggtccaggttccacaaggtaaaaggacataccactagactagttggcaagaccttcaactangagaaaatcaaact

SEQ ID NO: 12856 - DNA, 117 bp, Glycine max
  Clone ID: LIB3040-053-Q1-E1-C1
tggaacgtggaagtggaacccactttgatgtcacaaaacaaacaagtaccacatcagaaatccactcttataaaagaacaacctaacaacaaatctatcacaaatcgtcagtaatcc

SEQ ID NO: 12857 - DNA, 374 bp, Glycine max
  Clone ID: LIB3040-053-Q1-E1-C10
gattggacacattcttcagcgactgcgtttttggatcggaacctcttctgcggcgtagcaatgggacactccaacgtttggaactctcacccaaaaaactacggtcctggttctcgcacttgccgtgtgtgtgggaatccacatggactgatcaggaagtatggccttatgtgctgcaggcagtgcttccgtagcaatgccaaggaaattggcttcatcaagtatcgctaaaagagcagttgtcaactacggaccaatattgtgttctggcactaggatgttttgaggatgttatgtttgaagaaacttgagactttcttttttcatctaattaattatcagacgtaatttgtggtactaagaatacttttata

SEQ ID NO: 12858 - DNA, 267 bp, Glycine max
  Clone ID: LIB3040-053-Q1-E1-C2
ggatattagcctccaaataggaattaagatctacgttagggtagtagtagggattaaatatagagaaaaaataggattaattgaattgccaagaagagtaactcagctcaactcaagtgtttgttattgtttatcgagttgaggctcaggacccgacgaacgacggagaaacagagattaatcggggaagggtttagggtttgtgagtggaaaaatcgaatcgaatcgaattgagaatgtctctgacgagcgtgaaaatgtcggagg

SEQ ID NO: 12859 - DNA, 290 bp, Glycine max
  unsure (1)..(290): unsure at all n locations
  Clone ID: LIB3040-053-Q1-E1-C4
cgggtcttccattcggtttcgaattctcgcgattcgcgatgggggaacgacgctgacgttgaatttcaaggttctggtttttcgtcgtcgctgtggagtgaagaattctgtgttgctggagatgtttacgccgccgagggtttggtcgggttggtccctgactccgaacatcagcggggttcggggaggaatcgggtctggttcggaattgggtccgaattcgggagatggaacgatcccgaatggaaaangtgtcttggctgttgacaatggtgggaacttggatcgcg

SEQ ID NO: 12860 - DNA, 335 bp, Glycine max
  Clone ID: LIB3040-053-Q1-E1-C6
ggttccatttctcaacaacttctgcgacttcctactccaaccgcacttctgctccgcaattatcatgggcaaggtcaagatcggaatcaacggatttggaagaattggccgtttggtagccagagtggctctgcagagaggcgatgttgaactcgttgccgttaacgaccctttcatcaccaccgattacatgacatacatgtttaaatacgacagtgttcatggacactggaagcatcacgatgtcaccgttaaggacgagaagacccttctcgtcggtgacaagccaatcactatttttggacacagaaatcctgaagaaatccaagggggtc

SEQ ID NO: 12861 - DNA, 57 bp, Glycine max; identical to SEQ ID NO: 12752
  Clone ID: LIB3040-053-Q1-E1-C7

SEQ ID NO: 12862 - DNA, 158 bp, Glycine max
  Clone ID: LIB3040-053-Q1-E1-C9
cggcgaaattgccactgaggaagagtgaagtggcactttctaacggaaccattagggtttttttttaagctcggtttttttttgttttattttgtttttaatggttgactttgtttgaaatcaacgttcagtagtataattaaatttgttttcagagc

SEQ ID NO: 12863 - DNA, 320 bp, Glycine max
  Clone ID: LIB3040-053-Q1-E1-D1
gacaacacagggcaacacaacgcgcactctctcttttctctcttaacacaaaaaccctatcgttcttcgcggtttcgccgattctcgccatgccgaaagccaaatccgacgccaaagccgccgatagccggttgaagcgcaagggcgctggtgctggaaggaagcaatcgaagaaagctgctaaggatcctaacaagccaaagagacctccaagcgctttcttcgttttcatgtccgagttcagagagcagtttaagaaggagcatcctaacaacaaatccgtcgctgttgtcggtaaagctggtggtgacaaatgggaa

SEQ ID NO: 12864 - DNA, 292 bp, Glycine max
  Clone ID: LIB3040-053-Q1-E1-D10
gatgtttgcttactcagacataccccttgctagcaacactgagcttaatcgagcttcgcacacatgaatcaggaaaagttaatgaatatggacggttcggtcagaactggctgaaagggtagtgtgagaagaaagaagaaagctggccatacaacaacaaccacacatgacagacagcttgataccaacctgactagaataagggtgagtgccatccatgctagtgaataagtcggtatctttaatgatggcgtacttatccagttactaactcacacacttcatgcatcca

SEQ ID NO: 12865 - DNA, 355 bp, Glycine max
  Clone ID: LIB3040-053-Q1-E1-D11
ggatgatcctttaatttcctgagttccggcgaattaacaagcttcaaattcaattgcttttcatgcaaatggatgtttatacacacatctcattaccatctttcatatcgcatcgcttctcttcttcacgattccaatgctcatcactttcttcttgttctcctttcaagcttgtctgttccaacagagactccaaggaatctcaacgaaacgacgataacaataacaagggtgataaatcttcaacagactgggacaaggcatggtcaaaattcaaaaagcaagggggaaaaaacccttctccaaattttcagataagtatgtgagctggaatcctaagcgttcaaagttccct

SEQ ID NO: 12866 - DNA, 381 bp, Glycine max
  Clone ID: LIB3040-053-Q1-E1-D12
gcacctccgtagggtttggttattacggttttcgctcacccgtgtgcagtcgagcctctcgaagaaaaagcgaaaatgccgtcgcacaagacattcagaatcaagaagaagttggcgaagaagatgaggcagaacaggcgcatcccctactggattcgcatgaggaccgacaacaccatcacgtacaacgcgaagcgccgtcactggcgtcgcaccaagcttggattctgaggtgcttgctttgcctccattcagtttatccaattaattagtgttttattttcttgagccaaaaacaatgctttggagtttttaatattttgcattttattccaagactatattgtgtaaggaatttattggagtacgtttgacgtgggt

SEQ ID NO: 12867 - DNA, 298 bp, Glycine max
  Clone ID: LIB3040-053-Q1-E1-D2
gatccttcgaccagctggcaccacattcacctgaggcttccaaagcaatggcttcccttgcaacatccactgctgctgcttcccttggcatgtcagaaatgcttggaaaccccatcaacttcagtggtgccacaaggccagctccatctgcttctagtcctgcctccttcaagactgtggctcttttctccaaaaagaaagctacaccaacacctccaaaaaaagctgctgctgctgctcctgccaatgatcagcttgccaagtggtatggtcctgacagaaggatcttcttgcctga

SEQ ID NO: 12868 - DNA, 320 bp, Glycine max
  Clone ID: LIB3040-053-Q1-E1-D4
gaacgggatgccgaaaagtactaccaagatggcttcagttgtgtatctcctctttggcttccatctcattgttatcatgtcaagttccttacccgcaactagtgaagtgtttgcaaaacagtatccatccacagaacccgtggaagaaaaactcacccaactccacttctatttccataacaacataacgggggaacacccaactgctatgaaaactgttttgcctcctaaggggtccattcacggttttggggctacttacatgatggatgaccctctaactgaaggaccaagtccaacttcaaagcttgtgggaagat

SEQ ID NO: 12869 - DNA, 318 bp, Glycine max
  Clone ID: LIB3040-053-Q1-E1-D5
ggaacctgaaaatctagtttcttacaaggctctactctactgcttcaccttctgctctagaaaattcagtggtgatacatggcttcggctactctctctgtagccaaaccagcccttcaggcaaatgggaaaggcttctctgaattctctggcctccgcagctcatcaggcttccttcccttttctagaaaatcttcagaggatttccattctgtcattgccttccagacctatgcacttggaagcagtggaggatacaagaagggtgtgacataagcaaaactgaaggttgccataaacggatttggaacgattgga

SEQ ID NO: 12870 - DNA, 298 bp, Glycine max
  Clone ID: LIB3040-053-Q1-E1-D6
ggatagagagcgcggcataacctaaacctatctttcttctctctctgtgtgtgcgcttcaacggcaaccagaagcagccatggccactgcaaggactgtgaaggatgtttcacctcatgagttcgttaaggcgtactcctctcacctcaagcgatccggcaagatggagctgccagagtggactgatattgtgaaaactgcaagatttaaggagttggctccttatgatcctgactggtactatgtcagagctgcttccatggcaagaaagatctacttgagaagaggacttggtgtt

SEQ ID NO: 12871 - DNA, 333 bp, Glycine max
  Clone ID: LIB3040-053-Q1-E1-D7
gatagcaaaatcgtttctccaatttaatcaccattgtacaacccaaattcccttcgtcgttttcgattaagagagcaatggcacgtaccaagcaaaccgctcgcaagtccaccggaggaaaggctccgaggaagcaattggcaaccaaagccgctcgcaagtcagccccggcgaccggcggagtgaagaagccccaccgcttcaggccaggaacggtggctctgagggagattcgaaagtaccagaagagcaccgaacttctgatccgaaaactcgcattccagaggctcgtcagagaaatcgctcaggatttcaaaaccgatctccgctttc

SEQ ID NO: 12872 - DNA, 297 bp, Glycine max
  Clone ID: LIB3040-053-Q1-E1-D9
ggagaaagtgatggattacgatttagcagcgttgaagcttttctgttcgcagctgaagcaggctcgagaagtagcaatgccttgtcaaactcaaagtcaaagtcaaagcagcttcactctcggcggcctccttttccagcgcccttggttgcagggcgttctcgtctccgcctccgacgccggctctctgcttctcgacgacggaaccgacctcgtcgagctctccctcaatagcgagtttcgccaccgtccatggaaactcgggatgtatgtaatggtggttggagggtatgctgc

SEQ ID NO: 12873 - DNA, 349 bp, Glycine max
  Clone ID: LIB3040-053-Q1-E1-E10
ggatgcagatgcagcctatcatggcagcctactaccccaacaacgtcaccactgatcacattcaacagtacctggatgagaacaagtccttgatcctgaagattgttgaaagccagaattctggcaagctgagcgagtgtgcagagaaccaatcaaggctgcagagaaatctcatgtacctagctgcaatagctgattctcaaccccaaccatctccaatgcctggtcagtatccttctagtggacttatgcagcagggagcacactacatgcaggctcagcaggctcagcagatgtcacaacaacagctaatggcttcgcgctcctcactcttgtactcccaaaagcc

SEQ ID NO: 12874 - DNA, 338 bp, Glycine max
  Clone ID: LIB3040-053-Q1-E1-E11
gatcctacgaacgctcctcacttgcagaattcaaagaaggcgtcttcataaacgcctttattctccgtttccgtttccttcccggaattcgatttttcatctctgaaaatgagtgagtgcatctcgatccacattggtcaggccggtatccaggtcggaaatgcttgctgggagctctactgtcttgagcacggcatcgggcccgatgggcaaatgccaagtgacaaaacagttggcggaggtgatgatgctttcaacactttcttcagtgagactggtgctggaaagcacgtgccacgtgccgtctttgtagatcttgagcccactgttattgatga

SEQ ID NO: 12875 - DNA, 376 bp, Glycine max
  Clone ID: LIB3040-053-Q1-E1-E12
gatacctaaaaattgtaccgatatggcttcacttgtgtgtctccttttttccttgcatttcatggttatcatgtcaggttccttaccagcaaatagtgaagtgtttacaaaagagtctcctatgtctctatccacaaaacccgtggaaagactcacccaactccacttttatttccataacaacaaaatgggggaacacccgactgctatgaaaattgttgagcctcctaaggcgtccatttctggttttgggactatttacatgatggatgaccctctaaccgaaggaacaagtccaacttcaaagcttgttggaagatgtcagggaatatatgctgaggcttcgcaacatgaacctgcgatactcatggtaacg

SEQ ID NO: 12876 - DNA, 314 bp, Glycine max
  Clone ID: LIB3040-053-Q1-E1-E2
gactacaccagaaccataaccaccacgagtttctctatctgctttcttcacaaagagtaactcagtcttctaaaaactttctcaaaaccattattattctctaatctttcgtttcttcaattaattaattggtttcttgctatggctgtggactctgcgatttcgtccccattgggtcccccggcctgtgagaaggacgcaaaggcgttgcggttcatcgaagaaatgactcgcaacgccgacgccgtccaggagagagtcctggaggagattctcacacgcaacgcccagacagagtaccttaaacgcttcga

SEQ ID NO: 12877 - DNA, 333 bp, Glycine max
  Clone ID: LIB3040-053-Q1-E1-E3
ggagagaaagagagagaaagatgtcgaagcgtggtcgtggtggttcggcggggaacaagttccgcatgtcgctgggtcttccagtggcggcgacggtgaactgcgccgacaacacgggggcgaagaacctctacatcatttcggtgaaagggatcaaaggccgtttgaaccgtcttccctcggcctgcgttggcgacatggtgatggccaccgtgaagaacggaaaacccgatctgaggaagaaggtcttgccagctgtcatcgttcgccagcgcaagccatggcgccgaaaggacggcgtctacatgtacttcgaagataatgctggtgtta

SEQ ID NO: 12878 - DNA, 239 bp, Glycine max
  Clone ID: LIB3040-053-Q1-E1-E5
ggactcaaaaagagggttaacaagaaaaaaaaaaaaacttgaaataccttcaactcgaagaacacaaccactgaaaaaagagaaagtgagaaaagggtcgaacaactggtgaagtcattgatggctacagaggaagagagtgcggtgaaggagcctttggatctcattaggctcagcctcgacgagcgtatctatgtcaaactccgttccgacagagagcttcgtggcaaacttcacgc

SEQ ID NO: 12879 - DNA, 365 bp, Glycine max
  Clone ID: LIB3040-053-Q1-E1-E8
aggcatcttcttcaaattcctgtcctgaagatgacagcaaagtggtatctcattgtgtgtgttgtagcgatctgggccgttgatctgggttcatcatcacaccatgcccgtgccccagcaccagcaccgtcagtggagtgttcaaacctggtattgaccttatcggattgcctcaccttcgttagcaacggcagcaccgtcaccaagccacagggaacatgctgctcttccttgaaaactgtgctcaacacagcccctaagtgcctttgcgaggctttcaacagcagcgctcagttaggtttagccatcaatgtcaccaaggctgtcacgcttcccgctgcttgcaaactctctactccttctgc

SEQ ID NO: 12880 - DNA, 146 bp, Glycine max
  unsure (1)..(146): unsure at all n locations
  Clone ID: LIB3040-053-Q1-E1-F1
gacctcaacacgtttattcgttacagaaattaagctcagtgtgtgtgagtgagagaaaaaaaanggagaaaaagggaaaaaaagggggcggtccaaaaggttcaaggctaagttagcgtggaagggaaggtaaaggtcctccaaag

SEQ ID NO: 12881 - DNA, 374 bp, Glycine max
  Clone ID: LIB3040-053-Q1-E1-F11
ggacctatcaagttaatttgcgtctatattcattttggcatcgaggttgaatctcatcggagagagaaaaaccataaccatgtctggaagaggaaagggaggcaagggtctcggaaagggaggagcgaaacgacaccgtaaggttctgagggataacattcagggcataacgaagcccgcaattcgccgtctcgcgagacgtggcggcgtgaagcgtatcagtggtctcatctacgaagaaactcgcggtgttctcaagatcttcctcgagaacgtcattcgcgacgctgtcacctacactgagcacgctcgccgcaagaccgtcactgccatggacgttgtttacgccctcaagaggcaaggcaagaccctct

SEQ ID NO: 12882 - DNA, 352 bp, Glycine max
  unsure (1)..(352): unsure at all n locations
  Clone ID: LIB3040-053-Q1-E1-F12
cggttgcaaaaaaacaacaaaagggggggttaaaaaaatggtccaaccttggaattcaaaattcaattaaattccaacatcaaaaatggcttacaaccatcatgaccacacaaaccggaaatcccttttggacaccctatactgctccgaagcagaggaggactacggtcatttcctaaacaactcctcncctgcgtcncctctttcttgctccaaagcgacatgttttcggacgaacaagagttgacatcactgctggggaaagaacaccacaaccctctaagcacctgtctccaaaccaaccctgccttggactttgctcgccgggaagccgtggaatggatgctcaaag

SEQ ID NO: 12883 - DNA, 204 bp, Glycine max
  Clone ID: LIB3040-053-Q1-E1-F2
gacatgctcaatgtttatgttgctttcagtcattttagataatattgctacatttaatttgagtttttctttggacattcttgttccttaagtgtcttttacgtatgaaatcaaatttaagggtaaattaaactgattaaaacaaaaaaacacagaacaataacatcccaccttaaaactcccctccccaaaaaaaaccggccc

SEQ ID NO: 12884 - DNA, 354 bp, Glycine max
  Clone ID: LIB3040-053-Q1-E1-F3
ggtgaaggacgaggcaagaaggaagtgttgtgggacgaaagaggcagagctgcaatcaccagagtggaagcgcgaaacggtcctccccggctttccattttttctcttctgatgaaattttagttcatcccagttgctgattgagatcgaatttaaattcgaaaaagcgtacttgtgccactgtacttttacagatctgcggctacgggctagcctatcgtatttttgcgtagatctagtgtccgtgaagcggttaccatttcaccactcaccactattcatctctttcttctatattgatctgaaattgaagatggaaagcgaaaagaaatcgtcagcaatatttgatgtggg

SEQ ID NO: 12885 - DNA, 210 bp, Glycine max
  Clone ID: LIB3040-053-Q1-E1-F4
gacccaatggatcctgtggattcatacatacacatttctcaagttgcgctcggagaggcgaaaaaggacaaacctaatgaacctgtggttctgtacatgaaagttggtgaacagaacattgttttgggaaccctttctagggaaggcatccctcacctatcattggatttggttcccgactccgattctgaactttcccacacttcaaaa

SEQ ID NO: 12886 - DNA, 315 bp, Glycine max
  Clone ID: LIB3040-053-Q1-E1-F6
ggaatcagcaccacattcacctgagctttttgtgaggattccaaagcatggcttcccttgcagcatccactgctgctgcttcccttggcatgtcagaaatgcttggaaaccccatcaacctcagtggtgccacaaggccagctccatctgcctctagccctgcctccttcaagactgtggctcttttctccaaaaagaacgctgcacctccaaaaaaagctgcagctgctgctcctgccaatgatgagcttgccaagtggtatggtcctgacagaacgatcttcatgcctgatggtctcttggaccgatctgaga

SEQ ID NO: 12887 - DNA, 371 bp, Glycine max
  Clone ID: LIB3040-053-Q1-E1-F8
accaaccccttttagctcaccctcgcactctcagccaccgcacgccgccgtctccggcagccactgtccgttttcacttgtaatttgtcaactcagcataaaaggggtgggttaggctttgcaaccattggaagttccaacaatggcaggcatagctatacttttagatctatggaggaaaaatcaaaacttgagctctggattgcactcctctcatgcttttcagtcttccagtgcctttttttctgcctctgctgcaactgctgctgcagcgtcttttgctgcagggactggttttgcctcaagggcattgtttgggtcatcagttgcatattgtgatgctggtgcagcattaccaaaagactacattt

SEQ ID NO: 12888 - DNA, 365 bp, Glycine max
  Clone ID: LIB3040-053-Q1-E1-G1
aggggattcacttgcggctgcagcagagaagcactcatcattcttcgtttgtctaagatccgccttctctgaattgtaaaaatgtcgctcggagaaactgcttgttcatacgcagctctcatccttcatgaagatggaatcagtgtaactgccgacaagatcagcaccttgttggaaactgcaaaggttcaagtagatacctattggccaaccttatttgctaaacttgctgagaagaaaaatcttggcgatttgatagccaatgcagcaggcggtggtgcaccagttgctgttgcagctgcccctgttgctgcctcaggtggtggtggtgctgctgctgccgcccaactgctgaagagaaaaag

SEQ ID NO: 12889 - DNA, 378 bp, Glycine max
  Clone ID: LIB3040-053-Q1-E1-G11
ggctgtgagtgagacaccgatagatagagagcgcggcataacctaaacctatctttcttctctctctgtgtgtgcgcttcaacggcaaccagaagcagccatggccactgcaaggactgtgaaggatgtttcacctcatgagttcgttaaggcgtactcctctcacctcaagcgatccggcaagatggagctgccagagtggactgatattgtgaaaactgcaagatttaaggagttggctccttatgatcctgactggtactatgtcagagctgcttccatggcaagaaagatctacttgagaggaggacttggtgttggtgcctttcagaggatttatggtgggagcaagaagaatggtaatccccctcctcaatt

SEQ ID NO: 12890 - DNA, 380 bp, Glycine max
  unsure (1)..(380): unsure at all n locations
  Clone ID: LIB3040-053-Q1-E1-G12
gactcaccacttcaaaacactcataacacaaagcacaaagcaaagctcatccttgagttaaaaaatggcagcagcttcttccatggctctctcatccccatccttggctggcaaggccgtgaagctgggcccatcagccccagaagtgggaagggtgagcatgaggaagaccgtcaccaagcaggtctcctcaggaagcccatggtacggcccagaccgagtcaagtacttgggcccattctctggcgagcccccgtcctacctaaccggtgagttcccaggcgactacggctgggacactgctgggctttccgcnagaccagaaaccttcgccaagaaccgtgaactcgaagtgattcactcaaggtgggccatgctcg

SEQ ID NO: 12891 - DNA, 340 bp, Glycine max
  Clone ID: LIB3040-053-Q1-E1-G2
gaaatccaagctcgggaacagagaaggagaaagagaatggacgccattgattctgtgttcgatccgttgagagaattcgcaaaggacagcgtgaggctcgtgaagcgctgccacaaacccgatcgcaaagaattctccaaggttgccgtgcgtaccgcaattggtttcgttgtgatgggattcgtgggtttcttcgtgaagcttattttcattccaattaacaacatcattgtcggatctggttaggatgaagggtactacaatcgcctcaggaattcaggttgtcaagcaaaagtaggcagaaagagttcccacatcaatagatcattttatgccctca

SEQ ID NO: 12892 - DNA, 313 bp, Glycine max
  unsure (1)..(313): unsure at all n locations
  Clone ID: LIB3040-053-Q1-E1-G4
aggggacaacaaaaggggaagcacaatgttgaacctgttggagagatttacttgccagaaccttactttagaaccaaaaggactacttattggaccagatcagttggaagaacttgtacctagcttcgcaactggcttatctgagtgtggagaagcattatcaagccttangagtatgagaacgagtaccgtttgtgatgaatgtctatggtttaagaaatctgtctttagtcaacttgtgtgtcctgttaatcacttctcagcaataaactgctctgggaaactagtttcatgttcaatgcaacgataggaa

SEQ ID NO: 12893 - DNA, 321 bp, Glycine max
  Clone ID: LIB3040-053-Q1-E1-G5
gccaccctaacatttgatccccgaactaccaattcagacataagcaagcaaaagaagcacactcttgaccctgcttctccagattttcttcctcttccttcacttgaacagtgctttccaaagagcaccaaagaacacagggaagtcactcatgaagaaactggtcatgtgctcaaagttccctttcgtcgagttcaactgtctggggaagcaggacactttgatacctatgacactagcggtccccacaatgtaaacccaatgacaggactccgaaaattgcgctgacggtgggttgataggagggataaactgggttat

SEQ ID NO: 12894 - DNA, 341 bp, Glycine max
  Clone ID: LIB3040-053-Q1-E1-G6
gggtcacaaagagatgtattgtagaactgagcaatggtttctctttctcattcgcagtctgcttcttcaatttcacgcgtttcagtcaagcatgatcatgggcagaaaattcttcgtcggtggcaattggaattgcaatgggaccactgatgaggtgaagaagattgttaatactttagatgaagctaaagtcgctgaagaagatgttgtacatgttgttgtgagccctccttttgtgtaccttccttttgtaaatagtttgctgcatcctgatttccatgtcacggcccaaaattgttgggttcgcaaatgtggcacttacactggagacgttattgctg

SEQ ID NO: 12895 - DNA, 354 bp, Glycine max
  Clone ID: LIB3040-053-Q1-E1-G7
agtccaggcgtcagacggctgcgaaaggacgataaaaagggatatttctaactccgagcacttccatatcttatcttctccgcctccagctttgaggttctcacggaaacttctgaagattgctggcatagcattcggaagcttcagggattctttcagtttggcctccatcaaggcctacattgctgagttcatctcaacccttctctttgtttgttgctggtgtaggttcagccatagcctatgctaagttgatatcagatgcagctcttgatccaactgggttggtagcagttgccatttgccatggttttgctcacttcgatgctggttctgttggagccaacatttctg

SEQ ID NO: 12896 - DNA, 338 bp, Glycine max
  Clone ID: LIB3040-053-Q1-E1-G8
tccgtttttacgttatttcgcactgtattgtacaattcctttatttgtgggatttatttctcacacgataattcattaaattatagaatggatttttacctatgcctagatctcggataaatgaaaattttattgataaaaccttttcaattgtagccaatatcttattacgaataattccgacaacttcgggagaaaaaagggcattcacttattacagagatggtgcgatttgattctatttttttaccgaaatcggtaaaaagtggaaaaaacccacgcttgctgaaggtgaaatttgtaaatataaaggattaattccttctgtcgtgtatcct

SEQ ID NO: 12897 - DNA, 322 bp, Glycine max
  Clone ID: LIB3040-053-Q1-E1-H1
ggaagtaagggatcgagcctcggaggagggaatcgcagcgaagtccactatgccgaagcaaattcacgagattaaggacttcctcctcactgctaggaggaaggatgcacgctctgtgaaaatcaagcggagcaaggatgtggtgaagttcaaggtccgttgctccaagtacctttacaccctctgtgtgtttgattctgagaaggctgataagttgaagcaatcacttcctccaggtttaagcgtgcaggatgtgtgattcttactgctgtatgaagatcaggtttttctctggattttggggattcatagttagtaaaat

SEQ ID NO: 12898 - DNA, 368 bp, Glycine max
  Clone ID: LIB3040-053-Q1-E1-H11
gacaaccctaagaccctacgtcatggcaagcgatctattgagccttccctactgcttgtctaccacacaaattccacctagatcacatattagacatagaataagtactctttccaatgacaaatttctcaatagatctttgcaacaactcaactgtgccgagagcaaacaagatatccagttaactcaaaatggaaataggtgttcatctaactgagctaagcacgcgcccaatctttggacccatgaaattgtccagtccctggaaaatcatctagcggtaataacttcatatttcatttttcttttagtttagtgtagaacttgtgcagcaaggccaataacctaggcagatatatgatgtgaaa

SEQ ID NO: 12899 - DNA, 334 bp, Glycine max
  Clone ID: LIB3040-053-Q1-E1-H12
gacttcacaactcaaactgcttcattgcataattgcagataagatcaacccttctaccttcagattcgcgggaagatggcatcacttcatgctaatgtgacatcagttgtttacaacagtggcaaccgtgtttctcaatcgaaatttgcaagctcttccttcttgtctgggttcgatgttgttggtcgtgcttcaagtgcttggaagaaggaacttgtcccatcttccatttccttggtgcctagagccaccctaacatttgatcccccaactaccaattcagacataaccaagcaaaagaagcacactcttgaacctgcttctccagattttc

SEQ ID NO: 12900 - DNA, 303 bp, Glycine max
  Clone ID: LIB3040-053-Q1-E1-H2
gaaggttttgcgctgttgttgctgctcatcctccgtaacctccgagctctgcaccgaagaacgaagccatggggaagacacatggaatgggatctgctcgcaagctcaagtcccaccgcaggaggcaaaggtgggctgacaagtcatacaagaaatcacatcttggaaatgaatgggagaaaccttttgctggttcatcccatgccaagggaattgtccttgaaaagataggtattgaggctaagcagcccaactctgccattcgtaagtgtgccaaggttcaacttatcaagaatgggaaga

SEQ ID NO: 12901 - DNA, 66 bp, Glycine max
  Clone ID: LIB3040-053-Q1-E1-H6
gctcgccaccttttcttgttccattttgcttcaccgaattcaacccacttcggaggccaaattcaa

SEQ ID NO: 12902 - DNA, 342 bp, Glycine max
  Clone ID: LIB3040-053-Q1-E1-H7
ggctgacaagccaatcctttgtgtaggtgctcaaccctagtaagccgcaatggtgaagtactcaagggagcctgacaatccaactaagtcttgcaaggctagaggcgccgaccttagggttcattttaagaacacaagggaaactgcctttgcaatcaggaagttgcccttggtcaaggctaaaaggtacttggaagatgttcttgcccacaagcaggcaattccattcagacgtttttgtcgaggtgttggaaggacagcccaggctaagaatagacactctaatggccaaggacggtggcctgtcaagtcagcaaaattcattcttgatttgctcaaaaa

SEQ ID NO: 12903 - DNA, 105 bp, Glycine max
  Clone ID: LIB3040-053-Q1-E1-H8
cgggaccacttcaaaacactcataacacaaagcacaaagcaaagctcatccttgagttaaaaaatggcagcagcttcttccaagggtctctcatccccaaccttg

SEQ ID NO: 12904 - DNA, 337 bp, Glycine max
  Clone ID: LIB3040-053-Q1-E1-H9
gacacactgactcactgttctaattcatttctgaaatagaattccgttattctctctctctctctcttgtttcatcgatgggtggcacagttgttgctgaagtacccacaaagaggggaaggggcagaagggccctgaaggagaaaaccccatcaacgaacgatgctaacatcatcatagccacaccaatttcgccatcatccgaaaaggcggcacaagttgttccctcaaagaaaaaacaagattcaaagaagcagcaatctttcgaaaaagaattgctggagatgcaggaaatgctgcagcagatgcgcctcgagaaggagaagaccgaagagct

SEQ ID NO: 12905 - DNA, 266 bp, Glycine max
  Clone ID: LIB3040-054-Q1-E1-A1
actggcaaacaattttgaatatgtcatgtatgggaagctctacaggataacagagggttcacggcgtgaaaaagcggagatgaatatttcatttggtgggcttctgatgatgctcaagggacatacctctcattgcaacaagtttgaactggatcagacgttgtatcttctgataaggaaagtctgaaaattgtatgtaaaaaataaatatgaagatgtgaagccttgttgcagcaaaaagacagcagctatttccatcttcatgt

SEQ ID NO: 12906 - DNA, 357 bp, Glycine max
  Clone ID: LIB3040-054-Q1-E1-A10
ggggatctatcacaatagaaagcaaagctatataggattatttcccatatcaagaaaatgaaaatccctttttattttcccatcctcgtgcttgttgtcttcattgcttctggaaaacaagtgcaaatgacagtggtaccaaattgtgtggtagaaagcttgtcagttcattgtgaaatattcaagaatccttgcgaacttctttgccaacaacattttggatcacccgcagcacatggagcttgtggcattaagttccatgtatgtgtttgttatttatgttaaatataaagtttaaccataacaatcacagctttcatacctatttaatagtatgtaagccgattaaaaaaaata

SEQ ID NO: 12907 - DNA, 381 bp, Glycine max
  Clone ID: LIB3040-054-Q1-E1-A11
ggacgaagagaaaagacagtgaattgcggtttcaattcaacccacttcatctcaggtgtttgaagttgagataaaatgagtggaacagagaaagcaggatcaggaaccacgaaaacccctgccgattttctcaaatccattcgtgggaggccggttgttgtcaagctcaattctggtgttgattacagaggtatacttgcttgtctagatggctatatgaatattgcaatggagcagacagaggaatacgtcaatggacaattgaagaacaagtatggtgacgccttcatccgaaggaataatgttccaaacattagtacctccaagaggacccctaccaaagggggcttaaaaagtaaaggaatccgaatttttgggttt

SEQ ID NO: 12908 - DNA, 347 bp, Glycine max
  Clone ID: LIB3040-054-Q1-E1-A12
gacaacacaacgcaacacaacgcgcactctctcttttctctcttaacacaaaaaccctatcgttcttcgcggtttcgccgattctcgccatgccgaaagccaaatccgacgccaaagccgccgatagccggttgaagcgcaagggcgctggtgctggaaggaagcaatcgaagaaagctgctaaggatcctaacaagccaaagagacctccaagcgctttcttcgttttcatgtccgagttcagagagcagtttaagaaggagcatcctaacaacaaatccgtcgctgttgtcggtaaagctggtggtgacaaatggaaatcgctgtctgatgctgaaaaaggcccc

SEQ ID NO: 12909 - DNA, 288 bp, Glycine max
  Clone ID: LIB3040-054-Q1-E1-A4
gatagagaaagaagagggggacacagcgtcctagatttccgcgtcgctgcttcggaagaaagagaagacaaacaaaacaatggcgttcgcttctttcctcgggagagtcctcgtcgcttctgtctgcaggctctcggcttaccaagaatttaatgaatatggagttgatgggggacctgctacaggagcaggcagaccgaagtttgatgcctttagacatcgggtgcattctcaagtgggcgttcaaattccagagattaatctgaaatttttaattgctggggctat

SEQ ID NO: 12910 - DNA, 281 bp, Glycine max
  Clone ID: LIB3040-054-Q1-E1-A5
cggggcgtacacagcctcaacaaccctaacgcgtgcagagcagacagagacgcaggcatggggcgaagacccgcgaggtgttataggcaaattaagaacaaaccatgccccaagtcacggttttgccggtgtgtgccggatcccaagatcaggatttacgatgttcggatgaagaagaagggtgttgatgagtttcctttctgtgtccatctggttagttgggagaaggaaaacgtttcgagtgaggcccgggaagctgctcgtattgcttgcaacaagta

SEQ ID NO: 12911 - DNA, 158 bp, Glycine max
  Clone ID: LIB3040-054-Q1-E1-A6
gatcgctctcacacctgtgattattcctcttttaacaatccacacccagattcgaaggttccgaaatggacgctggcggaaagatcaagaagggcgccggacgtagaaagggcggcggcccagagaagaagccggtttcaaggtccgtcaaagccggt

SEQ ID NO: 12912 - DNA, 337 bp, Glycine max
  Clone ID: LIB3040-054-Q1-E1-A9
gaaacagagagtgatttcagtgagtgatcggtgttcacttgatctcatcataatcgtcagcgtcaattgaagaagatgccgatcagaaacatcgccgtcggaaggcctgaagaggcgactcaccccgacacgttgaaggcggctttggctgagttcatctcaaccttcatcttcgtgttcgccggctcaggctccggcatcgcctacaacaagctcaccgacaacggcgctgccacccctgccggcctcatctccgcctccatcgcccatgcattcgccctcttcgtcgccgtctccgtcggcgccaacatctccggcggccacgtcaaccccgccg

SEQ ID NO: 12913 - DNA, 317 bp, Glycine max
  Clone ID: LIB3040-054-Q1-E1-B1
ggcggttctgcctgcaaattttcttcccctcaatcgtatattgctcaggtggtgttcctgttcccccccaagcacccctgagattcgttcgcaaaaagcttaataagaacaaaaaatagaaataatagtcttcgttagtaggtcatttcaatttcgttttcgttttcgttttctgttttgatttgatcttccaatggcgtccgatggctttaccgacaagaacaccgtgttcagaaagctcaaggcgaagtctgaaaataagatgtgtttcgattgcaatgcgaagaaccctacctgggcgtccgttacgtatggga

SEQ ID NO: 12914 - DNA, 319 bp, Glycine max
  Clone ID: LIB3040-054-Q1-E1-B10
gatccataaccatggcgtctaactctgcttccgctctttacttccttttatgcctatcgcccatcactttgcttctttctgcgtttcgtgctcaagctcaatctcatgctccagctcccactttcaagtactgtgaaaagaatgcagactatgctgtgaaggtgagtggagtggaaatattgcctgaccccgtggagagaggagtgccattcacctttaagatcccagcttatactcctgaaccaattcaaagcggggacttgttatatgaaatttcttatgctggaatagaagcacaacctgctacatttctccatga

SEQ ID NO: 12915 - DNA, 85 bp, Glycine max
  Clone ID: LIB3040-054-Q1-E1-B11
aggagctttaacttgttcatacatgagatggctgcgataggaccacatgacgggatccatattcatggcgtcgaacgctgcttcc

SEQ ID NO: 12916 - DNA, 361 bp, Glycine max
  Clone ID: LIB3040-054-Q1-E1-B12
gattcctcaagaactagggtttgcagtcactgctctgtttcaccgagtttgggcgtttagatcagaaccaaatcgtgttctcttccattggcaaacatggcaactcaaatgagcaagaagagaaagtttgttgcggacggagtgttctttgccgaactgaacgaggttctgacacgtgaattggcggaggacggttactccggcgtcgaagttagggttacgccgatgcgcaccgagatcatcatcagagccaccagaacccaagccgttctaggtgagaagggaaggagaattagggaacttacctcagtggtgcagaagaggttcaaattccccgaaaacagcgtcgagctttatgctg

SEQ ID NO: 12917 - DNA, 147 bp, Glycine max
  Clone ID: LIB3040-054-Q1-E1-B2
caatggcgtctctggcaagcttagctgttgttcaaccatctactgtcaagggccttgctggaactaagctctctttcaagccctctcgccagagcttcagacccaagaatttcaggagtggtgccgttggtacaaagtagcgtgaca

SEQ ID NO: 12918 - DNA, 336 bp, Glycine max
  Clone ID: LIB3040-054-Q1-E1-B3
gagtagcagcagcagctttactccatagtgagatatggtttcttccaaccgttttgctgctctacctctctgttctcttctcctagctctgcttctatgtgcagttggggctagctcttcttcttcgtcttccacaggtgccaccagaattggccaaggctaccgtcttgtctccattgaagagacccctgacggtggtcttatagggatccttcaagttaagcagaaaaccaaaacctatggccctgacattccccttcttaggttctatgtcaagcatgagacagataatccgtttagggttaacataaccgatgcacaaaagcaaaggtggga

SEQ ID NO: 12919 - DNA, 287 bp, Glycine max
  unsure (1)..(287): unsure at all n locations
  Clone ID: LIB3040-054-Q1-E1-B5
gggttttccacattcatattttccttgcgtttccctttcattttccctcacgttctcgctcgccaaacgcgcctctctctcctccaatggccgaccagctcaccgacgaccagatcgccgagttgaacganggcttcagcctcttcgacaaggacggcgatggttgtattactacgaaggaacttgggactgtgatgcggtcactaggggcagaacccaactgaggcagaactgcaggatatgagtaatgaggttgatgctgatggcaatggaaccatcgacttccc

SEQ ID NO: 12920 - DNA, 213 bp, Glycine max
  unsure (1)..(213): unsure at all n locations
  Clone ID: LIB3040-054-Q1-E1-B6
cgggggtctgagagaaaccctagctagccacaatgcagagattcgtgaaaaccctaacggggaagacgatgaccctagaggtagagtcagcggacacagtcgacaatggtgaaggggaanatcgaggacaacgacggcatcccgccggaccaggagcgcctgatcggcgccggtaagcagctggacgagggccgcacgctcggggacgacaac

SEQ ID NO: 12921 - DNA, 319 bp, Glycine max
  Clone ID: LIB3040-054-Q1-E1-B7
gatccaacaaccgttcacaaatctttttctaagtgtagtagaagagaggaaccgcgccaaccctctcttcttcttcttcttcaatccttttacaacatttatagtttcattcttaatcgttgggaaaaatgttcatcgagaattttaaggtagagagtcctaatgtgaagtacaccgggactgacattcagtccgtgtacaactacgaaaccaccgaacttgttcacgagaacaggaatggcacctatcagtggattgtcaaacccaaatccgtcaactaccaatttaaaaccaagcaccatgttccaaaattgggggt

SEQ ID NO: 12922 - DNA, 316 bp, Glycine max
  Clone ID: LIB3040-054-Q1-E1-B8
ggctgccgctctctgagaaaaacagatagtgtgggagagagaagaacggaagagaaaatgacgaccaggttcaagaagaacaggaacaagagaggtcacgtcagcgccggacacggccgtatcggaaagcaccgcaagcatcccggaggtcgcggtaacgccggtggcatgcatcaccaccgtatcctcttcgacaagtaccatcctgggtttcttcgggaaggtaggcatgcgctacttccacaaacttcgcaacaaattctacaatccgatcatcaacatcgacaagctgtggtccctcctccccaggaggcca

SEQ ID NO: 12923 - DNA, 246 bp, Glycine max
  Clone ID: LIB3040-054-Q1-E1-B9
gtgggggaagggggaagaagaaaacccagaatcaaatcaaaaggtaaaaaagtagaagtatacgcagaagaggtggttcaagttcaatggctgagaagaaggaaatgattcccaaacaatatgacatcgatgccaaatgggacgcctgcattgatctcaccgtccgtcgcttcgtctactccgcatctgccggtgcatttggcggtctcctattttttaggagtcctgttactcgatgggcatcta

SEQ ID NO: 12924 - DNA, 337 bp, Glycine max
  Clone ID: LIB3040-054-Q1-E1-C10
gattcactcactcacttcagtgtcattttttcttattctcttcctctctctctactctgagacacaaaggaaaattataagaaattatggctggttattcaaaagcttcagctctttggatcctttttcttctctttggcttctctgtagctaaggaaattttggttggaggtaagactgatgcatggaaggtttcagcctctgaatcagattcactcaaccaatgggcagaaaagtctcgtttccaagttggagactatcttgtttggaaatatgatggtggaaaagactcagtgttgcaagtgagcaaagagaactatgtgaattgcagaatctc

SEQ ID NO: 12925 - DNA, 358 bp, Glycine max
  Clone ID: LIB3040-054-Q1-E1-C12
ggtttcactcggatcgcgcattcacaaataaggttgaagaggtcactgccggaagaagggagcaacaccatctttcattttccggcgatctcttgtttcttccatcatcaccgttttccggcgatccctaatcctcgcaaacagaaatgacgacatcaaggcgccttgcggacaggaaggtggagaagtttgagaagaacatcacaaaaagaggatttgtgccagacactaccactaagaagggaaaagactaccctgttggcccagtgctgctcggtttctccgtctttgttgtcattggatcatctctcttccagataatcaggacagcaaccagtggaggcatggcttaaatgga

SEQ ID NO: 12926 - DNA, 97 bp, Glycine max
  Clone ID: LIB3040-054-Q1-E1-C5
gcacgacagttggtggtagctgattgcatctgcatcggtttggtgttcagcagagcaggaaccgcaaacctttgtgtcgagaatcttagccatgggt

SEQ ID NO: 12927 - DNA, 300 bp, Glycine max
  Clone ID: LIB3040-054-Q1-E1-C7
ggatccttcgacactaactagagccgagcagcgagagagagaagccctagcagaaatgccggctggtcacggtttgagatcccgcaccagagattccttcgctcgtcgcttcaggaagaagggtagcatcggcggcagcacatacctcaggaacctaccacgtcggcgagtatgtcggcatcagcgttaacggcgccgtccacaagggaatgcgtcacaagttctagcatggccgcaccggtcgcgtctggaatgtcaccaaacgtgctgttggggtcgaagtcaacaagcgaggcggca

SEQ ID NO: 12928 - DNA, 259 bp, Glycine max
  Clone ID: LIB3040-054-Q1-E1-C8
ggagctggtttttttgtcgcgtttgtttataacgttggtgttccttgactcgtgtactagtactagtactacccccaacacagcacgcagcagaccacgcgccgaggcgaagtccaggtccgggtcaaggcctacgacagcaatccagggagaccttcttcggctcaattctccgatcccatccgcaatggaagaaggcggattcctctctgccgctctccagcaagaaggagaacgtgactcccattacctctaaaat

SEQ ID NO: 12929 - DNA, 365 bp, Glycine max
  Clone ID: LIB3040-054-Q1-E1-C9
acacagaccaatattcattcatttagattcatcaaaagcttataacaacaattaaacatgagtgcagccagcagagcttggattgtggcatcaagcattggagcagtggaggcattgaaggatcaattgggggtgtgcaggtggaaccatgcattgaggtcactgcagcagcatgccaagagcaacattagatcctacactcaggccaaaaccttgtcttctgctacttctgctgctgtctccaataaggtcaagaggaccaaggaggagtccatgaggaaagtcatggacttgagctgttggggtcccaatacttcaaggttttagtgtgtggaccattccaaatgcattcatcattgtgctgc

SEQ ID NO: 12930 - DNA, 168 bp, Glycine max
  Clone ID: LIB3040-054-Q1-E1-D12
agaaggggattgcaccccaaaaccaaaaccaaaaccacattgtcattaagccataccgttaaaacttaaaagggtgtgttttgagtttcacaatttgctcccttcttttcatccttttaccactctttcatcataaattggagtcgcctatagtttcttatatactac

SEQ ID NO: 12931 - DNA, 242 bp, Glycine max
  Clone ID: LIB3040-054-Q1-E1-D2
cggataagctttgctaaacatagtaatatcgacctttcgtcgtaaaaagccattttcagttgatgatgaacttaattttccataacagtctcagtgacagtccttcaaaccatacaaggctttattaactttgagaacatgatgagggtatatacaactctcaaacgcagggatttgtccgacatagacctcttccttgattagtcgattgaggaaagccttttttacctccagttgagaca

SEQ ID NO: 12932 - DNA, 266 bp, Glycine max
  Clone ID: LIB3040-054-Q1-E1-D8
tgggcaccgcttgagcagacttaacaacagcacagagcgggttactgtctgttcaggctaccatctctctctctctttcttagtgcctccttgccagaagttcgaatgggtgatgaaacttgcctatgcacatctgagtcggtgaacgatggggggtctgacaagctctgtgaccagatctcggagtcggtgctcgatgcatgcttggagcacgaccctgacagcaacgttgcctgtgaaacctgcaccaataccaacatggtgat

SEQ ID NO: 12933 - DNA, 303 bp, Glycine max
  Clone ID: LIB3040-054-Q1-E1-D9
ggcagtggagagagagtgttagcaccaaaaatgtcgaagttaatcttcgtgttccttgcactaattcctcttctctgcacctccttctcgccagagaaaccctcagattggggcaacctccttttggcccaagaattccgcaacaaatcctctcaatccctcctcctcaaatccctcaaatcccgccggttcgaattccaattccaacttcgcgaagaacccaaaattgccctccaaaaatacgggcaattcctccatgaagccctaattccccttttccccaacattgaaccttttggagga

SEQ ID NO: 12934 - DNA, 291 bp, Glycine max
  Clone ID: LIB3040-054-Q1-E1-E1
ggaacgtctcacgttcagttctagacatcgcgagctctggtcgtgccgtcgtgtgcgagggggtttcgggtgcgaagccctggacctccgctctctcgttcttctcgctcgcgtgtccatcgcttccgcgagggtcggcggcggagaacgtttcgataacgggtgggaaaatcgatgggttggatcagattggcaggaagataggagctgctggggagtggaaccacacctctggtcaatggaatggggacgctggtgacaaaggtattcaaaccagtgaggattacagat

SEQ ID NO: 12935 - DNA, 287 bp, Glycine max
  Clone ID: LIB3040-054-Q1-E1-E10
gagggtttggttattagggttttcgctcaccggtgtgcagtcgagcccccgaagaaaaagcgaaaatgccgtcgcacaagacattcagaatcaagaagaagttggcgaagaagatgaggcagaacaggcctatcccctactggatccgcatgaggaccgacaacaccatcaggtataacgcgaagcgccgtcactggcgtcgcaccaagcttggattctgaggtgcttgctttgcctcggttccgtttatccaattaattagtgtcttagtttcttgagccaaaaac

SEQ ID NO: 12936 - DNA, 350 bp, Glycine max
  Clone ID: LIB3040-054-Q1-E1-E12
gacatttttcttttcttttctttttctctgaaagatctgtgactattattattattattattatttctgatttttgtgggaaaatggctgactgggcaccggtgttgatcggggtggtgctgttcgtgctgctccaaccggggctgcttttttcctttccgggaaacgggaagcagctagagtttgggagcatgaagaccaacggcaaggccattttcatccacactctcatcttcttcgccctctactccatcctcatcctcgccgttaaagtccacatctacaccggctgaaccggttcccgggcgggatctcacgtatcaattggttttgttactgagaaattaaag

SEQ ID NO: 12937 - DNA, 123 bp, Glycine max
  Clone ID: LIB3040-054-Q1-E1-E5
cggggaaacacagagtgatttcactgagtgatcggtgttcacttgatcgcatgcagaagcgtcagcgtcaagtgaagaagatgccgatcagaaacatcgccgtcggaaggcctgaagaggcga

SEQ ID NO: 12938 - DNA, 72 bp, Glycine max
  Clone ID: LIB3040-054-Q1-E1-E7
gaccaaacaataagcaagaatttccattgcatgcaaagcaaatacgcattatattactaattttaatttgtt

SEQ ID NO: 12939 - DNA, 74 bp, Glycine max
  Clone ID: LIB3040-054-Q1-E1-E8
aaagctgccagagttcagaatcacagacgactaaatatccataccaaacggcaagtaacatcttcactgattgt

SEQ ID NO: 12940 - DNA, 336 bp, Glycine max
  Clone ID: LIB3040-054-Q1-E1-E9
ggttccatttctcaacaacttctgctacttcctactccaaccgcacttctgctccgcaattatcatgggcaaggtcaagatcggaatcaacggatctggaagaattggccgtttggtagccagagtggctctgcagagagacgatgttgaactcgttgccgttaacgaccctttcatcaccaccgattacatgacatacatgtttaaatacgacagtgttcatggacactggaagcatcacgatgtcaccgttaaggacgagaagacccttctcttcggtgacaagccagtcactatttttggacacagaaaccctgaagagatcccatgggggtc

SEQ ID NO: 12941 - DNA, 79 bp, Glycine max; identical to SEQ ID NO: 12323
  Clone ID: LIB3040-054-Q1-E1-F10

SEQ ID NO: 12942 - DNA, 80 bp, Glycine max
  Clone ID: LIB3040-054-Q1-E1-F11
gccggtttcccgaacgatttgatggtttggaatgcatttcccaagcaacgagtcttcggttcgaaaccagcagagagagg

SEQ ID NO: 12943 - DNA, 296 bp, Glycine max
  Clone ID: LIB3040-054-Q1-E1-F12
gacttctcttcacacctttgttcactcttcttctcttgcggctatggttttagcgcaacttcttctatatttaaggaacatcggtaaggaaaaggttcacagcagtattgttgtcattggccatgtccactctgggaaatccagtaccactggtcacctgatttacaagcttggaggcattgacatgcgtgttattgagacgtttgagaacgaagctgctgagatgaacacgatgtcattcaagtatgcctgggtgctggacaaacttaaggctgagcgtgaaagaggaatcacca

SEQ ID NO: 12944 - DNA, 264 bp, Glycine max
  Clone ID: LIB3040-054-Q1-E1-F8
ggtgtgtagtagaggattctctgtctggatgccttttgtgagttcagtcattcttaatctttgtgaaggagaatgttcatcgagaattttaagggtgacgtgcggagggggaagtacgccgagactgagattcagtgcgtatacggcgaggagaccaccgaacttgtgcacgagaacaggaatggcacctatcagtggattgtcaaacccaaatctgtcagggaggaatttaaaaccaacatccatgttcctaaattaggggta

SEQ ID NO: 12945 - DNA, 296 bp, Glycine max
  Clone ID: LIB3040-054-Q1-E1-F9
aggggttagaagaaaggttctaacggaaccaaaggcaacaaaggtgcccaaaagaagaagttaatccttccggctggttcaacaagggaagttggttacaataaatgttgggttcctttccgtactcctgtgtcctcctttctaagtaacttgtttttcggacaaaatttgaaatctccaacatcatctctcaactgttgttcccaaaactgggttcttgatataacgtggcaaacatgcttttaattatctgtgttttaaaatgttttgtttgtccgaacccctgattacaattt

SEQ ID NO: 12946 - DNA, 273 bp, Glycine max
  unsure (1)..(273): unsure at all n locations
  Clone ID: LIB3040-054-Q1-E1-G1
ggcgtacacagcctcaacaaccctaacgcgtgcagagcagagagagacgcagccatggggcgaagacccgcgaggtgttatangcaaattaagaacaaaccataccccaagtcacggttttgccgtggtgttcctgatcccaagatcaggatttacgatgttggtatgaagaagaagggtgttgatgagtttcctttctgtgtccatctggttagttgggagaaggaaaacgtttctaatgaggcccctgaagctgctcgtattgcttgcaac

SEQ ID NO: 12947 - DNA, 360 bp, Glycine max
  Clone ID: LIB3040-054-Q1-E1-G10
gaacgcagccaagaaaagaaaatcctcacccattttcttcgtagccaaacactctgaaattctcagttatgtcgtggcaagcgtatgtggatgatcacctactgtgtgaaatcgaaggtaaccacctcactcacgccgctatcatcggccaagacggaagcgtttgggctcagagcaccaacttccctcagttcaaacctgaggaaataactgccatcaataatgactttaatgagcctggatcacttgctccaactggattgtatatcggtggcaccaaatacatggtcatccaaggtgagcctggtgctgtcattcgagggaaaaagggtcctggtggtgttactgtgaagaagaccg

SEQ ID NO: 12948 - DNA, 308 bp, Glycine max
  Clone ID: LIB3040-054-Q1-E1-G11
ggagtgagtgagggcattgttgtttaggtacagaaaaatggcatcatctcagtcgaagaagagagttgacgctgtcgattctcgcgctgcttccgttctccttcgcgccaaagatggaagtgcttttgctcgatgcgacgactgcaagaagaatgtgccggttgcactcatcgacatgcacagttgcagccttgaagctaaaattaaaatgaacctagatgctcaagttgtggaacaggctgctgaagctaagaagccagagaggaagaagcccaaatccaaagagcctatggcaaaaaaggctaaag

SEQ ID NO: 12949 - DNA, 335 bp, Glycine max
  Clone ID: LIB3040-054-Q1-E1-G12
ggtgagttgagtcagtgatgataatgatgaagatgaagtgttccatgtggatgtgggttgtccatgtggccaatgctggtgccctttaagtcctaaaatccatccgcaggactgcatattgatggctctatgaatccaaattgggtgtgaaccagtactctttgccaccaggtgacatgggatggcccttcattggcaacatgtgagtcctttcacagtgctttcaaatccagggaacctgattccgtcatctcctcctttgtctccatattttgaagaactggaatgtatactaccatcatgttatggaatccaagtatcattgtgagaacacc

SEQ ID NO: 12950 - DNA, 69 bp, Glycine max
  Clone ID: LIB3040-054-Q1-E1-G7
ggtgctcggtttttgatcgagtttttctccgtttagcgcagagcgaatttcgaaatcccgtggagaacg

SEQ ID NO: 12951 - DNA, 339 bp, Glycine max
  Clone ID: LIB3040-054-Q1-E1-G9
ggtgctctgctcgtgcctctagggttatcatttctccatttccattttctctctcacttttcaagaatcgtaagctatgggaaagtcttacccaactgtgagtgctgattaccagaaggccgttgagaaggcgaagaagaagctcagaggcttcatcgctgagaagagatgcgctcctctaatgctccgtttggcatggcactctgctggaacctttgacaagggcacgaagaccggtgaacccttcggaaccatcaagcaccctgccgaactggctcacagcgccaacaacggtcttgacatcgctgttaagcttttggagccactcaaaggggagtt

SEQ ID NO: 12952 - DNA, 268 bp, Glycine max
  unsure (1)..(268): unsure at all n locations
  Clone ID: LIB3040-054-Q1-E1-H10
gagtacagaaaacgcagttctcaccatttccctctcgattgtgagacttgttgttgttaactgaacttttctgagcaagaatgtctgggcgtggaaagggaggcaagggtttgggaaagggaggagcgaaacgacaccgtaaggtgctgcgcgataacattcagggaatcaccaagcccgcgattcggcgtttggctcgtangggtggcgtgaagcgtatcagtggtctcatctaccacgagacacgttgcgtgctcaagatcttttt

SEQ ID NO: 12953 - DNA, 334 bp, Glycine max
  unsure (1)..(334): unsure at all n locations
  Clone ID: LIB3040-054-Q1-E1-H12
gaacatgccgaaaagtagtaccaagatggcttcagttgtgtatctcctctttggcttccatctcattgttatcatgtcaagttccttacccgcaactagtgaagtgtttgcaaaacagtatccatccacagaacccgtggaagaaaaactcacccaactccacttctatttccataacaacataacgggggaacacccaactgctatgaaaactgttttgcctcctaaggggtccattcatggttttggggctactttcatgnatggatgacctctaactgaaggaccaagtccaacttcaaagcttgtgggaagattcaaggaatatacgctt

SEQ ID NO: 12954 - DNA, 330 bp, Glycine max
  Clone ID: LIB3040-054-Q1-E1-H3
ggaaggaagggagggaagaatagaatgggatctggaagtggaaaacacactggagggttcttcaggagaacggatgcatggaggaagcatccgatgctcaccaatcagctccgccaggccacccctggccttggcatcgccgtcgtcgccttcggtatctacctcgtcggcgaacaagtctacaataggctctatgctcccgagtctcattcgatttctcacgtgaaagccggggatcaccagtaaacgtttggacggacgcactccattccatcatcacttagtaagcttgctagcatgttctcgcagcctttaatgtttaaatttcag

SEQ ID NO: 12955 - DNA, 354 bp, Glycine max
  Clone ID: LIB3040-054-Q1-E1-H6
ggccattgttgttgctattatcatccgcagctgcttttattcgcaccgcaaacagtgagccatggccgtcggaaagaacaagcgcatctccaaggggaagaagggtggcaagaagaacgcagctgatccctttgccaagaaggattggtatgacattaacgctccttctgtttttcaagtgaaaaatgttggcaaaaccctcgtctctcgtactcagggtaccaagattgcttctgaaggactcaagcatagagtgtttgaggtctccttggctgatcttcaaggggatgaggatcatgcattcaagaaaattacgttgagagctgaagatgtccaagggaaaaatgttctgac

SEQ ID NO: 12956 - DNA, 274 bp, Glycine max
  Clone ID: LIB3040-054-Q1-E1-H7
tgggacgaacgagcaaaacgatgctctgggattccttcatttcccgtgtgattcaccaccgatctgatagtcgtagtgcgttgtgtgtttgggaagtgggatggagtgtgtgtgaagagtctcatgagattttcgtcagcgaggaacacgagcagcagaggtttctgtctcgtgagctcgcggatcgggagccacactgcgaactggatgcaagatacaggcaggagatctccgatcgagctgattaatgaagttcctccaattgacgttgaaa

SEQ ID NO: 12957 - DNA, 310 bp, Glycine max
  Clone ID: LIB3040-054-Q1-E1-H9
ggttgcgctcacatcgtgttctctgcggcgcgagctagctagggtttagaacctcgcagttacagaaaacatggcgactgtggtgccaacctccgaagaagacgctgcactctccgtcgttcgattcgcctctgaacttgcctgggccgatgccggtcccgaggttgctgagccccaagttagcagactctgcgtggaggctgaagaattcattgttatgggaaagtggttggagctagcatcattgatgattacctctgctgaattgattttctcgaaggtttctgaaaaagatatagagtccatcctc

SEQ ID NO: 12958 - DNA, 185 bp, Glycine max
  Clone ID: LIB3040-055-Q1-E1-A1
atcatcaaatgcttttcaaaaaaaaaaaaaaaaaaaaaaaaaaaacagccgccccacaagatgatcccatcctaactcctccttgatacgacatcacacctctacaatatcgtcaactatcatctcatcagtggtcgtcttataacaacgtcattactaagaaaatcctgttattaaacataata

SEQ ID NO: 12959 - DNA, 282 bp, Glycine max
  Clone ID: LIB3040-055-Q1-E1-A10
gactcttacaatcacagttgtcgagtcaccggatctgggttgcatagattcagagaaaattttccactttcaaatagcaagcaccgtcaatacccacgggttggatcggtgagactgttcattcaatcaaatctcatcagatttgggagatcatcaccaattctgttagccgatgcacaattgtaacatcatcactgcaaatacggaaggcattgatcatacgtatacggcactgaatctcccgtagtcgtcgttctttcaggaatcatgcaaccccgatta

SEQ ID NO: 12960 - DNA, 340 bp, Glycine max
  Clone ID: LIB3040-055-Q1-E1-A11
gaggtttttagggtttacaccgaggagacacaccttcagcagcagcagccatggttctcaaaaccgaactatgccgattcagcggtgccaagatctacccagggaaaggcatcagatttgttcgtggtgattctcaggttttcctgtttgctaactcgaaatgtaagaggtatttccacaacaggttgaagccatcaaagctcacctggactgcaatgtacagaaagcaacacaagaaggacattgctcaagaagctgtgaagaaaagaagacgtgctgccaaaaagccttactccaggtccattgtcggtgccactttggaagttatccagaaaaagag

SEQ ID NO: 12961 - DNA, 379 bp, Glycine max
  Clone ID: LIB3040-055-Q1-E1-A12
aaccaagccttcaaacggtggcaaaaagacaacagaaggggataaacaacatcggtggtctggggcatatgctaaaacagatgtcagacatggatactgtagagaacagcattagaggcaatggcgagatatccgagaaagaagagcaccaacaccataccagtaagacggagcatcgacgaggaggcatcagaaccttacccttcatccttgcaaatgaattgtgtgatagatttgcgagctctggttttcatgcaaacatgataagctacctcactcagcagctgaacatgccattggtatctgcctcagtcacgctcaccaactttaatggaacttctagcttcactcctctctttggagctctcattgctgactc

SEQ ID NO: 12962 - DNA, 297 bp, Glycine max
  Clone ID: LIB3040-052-Q1-E1-E11
gagttctttgaggcacagaaggaggaaaagagcgtgttaccccagcagaggaaagatgaccagatgacagtggatgctgcattgttaaaagccattgagagtgtgccagacttgaagtcttatttgggtgccaagttttctctaaaggctggcgtgaaacctcatgagctagtcttctagaggaaagaacggtgttactcctgtatttgataacctgtttgtttattggtgttgatccttatagttgcactcatataacagtcttgttaacatacaaatgaagaacctaaaattttg

SEQ ID NO: 12963 - DNA, 396 bp, Glycine max
  Clone ID: LIB3040-050-Q1-E1-C11
ggaggctcgtgagatactggagaagcgggaagcagctgtttttgctaaggagcaagattcgttgcagaggcttcaagagaaaagagatgctgcttcatttgccattgtaaatgctcgagaaaagcagaggaagatttcatcacgtgaattggctactttctctaatggtggtaaaggagggatgccaggagtggaggagaaaccagtggatactttgtccactgcagctgaaggtaatgtggaagatgtaaaacttcctgataatggaaatgtggagttggtatcttatccagagttggtaaaactatgcaaagagatggatgctgctggacttcacaaattcatatctgataaacgtaagaaacttgctgctgtaagggatgaaataccaaatgc

SEQ ID NO: 12964 - DNA, 92 bp, Glycine max
  Clone ID: LIB3040-050-Q1-E1-C12
gactcacaactccataacacaaggcagaaagcaagctcatcctagagttttaaaaatggcagcagcctcctccagggctctctcttccccat

SEQ ID NO: 12965 - DNA, 372 bp, Glycine max
  Clone ID: LIB3040-050-Q1-E1-C2
gatggaaactggaggctttcatggctaccgcaagctccccaacacaacctctgggttgaagctgtcagtgtcagacatgaacatgaacatgaggcagcagcaggtagcatcatcagatcagaactgcagcaaccacagtgcagcaggagaggagaacgaatgcacggtgagggagcaagacaggttcatgccaatcgctaacgtgatacggatcatgcgcaagattctccctccacacgcaaaaatctccgatgatgcaaaggagacaatccaagagtgcgtgtcggagtacatcagcttcatcaccggggagggcaacgagcgttgccagaggggtgcaacgcaagaccatagccgcagaggacgtgcttt

SEQ ID NO: 12966 - DNA, 339 bp, Glycine max
  Clone ID: LIB3040-050-Q1-E1-C3
gctagtggcagtgaccaaactccatttctcactcgccgtcgtctcttccgtctagggtttctcctcttcacaaaaatggttgccgcaaaaaaaactaagaagacccatgagagcatcaacaacaggctcgctctcgtcatgaagagtggcaaattcaccctcggttacaagaccgttctcaaatctcttaagagctccaaagggaaattgattatcattgctaacaattgcccccctttgaggaagtcagagattgaatactacgctatgttggcaaaggttggggttcatcattacaatgggaacaatgtggatttgggcaatgcatgttggaaatat

SEQ ID NO: 12967 - DNA, 360 bp, Glycine max
  Clone ID: LIB3040-050-Q1-E1-C4
gggcagtggcaccttcagctgcacaaagattcccaaagttgagaaacagcacactctctcactcacttgtcattgttatttttgttttacattttgtcacaatctgtgactgttcgagttatccgaggcccctcttttatatggtcgttaataaaaatggcttcgacccttttcacaaagatgcttctgggccaacgattgatccatccttattcgttcctcactcaccagccacagattctctcttctctattcagtaaacggctgttttgtatacgatctgtcccagtctcagcctatacatcccaaaacatcaaaacaactggttgggctccttgtatggcttcttcctcagtttgt

SEQ ID NO: 12968 - DNA, 340 bp, Glycine max
  Clone ID: LIB3040-050-Q1-E1-C5
gagtagttttttattttctgctttcaaaacccattgagttgaatctgatgacggcatgactcagtttttcattccgtaaaatttctttacgttaatttccgtagcagttcatccttacaaaaaatcttccgtagcttctttctcttcctcctttttgggtcgtgagtgtacacgcatcacgcatggtagctttccttcgacgctggattccacgatggaaggtgttagcttcaccaccctgacgggatagcaagtcgttcatgaaattgagaattgctgctgctaacagagaggcttccattagggatggggagttcaccgggagtggtgagtatgtgac

SEQ ID NO: 12969 - DNA, 339 bp, Glycine max
  Clone ID: LIB3040-050-Q1-E1-C7
gatcgtaaatcaattcaaacaataggagaagaagggactagcggcgaactcaaacggcgtcgtatcgactcgttgttcatccatttgagaggcatctggtagcggaagatggataagggtaagatccaagaggtgatcgagaaccaagtcctgacggtggcgcaagccgtcgaggacaagatcgacgatgagatcgccgccctggaacgcctcgatgccgacgacatcgaagccctccgcgagcgccgcctccagcagatgaagaagatggcggagaagcgctcccgctggatctccctcggccactccgaatattccgagattccctccgagaaagac

SEQ ID NO: 12970 - DNA, 407 bp, Glycine max
  Clone ID: LIB3040-050-Q1-E1-C8
gaatttgaaagaagagattccttcataattcgttcttttctactaccttgaaatgtttatgataggcattaattaattaataagaaagaatttctgggaagggatcacaatcacattgatggatagattaactatcacaaactaaactacacacacaagatccggggtttgatcaaccatcatgtctgacgaagtcaacagcgttttcaagaaatatctcaaccagcttcagcttcatcctctcagaaccaaggcgattactgcggcatttttggctggttttagtgatgcagtggcgcagaagttatctggggccaataaacttcagttgagaagggtacttcttttcatgctctatggtttcccctactctgggccctttggaaattttctccacacattgatgg

SEQ ID NO: 12971 - DNA, 318 bp, Glycine max
  Clone ID: LIB3040-050-Q1-E1-D1
gacattttcttcgttgagcagaaagctaaaggctaaagcctagaaccttcttcctttacacctcgctggaaccagcgatggatcctcagcctgagctagtcagctacatatgcggagattgtggaatggagaatacgctgaagcccggtgacgttatacagtgccgtgagtgcggttaccgtattctttacaagaagcgcactcgtcgcattgtccagtacgaggcacgctgaagaaaactgctataacgtttgcaagtaatttccatgaagaaattgttactacatctgtgttgtgtgatattgaagaactactttt

SEQ ID NO: 12972 - DNA, 192 bp, Glycine max
  Clone ID: LIB3040-050-Q1-E1-D10
gacaccttcgaattttcttttccttcactttcccgagaaaaaaaaaaacactctttcactttcttgactacggtctcacttcgacatggctcgtactaagcaaactgcccgcaagtcaaccggcggcaaggcgcaacttaaccatttggcaaccaaggccccccgaaattccgttcccctaaccggagaatt

SEQ ID NO: 12973 - DNA, 302 bp, Glycine max
  Clone ID: LIB3040-050-Q1-E1-D11
ggtgtgtagtataggattctcttctttattccttttgtaatttcattcattcttaatctttgtgaaaaataatgttcatcgagaattttaaggttgagtgtcctaatgtgaagtacaccgagactgagattcagtccgtgtacaactacgaaaccaccgaacttgttcacgagaacaggaatggcacctatcagtggattgtcaaacccaaatctgtcaaatacgaatttaaaagcaacatccatgttcctaaatttagggtaatgcctgtgggttggggtggaaacaacgggtcaaccctc

SEQ ID NO: 12974 - DNA, 156 bp, Glycine max
  Clone ID: LIB3040-050-Q1-E1-D2
gcagagaaagggacacaatcaggtaacgatgcaaggttttaacaaacggttatggcagctgcaagggttttcggagcgatagccgcgacagcgttcatggacccagggtcaaagagttcggccaatcaacaaacacgttccgtccggcggagccga

SEQ ID NO: 12975 - DNA, 245 bp, Glycine max
  Clone ID: LIB3040-050-Q1-E1-D6
gacacaaactttattacagttgttgtattgtaattaagcaagaatattaggcaatggagtcttctagaacttcaactactcttgctctttttttaaccatcaatttgcttttccttgtcatggcaagtggctgctacacttgcacacagcctaagccaaaccctatcccattcccttaccctaaccctagtcctgccgcgaagagctgccccagggacgcacttaagctcggagtgtgcgcaaac

SEQ ID NO: 12976 - DNA, 325 bp, Glycine max
  Clone ID: LIB3040-050-Q1-E1-D7
gactcaccacttcaaaacactcataacacaaagcacaaagcaaagctcatccttgagttaaaaaatggcagcagcttcttccatggctctctcatccccatccttggctggcaaggccgtgaagctgggcccatcagccccagaagtgggaagggtgagcatgaggaagaccgtcaccaagcaggtctcctcaggaagcccatggtacggcccagaccgagtcaagtacttgggcccattctctggcgagcccccgtcctacctaaccggtgagttcccaggcgactacggctgggacactgctgggctttccgcagacccaaga

SEQ ID NO: 12977 - DNA, 383 bp, Glycine max
  Clone ID: LIB3040-050-Q1-E1-D8
gatcttcattttcgtcgtcgttcatttttttattttttttttctgttttccattcgcttcttctctcagaaaagctcgccaatcgatcttgctctcttctacgcttttcgaattccttccattccattatggacgcagattagattcacgttcacattcacttctcttcgtttgcttcaaccactctgctctgctctgctctactctgagatccgatcgcattttcattcagaaaggaaactcgtgtgactgatttatgcgctaattgcaattgcactgcgagcgtccctgtgccgaatcggaagatgggattagtgtttaccaaattgttttcctctcttttcggtaacaaggaagctcgaatcctcgttctcgggctcgag

SEQ ID NO: 12978 - DNA, 334 bp, Glycine max
  Clone ID: LIB3040-050-Q1-E1-D9
gaaatttgtttgtggcactttttgtagtctaggcattgaattaaacaattggaattcaaagagatgtggttttattaaaaaaaaaaaaaaaaaaaacaaaaaaaaaaaaaaaaaaaaaaaaaaaaaaaaaaaaaaaaaaaaaaaaaaaaaaaaaaaaaaaacccaaaaaaaaaaaaaaaaaaaaaaaaaaaaaggggaaaaaaaaaattccccaagggggaaaaaacccccccccaactgtcccaaaccttaattccaaaaaaaaacacacatcccacaaaatcccccttttttccaaaacaaaccccaaacccccaaaacagttccccccccg

SEQ ID NO: 12979 - DNA, 293 bp, Glycine max
  Clone ID: LIB3040-050-Q1-E1-E10
gacttccagatttcaaagaaggcgtcttcataaacgcctttcttctccgtttccgtttcctcgttcgaattcgctttttgatctgcgaaaatgagagagtgcatctcgatccacattggtcaggctggtatccaagtcggaaatgcttgctgggagctctactgcctcgagcacggcatcgggcccgatgggcaaatgccaagtgacaagacagttggcggtggtgatgaagccttcaatactttcttcaacgagaactggtgctggaaaacacgtgccacgtgcagtgtttg

SEQ ID NO: 12980 - DNA, 274 bp, Glycine max
  Clone ID: LIB3040-050-Q1-E1-E2
gaagatttgtgagagaaagggagaaagggtgtgagaatggagagcaaagaggaagatgtaagggttggagcaactaagttctcagaaaggcaatcaattggtacagcagctcaaggtgacaacgactacaaagaaccacccccagcacctttgtttgagcctggtgagctaaagtcatggtccttctacacagctggaattgctgactttgtggccactttcttgttcctctacattaccatcttaactgtcatgggtgtcaacaggtcaccct

SEQ ID NO: 12981 - DNA, 400 bp, Glycine max
  Clone ID: LIB3040-050-Q1-E1-E3
gaaccaagtttgcttgcgtgtatattcattttagcatcaaggttgaatctcagagaaaaagaaacatcgacaagcatgtctggaagaggaaagggaggcaagggtctcggaaagggaggagccaaacgacaccgtaaggttctgagggataacattcagggaatcaccaagcccgcgattcgccgtctggccagacgtggtggcgtcaagcgtatcagtggtcttatctatgaagaaactcgcggtgttctcaagatctttctagagaacgtcattcgcgacgctgtcacctacactgaagacgctcgccgcaagaccgttaatgccatggacgttgtttaagcccttaataagcaggggaagatcctctacggattttgcggtaagacaattggggatt

SEQ ID NO: 12982 - DNA, 57 bp, Glycine max
  Clone ID: LIB3040-050-Q1-E1-E5
agggagacctcaggtcaggcggggctacccgctgagtttaagcatatcaataagcgg

SEQ ID NO: 12983 - DNA, 102 bp, Glycine max
  Clone ID: LIB3040-050-Q1-E1-E6
agtccaggcgtcagtaaggaagcaaagggaacacacacagagacacctcaagacctgctgcgccactctctaagttgaaacatcgcacatcatctggaatca

SEQ ID NO: 12984 - DNA, 374 bp, Glycine max
  Clone ID: LIB3040-050-Q1-E1-E7
ggctttagattcttttcccctagattcagccacagttggaaaaaaaaaaagttgttcgagatggcacgtacgaagcaaactgctcgtaagtccacaggaggaaaggcacctaggaagcagctcgcaaccaaggctgcacgtaagtctgcaccaactactggtggtgtgaagaagccacatcgttatcgtcctggtaccgttgctcttcgtgagattaggaaataccagaagagtaccgagcttttgatcaggaagctccccttccagaggctggttcgtgaaattgctcaggacttcaagactgatctgcgtttccagagccatgctgtgcttgcattgcaagaagctgctgaggcataccttgttggactcct

SEQ ID NO: 12985 - DNA, 406 bp, Glycine max
  Clone ID: LIB3040-050-Q1-E1-E8
gagcctcagtctcaacacagaagcagaaggaggagaagcagaaagaggagacgaagcaatggcgccgaagaagccccgaaccacgtcgaggaaccctgatttggtcaggggaattggcaaatattcgaggtcgcagatgtaccacaagaggggcatctgggccatcaaggccaaaaacggcggtgttttgcccctccacgatcccaagcccaaacccgaggccccggcccagaagccgcccaagttctacccggccgatgacgtgaagaagcccctcgtcaacaagcacaagcccaagcccgcgaaactcagggctagcattactccagggactgttctgatcctgcttgctgggaggttcaagggaaagaggggttgtttcttgaagcagcttccatctggattg

SEQ ID NO: 12986 - DNA, 390 bp, Glycine max
  Clone ID: LIB3040-050-Q1-E1-E9
ggcccgaactccttcgacgaccgtcttccccaatcgcctgcgtctctctctgaattgacaagcttaaagacaaagtcttaaatggctggtccaaggattgcccatgctaccttgaaaggtccgagtgtggttaaggagataataattggaataacacttggcttagctgctggtagcgtgtggaagatgcaccactggaatgaacagaggaaaaccaggaccttctacgatttactggaaaagggtgagatcagtgttgttgcagaggaacagtgaaaatgttcttgttttgttgcctatgctctccatttatacgcttttttttttcccatgctatattcaattggctcttcaactgtaaatgagccaacttactattagattgaaaag

SEQ ID NO: 12987 - DNA, 413 bp, Glycine max
  Clone ID: LIB3040-050-Q1-E1-F1
ggtgagagagcgagcgagcgagcagtttcaaagagaggatttgggattgggaaggcgagggattgcgctgcgtctcttcctcttctctttcgattcatccctcattcataatcttccaatccaacaacctcagcctcacactcacacatacacacatctgaacgcgtatcgtccctcccatggcttcaaagcgcatcctcaaggagctcaaggacttgcagaaagacccaccaacttcttgcagcgctggtccagtagctgaggacatgttccattggcaagcaacgattatgggtcctgctgatagtccttatgctggaggtgtattcctagtcactattcactttcctccggattatccttttcaaactcccaaggttgcctttaggactaaggtgtttcatccgaacatc

SEQ ID NO: 12988 - DNA, 395 bp, Glycine max
  Clone ID: LIB3040-050-Q1-E1-F10
gaacatgccgaaaagtagtaccaagatggcttcagttgtgtatctcctctttggcttccatctcattgttatcatgtcaagttccttacccgcaactagtgaagtgtttgcaaaacagtatccatccacagaacccgtggaagaaaaactcacccaactccacttctatttccataacaacataacgggggaacacccaactgctatgaaaactgttttgcctcctaaggggtccattcatggttttggggctacttacatgatggatgaccctctaactgaaggaccaagtccaacttcaaagcttgtgggaagatctcagggaatatacgctttggcttcacaacatgagcctgggttgctcatggtgacaaattttctcttcactttgggca

SEQ ID NO: 12989 - DNA, 376 bp, Glycine max
  Clone ID: LIB3040-050-Q1-E1-F11
gagagtggtggagtgtgcaaaagagcgtcgtagtcgcaaccctaatcagaagaagcgcagcttcaagcgagtgacagccaccagccatgggtcgtatgcacagccgcggtaagggtatatcctcttctgctttgccctacaaaaggacacctcctagctggctcaagatctcttcgcaagatgtcgaagaaaatatctgcaagtttgcgaagaaaggtttgaccccgtctcacattggtgtcattctcagagattctcacggtattgctcaggtcaatagcgtcactggcagcaaaatccttcgcatcctcaaagctcacggacttgcgcctgaaattccataggacctgtaccatttgattaagaaagcagtttc

SEQ ID NO: 12990 - DNA, 371 bp, Glycine max
  Clone ID: LIB3040-050-Q1-E1-F12
caatccggaaccaacaacagttccaccaaggggtttcaacgagacattacatattgaagaattgatggcagctttattggttgctaactatctatattctgccattgctatatctgcctttcagagctttattgtatgattaagttgagtaaaatgctactacgtcaacgtttaaagtagacaatatctataattatctataataaagataaaaaaaactaaatacattagaaaaaagaaatagaggcttggctcacgcgggaaaatgaaaaatataaaatatgactttgcaagttaacttttttttgtttagttctaagaatgttaacatgcaaagtcgtattttatatttaactttttttgttcaattt

SEQ ID NO: 12991 - DNA, 345 bp, Glycine max
  Clone ID: LIB3040-050-Q1-E1-F2
ggtggagtggaagtagtagcaagtacgtcatatatgtggttgatcttttgctggttgtttgttttgttccttccaattgtcagatctgaatcaccggactcactcttcacactcactcacactgaatggcttctgaaggcgaccatcaccaccaccaccaccatcaagatcacgatcatcatcatcatgatcatgatcaccatcatcatcacgatggagagggagagaccaactcatgggtaggtaacgatgggaacgtgtaccatagccacgatggtctggcgccgcattctcacgaacccatttactccaccggctacatcaacacaagagctccaccgcttc

SEQ ID NO: 12992 - DNA, 274 bp, Glycine max
  Clone ID: LIB3040-050-Q1-E1-F3
gacgccaaaaccactgtatcagtgtgtccttccattccaggtttttccaccacactagaaagtaactttaaggttactatgatcttttttcaacatgattcatcacattttcaagcacacactgcattaagaagcgagaaatcataacgcatacatatatatggtcacttataaataattcttatagcaaaacggatggcatggaaagcgtagggaagaatgtgtctgtaactgtcattgtctaagtagagtccgtaattgtccttttgagaaa

SEQ ID NO: 12993 - DNA, 252 bp, Glycine max
  Clone ID: LIB3040-050-Q1-E1-F4
gagttttctgttggcgcgggtgaggtagaacccttccacggtggtgactgcgcgatgggtgcctacaagtatgtttcagagctatggcgcaagaagcagtctgatgtcatgcgcttcttgcagcgggtgaggtgctgggagtatacgcagcaaccttcccttgttcgcttgacaaggtcgacccgccctgacaaagctcgtcgcttgggcttcaaagctaaccacggctatgtgatataccgtgttcgtgtt

SEQ ID NO: 12994 - DNA, 292 bp, Glycine max
  Clone ID: LIB3040-050-Q1-E1-F5
aggcaaaattcaatacattaatgaatgagcatgatagtatttgtgatgtagaagcagtagaaaagtaaatcttaagtagcagggttacttttataatatccaaacatttaattaatttttgtaacatctagttaaggttagtattttgggccagatctgttttttaagaattctagtattttagtctaaggacgtttaatgggcatgggcttgtactaagagtctatcattatgttatggtagttgtttagttgtaagttgctttcctaataagttattcctacagagttgt

SEQ ID NO: 12995 - DNA, 332 bp, Glycine max
  Clone ID: LIB3040-050-Q1-E1-F6
ggaagaagaagaagaagatgtcgtacctgttgcctcacttgcactctggatgggccgtcgatcaagcaatcctcgccgaagaggagcgtctcgtcgtcatccgtttcggccacgactgggacgaaacctgcatgcagatggacgaggtgttggcgtcagtggcggatacgattaagaactttgcggtgatatacctggtggacataacggatgtgccggatttcaacaccatgtacgagctctacgacccttccacggtgaagttcctcttcaggaacaagcacatcatgaatgatctcagaaacggtaacaacaacatgattaactgggct

SEQ ID NO: 12996 - DNA, 317 bp, Glycine max
  Clone ID: LIB3040-050-Q1-E1-F7
ggttaaacttcaccttacagtccactaaagcataacctaatcgcactccgctctccgcactccgctattgcacctccctcgacggcacctcaggcgcactcgttttcggttccgattgcattgaatcaaatctgagaaccattctcattgcccgtgtagtctgtaatcatgtcaggaaagtatatcatttctgctattcttggattatttggagttgcatgggtttgtgattattatgtttcagagaaaaagctatttggaggttctacccctggcactattacgaacaatgagtgggcagaagagactgacagaaa

SEQ ID NO: 12997 - DNA, 385 bp, Glycine max
  Clone ID: LIB3040-050-Q1-E1-F9
gactcaccacttcaaaacactcataacacaaagcacaaagcaaagctcatccttgagttaaaaaatggcagcagcttcttccatggctctctcatccccatccttggctggcaaggccgtgaagctgggcccatcagccccagaagtgggaagggtgagcatgaggaagaccgtcaccaagcaggtctcctcaggaagcccatggtacggcccagaccgagtcaagtacttgggcccattctctggcgagcccccgtcctacctaaccggtgagttcccaggcgactacggctgggacactgctgggctttccgcagacccagaaaccttcgccaagaaccgtgaactcgaagtgatccactccaggtgggccatgctcggagcc

SEQ ID NO: 12998 - DNA, 279 bp, Glycine max
  Clone ID: LIB3040-050-Q1-E1-G1
gagcaacatggtgaagctggtggagagatttacttgccagaagcttacgttagaaccaagaggactacttaatggagcaaatcagttggaagaacttgtagctagcttcccaactggcttatctgagtgtggagaagcattatcaagccttaggagtaggagaacgagtactgtttgtgatgaatgtctatggtttaagaaatctgtctttagtcaacttgtgtgttttgttattcagttctcagcaataaactgctctggcaatctagtttcatgtcc

SEQ ID NO: 12999 - DNA, 322 bp, Glycine max
  Clone ID: LIB3040-050-Q1-E1-G10
gaccgtgcgctagttctgagtattctgatcgctccctgagagagctcgtcgcggcggttgcagaagaagattgcaagatgaagttcaacatcgcgaatcccaccactggatgccagaagaagctcgagatcgacgacgatctgaaactgcgagcattttgggacaagaggatctcacaggaggtcatcggagatgcactcggtgaggaatttaagggctatgtcttcaaaattaccggaggttgtgacaaacaaggatttccaatgaagcatggagtgctgactcctggtcgtgttagacttttgcttcacaggggaactcc

SEQ ID NO: 13000 - DNA, 392 bp, Glycine max
  Clone ID: LIB3040-050-Q1-E1-G12
ggcccttctagctttttcccagtccaagcagcctccaattcgtgccactctcttcaaaatggccgttaccttctcaaatctccacacagaatcagatctcaagtccctcgacgacttcctctctgggaaggtctacgtttctggggatcagttcacaaaggacgacatcaaagtgtatggtgctgttttggagaagccaggtgactcttttcccaatgctgccaagtggtacgaggttgtctcatctcagcttgctgcaagcttccccggcaatgctcaaggggtgagattcagtggcaaagcttctgctccagcggaggctgctcctgcgaaaccggatgcttctgctgctgaagatgatgatgaccttgatctctttggcgatgagactg

SEQ ID NO: 13001 - DNA, 345 bp, Glycine max
  Clone ID: LIB3040-050-Q1-E1-G2
gactccgcagctgcagcactcaaaaccctagagaggacgagagagcgtgcaactttcggcaaccacagaccatgacattcaagcgcaggaatggaggtcgcaacaaacacggccgcggccatgtcaaattcatccgatgctccaactgcggaaaatgctgccccaaggacaaggccatcaagaggtttttggttaggaacattgttgaacaggctgcagtcagagatgtgcaggaagcttgtgtctatgaacaatatacacttccaaaactctatgtgaagatgcagtactgtgtttcctgtgctatccactcccatgttgtgagggttcgattccgcaccgaca

SEQ ID NO: 13002 - DNA, 106 bp, Glycine max
  Clone ID: LIB3040-050-Q1-E1-G4
tggggcgcacccagagaggaagcttagagagagagagagagagagagagagagaggagagagtattggcgcttcatcaagatgggtatttctagggattccatgca

SEQ ID NO: 13003 - DNA, 414 bp, Glycine max
  Clone ID: LIB3040-050-Q1-E1-G5
ggagtaagatttttcttgttcctttgttggtgggtttcctttccgcttcaggttcagcttcaacttcaaattctcagtgaaaccaattcagctgagtccaaatcccaaatccgaatcaaaatccgaagtgagatttgcgatggagaggcttcagcgaatgtttgcaggtgcaggtggagcgctagggcaccctcccccagattccccaactctcgattcctccgagcaggtctacatctcctcactcgctctcctcaagatgcttaagcacggaagggctggggttcccatggaggtgatgggtttgatgcttggagaattcgtggacgagtacaccgttcgtgtggttgatgtcttcgcaatgccgcagagtggcactggtgttagtgtttacgctgttgatcacgtttttca

SEQ ID NO: 13004 - DNA, 403 bp, Glycine max
  unsure (1)..(403): unsure at all n locations
  Clone ID: LIB3040-050-Q1-E1-G7
gatcccgcccaacggtatctccttatccgtgtttttttcaaaatttgagctcgtttgttgtcgtgtttgtttataacgttggtgtttctaaactcgtgtgcgctccgattcaaattccaactccgaatcaaaccctagtacaacaaaccaacgaaaccctcttcttcccaattctccgaccccatcatcctcaatggccaaccctgattcctctcttcctctctccatcaagaaggagaacatcactctcattacctctaaaatcgaggaacttaatgaatcgagatcggagcttctgggcagagttcagagtttgaaacaggatttgcanagttggacgtctaagttggatacacaagtcaaggtccatcgcgatgagctgtcagaacttaagaaaacactt

SEQ ID NO: 13005 - DNA, 250 bp, Glycine max
  Clone ID: LIB3040-050-Q1-E1-G8
caaaaggggctattcttggtgctaataccatcagcagactgcatttaatcacaccgcaaacagtgaaccacggtcgtcggaaacaactaactcatctccaaagggaagacaggtcggacgaagaacgcaactgatacccttgcgacgaaggattggcatgaaattaatgccccctctgtgtttcaagtaacaaatgttggcgcaacactcgtctcacggatccacggtaccaagattgcgtcctaacgac

SEQ ID NO: 13006 - DNA, 371 bp, Glycine max
  Clone ID: LIB3040-050-Q1-E1-G9
gatggcaactgaactcgcaggttgagaactgttaaaccctagcttcttcttcctcttcctcttcgcttagcgtcttcgtctctcgcacttcgttttcagcttcacctcgcagaagaaagagtgtaaaaagaaacgaagatgaacatgaacgaagagagtgttgaaggaagcgcgaggaggatccaagtgcgcttcgtgacaaagttaggcgagccgtacaaagttccgaccaccgccatcgctatccccgccgacctcggtcgattcggcctctcctcactcgtgaacgcactccttcaatccaatgacgctgatcatcagctggagccgtttgattttttgatcgatggcgagttcgttcggatgtcgct

SEQ ID NO: 13007 - DNA, 277 bp, Glycine max
  Clone ID: LIB3040-050-Q1-E1-H1
gagcaacatggtgaagctggtggagagatttacttgccagaagcttacgttagaaccaagaggactacttaatggagcaaatcagttggaagaacttgtagctagcttcccaactggcttatctgagtgtggagaagcattatcaagccttaggagtaggagaacgagtactgtttgtgatgaatgtctatggtttaagaaatctgtctttagtcaacttgtgtgttttgttattcagttctcagcaataaactgctctggcaatctagtttcatgg

SEQ ID NO: 13008 - DNA, 391 bp, Glycine max
  Clone ID: LIB3040-050-Q1-E1-H10
ggcagaaacaaaagcataaccctagctaggacgtgtttggagttggtttgagcgtattgaggcaatgacgcgaccttacggtgtgaaggggggccggaagcgaaagcacgccgaacccaaatacgacgaagaagaccaagaaacgcaaccaaaaaaagctgtggtggaggtggagcacaacaaagaagaagaacaacagcaacaaacaccagagggggatgaattgagcggtatcccaattacgcccagtgagaacaacaccaacaaacccaacgtcatcttcattctagaaaaagcttctttggaagtcgccaaagtcggcaagacatatcagctcttaaactccgacgaccatgccaatttgctccgcaaaaaataacaagaatcccgg

SEQ ID NO: 13009 - DNA, 396 bp, Glycine max
  Clone ID: LIB3040-050-Q1-E1-H11
ggcagtttcaaattttcttttccttcactttcccgagaaaaaaataacacttttcactttcttcactacgttctcacttcgatatggctcgtacgaagcaaaccgctcgcaagtccaccggtggcaaggcgccacgtaagcagctcaccaccaaggccgctcggaagtccgctccggcgaccggaggagtgaagaagccccaccgcttcaggccgggaaccgtggcgctgagggaaatcagaaagtaccagaagagcaccgagcttctcatcaggaagcttccatttcagaggctcgtgagagaaatcgcgcaggatttcaagaccgatttgcgtttccagagcagcgctgtttccgcgcttcaggaggctgctgaggcttacctcgttgggttgt

SEQ ID NO: 13010 - DNA, 325 bp, Glycine max
  unsure (1)..(325): unsure at all n locations
  Clone ID: LIB3040-050-Q1-E1-H12
gacagaaagagaaagcaatggcttctctggcaagcttagctgttgttcaaccatctactgtcaagggccttgctggaactaagctctctttcaagccctctcgccagagcttcagacccaagaatttcaggagtggtgccgttgtagcaaagtacggtgacaagagtgtgtactttgatttggaggatctangcaacactactggtcagtgggacttgtacggctccgatgcaccttcaccctacaaccctcttcagagcaagttcttcgagacattcgccgctccattcacaaagaggggattgttactaaagtttttgatcct

SEQ ID NO: 13011 - DNA, 157 bp, Glycine max
  Clone ID: LIB3040-050-Q1-E1-H2
gggtcgaggcacgcgtccgcctcaacgtcagggctgcaaaaagacgacagaacgggacggtttggttaataaggtttacgctcaaacgtgtgcagtctcaccccccgacgcaagatcgatcataccgtcgcacaagacactcagtcacatcatgaaa

SEQ ID NO: 13012 - DNA, 124 bp, Glycine max
  Clone ID: LIB3040-050-Q1-E1-H4
gaacgcagccaaagaaaagaaaatcctcaattttctgagcagccaaacactctctctctgtctctcgaaaattctcagtttgcagagaaaatctgaatcatgtcgtggcaagcgtatgtcgacg

SEQ ID NO: 13013 - DNA, 103 bp, Glycine max
  Clone ID: LIB3040-050-Q1-E1-H5
gtgtgtaattttcaatatgatccaacggttacaaattccgtgatcatagttttaatgggacaggtttgggtgtacgcgagaaaaagagaaggttttgttagac

SEQ ID NO: 13014 - DNA, 201 bp, Glycine max
  Clone ID: LIB3040-050-Q1-E1-H6
gaacgcagccaaagaaaagaaaatcctcaattttctgagcagccaaacactctctctctgtctctcgaaaattctcagtttgcagagaaaatctgaatcatgtcgtggcaagcgtatgtcgacgatcaccttcggtgtgacatcgaaggtaaccacctcactcacgctgctatcatcggccaagacggaagcgtttgggct

SEQ ID NO: 13015 - DNA, 401 bp, Glycine max
  Clone ID: LIB3040-050-Q1-E1-H8
aggggacgagcacgaggaccaagagcaagaagaggaggaggaggaggaggaaatgggattctcactggcggcggcggcgagttacgactcgctgggaaacgccgcggtgaggtctaaaattaccggcggcgatggtgttgcggccaccgtgaattccggtcgcaaagggacggtgagatacagagaatgtcagaagaaccatgccgtcagcatcggcggccacgccgtcgacggatgctgcgagttcttggctgccggagaggaaggcacgctggaagccgtaatttgcgccgcctgtaactgccaccgcaacttccaccgcaaggagatcgacagcgaaaccagcccttaacagcaccgttcgcagccacagcctcagcctctgcaccctcagtaacacc

SEQ ID NO: 13016 - DNA, 363 bp, Glycine max
  Clone ID: LIB3040-050-Q1-E1-H9
gaccatccagtactcttcttttcagcacaacctcttcatctctcccaggctttcttttctttgcaacaacactaccaaaaatgtcaccagatttcacacttttgttctccccggaactcatgcagtcccctatcatcactttccaagccactttctgtgtccttctcttcaccctcatgttcacgccgttcttcactcctggtgggcttccttgggcctgggcccggcccagaaccatcatccctggcccagtaactgccctgctcggggtcttcacgggttccacacctcacagcgctttatccaaactggcccgcacttatcacgcggaaaagctcatggctttccccatcggttaacccg

SEQ ID NO: 13017 - DNA, 134 bp, Glycine max
  Clone ID: LIB3040-051-Q1-E1-A1
ggccgagaaaacgctaattcgcttgcagtcacagaagaggccaatcctattcatagctcgaggatggtgaagaagtgaaggtagttgttccagaatcagtgttgaataagcgcaagagggatgaggaatgggcg

SEQ ID NO: 13018 - DNA, 235 bp, Glycine max
  Clone ID: LIB3040-051-Q1-E1-A10
gattcaccacggggctctcactatcttccattgccactcagttttgactctcattttattccctccatgtttcttcactttcttccagagacatgaccatgtcttcacacagtgttggcctcaaaattgcgtaatcatctgtaaggtgtgctggagcagtaaacagggtcatgggaaacatgtacagtgctaagtcagttgacatcgattcaaatgaactcaaggtgagtgtgat

SEQ ID NO: 13019 - DNA, 349 bp, Glycine max
  Clone ID: LIB3040-051-Q1-E1-A12
ggtgtggtctctctctatactataggtctcgcccaatacctactctccgctcccaagagcacgcaccaccactattgcacttcttcctcgttctccctctttttcttcttcttcgctaaacccttttttctatctcactaacacaacaatgggagacgagaagaagggcaagcctgctgcttccggcgtgtggtccaccatcaagcctttcgtcaatggtggagcctccggcatgctcgccacctgcgtcattcaacccatcgatatgatcaaggtgaggattcaacttgggcaaggatcagctgcgcaggtcacttccaccatgcttaagaatgagggttttgctgcc

SEQ ID NO: 13020 - DNA, 147 bp, Glycine max
  Clone ID: LIB3040-051-Q1-E1-A3
gctccgtcacttttctcagctgctgttcctgcgcgtgaacaagcctcaggtaagccaaagccatggttaagcatgagaatcttatccccaacggacacttccgtaagcagtggcagaactatgtgaagacctgggtcaatcagccag

SEQ ID NO: 13021 - DNA, 299 bp, Glycine max
  Clone ID: LIB3040-051-Q1-E1-A4
gagggtttttgtcgttgcgactaagagttgctgcttcttccgccactcagcacttcgctccctctgtgcttcagcaagcatggccgaaatcgaagctaccgttccagatcgctctcaaatcgacgtcaaacttttcaaccgctggagcttcgaggacgttgaggttactgagaggtcgctggcggagtacattggagtgtccccgtcaaggcatgggagggatgtgcgtgagactgctggtagggtactcagtgaggaggttcaggaaggcgcagtgccccattgttgagagactcagc

SEQ ID NO: 13022 - DNA, 361 bp, Glycine max
  Clone ID: LIB3040-051-Q1-E1-A5
gacaccaaaatttgccaattgccatttcaatccccagtttcttcttcaacgtcctcttacgagcagatcgcaattctccttcccagtttcaaaccctaattccctcattcccatggcctcagaagagcccactgtcgcggtggaagccgctcccgaacctgccagcgccgagcctcgcccggaggagaaggaggagccgagagctgaagccagggctaagaggaccaaggagcccagacctaaagaggtttcgagaggacgcaaccctcccactcatccttcggacgaggagatgattaagggggcagttagctcgctgaaggagaagagcggttcgagccaacacgcgattgcgaagttc

SEQ ID NO: 13023 - DNA, 276 bp, Glycine max
  Clone ID: LIB3040-051-Q1-E1-A6
ggagttgagttttgaaagcgtgtgcgtgggagggtccgaagttggagatagtgattctggttctgttctgttcttctttctactcacaacaacatcagaatcagaaacaacaatggccaacactaacttggaagatgttccctcgctggatggcatgactgagctccttcgtcgtctcaggtgctcttcgaaacctgacaagcgtcgtagtctcattggggcacctggatctggaaaaggcacccattcaccagtcataaaagatgagtactgctt

SEQ ID NO: 13024 - DNA, 256 bp, Glycine max
  unsure (1)..(256): unsure at all n locations
  Clone ID: LIB3040-051-Q1-E1-A7
gactcaccacttcaaaacactcataacacaaagcacaaagcaaagctcatccttgagttaaaaaatggcagcagcttcgtccatggctctctcatccccatccttggctggcaaggccgtgaagctgggcccatcagccccagaagtgggaagggtgagcatgaggaagaccgtcaccaagcanggtctcctcaggaagcccatgggacggcccagaccgagtcaagtaggtgggcccattctctggcgagccccc

SEQ ID NO: 13025 - DNA, 84 bp, Glycine max
  Clone ID: LIB3040-051-Q1-E1-A8
gacagacacctcacttcacacaattgctctctaaaatgcgtgagctcatgtggttgacagaccattgccgcgagacagtttccg

SEQ ID NO: 13026 - DNA, 371 bp, Glycine max
  Clone ID: LIB3040-051-Q1-E1-A9
ggccaacactttctcgcattttccctcttctttctctctcacgttttccgcttcagttttctcgggaaaatcatggtgaaaggtccaggcctctactctgacattggcaagagagctcgcgatcttctgttcaaggattatcagaatgaccacaagttcaccatcaccacttacacttccaccggagtggaaatcacttcaactggagtcaggaaaggtgagatatatttggccgatgtcagcactaaggtgaagaacaagaacatcacaactgatgtcaaagtggacactaactcaaatctgcgtacaatcattactgtggatgaacctgcccctggactcaagacaatttttagctttaattttccaga

SEQ ID NO: 13027 - DNA, 276 bp, Glycine max
  Clone ID: LIB3040-051-Q1-E1-B1
gacagcactgcactcttcgcaacacaacaaagaaagacaacccagagagcgcgtcttaataaacgctcttctctgaaaacccccatttcttttcttctttcttcttctctttcgcttcttcgatcttcgatcttcgtcgctgaagatgagagagtgcatttcaatccacatcggccacgccgggattcaggttggaaacgcctgctgggagcgttactgcctcgaacacgggattcagcctgatgggcagatgccaagtgacaagaccgttggtgg

SEQ ID NO: 13028 - DNA, 381 bp, Glycine max
  Clone ID: LIB3040-051-Q1-E1-B10
ggttcaccctgacattggtatctcaagcaaggccatgggaatcatgaacagcttcatcaacgacatcttcgagaagcttgcccaggaatcttctagacttgcccgctacaacaagaagcccaccatcacttcaagggaaattcagaccgcggtcaggcttgtgctgcccggtgaattggccaagcacgccgtttcggagggtaccaaggccgtcaccaagttcactagctcttgaacaaaatatctttgcctggctcttgtttttcttcatgtgtttctgttagatctagcgacctatgcttagatttgaacagttaacttttttattattatttgtaattgaagtattgggattacgttcatcctctgtgtatggaaatg

SEQ ID NO: 13029 - DNA, 356 bp, Glycine max
  Clone ID: LIB3040-051-Q1-E1-B2
ggagaggagagaggagaagagaagctaaagaaagaaaggagatgggagtggagaagcagttgttgaggtctggcaccggtccgaagccaattcccggtcagaacgtaaccgttcactgcactggtttcgggaagaacggtgacctttctcagaaattctggagcacgaaggatcctggccagaacccattcactttcaaaatcggccaaggttctgttagcaaaggatgggatgaaggtgtgcttggcatgcaaattggtgaagttgctcgtctccggtgctctccggattatgcgtatggtgctggtggctttcctgcgtggggaatacggcccaactctgtcttggaatttgaa

SEQ ID NO: 13030 - DNA, 283 bp, Glycine max
  Clone ID: LIB3040-051-Q1-E1-B3
ggaggacaccatggccaacaacaacgaagaggaagaggaagcagtggcgccaatggtgaagttgggttcgtacggtggtgaggttcggttggtggttggtggggaggaatccgctgcggaggagaccatgctgctttggggtattcagcaggccacactttccagacgcgaatgccttcggcgcgcaagctcccttgcaactctcccgcgacgcgtgtggccaggcgcgctcgaggcatcggtcgcggtccgcggggggaacgcctggagtaactggagcagt

SEQ ID NO: 13031 - DNA, 282 bp, Glycine max
  Clone ID: LIB3040-051-Q1-E1-B5
gacatcacatttcgttgcgcctttgatctctgtccccgctgcgtctctcgtaatcatgcctaagcaaatccacgagattaaggatttccttctcactgccagaaggaaggatgcgaggtcagtgaagatcaagaggagcagagatgtggttaagttcaaggtcagatgctcgaagtacctctacacactttgtgtgtgtgagccagagaaggctgatagagtgaagcaatctcttcctccaggtttgagtggttaggacctgtaaaggtactgggctagaga

SEQ ID NO: 13032 - DNA, 284 bp, Glycine max
  Clone ID: LIB3040-051-Q1-E1-B6
gacaccttcgaattttcttttccttcagtttcccgagataaaaaaaacacgcttgcactttcttgactacggtctcacttcgacatggctcgtactaagcaaactgctcgcaagtccagcggcggcaaggcgccacgtaagcagttggcgacgaatgccgcggggaagtcagctcccgcgactggaggactgaagaaggcggagcgcggtcgggccggggaagcgtgggcggctgagggagggcagagggtatcagaagagcagcgagcttctggtcaggaagc

SEQ ID NO: 13033 - DNA, 122 bp, Glycine max
  Clone ID: LIB3040-051-Q1-E1-B7
gcgcacccagagaggaggcttagagagagagagagagagagagagagagatgagagagtgttggcgcttcatcaagatgggtatttctaggggttccatgcacaagaggcgtgccactggtg

SEQ ID NO: 13034 - DNA, 379 bp, Glycine max
  Clone ID: LIB3040-051-Q1-E1-B9
gattcatagctattcgcagttcccaaattcattttaatcctaattctgcacttcttgatcattcgatttttctcctcaagatgcagatattcgtaaaaactttgaccggcaagaccatcacccttgaggtggaatcctccgacaccattgacaacgtaaaagctaagattcaagacaaggaagggatcccacctgaccagcagagacttatctttgcgggtaaacaacttgaggatggtcgcacccttgccgattacaacatccaaaaggaatcaaccctccatctcgtgcttcgcctcaggggtggcatgcaaatctttgtcaagactttgaccgggaagaccatcacccttgaggtggaatcctcggacaccattga

SEQ ID NO: 13035 - DNA, 220 bp, Glycine max
  Clone ID: LIB3040-051-Q1-E1-C10
aagaagatgtcgggtatgggagatgggtacgtgggcaccgcccaagacgcggtgaggattcgacggttggagaagcagagagaagcggagcgtcgcaaaatccaagagctgaaaaccaagtctgcctccgccaaggaccaacccggtcatctccaattcggttccagcacctccgagattctagagactgcctttaacaatgaaactgtgggtttggtca

SEQ ID NO: 13036 - DNA, 359 bp, Glycine max
  Clone ID: LIB3040-051-Q1-E1-C11
atagcgaaacagagagtggtttcagtgagtgatcggtgttcacttgatccttcataagtcgtcatcatcatcatcatcatcaccgttgattgaagaagatgccgatcagaaacatcgccatcggaaggcctgaagaggctactcaccccgacacgttgaaggcggggttggctgagttcatctccaccttgatcttcgtgttcgccggttcaggttccggcatcgcctacaacaagctcaccgacaacggcgccgccactcccgccggcctcatctccgcttccatcgcccatgctttcgccctcttcgtcgccgtctccgtcggcgccaacatctccggcggccacgtcaaccccgcc

SEQ ID NO: 13037 - DNA, 216 bp, Glycine max
  Clone ID: LIB3040-051-Q1-E1-C12
aattcgcggtctgacccacgcatacatacggccctagaagaggagagaaaggggaaggagagggaatgcaagacattgagtagtttcagtaagtgattggtgttcaattgatccttcataagtcatcatcagcagcagcatcatcaccgtagattgagaaatatgccgcttacacacatcgctatcgcgaaagcctgaagaggcgactcatcacca

SEQ ID NO: 13038 - DNA, 365 bp, Glycine max
  Clone ID: LIB3040-051-Q1-E1-C2
gattcattcacaaatcttagttactttatcagtatcattcattgtcactacgattgttctaaaagcaattagtactcttgagaagaattaagatatcatcatcacaataacaagatgagttcaggaattagagcatggagtgtggcagctagtgttggagttgtggaggccttgaaagaccaaggcatatgcaggtggaatcatgctttaagatcagctcaacaccatctcaaaggccatgttggctcattctctcaggctaacaagctttcttctactgctatgatctccacagcactaagagatgagaaggcaaagcagtcagaggagtccttcagaactgtcatgttgttaagctgctgggg

SEQ ID NO: 13039 - DNA, 154 bp, Glycine max
  Clone ID: LIB3040-051-Q1-E1-C4
ggagcaaaagcctaatccctatttttcttcctcagtagtgtcatttacgcttctcttctctgcagcagctatgcgtaaacctaaagtcttcttcgacatgaccatcagcagtcaatctgctggccgcatcgtgatggagctctacgccgacgtc

SEQ ID NO: 13040 - DNA, 272 bp, Glycine max
  Clone ID: LIB3040-051-Q1-E1-C5
gtgagggacatgcgtcaaactgtggctgtcggagtcatcaagagtgttgagaagaaagaccccaccggagccaaggtcaccaaggccgctgccaagaagaagtgattgcatttgggcaattttgctagcacatgtgatcatcatcgtggtgacgcctttatagtagttttatccgtgcagagtcgtaggtgttttgtcgaagttagagttgtgagtgtcggccgagggcatgtagccgtaactttcagaactaggttcgtgatcggcggtgg

SEQ ID NO: 13041 - DNA, 92 bp, Glycine max
  Clone ID: LIB3040-051-Q1-E1-C6
atagcttctattaaccctctagggcagccagtttatgtttgtctataatatacacagtttatcataagaagtattattcctgctatgtcaag

SEQ ID NO: 13042 - DNA, 104 bp, Glycine max
  Clone ID: LIB3040-051-Q1-E1-C7
accacgcgtccgtccagacgtcagggtacaacacaacgaaaaaacgcaatgaggactctaggcgtatccaatttaggtatgagggcgagctcgacgattcagca

SEQ ID NO: 13043 - DNA, 233 bp, Glycine max
  Clone ID: LIB3040-051-Q1-E1-C8
gacaggtgtttgcaatactagcgatagctgataagagagataccaacaagaagagaaaagaagaagagttgagattccctttgaagaaaagatggcatcccataggcaaagctatgaagctggtcaaactaagggccgaactgaggaaaacacgaaccagacgatgggcaagattggagagaaggctcaggctgcagacgagaagacccaggaaatggcccaagctgcaaagg

SEQ ID NO: 13044 - DNA, 363 bp, Glycine max
  Clone ID: LIB3040-051-Q1-E1-C9
gaggggcttaatatctcccctcacttgtgcctagccttatgtcatagtattatcattcattctcagctttctctcttctctctccacccaaaccctaactcccgaccctgttcccctctcgtatccgtcatgaaaggaggaaagtccaagaccgaatctaagagagccgatcccaaacttgctgtgaataagaagggagccgccaccaaggctaggaaacccgccggcaaggggaaggcagcgaaagaccctaacaagccaaagaggcctccaagtgctttcttcgttttcatggatgagttcaggaaggtattcaacatagaacatcctgaaaacaaagcagtgtctgctgtgggcaaagct

SEQ ID NO: 13045 - DNA, 55 bp, Glycine max
  Clone ID: LIB3040-051-Q1-E1-D1
gaagccagagaaagagaaggaaccagcaacaaagagcagagagaaagagaggacc

SEQ ID NO: 13046 - DNA, 365 bp, Glycine max
  Clone ID: LIB3040-051-Q1-E1-D10
ggagagctttaccaacttcaaaacttggagcttttcatttcattgatggcgttctctctcttcatccccagccaacccttccctttggtgccaacccttcttcttctcgttctcctccacgcttctctcttggaaccctctcacggcgctagaatttccaaggatgcttcaactcggcacctgtttgagtcgaggaacactaagcaccccaacaagtgtggagagttggtggcgctgtctcagtgctcgcagaactcaaagtgcagctggtgcaccagtgaggtccttgatgacatgtgtttcaccaaatctgaggcgtggaggttgccacaacaggtttactcttgcagcttgattcggtgaga

SEQ ID NO: 13047 - DNA, 374 bp, Glycine max
  Clone ID: LIB3040-051-Q1-E1-D11
gacagaaaacgcagttctcaccatttccctctcgattgtgagacttgttgttgttaactgaacttttctgagcaagaatgtctgggcgtggaaagggaggcaagggtttgggaaagggaggagcgaaacgacaccgtaaggtgctgcgcgataacattcagggaaccaccaagcccgcgattcggcgtttggctcgtaggggtggcgtgaagcgtatcagtggtctcatctacgaagagacacgtggcgtgctcaagatctttttggagaacgtgattcgtgaccccgttacctacactgagcatactaggagaaacaccgttaccgcaatggacgtggtttatgcccccaagagacatggaaggaccctctac

SEQ ID NO: 13048 - DNA, 315 bp, Glycine max
  Clone ID: LIB3040-051-Q1-E1-D12
gaaacaaaagcagatcatagttgttgcgattaacaagatgaagagagtggagtttatggggctgaggctgtgattggtggtgatgatgggatgttgtgggtctgcgagctgctgccgatgacttggcagccaagtgttcggcggtgattcagaatgtaataccgtgtctgaacttcgcgactgggaatgaacacatgcccaaaaaggaatgttgcgacgccgccactgtcataaaggagatcaacccatagtgcttgtgctacatcattcaagacacccacaagggtagcccacaggtcagaagcttgggcattc

SEQ ID NO: 13049 - DNA, 132 bp, Glycine max
  Clone ID: LIB3040-051-Q1-E1-D3
ggtagcgcacagaaagaactagaactagggtttcatcgttgggagcagtaaacgacaatgatttacgacgttaactctccgcttttccgatccttcctcagccagaagggaagctcctctgataagaggaag

SEQ ID NO: 13050 - DNA, 127 bp, Glycine max
  Clone ID: LIB3040-051-Q1-E1-D4
gacagcactgcactcttcgcaacacagcacgaggggagaacccagagagcacgtcttaataaagactcttctcgtgaagagcccatttcttttcttcgttcttcgtcgcggtcgcgtcttcgatctt

SEQ ID NO: 13051 - DNA, 279 bp, Glycine max
  Clone ID: LIB3040-051-Q1-E1-D5
ggaaactcaactcctgaaaggcaagagtgagagagaaatggagaatgcggaggagatgatgcagcacaacgacgaggttttgtcggttgaacttccagctccttccggttggaataaactgtttttccctaagaaactgggaacaccaggaaaaagtgagattgtattcattgcgccaactggagaggagatcagtacgagtggacaagtggggcagtacctgggggcacagcgtggcaagcctgtcagttcagagtttgactggggaactggtgagac

SEQ ID NO: 13052 - DNA, 133 bp, Glycine max
  Clone ID: LIB3040-051-Q1-E1-D6
ggtatccaatactcaccgtttctcagatgttttatttgcaacactgagagcacgagcagttgcgtagtgggttgttcgtcgccgctgcgacagagtgccctagcgacctctcgagcttgccacctacgcgact

SEQ ID NO: 13053 - DNA, 142 bp, Glycine max
  Clone ID: LIB3040-051-Q1-E1-D7
gttcactttcttccaacctctaacctagctcgttttcttctcgctcatgagcttcaccttcgtcctcctcgatcatgtctcacttcaggggcaagtaccatgaggagcttatcgccaatgctgcgtacattggcactcctgg

SEQ ID NO: 13054 - DNA, 364 bp, Glycine max
  Clone ID: LIB3040-051-Q1-E1-D9
gtccgccatttttcgtagctgctgttcttgcgcgtgaacaagcctcaggtaagccaaaaccatggttaagcataacaatgttatcccaaacggacacttccgtaagcactggcagaactatgtgaagacttggttcaatcagccagcacggaagacaaggagacgattggctcgtcagaagaaagctgtgaagatattccccagacctacggctggacctctcaggcccattgtacatggtcaaactttgaaatacaacatgaaagtgagaggtggaaggggattttctcttgaagaactcaaggcatcagggattcccaaaaagcttgcaccaaccataagtattgctgttgatcatcgtcgc

SEQ ID NO: 13055 - DNA, 141 bp, Glycine max
  Clone ID: LIB3040-051-Q1-E1-E1
gagtacagaataggcagttctcaccatttcccgctcgggaagttccaggtactacgaactttgccatggtttcgtcagcttactcttaatcctctttggtttactttaagtggtgtgtgtttgaacttacggtgcacattg

SEQ ID NO: 13056 - DNA, 269 bp, Glycine max
  Clone ID: LIB3040-051-Q1-E1-E10
gaacttggcttgttccaattccattcactcgttcattcccaggttgtgatggcagcagcaccagcagctaccttcgctattggaaccaccggttccctcggccaaagaggaagctcgcttcctcaatcaaagtcctttgggttgaaatttaactctcctaatcacttgaagagcttctgtggcctcaagggcatgtcatccgtgagatgtgaatcggaatccaccttcctccgtaacaaaaccgggtgctgctccacgggagctctttt

SEQ ID NO: 13057 - DNA, 129 bp, Glycine max
  Clone ID: LIB3040-051-Q1-E1-E2
cgggaatcttggtgctgttgcagttcctagattccgagggagcgtgtaccgtgtaattcgcggagtttcattctgaacggagcacggaggatttcagcatcggagaccgaatcgttcgggtgaggggag

SEQ ID NO: 13058 - DNA, 122 bp, Glycine max
  Clone ID: LIB3040-051-Q1-E1-E5
ggtgcataagaggaacaggaaacataggattggagggtcaccacgtttagcaacaagtaatcgctctcgactctttcgtcttcacttcacgagggttttagcttcttcctcttcacttcgtt

SEQ ID NO: 13059 - DNA, 268 bp, Glycine max
  Clone ID: LIB3040-051-Q1-E1-E6
gaggtaagcacaaccaaagcaacaccccaaatggcttcagcttctgttcccatggcgttgtcactgagctctgttaccaacaacaacaagccttcatccgaaggcttcttcaggccactacccctacgccaaccaaagaggaccctcttcagcacgaagggagtgtcaaagtccagggctcaagtcaatgcatcgttgagggagaaggcggttgccggaggcagagcaggtgctgtgagagcatcgagggtgaatccggaggtggctc

SEQ ID NO: 13060 - DNA, 169 bp, Glycine max
  Clone ID: LIB3040-051-Q1-E1-E7
gatccccatttcgcgttggtgcaaagcatccttcgtttcaatttctctctctcagcgctttctgcaatcgaacctttcagctccaaggggatccacaggccgaaggagaaatggggctgacattcacagaacttttcagtcggcttttcgcgaggaaggaagtgcgagt

SEQ ID NO: 13061 - DNA, 377 bp, Glycine max
  Clone ID: LIB3040-051-Q1-E1-E9
taatttgggaattattgctcccatcgccattggtttcattgtcggcgctaacattttgttgggtggggccttctctggagcggccatgaaccccgctgtgacatttgggcctgctgtcgtgagctggacctggaccaaccactggatctactgggccgggcctctcatcggtggtggaatcgctggccttgtttacgaggttgtctttatcagccacacccacgagcagcttcccaccactgactactagagggggggaaatgaagataaagaaataaaaaattgtgtattattgaatttctctggaatcttcttctgtgtatggttttccttccttgtgttttcttcctaattcactttcgaaggttgtacttgtt

SEQ ID NO: 13062 - DNA, 364 bp, Glycine max
  Clone ID: LIB3040-051-Q1-E1-F10
gatcttcagtgtgtttttcctaacaggatcatttcgttccaagctgaggaggcacaaacaccataacatatgacatggaagctgcaaatggaaccgtcaaaggtgtggctaacatcatcagagacaacaacattaaaagctctcttcagtgtcgtcagcaccccaatgggaccacccatgtgacagggatagtgacagggttgtcccaaggatttcatgggttccatagtcatgcttttggtgacaccagcactggctgcaacgccactggtccacacttcaatccgttcaagaatgatcatggagctcaatgatatgataagcaccatgctggtgacattgggcaacattgctgcaagccctg

SEQ ID NO: 13063 - DNA, 348 bp, Glycine max
  Clone ID: LIB3040-051-Q1-E1-F11
ggaattaggtttttagggtttacaccgagcagccacacctcccgcagcagccatggttctcaaaactgaactatgccgattcagtggtgccaagatctacccaggaaagggcatcagatttgttcgtggtgattctcaggttttcctgtttgcaaactcaaaatgtaagaggtatttccacaatcgcctgaagccttcaaagctcacctggactgcaatgtacagaaagcaacacaaaaaggacattgctcaagaagctgtgaggaagaggagacgtgctgccaaaaagccttactccaggtccattgttggtgcgaccttgggagtaatccaaataaagagagctga

SEQ ID NO: 13064 - DNA, 373 bp, Glycine max
  Clone ID: LIB3040-051-Q1-E1-F12
ggtcttgcaggcgaagagatggccaccgttccagggcagctcgtgtgggagatcgtcaagaaaaacaattccttcttggtcaagcagtttggaaggggcacccagagcgtcgaattcagcagagagagcaacaatctctacaacctcaattcgttcaagtactctggtttggcaaacaagaaaactgttactgttcagcctgagggcaaagatcaggctgtgttgttggctacaaccaagacaaagaagcaaaacaagcccgctgcattgctccacaaatctgtgatgaagaaggagttcaggaggatggcaaaagctgttgaaaaccaggtggccaaaaattactacaggcctgatctcaagaaggctgccc

SEQ ID NO: 13065 - DNA, 140 bp, Glycine max
  Clone ID: LIB3040-051-Q1-E1-F7
aagaactctaagattttgaagaatgcgcaacctttcattgattggcttcagagtgcagaatcagaaagcgacgaagaataatttttcctacattctccgttacttaggtttacttgattgtgtcatgttcgttatttcca

SEQ ID NO: 13066 - DNA, 345 bp, Glycine max
  Clone ID: LIB3040-051-Q1-E1-F9
gccacaccgcaaactctctctgtaaagtgcaaagcctctattttttcttgtgaatttgaaggacgatgagttccacagaggtcgcagccacaacgaagaagggtggaagagggaaacccaagaccacaaagtccgtttcccgttcctccaaagccggccttcagttccccgtcggccgcgtcgctcgctacctcaaggccggtcgctatgcccagcgcgttggttccggttcccctgtttacctatctgcggttctcgaataccttgccgctgaggttttggagcttgccggcaacgctgcgaaggacaacaagaagacgaggatcgttcctaagcacattcaac

SEQ ID NO: 13067 - DNA, 342 bp, Glycine max
  Clone ID: LIB3040-051-Q1-E1-G10
ggtttctcttcttttctcactcagtgtcacttcttcaccgccatgaatgctatagccactgcttctgctctctctcttccgatttttcttagagctgggaagcttgacaccaaaagggatttgaaaggtagatttagagtgtttgctgtatttggagaagaagagaagaaaaatgcatggggtgcgctttttgatgttgaggatccgagatctaagtttccacagaataaagggaaggttttggatatatctcaagcactagaagtggcaagacatgatattcagtacttagattggcgagctcggcaagatgtgctaacaatcatgcacctccatgaaaag

SEQ ID NO: 13068 - DNA, 354 bp, Glycine max
  Clone ID: LIB3040-051-Q1-E1-G11
gggaagcagaaagagaagcattagcaaaagcaagaagaactagtctaagcagaaatggcctcttcagtgatggcatctgtggccctcaaacctgcccctttcactgttgagaagtcctcagttagaggccttccctccctctcaaggaactcctcttcattcagagttgtggccagtggtggcaagaagatcaagactgacaagccttatggaattaatggtggcatggctttgagggaaggagttgatgcatctggcaggaagggaaagggaaagggcgtttaccagtttgtagacaaatacggtgctaatgtcgatggttacagtcctatctacgacaccaaggactggtct

SEQ ID NO: 13069 - DNA, 365 bp, Glycine max
  Clone ID: LIB3040-051-Q1-E1-G12
gatataccgttgcatacttgcatagtagtaatggcgctctttgttttgtctctcttattcttcgtcattcttaatggggagttccgagagtcagcttcaagtacgtttctactccaacacatgtcctcacgttgactctattaaccgtgccgttgttagagactccgttctctctgaccacaatatggcggctgtcttactcatacttcattttcacgactgctttgctcacggatgtgatggttcaattctgattgagaatggtgcacaatcggatagacatgcatttggacatcacggggttatagggtttgaagtgatacaaagagcagaggcacaattgggaggctcttacctcggcctgg

SEQ ID NO: 13070 - DNA, 277 bp, Glycine max
  Clone ID: LIB3040-051-Q1-E1-G2
ggttttgcactgccattgaaggaagagcacaaactgtttcttgttcgtatactgattccgttgcacaagccaaagtgcttagcagtgtagcatcaacagttatcttagtgcattacccaatttgtagagaaagactgcaagcttgctgatacaattagtaggggattgttgaagtagtggcctataacaaatagtccaaaggacgttatgtgccgtgggtgagttgggagaagtcgtggaaggaacgcaggggcgatgggttcagcgttgtatggtg

SEQ ID NO: 13071 - DNA, 129 bp, Glycine max
  Clone ID: LIB3040-051-Q1-E1-G3
gctaggcagtcgtaacgtttgcttaagatgagaaagagcaccacttggtcagtctcttaaacgtccgaagagtgcggcgatcgagtccggtcctaggacgcgggagagggcttagcagcagggcgaaca

SEQ ID NO: 13072 - DNA, 139 bp, Glycine max
  Clone ID: LIB3040-051-Q1-E1-G6
cactggaggaggaggctgaagctgatgctgagggcagcataatggaggatgttgattagacttttatatcatgcggaacggaattgggtatgttttttccctttttttcctttccgattgctctgacagtgtttaatgg

SEQ ID NO: 13073 - DNA, 281 bp, Glycine max
  Clone ID: LIB3040-051-Q1-E1-G7
gagagagagagagagttggaagaagaagaagggaagatgaacttgagatggatgcaagcggtgctgccgctgggaatcatagcgggaatgctctgcgtcatgggaaacgctcagtattacattcacaaatccgcgcatggcagacctaagcagatcgggaacgagatgtgggacgtggccatggaacgacgggacaggaggcgtgtcaaggaagcctctgcggcgaatgaacatcgttggtttgccaatgacattgtgaagaaaatagactgcgcagctgg

SEQ ID NO: 13074 - DNA, 294 bp, Glycine max
  unsure (1)..(294): unsure at all n locations
  Clone ID: LIB3040-051-Q1-E1-G9
gaccgtgcgctagttctgagtattctgatcgctccctgagagagctcgtcgcggcggttgcagaagaagattgcaagatgaagttcaacatcgcgaatcccaccactggatgccagaagaagctcgagatcgacgacgatctgaaactgcgagcattttgggacaagaggatctcacaggaggtcatcggagatgcactcggtgaggaatttaagggctatgtcttcaaaattaccggaggttgtgacanacaaggatttccaatgaagcagggagtgctgaatcctggtcgtg

SEQ ID NO: 13075 - DNA, 360 bp, Glycine max
  Clone ID: LIB3040-051-Q1-E1-H1
gattcaccacaaccctctctctatattccattgccacccagttttgaatatatttttattccttctttgtttcttcactttcttccatacacataaccatgtcttctcagactgttgtcctcaaagttggtatgtcatgtcaagggtgtgctggagcagtgaacagggttttgggaaaaatggaaggtgttgagttatttgacattgatctgaaggagcagaacgtgacagtgaaaggaaatgtggagccacatgaagttctgcaagccgtttccaaatctgggaagaagactgcattctgggtggatgaagcagcacgatctaagagcaagcgtttagaaagtgcagctgttgcctcag

SEQ ID NO: 13076 - DNA, 360 bp, Glycine max
  Clone ID: LIB3040-051-Q1-E1-H10
gacccccaaaccctgctgcataggaagaaaccctagcctctcaccctccctgcgacacgatgcagatcttcgtgaaaaccctaacgggtaagacgatcacccttgaggtggagtcttctgacaccatcgacaacgtgaaggccaagatccaggacaaggaaggcatccctccggaccagcagcgcctcatcttcgccggaaagcagctggaggacggccgcaccctcgccgactacaacatccagaaggagtccaccctccacctcgtcctccgtctccgcggtggcgccaagaagcgcaagaagaagacctacaccaagcccaagaagatcaaacacaagcacaagaaggtcaagctcg

SEQ ID NO: 13077 - DNA, 349 bp, Glycine max
  Clone ID: LIB3040-051-Q1-E1-H12
gaattcacttgcggctgcagtagagaagcactcttcgttcttcgactgtctacgatctgctttctctgaattgtgaaaatgtcgctcggagaaactgcttgttcatacgcagctctcatccttcatgaagatggaattagtgtaactgctgacaagatcagcaccttgttgaaaactgcaaaggttccagtagactcttattggccaaccttgtttgctaaacttgctgagaagaaaaatcttggcaatttgatagcaaatgcggcaggcggtggtgcaccagttgctgttgcagctgccccagttgctgctgctgctggtggtgctgctgccgcagctccagctgctg

SEQ ID NO: 13078 - DNA, 138 bp, Glycine max
  Clone ID: LIB3040-051-Q1-E1-H2
tgggaagactgtctctagcatcagaagatcatctatgagatatcagaaaactcactgcagatatacactcgagacttaactaagatgtagttgtgcagtatctttcgctctcacattaccaagtttaagctcgtaagc

SEQ ID NO: 13079 - DNA, 245 bp, Glycine max
  Clone ID: LIB3040-051-Q1-E1-H3
gcttgcgcccaatttccatggaactgtaaagagaggatagttagaagattaaatcttaaagcagtaagtcatcatggataaatcagagcagactcaacagcagcagcagcaacaacagcatgtgatgggagttgccgcaggggctaaccaaatggcctattcgtctcactaagcgactgcttccatggtggcttctggcacgcccgctgtaactgctccttcaccaactcaggctccagctgcct

SEQ ID NO: 13080 - DNA, 151 bp, Glycine max
  Clone ID: LIB3040-051-Q1-E1-H4
ggggacgaggaagagagagagagatagattgttgtattttttggaaatgagagatagagagagagagagagagagagagaagacagtggtggcgaggcgacgcgagactcggaacgagtcattattcggtcgtggggttctggcggttttc

SEQ ID NO: 13081 - DNA, 354 bp, Glycine max
  unsure (1)..(354): unsure at all n locations
  Clone ID: LIB3040-051-Q1-E1-H7
ggttgacctccttgcttctctcatgttacaatcctcttgccgctgagctccctttctcctcggtccacagagacaagatgtaagacaggtgccaacagttcatcacgaaagaaaggactagctgagccgagatcactaactaaaacgaatttaatactaatcgaaaatactaatagaatagaaatagaactgtcgtttcatatagatatcccgtcaacacaacatangtcatcgaaaggatctcgaagacccagcaacgcacgaaagccgggatctttcagaaaatggattcctagtcgaagggtgcataaccgcatggataagctcacactaacccgtcaatttgggatccaa

SEQ ID NO: 13082 - DNA, 323 bp, Glycine max
  Clone ID: LIB3040-051-Q1-E1-H8
gaaaacgagaattagggtttgtagtgcagcaggaagaagcaataatggcgccgaagataacacgtaaggttagcagaaaccccgaattgataaggggaatcggaaagtactcgaggtctcaaatgtaccacaagaggggcatttgggctatcaaggccaaaaacagtggcgttttagctcgccacagccctaaacccaaacctgaaactcccgctgaaaaacgagccagattttacgctgctgacgatgtcaagaaaccccttgtcaacaagcacaaacccgaacgcgcgaagctcaaggcgagcattagtccgcgggacagt

SEQ ID NO: 13083 - DNA, 253 bp, Glycine max
  Clone ID: LIB3040-051-Q1-E1-H9
ggacccttttttggcagacttacttgtttgtggtccgaaactgctgattgcaactgttcagtggtcacaggaagcaccaggctccaaagccagcacttaagacctttccttctcttccgtctctcttctttacccttctgtttttattaacaatgcaatatcgaggagagataaagaacacaagtttaattaggattgacattcaagaatcattttcttttatgccaagaaggaattagatgccgataagtgg

SEQ ID NO: 13084 - DNA, 384 bp, Glycine max
  Clone ID: LIB3040-052-Q1-E1-A10
gatcatttgtaagagaagggaaaagcgggaaaagagaaaaaacagagggttttgtttctcttttgcagttgcactcttgcgttgcaggcaggggcatctgtttcccgttctgctccgagcgatcaagtgagtgagtgagtgagtgtcatatatatatacatagtgcgttcgagaaatgcagcagcacctgatgcagatgcagcccatgatggctgcctactaccccaacaacgtcaccactgatcacattcaacagtacctggatgagaacaagtccttgattctgaagattgttgaaagccagaattctggcaagctgagcgagtgtgccgagaaccaatcaaggctgcagagaaatctcatgtacctagctgcaatagctga

SEQ ID NO: 13085 - DNA, 391 bp, Glycine max
  unsure (1)..(391): unsure at all n locations
  Clone ID: LIB3040-052-Q1-E1-A11
gagcgccaatgtttttttcagaggagtttcatcttgtaatcaaaagagtttatcttatagtaagaaatcgatgtcttactccattttaaggaacaaaacaagagaacaatagcctgacaaagggtttagccataaaatcgaatccatcattgatttgagatattgataaggtgaatactcatttctcgtcaatgctaggcataatgcgggtatagggacctaaaaaagattatcttttcttcctatcttatgaactttaaggtgtatgaagtgtcatttcctatcttagattttaattttagtacgtagataaagagtccatttaacttaagttgatctangccagaagcagacctacgtcaagataatccttctttgaaacactttggta

SEQ ID NO: 13086 - DNA, 393 bp, Glycine max
  Clone ID: LIB3040-052-Q1-E1-A2
aacagaactactatttagaagtgtttgtacatcttagtaggttgagtattcagcagtttatactcggaactttttcaaataaatgttttcatttacgttcttgaatgtagtatactttttacgttttgaagataacggagttttttttaagtgtttttgtgaagtaattttgttttgacattcattgtattaccacaatttgttgtttttgatttcaacagccgagccttttacttccacaagatcgggatttcatggccagaaccactattcatcatgattcgttccagacaacatactgaatgcttttttgtacataatttccgtcagatagctcgtaggaattggcacaatacaggaatctaatttacctcctacattccaagttgtacg

SEQ ID NO: 13087 - DNA, 372 bp, Glycine max
  Clone ID: LIB3040-052-Q1-E1-A3
gacgccaaaaccactgtatcagtgtgtccttccattccaggtttttccaccacactagaaagtaactttaaggttactatgatcttttttcaacatgattcatcacattttcaagcacacactgcattaagaagcgagaaatcataactcatacatatatatggtcacttataaataattcttatagcaaaacggatggcatggaaagcgtagggaaggatgtgcctgtaattgtctttgtctaagtagagtctgtaattgtctttttgagaaaacaacagctaacgtaattacatagagccatatttcatctacaaaatagcctgaaatctcatctgccactagttcgtgaagaacacacttgagctaact

SEQ ID NO: 13088 - DNA, 378 bp, Glycine max
  Clone ID: LIB3040-052-Q1-E1-A5
gataccatagaagaagcacaaagagaagcattagcactaggagcagcaacaactagtctcagctgaaatggcctcttcagtgatggtatctgtggccctcaaacctgcccctttcactgttgagaagtcctcagtgagaggccttccctctctctcaaggaactcttcttcattcagagttgtggccagtggcaagaagatcaagactgacaaaccttatggaattaatggtggcatggctttgagggatggaactgatgcatctggcacgaaaggaaagggaaagggtgtttaccagtttgtacacaaatacggtgctaatgtcgatggttacagtcctatctacgacaccaaggactggtccccaaccggtgatgt

SEQ ID NO: 13089 - DNA, 393 bp, Glycine max
  Clone ID: LIB3040-052-Q1-E1-A6
ggagcgtgtctctccgcagcagccttcttcgccgtttcagctcaagagccaccagcaggtaagatatggttaagcataacaacgctatccccaatgggcacttcaggaaacactggcaaaactatgtgaagacttggtttaatcaaccagcacggaagaccagaaggcgtttagctcggcagaagaaggctgtcaagattttcccaaggcctactgctggacctctcaggccaattgttcatggccagactctgaaatacaacatgaaagtcagatctgggagaggattttctctcgaagagttgaaggctgtgggaattcccaagaaacttggtccaactattgggatttctgttgatcaccggagaaagaatcgttctttggagagtctgc

SEQ ID NO: 13090 - DNA, 379 bp, Glycine max
  Clone ID: LIB3040-052-Q1-E1-A7
gactccgcagctgcagagctcaaaaccctagagaggaggaagagagagcgtgcaagttccggccaccaccgaccatgacattcaagcgcaggaatggaggtcgcaacaaacacggccgcggccacgtcaaattcatccggtgctccaactgtggcaaatgctgtcccaaggacaaggccatcaagaggtttctggtgaggaacattgttgaacaggctgcagtcagagatgtgcaggaagcttgtgtctatgaacaatatactcttccgaaactctatgtgaagatgcagtactgtgtttcttgtgctatccactctcatgttgtgagggttcgattccgcactgacaggaggaaacgttagcctccacagagattcat

SEQ ID NO: 13091 - DNA, 109 bp, Glycine max
  Clone ID: LIB3040-052-Q1-E1-B1
atatttctgccatataatattttattgcatataatacgtagtgaacaaataaaaagagagggggttggggaatttgattaaacaaattgaatttcttcaattaacttgt

SEQ ID NO: 13092 - DNA, 258 bp, Glycine max
  Clone ID: LIB3040-052-Q1-E1-B10
catgctaagagggttaccattatgcccaaggatatccagcttgcacgcaggatcagaggcgagagggcttagaaacaaggttgagaggtttgggtgttaggtgcttagggttagggttctggtcttgaaggatgtgtttgggagtttggttgtaggaatcctctccatctgtgtgtttatgtggaatgtgaaatgtgaatctctttgcttttgtaattatattgtgttactatgaggagttaatgaaaatgctatggc

SEQ ID NO: 13093 - DNA, 115 bp, Glycine max
  Clone ID: LIB3040-052-Q1-E1-B12
ggttctagtgtgtgattgtttgttgttgtaactcgttcttcttcttttgttgttctgtgtttgtgtttgttttttctctcaactgaaaatgtcttgctgcggtggtaactgtggt

SEQ ID NO: 13094 - DNA, 388 bp, Glycine max
  Clone ID: LIB3040-052-Q1-E1-B3
gatacctaaaaattgtaccgatatggcttcacttgtgtgtctccttttttccttgcatttcatggttatcatgtcaggttccttaccagcaaatagtgaagtgtttacaaaagagtctcctatgtctctatccacaaaacccgtggaaagactcacccaactccacttttatttccataacaacaaaatgggggaacacccgactgctatgaaaattgttgagcctcctaaggcgtccatttctggttttgggactatttacatgatggatgaccctctaaccgaaggaccaagtccaacttcaaagcttgttggaagatgtcagggaatatatgctgaggcttcgcaacatgaacctgcgatactcatggtaacgaatttgttcttc

SEQ ID NO: 13095 - DNA, 379 bp, Glycine max
  Clone ID: LIB3040-052-Q1-E1-B6
taatttgggaattattgctcccatcgccattggtttcattgtcggcgctaacattttgttgggtggggccttctctggaacggccatgaaccccgctgtgacatttgggcctgctgtcgtgagctggacctggaccaaccactggatctactgggccgggcctctcatcggtggtggaatcgctggccttgtttacgaagttgtctttatcagccacacccacgagcagcttcccaccactgactactagagggggggaaatgaaaataaaaaaaaaaaaattgtgtattattgaatttctctggaatcttcttctgtgtatggttttccttccttgtgttttcttcctaattcactttcgagggttgtacttgttcct

SEQ ID NO: 13096 - DNA, 393 bp, Glycine max
  Clone ID: LIB3040-052-Q1-E1-B7
gaaaagcggcgtttgctaattgcttcgaccgagtgattcagaggaggagaagtaatggctgcgatcgcgggagcgcacgtgtttggtgttgtgagttttcagctcaagcaagctgaaatgccctttgcatgttccagcttaatccgcaagcatattggagattctcctcagcgcaatgtggctctaagacgcagagcaaatggaacaattcttccccaaatcagagcccagaacgttcttccagactatgttccaaaatcggagttttataaagtagaagccattctcaggccctggcgagtccctcaggtttcttcggctatgttgaaaatgggaattcgcggtgtcactgtatctgatgtcaagggccttggttctcaaggtggttcaaaa

SEQ ID NO: 13097 - DNA, 373 bp, Glycine max
  Clone ID: LIB3040-052-Q1-E1-B8
gaggggttcaatgtataacgctgctgccgagccccttcgcgatcactaaggtaagtgagtcatctgtggtcgacaacggtcgccaccgccatggctatgaatgacgaggtggttaccagacagtacagcattatccgccactcacgcctccatggctgcacatttatgagtaaagctcctaacgctagtactgagatcaggaagtttgcccagtacgccatggggaccaatgatgtgatggtggatgtgcaacttgatcaactttgtctggagccaatgaatcaggactgttccaatgacgactaaggtaagaattgctcgcaggacgaatgacgatgaacatgcccatgaacagctatacactcatgtcacc

SEQ ID NO: 13098 - DNA, 276 bp, Glycine max
  Clone ID: LIB3040-052-Q1-E1-C1
ggcgcattgaacgaagcttagggtttgtagtgtagcatgaataagcagcaatggccccgaatataagaccttaggtgagcaaaaaccctgaactgatcctgggaatcggacagtactccaagtcgcatatgtactacaataggggcatttgggctatcaaggccaaatacggtggcgttttatcgcggctcgacgctaaactcaagcccgatgcgactgctgaagaaccaatcaaattttaccctgctgatgacatcaaaaaacctcctgtcaaca

SEQ ID NO: 13099 - DNA, 375 bp, Glycine max
  Clone ID: LIB3040-052-Q1-E1-C11
ggagcgaagaagatattagggtttttgagtgcggtgcggcgatcctagcactctcttctgcagctttcgccgacagcttcattcaccatggctgagcaaaccgagaaggcttttttgaaacaaccaaaagtgtttctcagctcgaagaaaactgggaagggaaagagacccggaaagggtgggaaccgcttttggaaatccattgggcttggatttaagactcccagggaagccatcgaaggaacctacattgacaagaaatgccccttcactggcaatgtttccatccgtggccgtatcttggctggaacatgtcacagtgctaagatgaacaggactattattgttacgaggaattatctccattttatcaag

SEQ ID NO: 13100 - DNA, 395 bp, Glycine max
  Clone ID: LIB3040-052-Q1-E1-C3
ggattcggcaaagttgatttcaattcaatttgatttccccctttttcttctccacgtttgtgcctgcaacctcaaataccgattagggttcatgctacactgaacttggtttcggtgttccaagttagttagaggcattgttgcttgcatagatctctgatctgaaaatgagtgcgtcgaggttcactaagtgcgtcaccgtcggcgacggtgctgtcggcaaaacctgcttgttgatttcctacaccagcaacacttttcccacagactatgtgcccaccgtttttgacaatttcagtgctaatgtggtggtggatggaagcaccgtaaacctacgattgtgggatacagctggtcacgaggattacaatagattaagacccttgagctatcga

SEQ ID NO: 13101 - DNA, 383 bp, Glycine max
  Clone ID: LIB3040-052-Q1-E1-C4
ggcgtacgcagcttcatccctaacgcgtgcatagcagagtcagagacagagacgcagccatggggcggagacctgcgaggtgttataggcaaattaagaacaagccataccccaagtcacgtttctgccgtggtgttcctgatcccaagatcaggatttatgatgttggtatgaagaagaacggtgttgatgagtttcctttctgtgtccatctggttagttgggagaaggaaaatgtttcaagtgaggccctggaagctgctcgcattgcttgcaacaagtacatggccaaatttgctggaaaggatgctttccacttgagagtcagggtgcacccattccatgttcttatgatcaacaagatgctttcgtgtgctggtgct

SEQ ID NO: 13102 - DNA, 317 bp, Glycine max
  Clone ID: LIB3040-052-Q1-E1-C5
gagaaaagaagagaaagcgagaaaggaacagaagagaaaagcaaagggctttgagttgttccaatggaagaagcgaaaccagcgatgggtcctcctcctcctcttgctcctctcactacgaagaataggccactggaagactccaatgcccactccaattacttcaagattcgcgctgttattcgagaccttcgtcctcactttctcgaggttctccgaactccagactacgcaaattgcaaggcatcccatgacattcacgaacagctgaagattgtggtcaagttatacgagaatatgaaagcagatgcggcttc

SEQ ID NO: 13103 - DNA, 382 bp, Glycine max
  Clone ID: LIB3040-052-Q1-E1-C7
gattcccacattgtactaccctgttagttagtcaagtagcttcactcactctttctatttccagaatgccaaatccaaatccaaagcaccttttccacgccactctcttcctctcgatacttctccaggcgctgtctaaatccacgattgagccatgctcgaactccgactcatgcaacgcgcttctgggatacaccctctacacggacctcaaagtctccgaagtggcgtcgctcttccaaatcgaccccatcgcgcttctcaccgcgaacgccatcgacatctcttaccccgacgtggagcaccacattcttccctcgaagctcttcctcaaagtccccatctcctgctcctgcgtcgacggcattcgcaaatccgtcgc

SEQ ID NO: 13104 - DNA, 392 bp, Glycine max
  Clone ID: LIB3040-052-Q1-E1-C8
gacactcactctttgactcttcttcgtctcaaatctcttcgttccttcgattcgttccatttcttccaaaatggccaaagacccagttcgcgttctcgtcactggagctgcagggcaaattgggtatgctcttgtccctatgattgctaggggagtgatgttgggtcctgaccagcccgtgatcctccacatgcttgacattcctccggcagcagagtcattgaatggggttaaaatggaattggtggatgctgcattctctcttcttaaaggtgttgttgccacaactgatgtggttgaggcatgcactggggtcaatattgccgtgatggttggtggattcccaagaaaagaaggtatggagaggaaggatgtgatgactaagaacgtct

SEQ ID NO: 13105 - DNA, 104 bp, Glycine max
  Clone ID: LIB3040-052-Q1-E1-C9
ctcttgccgctaatacgaatcctgacaaagtcacaaatccgttgttcgaaaaacgtccgaagcaattccgaatcggaggagcgttgcctccgaagaaaaacctg

SEQ ID NO: 13106 - DNA, 231 bp, Glycine max
  Clone ID: LIB3040-052-Q1-E1-D1
gatgtcatattacaagaccctcatcaccatgtacaaactctcacaagaatacaacactcaagatcagtgttaatataggtaatatctatagcacgtcgttaagatattggcacacatggatccagtgggccattttcacgttaatggtcccgtcaactgtgcactttgcctttccaggtatgagaagtttgctcttggatacactacagatgttgacattaagttgcactg

SEQ ID NO: 13107 - DNA, 368 bp, Glycine max
  Clone ID: LIB3040-052-Q1-E1-D2
ggcatcatttcattgcactcattcaccgcacatgtccggcaaggaccgaaagaaaattaaaacggcgtttcgataactgccacaaaaaagtacaaataaaataagaaaaagaaaaccaacatacatcagtcactagtgtgttaaaagcgacacaacacaacataagctttattcttttttcttcgcttcttctgtacagcacccaagattgaagatgatagaccttgcgcgcgtgcagaatgagctcgtggaatgcagcaaggactcggacggatcgggcatcaaagtctgccccaaaagcgacaaccttgttctcttgatcggcaccattcctggccctgtcggaactccttatgaaaggggcattt

SEQ ID NO: 13108 - DNA, 297 bp, Glycine max
  Clone ID: LIB3040-052-Q1-E1-D4
cggggaggtttacaccgaggagacacaccttcagcagcagcagccatggttctcaaaaccgaactatgccgaatcaacggtgccaagatctacccatggaaaagcatcagatttgttcgtggtgattctcaagttttcctgtttgctaactccaaatgtgataggtatttccacaacaagttgaaaccatcaaagctcacctggactgcaatgtacagaaaacaccacacgaaggacatttctcaagaagctgtgaagaaattaacacgtgctgccaaaaagccttactccacgtcc

SEQ ID NO: 13109 - DNA, 375 bp, Glycine max
  unsure (1)..(375): unsure at all n locations
  Clone ID: LIB3040-052-Q1-E1-D5
ggcagtttcaaattttcttttccttcactttcccgagaaaaaaataacacttttcactttcttcactacgttctcacttcgatatggctcgtacgaagcaaaccgctcgcaagtccaccggtggcaaggcgccacgtaagcagctcgccaccaaggccgctcggaagtccgctccggcgaccggaggagtgaagaagccccaccgcttcaggccgggaaccgtggcgctgagggaaatcagaaagtaccagaagagcaccgagcttctcatcaggaagcttccatttcagaggctcgtgagagaaatcgcgccggatttcaagaccgatttgcgtgtccagagcagcgctgtttccgcgcttcaggangctgctg

SEQ ID NO: 13110 - DNA, 370 bp, Glycine max
  Clone ID: LIB3040-052-Q1-E1-D6
ggttgaatgtagaacgctgctgccgaaacccttcccgatccctaaggtaagtgagtaatccgtggttgagaatggtggagaacgcgaatggtacgaaggaggacgtggttaccacagagtacaccattaacctccacaagcgcctccatggctgcacatttaagaagaacgctcctaaagctattaagagagataacgaaatttgcccaaaaggccatggggaccaatgatgtgagggtggatctgaagttgaacacctttgtctggagccacagaatcatgactgttccaacgaagattacggtaagaattgctcgcatgacgaatgacgatcaatatgccaacgaagagctatactcgcttgtcaccg

SEQ ID NO: 13111 - DNA, 318 bp, Glycine max
  Clone ID: LIB3040-052-Q1-E1-D7
ggttctagtgtgtgattgtttgttgttgtaactcgttcttcttcttttgttgttctgtgtatgtgtctgttttttctctcaactgaaaatgtcttgctgcggtggtaactgtggttgcggaagctcctgcaagtgcggcaacggatgcggaggctgcgagatgtacccagacttgagctacactgagtcaaccaccaccgagaccttggtcatgggagtggcacctgttaaggctcaatttgagggtgctgaaatgggtgtgcccgctgagaacgatgactgcatatgtggaccaaactgctcctgcataccctgcac

SEQ ID NO: 13112 - DNA, 387 bp, Glycine max
  Clone ID: LIB3040-052-Q1-E1-D8
aaggaagcagaagtgaaagaagagaagaaggaaggggaagtgacggaagagaagaaggaagttgaagtgacggaagagaagaaggaagcggaagtgatagtagaagagaagaaggaagttgaagtgacggaagagaagaaggaagtggaagtgaccgaaggaaagaaagaagtggaagtgatcgaagagaagaaggaaacagaagtgacagaagaaaagaaagaagtggaagtagaagtgagggaagagaagaaggaaagtgaagtgaaagaagaagagaaaggtcgggaagtgaccgaagagaagaacgaagttgaagtgacggaagagaagaacgaagcggaagtgatagtagacgacaagaaggaagttgaagtgaccggagag

SEQ ID NO: 13113 - DNA, 53 bp, Glycine max
  Clone ID: LIB3040-052-Q1-E1-D9
gacgttcacattcacgatccgttttcttcagattatttgccaccgctgaggga

SEQ ID NO: 13114 - DNA, 401 bp, Glycine max
  Clone ID: LIB3040-052-Q1-E1-E1
gagatcccgtcgtcgcaggcgcagagtagagcagcacagaagagggaaaacggcaccgccgccgtagaagaaaacaaccatggtgcacgtctccttttacaggaactatgggaagacattcaagaagccgcgtcgtccgtacgagaaggagcgtctcgacgcggagttgaagctggttggtgagtacgggcttcggtgcaagagagagctgtggagggtgcagtacgcgctcagccgcatccgcaacaacgcgcggaacctcctcaccctcgacgagaagaacccgcgccggatcttcgagggagaggcgctgctccgaaggatgttccgttacggtctcctcgatgagacacagaacaagcttgattacgtcctcgccctcaccgtcgagaactttctcg

SEQ ID NO: 13115 - DNA, 358 bp, Glycine max
  Clone ID: LIB3040-052-Q1-E1-E10
gaaaaacaagaagaagaattggattcgaaaatcgtagcgtagcgttggtgcgattgaacgatacgatgggaagaggaaaattcaagagcaagcccactggtcgccgccagttctccaccccggaagatatgcttgctggaacctctaaccgtcctcgaacttttagacagaaagaagctgagcatgaagaggaagaacccgaggaagtatctggagatgaatctggagaagaatctgaagaagaaacttctaagaaaaaaggaacacaaggggttattgagattgaaaatcccaacttagtaaagccaaagaccttgaaagctagagatgttgatgttggaaaaacaacagaactttc

SEQ ID NO: 13116 - DNA, 387 bp, Glycine max
  Clone ID: LIB3040-050-Q1-E1-B9
gacagacagacacacactcggttctgccttcacaaaaaaattatcgagatcccctttttctcctaagaaaagccatggctaagggtcccggtctctactctgacatcggcaagaaagccagggatctgctgttcaaggactaccacagtgaccagaagttcaccatcaccacctactcacccactggagttgctataacagcatcaggaaccaggaaaagtgaactgtttgtggctgatgtcaacacccagttgaagaacaaaaacatcactactgatatcaaagttgatacagattctaatctcttcacaactatcactgttaatgaatctgctcctggtctgaaagctatttttagcttcaaagttcctgaccaaaagtctggaa

SEQ ID NO: 13117 - DNA, 328 bp, Glycine max
  Clone ID: LIB3040-047-Q1-E1-H12
gaagcaaaaccctaatccctctttcttcctcttcctcagtagtgcgattttcgattctcttctctgcaactatgcctaaccctaaggtcttcttcgacatgaccatcggcggtcaacctgccggccgcatcgtgatggagctctacgccgacgtgactccgagcaccgccgataacttccgcgcgctctgcaccggccataagggcgccgggcggagcggcaagcccctccactacaaaagctcgtccttccaccgcgtgatcccgaacttcatgtgccagggcggctacttcaccgccggaaacggcaccggaagcgagtcgatcta

SEQ ID NO: 13118 - DNA, 316 bp, Glycine max
  Clone ID: LIB3040-047-Q1-E1-H2
gacaccagcgactactcttcttagttccagcacaacaagctctgtcatttctcccacactttcttttctttcaccaaaaatgtcaccagatttcagacttttgtgcttcccggaactcatgcagtcccctatgatcactttccagggccaccctctgcgtccttctcttcaccctcatgttcacgctgctcttcactcctggtgggcttccttgggcctggggccggccgagacccagcatccctggcccattaactgccctgttagggatctttactggctccaggcctcacggtggtttatccaaagtcgcccg

SEQ ID NO: 13119 - DNA, 385 bp, Glycine max
  Clone ID: LIB3040-047-Q1-E1-H3
ggtggaacaaccttgtaacaatggcttcctcagttacttcctcttttcgcatcagcaatttgaagtcggtttttgttggtgagactaataaactcagagtttcaagtgttcctggtgctcatgttggtttcaatagaaagactgtagaatgtaaggaatcacgaattgggaagcaaccaattcctgtgccatccaatgtcacagtcaaattggaaggacaagatatacaagtgaaaggtcctttgggtgaacttgcattaacttatcctcgagaagtgttggttgagagggaagagtcagggactctaagggttaaaaaggcagttgaaaccagaagggccaatcaaatgcatgggctttttacgacacttacagacaacctggt

SEQ ID NO: 13120 - DNA, 376 bp, Glycine max
  Clone ID: LIB3040-047-Q1-E1-H5
gagactaaaaatttccacacccaacgaagatatgtttttctctttttttcctacggtgtggccaggctgttcactttagcgaaggatcaaaaaccctgtgaaagtgtgtttgtttggtcgagttgattgaattcgctggcagcttacagctatgatcatcaacaacgccccttttcctctatgattgattcgattcgattgaagtcgattccgtagagagtgagaaatcagatcacagtaatcatcgatgggtaatttgttcgtgaagaagcccaaggtaacagacgttgataaagcaatcctcgcactcaagacccagagacgcaaactcgcccaatatcaacaaaaggttacttttttttttcaaaatcaattt

SEQ ID NO: 13121 - DNA, 198 bp, Glycine max
  Clone ID: LIB3040-047-Q1-E1-H6
agggacaccatccactactcttcttagttccagcacaacaagctcttcaattctcccacactttcctttccttcaccaaaaatgtcaccagatttcacacttttgttcttcccggaactcatgcagtcccctatgattactttccaagccaacctctgcgtccttctcttcaacctcatgttcacgctgctcttcaat

SEQ ID NO: 13122 - DNA, 385 bp, Glycine max
  Clone ID: LIB3040-047-Q1-E1-H7
gaagggagaaatgaccgaatgctattcacttctaaatcttcgatttccatcgtttcccgtcattgatttcggcgcaaaaatcttccccaaacgtttccccaaatccatttcattctcacacccttcatcgaagtttcaactttgtggaatttcccgagctatggaagtggtcgaaggaagtgaagagagtaaagggtcgtcatcccctctaatgaagctcttgttcgtggaaatgggtgtcggctacgatcaacatggacaggacataacggttgcagcaatgagggcttgcagggatgcaatctcttctaattcaatccctgctttccgcagaggttccattcctggtgtcagttttgatcagatgaaattgcagattaaacta

SEQ ID NO: 13123 - DNA, 300 bp, Glycine max
  Clone ID: LIB3040-047-Q1-E1-H9
ggaagaagtaatagtatggcattggcattgggtaacgctattcctctctcaaacttgaaaccttgtccaaagttatcttgttgttgtatgaagaaactctttttcactcactcagtccccatttctcgcatcccaacaacgccaaagcgtactcccaccaccgtaattcgagccacttcctctttcgggtctcgcctcgaagacaccatcaagaagactgtatccgagaacccagtggtgctttattccaaaacatggtgctcctaatcttctgaggtcaaaatcttgttcaaaaagctc

SEQ ID NO: 13124 - DNA, 403 bp, Glycine max
  Clone ID: LIB3040-048-Q1-E1-A10
gatgtcatagtattatcattcattctcatctttctctcttctctctccaccaaaaccctaactcccgaccctgttcccctctcgtatccgtcatgataagaggaaagtccaagaccgaatctaagagagccgatcccaaacttgctgtgaataagaatggagccgccaccaacgctatgaaacccgccggcaatgggaaggcagcgaaagaccctaacaagccaaagaggcctccaagtgctttcttcgttttcatggaggagttcaagaaggtattcaacaaagaacatcctgaaaacaaagcagtgtctgctgtgggcaaagctgctggagcaaaatggaagaccatgtctgatgctgaaaaagcaccttatgtggcaaagtctgagaaaaggaaagtgga

SEQ ID NO: 13125 - DNA, 375 bp, Glycine max
  unsure (1)..(375): unsure at all n locations
  Clone ID: LIB3040-048-Q1-E1-A11
aaaatcggtccggaaagatcctaaccccttcttaaggggccatcaaggagcaacgcggtccttccttcaattcgcaatctgcaattctcccatcgcaattgctggaaagagctattacgaatatatttcaacggtcaaagggtgcatcggacaagcagatanagagggcgtataagnagctagcattgaagtacatcctgataagaacccggcaatgaagaagctaataagaaatttgctgagattagcaatgcgtatgaagtgttgtcggatagcgagaagaggaatatttacgataggtatggtgaggaatgtttgaagcaacatgctgctagtggaggcagaggtggtggaatgaacttccaagatattttt

SEQ ID NO: 13126 - DNA, 405 bp, Glycine max
  Clone ID: LIB3040-048-Q1-E1-A12
tggggtggttcttgtttgcgagatacaagcgtaagcagcggctaccctaacctcgtcttcctctctactaatttcagctatggccgacgaagctgtggttgttccagatcccacccagatcgatgtcaagctctttaaccgctggagcttcgaggatattgatgttactgacatttcactggctgattacattggagttgcggcatccaagcacgccacatatgttcctcacaccgccggaaggtactccgtgaatcggttcaggaaggcgcagtgccccattgttgagaggctcaccaactctctcatgatgcacggtagaaacaatggcaagaaactcttggctgttaggatcatcaagcatgctatggacattattcatttgttgactgaccagaaccccat

SEQ ID NO: 13127 - DNA, 378 bp, Glycine max
  unsure (1)..(378): unsure at all n locations
  Clone ID: LIB3040-048-Q1-E1-A2
gactgcgaaccagtagggactcccattccgactcttagccgccgatctctcagggcttgcatcttctcaggtaagctgtgaagatgtacacatcaaggaagaaaatccacaaggataaggatgctgaaccaactgaatttgaagagtcagttggacaggcattgtttgatctggaaaataccaatcaggagcttaaaagtgatctgaaggatttatacataaactcagccgtgcaagttgatgtttctggaaaccgcaaggctgttgttattcatgtcccttacagattaaggaaaggtttccgtaagattcatgttaggcttgtcanggagcttgagaagaagtttagtggcaaggatgtaatcttggttgccaccg

SEQ ID NO: 13128 - DNA, 367 bp, Glycine max
  Clone ID: LIB3040-048-Q1-E1-A7
gacagcactgcactcttcgcaacacaacaaaaaaagacaacccagagagcgcgtcttaataaacgctcttctctgaaaacccccatttcttttcttctttcttcttctctttcgcttcttcgatcttcgatcttcgtcgctgaaaatgagagagtgcatttcaatccacatcggccaggccgggattcaggttggaaacgcctgctgggagctttactgcctcgaacacggcattcagcctgatgggcagatgccaagtgacaagaccgttggtggaggtgatgatgctttcaacaccttcttcagtgaaactggggcaagaaagcacgtgccccgtgcgatttttgtagatcttgagcccactgtg

SEQ ID NO: 13129 - DNA, 389 bp, Glycine max
  unsure (1)..(389): unsure at all n locations
  Clone ID: LIB3040-048-Q1-E1-A8
gacttcacaactcaaactgcttcattgcataattgcagataagatcaacccttctaccttcagattcgcgggaagatggcatcacttcatgctaatgtgacatcagttgtttacaacagtggcaaccgtgtttctcaatcgaaatttgcaagctcttccttcttgtctgggttcgatgttgttggtcgtgcttcaagtgcttggaagaaggaacttgtcccatcttccatttccttggtgcctagagccaccctaacatttgatcccccaactaccaattcagacataaccaagcaaaagaagcacactcttgaccctgcttctccagattttcttcctcttccttcatttgaacagtgctttccaaagagcaccanagaacacaggga

SEQ ID NO: 13130 - DNA, 404 bp, Glycine max
  Clone ID: LIB3040-048-Q1-E1-B11
gacaactcaaactgcttcattgcataattgcagatcagatcaacccttctaccttcagattcgcgggaagatggcatcacttcatgctaatgtgacatcagttgtttacaacagtggcaaccgtgtttcgcaatcgaaatttgcaagctcttccttcttgtctgggttcgatgttgttggtcgtgcctcaagtgcttggaagaaggaacttgtcccatcttccatttccttggtgcctagagccaccctaacatttgatcccccaactaccaattcagacataaccaagcaaaagaagcacactcttgaccctgcttcgccagattttcttcctcttccctcatttgaacagtgctttccatagagcaccatagcacacagggaagtcactcatgacgaaactg

SEQ ID NO: 13131 - DNA, 74 bp, Glycine max
  Clone ID: LIB3040-048-Q1-E1-B12
ggaagaagaacattaaattaaaccacagtgaagaagtaactaaaccaaactgcgaaacgctgaacatttgaagc

SEQ ID NO: 13132 - DNA, 339 bp, Glycine max
  Clone ID: LIB3040-048-Q1-E1-B4
gagggtttcaaagtggacagaagagagcgtcctagtcgcaaccctaataagaagaaccacagcttcaagcgagtgacatccaccagccatgggtcgtatgcacagccgcggtaagggtatatcctcttctgctttgccctacaaaaggacaccccctagctggctcaagatctcttcgcaagatgtggaagaaaatatctgcaagtttgcgaagaagggtttgaccccgtctcagattggtgtcattcttcgagattctcacggtattgctcaggtcaacagcgtcactggcagcaaaatccttcgcatcctcaaagctcacgggcttgcgcctgaaat

SEQ ID NO: 13133 - DNA, 371 bp, Glycine max
  Clone ID: LIB3040-048-Q1-E1-B5
ggtgtgtgtagtataggattctcttctttattccttttgtaatttcattcattcttaatctttgtgaaaaataatgttcatcgagaattttaaggttgagtgtcctaatgtgaagtacaccgagactgagattcagtccgtgtacaactacgaaaccaccgaacttgttcacgagaacaggaatggcacctatcagtggattgtcaaacccaaatctgtcaaatacgaatttaaaaccaacatccatgttcctaaattaggggtaatgcttgtgggttggggtggaaacaacggctcaaccctcaccggtggtgttattgctaaccgagagggcatttcatgggctacaaaggacaagattcaacaagcca

SEQ ID NO: 13134 - DNA, 352 bp, Glycine max
  Clone ID: LIB3040-048-Q1-E1-B7
ccagggaaaaaaaaaaaaaaaacatgacgtttacccagaaaaatgtaaagtggaaattgtagacaagcaaagttacctaacaaatgaggattataccctcttttaatgtgatggaactgaaattttcccagccatgaaaaccttgggaacccacatggccacaaaactcattaaaatcatgtgggacaaacatatgaaaggacatgagttacaatgtcagactttgtagtttaaaatctcttttcattttctcatcctttagatctagcctcagtgctctgaagatcctctgtcaaaaggatccaaaacccttttcttatccattgccttgtttcctttcatcactcaaatc

SEQ ID NO: 13135 - DNA, 61 bp, Glycine max
  Clone ID: LIB3040-048-Q1-E1-B8
aagaaggaagctgaagtcatagaagagaagaaggaagtggaagtgacggaagagaagaagg

SEQ ID NO: 13136 - DNA, 57 bp, Glycine max
  unsure (1)..(57): unsure at all n locations
  Clone ID: LIB3040-048-Q1-E1-C1
gagacctcaggtcangcggggctacccgctgagtttaagcatatcaataagcggagg

SEQ ID NO: 13137 - DNA, 367 bp, Glycine max
  Clone ID: LIB3040-048-Q1-E1-C10
gaacagccacaacactttccacttgtctccgaattagttatcttgagaaacattattcccattgctatatattatggctagcatgaaggttacatgggtggttgtgatcatgtgcatggccgtggtgggtgcaccgatgatggcgcaagccatgacatgcaatgatgtgacggtgaacatggcacagtgcctatcctacctgatgcatggaggaacaccttcaacactttgctgcagcggagtcaagaacattcttggctctgctgtcaccaccgttgacaaacaaactgtgtgcaactgtctcaaggcggatgctgctaggtacaacatcaatgaccagtatgctcaggcactccctggtttctgc

SEQ ID NO: 13138 - DNA, 264 bp, Glycine max
  unsure (1)..(264): unsure at all n locations
  Clone ID: LIB3040-048-Q1-E1-C11
gatcgcacaacattattctttcgcaccttgcagaatcagttttctctctcaatcgtctttcatggctcgtaccaagcaaaccgctcgcaaatccaccggtgggaaggctcctangaagcaactcgccaccaangctgcaagaaaatctgcacctaccaccggtggagtcaagaagcctcatcgctatcgtcctggaactgttgctcttcgtgagatccgaaaataccaaaagagcacagagcttctgatccgcaagctcccctt

SEQ ID NO: 13139 - DNA, 358 bp, Glycine max
  unsure (1)..(358): unsure at all n locations
  Clone ID: LIB3040-048-Q1-E1-C2
gaccttcgaattttcttttccttcactttcccgagaaaaaaaaacactctttcactttcttgactacggtctcacttcgacatggctcgtactaagcaaactgctcgcaagtccaccggcggcaaggcgccacgtaagcagttggcgaccaaggccgcccggaagtccgctcccgcgaccggaggagtgaagaagccccaccgcttcaggccgggaaccgtggcgctgagggaaatcagaaagtatcagaagagcaccgagcttctcatcaggaagcttccgtttcagagactcgtgagggaaatcgcgcaggacttcaagaccgatttgcgttttcagagtancgccgtttctgcgc

SEQ ID NO: 13140 - DNA, 326 bp, Glycine max
  Clone ID: LIB3040-048-Q1-E1-C4
gacttcacaactcaaactgcttcattgcataattgcagataagatcaacccttctaccttcagattcgcgggaagatggcatcacttcatgctaatgtgacatcagttgtttacaacagtggcaaccgtgtttctcaatcgaaatttgcaagctcttccttcttgtctgggttcgatgttgttggtcgtgcttcaagtgcttggaagaaggaacttgtcccatcttccatttccttggtgcctagagccaccctaacatttgatcccccaactaccaattcagacataaccaagcaaaagaggcacactcttgaccctgcttctcc

SEQ ID NO: 13141 - DNA, 361 bp, Glycine max
  Clone ID: LIB3040-048-Q1-E1-C6
gacttcacaactcaaactgcttcattgcataattgcagataagatcaacccttctaccttcagattcgcgggaagatggcatcacttcatgctaatgtgacatcagttgtttacaacagtggcaaccgtgtttctcaatcgaaatttgcaagctcttccttcttgtctgggttcgatgttgttggtcgtgcttcaagtgcttggaagaaggaacttgtcccatcttccatttccttggtgcctagagccaccctaacatttgatcccccaactaccaattcagacataaccaagcaaaagaagcacactcttgaccctgcttctccagattttcttcctcttccttcatttgaacagtgct

SEQ ID NO: 13142 - DNA, 361 bp, Glycine max
  unsure (1)..(361): unsure at all n locations
  Clone ID: LIB3040-048-Q1-E1-C8
gagggttttgcgctgttgttgctgctcatcctccgtaacctccgagctctgcaccgaagaacgaagccatggggaagacacatggaatgggatctgctcgcaagctcaagtcccaccgcaggaggcaaaggtgggctgacaagtcatacaagaaatcacatcttggaaatgaatggaagaaaccttttgctggttcatcccatgccaagggaattgtccttgaaaagataggtattgaggctaagcagcccaactctgccattcgtaagtgtgccagggttcaacttatcaagaatgggaagaagattgccgcttttgtcnctaatgacggttgcttgaactacattgaagagaatgacga

SEQ ID NO: 13143 - DNA, 376 bp, Glycine max
  Clone ID: LIB3040-048-Q1-E1-D10
ctatattactttaaaaatacagaacaaaatagtgttttgggtgactgcacctttatggttaaaaataagattaaaatatgtttttaatttttatggatataaataaattttatttcagtttttttaaaaaaaaaaaaaaaaaaaaaaaaaaaaaaaaaaaaaaaaaaaaaaaaaaaaaaaaaaaaaaaaaaaaaaaaaaaaaaaaaaaacaaaaaaaaaaaaaaaaaaaaaaaaaaaaaaaaagggcccccccaaagatttaaatttaaatttccgtttcagggaaattcaaaccctttcaaattggtccccaaaatcaaattaaagggcccgcgttttaaaattttcgcccgggaaaaaccagggcttttccaaa

SEQ ID NO: 13144 - DNA, 230 bp, Glycine max
  Clone ID: LIB3040-048-Q1-E1-D3
ggttctagtgtgtgattgtttgttgttgtaactcgttcttcttcttttgttgttctgtgtttgtgtttgttttttctctcacctgaaaatgtcttgctgcggtggtaactgtggttgcggaagctcctgcaagtgcggcaacggctgcggaggctgcaagatgtacccagacttgagctacactgagtcaaccaccaccgagaccttggtcatgggagtggcacctgtta

SEQ ID NO: 13145 - DNA, 306 bp, Glycine max
  Clone ID: LIB3040-048-Q1-E1-D5
ggagaagagggtcagagtgagaaagagagagagagagagagaaactgagagaaattcgcaaaccctaatttcggaaagatcggcgatggctgcctccaaggatcgcgagaacttcgtctacatcgccaagctcgccgaacaggccgagcgatacgaagagatggtggaatcaatgaagaacgttgcgaatctcgacgttgaactgactgtggaggagcggaatttactttctgttgggtacaagaatgtgattggtgctcggagagcatcgtggaggatcctgtcttcgattgagcaagatgaaca

SEQ ID NO: 13146 - DNA, 386 bp, Glycine max
  Clone ID: LIB3040-048-Q1-E1-D6
ggatcaaacacagagagcgcagtccaaccctcaaaatgcattcattcggctacagagccaacgcgttgctaacctttgccgtaaccattctggcgcttatgtgcgctatggcttctgtatccgacaacttcaacacccccactccctctgcacaagtccaggttctgaacatcaactggtttcagaaacaacccaatggcaacgacgaggtcagcatgacgatgaatatttccgcagacttgcagtcccttttcacatggaacacaaaacaggttttcgtttttctagccgctgagtatgaaactcctaagaattccttgaatcagatatccctatgggatggtatcattccctctaaagagcatgcaaagttttggattccatac

SEQ ID NO: 13147 - DNA, 382 bp, Glycine max
  unsure (1)..(382): unsure at all n locations
  Clone ID: LIB3040-048-Q1-E1-D7
gattgtgtgagtgaagaagcagagggagtagcggcattaaaaatgcagatcttcgtgaaaactctgacagggaagactataaccctcgaggtcgagagcagcgacaccatcgacaatgtcaaggccaagattcaagacaaggaaggcattcctccggatcagcagcgtttgattttcgccggaaagcagcttgaagatggaaggaccctggccgattacaacatccagaaggaatcaacccttcatctcgtcctcaggcttcgtggtggcatcattgagccttccctcatggctttggctcgcaaatacaaccaggacaagatgatttgccgcaagtgctatgcccgtctgcatcctanggctgtgaactgccgcaagaaaa

SEQ ID NO: 13148 - DNA, 103 bp, Glycine max
  Clone ID: LIB3040-048-Q1-E1-D8
gtgttcggattgcggcgacgtgagcggttcgctgcccgcgacgttgtgagaagtccactgaaccttatcatttagaagaagaaagaagaagcagcagcagcgg

SEQ ID NO: 13149 - DNA, 404 bp, Glycine max
  Clone ID: LIB3040-048-Q1-E1-D9
ggcactgtagaaattcagaagctcatcgtcatcgcgagaaatcttggtcataaaccctaaactagttttagtttctggaacattgataaccaattcaacaattgagaagcgatgcttggcgatggaggcgaaaccccctcaaggtatgaattgttgagcatggtgaagaagcattccaatttaatagggaaaacggtagttgaggagcaagatgcttctgatatcgaaatggatatgaggttttggcacgatgtctttgatttgtattttgtctgtggcaaggaatcaaggggacgccaagatgatgatcttgttttctttgtcagaaaattgggttcccatggttctggttccaacaataaaacagagagcgttgatccttattttgtacgcagttgagcgac

SEQ ID NO: 13150 - DNA, 310 bp, Glycine max
  Clone ID: LIB3040-048-Q1-E1-E10
ggaattaaactgcaaagtgaaatccccatgctacaaagcgttatactcatctttctagatacgttgttgactggaaagttccctctcagaaacagaagaccttgccttcgtcaccgtctctagaaacatgactaccacgaaaaccatcaccaccagcagcgatgtctttgacaaacggttcggggaaactgtctgcctgagaaaagtatgctcagaatcacgataacttcaccatgcgagatcatgtctcaactgccttgaagaaagaaggtttatcaccatcaactcttgtccctggcattgaattcac

SEQ ID NO: 13151 - DNA, 406 bp, Glycine max
  Clone ID: LIB3040-048-Q1-E1-E11
tgatcccctatccactcgataattcaatggtagccataaccccaaccaaggttcctcaacctccatttctccgagaatacgactcgaaacgcaacgtgtgcttgtcacggaggagccccggggcattccattgagcattgtatgaccccgaagcataaagtgtgaagtctaattgatacgggctggctgaaatttgaggagaatcgcttgttgaatcctaacattgacaagcaacaccatacatggggcaattctggaagctgttgttatgactcatcaggattttcaagtttatgccattattataaaccacagttacaatgctaaatgaaatggataaagttggtatctttgtccctcatcctctcacaaacgcatgtttgcttattcaactttcactggaatg

SEQ ID NO: 13152 - DNA, 349 bp, Glycine max
  Clone ID: LIB3040-048-Q1-E1-E2
ggttgtttgttgttgcattttgcacttgcaaaattttggttgcagaggcagagagaggaggcaacgccacaccgcaccactctcactctgcaacacccgaatctcgtttcacctaaacgacctcgtttttgcgttcttttcccttttcttcttctgatttaggtttcagagagaagaagaaggagcagcaatggactctcgcacgtataatcctcgcaccgtcgaagaggtttttaaggatttcaagggccgaagagctggtctcatcaaagccctaaccaccgatgttgaagatttctacaaccaatgtgatcctgagaaggagaatttgtgcttgtatggctttccc

SEQ ID NO: 13153 - DNA, 357 bp, Glycine max
  unsure (1)..(357): unsure at all n locations
  Clone ID: LIB3040-048-Q1-E1-E4
ggaacttctcacgttcatttctacacatccctagctctgtcgttccgtcgttgacgatggcgtttcgggtgcgaagccctgacctccgctctctctttcttctctctctcttgtccatcgcttccgccaatgtcttcttcgaagagcgtttcgatgacgggtgggaaaatcgatgggttaaatcagattggaaaaaagatgagaacgtggctggggagtgngaacacacctctggtcaatggaatggagacgctaatgacaaaggtattcanaccagtgaggattacagattctatgctatttcagctgagtaccctgaattcagcaacaagggtaagacactagtccttcaatttt

SEQ ID NO: 13154 - DNA, 339 bp, Glycine max
  Clone ID: LIB3040-048-Q1-E1-E6
ggcgagagaagttattagggtttttgagtgcggcggtccaaacactcttctctgcagcttttgcctacaactcccttcaccatggctgaacaaaccgagaaagcttttctgaagcaaccaaaagtgtttctcagcacaaagaagactgggaagggaaagagacctggaaaaggtgggaaccgcttttggaagtccattgggcttggatttaagactcccagggaagccatcgaaggaacctatattgacaagaagtgccccttcactggcaatgtttccatccgtggccgtatcttggctggaacatgtcacagtgctaagatgaacaggactattatt

SEQ ID NO: 13155 - DNA, 374 bp, Glycine max
  Clone ID: LIB3040-048-Q1-E1-E7
ggacacatacaaacatccatcatcattattattttactccgaacgagttgacaccgattccactcactcaaccatgagccgattcaggcgttttgagctcatagaacaaccacctttcttccactcctgctactctttcccttccttcgtcctccaagactcactctctctcgacctcgacctcttgccacttcccagccacttcgacgctttcgcagatctggtgcacgcgccgtcgttcgcttaccggcgcgtggagaggcatctcgagaatgagttgcgtttgcagagcctctctgaccgtgtggcggagctggagtcgcggttcgaccgtgtgctcggcggagatcggaagtacacgtggacagcggaga

SEQ ID NO: 13156 - DNA, 370 bp, Glycine max
  Clone ID: LIB3040-048-Q1-E1-E8
ggtgctctgctcgtgcctctagggttatcatttctccatttccattttctctctcacttttcaagaatcgtaagctataggaaagtcttacccaactgtgagtgctgattaccagaaggccgttgagaaggcgaagaagaagctcagaggcttcatcgctgagaagagatgcgctcctctaatgctccgtttggcatggcactctgctggaacctttgacaagggcacgaagaccggtggacccttcggaaccatcaagcaccctgccgaactggctcacagcgctaacaacggtcttgacatcgctgttacgcttttggagccactcaaggcggagttccctattttgagctacgccgatttctaccag

SEQ ID NO: 13157 - DNA, 393 bp, Glycine max
  Clone ID: LIB3040-048-Q1-E1-F1
ggcagtcacctcagagacatcatttctctctctaactttctctctcctctccgctccggcgagtaagaaaaatgcagcatttcgtggatttgcaagagaattcggagttgggtgagtcgaattcatggctttcagcgaaagagcagtccggtgcggcacccaacaccaatttggatcgcgtcctcttcaacgacctcgtcgagattgtccctctcgttcagtcactcatcgatcgtaaagcaagccgttcattcacgcggcgtggttccatgatctacaccaagacacccacaagagaatcattgtccaaaagaacaacagattcaaaaagtaggaatgttgcccaatctattcttgccaaaaagaaaagggaacatggagaaaaagaacaag

SEQ ID NO: 13158 - DNA, 405 bp, Glycine max
  Clone ID: LIB3040-048-Q1-E1-F11
ggcagcagcaactttaaacgccgaagaaagttcatccaatctccgaagcccttcaccgcattgcaaccatgtcgagaagaaaggttagagagccaaaggaagaaaacgtgactctgggcccagctgttagagatggcgaacatgtctttggcgtcgctcgcatctttgcctccttcaatgataccttcattcatgtcactgatctgtccgggagggaaacacttgtccgcatcacaggtggaatgaaggttaaggctgacagagatgaatcgtctccctatgctgctatgcttgctgcacaggacgttgctgccagatgcaaggaactgggcataactgctcttcacatcaagctccgtgcgacgggtggaaacaagacaaaaacacctggtcctggtgctcaat

SEQ ID NO: 13159 - DNA, 401 bp, Glycine max
  unsure (1)..(401): unsure at all n locations
  Clone ID: LIB3040-048-Q1-E1-F12
ggttctttcgccgccgtcgctcacaactcgcaaaccacaatgcctaagcagatccacgagattaaggatttccttctgacggcacggaggaaggatgcgaggtcggtgaaaatcaagaggagcagggatgtcgttaagtttaaggttcgatgctccaagtatttgtacacgctttgtgtctttgatcctgagaaagccgataaattgaagcaatctcttccccccggtttgagtgttcaagacctgtagaggtgctgagtgcggcagcgtgcgtttgtttatctttttgttgcctcatgctctagattttgtggcttgcttttatattttggtaattgttatgaggatatgcttgttttttatttgctatganaatgcganagttttattttgagcacaat

SEQ ID NO: 13160 - DNA, 354 bp, Glycine max
  Clone ID: LIB3040-048-Q1-E1-F2
ggatcaaagtggaccttccatttcatagccggcggtgaagatagttagcagacttggctgaccctgagcaggaggaataagaataagatgcctccttatgattgtatgtttctgtttaagccccatataacgaaggaagctgtcatggatttagttgtgagggtgggaaagcatgtgtgcagaagaaatggggttgtcactgatatcaagagtctcggaaaagttcacttgggctatggtgtgaaaaagctagatggcagatattatcagggcctactgatgcaaatgagcatgattgctacacctgaaatcaacaaagagtttcattacctaaacaatgaagaccggttactg

SEQ ID NO: 13161 - DNA, 286 bp, Glycine max
  Clone ID: LIB3040-048-Q1-E1-F5
ggcagtccatacctcacaccacatctatccaaacaatcaataacaatggcttatgcaaggcatgctcctacggatgtcttcctgcttgccacttccatcaaactgttcccaacgaacatagatacagcagattgtattggttcatgtacatctttctatataccaccgtgcctctcacgtgattgtcgttctgtctctatatgactaattactggtttctgcatacatccatctggacttacatccgtcgctaacatcatcgattaacatccctccttatgtcaat

SEQ ID NO: 13162 - DNA, 382 bp, Glycine max
  Clone ID: LIB3040-048-Q1-E1-F7
ggcccaaattttttcatagcattttcagaggaacaatggcgggtagggtttcgacgtgcttcttcttcgtgtttgctctttctctccttcttccttttcagatctccgctgaggaatcatcggagaaagagttcgtactcacattggatcactctaactttcacgacactgtcagcaagcacgatttcatcgtcgtcgagttctacgctccatggtgtggccactgtaagaagcttgctcccgagtatgagaaagctgcttctatcttgagtagtcatgatcctccggttgttttggctaaaattgatgccaatgaggagaagaacaaagaccttgcatctcaatatgatgttaggggatacccaacaattaagattctgag

SEQ ID NO: 13163 - DNA, 390 bp, Glycine max
  unsure (1)..(390): unsure at all n locations
  Clone ID: LIB3040-048-Q1-E1-F8
gacatttctgcgtggcgtctccggtgagggaaaagtagtagaagagaagatgtcgaccgtaccaggacagctcatctgggagatcgtgaagaagaacaactcctttttggtgaaagagttcggaaggggcactcagagcgtgcagttcagcagagagcccaacaatctctacaacctcaacactttcaagtactccggtttggcgaaccagaaaactgtcactgttcaacctgctggtaaagaccagtccgtgttgctcgcaacaaccaagacaaagaagcaaaacaagcctgctgctttgcttcacaaatctgtcatgaaaaaggagttccgtaggatggcaaaggctgtgcaaaatcaggtancagataactactacaggcctgatct

SEQ ID NO: 13164 - DNA, 403 bp, Glycine max
  Clone ID: LIB3040-048-Q1-E1-F9
gaatcgcgcaatgtcttatgtcattcacatgtactttctcctctctttccgttccctctttttttcctttcttgtcaaccaatatttaattcctttttcttcaagcatttcaattgcaatttgcaaactttaaaccaaaacccacataagaaaatataaaaaagagcattacttttttaatttctccttcttttatgcaaccagaagtgtagtgtgttgtgtatgactaggtttctgccagccctggggataatgggtaattatctagattcttcagctaaagtagaagcagctcacagttccagaaccccttctggaatttcaaaaactagaccttcatctgttcctcccaacttatctattctgtcatatagtgaagcaagtgatttctcagatcttccca

SEQ ID NO: 13165 - DNA, 354 bp, Glycine max
  Clone ID: LIB3040-048-Q1-E1-G1
gggaagaagaaaaagaggaacaagaagagcgtggagacgtacaagatatacatattcaaggtactgaagcaggtccaccctgacattggtatctcaagcaaggccgtgggaatcatgaacagcttcatcaacgacatcttcgagaagcttgctcaggaatcttccagacttgcccgctacaacaagaagcccaccatcacttcaagggaaatccagaccgcggtcaggcttgtgcttcccggtgaattggccaagcacgccgtttctgaaggtaccaaggccgtcaccaagttcaccagctcatgaaccgactattaattggattttgtttctggttgcacacacaaatctgtt

SEQ ID NO: 13166 - DNA, 401 bp, Glycine max
  Clone ID: LIB3040-048-Q1-E1-G10
ggcagcgcttgatttgaggccaggcaagccccactcaaccaccacacctctcctcgttcacgctacccctttctgctcttcttctacctttcaagttttaaaagtataaagatggcagagacattcctatttacctcagagtcggtgaacgagggacaccctgacaagctctgcgaccaaatctccgatgctgtcctcgacgcttgcctcgagcaggacccagacagcaaagttgcctgcgaaacatgcaccaaaaccaacttggtcatggtcttcggagaaatcacgaccaaggccaacgttgactacgagaagatagtgcgtgacacctgcaggaacatcggcttcgtctcaaatgatgtgggactggatgccgacaactgcaaggtcctcgtcaacat

SEQ ID NO: 13167 - DNA, 324 bp, Glycine max
  Clone ID: LIB3040-048-Q1-E1-G12
ggtggaagtggtggattaggaggaccggtggtgccgggtggtgcggggactttaggtggagctggtggtttgggatgtggtgttggtggtgctggtgtctttcaacattgtaataatccttgatatcattctggggcttgcatgcatggctgttcttgttaatctaaggctgccaatattaattgttttttaggttagataatcttagcctcttagcatttgatttacttgttatgttattttagattcaagttgttataattgtcttggtttactgtttgatgtttctggtcattaaaggctgcatgcatcgacagggtcact

SEQ ID NO: 13168 - DNA, 363 bp, Glycine max
  Clone ID: LIB3040-048-Q1-E1-G3
ggaacctttgcattctattcattcaagattcagcaagtgcgttttggaagcagagaccgaaatacttcgagatggcccgtacaaagcaaactgcccgtaagtcaactggaggaaaagctcccaggaagcagcttgcaaccaaggctgcacgtaagtctgcaccaacaactggtggtgtgaagaagcctcatcgttatcgccctggaactgttgctcttcgtgagattaggaaataccagaagagcactgagctcctaatcaggaagcttcctttccagaggttggttcgtgaaattgcccaggatttcaagactgatctgcgtttccagagccatgctgtgcttgcattgcaagaggctgctg

SEQ ID NO: 13169 - DNA, 131 bp, Glycine max
  Clone ID: LIB3040-048-Q1-E1-G4
agattatggatttcgtagtttgtttccctatttatagatcgtgccaatccctgttgattttccccctcctttgcctgacgctttgactaacttccctaatgcaagtaagcatgatttaccgccgcattccg

SEQ ID NO: 13170 - DNA, 376 bp, Glycine max
  Clone ID: LIB3040-048-Q1-E1-G5
gattatttgacgagttatccctaaacaaatgctctgcaattgcaaattcagaggatgtcgatcttcgagtacaacggaagcgccgtggtggctagggtcggcaagaactgcttcgccattgccagcgaccgaaggctcggcgttcagctccaaactatagccacagattttcaacgcatttccaagattcacgacaagctcttcatcgctctctcgggcctcgccaccgatgctcaaacattgtatcagcgtcgtgttttccggcacaaactgtagcaactgcatgcacagagggatatgatgccagagagctttgccaatttagtcgctgctctgctctatgagaaaaagtttgatccatatttttgccaacctg

SEQ ID NO: 13171 - DNA, 355 bp, Glycine max
  Clone ID: LIB3040-048-Q1-E1-G6
gacaccactaaaatatctctctattattctcgttttcaatatgcagatcttcgtcaaaaccctaaccggtaaaacgattacgctagaggtcgagtcctccgacacaatcgataacgtgaaagctaaaatccaagacaaggaaggcattccaccggatcagcagcgtttgatcttcgccggtaaacaactcgaagacggcagaactctcgccgattacaatatccagaaagaatcgacgctccacctcgtcctccgccttcgcggtggcatgcaaatcttcgtcaaaaccctaaccggtaaaacgattacgctagaggtcgagtcctctgacaccatcgataacgtgaaagctaag

SEQ ID NO: 13172 - DNA, 369 bp, Glycine max
  Clone ID: LIB3040-048-Q1-E1-G7
gacacaaactttattacagttgttgtattgtaattaagcaagaatattaggcaatggagtcttctagaacttcaactactcttgctctttttttaaccatcaatttgcttttctttgtcatggcaagtggccgctacacttgcacacagcctaagccaaaccctatcccattcccttaccctaaccctagtcctgccgcgaagagctgccccagggacgcacttaagctcggagtgtgcgcaaacgtgcttaatggaccaattggtgctattgtagggtcaccaccggaccacccatgttgctcagtgctagaagggcttcttgatcttgaagttgcggtttgcctctgcactgccatcaaaggcaaca

SEQ ID NO: 13173 - DNA, 347 bp, Glycine max
  Clone ID: LIB3040-048-Q1-E1-G8
gatcgcatttcatagcactcaccctcattaccaacacgaaagcatagccaaaaccttttttcgaagtctctgattttcctaatggctccggcaaaggcagagaagaagccggcggagaagaagccagcggcggagaaggcaccggcggagaagaagccgaaggcggagaagaagatctcgaaggaaggagggagcgagaagaagaagaagcgcacgaagaagagcgtggagacctacaagatctacatcttcaaggtcctcaagcaggttcaccccgacattggtatttccagcaaggccatgggcatcatgaacagcttcatcaacgacatcttcgagaagctcgc

SEQ ID NO: 13174 - DNA, 404 bp, Glycine max
  Clone ID: LIB3040-048-Q1-E1-G9
gacaacacaacacaaacacacagagttagaggagaaatcatcatggcatcagcagcatctgggtttgtgttgtcacttaatgttgcagctgccaccacaaactcaagggtggtcatgttcaacacaaagaacaacgcttctaggcttgttgtaagggcttcagatgagcctgcagcggcggcacccgccaccgccacacccccagctgaagctgaagctaaaccaaagccaccacctattggccccaagagaggtgctaaggtgaagattcttaggaaggaatcttactggtacaaaggcactggttcagtggttgctgttgatcaggaccccaacactcgctaccctgttgtggttcgattcaacaaagtcaactatgccaatgtatcaacaaacaactatgc

SEQ ID NO: 13175 - DNA, 363 bp, Glycine max
  Clone ID: LIB3040-048-Q1-E1-H1
gatttttgagttgcggcacaaagcattcactgtgtcggaaaaagaagaagagaaaaaagatgagcgacggaggaaaacgacaaggtggaagagcgttgccgccgccgccaagaggccctccgcctcctcccccctctcgccctcgcctcgaacccgtcgatcgcgaaaagacatgtccgttactgctgcgagtgttcactaagattgggagtcaccattccatggaagactttgccgtcagaggcaaagagcccaaagacgaggttcagatttacacctggaaggacgctactctccgagaactcaccgatcttgtcaaagaagttgctccggctgcaaggagaagaaacgccaaactctcct

SEQ ID NO: 13176 - DNA, 394 bp, Glycine max
  Clone ID: LIB3040-048-Q1-E1-H10
ggaaaccgcggagagtttgctgctacatcgatcatcatcacctcatggacggacacgatccacaagacccaaagcagagccctgctgacatgactgcctttgtgcaaaatcttcttcagcagatgcaaaataggttccagacaatgtccgactccattgttacaaagattgatgatatgggaagtcgcataaatgagttggaacaaagcatcaatgacctgagagcagagatgggagtggagtcctctccatcacctgcagcccctgctaagctaacggaggagataaccaaagaagaaggttcagcttaagtggcattctgatttcagttgctcattattcatgcattgtattgcacaaggattgatattctgcatctacttttgtctgctgt

SEQ ID NO: 13177 - DNA, 399 bp, Glycine max
  Clone ID: LIB3040-048-Q1-E1-H11
gagggtttttgtcgtcgctactaagagttgctgcttcttcagccactccgcacctcgcagcctctgtgccctcaacaaccatggctgaaatcgaaactaccgttccagatcccacccaaatcgacgtcaaactcttcaatcgctggagcttcgaggatgttgaggttaatgatatgtctctggctgattacattggagtgtccccatcaaagcatgctacatatgttcctcacactgctggtaggtactcagtgaagaggttcaggaaagcgcagtgccccattgttgagaggctcaccaactctctgatgatgcacgggaggaacaatggaaagaagctcatggctgtcaggattatcaagcatgccatggagatcatccacttgctcactgacctga

SEQ ID NO: 13178 - DNA, 393 bp, Glycine max
  Clone ID: LIB3040-048-Q1-E1-H12
ggaggttttagcctaggaaccgtgttcatctactctgagccgcatcacttcccggaatcgtgcatccctacgttcaatatgtcgctggtggcaaacgaggatttcaagcacatacttcgtgttttgaacacgaacgtagatgggaagcagaagataatgttcgctcttacctcaatcaaatgtattgggaggcgatttgctaacatttgctgcaagaaggctgatgttgacatgaacaaaagagctggtgaactgagtgctgctgagttggatagtgtgatgactgtggttgccaacccccggcaattcaagattccggactggtttttgaacagaaagaaggactataaggatggcaagtattctcacgtggtgtcaaatgcactggatatg

SEQ ID NO: 13179 - DNA, 319 bp, Glycine max
  Clone ID: LIB3040-048-Q1-E1-H2
gagggacccaaattttaagaacttggctttgcgtccttcaaagtgaggtctctaagtttcactttctttgcataaggcaacctcgtttctctgtgactctgagtatcgtatcgtgttattagtatttctaattctctcttatcacgtccattgaatatgtctccgtcgttggatcttcctcccaatggtggcttcagttttgatcgaagccgaagaaacgcaatgcttcataacaatggcctcaaagccccaacctttctcaaaaatggcatcactagtgtcggtttagttctccaagatggtgtcaatcctggtgctg

SEQ ID NO: 13180 - DNA, 373 bp, Glycine max
  Clone ID: LIB3040-048-Q1-E1-H3
ggcttctatggacgaaagagaaaatagagttaaaaaggttactactcagattttgcagagcctggagctgagctgagaaaacccccaaccccaacctcaaccttaacctctcctcactttcttttcaaccagaactatgattaagctttttaaagtaaaggaaaaacagagagaactggcagaaaatgcgagtggcggaccacccgttaagaagcaaagtgccggcgagttgcgtcttcacaaagatataagcgagctgaatctaccaaaatcatgtaccatgcaattccccaatggcaaagatgacctgatgaactttgaagtttcaattcgacctgatgatggatattacttaggtggcacatttttgttt

SEQ ID NO: 13181 - DNA, 361 bp, Glycine max
  Clone ID: LIB3040-048-Q1-E1-H5
ggaacttctcacgttcatttctacacatccctagctctgtcgttccgtcgttgacgatggcgtttcgggtgcgaagccctgacctccgctctctctttcttctctctctcttgtccatcgcttccgccaatgtcttcttcgaagagcgtttcgatgacgggtgggaaaatcgatgggttaaatcagattggaaaaaagatgagaacgtggctggggagtggaaccacacctctggtcaatggaatggagacgctaatgacaaaggtattcaaaccagtgaggattacagattctatgctatttcagctgagtaccctgaattcagcaacaagggtatgacactagtctttcaattttctgt

SEQ ID NO: 13182 - DNA, 314 bp, Glycine max
  Clone ID: LIB3040-048-Q1-E1-H6
gtggacattgaattattgcacgatgccacaagaagagaagcccggggcggttagtgtcttcattttgtgatgtatcttatttatgagaattcggtgggcttacataaggtggatgttaaccttcctacttcagaaggaaactcttttcagatgttaaaggttatgtaactgtattggcttttccttttagttcttttggaagctttgtccagttttaatgtgacaaaaatgatactggtgtaactgcatttctttttctttcccctagtgcctctatattcgaagaaatatcaccaagtataatgcatttatat

SEQ ID NO: 13183 - DNA, 340 bp, Glycine max
  unsure (1)..(340): unsure at all n locations
  Clone ID: LIB3040-048-Q1-E1-H7
agaaggggaaagggtttttgttttgtttccttgggtgctgcatgcactttcactcgaagaaccttgaagcgagtctgggccacagcaaccagcgacaacaactcaatcagctagggttgctttgccttgcatcctgttggaggatttcctgttcangaaaagatggtactaaaaattgtggatctcgttcagacacagttacaaagccaactgaagcaatgagagctgctatggcaagtgctgaagttgatgacgatgttctaggctatgattcaactgcttttcgcttagaaacagagatggcaaagacaatgggcaaagaaactgctccttttggtcc

SEQ ID NO: 13184 - DNA, 393 bp, Glycine max
  Clone ID: LIB3040-048-Q1-E1-H8
gataacggcgatttctccaaaaccttcaattccaccttcttcttctcatcttcacaccctacccctttattcttcttcacacacaattccttcaactctctttctctctctctctctctctctaaaaatgtctcatgtagtggtcactcgatccattcacacctccctcacgcgccccacctcaggatctgcacaccacagagcccaaacgttgttgaagcctccaacttttgcttccaaagtgttcccacaacaaaggaacaacccctccaaagtttgctcccgaagttgcctcgtcaatgcgaggaaatctgcacccactgaagttgttcccgtctcacccgaggatgattcaaagattgaagaagagttgcagcactcgcgtggtatgcg

SEQ ID NO: 13185 - DNA, 400 bp, Glycine max
  Clone ID: LIB3040-048-Q1-E1-H9
ggcagccaaagaaaagaaaatcctcaattttctgagcagccaaacactctctctctgtctctcgaaaattctcagtttgcagagaaaatctgaatcatgtcgtggcaagcgtatgtcgacgatcaccttctgtgtgacatcgaaggtaaccacctcactcacgctgctatcatcggccaagacggcagcgtttgggctcagagtaccgacttccctcagttcaaacctgaggagataactgccatcatgaatgactttaatgagcctggatcacttgctccaactggattgtatctcggtggcaccaaatatatggtcatccagggtgaacccggtgctgtcattcgagggaagaagggtcctggtggtgttactgtgaagaagaccggtgcggccttga

SEQ ID NO: 13186 - DNA, 350 bp, Glycine max
  Clone ID: LIB3040-049-Q1-E1-A1
gacgttcacattcaggaatcgttttcttcagaaaatttgccatcgttgagggaagcgcgagagccttcgttgttcaagatgagagctaagtggaagaagaagcgcatgaggaggttgaagaggaagcgccgaaagatgagacaaagatctaagtaggtgcttgaacaacgagtggagatgatgtgcttttccatctgctaccagcttcatgacattttatgctgtcatggctcttatgatgatcttgaggtctagtggccaggggagcttccatcttgactttagtttagctttactggtctaaagattgctgttttagtgtgggttaagttatgatattgagagttttg

SEQ ID NO: 13187 - DNA, 369 bp, Glycine max
  Clone ID: LIB3040-049-Q1-E1-A10
tcatgccattttttttatcggcattgatatatgcaatgacattagacacgttaattataattataacttgtatgagattctttctttcttttttcgtcaaatattgagaggcttattcacgaagcttttatcggagcagacttgtattttaagggagaattatgacaacatagcaatcattgcagtacatggtagcaataatttatcataatgttcgcagtatttaaaataatcaagaccaccaattttagtataactttttttaatctttttattcaacaaaaaaatttcatcagttctgttgcaagtgctacttattagcatcattctatttttttttcctacatattcttttaacattccgatata

SEQ ID NO: 13188 - DNA, 380 bp, Glycine max
  Clone ID: LIB3040-049-Q1-E1-A11
gagggtttggttattagggttttcgctcaccggtgtgcagtcgagcccccgaagaaaaagcgaaaatgccgtcgcacaagacattcagaatcaagaagaagttggcgaagaagatgaggcagaacaggcctatcccctactggatccgcatgaggaccgacaacaccatcaggtacaacgcgaagcgccgtcactggcgtcgcaccaagcttggattctgaggtgcttgctttgcctcggttctgtttatccaattaattagtgttttattttcttgagccaaaaacaatgctttggagattttaatattttgcattttgttccaagactatattgtgtaaggaacttattgtacttcagactaatggtggtgttggtca

SEQ ID NO: 13189 - DNA, 392 bp, Glycine max
  Clone ID: LIB3040-049-Q1-E1-A12
gacttgaatcacagtggtgccttatcgctgtggttatcatcttcttcttcctctttctcagatctcttctttctctacgccgcacgccgaaaccatggccggaaaaggagagggtcctgctatcggaatcgatctcggaaccacctactcttgcgtcggtgtgtggcaacatgaccgcgttgaaatcatcgccaacgaccaagggaacagaaccacgccgtcttacgtcggattcactgacaccgagcgtctcatcggtgatgcggccaagaatcaagtcgccatgaaccccatcaacaccgtcttcgatgccaagaggttgattggtcgtagattcagtgattcctctgttcagagtgatatcaaattgtggcctttcaaagtcattcctg

SEQ ID NO: 13190 - DNA, 317 bp, Glycine max
  Clone ID: LIB3040-049-Q1-E1-A4
aggggcgtgttttcatcattgtcgttctgaacggaaaagcactggcgcagctaccctgaagcttctcttctcgtctcttctctgtcgtgagtcaccatggtgagggttagtgtgctgaacgatgctctgaagagcatgtacaatgctgagaatatgggaaagcgccaagtcatgattaagtcatcctccacagtcattatcaaattccttttggtgatgcaaaagcacggatacatccggagaatttgagtacgttgatgaccacagggctggtaaaatcctggttgaattgaacggttcactgaacaactgttggg

SEQ ID NO: 13191 - DNA, 304 bp, Glycine max
  Clone ID: LIB3040-049-Q1-E1-A5
ggtgctctgctcgtgcctctagggttatcatttctccatttccattttctctctcacttttcaagaatcgtaagctatgggaaagtcttacccaactgtgagtgctgattaccagaatgccgttgagaaggcgaagaagaagctcacaggcttcatcgctgagaacagatgcgctcctctaatggctccgtttggcatggcactctgctggaacctttgacaagggcacgaagaccggtggacccttcggaaccatcaagcaccctgccgaactggctcacagcgctaacaacggtcttgacat

SEQ ID NO: 13192 - DNA, 297 bp, Glycine max
  Clone ID: LIB3040-049-Q1-E1-A6
gatccctgaaaatcaaatcagactcagaaagagaaagggaaagaaaatggcgctgaagtttctgaacaagaaacatcataaggctcaatcagattcagagtagcagtcaagtgaaggagaaatgagaagaaggaaggatcgctatgaggacaaaaaatacatggaaagatcacccagtcaccaacagagacaaagaaatggcaaagactacaaagaagatgccggtgacagatattataacaggtccaggtcagaaaggactgtccaaaacggtcaattggattcacggtatgaatc

SEQ ID NO: 13193 - DNA, 204 bp, Glycine max
  Clone ID: LIB3040-049-Q1-E1-A7
cacagaagggactcgcagattcaaacgtttccaggtgaggctgacgcatctctctctgcgttcatatgggagctgggcgtggagtcccagcgcacttgaggggtgagggacaaaaccttatgcagtcacaaagcctcaatcgcgcacttttccccgttcgttacaatgacacgttctatgtctatgcattcccttccgggtgaa

SEQ ID NO: 13194 - DNA, 393 bp, Glycine max
  Clone ID: LIB3040-049-Q1-E1-A9
gatgtcatagtattatcattcattctcatctttctctcttctctctccacccaaaccctaactcccgaccctgttcccctctcggatccgtcatgaaaggaggaaagtccaggaccgaatctaagagagccgatcccaaacttgctgtgaataataagggagccgccaccagagctaggaaacccgccggcaaggggaaggcagcgaaagaccctaacaagccaaagaggcctccaagtgcgttcttcgttttcatggaggagttcaggaacgtattcaacaaagaacatcctgaaaacaaagcagtgtctgctgtgggcaaagctgctggagcaaaatggaagaccatgtctgaagctgaataagcaccttatgtggcaaagtctgagaaaa

SEQ ID NO: 13195 - DNA, 378 bp, Glycine max
  Clone ID: LIB3040-049-Q1-E1-B1
gactcgcagattcaaacgtttccgaggtgaggctgaggcatctctctctgctttctacaatgggagctgggcgtggagtctccatctcacttgatggggtgagggacaagaaccttatgcagctcaaaaagctcaatctcgctcttttccccgttcgttacaatgacaaatactatgtcgatgcactcgcttccggtgaatttaccacactagcttactatagtgatatttgtgttggagcaattgcatgccggctggataagaatgaacgtggggggcaagttcgggtttacatcatgacgttaggtgttttggcaccttaccctggacttggtaatggaacaaaattattgaattcatgttcttgatcctttctcc

SEQ ID NO: 13196 - DNA, 155 bp, Glycine max
  Clone ID: LIB3040-049-Q1-E1-B11
ggatagcgaaacagagagtggtttcagtgagtgatcggtgttcacttgatccttcataagtcgtcatcatcatcatcatcatcaccgttgattgaagaagatgccgatcagaaacatcgccatcggaaggcctgaagaggctactcaccccgaca

SEQ ID NO: 13197 - DNA, 352 bp, Glycine max
  Clone ID: LIB3040-049-Q1-E1-B3
ggttgtagcaacctaacgtgagtgagtgatagaacttcagaccctttgttgcgctcttccctcgcaagcacttcacgtttccaaccatcgtagtctatcatcaacagcgtttggcacccacgctccattaacaaaccaaattcatggatttcggttcggaaacccctcatagtgtttataatgggtgattaaagagacttcacttttgggaatgagcgaatctacgaagcttctattacatgcatctgattccaatttataaggtggcttggaagttcatccacaacaaagttctagtgtacccgttactacatttaacagtgtggaaccgtgtcatggtagatcaggttct

SEQ ID NO: 13198 - DNA, 392 bp, Glycine max
  Clone ID: LIB3040-049-Q1-E1-B5
gacacttactagtagtaagcatggagtcctcaaagatctatgcttacctcttcctctgcatgatctttctctcttccgccactcacattctcggttgtggctactgtggcaaactccccaagaagcacaagcctggtaaaacaccaaagacacccagaacacccgttgttaagccaccagtcaccatccctcccattaatgttcctcccgttgttcttccaccaatagtgaagcccccatgtattctccctccaattccaattattaacccaccaaccacaccagggaagggagggaacactccatgcccaccaccaaaatctcctgcgcaggctacgtgccccattgacacgctcaaacttggtgcctgtctggatcgtcttggaaggttg

SEQ ID NO: 13199 - DNA, 313 bp, Glycine max
  Clone ID: LIB3040-049-Q1-E1-B7
tgggacacagaccaatattcagtcatttagattcatcagaagcttataacaacaattaaacatgagtgcagccagcacagcttggattgtggcatcaagcattggagcactggaggcattgaaggatcaattgggggtgtgcaggtggaaccatgcattgaggtcactgcagcagcatgccaagatcaacattagatcctacactcaggccaaaagcttgtcttctgctacttctgctgctgtccccaataacgtcaagaggaccaatgaggagtccatgagggaaagtcatggacttgagccgtcagggtcc

SEQ ID NO: 13200 - DNA, 394 bp, Glycine max
  Clone ID: LIB3040-049-Q1-E1-B8
gacactgtttttttcagatttcagttttctataatagagagttctattatagaaatttcgattgtaaaatacaataaaattggattcgatactaaacataaaatagatatctatatagatagataatttgagacaaaatcaattaacatatggaaaaggtactctacgggggattttttgtcttttcctagagtccgattcctattccttcttgtttgtgtcgaaatacaaatattctaaaaatatcaataaaataatcttttttaaccccttcctgaaaaatcctacatcttagtttctattttttccaacttagaatatttctgccatataatattttattgcatataatacgtagtgaacaagttatacgagagggggttggggaatttga

SEQ ID NO: 13201 - DNA, 391 bp, Glycine max
  Clone ID: LIB3040-049-Q1-E1-B9
ggttctagtgtgtgattgtttgttgttgtaactcgttcttcttcttttgttgttctgtgtttgtgtttgttttttctctcacctgaaaatgtcttgctgcggtggtaactgtggttgcggaagctcctgcaagtgcggcaacggctgcggaggctgcaagatgtacccagacttgagctacactgagtcaaccaccaccgagaccttggtcatgggagtggcacctgttaaggctcaatttgagggtgctgaaatgggtgtgcccgctgagaacgatggctgcaaatgtggaccaaactgctcctgcaacccctgcacttgcaagtgaggtgttgggagagcaagcttcaagcagagatagcccttaattaggaataatgataaactatta

SEQ ID NO: 13202 - DNA, 350 bp, Glycine max
  Clone ID: LIB3040-049-Q1-E1-C1
gattatcatagtagatattcattccccttatctttctctcttctctctccccgcccaaaccctaactccctatcctattccgctttctctcatccatcatgaaacgaggaaagtccaagatctgaatctaacagagccgatgccaaacctgccgtgaataagaagggcgccgccatcacgactaggaaacccgccggaaaggggaatgcatcgaaagattctaacaagccaaagacgcctccaagtgctttcttcgttttcatggaggaaatcatgaacgtgttcaacaaggaacatcccgacagcaaaacagtgtctgctgttggcaaaactgctggagcaaaatggaa

SEQ ID NO: 13203 - DNA, 169 bp, Glycine max
  Clone ID: LIB3040-049-Q1-E1-C10
gagtgtggaagtatgtgcagaactttgtttcccaacctccattgcctccgcttctacctcgctaccatgatcattcctgagaagaaccgcaacgagatctgcaaatacctcttccacgagggagtttgctttgccaagatggacttcaatttgggcaagcaccctgaga

SEQ ID NO: 13204 - DNA, 376 bp, Glycine max
  Clone ID: LIB3040-049-Q1-E1-C11
gatcacaaataacaatggggctttgtacagttcagcctatcactctctcgaagcttcctaacgcctcctcttttcttcctaaacctaaaccctctcttcctcagtcttacactccctccgccgcacacttatctcggtcagtttgcttaaggaatctgtcgccaaaggcaacatcttctgaagaagaaaggtccagtgggggaagtcaatttttcaatgagaagcgcgatggtgtaataatcctggaggatgttaaagaggataataataagaatgagttcgataaaacggtgattgaagatacaaagcaggacttgtttgatgatgatggacagggtctatcatttgatttgctggataagctcaattttgatac

SEQ ID NO: 13205 - DNA, 229 bp, Glycine max
  Clone ID: LIB3040-049-Q1-E1-C12
gaacttttaagttattattattattatgaacactattgtgttaacaatgctgccattttttctcttcctgttagtttggcttcctagggttacctgtggctggacggctgcacatgccacattctatggtggtgcacatgcttcagggaccatggggggagcatgccgttacgggaacttgtatcagcaagggtatggaaccagtacagcaccattaaccgctgcactt

SEQ ID NO: 13206 - DNA, 389 bp, Glycine max
  Clone ID: LIB3040-049-Q1-E1-C2
gactttcacacagtttcctttcttctctctctggacctatggcgagtgaccggagcggcgaatatagagtcagatcggaagcggaagaaggcgtcgacctcggcggcggacaatgagaaccggaataagaataagaagttgaagatgtcgtcgtcgtcctcgaacgctggtggccgtggcgatgttagggcttcgcacatactgataaagcacgaacgttctacaacgaaggcctcgtggaacgatccagaaagccgcatcatcaagagcacaaccaggataaaacgccgtttctcagctcaaggccctccgcgacgacatcgtttcgggcaacgccacttttgacgacatcgcctctcgcctcctcccaatgcaactccgccaagccc

SEQ ID NO: 13207 - DNA, 382 bp, Glycine max
  Clone ID: LIB3040-049-Q1-E1-C4
gaactcaaactgcttcattgcataattgcagataagatcaacccttctaccttcagattcgcgggaagatggcatcacttcatgctaatgtgacatcagttgtttacaacagtggcaaccgtgtttctcaatcgaaatttgcaagctcttccttcttgtctgggttcgatgttgttggtcgtgcttcaagtgcttggaagaaggaacttgtcccatcttccatttccttggtgcctagagccaccctaacatttgatcccccaactaccaattcagacataaccaagcaaaagaagcacactcttgaccctgcttctccagattttcttcctcttccttcatttgaacagtgctttccaaagagcaccagagaacacaggga

SEQ ID NO: 13208 - DNA, 384 bp, Glycine max
  Clone ID: LIB3040-049-Q1-E1-C6
gatctcaagccacttcagagaaaatggcggtacctctgctctcgaagaagatcgtgaagaagagggtgaagaagttcaagaggcctcagagtgacaggaaaatttccgtcaagacaaactggcgtagaccaaagggtatagattcccgtgttaggagaaagttcaagggatgcactttgatgccaaacatcggttatggttctgacaagaagacccgccactatctccctaatggttttaagaaatttgttgttcacaatgtgaaggacttggaactgctcatgatgcacaacaggacttactgtgctgagattgctcacaatatatccacaagaaagagaaaagatatagttgagaaagctgcgcaacttgatgttgttgtga

SEQ ID NO: 13209 - DNA, 378 bp, Glycine max
  Clone ID: LIB3040-049-Q1-E1-C7
ggattcatctctctcattgcactgcattgcaccactcactcaccaatgggactcagacccatcgacaacgctcttccaacaaccccagagagacctaacttacaacccaaagtcgctcttgcaacccaaaagcaacaagaccgtgctggcgtcaatggcgaaaacatagttccattgccctcatctggggatgccactgttgactatgtctcctccgagaaccttaagcccttgtcggaccctgaagttaagattcagagcttggttgaagatttggattcgaaaaattggacgaaggtttgtgagtcgctgaatgatgttaggcgcgtcacgatgtgacactcgtctcatctgttccccagtttgggaaaaattgtg

SEQ ID NO: 13210 - DNA, 154 bp, Glycine max
  Clone ID: LIB3040-049-Q1-E1-C8
ggtgaacaaattgaggtgtggtgtgcatgttcaacattgggcaccgatgatgggttcagctactgtgcaaatagcgacgtcaaaatttgttctttgcccgaatgcttcagcggcgaaggttgcgagtcccaacaagaatgccgtcatcaatttc

SEQ ID NO: 13211 - DNA, 281 bp, Glycine max
  Clone ID: LIB3040-049-Q1-E1-D11
gagatttctgagagaaaggaaagggtgtgagaagagaatggagagtaaagaggaagatgttaacgttggagcaaacaagttctcagaaaggcaaccaattggtacagcagctcagggtggtggtgacaaggactacaaggaggcacccccagctcctttgtttgaacctgcttagctcagatcatggtccttctacacagctggaattgctcagtttgtggcaactttcttgtacctctacattaccatctaaactgccatgggtgtcaacaggtcaccct

SEQ ID NO: 13212 - DNA, 317 bp, Glycine max
  Clone ID: LIB3040-049-Q1-E1-D4
gaatcctctgttgtttctcagccgcctcggctagggttcggaaacgaagaagggttctgttttcttttcgcgatgagggccaagtggaagaagaagcgtatgaggaggctgaagaggaagcgccgaaagatgagacagagatccaagtagtgcgttaaacctagtttgtttccgttgcttttacaattgcttatgttgtcaaatacgacacccagttgttaatggcactggtctctcctttttgatgttttgatacattttgttggattttatttcgtcgtatgttcttagctgaaaacaatgctgttactgcgttt

SEQ ID NO: 13213 - DNA, 359 bp, Glycine max
  Clone ID: LIB3040-049-Q1-E1-D5
ggtgcaaaggaggaagaggaaaaagaggattggagggtcgccacgtttagcaacaaccaaaccctctctactctttcttcttctcttcgctagggttttagcttcttcctcttcacttcgttcttctggcctctacaatgagcaacgacaaggacaccttcaacgtcgctgatctcacttccgctctcaacgaggacaatagagcagaccttgtcaatgctctcaagagcaagatacagagtttggctggacagcattctgatattctagagtctctgtcgcccaatgtcaggaagcgtgtggaggttcttagaaagatccacggtcaacattatgaattagaggcaaaattttttgag

SEQ ID NO: 13214 - DNA, 291 bp, Glycine max
  Clone ID: LIB3040-049-Q1-E1-D6
ggttctagtgtgtgattgtttgttgttgtaactcgttcttcttcttttgttgttctgtgtttgtgtttgttttttctctcacctgaaaatgtcttgctgcggtggtaactgtggttgcggaagctcctgcaagtgcggcaacggctgctgaggctgcaagatgtacccagacttgagctacactgagtcaaccaccaccgagaccttggtcatgggagtggcacctgttaaggctcaatttgacggtgctgaaataggtgtgcccgctgagaacgattgctgcaaatgtgg

SEQ ID NO: 13215 - DNA, 350 bp, Glycine max
  Clone ID: LIB3040-049-Q1-E1-D9
gatcattagcaaatagaagagcaaagagagtgagaaaagaaggaagaagaagaagaagagatggcaaatgaactacccgtcaaagcttttggttgggctgcttcagacacttctggcacccttgccccttttcatttctccagaagggaaaatggcgtcgatgacgtcactctcaagattctcttctgcggggtttgccactctgatctccacactctcaaaaacgactggggtttcaccacctaccctgtcgttcctgggcatgaaattgttggtgttgtgacagaagttggaaacaatgtgaaaaacttcagagttgggtgataaagttggagttggtgtgatagtgg

SEQ ID NO: 13216 - DNA, 362 bp, Glycine max
  Clone ID: LIB3040-049-Q1-E1-E10
attgattttctaattctccttattttcttgtatataatgattttgtatactcattttagtttcataatctacatgtattataatttttcattttcttatgatatcgataaaaaaaatgtaataaaaaaactcataatgaggacatagaaattatatttcaataaccaaaataatagcatatagttcaaagatttataatttaaatttctattgtaaatcaaagtatgacataaaatccataacaaagtaatattagtattgtactaaacttttaatttaaatccaaaatacattataagcaaactaagggttgctagcaccagaagatcctcttgcatccaaacgtgtattacgaacacttg

SEQ ID NO: 13217 - DNA, 393 bp, Glycine max
  Clone ID: LIB3040-049-Q1-E1-E11
gactcaccacttcaaaacactcataacacaaagcacaaagcaaagctcatccttgagttaaaaaatggcagcagcttcttccatggctctctcatccccatccttggctggcaaggccgtgaagctgggcccatcagccccagaagtgggaagggtgagcatgaggaagaccgtcaccaagcaggtctcctcaggaagcccatggtacggcccagaccgagtcaagtacttgggcccattctctggcgagcccccgtcctacctaaccggtgagttcccaggcgactacggctgggacactgctgggctttccgcagacccagaaaccttcgccaagaaccgtgaactcgaagtgatccactccacgtggggcatgctcggagccttgggctg

SEQ ID NO: 13218 - DNA, 251 bp, Glycine max
  Clone ID: LIB3040-049-Q1-E1-E12
ggaaccctagccatccattcatccacgagtcagtatttgcatcttggacccagatacctcgatattgcgcgttggcccctacctgctcgtctgtccgttggtcgactggctgacaagctcccacgtgccagcttggctgcacggctgtctgtacctctgcatgatggtctggtgatgtcacaacgccacagccctataactgtggcactgcgtcacatcatgagattccggaatagcactgaactcctgat

SEQ ID NO: 13219 - DNA, 384 bp, Glycine max
  Clone ID: LIB3040-049-Q1-E1-E2
tggggcgacaacatagcgcacttgtttcgttgatcaccgttcttcacctgccggtgacggaattcaaaaacacccgcctctttctctttctctctctgtctgtcaccagaatctgttccattcatcttctctggtttcgattccaattcgcttggggatctgaagattgatgacaaatactctggttctgtaccaataacaaaaatcaagttgagtactattttgctggaaaataatggaagcacatcctactttctccattgaaagttccaagcaactcaatatcatggggatgtctggagcactttcttcatccttgtcaatccttccaatacacccagaagaattgtttcccaagctggcctgaatcacagctggattttg

SEQ ID NO: 13220 - DNA, 381 bp, Glycine max
  Clone ID: LIB3040-049-Q1-E1-E3
gaacacaatactcttcaaacactttaccttcttcttaagacaacaagctaaaagcgcttctaacttaagtgatggctaacgctgctgaagtttcagcgttgaaacgcatcaagttgcatcttttgggtgaactctctccactggccactccccaaaacaaatttgaccaaacaaaccctagcccctctgaatcttccaattccgaatcttcttctatttctcttaaccactacttcactgacctcctcgaacccgaaattgaatttcctctcttcgaattcgattccaaaccccaagtaatcgacctcgaaaccccgaaaaacctaatttcagctgagaagaagcctcaatttaatcggaaaccgtcgctgctaatcgctg

SEQ ID NO: 13221 - DNA, 399 bp, Glycine max
  Clone ID: LIB3040-049-Q1-E1-E5
gacacttactagtagtaagcatggagtcctcaaagatctatgcttacctcttcctctgcatgatctttctctcttccgccactcccattctcggttgtggctactgtggcaaaccccccaaaaagcacaagcctggtaaaacaccaaagacacccaaaacacccgttgttaagccaccagtcaccatccctcccattaatgttcctcccgttgttcttccaccaatagtgaagcccccaggtattctccctccaattccaattattaacccaccaaccacaccagggaagggagggaacactccatgcccaccaccaaagtctcctgcgcaggctacgtgccccattgacacgctcaaacttggtgcctgtgtggatcctcttggagggttggttcaca

SEQ ID NO: 13222 - DNA, 358 bp, Glycine max
  Clone ID: LIB3040-049-Q1-E1-E8
ggcagcgcttgatttgaggccaggcaagccccactcaaccaccacacctctcctcgttcacgctacccctttctgctcttcttctacctttcaagttttaaaagtataaagatggcagagacattcctatttacctcagagtcggtgaacgagggacaccctgacaagctctgcgaccaaatctccgatgctgtcctcgacgcttgcctcgagcaggacccagacagcaaagttgcctgcgaaacatgcaccaaaaccaacttggtcatggtcttcggaaaaatcaggaccaacgccaacgttgactacgagaagatagtgcgttacacctggaggaacatccggctcgtctcaaatg

SEQ ID NO: 13223 - DNA, 328 bp, Glycine max
  Clone ID: LIB3040-049-Q1-E1-E9
gactcatacaatagagaccagcttttgcttctttgtgaacatggagatgaggaaatcatgtggcttcttcttcttgctcctcctccttgtctttgcttcccaggtggtggtgcagacggagggaagagtgtgtgagtcacaaagccacgggttccatggtttgtgtaatatagaccacaactgtgctttggtctgcaggaacgatggtttctccggtggcaggtgcagaggcttccgccgccgcttttgcaccaggatttgttgagatctcatcagttagttattcttgccatgcaaattaataaatcatagctaggccaaatcaatt

SEQ ID NO: 13224 - DNA, 368 bp, Glycine max
  Clone ID: LIB3040-049-Q1-E1-F10
gacagcagcttccctcgcacccatgcccaatcacatcgacgagactcacgatttccttctcactgctatccagaaggacgcagagtccgttcacatcacgaggagcgagagatgtggtgacgttcaaggtcagatgcgcgaaatatctcgacacacttctgtgtctttgacccaaagaaagctgatacattgagtcagtctcatccaccaagtttcaatgttcaagacctgtcacggtacacggctatagatcaacaagaaccaattcagtgattcgtcagaacatcgtatcacagtagtcgatacttcatattcatttcagtttcctgtagttttaaatcaatactctgacaaggttcttttcatct

SEQ ID NO: 13225 - DNA, 374 bp, Glycine max
  Clone ID: LIB3040-049-Q1-E1-F11
gaccgcacagaattagggttttccaattcacagagcaacacaacgaaccaacaatggcgcagcctcagccgcagtcgcagccgcagcacgggcaagcagcgctggagcaggtgcagtgcttcggtcgcaagaagaccgccgtggccgtgacctactgcaagcgcgggcgcggtctcatcaagatcaacggctgccccattgagctcgtggagccggagatcctccgcttcaaggccttcgagcctatcctcctgttgggtaagagccgcttcgccggcgtcgacatgcgcatccgcgtcaagggtggcggccacacctcccagatctacgccatccgccagagcatcgccaaagcgctcgtcgcgttctaccag

SEQ ID NO: 13226 - DNA, 269 bp, Glycine max
  Clone ID: LIB3040-049-Q1-E1-F12
gatcacaacactaacacagattttgattcgattcgattcgattcagtcgaggttttaagcagcagcaagatgtctgggcgtggaaagggaggaaagggattgggaaaaggaggagcaaaacgacatcgtaaggtgctccgcgacaacattcagggaattacgaagccagcgattcgtcgtttggctcgcaggggtggcgtgaagcgtatcagcggtttgatctacgaggagactcgcggtgttctcaagatcttcctggagaatgtcat

SEQ ID NO: 13227 - DNA, 374 bp, Glycine max
  Clone ID: LIB3040-049-Q1-E1-F2
gggtgaaactaacaacaacacaaggccatcatcatggcagctgcttccccaatggcaagccaactcaagtccaccttcactaggactcttgtagctcccaagggcctctctgcctcttcaccacttcacctcgtgcctcctagaaggcaatttagcttcactgttaaggccatccaatcagagaagccaacctatcaagtgattcagccaatcaacggtgacccattcattggaagcctggaaaccccagttacatccagccctttgatcgcatggtacttgtccaacctgcccgcatacagaaccgcagtgagcccactactaagagggatccacgtgggcctggcccacggataccttctggtgggcccata

SEQ ID NO: 13228 - DNA, 396 bp, Glycine max
  Clone ID: LIB3040-049-Q1-E1-F3
ggcgtacgcagcttcatccctaacgcgtgcatagcagagtcagagacagagacgcagccatggggcggagacctgcgacgtgttataggcaaattaagaacaagccataccccaagtcacgtttctgccgtggtgttcctgatcccaagatcacgatttatgatgttggtatgaagaacaagggtgttgatgagtttcctttctgtgtccatccggttagttgggagaaggaaaatgtttcaagttaggccctggaagctgctcgcattgcttgcaacaagtacatggccaaatttgctggaaacgatgctttccacttgagagtcagggtgcacccatttcatgttcttaggatcaacaagatgccttcgtgtgctggtgctgatacgctccaaa

SEQ ID NO: 13229 - DNA, 326 bp, Glycine max
  Clone ID: LIB3040-049-Q1-E1-F4
acgacagaacggtacagctgccagaaacgacagaacggtacggctgccagcaacacgacacaaaggtacagctgcgacaacacgacaacaaggtacggctgccacaacacgacaaaaaggtacggctgctactacgacgacaacaacgggatatttctaactctcaacacttccatatcttatcgtctcctcctccatcattgatgttctcacagaaacttctcaagattgctggcataccattctgaagcttcaatgactccttcaatttggcctccatcaacgcctacattgctgagttcatctcaacccttctccttgttttt

SEQ ID NO: 13230 - DNA, 385 bp, Glycine max
  Clone ID: LIB3040-049-Q1-E1-F5
ggtttgattagggtttgtcattagcacttcttcttttcacactgccgctgcaacaatggcttcagagaagaaactttcgaacccaatgagggagataaaagtgcagaagctcgttctcaatatctctgttggcgagagtggagatcgtctcaccagagccgccaaggtgttggaacaacttagtggccaaaccccagtgttttccaaagcaaggtacactgttcgttcctttgggattagaagaaatgagaagattgcatgctatgtcactgtcagaggtgacaaggcaatgcaacttttggagagtggtttgaaggttaaggaatatgaacttctcagaaggaatttcagtgatactggttgcttcggctttggtattcacgag

SEQ ID NO: 13231 - DNA, 255 bp, Glycine max
  Clone ID: LIB3040-049-Q1-E1-F6
accgacgttctgccatttgacaagaacagggttgttctcaaatctagtactgattatagacctgaagcacaggggtatatcaatgcaagccttgtctcgacctcctcagctggaaacgtgtcccagtttatagccacgcaaggtccacttcaacatacttacgaggatttctgggaaatgatcatccaatatcactgccctgcaattatcatgcttactaggttggtggataattacaagatgacaaaatgtgga

SEQ ID NO: 13232 - DNA, 362 bp, Glycine max
  Clone ID: LIB3040-049-Q1-E1-F7
gactcctttccgtcagttttggggaaaaggtcgagtttcacagcagcaatggtgtacgtcaaggctcagaaatcaaaagcctacttcaagagatagcaagtcaagttcaagagaagaagagagggaaaaaccgattaccgtgccaggattcggttgattaatcaggacaagaacaaatataacactccgaaataccgagttgttgttcgctttagcaacaacgacattgttgcacaaataagatctgctagcaatgctggcgatattgttcttgcctcagcatatgcacatgatctgccacaatatggtcctgaagtacggcttacaaattatgctgcagcttagtgcactggtctcctgtt

SEQ ID NO: 13233 - DNA, 299 bp, Glycine max
  Clone ID: LIB3040-049-Q1-E1-F8
gaggcacacactgcgacaccacactccctgcgatcccgagatcacactctcttgcgcgagactctaactctcactatctcgctcgacactggttccgcttgtcggtcttgatctctgtggttcacaccaatgtctctcacacacatatgtggtcagtcattgtctagctgcactttaatttattaccagtggggcaattcatacactacccatgaatctcattttgagttgcttggtggaagctgatatttgagaaaacagtgaaattactgtcactattgcatctgtacatagaccac

SEQ ID NO: 13234 - DNA, 195 bp, Glycine max
  Clone ID: LIB3040-049-Q1-E1-F9
gaggaacagtgaaaatgttcttgttttgttgcctatgctctccatttataggcttttttttcccgtgttatattcaattggctcttcaaatgtaaatgagccaacatactatgagattgaaaagaataagtttcttgaactgattgaatactatgttggcctgtaaaagtttcatgcagttatgtttttatttcg

SEQ ID NO: 13235 - DNA, 377 bp, Glycine max
  Clone ID: LIB3040-049-Q1-E1-G1
gagttcaattccaatatattccattctctctgtgtatttccctacctctcccttcaagatgcagatcttcgtcaagaccctcaccggcaagaccatcacccttgaggtggaaagctctgacaccatcgacaacgtcaaggccaagatccaggacaaggaaggaatccccccggaccagcaacgtctcattttcgccggaaagcaacttgaggacggccgtacccttgctgactacaacattcagaaggagagtactcttcacctcgtcctccgtctccgtggtggcatgcagatcttcgttaagacactcaccggcaagaccataaccctagaggttgaaagctccgacaccatcgataacgtcaaggcaaagatcc

SEQ ID NO: 13236 - DNA, 66 bp, Glycine max
  Clone ID: LIB3040-049-Q1-E1-G10
gagaacagtgggagctcgaggaagtacacttttcaggtgcagagtggggatgctgagaagaaggcg

SEQ ID NO: 13237 - DNA, 273 bp, Glycine max
  Clone ID: LIB3040-049-Q1-E1-G2
gagcaacatggtgaagctggtggagagatttacttgccagaagcttacgttagaaccaagaggactacttaatggagcagatcagttggaagaacttgtagctagcttcccaactggcttatctgagtgtggagaagcattatcaagccttaggagtatgagaacgagtactgtttgtgatgaatgtctatggtttaagaaatctgtctttagtcaacttgtgtgttttgttattcagttctcagcaataaactgctctggcaatctagtttc

SEQ ID NO: 13238 - DNA, 396 bp, Glycine max
  Clone ID: LIB3040-049-Q1-E1-G4
ggttttaggttttcttagatagagttgttaccatttgctcccagtacagagcttaaccgagcttcacaaagatgaatcgggaaaagttgatgaagatggccggttcggttagaactgggggaaagggtaccatgagaagaaagaagaaggctgtccacaagacaacaaccacagatgacaaaaggcttcagagcaccctgaagagaataggggtgaatgccatcccggctattgaggaggtcaatatctttaaggatgacgtagttatccagtttctaaatcccaaagttcaagcatccattgctgctaatacttgggttgtcagtggttctccacaaacaaagaagttgcaagatatactccctagcattatccaccaattaggaccagataact

SEQ ID NO: 13239 - DNA, 422 bp, Glycine max
  Clone ID: LIB3040-049-Q1-E1-G5
accacgcgtccgtgcactagagaatttggtatacagcttctgaaggcaatctttactagccagagcataatattccagaagcaaattaatttcagggcacatatttacaacttagacacaaacccttccatttccattatcctctccgacgtctccgtcagtcacatacacatactcttcttcttcttctgcttccatggcgctcactgcttcgctcgctcacaactcatttctgaaaatcccaacagccattcatagcgaagcctctccgttatgttcatccttcatgggttctccgcctacactctcgcgctcttctactcttcccgggaaccagtcgctttcgaggaaccaattcgtggtttttgcgaagaagatttcgggattggaggaggccatgaatatcagaagagatcgtgaac

SEQ ID NO: 13240 - DNA, 381 bp, Glycine max
  Clone ID: LIB3040-049-Q1-E1-G7
gactgcaactttgctctctgtgaggcttcaatttctaattagggtttcgcttagagtaaccaataaccatgggagtcttcacctttgtcgtccgcaaatccggcagcgaatggagcgccaagcaacattccggcgacatcgaggcctccgccgattccaccttcgatctccaacggaagctcgtgcaagccgctctcgccgttgattcctccggtggagttcagtcctctttctctcccgtgtctcctacctccgctgtgttccaggtgatagtgggtggtgcagtattcgttggaggtggtggtggtgctgttgcagctgcacctgcaggtggtgctgccgcagctgatgctgccccagctgctgagaaaaaggaagaaa

SEQ ID NO: 13241 - DNA, 144 bp, Glycine max
  Clone ID: LIB3040-049-Q1-E1-G9
gatcgcatttcatagcactcaccctcattaccaacacgaaagcatagccaaaaccttttttcgaagtctctgattttcctaatggctccggcaaaggcagagaagaagccggcggagaagaagccagcggccggagacagcacc

SEQ ID NO: 13242 - DNA, 356 bp, Glycine max
  Clone ID: LIB3040-049-Q1-E1-H10
gatggctgcgcttggggaacaatcagaagaacaagccatggctgcccaacctaaacctcagaaccgacgacccatttctaacatcgtcatcgtcgttgctatgcagacggaggcacttcccattgtcaacagatttcagctcaccgaggaccctcactctccgtttccgcgaggggttccttgggttcgttatcaggggacatacaaagatcttaatataagcttgatttggcctggaaaagatccaactttgggggttgatagtgtaggcacgatatcatctgctcttgtaacgtatgctgctattcaagcattacaaccagacttgatcatcaatgcaagcactgctggtggct

SEQ ID NO: 13243 - DNA, 417 bp, Glycine max
  Clone ID: LIB3040-049-Q1-E1-H12
cagaaggggaaccacttttaaatttgagggatcaaagggtaagttgtttcagcgaaccagaagaaggggctcctcaactttaaaaagtgaagttagaattgaatgaatgaaaaagggtccgtggcaatggagacagagccaaaagggctagaagcttccctagaacatttgattgaccttcaccaccacaaatctcttgtccttgcccaccacacagacaaagccaagaaggacgcaataaggaaagccgagcacgtttctgatttgttggttgaagcggtgaatggtggggtccaagattccttcatcaaccagaagcgaattgagctcgaaattcgaactctggctaccaccatcacgaggttcatgaagcagactgatcaatggctcgctgccactcatgccctcaacactgct

SEQ ID NO: 13244 - DNA, 309 bp, Glycine max
  Clone ID: LIB3040-049-Q1-E1-H2
ggaattgattgttgtaagactttgtaattgaggtgctgcaatggcttcaagtcaggaagaggtgactcttttgggagtaattggaagcccatttgcttgcagggtgaagattgcccttaagttgaagggagttgaatacaaatatgcggaagaaaatttggccaacaagagtgatttgcttctcaaatccaacccagttcacaagaaagttccagtttttattcacaatgagaagcccatagcagagtctcttgtgattgttgagtacattgatgagacatggaagaacaaccccatcttgccttctga

SEQ ID NO: 13245 - DNA, 272 bp, Glycine max
  Clone ID: LIB3040-049-Q1-E1-H3
cggggaattgattgttgtcagactttgtaactgacgtgctgcaatggcttcaagtcaggaagacgtgactcttttgggagtaattggaaacccatttgcttgcagggtgaagattgcccttaagttgaacggagttgactacaaatatgccgaataaaatttggccaacaagagtgatttgcttctcaaatccaacccagttcacaagaaagttccagtttttattcacaatgagaatcccataccagagtctcttgtgaccgttgactaca

SEQ ID NO: 13246 - DNA, 239 bp, Glycine max
  Clone ID: LIB3040-049-Q1-E1-H6
gggaaattcgcaagacctttaacattaagaatgacttcacccctgaggaggaagaggaagttcgtcgggaaaaccaatgggcatttgaatggttttgttaatctcaaaaaatctgaatcaaagatctgccatgtggatttatgctatgcttgtttgtttatcaaagatctctcttgtagatttgcctatgctatatacttgtttgttttatattcaagactatttccgttgactgtgtg

SEQ ID NO: 13247 - DNA, 380 bp, Glycine max
  Clone ID: LIB3040-049-Q1-E1-H9
gaagatggccggttcggttagaactggaggaaagggtactgtgagaagaaagaagaaggctgtccacaagacaacaaccacagatgacaaaaggcttcagagcaccctgaagagaataggggtgaatgccatccctgctattgaagaggtcaatatctttaaggatgacgtagttatccagtttctaaatcccaaagttcaagcatccattgctgctaatacttgggttgtcagtggttcaccgcaaacaaagaagttgcaggatatactccctagcattatccaccaattaggaccagataacttggaaaacctgaagaagctagccgagcaattccagaagcaggctcctgaaagggccgctggttcaaccacagctc

SEQ ID NO: 13248 - DNA, 387 bp, Glycine max
  Clone ID: LIB3040-050-Q1-E1-A11
gactccactcacaactgaaaccaaaactgaagcggacgacctacaagatcataacatggcttcttctaccatcaactcctccttcctaacatcatgcccttcatctctcttcaacagatcatcatctccttccttccatgctaggcataatctccgcgttctcgcgccaagcccccctatgtcagcctcagctttcgcctacgagctcggatcgttccagttcgatccgattacagagtcgattgtgtcgcgcgagatgactcgcaggtacatgatcgacatggtcacccattccgacaccgacgtcgtcatcgttagcgcaggctccacgggtcactcgtgcgcctacgagctctcgaaaaacttctccatcaacatcgccattgt

SEQ ID NO: 13249 - DNA, 259 bp, Glycine max
  Clone ID: LIB3040-050-Q1-E1-A2
gaatcacgcactatcagtacaacaactcactcactaagctaaacaatttcatcaagcctgccatggcttcctcgcgtgcttcctctgccattgcagctgttgccatctccacaacaggttcccagaagaatggatcactcttgggaagcacaaaagcttcttttcttaatgggaggaaactgaaggtgaacagttttacagcaccagttggaccacgatgcaggaatagattgcgcttcccaacagttcctcaacctga

SEQ ID NO: 13250 - DNA, 340 bp, Glycine max
  Clone ID: LIB3040-050-Q1-E1-A3
ggactaaccctagttcattgcactgcaacttagccacttgaacgcccgtcactacgaaaccacagggaattcagagaagaggttacgatgtcggcccatgacagagaggacaaggagttggatctcacttctccggaagttgtcaccaagtacaagagcgccgcggagattgttaacagggctttgcagttagttatttcagaatgtggatcgaaggcagagattgttgacctttgccagaaaggggagtcctatattagtcagcaaactggtctcaggtacaagaacgtgacgaggacacatcgagagatgtgtttgccttcctacatgtgtgtctgtg

SEQ ID NO: 13251 - DNA, 370 bp, Glycine max
  unsure (1)..(370): unsure at all n locations
  Clone ID: LIB3040-050-Q1-E1-A5
ggtttttatccttccttaaggttaagatttgggtggcatattttcaagtggttgagaaaaattatacagcgggagtgttgtgatttctaaatctgagattctgaatctgaagctacgatgagaagttgaagttgaagaagcaaaatggtgaagcattcgcaagcgtggttgttgtgatttctaaatctgagattctgaatctgaagctacgatgagaagttgaagttgaagaagcaaaatggtgaagcattcgcaagcgtggttggcaatgcggagcaagacttgtgcgctaacactcctggcactcttgtcnctctgcaacctcaacctcctcttcctccgaaccacttccgattcctgcaccaaactc

SEQ ID NO: 13252 - DNA, 321 bp, Glycine max
  Clone ID: LIB3040-050-Q1-E1-A8
ggtgtagtggaagtactagcaagtacgtcgtatatgtggttgatcttttgctggttgtttgttttgttccttccaattgtcagatctgaatcaccggactcactcttcacactcactcacactgaatggcttctgaaggcgaccatcaccaccaccaccaccaccatcaagatcacgatcatcatcatcatgatcatgatcaccatcatcatcacgatggagagggagagaccaactcatgggtaagtaaagattggaaagtgtaccatagccacgatggtctggcgccgcattctcacgaacccatttactcccccggct

SEQ ID NO: 13253 - DNA, 60 bp, Glycine max
  Clone ID: LIB3040-050-Q1-E1-A9
gatgagaactactttcaccaaaacacactctactctcgcaaaaaaaaaaaattgagtttc

SEQ ID NO: 13254 - DNA, 344 bp, Glycine max
  Clone ID: LIB3040-050-Q1-E1-B1
ggagatacagaaaagaaaaaggaaaccctagctggataggtcaaacatcatcatgtcggacgaagggcaccatttcgagtccaaggcagacgccggtgcctccaaaacctaccctcagcaagccggtaccattcgcaagaacggctacatcgtcatcaaaggacgcccctgcaaggttgtggaagtttcgacttccaaaactggaaagcacggtcacgccaagtgccactttgttggaattgatattttcactgccaagaaacttgaggatattgtgccctcttctcacaactgtgatgttcctcatgtgaatcgtactgattaccagctcattgatattgctg

SEQ ID NO: 13255 - DNA, 363 bp, Glycine max
  Clone ID: LIB3040-050-Q1-E1-B10
ggtagttccaccgagtagcaacaatgtcgaagcgaggtcgcggaggatcggcgggaaacaagttccgcatgtcgctgggtctgccggtggcggcgacggtgaactgcgccgacaacaccggcgcgaagaacctctacatcatatcagtgaaggggatcaagggtaggctgaaccggttgccgtcagcttgcgtcggagacatggttatggccaccgtcaagaagggaaagcccgatctccgtaagaaggtgctgcccgccgtcatcgtccgccagcgcaagccttggcgccgaaaggacggtgtttacaagtacttccaagataatgctggtgttaccgtgaatcccaagggtgaaatgaaag

SEQ ID NO: 13256 - DNA, 393 bp, Glycine max
  Clone ID: LIB3040-050-Q1-E1-B11
gatctcaatttcttttctctttgtcgcaaagagaagagatctgcctcctttttccttcccaaatcaaatctatctcttcttcaagttgaaaatggggctgtcgttcaccaagttgttcagccggctgtttgccaagaaagagatgcgtatactaatggtgggtctcgatgctgcgggtaagaccaccattctgtacaagctcaagcttggagagattgtcaccaccattcccaccattgggtttaatgtggaaactgtggaatacaagaacatcagcttcactgtctgggatgttggaggtcaggacaagatccgtcctttgtggagacattacttccaaaatacacaacgactcatttttgtggttgatagcaatgacagggaccgagttgt

SEQ ID NO: 13257 - DNA, 395 bp, Glycine max
  Clone ID: LIB3040-050-Q1-E1-B12
ttaatgcagtgcttcagttaactgaaaagcaccaaagtgatccataccagcttcaagggagccacatgagagggaatattttttaatggatcttccatctgaacgtccttcaaaatccatttaaaccaatgaacacctgacttgcacctggacaaaaataatgtcaacaccttacactatcatttgtaaattcggcagatttaagatttatagaatagactgataaacactagatattagaaacacaagaaatgcatctgtacatcaataattaaaagaagattccatgtcccacaaaaatgctccctatctgatgtgttttgcaccccaattaagaagggtgacaaatgatgaagagcatgataaaattcaaaatgcacataacaaagtgattc

SEQ ID NO: 13258 - DNA, 383 bp, Glycine max
  Clone ID: LIB3040-050-Q1-E1-B2
gagtgtaactcggaagcgcagcagcaatggcaagagcgactctccttcacttgctgcggtcacagagcctccgccacgtgtccaaaaacgctccttcagcatatcgttgttttgggtcctctacctgtcaacgacccattagccccaatccatcattcaaaacttcctcccatcttgctattttccaaagaagatgggcatcacaaatcccaactacagaggaagacgacaagattagcatcggacctcgtagtggaggacaaccaggggagggtgacaaggaaactggagtcgtttattatggcccgatctcaaacaccataaagaaagtaaaacttctgtctctctcaacttgttgcccttcggtatctcttggtccggtc

SEQ ID NO: 13259 - DNA, 341 bp, Glycine max
  Clone ID: LIB3040-050-Q1-E1-B3
ggaaattctaagagcttgttccgtcgtcccccaagtgctgcagagccgcattttgcttgcaattcagaaactttgtgcgtataggggacgaaacaatacaatggcttacgctgcaatgaagcctactaaggccggcttggaggagcctcaggagcagatccataacattaggatcaccctttcctctaagaacgtcaagaatctcgagaaagtgttcgccgaccttgttcgtggtgccaaggacaagcgcctcacggtgaacggacctgttaggatgccaactaaagtacctaacatcaccaccaggaaatccccgttttgttaacgcaccaacacatggg

SEQ ID NO: 13260 - DNA, 257 bp, Glycine max
  Clone ID: LIB3040-050-Q1-E1-B4
agaattcacatagatacatacataacacaacgtatgctgcataacaacaatatacatacaaatgagcatgttgattatatagaacgtagaaggcaacactcatttttgtttaccatgggtaacgacaccatctctcatataagagcctatataacacatgctgacatgtatgataaacgaatggttcaaacaccatttactaacctaacagactacattcgtacaaagacctttacgccatggttttgttgaacacg

SEQ ID NO: 13261 - DNA, 396 bp, Glycine max
  Clone ID: LIB3040-050-Q1-E1-B5
gatttcgcttcttttcctaacctaaaccctactcattctccatacctcaacgaagaggttaaagagacggcaacactttgctgtccgccttgaccgagcagagcttcgtcttggccctcgattttgccctaaagtactctcagtcacaacagacaccgtcgtcgtcgtcgtcatcaatggcaccgaagcagaccaaggctgagaagaagatcgcttacgatgcgaagctgtgcgacctaatggaggagtacggccagatcctcgttgtgaactccgataacgtgcgatcgaaccagctccagaacattcgcaagggtctccgtggcgactccgtcgtcctcatggggaaaaacaccatgatgaagcgctcagtcaggaatccagcctgagaaaacg

SEQ ID NO: 13262 - DNA, 83 bp, Glycine max
  Clone ID: LIB3040-050-Q1-E1-B6
cacgcgtccgtccactcgtaaaagggcagccagagggcgaccctcgggtttcgctgccagtcgccttccccaggggacatgtc

SEQ ID NO: 13263 - DNA, 371 bp, Glycine max
  Clone ID: LIB3040-050-Q1-E1-B8
gatatcagaagcgcagacctaggatttcggccgtttgctccccaaggaaagaagcagagtgtttcttttgaaatcagctagaaaagatgtcaggtgaagaggtagctgttgcagctgaggcacctgctgcttcaattccaggtgagccaatggacatcatgactgctctacagcttgtgctgagaaaatctctggcctatggtggtcttgcacgaggtcttcatgaaggtgctaaggtgatcgagaagcatgctgcacagctctgcgttctagcagaagattgtgaccaacctgattatgtgaaactggtgaaggctctttgtgcagagcacaatgttagccttttgacagttccaagtgcaaagaccctt

SEQ ID NO: 13264 - DNA, 115 bp, Glycine max
  Clone ID: LIB3040-047-Q1-E1-H11
gaattagaaaactttcaaccgtattaaaagattacgaatccataatccataattagcaacaaatcaaaaccgtatccggaaacaagcaattcagcaaaatgcgcgcgcagctacc

SEQ ID NO: 13265 - DNA, 122 bp, Glycine max
  Clone ID: LIB3040-045-Q1-E1-G11
agctagttacactctgtctgtttccattggcattgtagttgtacactctgcttggaaacttgggtgcatttcccagtaggaaattttatatttttccttccttgtgtaatttgtaatcgtag

SEQ ID NO: 13266 - DNA, 356 bp, Glycine max
  Clone ID: LIB3040-045-Q1-E1-G12
gagagaaccttcagaaaccctaatttctcaaaatcttcagaggacacacagcacaaccaacacctccacagcctctcctacctcccggagccatggccgccgccgactcctccgccgctccatcgcaccagttgtcgcagagggagacggacatccagatgatgctcgccgccgacgttcacctcggcaccaaaaactgcgactttcagatggaacgctacgtcttcaagcgcagaaccgatggtatttacataattaaccttggcaagacatgggagaagctccagctcgctgctaggattattgttgccattgagaacccacaggatatcattgttcagtctgccaggccttat

SEQ ID NO: 13267 - DNA, 382 bp, Glycine max
  Clone ID: LIB3040-045-Q1-E1-G2
ggcagcgccccaagttccaggtttcagcgagcattctacaatggctactataccagttaatcccaagcctttcttgaacaatttgactgggaagcctgtaattgtgaaactgaagtggggaatggagtacaagggctatctcgtttccgttgattcctatatgaacttgcagctggccaacaccgaggagtacattgagggacaatttactggaaatttgggagagattttaatcagatgtaacaatgttctctaccttcgaggagtaccggaggatgaggaaatcgaagatgctgctgaagactagagagtgatagaagctgctaatggctatgacataaacagaactcgaatttctactggttttgtatcctcacataaa

SEQ ID NO: 13268 - DNA, 374 bp, Glycine max
  Clone ID: LIB3040-045-Q1-E1-G3
gaaggaacggagggaagaatataatgggatctggaagtggaaaacacactggagagttcttcaggagaagggatgcatggaggaagcatccgatgctcaccaatcagctccgccacgccacccctggccttgggatcgccgtcgtcgccttcgattgattgctcttgcaggtgaaagccggggatcaccactaaacgtttggacggacgcactccattccatcatcacttaataagcttgctagcatgttctcgcagcctttaatgtttaaatttcagaccgtgttcgcttctttggcactcactatgttgtcgtgtatgcctacattttatgccttcaatttgcattcacaatgaaactcaatttacgttaat

SEQ ID NO: 13269 - DNA, 351 bp, Glycine max
  Clone ID: LIB3040-045-Q1-E1-G4
cgagcaattttaaaaataagaaaataaaaaacacactaaaaaaattcatcaagaaaaaggatacaaaaaaagaaacataaaaaacacaacaaaaaaactaaaaaaaacaaaacctaaacataaaaaacgcggccgcccaaagggttccaacttaacttacccgtgaatgcaagttataaccccttcaaaagtgtccccaaatttcatttcacgggccttcttttaaaaacttcttaacgggaaaaccccggctttaacccatctaattccccttgcagaaaatccccttttcccaactgggtttattaccaaaaaggcccgcaccgttcgcctttccaaaaatttgcccac

SEQ ID NO: 13270 - DNA, 377 bp, Glycine max
  Clone ID: LIB3040-045-Q1-E1-G5
gatagcattttcagaggaaaatggcgggtacggtttcgacttgtttcttcttcgtgtttcttctttctctccttcttccttttcagatgtccgctgaggaatcctcggagaaggagttcgtactcacattggatcactctaactttcacgacactgtcagcaagcacgatttcatcgtcgtcgagttctacgcaccatggtgtggtcactgcaagaagcttgctccggagtatgagaaagctgcttctatcttgagtagtcatgatcctcctattgttttggctaaagtagatgccaatgatgagaagaacatggaccttgcatcacaatatgatgttaaaggattcccaacaattaatattctgacaaatggggga

SEQ ID NO: 13271 - DNA, 341 bp, Glycine max
  Clone ID: LIB3040-045-Q1-E1-G7
ggaagtaagggatcgagcctcggaggagggaatcgcagcgaagtccactatgccgaagcaaattcacgagattaaggacttcctcctcactgctaggaggaaggatgcacgctctgtgaaaatcaagcggagcaaggatgtggtgaagttcaaggtccgttgctccaagtacctttacaccctctgtgtgtttgattctgagaaggctgataagttgaagcaatcacttcctccaggtttaagcgtgcaggatgtgtgattcttactgctgtatgaagatcaggtttttctctggattttggggattcatagttagtaaaatggttcagagaattttcgta

SEQ ID NO: 13272 - DNA, 369 bp, Glycine max
  Clone ID: LIB3040-045-Q1-E1-G8
gcaatccgacccgaatacttcactctcagtcccaggatccgaatactaccaccgcggatcctcatgttctgcttcagaacctttccctggttcggaccagaatggattctctacaacacttcctatctcaatccatcaacaccaacactcccctcgccgtcgatcaaatcgccatggtctccagccagatcgtctcctccatccatcaattgatcgtcaacggctcagctctcgtctcttactctcaaaattccaccgccgcctccggagcaccggatccaccgttgtatccgaagaagccggagccggaaccttcagtcgccgataaagcgaagcaaatactcgattccaaatttgggcctctcgaag

SEQ ID NO: 13273 - DNA, 349 bp, Glycine max
  Clone ID: LIB3040-045-Q1-E1-H1
gactccgcagctgcagcactcaaaaccctagagaggacgagagagcgtgcaactttcggcaaccacagaccatgacattcaagcgcaggaatggaggtcgcaacaaacacggccgcggccatgtcaaattcatccgatgctccaactgcggaaaatgctgccccaaggacaaggccatcaagaggtttttggttaggaacattgttgaacaggctgcagtcagagatgtgcaggaagcttgtgtctatgaacaatatacacttccaaaactctatgtgaagatgcagtactgtgtttcctgtgctatccactctcatgttgtgagggttcgatcccgcaccgacaggag

SEQ ID NO: 13274 - DNA, 383 bp, Glycine max
  Clone ID: LIB3040-045-Q1-E1-H10
atgggatttccagacgcggcggcttcttcttccgtttttgtctatcggcgtgaacaatggcgacttacgctgcgatgaagcccacaaagcccggcttggaggagccccaggagcagatccacaagataaggatcaccctttcctccaagcacgtcaaaaacctcgagaaggtttgtgcggacttggttcgcggtgcaaaggacaagcgcctcagggttaagggacctgtcaggatgcccactaaggttcttctcatcactaccaggaagtccccttgtggtgaaggtaccaacacatgggacagatttgaacttcgtgtgcacaagagagtgattgacctctacagttccccagatgtagttaagcagattacctctatcacg

SEQ ID NO: 13275 - DNA, 402 bp, Glycine max
  unsure (1)..(402): unsure at all n locations
  Clone ID: LIB3040-045-Q1-E1-H11
ggatatgaacggtgaaccggatcccccttcgaagtgaattatattgcagcgaatcacacacactctgaacaacgcccaccatgcaggccagtgataggtttaacatcaattctcagctcgagcatctccaagccaaatatgttggaactggccatgctgatttgaacagatttgagtgggcagtgaacattcaacgtgatagctatgcatcatatattgggcactaccctttactgggattctttgctattgctgaaaatgaatctattggaagagaacgctacagctttatgcagaaaatgctcctgccttgtggtttgcctcncgaaagagaagaagattaagaattgccatctggattgcanatggatcacacagtacagttaatatagcctatgacag

SEQ ID NO: 13276 - DNA, 436 bp, Glycine max
  Clone ID: LIB3040-045-Q1-E1-H12
gtcaaaacggtggcaaaagacaaccgaaaggggatacgggttgagaacctgattaccattctaggtgagttacattgcagcgaatcacacacactctgaacaacggccaccatgcaggataatgataagtttaacatcaattctcagctcgagcatctctaagccagttatgttggaactggccatgctgatttgaacagatttgagtgagcagtaaacattcaacgtgatagctatgcatcatatagtgggcaataccctttactgggattcgttgctaatgctgaaaatgaatctaatggaagataacgctacagctttatgcagaaaatgcacctgccttgtggtttgcctcgcgaatgagaagaagagtaagaattgccatctcgattgcatatggattacacagtacagttaatatagcctaggacagttt

SEQ ID NO: 13277 - DNA, 360 bp, Glycine max
  unsure (1)..(360): unsure at all n locations
  Clone ID: LIB3040-045-Q1-E1-H3
ggaccganacagagagtgctatcagtgattgatctgtattcacttgatctcatcacaagcgtcagcgtcgattgaagaagatgtcgatcagaaccatctccgtcggcatgcctgaataagccactcagaccgatacgttgaaggccgccttgacttaattcaactcatcattcatctgcatgttcgccggcgcacgcgccggcatcacctacaacaagctcaccgaggacggcgctgccatgcctgccggatttagcactgcatctatcacacatgcattcgccctcttcgtctccgtctccgtcggcgccaatatcgccggcagctacatcaagccctccgtcaccgtccgcgccttcg

SEQ ID NO: 13278 - DNA, 316 bp, Glycine max
  Clone ID: LIB3040-045-Q1-E1-H4
gggggatgcaagcagagaatgctatgagtgattgatccgtattcaggtgatcccatgatatgcgtgaccatcgattaacaacgacgtggctcataaagatgtcagtcggcttgccaggataagcaagtcaaatcgatacgtggaatgtcgccttgactgaatgcatctcatcattcatctacaggttggtgggtgctagtgcatgcaatgactatctacggattactgagtctgtctctacccatcctgtgtgttttggtactcagttcacagcacatgaatgcgctggcaatctagctgcatctgcaagaacaaa

SEQ ID NO: 13279 - DNA, 282 bp, Glycine max
  Clone ID: LIB3040-045-Q1-E1-H6
gagcaacatggtgaagctggtggagagatttacttgccagaagcttacgttagaaccaagaggactacttaatggagcaaatcagttggaagaacttgtagctagcttcccaactggcttatctgagtgtggagaagcattatcaagccttaggagtaggagaacgagtactgtttgtgatgaatgtctatggtttaagaaatctgtctttagtcaacttgtgtgttttgttattcagttctcagcaataaactgctctggcaatctagtttcatgttcaat

SEQ ID NO: 13280 - DNA, 359 bp, Glycine max; identical to SEQ ID NO: 10498
  Clone ID: LIB3040-045-Q1-E1-H7

SEQ ID NO: 13281 - DNA, 182 bp, Glycine max
  Clone ID: LIB3040-045-Q1-E1-H8
gatagtttcttcattttggttccgtccgttggtttgctcaatcaatcacttttcaatttcttcacgttcctaacacatagaatatctatcgtatgaaccaggactgtctgaagtacacacgcgataaggtcagtcattaccagcacggcagggacggcattcattatcacgcaaggaagact

SEQ ID NO: 13282 - DNA, 378 bp, Glycine max
  unsure (1)..(378): unsure at all n locations
  Clone ID: LIB3040-045-Q1-E1-H9
gaaaaacagagcataggaaatagctttcctcggttataaccttcaaggtggaaagaaaaacccacccactatcccaattccaataaataccttcctctctatattttcgcacaataccctctcacccttcaacgatgagttactacaatcagcagcaaccacccgtcggtgttcctcctccccaaggttacccaccgccggattcttacggaaaggacgcgtaccctccgccagggtacccgccgcaaggaggataccctccgcaagcgtatccagcacaagggtacccntcaccctacgcgcctcctcagtacgctcagcctccgccgcaacaacaccagaattcatctggcccaagttgcttagaaggatgtttgg

SEQ ID NO: 13283 - DNA, 376 bp, Glycine max
  Clone ID: LIB3040-046-Q1-E1-A10
gattgtggtgaatgtttgagtgcagaaggtaaaaaagaaaatggtggtgaagattcgattggcaaggctcgggtgccggaaccacccattctatcgtgtggttgttacggatagcaaaacaacaagagatggcaagcaacttgaagttttaggtttctacaatcccgtcgcaggcaaggatgatgacaaaagaatgagcctcaaactggagagaatcaagtattggctttccgttggagctaagccttcagagcctgttgagcatcttctatttagagcaggtttaggacaatctcatcaattccctgttgctgctctaaatggacatatcctcaaccaagaccaaccaaccattgctgctgatcacaatggtata

SEQ ID NO: 13284 - DNA, 365 bp, Glycine max
  Clone ID: LIB3040-046-Q1-E1-A11
gatgccgaaaagtagtaccaagatggcttcagttgtgtatctcctctttggcttccatctcattgttatcatgtcaagttccttacccgcaactagtgaagtgtttgcaaaacagtatccatccacagaacccgtggaagaaaaactcacccaactccacttctatttccataacaacataacgggggaacacccaactgctatgaaaactgttttgcctcctaaggggtccattcatggttttggggctacttacatgatggatgaccctctaactgaaggaccaagtccaacttcaaagcttgtgggaagatctcaaggaatatacgctttggcttcacaacatgagcctgggttgctcatgg

SEQ ID NO: 13285 - DNA, 350 bp, Glycine max
  Clone ID: LIB3040-046-Q1-E1-A12
gggctttcccttcatacaaaacctacaaggcacggacttgagatttctaagaccctctctctctcgtacttcatcggaaccgaaacccttcgccgcaaaaaatgcctcccaaatctgccaaatccaaggaagctccagctgagcgacccatcctcggtcgattctcttctcacctcaaaattggcattgttggcttgccaaatgttggaaagtctactctctttaatactctcaccaagttggcaatacctgctgagaacttccccttttgcaccattgagcctaatgaggcacgggtcaatgtacccgatgaacggttcgagtggctttgccaattattcaagccaaaa

SEQ ID NO: 13286 - DNA, 345 bp, Glycine max
  Clone ID: LIB3040-046-Q1-E1-A2
aggggagtctgaggcgatcgtgaagaaatggagaaggcggtgagagcgtatgcggaggttctgagattggtgaggctcttaccaaaggacagcagggcttattatgccaagtacgcccgcgagaacttcgtcaattaccgtgatgtcgttgatccttctgatttcgatgacctctttcaacgcagctagactcattctctatgggtccgtcataagtattccattgataaatctgctgcggataagctcagagggatatgctgcacttgatgcaatttcaattgccacccaagtgtttgttcgtagttcgcactcattcacacccttccttgcatgcgtgagatg

SEQ ID NO: 13287 - DNA, 210 bp, Glycine max
  Clone ID: LIB3040-046-Q1-E1-A3
ggcttcttcaaccttttaagggtaaaagttgagacgattcctatttcataacggaagaagatcttgccagtctcagaaacagaggcgagtgagggtatcagaattggagaagagaggggtagaagcaaaaattatataagcttttgtgctatcaaatagcaagaactagagcgcatagagggttttgcagttttgtgtcatgatgatgga

SEQ ID NO: 13288 - DNA, 281 bp, Glycine max
  Clone ID: LIB3040-046-Q1-E1-A4
gagatctgtatcgtattattaagcacaaccaagcaagggtgcaaggtgggggtgttttttttttttttttttgctggatgagtcgtagctgacactcgcttatggcgtctgaaacggcgtcgtcggcggatgaagaaaccgctgttgttgttgtttcaactgcgggtgcaggaggggactgataagagaggcaagcaccggattcttgccgaattgaagcgtctcgagcaggactccatgtttcttcaggaaaaattgggagagcttgagaaaacagaaaa

SEQ ID NO: 13289 - DNA, 308 bp, Glycine max
  Clone ID: LIB3040-046-Q1-E1-A5
ggaacggaaaagcactggcgcagctaccctgaggcttctcttctcttctcttctctgtcgtgagtcaccatggtgagggttagtgtgctgaacgatgctctgaagagcatgtacaatgctgagaaaaggggaaagcgccaagtcatgattaggccatcctccagagtcattagcaaagtccttttggtgatgcaaaagcacggatagagtcgggagtttgagtatgttgatgggcacagggctggtaaaatcgtggttggattgaacggtagactgaacaagtgtgggggtattagtcggcgttttga

SEQ ID NO: 13290 - DNA, 183 bp, Glycine max
  Clone ID: LIB3040-046-Q1-E1-A6
gagtgcagcatcgtagagaaataagggaaaaatggtgtcgctgaaactgcagaagcgcctctccgcaagcgtgctcaagtgctggagaggaaacgtttggcttgaccccaatggagtcaacgaaatctccatggccaattctcggcaaaacatcaggaagttggttaaggatgggtttagcat

SEQ ID NO: 13291 - DNA, 54 bp, Glycine max
  Clone ID: LIB3040-046-Q1-E1-A7
ggctgcgagcgaatccctctctctcgttctctttcgctctcatccagatcttgc

SEQ ID NO: 13292 - DNA, 371 bp, Glycine max
  Clone ID: LIB3040-046-Q1-E1-A9
gactgcaactttgctctctgtgaggcttcaatttctaattagggtttcgcttagagtaaccaataaccatgggagtcttcacccttgtcgtccgcaaatccggcagcgaatggagcgccaagcaacattccggcgacatcgaggcctccgccgattccaccttcgatctccaacggaagctcgtgcaagccgctctcgccgttgattcctccggtggagttcagtcctctttctctcccgtgtctcctacctccgctgtgttccaggtgatagtgggtggtgcagtattcgttggaggtggtggtgctgttgcagctgcacctgcaggtggtgctgccgcagctgatgctgccccagctgctgagaaaaag

SEQ ID NO: 13293 - DNA, 228 bp, Glycine max
  Clone ID: LIB3040-046-Q1-E1-B1
gcttgttggagatgcacctgcatagtctagtgcttaattaggttgctgaagagtgaagaatgagacagcctggttcgaaggggaaaagcctaaggatatagcaaaggatcctatatgtataagataaatgttgcttttttaccttcggtagtgatatctgaagtcgagtttggcagcctatatatgaatatatgatctatgtgggtctttagtggagaaggggggggg

SEQ ID NO: 13294 - DNA, 321 bp, Glycine max
  Clone ID: LIB3040-046-Q1-E1-B10
cggtttcaaggtccgtcaaggccggtctccaattccccgtcggaagaattggccgttatttgaagaaaggaaggtacgcccagcgtgtcggtaccggtgctcccgtttacttggccgcagttctcgagtacctagctgctgaggtgcttgagttggctgggaatgctgcacgtgacaacaagaagaacaggattattccgagacatgtgctattggctgtgaggaacgatgaggagttggggaaattgcttgctggtgtcaccattgctcatggtggtgttcttccgaacattaaccctgttttgttgcctaagaagactg

SEQ ID NO: 13295 - DNA, 314 bp, Glycine max
  Clone ID: LIB3040-046-Q1-E1-B11
ggttctagtgtgtgattgtttgttgttgtaactcgttcttcttcttttgttgttctgtgtttgtgtttgttttttctctcacctgaaaatgtcttgctgcggtggtaactgtggttgcggaagctcctgcaagtgcggcaacggctgcggaggctgcaagatgtacccagacttgagctacactgagtcaaccaccaccgagaccttggtcatgggagtggcacctgttaaggctcaatttgagggtgctgaaatgggtgtgcccgctgagaacgatggctgcaaatgtggaccaaactgctcctgaaaccctg

SEQ ID NO: 13296 - DNA, 375 bp, Glycine max
  Clone ID: LIB3040-046-Q1-E1-B12
gatgaatagtactagtacattttgaaaatagaagtaaatgatgaatcccttgagtttgtgatatatagagagagagagttatgagcatgtatagctatagttgtatctccacaagcacaatgattcgtcggttatggtgtttacagagcggctctccctccgtgcccccctcgagcaccaagaagaagaagccccttgtcttgttgggcgcacctcatgtctccgccatcgtccttgaagcccttctgaacgctcctacttgtccagattcttcatttgaggttgcggctattgtgactcaacctgctgccagaagggacagggggaagaagctctctctctctccctttggcctctcatgctcttcagaggggc

SEQ ID NO: 13297 - DNA, 60 bp, Glycine max
  Clone ID: LIB3040-046-Q1-E1-B3
ctttggaagggcacttcaacagagcacccttaaggcatggagtggaaaaaaagaaggagg

SEQ ID NO: 13298 - DNA, 279 bp, Glycine max
  Clone ID: LIB3040-046-Q1-E1-B5
gaggccctacctttgtgtccgctactctctctaccccttccttttttctcacccttttgaaatttgagcagtagcactgttgcgacacaacaacatcatgaacatgaacatgaacatgaacatgaacactaagagcaggttgatcaccctttgggttgtgctctatttttggtccagcacagactcactagctgcttcaaagcagtgccatttccctggcagcttcaacgtgtggtgactccaattcagacactgggggtcgctctggtgcctttggac

SEQ ID NO: 13299 - DNA, 356 bp, Glycine max
  Clone ID: LIB3040-046-Q1-E1-B6
ggtcttgcaggcgaagagatggccaccgttccagggcagctcgtgtgggagatcgtcaagaaaaacaattccttcttgggcaagcagtttggaaggggcacccagagcgtcgaattcagcagagagagcaacaatctctacaacctcaattcgttcaagtactctggtttggcaaacacgagaactgttactgttcagcctgagggcaaagatcaggctgtgttgttgggtacaaccaagacaaagaagcagaacgagcccgctgcattgctccacagatctgtggataacaaggagttcaggaggatgggaggagctgttgaaaaccaggtggccaaaaattactacagggctga

SEQ ID NO: 13300 - DNA, 413 bp, Glycine max
  Clone ID: LIB3040-046-Q1-E1-B7
gcaagttgatgggtagaaacagcggatttattgcaatgtatgctacacttgcaagtcgagacgtggactgttgcttaattccagagtcacccttttaccttgaaggtcctggtggactctatgaatatatagagaaaagactcagagaaaatgggcacatggttatcgtcattgctgaaggagcaggacaagaacttgtttctgagagcgtgcagtcaatgagcagacagggtgcttctggaaataagctttttcgggatgttggcctatggatatcccaagggattagggatcattttgctgcacagaagaggctgccgagaactctcagatacgaagagtgaacttagatgattcgagctagtccaagcaatgcttctgacagggtgtgctgcacaggtcttgctcaaagt

SEQ ID NO: 13301 - DNA, 343 bp, Glycine max
  Clone ID: LIB3040-046-Q1-E1-B9
gaccgcattagcactcgtctttggttctggtttatagatctctgtgaagtcgctttataacactcaacctaagatgcagaacgaggaaggacagatcaccgagctttacattcctaggaagtgctctgccacaaaccgattgattaccgctaaggaccatgcttcggttcaggttaacattgggcatgtggatgagaatggcgtctacaatggccatttctccacttttgctctctgcggcttcatacgtgctcagggtgatgctgacagtgccctagatcgcttgtggcagaagaagaaagttgaagttaagcaacagtagacacccatgatagtttgttac

SEQ ID NO: 13302 - DNA, 285 bp, Glycine max
  Clone ID: LIB3040-046-Q1-E1-C1
gaaaacagcgcactgagtgctgagaacgttacctcattcaaaagcagcaacagcagattattcttctttgtttctgttctttcttcatcagccgattcagctttgtccatggccaccgaaccaaaagcagccgccgatgacgtcaagatcgatctcgtcgaagacgacgacgagttcgaagagttcgaaatcaatgaagagtgggatgacaaggaagaagggaaggaagtgaggcaacagtgggaggatgattggggatgatgatgatgtgagtgatgatttttc

SEQ ID NO: 13303 - DNA, 63 bp, Glycine max
  Clone ID: LIB3040-046-Q1-E1-C11
aatgcttttttcctataaaaaaaaaagggaactactaaatgcacttcgattggatttttctac

SEQ ID NO: 13304 - DNA, 370 bp, Glycine max
  Clone ID: LIB3040-046-Q1-E1-C12
ggctcttggctgatatttcctgataagtggacagacgcttaaacagagaaactaacacagatttgcatgcatggggaaaataacgcacattgtagtaattcccagtgcagggtacagccacttcgttcccgttatccacttctcaaagagacttgttgagcttcacccagaaattcacgtcacatgcatcattcccattctggggtctctcccaagtgctgcaaaacccattctccaaacccttccacaaaacatcaacacggttttccttccaccggtgaaccctaatgacctaccacaaggtgttcccgtagttgtccaaattcagctagcaatggctcactccatgccctccatccaccaaaccctc

SEQ ID NO: 13305 - DNA, 279 bp, Glycine max
  Clone ID: LIB3040-046-Q1-E1-C7
tgaagccgaagatgagggtgaggatggtgaggacggtgaagaagaacaagctgtgattggattatggagtggcattgcttggttggtagggatgactgtgttcagtgctgtgttgtctgaatatgcggtggatagaggtgaggatgcatcagattcgtgcggtttgtctgtgagctttctcagcataagcgtgctagcaatagttgggaatgcagctgggcatgcaggagcaatcatatttgcgtgcaggaacaagctggacatttcagtgggtgttgc

SEQ ID NO: 13306 - DNA, 328 bp, Glycine max
  Clone ID: LIB3040-046-Q1-E1-C8
aatgagggttgtccctcacgtggaaaaaaaaaaaagagaggagggaaaaaaaaagcggcccacgcgtccgcccacgcgtccggagacacaaaacaagcccgctgcattgctccacaaatctgtgatgaagaaggagttcaggaggatgggaaaagctgttgaaaagcagggggccaaaaattactacaggcctgatcgcaagaaggctgcccttgcaaggttgagtggtgttcagaggaagcctcaaagtgtccaaggtctggggtcaggaacaggaatagacagggcgtgagagtcgcggggagagagtgaaagggaattgagaaag

SEQ ID NO: 13307 - DNA, 255 bp, Glycine max
  Clone ID: LIB3040-046-Q1-E1-D1
ggattagggtttgtcattagcacttcgtcttttcacactgccgctgcaacaatggcttcagggaagaaactttcgaacccaatgagggagagaaaagtgcagaagctcgttctcaatatctctgttcgcgagagtggagatggtctcaccagagccgccaaagtgttgggacaacttagtatggaaaccccagtgttgtccaaaggaggaggcactgttcgttcctttgcgattagggggaatgggaagattgca

SEQ ID NO: 13308 - DNA, 323 bp, Glycine max
  Clone ID: LIB3040-046-Q1-E1-D10
gggagtcctctggtttattctgaggcctgtgctgtgctctgaggggccatagtttgggaccctttgaaccctaatctccacccaaacccattttcccgggaaattgccttggaaaagaaagagcgaagaggaaaatgcagaatcacaggctgaagcagcagcagcagcagcaacaacaagctcttatgcagcaagctcttctccaacaacagtctctctaccaccctggcctccttgctcctcctcagatcgaaccatatccaagtggaaatttgccccctggttttgattccagtacttgccgcaatgtgtatgttgggaac

SEQ ID NO: 13309 - DNA, 348 bp, Glycine max
  unsure (1)..(348): unsure at all n locations
  Clone ID: LIB3040-046-Q1-E1-D12
gatttgcgctaacaacaactaacgtgcaagttccaaggcggagaaaacaataatggccaccaacgaggagagggatatggagaacaagaagagtgaggaagaactgaagcatctcgggtttgtgaagattgcggcaatgaaagccttagtgtgtgtgtcgaatctctacggcttcgcaaagcaaaactcgggacttttgagatctgctgttggaaccgtggaagacactgtaaccaccgttctgggtcncgtctaccacaaattcaacgctgttcccaaccacatcctcctttttgtcgacaacaaggtggatgaagctgctcacaaattcgatgagcatgcaccttc

SEQ ID NO: 13310 - DNA, 61 bp, Glycine max
  Clone ID: LIB3040-046-Q1-E1-D2
gcaattaagatcgcagagagagatggggagtgacagcgaggcagagaaggagaagaagaag

SEQ ID NO: 13311 - DNA, 283 bp, Glycine max
  unsure (1)..(283): unsure at all n locations
  Clone ID: LIB3040-046-Q1-E1-D3
gattgagcaaacaaaaagaatctttgggagatcggagaggtcatcgtcgtcatttctgcgctcgagattaacataaggaacaacagtgagcagggtattgtagctgaacgatatggagagaagcactccggtgaggaagccacacacgtcaagtggagatctgcttacgtggcctgaaagacgaagttctcagtccccaacgcatcggtcctccgccgttcgttcccaccaggcgtcngatgagatcaggaaggtggtatttgggggtcaggccaccgatgaa

SEQ ID NO: 13312 - DNA, 278 bp, Glycine max
  Clone ID: LIB3040-046-Q1-E1-D5
gtctcttttccctttctttcattgtttgttttgtttgcactctcctctccccttaacagtaactcaacaatcaagaggatcagatccataggagaagttttatctgtccatcacgaaaaccgcgactactgatcagtcaatcccatcaatcaaaggaaatcatcagaaagggaggaaaggaaagaagagaagaaggggaagagggaatcaacaggaagaggaacaggaggagtatcaaacatgtcctcctcagggaggtccgtttcggcggaccaaca

SEQ ID NO: 13313 - DNA, 153 bp, Glycine max
  Clone ID: LIB3040-046-Q1-E1-D6
gacagcactgcactcttcgcaacacaagagaggaagacaacccatagagcgcgtcttaataaacgcgcgtcgctgaaaacccgcatttcgtttcgtcgtgcgtcgtcgcgttcacatcttcgatggtcgatcgtcgtcgcggaaggggagaga

SEQ ID NO: 13314 - DNA, 201 bp, Glycine max
  Clone ID: LIB3040-046-Q1-E1-D7
ggtgtctgctcactcgctcttctccgccacttctgaatctattggatcaacaatcatgtcggacgaagagcaccatttcgagtccaaggccgacgccggagcctccaaaacctaccctcagcaagccggtaccatccgcaagaacggctacatcgtcatcaaaggccggggctggcagagttgtggaagtttcgacgtcca

SEQ ID NO: 13315 - DNA, 305 bp, Glycine max
  Clone ID: LIB3040-046-Q1-E1-D9
tgtaaaaaaaaaaaaaaaaaaaaaaaaaaaaaaaaaaaaaataaaaaaaaaaaaaaaaaaaaaaataataaaaaaaaaaaaaaattaaaaaaaaaaaaaaaaaaaaaaaaaaaaaaccggccgcccaaaaggttcaagccttacttacccttgcatgcaacttcaaaccccttcaaaattgtcaccaaatttaaattcacgggccttcttttaaaaacttcttgacgggaaaaaccctggctttaccaaattaaaccgctttgcacaaaatccccttttcccaaacgggcttaataccaaaaagg

SEQ ID NO: 13316 - DNA, 329 bp, Glycine max
  unsure (1)..(329): unsure at all n locations
  Clone ID: LIB3040-046-Q1-E1-E1
aagctcggtatgaaatattaaggtcctgcttacaggaaatgatgcgtacagggatattgactagtttacaggattgtaagaacgccatgcttcctcattacgctagtgcgaaagataggttgaacactctagattttcatgaggacgcgacattcatgcaactgtgcaaacaactacttgagactgcagaggcatgtganggaatgggtggaaggtcgttgagagagcttccagttttgggagatgctgcgcttgcaaatccgtttgaatgcaagcctattaagttcttaggttcaagggtagaaacagcaaacgaggagcgttctgag

SEQ ID NO: 13317 - DNA, 344 bp, Glycine max
  Clone ID: LIB3040-046-Q1-E1-E10
gatttgcgtgttttcatcattgtcgttctgaacggaaaagcactggcgcagctaccctgaggcttctcttctcttctcttctctgtcgtgagtcaccatggtgagggttagtgtgctgaacgatgctctgaagagcatgtacaatgctgagaaaaggggaaagcgccaagtcatgattaggccatcctccaaagtcattatcaaattccttttggtgatgcaaaagcacggatacatcggagagtttgagtatgttgatgaccacagggctggtaaaatcgtggttgaattgaacggtagactgaacaagtgtggggttattagtccccgttctgatgtgggcg

SEQ ID NO: 13318 - DNA, 373 bp, Glycine max
  unsure (1)..(373): unsure at all n locations
  Clone ID: LIB3040-046-Q1-E1-E12
ggcgcctgatttctcagttctctcacacactcattcggtgctccgaatctcagattctagggttagggttcccaatttctccaccgatcagaaaatgagttcaactggtggttctaccaagggcggaaggggcaagcccaaagcctccaaatccgtttcaagatcgcagaaagctggtctccaattccccgttggaagaatcgctcgattccttaaggctgggaaatacgccgagcgtgttggtgctggtgctcctgtgtacctctctgcagtgctcgaatatctcgctgctgaggttttggaattggctgggaatgctgctanggataacaagaagaatcgtattgttcctaagcacattcagcttgctgtg

SEQ ID NO: 13319 - DNA, 120 bp, Glycine max
  Clone ID: LIB3040-046-Q1-E1-E2
cacaacctcctacaatgtatatatcatgccccacaccactcaaatggggtcatcaatcatgcactttcctccctaactttgcaggtacatgcagacaaactatggagtcttattcttaaa

SEQ ID NO: 13320 - DNA, 147 bp, Glycine max
  Clone ID: LIB3040-046-Q1-E1-E3
gagttctactccatcgtcactccgtcttcgctgtttatgtgtatctcacgtgcatcgagcaaggacgtcaaagggacctcatcgagatctacttaaaggctacattccgtgtagacaccttgtctaaatccagtccatatccaaaca

SEQ ID NO: 13321 - DNA, 138 bp, Glycine max
  Clone ID: LIB3040-046-Q1-E1-E4
ggtgtgtagtataggattctcttctttattccttttgtaatttcattcagtcttaatctttgtgaaaaataatgttcatcgagaattttaaggttgagtgtcctaatgtgaagtagaccgagactgagattcagtccg

SEQ ID NO: 13322 - DNA, 359 bp, Glycine max
  Clone ID: LIB3040-046-Q1-E1-E5
gacatatgcagtgtggggaaggagtaaacaaacgttggagtcagaaatgaaagagcaaaggaaaaaccatgctgctcactgtcttgtcctaccttatccagcccaaggacacatcaatcctatgcttcagttctccaagcgtttggtgcagagaggagtgaaggtaacacttgtaactgttgtgtccaattggaagaacatgagaaagagaaacttcacttccagtggggttgagagcatctcagatggctatgatgatggaaggcttgcagcagcagagagtcgtgaggcttacatagagaccttttggagggttggatcacaaacttttgctgagcttgttcagaagcttgcagggt

SEQ ID NO: 13323 - DNA, 75 bp, Glycine max
  Clone ID: LIB3040-046-Q1-E1-E6
gccggtttcccgaacgatttgatggtttggaatgcatttcccaagcaacgagtcttcggttcgaaaccagcagag

SEQ ID NO: 13324 - DNA, 142 bp, Glycine max
  Clone ID: LIB3040-046-Q1-E1-E8
gacagcgaaacagagagtgatttcagtgagtgatcggtgttcacgtgatctcatcataagcgtcagcgtcaattgaagaagatgccgatcagaaagatcggcgtcggaaggcctgaagaagggactcaacccgacacgttga

SEQ ID NO: 13325 - DNA, 347 bp, Glycine max
  Clone ID: LIB3040-046-Q1-E1-E9
gacaacacaacgcaacacaacgcgcactctctcttttctctcctaacacaaaaaccctatcgttcttcgcggtttcgccgattctcgccatgccgaaagccaaatccgacgccaaagccgccgatagccggttgaagcgcaagggcgctggtgctggaaggaagcaatcgaagaaagctgctaaggatcctaacaagccaaagagacctccaagcgctttcttcgttttcatgtccgagttcagagagcagtttaagaaggagcatcctaacaacaaatccgtcgctgttgtcggtaaagctggtggtgacaaatggaaatcgctgtctgatgctgaaaaagccccc

SEQ ID NO: 13326 - DNA, 324 bp, Glycine max
  Clone ID: LIB3040-046-Q1-E1-F1
attgcatcaaatcctgtttttcatgaaaggacccagcacattgaagtggactgtcattttattatacagaaaatcgagtcaggtgacatcatcactagatttgttcattcatgtgatcatggcagatgtgtttaccaaatccttgaggggtccatgggttaactacatatgcattattgcattaggtacaaataaatagaggacataatgattcctctaaatcaaagatacagtttccatataacactatataaactggcatccgtgaagtctctagacccacagtgttgttctgcctttctctatgttatttgttgctctgtt

SEQ ID NO: 13327 - DNA, 372 bp, Glycine max
  unsure (1)..(372): unsure at all n locations
  Clone ID: LIB3040-046-Q1-E1-F10
gatgccgaaaagtagtaccaagatggcttcagttgtgtatctcctctttggcttccatctcattgttatcatgtcaagttccttacccgcaactagtgaagtgtttgcaaaacagtatccatccacagaacccgtggaagaaaaactcacccaactccacttctatttccataacaacataacgggggaacacccaactgctatgaaaactgttttgcctcctaaggggtccattcatggttttggggctacttacatgatggatgaccctctaactgaaggaccaagtccaacttcaaagcttgtgggaagatctcaaggaatatacgctttggcttcacancatgagcctgggttgctcatggtgacaaa

SEQ ID NO: 13328 - DNA, 363 bp, Glycine max
  unsure (1)..(363): unsure at all n locations
  Clone ID: LIB3040-046-Q1-E1-F11
gaccgcgcaccacactgagaggaagagggagtgagagagagtgttcttcgtttgctaccttctcccagaaatggttacgttcaggtttcaccagtaccaggtggtcgggagggctctcccaacggaagcagatcagcatccgaagatctaccgaatgaagctctgggccaccaacgaggttcgcgccaagtctaagttctggtattttttgaggaagctgaagaaggtgaagaagagcaatggtcaagttcttgctatcaacgagatttttgagaagaacccaaccaagattaagaactacgggatatggttgcggtatcagagtanggcttggttacacancatgtacaaggagtaccgcga

SEQ ID NO: 13329 - DNA, 367 bp, Glycine max
  Clone ID: LIB3040-046-Q1-E1-F12
tatcaaccgaggcagagacagatcagccagcaattgaactaaaacctggaattgaccttctaggacctgttgatgagatattttttgatatctatgacagatatgaaccggtcaatgaacccactttggacaactgctttgtatcaacaagttatgatgctactactcactttgagtcgaccgtggatgatgttctcaacatgtatacattgataactggaaaggttattgacctgagtgtggatcttagtgctgctagtgctgcagaagagtaaagaaaactcggtgatgtccttccttcatgatttgttgctgatgggatccgtaatggacttgataatgaatgttataaacgtttataataaat

SEQ ID NO: 13330 - DNA, 358 bp, Glycine max
  unsure (1)..(358): unsure at all n locations
  Clone ID: LIB3040-046-Q1-E1-F3
gacacatgcccatcatcaaagtttcttcctttctctgctctttgtcttctctgacacatttggggccttgttgagtgtgtttttgcaagagggtatggcgaaggacgttgaggttgctgagcgtggctccttctctgggaaggactaccaggacgctccagcagcaccactcattgatgctgaggagctcacaaagtggtccttttacagggctcttagtgctgagttcaggtgcactttgctcttcctctacattactgtgctcacagttatagggtacaagcaggagacngatcatgctgatgcgtgtggtggggttggcattcttggcattgcatgggcctttggtggcatgatg

SEQ ID NO: 13331 - DNA, 141 bp, Glycine max
  Clone ID: LIB3040-046-Q1-E1-F4
ggagggttattggacagattcgtcagcgacggcgttgttggatcggaacctcttctgcggcgtaccaatgggacactccaacgtttggaacgcgcacccaagagactagggtcctggttctcgcacttgccgtgtctgtgg

SEQ ID NO: 13332 - DNA, 245 bp, Glycine max
  Clone ID: LIB3040-046-Q1-E1-F5
gaagagaagctgaatgaggttgaagccgtttgcaacccaatcattagtgctgtgtatcagagatctggaggagccccaggcggtggtggtgcatcaggcgaggaagacgacgacgattctcacgatgagctctagattagtcggagtctgtgagatttttatgatagctgcgaattaagaagtcccctgcgcttgctttggtggtggcgatgatgggatacggtggggaattacttgtactttac

SEQ ID NO: 13333 - DNA, 369 bp, Glycine max
  Clone ID: LIB3040-046-Q1-E1-F6
gatcactgtcttgtccgttttctaaatctcattcttcacctgcaactatttggattgctgatttttgttaataccatatttactgatattggcgcatttctttgagaaagttactaattcctagatagaggcaaaaatgttgggaattttcaaggagaagttggttaaagcacccaaagagctgaacagtccagcttcgttgaattcatggactaagcctaagctaagtcacgaaatccttcaggatttcatgtcctgcaattcctccaaggctttctcaatgtgctttgggaatgaagcctttgtagcctattcgccttcaaacaagccctccattcatcaagggttgtttagtgggttggataacat

SEQ ID NO: 13334 - DNA, 126 bp, Glycine max
  Clone ID: LIB3040-046-Q1-E1-F7
ggtgtgagttgagtctgtgatgataatgatgatgatgatgtgttccatgtggatgtgggttgtccttgtggccattgctggtgcccttttagtcctaagatgtatcctcaatctacgatagagctc

SEQ ID NO: 13335 - DNA, 280 bp, Glycine max
  Clone ID: LIB3040-046-Q1-E1-F8
ggtagcattcagtgaaacactagcgagggtattgggagctctcgttgtttcggagttagggaccttacgcagccatggcgactgctacgaatgccgccgccgccccaccacgccagctctcccagatggaagctgacatccagatgatgttggccgccgacgtccacctcggcagcaacaactgcgacttccaaatggagcgtggcagcgtgaagcgccggatgcgacgggatttacattagtaaccttgggaagacgtgggaggggcttcagctagcag

SEQ ID NO: 13336 - DNA, 340 bp, Glycine max
  unsure (1)..(340): unsure at all n locations
  Clone ID: LIB3040-046-Q1-E1-F9
ggaaacgtgaaagcaaaacagagaagaggagctgcggaactcttcacttcatctcagcgagacagatagaaaaagcattaacgatgagatttcacggtaactttattatttgccgttatctttctcggttgcgaaatcaattcaattcaaacttcgaattcccactcccgaatttccggcatcgagctccattcttcctccgttcttactctgccgaagtgccagctcaactgtctccggagctcttaaacataatggagcaaagactctccgctattgagtacaggacttcttgtcttaacaattttctaaatcagccagaagcatcancatcagagta

SEQ ID NO: 13337 - DNA, 149 bp, Glycine max
  Clone ID: LIB3040-046-Q1-E1-G1
ggagccgccgccgcactgtggttttgcgtttctgaaagtggagagaaccctagaaaccaaactgtgctgtgcttcctacagtcatgggggacgtcatgattatgaaggagatcgaggacacgtcgcttcgtctcggcgtcgatctctcc

SEQ ID NO: 13338 - DNA, 382 bp, Glycine max
  unsure (1)..(382): unsure at all n locations
  Clone ID: LIB3040-046-Q1-E1-G10
gctcttttccctttctttcattgtttgttttgtttgcactctcctctccccttaacagtaactcaacaatcaagaggatcagatccataggagaagttttatctgtccatcaccaaaaccgcgactactgatcagtcaatcccatcaatcaaatcaaatcatcagaaagaaaagaaaggaaagaaaagaagaaaaaaaaaagggaatcaacaaaaagaggaacaacagcaatatcaaacatgtcctcctcatccacttccttttcaccggaccaacaacacctctctccctccgaccagctctgctatgtccattgcaacttctgtgacactgtcctcgcggtgagtgtntccttgcacagcttgttcaagaatgtcactgt

SEQ ID NO: 13339 - DNA, 326 bp, Glycine max
  unsure (1)..(326): unsure at all n locations
  Clone ID: LIB3040-046-Q1-E1-G11
gatgccgaaaagtagtaccaagatggcttcagttgtgtatctcctctttggcttccatctcattgttatcatgtcaagttccttacccgcaactagtgaagtgtttgcaaaacagtatccatccacagaacccgtggaagaaaaactcacccaactccacttctatttccataacaacataacgggggaacacccaactgctatgaaaactgttttgcctcctaaggggtccattcatggttttggggctacttacatgatggatgaccctctaactgaaggaccaagtccaacttcaaagcttgtgggaagatctcanggaatat

SEQ ID NO: 13340 - DNA, 339 bp, Glycine max
  Clone ID: LIB3040-046-Q1-E1-G12
gaggatcgttccgaggcacattcaactggcggctaggagctacaaggagttgtgcacgctgatgggatctgtgaccactgccaacggtggtgttctgcctaacattcaccacgatctttgttgcccaatcaaggtctctggcaacgggaagaccgacattggatctgccattcaggagttttacatttaacgctcttgttttcgtatgtagttggttgccttatatactatgattaggattgacattggctgatgtataatcgcttaacatttggtaatagttaattgttttctaacattgttcctgcatagctcacagttacttgagtttctcgtgaa

SEQ ID NO: 13341 - DNA, 282 bp, Glycine max
  Clone ID: LIB3040-046-Q1-E1-G2
aggtcagacacaactaaattgaacggtgggtgagtatatccttcctggaaaaagaaaatttcattcacaactcacaaggactatgcactaataggtatcttaaatatattcacacattaacatgacgtgattggtggtgacgttattagaatgaatggagagtaatagtagtatttaacaggtgtgaagaaggacatttgtttcgtcgttcgcgctttcgccagacacgtcggtaaactaattaaggctgtacaataggtggaaccagttatttcaccaaaa

SEQ ID NO: 13342 - DNA, 338 bp, Glycine max
  unsure (1)..(338): unsure at all n locations
  Clone ID: LIB3040-046-Q1-E1-G3
gaaaccgagaagaagaagatggagatgtatcagatctggagcaggagaatagcgttgggagcgttcgcgtttgttctgcttttccgatcggcctcagcagacgacgtcgttgtgctctctgaagataacttcgagaaggaagttggtcaggacagaggagctctcgttgagttctaggctccttggtgtggacactgcgagaggcgtgctccagaatatgaaaagcttgggagcagcttcaagaaagccagatctgttttaatcggcaaggttgactgtgatgaggacaanagtttgtgcagcaaatgatgagtctctgggtacccaacaattcagtg

SEQ ID NO: 13343 - DNA, 197 bp, Glycine max
  Clone ID: LIB3040-046-Q1-E1-G4
ggacttcaccttacactctcgatgtatttgcaagttttgaagatctattaaaattgacgcgaacacgaaaagactagaaaaaagggttaagaagtaaaagtttggtgtgaggtgtgagtgttctgcacgcaccgaatcaacaataatttctcaaacagcgttgtgaaagaaacacattagaccatgcagataactat

SEQ ID NO: 13344 - DNA, 239 bp, Glycine max
  Clone ID: LIB3040-046-Q1-E1-G5
ctgatctagttcatggcctattagaagtagaaggcgctctggtgggatcctcacgtacagaaaaagattgcagtcagtttgataaggatcgagtgacattgcttcttcggtccgaaccaaggaatcccttaaatatgattcaaaatggatggtattctatcgttgagtagagatttctctatgagaaatatgaatcgcggttttgaggagggggggggagtggtcggggcacaacaggt

SEQ ID NO: 13345 - DNA, 270 bp, Glycine max
  Clone ID: LIB3040-046-Q1-E1-G6
gaaccgtaacggcgacgtccgtgaagtcaatcgcaagtactacgatcgcgacgtctgtcgcctctacctcgtcggtctctgccctcacgaactcttccagttgacgaaaatggatatgggcccctgccctaaggtccactcgttgcaggtccggagaggatatgaggaggggaaagcaaaggggaccgatgaggatgagacggagttggggggagtgggggacaagcttattggtgagtggtggggggaaatggggagggctctaaagcg

SEQ ID NO: 13346 - DNA, 133 bp, Glycine max
  Clone ID: LIB3040-046-Q1-E1-G7
gactcactcatacaatagagaccagcttttgcgtctttgtgaacatggagatgatgaaatcatgtggcttcctcttcgtgctcctcctccttgtcgttgcttcccaggtggtggtgcaaatggagggaagagt

SEQ ID NO: 13347 - DNA, 354 bp, Glycine max
  Clone ID: LIB3040-046-Q1-E1-G8
gaaacacagagggagagagagtgagagaagcagtaattcatcacaatgggtaaggttcacggatctctcgcacgtgcggggaaagtgagaggacaaactcccaaagtggcgaagcaagacaagaagaagaagccacgcggacgtgctcacaagagaatgcagtacaaccgccgattcgtcaccgccgtggtgggattcggaaagaagcgtggacgaaactcgtcagagaagtgacggaggcgtttggaagatgatgggttttcttaggttgcgaaatgtatcacctcgtggtagttgagtgatgaactcaagacggtcggagttgggattaagcgtcaatgaacgagttttttg

SEQ ID NO: 13348 - DNA, 376 bp, Glycine max
  Clone ID: LIB3040-046-Q1-E1-G9
tatatgcagtacctgtacctcataatgtaaaaccttatccttaagtttttattaaattcatagatacaacacatacacaataaattccatgtatcaaaccgaaagaaccgttcgttcactttactgatcgagactccatttcaggaagcaccagcgcatgtggaaagtaatcaaattccattttttgctcatcttaattacgggcgtggtagaattaaactaattatatattattatggcgatgatattagcgacaaaatcgaaaaactggaacaaaaaatgtggcaatctctcatggtttttgtacgcaccgaaagcttgtgattatgcatccacagcatgaattaacaaataaattggctgcgcaaattttgct

SEQ ID NO: 13349 - DNA, 293 bp, Glycine max
  Clone ID: LIB3040-046-Q1-E1-H1
gcctgagcaaaaccctaatccctatttttcttcctcagtagtgtcatttacgcttctcttctctgcagcagctatgcctaaccctaaggtcttcttcgacatgaccatcggcggtcaatctgctggccgcatcgtgatggacgtctacgccgacgtcagtccccggaccgccgagaacttccgcgcgctttgcaccggcgagaagggcgtaaggcggagcggcaagcccctccactacaagggggtcgtccttcgaccgcgtgattccgagtttcatgtgtcagggtggcgac

SEQ ID NO: 13350 - DNA, 377 bp, Glycine max
  unsure (1)..(377): unsure at all n locations
  Clone ID: LIB3040-046-Q1-E1-H10
ggtgtgtgcgttcctaacattattgtttcctaccaagttctctgtctggggagttcttagcaccaccaccagcttctgcagtagctttaagctacgaaagattttccttgaccatggggcaaaagcatttagtgacggtgttctgtttatgggctttaacatgttcccttcttccatctttctcctttggaattctgagaattggtttgaagaagagacctctagatcttgatagtattaatgctgctagaaaggcaagagaaggtctaagatctgtaagaccaatgatgggtgcacatgatcagtttattggtaagtcaaaaggtgaagatatagtacctttgaaaganttatttggacgctcaatattttggtga

SEQ ID NO: 13351 - DNA, 357 bp, Glycine max
  Clone ID: LIB3040-046-Q1-E1-H2
gactgcaactttgctctctgtgaggcttcaatttccaattagggtttcgcttagagtaaccaattaccatgggagtcttcacctttgtcgttcgcaaatccggcgccgaatggagcgccaagcaacattccggcgacatcgaggcctccgccgactccacgtacgatctccaaaggaagctcgtgcaagccgctctcgccgttgattcggccggtggagtccagtcctcggtcgcgcgcgtgtctcctacctccgctgtgtgcgaagtgagagtgggtggtgctgtagtcggtagaagtggcggtggggcggttgcgagtggggccgggagggtggtgctgctgcagctgatgctgc

SEQ ID NO: 13352 - DNA, 354 bp, Glycine max
  Clone ID: LIB3040-046-Q1-E1-H3
gacactcactctttgactcttcttcgtctcaaatctcttcgttccttcgattcgttccatttcttccaaaatggccaaagacgcagttcgcgttctcgtcactggagctgcagggcaaattgggtatgctcttgtccctatgattgctaggggagtgatgttgggtcctgaccagcccgtgatcctccacatgcttgacattcctccggcagcagagtcattgaatggggttaaaatggaattggtggatgctgcagtccctcgtcgtaaaggtgttgttgccagaactgatgtggttgaggcatgcactgggggcaagagtgccgtgatggttggtggattcccaagaaaaga

SEQ ID NO: 13353 - DNA, 77 bp, Glycine max
  Clone ID: LIB3040-046-Q1-E1-H4
agacgacgacagcattgatattcaagttggtgatgttgatgatgcctctgaggctgattaggaggaagttggtaaaa

SEQ ID NO: 13354 - DNA, 146 bp, Glycine max
  Clone ID: LIB3040-046-Q1-E1-H5
gggggcaccagctgtcgaatctgatgacctcactcctgaagtcgtatcttgcctcacaattccaaagttaaacacaagtctttcagcacaatcgcaaacatcagtatccacggcgacaattagttacgaagctgaagtacgcattt

SEQ ID NO: 13355 - DNA, 326 bp, Glycine max
  Clone ID: LIB3040-046-Q1-E1-H6
gacacttcactctctagtcatggcttcttctcttcctcttctcaaccttcttagcctcgctctgtcactactcttctgcattgccttaacttccgaggttggcgtgcaggcgcagatggaggagacaggcttgaacctcatgtcggaggcgttggagtggccaaccgcaatgtcgcgctacgacgaagacagcgaagaagaggatgtccagaacggttacagtcggagatggttgttctggcggaggatgaagtactagatctcctagggcgctctttgggcgaagcgagtcgggtgcccacctgcgttctggtggatcttactac

SEQ ID NO: 13356 - DNA, 248 bp, Glycine max
  Clone ID: LIB3040-046-Q1-E1-H7
atactttttatcatccaggaaagattgctctatttattatctatccagcgtcccacgtgctaaaatcaaaaggcatccactctttttgataatcaatgatagatattgtgttatggttattccatgcgtctagctcgtaagaaactcacagagcttctgaaatgatcagtattgagcagaaagtttgtgataacggaaagggaaaggtgagtacaggtgcgtgatgggagaaaattcattttgtctcg

SEQ ID NO: 13357 - DNA, 272 bp, Glycine max
  Clone ID: LIB3040-046-Q1-E1-H8
aaagataaaaatggatacctcaaagcccaacactggggcaatgaaaggcaccatgcataaacctcaaacgaacctaggggcagattagaagttctcacccaataggttccttgctacaaggtcatgacggaagacaacgattgggaccttagagccttacactggggcaatgaaaggcaccatgcagaaacctcaagcgaaactaggggtagattggaagttctcacccaataagttcccagctacaaggtcatgaggaaagataacaattg

SEQ ID NO: 13358 - DNA, 359 bp, Glycine max
  Clone ID: LIB3040-046-Q1-E1-H9
gagaacaattaggaagacagagaaatcggacaaaaacctaaacctaaaccctgcaaagtgttgaatttacagtttagtagtgagtgaattgagaaatcgaagttaaaaagataatagatagtaacagcaccattcaatcactcatcagagatggctaccattgaaagtagaaggaaatcagtggctttggctctctccaagtacttttcattggatcctagtgttgttccagccgatagttcagacagtgatattaagagtctttacttgaacatcatggcggtttctggacatagggttaatcactctgatgaggtgttgaagtgggtagcatttgcagaagcctttcccggtggccc

SEQ ID NO: 13359 - DNA, 108 bp, Glycine max
  Clone ID: LIB3040-047-Q1-E1-A1
ggtaagtttaggggttgttattccgtgtacggtttgtagtactcgtaaaagactagaagagaatgtaagaggtttgttttgtgttagttgttaattaagtgtatttgc

SEQ ID NO: 13360 - DNA, 364 bp, Glycine max
  Clone ID: LIB3040-047-Q1-E1-A10
gagagccggcttcttcctctgcgcaggaattaggaatattcgacaggtagagtttcttcaatggctcctaaagttgataagaagaatgatccaaaggcccaggccttgaagactgctaaggcagttaagtcaggtgctacctttaagaagaaggtaaagaagatccgaacttctgtcactttccacaggccgaagaccttgaagaaggacaggaaccccaagtaccctcgcattagcgccccgccgaggaacaagcttgatcattatcagatcctgaaataccccctcaccactgagtctgccatgaagaagattgaggacaacaacactttggttttcaatgtcgacctgcgtgccgacaaga

SEQ ID NO: 13361 - DNA, 88 bp, Glycine max
  Clone ID: LIB3040-047-Q1-E1-A11
agggggttcccggagagatttgcaaaagataggataaggttgcatgaattatcacctttttcaaaagggcagtcaatctgtgttttcc

SEQ ID NO: 13362 - DNA, 333 bp, Glycine max
  Clone ID: LIB3040-047-Q1-E1-A12
gatccatttctcgcaacaacgcttaacctctctcattccccatttcctcacctccttcaaccgctgctaaattctagggttccgaaatggacgctggcggaaagatcaagaacggcgccggaggtagaaagggcggcggcccaaagaagaagccggtttcaaggtccgtcaaagccggtctccaattccccgtcggaagaattggccgttatttgaagaaaggaacgtacgctcagcgtgtcggtaccggtgctcccgtatacttggctgcagttctcgaatacctagctgccgaggtgcttgacttggctgggaatgccgcacgtgacaaca

SEQ ID NO: 13363 - DNA, 89 bp, Glycine max
  Clone ID: LIB3040-047-Q1-E1-A2
gaaaaaaagcctaagacaaagacagtgaaggaaacaacttatgagtgggaacttttaaatgatgtgaaagctatatggctgaggaatcc

SEQ ID NO: 13364 - DNA, 207 bp, Glycine max
  Clone ID: LIB3040-047-Q1-E1-A3
aactccattctataccatcaaacaaacaaacgcataagaaacatcacaaaaaaacaattaagctaccaaaacacaagaaaaacaaaaattaagaagaaaagcaagcatttgcaacttgcaaagaagccaaactacacataccctcaactgggtagggacagtgtctccttgatggtaaaaggtaatccccgaaaaacggggaaaagg

SEQ ID NO: 13365 - DNA, 355 bp, Glycine max
  unsure (1)..(355): unsure at all n locations
  Clone ID: LIB3040-047-Q1-E1-A4
gcttccctcgccgctttgtgctgctgctgctgcaaaacctagggttgagccttttgctcaggttttcagcgcttctttcttacaatggttctacagaacgatattgatttgctgaatcctccagctgagttggagaagagaaagcacaagctcaagcgtcttgtgcagtcaccaaactctttcttcatggatgttaagtgccagggctgcttcaacataacaactgtgtttagccactctcagactgttgtggtttgcggaaactgccagactgtgttgtgccaaccaacaggcggacgggcaaggttaaccgaanggtgctcttttangaagaagggagattgaatggtttgtt

SEQ ID NO: 13366 - DNA, 324 bp, Glycine max
  Clone ID: LIB3040-047-Q1-E1-A5
ggttgtgtgagtgaagaagcagagggagtagcggcattaaaaatgcagatcttcgtgaaaactctgacagggaagactataaccctcgaggtcgagagcagcgacaccatcgacaatgtcaaggccaagattcaagacaaggaaggcattcctccggatcagcagcgtttgattttcgccggaaagcagcttgaagatggaaggaccctggccgattacaacatccagaaggaatcaacccttcatctcgtcctcaggcttcgtggtggcatcattgagccttccctcatggctttggctcgcaaatacaaccaggacaagatg

SEQ ID NO: 13367 - DNA, 388 bp, Glycine max
  Clone ID: LIB3040-047-Q1-E1-A6
gcagatagatctgcttcttgttgttggaaagaaaccctagcaagcggaacaatggcagacgttgaggtcgatgtggcggctgcagcagcagcagggcagccgaagaagagaacgttcaagaagttcagtttcaggggcgtggatctcgatgcgcttctggacatgtccaccgatgaactcgtgaagatgttcagtgctcgcgcacgtagaaggttccagagaggcctcaccagaaagcccatggccttgatcaagaagcttcgcaaagcgaaaagagaagctccaccaggtgagaagccagaacctgtccgcacccacctccgcaacatgattattgtgcctgagatgattggtagcattattggagtgtacaatggcaagaccttta

SEQ ID NO: 13368 - DNA, 389 bp, Glycine max
  Clone ID: LIB3040-047-Q1-E1-A7
ctccttaaggttccttttgaatccaagggtggcctttgttgtataaaatattttgggattaacccatgtcatcaagcttcaaggggattgacaaacccttggcatcactctacgatcttaaatcaagaaagtttcacttagtcacataccaaggttgacaatccattgccatccttcaatggggcacacaatcgatcccaaagccttatgttttcttgttgtgcataataatcgaagcttttttaaaaaaaataagaaacgggaaaaccctaggatcaatatttcgattgattgattaaatgtcaaacagctccattatcgtcacccaaaattgtcaagtgatttaacagaacatatgctctgagggagtccccgaagagatttgcaaa

SEQ ID NO: 13369 - DNA, 88 bp, Glycine max
  Clone ID: LIB3040-047-Q1-E1-A8
gtacttcaacaaaatgattgtcatacacatgaccgatacaaattatacgatacaatgaagaatttgccagcggttgacttgtaagagg

SEQ ID NO: 13370 - DNA, 322 bp, Glycine max
  Clone ID: LIB3040-047-Q1-E1-A9
gattgttggcctgtgctctgctcgtgcctctagggttatcatatctccatttccatttcctctctctcagtttccaagaatcttaagctatgggaaagtcttacccaaccgtgagcgctgattaccagaaggccgttgagaaggcgaagaagaagctcagaggcttcatcgctgagaagagatgcgctcctctaatgctccgtttggcatggcactctgctggaacttacgacgtgagctcgaagaccggtggtcccttcggaaccatagagcacccctccgaactcgctcacggcgctaacaacggtcttgacatcgctgt

SEQ ID NO: 13371 - DNA, 397 bp, Glycine max
  Clone ID: LIB3040-047-Q1-E1-B1
attgacttcccaatccaagaaggctgggttccttacacagtcaaccagtaattcaaccatttgtggagcataggtctttaatgcatcaaatgtataacccatttgctcccgagaggctgaggctcctatatttccaccaattgcttctacttcccttacaatgtcaagtgtggaggagcctaagccaaaggaatgtgatagtaaaatgttaacttcaccgtctgctagtcctttcactaaatttaccaatgcctcatgtagcattggctccaaatttggtgcaaaagacctcctggttgagttgctgtggattgtttgaagttctgtcaagttcaaatagataatttcagaaatacaagatacaagcgtcaagcgtgagtatctcaaatgatgggtc

SEQ ID NO: 13372 - DNA, 329 bp, Glycine max
  Clone ID: LIB3040-047-Q1-E1-B10
gagagtggtggggtgtgcagaagagcgtcgcagttgtaaccctaatcagaagaagcgcagcttcaagcgagtgacagccaccagccatgggtcgtatgcacagccgcggtaagggtatatcctcttctgctttgccctacaaaaggagagctcctagctggctcaagatctcttcgcaagatgtcgaagaaaatatctgcaagtttgcgaagaaaggtttgaccccgtctcagattggggtcattctcagagattctcacggtattgctcaggtcaatagcgtcactggcagcaagatccttcgcatcctcagagctcacggacttgcg

SEQ ID NO: 13373 - DNA, 335 bp, Glycine max
  Clone ID: LIB3040-047-Q1-E1-B11
gagggtttttgtcgtcgctactaagagttgctgcttcttcagccactccgcacctcgcagcctctgtgccctcaacaaccatggctgaaatcgaaactaccgttccagatcccacccaaatcgacgtcaaactcttcaatcgctggagcttcgaggatgttgaggttaatgagatgtctctggctgattacattggagtgtccccatcaaagcatgctacatatgttcctcacactgctggtaggtactcagtgaagaggttcaggaaagcgcagtgccccattgttgagaggctcaccaactctctgatgatgcacgggaagaacaagggaaag

SEQ ID NO: 13374 - DNA, 280 bp, Glycine max
  unsure (1)..(280): unsure at all n locations
  Clone ID: LIB3040-047-Q1-E1-B12
ggtgtgtagtataggattctcttctttattccttttgtaatttcattcattcttaatctttgtgaaaaataatgttcatcgagaattttaaggttgagtgtcctaatgtgaagtacaccgagactgagattcagtccgtgtacaactacgaaaccaccgaacttgttcacgagaacaggaatggcacctatcagtggattgtcaaacccaaatctgtcaaatacgaatttaaaaccaacatccatgttcctaaattangggtaatgcttgtgggttgggg

SEQ ID NO: 13375 - DNA, 393 bp, Glycine max
  Clone ID: LIB3040-047-Q1-E1-B5
gggccgcacttactcttgttctcaagggattcgattttctctgcactcacttctagggtttcctccgcgctatcagcaatcatggccgacgaaacaccaaatgagatgaaggaggaggttccagaaattgttccttttgatcctaccaagaagaagaagaagaagaagattacaattgtagatcctgctgatgaccctgtggagaaattggctgagaagacagaaaacctctcagtttctgagggggttgagactgcatttgctggtttgaaaaagaagaagaagaagcctgttgaaatgagtaacttgaatgatgagagtggagatgcaaatgaagatttggatgatcaccctgaagatgatgaaggagaagtggttgctcccgaggctcgc

SEQ ID NO: 13376 - DNA, 388 bp, Glycine max
  unsure (1)..(388): unsure at all n locations
  Clone ID: LIB3040-047-Q1-E1-B6
gatcatcaataggtgttttcatttgggattcaaactcaccatggtggacgccttcaaactttgcatcttccttcttgcgtcgatctgtgctttcctagtcttttctaatccagtgctgtgtagtgataaggaggacagtgtattcaagggaatcaacagctacaggcaaacacggagcctggtacccctgagccaagtttcgaaggcaacatgtttggctgatgaagttgcagaagaaatagagaagatgccctgtgaaaacgtgaaccaatactacccttcatctgttcctggtagtgggaacctcaaaatcccaaacttgcagaagcacataaataaatgtgacattaacttcaacaccaccactgatggggtcattctcnccgtt

SEQ ID NO: 13377 - DNA, 69 bp, Glycine max
  unsure (1)..(69): unsure at all n locations
  Clone ID: LIB3040-047-Q1-E1-B7
ggtctgcagtgtgcacttctcttgcataggaagggaaagaccganaactagagaagaaggaaaaccttc

SEQ ID NO: 13378 - DNA, 385 bp, Glycine max
  Clone ID: LIB3040-047-Q1-E1-B8
gatcatagtagatattcattccccttatctttctctcttccctctccccgcccaaaccctaactccctaccctattccgctttctctcatccatcatgaaaggaggaaagtccaagaccgaatctaagagagccgatgccaaacttgctgtgaataagaagggcgccgccaccaagactaggaaacccgccggaaaggggaaggcagcgaaagatcctaacaagccaaagaggcctccaagtgctttcttcgttttcatggaggaattcaggaaggtgttcaacaaggaacatcccgacaacaaagcagtgtctgctgtgggcaaagctgctggagcaaaatggaagacgatgtctgatgctgaaaaagcaccttatgtggcaaa

SEQ ID NO: 13379 - DNA, 376 bp, Glycine max
  Clone ID: LIB3040-047-Q1-E1-B9
gacacttactagtagtaagcatggagtcctcaaagatctatgcttacctcttcctctgcatgatctttctctcttccgccactcccattctcggttgtggctactgtggcaaaccccccaaaaagcacaagcctggtaaaacaccaaagacacccaaaacacccgttgttaagccaccagtcaccatccctcccattaatgttcctcccgttgttcttccaccaatagtgaagcccccaggtattctccctccaattccaattattaacccaccaaccacaccagggaagggagggaacactccatgcccaccaccaaagtctcctgcgcaggctacgtgccccattgacacgctcaaacttggtgcctgtgtgga

SEQ ID NO: 13380 - DNA, 332 bp, Glycine max
  unsure (1)..(332): unsure at all n locations
  Clone ID: LIB3040-047-Q1-E1-C1
ggccattgttgctgtcatcatccgcagctgctgttattcgcaccgcaaacaaacagtgagccatggccgtcggaaagaacaagcgcatctccaaagggaaaaagggtggcaagaagaaggcagctgatccctttgccaagaaggattggtatgacattaaggccccttctctttttcaagtgaaaaatgttggcaaaaccctcgtctctcgtacgcagggtaccaagattgcttctgaaggacttaaacatanagtgtntgaggtctccttggctgatcttcaaggggatgaggatcatgcattcaagaagattagggtgagagctgaagat

SEQ ID NO: 13381 - DNA, 353 bp, Glycine max
  Clone ID: LIB3040-047-Q1-E1-C10
ggtcctaaatcctcattccagccacacgcttcagaagacatggcctcattgggtgggttacaaaatgtgagcggcatcaattttcttatcaaagagggtccaaaagtcaatgcaaagttcgagctgaagccgccaccatatccactgaatggtttggagccggtgatgagccagcagacacttgagtttcactgggggaagcaccacaagacttatgtggaaaatctgaaaaaacaagttgttgggacagagcttgatgggaaagtcaactagaagagaatattggcacatcatacaataagggtgacattcttccagctttcaacaatgcagcacaggtatggaaccatgac

SEQ ID NO: 13382 - DNA, 372 bp, Glycine max
  Clone ID: LIB3040-047-Q1-E1-C12
gaggaaaggaaaggggaacccaaaccgaaaccctaaccctaacggagagatggcggagcacttggcatcgatattcgggacggagaaggacagggtgaactgtccgttctacttcaagatcggcgcgtgcaggcacggcgaccggtgctcccggcttcacaccaagccgacaattagcccaacattggttctgtcgaacatgtaccagaggcccgacatgaacatgagcattatcaccaaccccgatcagccacaaccccaatcccttgaccccgacaaggtgcaggatcacttcgacgacttctacgaagatctcttcgaggagctcagcaagtacggccccattcagagcttgaatatttgtgacaacct

SEQ ID NO: 13383 - DNA, 356 bp, Glycine max
  Clone ID: LIB3040-047-Q1-E1-C4
ggtcgtgaacgtgtacaattccacaaccactttatttactctccttctctcctctcccttgagcagattaaaatcatgggtccgatgctgctgagccaactcgccaccggtctaagcgttctcgccggagcggttcttgtgaaatcggttatggaccagaagcccatggcaggcccattcactcgctgccccacgtgcaacggaaccggtcgagtcacgtgcctctgttcgcgttggtccgacggcgatgtcggatgctccacatgctccgggtcgggtcggatggcctgcagcagttgcggcggctccgggaccggtcgtcccttgccggccaaaatcgcgattcgcccaccgaa

SEQ ID NO: 13384 - DNA, 374 bp, Glycine max
  Clone ID: LIB3040-047-Q1-E1-C5
atcaagagaagcactcaattgaagaagcttatgaatgcttactgtgaccgacagtcggtggatttcaactccattgcttttctgtttgatggacgccgcctccgagctgagcagactccagatgagttggaaatggaggacggggacgagattgatgccatgcttcaccagacaggaggttctgttgtctgaaggatgtgattacctttgctcctcattataagtaggaattagttaacttagagctatgtatggcataagatacatattttattatctgctattatatacagcttttgccggtggattttggaggcattgtgcttcctcttcaatatgatgattatgaatggattgtcatatttctgctttac

SEQ ID NO: 13385 - DNA, 388 bp, Glycine max
  Clone ID: LIB3040-047-Q1-E1-C6
ggttgaacttcattgtttttggctaagcctcgaaatccagaaaaatcgtgagcgaagatgatgcacatgaccttttactggagcaggaaggtgaatctcctaatagattcatggaagaccaacgattggacggagtatctcatcactctgctcgcatgcctcgtcgttgccgccttctaccagttcctagagaatcgccgcatccgcctcaagctcatcggcgccggaaatcccttcccggcagagatcgaggccccgcttctgcgacggaagcttgccggaaaccgcgccaaggtgggcgtgaaggtagccggagcgtttctgttcgggctgagctcggcgatcgggtacttgctgatgttgtcggtgatgtccttcaacggtgggg

SEQ ID NO: 13386 - DNA, 388 bp, Glycine max
  Clone ID: LIB3040-047-Q1-E1-C7
caccagttccctgatgagtccttgagtgaagcattggagaggtttcggggtttgttgagaaagactcccacacatggattctctgagccaattcaattgaacatgtttatagatgggctgagaccataaaccaagcagttgttagaggcttcatcaggaggaaagataaagctgaagacccctaaggaggcaactgagttgattgaaaatatgtctgccagtgatcatgctattctaggtgatagagtgcatcaacccaccaagaggagcttattggagttatcatcgcaagacattgtgttggcacaaaataagttgctttctaagcaacttgagatcttaatagaaacaattggtaagttgccaactaaattgtctactggtcaac

SEQ ID NO: 13387 - DNA, 180 bp, Glycine max
  Clone ID: LIB3040-047-Q1-E1-C8
aaaccatcatcagcaatgtcaagtacacacgtttatgacattttctatcgtttgccaaaattcttattggtttgagttattatagtgtctttgtaggtacctcaactcttcaccggtcaccaccgatatcaccattttgaagagagaactattgcaaaatcatctcagagctaacttgac

SEQ ID NO: 13388 - DNA, 373 bp, Glycine max
  Clone ID: LIB3040-047-Q1-E1-C9
gaaaatcctctcgtctatagtctattgcactctgacagacactatcagatttcagaggcggaggcggaggctggagctgcctcaactcaagtcctcaactatctgaatctgaactcatccactcactcgttagcgctgctagaacgaaaactgagtaatggaaagtggagggaactcccttccatcagggtcagatggtgtgaagagaaaggtttcatatttctatgatccagaggttggaaactattattatgggcagggacacccaatgaaacctcataggattcgaatgacacatgctcttttagcccactatggattgcttcaacacatgcaggtcctgaagcctacggctgctaaagatagggacctt

SEQ ID NO: 13389 - DNA, 392 bp, Glycine max
  Clone ID: LIB3040-047-Q1-E1-D1
gagaacagaaaaataaattgaagattgagagaagatacaaaacagaagagagatgggcgtgacgaaggaacaagttgaattatccttgaaggccaaactgaacccttctcaccttgaagtggttgatatatctggagggtgcggtgcaagttttgtggtagagattgtatccgaacagtttgaaggcaaaaggctacttgagaggcatcgaatggtgaatgctgccttagaggaggaaatgaaacaaattcatgctctctctattaagaaagctgttaccccagagcagtggaaacaacagcaagaatccaaccaatcaaatcctgctgcctagagcatatgttttagttataaaataagaaatccatacagtgtgttgctgactgttgaca

SEQ ID NO: 13390 - DNA, 302 bp, Glycine max
  Clone ID: LIB3040-047-Q1-E1-D10
gatgccgaaaagtagtaccaagatggcttcagttgtgtatctcctctttggcttccatctcattgttatcatgtcaagttccttacccgcaactagtgaagtgtttgcaaaacagtatccatccacagaacccgtggaagaaaaactcacccaactccacttctatttccataacaacataacgggggaacacccaactgctatgaaaactgttttgcctcctaaggggtccattcatggttttggggctacttacatgatggatgaccctctaactgaaggaccaagtccaacttcaaagc

SEQ ID NO: 13391 - DNA, 337 bp, Glycine max
  Clone ID: LIB3040-047-Q1-E1-D11
ggcttccgctgccattgaaagaagctgttgaatcgcgtcgaataaggttctgaaatttttaagctttcatctcagacagggtgtaataagaaatgatagatataagtactctcaatgctgcacagattactgtgctgggatccgcgttttgtgttatgctttccatgcatttcacgacgcagttaatgtctcagcatctcttctattggaagaatccgaaagagcaaaaggctattatcattatcatccttatggctcctatctatgcagctgtctcctttgtgggtctcttggatatcagaggaagcaaggagtttttcacctttttagagtcagt

SEQ ID NO: 13392 - DNA, 351 bp, Glycine max
  unsure (1)..(351): unsure at all n locations
  Clone ID: LIB3040-047-Q1-E1-D12
aagaaggaagctgaagtcatagaagagaagaaggaagtggaagtgacggaagagaagaaggaaattgaagtaacagaagagaagaaggaagctgaagtcatagaagagaagaaggaagtggaagtgacggaagagaagaaggaaattgaagtaacagaagagaagaaggaagcagaagtgaaagaagagaagaaggaaggggaagtgacggaagagaagaaggaagttgaagtgacggaagagaagaaggaagcggaagtgatagtagaagagaagaagggagttgaagtgacggaagagaagaaggaantggaagtgaccgaaagaaagaaagaagtggaagtgatcgaa

SEQ ID NO: 13393 - DNA, 162 bp, Glycine max
  Clone ID: LIB3040-047-Q1-E1-D2
agtctagacttttagatgatatggtactttccaaacttaaaaatgttaaacgcctgtattaatccaacaaaaaatgggcctttgaaactaaagaaaaacaaactaagattggcccaaactgaagaaatacaaaaaaatggcttgagatcaagcctaaccatg

SEQ ID NO: 13394 - DNA, 335 bp, Glycine max
  Clone ID: LIB3040-047-Q1-E1-D3
gggtggagagcaagagctataagtgtgggaagtgattggaaattgttggaacccaccctatcaacaaggagaagctgttttcgttcgtcgccactaacactaatcgtttcttcaatgccttacgagaaggaactcgccgctgcaaagaaagcagtcactctcgctgctcgtctctgccagaaagttcagaaggctcttctgcaatccgatgtgcactcaaagtcagacaaaagtcctgtcacagtggctgattatggttcacaagcattggtcagctttatacttgagagagaacttccttctgaatcattttcattagtagctgaggaggattc

SEQ ID NO: 13395 - DNA, 321 bp, Glycine max
  Clone ID: LIB3040-047-Q1-E1-D4
gaagactgtctctaaggaggaagcgtctgccatcaaggctgctgggaaagcatggtatcacactatggtgtcagattctgattatacagaattcgacaacttttctaagtggttgggtgtttcacagtaaacttcatgatttattttttcgtattagaattttgttttttatgctcatcagaactaaatatccttatctttggtttttttgttttgcgggttaaggttgtcatcataattacgcagacaatgtggaaattttgtttgttggattttagtgcaaattctggttcttatattaaaaacagcatctcttttatt

SEQ ID NO: 13396 - DNA, 283 bp, Glycine max
  Clone ID: LIB3040-047-Q1-E1-D5
ggcacttcaattgcaatcaaattagttcattctctttgcgcagttccctacctctcctttcaagatgcagatcttcgtcaagaccctcaccggaaagaccatcacccttgaggtggaaagctctgacaccatcgacaacgtcaaggccaagatccaggacaaggaaggaattcccccggatcagcaacgtctcatcttcgccggaaagcatctcgaggacggccgttacctcgccgactacaacatccaagaaagagtcaacccttcaccttgtccttcgtct

SEQ ID NO: 13397 - DNA, 58 bp, Glycine max
  Clone ID: LIB3040-047-Q1-E1-D6
cccacgagtcaaaccacgcgtccgccgacacgtcagacggctgcgataagagcaccga

SEQ ID NO: 13398 - DNA, 387 bp, Glycine max
  Clone ID: LIB3040-047-Q1-E1-D7
gaagcactaaggagtagcgagtattggctgatacttgcaccctcttaacaataacatgagacagagaaagggttgacggaaaggaaaaccaaatcaaacccaacccaccttgtccgatctgccaccaggtgtggttgttgtgatttgaatggaggcaagtggaggtggcggtggcggtgcttcaccgtctgcaccagtgaagcaatatctgcacgatttctcgaagctgtttcagtactatctggataaatccactccacattccacgtacagatggattgggacttttgtgatagcatccatctacgtattacgcgttgtttatgtgcaggggttttacattgtctcttatggcctcggaatctaccttctgaatctcttgattgg

SEQ ID NO: 13399 - DNA, 362 bp, Glycine max
  Clone ID: LIB3040-047-Q1-E1-D8
gacttccaacttgaggattcaaaagcaggaattctttgaattctctgagcaatcagtgctgtccaatctctattggggtattgacagcattgaggctgcaattcaagctcaacagccagaagaaagatccttcaggctaaggaactcagaacaaatgcttcaggtgccagcaatgcttgatgaggaagaggtcacagccacaattccaaaccgttacttggtgtgctgctcctacttttacctctcagtggttaggaagctccagggagatgagtggcaggcagcactgcattttctccaagcagttttggtctcaccaaagcttgtttggacagaatttgcatcacaactttgtgaaagtc

SEQ ID NO: 13400 - DNA, 356 bp, Glycine max
  Clone ID: LIB3040-047-Q1-E1-D9
gactctgttacggtgcaacctagcagcctccaaatccaatggcttcagagaagaaactttcgaacccaatgagggagataaaagtgcagaagctcgtcctcaatatctctgttggcgagagtggagatcgtctcaccagagccgccaaggtgttggaacaacttagtggccaaaccccagtgttttccaaagcaaggtacactgttcgttcctttgggattagaagaaatgagaagattgcatgctatgtcactgtcagaggtgacaaggcaatgcaacttttggagagtggtttgaaggtgaaggaatatgaacttctcagaaggaacttcagtgataacggttgccttgggctt

SEQ ID NO: 13401 - DNA, 74 bp, Glycine max
  Clone ID: LIB3040-047-Q1-E1-E10
gacctaagtaagttcaagttaggcaaaatgctaatccctgagaagggaggggacatggttaatgttcccctcac

SEQ ID NO: 13402 - DNA, 352 bp, Glycine max
  Clone ID: LIB3040-047-Q1-E1-E11
ggagcagaaagctaaaggctaaagcctagaaccttcttcctttacacctcgctggaaccagcgatggatcctcagcctgagccagtcagctacatatgcggagattgtggaatggagaatacgctgaagcccggtgacgttatacagtgccgtgagtgcggttaccgtattctttacaagaagcgcactcgtcgcattgtccagtacgaggcacgctgaagaaaactgctataacgtttgcaagtaatttccatgaagaaattgttactacatctgtgttgtgtgatattgaagaactacttttaattctacagtagattgctttttgggtgatgtttatgcaaagattaaa

SEQ ID NO: 13403 - DNA, 82 bp, Glycine max
  Clone ID: LIB3040-047-Q1-E1-E2
gaagacgacagaaggcggagaaagaaaatactagtaatagtctaaatagtgttccctttttgtctcgagtaacgaagccagg

SEQ ID NO: 13404 - DNA, 379 bp, Glycine max
  Clone ID: LIB3040-047-Q1-E1-E3
ggtgctctgctcgtgcctctagggttatcatttctccatttccattttctctctcacttttcaagaatcgtaagctatgggaaagtcttacccaactgtgagtgctgattaccagaaggccgttgagaaggcgaggaagaagctcagaggcttcatcgctgagaagagatgcgctcctctaatgctccgtttggcatggcactctgctggaacctttgacaagggcacgaagaccggtggacccttcggaaccatcaagcaccctgccgaactggctcacagcgctaacaacggtcttgacatcgctgttaggcttttggagccactcaaggcggagttccctattttgagctacgccgatttctaccagttggctggg

SEQ ID NO: 13405 - DNA, 379 bp, Glycine max
  Clone ID: LIB3040-047-Q1-E1-E4
gatgccgaaaagtagtaccaagatggcttcagttgtgtatctcctctttggcttccatctcattgttatcatgtcaagttccttacccgcaactagtgaagtgtttgcaaaacagtatccatccacagaacccgtggaagaaaaactcacccaactccacttctatttccataacaacataacgggggaacacccaactgctatgaaaactgttttgcctcctaaggggtccattcatggttttggggctacttacatgatggatgaccctctaactgaaggaccaagtccaacttcaaagcttgtgggaagatctcagggaatatacgctttggcttcacaacatgagcctgggttgctcatggtgacaaattttctc

SEQ ID NO: 13406 - DNA, 365 bp, Glycine max
  Clone ID: LIB3040-047-Q1-E1-E5
gacaccatccactactcttcttagttccagcacaacaagctcttcatttctcccacactttcttttctttcaccaaaaatgtcaccagatttcacacttttgttcttcccggaactcatgcagtcccctatgatcactttccaagccaccctctgcgtccttctcttcaccctcatgttcacgctgctcttcactcctggtgggcttccttgggcctgggcccggcccagacccatcatccctggcccagtaactgccctgttagggatctttactggctccacgcctcaccgtgctttatccaaactcgcccgtaattaccacgcggaaaaactcatggctttctccatcggtttaacccgttt

SEQ ID NO: 13407 - DNA, 386 bp, Glycine max
  Clone ID: LIB3040-047-Q1-E1-E6
ggacgaagaccggatatattccctcaatttagtccaatgaagacacctttgccgcctccgttgcctgcagatcctccagaagaggatgaagaggaggaagaaaagaaagaggaagagcaagaacctgataaggaggagccagataagccagacaagccagaaaagcaatagtgtgtagtaaatgactagtcttgatttctccagttatccttgatatgtcaagccagactgctgattgattaagtgaatgtaagggtatcacatgaatacctatagcgtcagaaattttagctttcaagtttttctagcaccatgtggccttatatgagttagctcatgcaagaaggaaaaaaaaacaattttgtgctacggacatatttgtaggc

SEQ ID NO: 13408 - DNA, 387 bp, Glycine max
  Clone ID: LIB3040-047-Q1-E1-E7
gactgtggttgaaaatcgaatcctttctctctctctctctctaggcaataaagtgaaacgcatcagagaaattcaattcaatggatgcaaatcgcgagcaaattgtggacgttgggtcggtggtggaagccgtttctgctgacgacggtgacgctcctctctacagcctcgaaagtctctgcatgcgttgcggtgaaaacgggacttcaagatttttattgactttaattcctaactttagaaagattttgttgtcagcttttgaatgtccacactgtggtgagaggaacaatgaagtacagtttgctggtgaaattcaaccacgtggttgttgttactctttggagatcccatcatgcgaacaaaagatgctaaatcgacaagtgg

SEQ ID NO: 13409 - DNA, 130 bp, Glycine max
  Clone ID: LIB3040-047-Q1-E1-E8
caataaaaattaaattaatagtacagatgttatcattaatttatattaataatatgattctttatatatattaagaaattttttggtttatatatagaaattgtttatattcttaatactaagaataccg

SEQ ID NO: 13410 - DNA, 328 bp, Glycine max
  Clone ID: LIB3040-047-Q1-E1-E9
actcaccacttcaaaacactcataacacaaagcacaaagcaaagctcatccttgagttaaaaaatggcagcagcttcttccatggctctctcatccccatccttggctggcaaggccgtgaagctgggcccatcagccccagaagtgggaagggtgagcatgaggaagaccgtcaccaagcaggtctcctcaggaagcccatggtacggcccagaccgagtcaagtacttgggcccattctctggcgagcccccgtcctacctaaccggtgagttcccaggcgactacggctgggacactgctgggctttccgcagacccagaaacct

SEQ ID NO: 13411 - DNA, 373 bp, Glycine max
  Clone ID: LIB3040-047-Q1-E1-F1
ggcccctcttctaattcttctctcaaaaggactgaacgaaaaaaccttagggttcctctgttcttcttcgccccccaaaaaattttctggctcagagaaattcaaccgttctcgccattgccgaagctccaactcctcgcatttccaactcttcacccaaaaccctttttgttggaacagagtttcagagagagacccttcacaacatggcaaaaacgaggccaggcagaaaagacttggattcctacaccatcagaggcaccaacaagatcgtaagagctggggactgtgtgctgatgcgcccctctgatacgagcaagccaccgtacgtggcgcgcgtggagaagatcgaacaggatagtaggaacaacgt

SEQ ID NO: 13412 - DNA, 358 bp, Glycine max
  Clone ID: LIB3040-047-Q1-E1-F10
ggccgttttcttcttcatcatagtcgtggccgtgtcgcagcaaaaccaaaccacatattaacttgtttgctctaagtcatggctctgatcttgcacgcaaccaaagcaaacaagaatgctttcaagactctgattgcggcagagtacagtggcgtccaagtggaattggcccctaatttcgagatgggtgtctctaatagaactcctgaattccttaaaatgaatcccataggaaaggttcctgtcttggaaacgcccgatggtccagtctttgagagcaatgccattgctcgttacgttgctcgactcaagggtgacaacgctttgttctcatcttctgccaatgataatgcccaca

SEQ ID NO: 13413 - DNA, 354 bp, Glycine max
  Clone ID: LIB3040-047-Q1-E1-F11
gagtgccattcccttcacaccattctcacaaaacaactttcaaactctgagaaagaatggctgccaacacattgatgagtactgctatctcagccttcccatctctcctttcttcctcaaaatccagatttgccaccgcagttcctctttctagctttggtgtcaccaatgcctcttcttctcgcttttctatgagtgctgactggatgccaggccagcctagacctccttaccttgatggttcagcacctggtgactttggattcgaccctcttcgtcttggtgaagtaccagagaatcttgagaggttcaaagagtcagaactcattcactgcagatgggccatgcttgctg

SEQ ID NO: 13414 - DNA, 375 bp, Glycine max
  unsure (1)..(375): unsure at all n locations
  Clone ID: LIB3040-047-Q1-E1-F12
ggaaggctcgttgatataaaagggagtccttatcttctcatattgtttaggttttcttagtcagacttaccccttgctaccaacactgagcttaaccgagcttcgcaaagatgaatcgggaaaagttaatgaagatggctggttcggttagaactggaggaaagggtactgtgagaagaaagaagaaggctgtccacaagacaacaaccacagatgacaaaaggcttcagagcaccctgaagagaatangggtgaatgccatccctgctattgaagaggtcaatatctttaaggatgacgtagttatccagtttctaaatcccagagttcaagcatccattgctgctaatacttgggttgtcagtggttcaccgc

SEQ ID NO: 13415 - DNA, 373 bp, Glycine max
  Clone ID: LIB3040-047-Q1-E1-F2
gatagtctgaggaaagtgagtgagagaaagagatcgcagacacagagcagaatggcttctacccaatgtttcttgcaccaccatgctcttaccacccctgccagtgccagatccccatcactacgcatcttggttagcaccaagcctaaccagcttgtttgcaaggcacagaaacaacaaacaccacaagaggatattgatgtcagcccaatctctcgccgtttagctctaactgtgctcattggtgctgctgctgttggctccaaagtccaacctgctgatgcagcctatggtgaagctgccaatgtgtttggaaagccaaagacagacacagatttcctgccatacaatggagatggattcaaactatcta

SEQ ID NO: 13416 - DNA, 365 bp, Glycine max
  Clone ID: LIB3040-047-Q1-E1-F5
gacctgatgcagatgcagcctatcatggcagcctactaccccaacaacgtcaccactgatcacattcaacagtacctggatgagaacaagtccttgatcctgaagattgttgaaagccagaattctggcaagctgagcgagtgtgcagagaaccaatcaaggctgcagagaaatctcatgtacctagctgcaatagctgattctcaaccccaaccatctccaatgcctggtcagtatccttctagtggacttatgcagcagggagcacactacatgcaggctcagcaggctcagcagatgtcacaacaacagctaatggcttcgcgctcctcactcttgtactcccaacagcctttctcagtgct

SEQ ID NO: 13417 - DNA, 349 bp, Glycine max
  Clone ID: LIB3040-047-Q1-E1-F6
ggaaacagaaaatatattaggagagatatactaatatttatatcatgaacatccttccgacgaaatgagtgatttccatcaatgaacagtatactcggtaaaagaaaaagaaaaaaacatgtgaaagtgacagtaagctttgatgttaacaggttaaagatataagcctaagctaagtggagacgctgttgccatttctgctcattgagtgaaagttccattgggcgtggtttaatggaagggatgaagcagcttgcgtacaacactgcggtgaagctcattctggctgcactcgaacacaacttgctccctgactttgtcaccaggagatatggtcgcttcatggcgg

SEQ ID NO: 13418 - DNA, 388 bp, Glycine max
  Clone ID: LIB3040-047-Q1-E1-F7
gagagaaagagagagaaagatgtcgaagcgtggtcgtggtggttcggcggggaacaagttccgcatgtcgctgggtcttccagtggcggcgacggtgaactgcgccgacaacacgggggcgaagaacctctacatcatttcggtgaaagggatcaaaggccgtttgaaccgtcttccctcggcctgcgttggcgacatggtgatggccaccgtgaagaagggaaaacccgatctgaggaagaaggtcttgccagctgtcatcgttcgccagcgcaagccatggcgccgaaaggacggcgtctacatgtacttcgaagataatgctggtgttattgtcaatcccaagggagaaatgaaaggttctgctatcactggtcccattggaaaa

SEQ ID NO: 13419 - DNA, 385 bp, Glycine max
  Clone ID: LIB3040-047-Q1-E1-F8
gtctcctacagattcttcagcaactgcgattttggatcggaacctcttctgcggcgtagcaatgggacactccaacgtttggaattctcacccaaaaaactacggtcctggttctcgcacttgccgagtgtgtgggaatccacatggattgatcaggaagtatggccttatgtgctgcaggcagtgcttccgtagcaatgccaaggaaattggcttcatcaagtatcgctaaaagagctgttgtcacctacggaccaatattatgttctggcactaggatgttttgaagatgttatgtttgaagaaacttgagacttgtttttttcatctattttattatcagacataatgtgtggaacgaagaatacttttatataaattgttt

SEQ ID NO: 13420 - DNA, 271 bp, Glycine max
  Clone ID: LIB3040-047-Q1-E1-F9
ggttctagtgtgtgattgtttgttgttgtaactcgttcttcttcttttgttgttctgtgtttgtgtttgttttttctctcacctgaaaatgtcttgctgcggtggtaactgtggttgcggaagctcctgcaagtgcggcaacggctgcggaggctgcaagatgtacccagacttgagctacactgagtcaaccaccaccgagaccttggtcatgggagtggcacctgttaaggctcaatttgagggtgctgaaatgggtgtgcccgctgag

SEQ ID NO: 13421 - DNA, 347 bp, Glycine max
  Clone ID: LIB3040-047-Q1-E1-G10
ggtgctctgctcgtgcctctagggttatcatttctccatttccattttctctctcacttttcaagaatcgtaagctatgggaaagtcttacccaactgtgagtgctgattaccagaaggccgttgagaaggcgaagaagaagctcagaggcttcatcgctgagaagagatgcgctcctctaatgctccgtttggcatggcactctgctggaacctttgacaagggcacgaagaccggtggacccttcggaaccatcaagcaccctgccgaactggctcacagcgctaacaacggtcttgacatcgctgttaggcttttggagccactcaaggcggggttccctattt

SEQ ID NO: 13422 - DNA, 337 bp, Glycine max
  Clone ID: LIB3040-047-Q1-E1-G11
acttcacaaaatatatatatgtatgtttaggtagaaagataccttggatatgcatgtatgtagcaaaaagatacctcaccaaaatatatatatgtatgtttaggtagaaagataccttggatatgcatgtatatagcaaaaatacctcacaaaacatatatatgcatgtttaggtagcaagataccttggatatgcatgtatatagcaaaaatacctcacaaaacatatatatgtatgtttaggtagcaagataccttggatatgcatgtatatagcaaaaatacctcacaaaaataaacacatgtttaggtagcaaaatatctcatgaaaagaaaa

SEQ ID NO: 13423 - DNA, 383 bp, Glycine max
  unsure (1)..(383): unsure at all n locations
  Clone ID: LIB3040-047-Q1-E1-G12
gatattaaattttttcgtcacccagaagaagagcgagagagagtgggggaacgaagaagctacagctacagctgaaacagaagctccttcgatctacaatctatagcgattaagctctcattttctgagagtgttctttctttctctctctctctctctcaccgtgattccaccatttccccatcatgatttctgctaccaaactcaaatccgttgatttttacaggaaaatcccgagagatttgactgaggcgtcgctatcaggagccggattatccatagtggcagctctggctatgatgtttttatttggaatggaactaagtagttatttgtctgttagcanctcgacatctgtaattgttgacaagagttctgatggg

SEQ ID NO: 13424 - DNA, 256 bp, Glycine max
  Clone ID: LIB3040-047-Q1-E1-G3
ggcgtacacagcctcaacaaccctaacgcgtgcagagcagagagagacgcagccatggggcgaagacccgcgaggtgttataggcaaattaagaacaaaccataccccaagtcacggttttgccgtggtgttcctgatcccaagatcaagatttacgatgttggtatgaagaagaaaggtgttgatgaatttcctttccgtgtccatctgggtaatttggaaaaagaaaacgtttccaatgaaggcctggaaactg

SEQ ID NO: 13425 - DNA, 339 bp, Glycine max
  Clone ID: LIB3040-047-Q1-E1-G4
gaaccattcaaacgcacactctctctcaccaaagccttcctagaacgaaaaaaaaaagaagagcaattttccctcaccaaagaagaagaagcaaacaatggccgatcaacttaccgatgaacagatctccgagttcaaggaagccttcagcttgttcgacaaggacggcgatggttgcatcacaaccaaggagcttggaactgttatgcgttcattggggcaaaacccaactgaggcagagctccaggacatgatcaatgaagtggatgctgatgggaatggtaacattgacttccctgagttcctaaatctcatggccaggaagatgaaggacactga

SEQ ID NO: 13426 - DNA, 319 bp, Glycine max
  Clone ID: LIB3040-047-Q1-E1-G6
gagcttgacctcaccgacaagggtctcggcgtccgctcaaagaggtttgctttgctggtggaagacctcaaggtgaaggttgcaaatgttgaaagtggaggagagttcaccatctccagtgctgaagagatcatcaaggccctctaaacccttgaatcctcttgtttgctcttttgccgtctttaatgtgtggtgtgactcttttgatgcctgaacatactagaatcctttcccttttcatagatgtaattgtgttatgtgctctggaaaggaccatgatatggtgcatattatggaaataaataagatttcttgctac

SEQ ID NO: 13427 - DNA, 382 bp, Glycine max
  Clone ID: LIB3040-047-Q1-E1-H1
agacacaggctgctcaacagttcaggatgccagatatgggatctgtaacggcaaaacaagaagatgctgctgctgcagcagcgcaacctgaagaagaggaggaggttgatgaaactggtgtcgagccccatgacattgatttggtgatgacacaggcaggagtgtcaagaagcaaggctgtcaaggctctcaagactcacaacggggacattgttggagccatcatggaactcactgcttaattggggtttatgttctatttgtttgttttttgggaatgatattagaactagtgccgtttctatgttaaaccgaatcaacataaccgttatatgtttgggatttgggttttaccctttacatcataattttgttgcgttct

SEQ ID NO: 13428 - DNA, 57 bp, Glycine max
  Clone ID: LIB3040-047-Q1-E1-H10
gagacctcaggtcaggcggggctacccgctgagtttaagcatatcaataagcggaag

SEQ ID NO: 13429 - DNA, 364 bp, Glycine max
  unsure (1)..(364): unsure at all n locations
  Clone ID: LIB3040-045-Q1-E1-G10
gacctaaaaattgtaccgatatggcttcacttgtgtgtctccttttttccttgcatttcatggttatcatgtcaggttccttaccagcaaatagtgaagtgtttacaaaagagtctcctatgtctctatccacaaaacccgtggaaagactcacccaactccacttttatttccataacaacaaaatgggggaacacccgactgctatgaaaattgttgagcctcctaaggcgtccatttctggttttgggactatttacatgatggatgaccctctaaccgaaggaccaagttcaacttcanagcttgttggaagatgtcagggaatatatgctgaggcttcgcaacatgaacctgcgatact

SEQ ID NO: 13430 - DNA, 358 bp, Glycine max
  Clone ID: LIB3040-043-Q1-E1-F9
gagcattagttagagcgagacaacacctcagagaacccaaattccgcgtcaagaggttagggtttggcgtttctgcgagaagaagaagagagagcagaagcagcaatggaagcatacggcggcttcatggtcgacgagaaagccgttagggttgagaacgctttccttgatttcctcaaaagcttcaagtctagtagccagcggaacgaactttattacgaagcggagatcgaattgatgaagagcaatgaatccaacagcatgttcatcgatttcgaccacgtcatcagattcagcgacctcctccagcaaaccatctccgatgaatacttgagatttgaaccttatttgaagaacg

SEQ ID NO: 13431 - DNA, 379 bp, Glycine max
  Clone ID: LIB3040-043-Q1-E1-G1
ggatcgaaacaaagaagccacgcaaggcaagggttttcatcttttccacaacagtcgaacggcgaacgttcgcaagagacgcaacacaaagttgaacgaggaataggcgtgtagggaaaccgtttcattttcaagcgcgtgactttcaaatccaatcttccataccaatggccttcagcaacgctctcagatctgccgcgaagcttgtcgcttcttccgaatcctccctctctaactcagtgagcagaggttttcattcaactggcatgaagaggatgggaggtggacatggccatgatgagccctattatcttcatgcaaagcacatgtacaacttggacaggatgaagcaccaggggttgaaaatgtcccttgctgt

SEQ ID NO: 13432 - DNA, 377 bp, Glycine max
  Clone ID: LIB3040-043-Q1-E1-G11
ggaggccaaaatatctgttcactgattaaagataaacacagagacagggattccagaaccagcgatgaaacctcaaacaaaacataactaaactaaactaaattaaaagtaaaaacaaaacatgttggtttttcaaaatcaatggctgtgtcttcctctcactcattcccttttctccaagttacttcccagaacaaaacatgcagcaacagtgttatccccaagactatgccccgtttggtgtcattcagtagctcgtgccaccactctgcccacttctccaggtggggcggagcaagttgtggacagttcgtttgatgcacctaaagtgaaattattgaagcagaaaatggaacttcttggtatcaacttggaaa

SEQ ID NO: 13433 - DNA, 420 bp, Glycine max
  Clone ID: LIB3040-043-Q1-E1-G12
ccaacccttcaatagggtggcaaaaaaacaaaaaaggggaaccaaaaatttgtaccgaaagggcttaacttgggggccccctttttccctgtgcatttcagggttataaggttaggttccttacaaccaataattgaatgtttaacaaaaaagtccccaacgtccctatccacaatacccgtggaaagactcacccaactcaacttttatttccataacaacataatgggggaacacccgactgctatgaaaattgttgagcctcctaaggcgtccatttctggttttgggactatttacatgatggatgaacctctaaccgaaggaccaagtccaacttcaaagcttgttggaagatgtcagggaatatatgctgaggcttcgcaacactgaactgcgatactcatggtaacgaatttg

SEQ ID NO: 13434 - DNA, 407 bp, Glycine max
  Clone ID: LIB3040-043-Q1-E1-G2
ggagagcagcaacaaacaaacgcagaactgcccaatcttcaagctaacataaacaccatggaagccgtccaagtcatatccaccactacaatcaaggcaccaccgagtcacaataaccatgactcagttcagaaaatcgatttaactccctgggatcttcagttcctcccaattgaaaccattcagaaaggccttctttttcgcaacaaaaaacacacagaaaaccaaatcgagcacctccaacactccctttcatccactctcgccttctttccacccctcgcaggtcgtcttgtcattctccaacaccacgacaacactgtctcgtcccacattgtatgcaacaacgcaggagcactctttgtccacgccgttgcagacaacaccactgtcgttgatattcttca

SEQ ID NO: 13435 - DNA, 342 bp, Glycine max
  Clone ID: LIB3040-043-Q1-E1-G3
gacacaccatccgttctagtctcaacttctgctcttccaactcctacaacgcttttctctgcactcatgggcaaggtcaagatcggaatcaacggatttggaagaattggccgtttggttgccagagtcgctctgcaaagagacgatgttgaactcgttgccgttaacgaccctttcattaccaccgattacatgacatacatgtttaaatacgacagtgttcacggacactggaagcatcacgatgtcaccgttaaggacgagaagacccttctcttcggtgacaaggcagtcactgtttttggacacagaaaccctgaagagatccatgggggtcaactg

SEQ ID NO: 13436 - DNA, 398 bp, Glycine max
  Clone ID: LIB3040-043-Q1-E1-G5
ggcgtacacagcctcaacaaccctaacgcgtgcagagcagagagagacgcagccatggggcgaagacccgcgaggtgttataggcaaattaagaacaaaccataccccaagtcacggttttgccgtggtgttcctgatcccaagatcaggatttacgatgttggtatgaagaagaagggtgttgatgagtttcctttctgtgtccatctggttagttgggagaaggaaaacgtttctagtgaggccctggaagctgctcgtattgcttgcaacaagtacatggccaaatttgctggaaaggatgctttccattgagagtcagggtgcacccattccatgttcttaggatcaacaagatgctttcgtgtgctggagctgataggctccgaactggaatg

SEQ ID NO: 13437 - DNA, 364 bp, Glycine max
  Clone ID: LIB3040-043-Q1-E1-G6
gaagaaagtgagggaaaaaagtagagtggtatgtgggttgctgcggcaacaaaaccattcatcaaattccaattccacagacacactacttctcttccgcttcttctgatggcaaaccaagcttcactctccttttcttcttccgtgtctcctgttcacgcgcctctcaagcgcgtgggcacgcacaacggaagctttcattgcgacgaggccctcggctgcttcatgattcgcctcacgaacaaattcaacagcgccgaaatcgttcgctcccgagaccctcaagtgttggaggttctcgatgctgttctcgatgttgggggagtgtatgaccctgcccgagatcggtatgatcatcatcaaa

SEQ ID NO: 13438 - DNA, 383 bp, Glycine max
  Clone ID: LIB3040-043-Q1-E1-G7
gactcactcatacaatagagaccagcttttgcttctttgtgaacatggagatgaggaaatcatgtggcttcttcttcttgctcctcctccttgtctttgcttcccaggtggtggtgcagacggagggaagagtgtgtgagtcacaaagccacgggttccatggtttgtgtaatagagaccacaactgtgctttggtctgcaggaacgaaggtttctccggtggcaggtgcaaaggcttccgccgccgctgcttttgcaccaggatttgttgagatctcatcaaacactactcttgccatgcaaattaataaatcatagctaggccaaataaattgcatctactctttatccatttgggagctagcttacacaaacaactcata

SEQ ID NO: 13439 - DNA, 404 bp, Glycine max
  unsure (1)..(404): unsure at all n locations
  Clone ID: LIB3040-043-Q1-E1-G8
gcagccactctgtgagagaaagagatagtgtggtagagagagaggagcggaggagagaaaatgacgacgaggttcaagaagaacaggaagaagagaggccacgtcagcgccggtcacggtcgtatcgggaagcaccgcaagcatcccggtggtcggggtaacgccggtggcatgcaccaccaccgcatcctcttcgacaagtaccatcccggtttcttcggaaaggtgggtatgcgctacttccacaaactccgcaacaaattctactgccccatcgtcaacattgataagctatggtccctcctaccccaggaggccaaggacaaggccaccgccgacaaggcgccattgctcgnatgtcaccagttcggttactttaaggttttgggtaaaagggttttgcc

SEQ ID NO: 13440 - DNA, 381 bp, Glycine max
  Clone ID: LIB3040-043-Q1-E1-G9
gaacacttccaattctctttctttctccctctctagggtttcgaagatgttctcgggatcccaattcgacgccaccaccgccttctccggaggcggtttcacgtcctcccagccgtctaccctcaacgattcttctcccgcgccgtcaaacagccgcgaaactccgggtttggtgccggtgacagtgaagcagataagcgaggcctctcaatccggtgatgaaaagtcgaatttcgtgatcaacggtgtagatctgaacaatgtaacactggttgggatgatgtttgagaaagttgagagaaatactgatgtcagttttgttttggatgatggaacaggacgaatcaaatgtcgaagatggattaatgaggcttttgacac

SEQ ID NO: 13441 - DNA, 79 bp, Glycine max
  Clone ID: LIB3040-043-Q1-E1-H1
gccggtttcccgaacgatttgatggtttggaatgcatttcccaagcaacgagtcctcggttcgaaaccagcagagagac

SEQ ID NO: 13442 - DNA, 279 bp, Glycine max
  unsure (1)..(279): unsure at all n locations
  Clone ID: LIB3040-043-Q1-E1-H10
tgggtaccttagatgaaggtcagtgaagatttcattctaataatgcataaacacatgaagatggcttggctccaatccgttatacctcttcatgggccctctctatttactgaccagnggccatcaagcaaggaggaataaattctgtaggtatacacgtttctgtttaaagatctcaatgggagtttgttctacaattatggatgagtacagttatcttgtaaactagaaatttggattaacaatgtaacaattctctgtgtgatgcattgccatttc

SEQ ID NO: 13443 - DNA, 368 bp, Glycine max
  unsure (1)..(368): unsure at all n locations
  Clone ID: LIB3040-043-Q1-E1-H11
gatanggttgttgtcgttgcgactaacagttgctgcttcttccgccactcagcacttcgctccctctgtgcttcaccaagcatggccgatatcgaagctaccgttccagatccctctcaaatcgacgtcaaacttttcaaccgctggagcttcgacgacgttgaggttactgatatgtctctggctgattacattggagtgtccccgtcaaagcatgctacatatgttcctcacactgctggtacgtactcagtgaagaggttcacgaaggcgcagtgccccattgttgagagactcaccaactctctcatgatgcacggaaggaacaatggaaagaagctcatggctgtcacgattatcacgcatgc

SEQ ID NO: 13444 - DNA, 182 bp, Glycine max
  Clone ID: LIB3040-043-Q1-E1-H12
caaacgttggcaaaaggaaaaaggatggggggggtgaaactaaaagttgctgcttcttcagaaacgggggatctcaaggtttcaaccttacattaacttgaatgcaaatctaaactcctttacaagatcccccaaaattcaattaacggcccttcattttaaaaatcctgaacgggaaaaac

SEQ ID NO: 13445 - DNA, 351 bp, Glycine max
  unsure (1)..(351): unsure at all n locations
  Clone ID: LIB3040-043-Q1-E1-H2
aggggcaagagggtatagcgaaagacgttgaggttgctgaacgtggctccttccctgggaatgactaccacgaccctccatcagcatcactcattgatgctgacgagctcacaaagtggtccttttacagggctcttattgccgagttcattgccactttgctcttcctctacattactgtgctcacagttatagggtacaagcaccagacggatcatgctgatgcgtgtggtggggttggcattcttggcattgcatgggcctttggtggcatgattctcatccttgtctactgcactgctgggatttcatgangtcacattaacccagcantgacatttgggctgtttt

SEQ ID NO: 13446 - DNA, 100 bp, Glycine max
  Clone ID: LIB3040-043-Q1-E1-H3
aacccaatgcccacaacacaaaatccaaactttatcccaaaaccaaacacattaagtcattcaacaccgaccacatcaatcaaccgtataatgttcactc

SEQ ID NO: 13447 - DNA, 355 bp, Glycine max
  unsure (1)..(355): unsure at all n locations
  Clone ID: LIB3040-043-Q1-E1-H4
ggcgcctctgcgtgcaagagtgaaaaccttctcttacccttctctcaagtttcaagagatttcatcatggctccaaagaatgacaatgctccaccaccttcctccaagcccgccaaatctggcggtggcaagcagaagaagaagaagtggagcaagggaaagcaaaatgagaatgtgaacaatatggtgctgtttgatcanggcacctatgacaagctcctttctgaagctcccaaatacaagctcatcactccttccattctctctgatcgtttgaggattaatggatcacttgcaaggaaggctataagagaattgatggcaagaggttctatcacgatggtgtctgcccatg

SEQ ID NO: 13448 - DNA, 67 bp, Glycine max
  Clone ID: LIB3040-043-Q1-E1-H5
atacccgctctcttattgtagctagtagaccatcattccactcttccccgtctaaacatatctctac

SEQ ID NO: 13449 - DNA, 356 bp, Glycine max
  Clone ID: LIB3040-043-Q1-E1-H7
ggttttcaacttcgtttttttttggtgtttcggtgtctctcagattaataggttgttcctacggctgctgcctccatcttcaccttgtttctcaacagaacctactgatctacctctccatcacccttctctacacaagaaatagtatcttcgtttcaacaatatgtttggttcatcccgcatggcacatgaatctggtatgttcatggttacacaaacaatttgcagtgtattgtgctgcaaatgtggaattccaatgcaaccaaatgctgctaatatgtgtgtgaagtgtctgcgctcggaagtcgatattacagaaggactgctgaatcctctaatgctggtgaattgccctg

SEQ ID NO: 13450 - DNA, 355 bp, Glycine max; identical to SEQ ID NO: 13447
  unsure (1)..(355): unsure at all n locations
  Clone ID: LIB3040-043-Q1-E1-H8

SEQ ID NO: 13451 - DNA, 351 bp, Glycine max
  Clone ID: LIB3040-043-Q1-E1-H9
gctctgcattcattcagcgttcatctcaatctagatttgtgtgcggtgcgtctccggtgaagagaagaagatggcgaccgtaccaggacagctcatatgggaggtcgtaaagaagaacaactctttcttggtgaaagagttcggaaggggcactcagagcgtgcagttcagcagagagcccaacaatctctacaacctcaacactttcaagtactccggtttggcgaacaagaaaactgtcactgttcaacctgcgggtaaagaccagtctgtgttgctggcaacaaccaagacaaagaagcaaaacaagcctgctgctttgcttcacaaatctgtcatgaaaaaggagtt

SEQ ID NO: 13452 - DNA, 257 bp, Glycine max
  Clone ID: LIB3040-044-Q1-E1-A1
gaagcctggttcgggagactataggatacggctttttatccgaactgaactcttggggaagggaattccacccactcatcaatggcatctactctcttcgcttgcccgtcgttgtgttcctcctcttcttctatattttctacttccgtcaaattctccttaaacccgaataaaatttctcttccgttcgccggaaacaaaaaacctctttcggctccaattcgaaggcggttcaatgtcattgctatggctccccc

SEQ ID NO: 13453 - DNA, 368 bp, Glycine max
  unsure (1)..(368): unsure at all n locations
  Clone ID: LIB3040-044-Q1-E1-A10
ggcacttcaattgcaatcaaattagttcattctctttgcgcagttccctacctctcctttcaagatgcagatcttcgtcaagaccctcaccggaaagaccatcacccttgaggtggaaagctctgacaccatcgacaacgtcaaggccaagatccaggacaaggaaggaattcccccggatcagcaacgtctcatcttcgccggaaagcagctcgaggacggccgtaccctcgccgactacaacatccagaaggagtcaacccttcaccttgtccttcgtctccgtggtggcatgcagatcttcgtcaagactctcactggcaaaaccataaccctagaggtcgaaagctctgacnacattgacaacg

SEQ ID NO: 13454 - DNA, 365 bp, Glycine max
  Clone ID: LIB3040-044-Q1-E1-A11
gatagcaaaatcgtttctccaatttaatcaccattgtacaacccaattcccttcgtcgttttcgattaagagagcaatggcacgtaccaagcaaaccgctcgcaagtccaccggaggaaaggctccgaggaagcaattggcaaccaaagccgctcgcaagtcagccccggcgaccggcggagtgaagaagccccaccgcttcatgccaggaacggtggctctgagggagattcgaaagtaccagaagagcaccgaacttctgatccgaaaactcccattccagaggctcgtcagagaaatcgctcaggatttcaaaaccgatctccgctttcagagcagcgccgtttcggctcttcaggaagccg

SEQ ID NO: 13455 - DNA, 363 bp, Glycine max
  Clone ID: LIB3040-044-Q1-E1-A12
ggtagtataggattctcttctttattccttttgtaatttcattcattcttaatctttgtgaaaaataatgttcatcgagaattttaaggttgagtgtcctaatgtgaagtacaccgagagtgagattcagtccgtgtacaactacgaaaccaccgaacttgttcacgagaacaggaatggcacctatcagtggattgtcaagcccaaatctgtcaaatacgagtttaaaaccaacatccatgttcctaaattaggggtaatgcttgtgggttggggtggaaagaacggctcaaccctcaccggtggtgttattgctaatcgagagggcatttcatgggctacaaaggacaagattcaacaagc

SEQ ID NO: 13456 - DNA, 372 bp, Glycine max
  Clone ID: LIB3040-044-Q1-E1-A2
tggatgcgattggcaacatgcttgtgaagtttcctcctctactcacttacagtctgaacaagaagattagaccagtggtcatattcttgatgaccaaagctggagtcagtgagaaagatatcgccaaggttgtagctcttggacctgagctgttgggatgcaatatagcacataagcttgatctaaatgtaaaatattttttgtctcttggcatacgtcttcggcaattgggtgagatgattgctgattttccaatgctgctcagatacaatccagatgtccttcgtcccaaatatatttatttgcgaaaaacaatggtccggcctttgcaagatcttactgagtttccaaggtttttcagctattctcctg

SEQ ID NO: 13457 - DNA, 344 bp, Glycine max
  Clone ID: LIB3040-044-Q1-E1-A3
gattgttgtcgtttcgttcctcactgtcactgactcactcttgttttcgcttcgctactcatcatcctaataagtaccatcaagaaacaaacaatgtttctcaaagtccagctgcactggaatgtcatcatcgctgctgaaaatctgcaaacggaaggtctgatgcttcataaggcaatcattgtccgccttctgagtgactttgctgtgaataatgccaccaaagatctgggatactttcttgcagtgaccacactggagaaaatacgggaaggaaacgtcacacaacatactggggatgtgctcttccctgtggtttttaatgccatcatcttcaagttttt

SEQ ID NO: 13458 - DNA, 53 bp, Glycine max
  Clone ID: LIB3040-044-Q1-E1-A5
gagacctcaggtcaggcggggctacccgctgagtttaagcatatcaataagcg

SEQ ID NO: 13459 - DNA, 387 bp, Glycine max
  unsure (1)..(387): unsure at all n locations
  Clone ID: LIB3040-044-Q1-E1-A6
ggtaatataagattctcttctttaatccttttgtaatttcaatcattcttaatctttgtgaaaaataatgttcatcgagaattttaaggttgagtgtcctaatgtgaagtacaccgagactgagattcagtccgtgtacaactacgaaaccaccgaacttgttcacgagaacaggaatggcacctatcagtggattgtcaaacccaaatctgtcaaatacgaatttaaaaccaacatccatgttcctaaattaggggtaatgcttgtgggttggggtggaaacaacggctcaaccctcaccggtggtgttattgctaaccganagggcatttcatgggctacaaaggacaagattcaacaagccaattactttgggtcccctcacca

SEQ ID NO: 13460 - DNA, 375 bp, Glycine max
  Clone ID: LIB3040-044-Q1-E1-A7
gacatacacacccacatcgaccatcttctctcttccctttcagatcacacgcacacagttacgctcttcaaatctatctcttctcagcgattcttgcttcaagttccagaaatgggtgtggctcaaaacattcccgatgcggaggagggaaccttggagattggcatggaatacagaactgtttctggagttgctgggccattggtcattcttgataaagttaagggacccaagtttcaagagattgttaacattcgcttaggagatggtactactcggcgtggacaagtgctagaagttgatggtgaaaaggctgttgttcaagtctttgacggtacatctgggattgacaataaatttacaactgtgcaattt

SEQ ID NO: 13461 - DNA, 368 bp, Glycine max
  Clone ID: LIB3040-044-Q1-E1-A9
gatataacactgtcactcttacaatctcagctcatagcattcttcttcttccaacgagaatcagtctttgtgttccaaatggctcgtacgaagcaaacagcaagaaagtccaccggaggaaaagctccaaggaagcagctcgccaccaaggcagcacgtaagtccgctccggcgacgggcggcgtgaagaagccccaccgtttcaggccggggacagtggctctgagggagattcggaagtaccagaagagcacggagcttctcataaggaagcttcctttccagaggctcgtaagggaaatcgctcaggacttcaagaccgatctacgcttccagagcagtgctgtctccgctcttcaaggaagcgc

SEQ ID NO: 13462 - DNA, 340 bp, Glycine max
  unsure (1)..(340): unsure at all n locations
  Clone ID: LIB3040-044-Q1-E1-B1
gattcaaacgcacactctctctcaccaaagccttcctagaacganaaaaaaaaggagagcaattttccctcaccaaagaagaagaagcaaacaatggccgatcaacttaccgatgaacagatctccgagttcaaggaagccttcagcttgttcgacaaggacggcgatggttgcatcacaaccaaggagcttggaactgttatgcgttcattggggcaaaacccaactgaggcagagctccaggacatgatcaatgaagtggatgctgatgggaatggtaccattgacttccctgagttcctaaatctcatggccaggaagatgaaggacactgattctg

SEQ ID NO: 13463 - DNA, 352 bp, Glycine max
  Clone ID: LIB3040-044-Q1-E1-B10
ggcccaaaatattttcatagcattttcagaggaaaatggcgggtacggtttcgacttgtttcttcttcgtgtttcttctttctctccttcttccttttcagatctccgctgaggaatcctcggagaaggagttcgtactcacattggatcactctaactttcacgacactgtcagcaagcacgatttcatcgtcgtcgagttctacgccccatggtgtggtcactgtaagaagcttgctccggagtatgagaaagctgcttctatcttgagtagtcatgatcctcctattgttttggctaaagtagatgccaatgaggagaagaacaaagaccttgcatcacaatatgatgt

SEQ ID NO: 13464 - DNA, 354 bp, Glycine max
  Clone ID: LIB3040-044-Q1-E1-B12
gcattctattcattcaagattcagcaagtgcgttttggaagcagagaccgaaatacttcgagacggcccgtacaaagcaaactgctcgtaagtcaactggaggaaaagctcccaggaagcagcttgcaaccaaggctgcacgtaagtctgcaccaacaactggtggtgtgaagaagcctcatcgttatcgccctggaactgttgctcttcgtgagattaggaaataccagaagagcactgagctcctaatcaggaagcttcctttccagaggttggttcgtgaaattgcccaggatttcaagactgatctgcgtttccagagccatgctgtgcttgcattgcaagaggctgctg

SEQ ID NO: 13465 - DNA, 345 bp, Glycine max
  Clone ID: LIB3040-044-Q1-E1-B2
cgggggctccgccatttttcgtagctgctgttcttgcgcgtgaacaagcctcaggtaagccaaaaccatggttaagcataacaatgttatcccaaacggtcacttccgtaagcactggcagaactatgtgaagacttggttcaatcagccagcacggaagacaaggagacgattggctcgtcagaagaaagctgtgaagatattccccagacctacggctggacctctcaagcccattgtacatggtcaaactttgaaatacaacatgaaagtgatacgtggaacgggattttctcttgaagaactcaacgctgcacggattcgcaaaaagcttgcaccaaccat

SEQ ID NO: 13466 - DNA, 56 bp, Glycine max
  Clone ID: LIB3040-044-Q1-E1-B3
aatcaatgactattcatgattccataattgaatcaattacatactggatccaagcg

SEQ ID NO: 13467 - DNA, 361 bp, Glycine max
  Clone ID: LIB3040-044-Q1-E1-B4
gagctgcgaaaacctagtgcaccgtaagggttgtgaagcatgcagagaagagccatggtgcacgtttctttctaccgaaactatgggaaaacgttcaagaagcctcgtcgtccctacgagaaggagcgtttggacgccgagttgaagctggtcggtgagtacgggcttcgctgcaagagggagttatggagggtccagtacgccctgagccgcatccgtaacaacgccagaaacctattgacccttgatgagaagaaccctcgccgtatcttcgagggtgaagcccttctccgaagaatgttccgttacggactcctcgacgagacacagaacaagctggattatgtgttggctctcaacg

SEQ ID NO: 13468 - DNA, 369 bp, Glycine max
  Clone ID: LIB3040-044-Q1-E1-B5
gatagttatttattatctgaagttgcgagagtgaagaaatggcgcaagacttggcattggatttggaggagcttcgccgcctccacagcatcgccaaaagacctcgaaccctctctcttctctcctccgaaattcgtaacctcgaaaagttatcgtcagaggaagcttctgcgcagattccggcgccgatttcgaccggaactaaagtggcgccttcacctgcgctgaagtatgcggcactcgcgtcgttcagttgggaccaggatagtgacaaagttaagatatatgtgttaatggagggaatcgatgagaataaggttgaatccgagtttaagtcgatgtcattcgatgttaagttccatgatgttc

SEQ ID NO: 13469 - DNA, 368 bp, Glycine max
  Clone ID: LIB3040-044-Q1-E1-B6
gacacaaactttattacagttgttgtattgtaattaagcaagaatattaggcaatggagtcttctagaacttcaactactcttgctctttttttaaccatcaatttgcttttctttgtcatggcaagtggctgctacacttgcacacagcctaagccaaaccctatcccattcccttaccctaaccctagtcctgccgcgaagagctgccccagggacgcacttaagctcggagtgtgcgcaaacgtgcttaatggaccaattggtgctattgtagggtcaccaccggaccacccatgttgctcagtgctagaagggcttcttgatcttgaagttgcggtttgcctctgcactgccatcaaagccaac

SEQ ID NO: 13470 - DNA, 383 bp, Glycine max
  Clone ID: LIB3040-044-Q1-E1-B7
ggtgctcactcatctatctattataaccaaacactcttcttcatattcttcttcttcttcttgttcttgttctatctgtgacgagcatcatggcctcgagagcagtgctattgttggccatgtgtgtgcttccggccatggttgtggccattcgcccagcaaagaaccctttttgcgtgaagggtcgcgtctactgtgacccttgccgtgctggttttgagacctcagcaaccacctacattgccggtgctgagattatgttgcaatgcaagagcagggttagcaacgaggttgtgtacaccaagaaggggtacactgactcaactggagcatatacaatgtacgtggacgaggatcacgcagattaaatatgcagtgccaag

SEQ ID NO: 13471 - DNA, 340 bp, Glycine max
  Clone ID: LIB3040-044-Q1-E1-B8
gacacgcaactatttctgactacgttttgctctacgcctctccctctctctcaaaaatcgttctcttcgattttagggttttgttttgctgctgcctccgttccccccttctcataaacaacgcgttttctcttctgcttcgtatctattctttgcttttggttttggttgattcaaggccttcacagcattcgttgcggcattttaatcgatttatccaagcaggactgaatgaactaatggagtctaaaggtgggaaaaagaagtctagtagtagtagtagtaaatcattgttctacgaagctcccctcggatacagcattgaagacgttagaccaaa

SEQ ID NO: 13472 - DNA, 295 bp, Glycine max
  Clone ID: LIB3040-044-Q1-E1-B9
ggccaagattgaaatattactggggaagactgaaaaatttgatgagttgatggctgctgctgctgctgctgctgcagaagatggtgaaaacggagatgttgaagagtacgccgcataagttcatcgaagttatacctgtcttgggtgaagatatgcactctttaatgaactgcactgatgttgttagtatgtagcaggactagtaaagcaaagaactcgttatatagactgtcatgcaatattgaactatgcaattccttcatttcttttccctataaatagaggcttttttcgt

SEQ ID NO: 13473 - DNA, 373 bp, Glycine max
  Clone ID: LIB3040-044-Q1-E1-C1
gacacgttcacattcaggaatcgttttcttcagaaatttgccatcgttgagagaagcgtgagagccttagtcgttcaagatgagagctaagtggaagaagaagcgcatgaggaggttgaagaggaagcgccgaaagatgagacaaagatctaagtaggtgcttgagcaggagttgagatgagctttccatctgctaccagcctcatgacattttaggctgttatggctcttatgatcttgaggtctagtcgctaggggagcttcgctcttgacttagtttgctttactggtcctggtcctggtccaagactattgagtgtgggttaagttgtgatgtttagtgttttgtggtatctaattatgtactggtttt

SEQ ID NO: 13474 - DNA, 370 bp, Glycine max
  Clone ID: LIB3040-044-Q1-E1-C10
gaattttgaaaataaagaggaaagcttgaagcataagagagagatgtcatcatcttcagacctggacaggcaaatagagcagttgaagaggtgtgagcctcttaaggagtctgaagtgaaggtgctctgcctcaaagccatggaaatcctcgtcgaagagagcaacgttcaaagggtcgacgctcctgtcatcatatgtggtgatattcacggtcagttttatgacatgaatgagcttttcaaagtatgatgggattgccccaaaactaagtagttattcctgggggattttgttgatagagggttttactcggttgaaacgtttctgcatctgctcgctcttaaggtgaggtatccagattcgataaca

SEQ ID NO: 13475 - DNA, 356 bp, Glycine max
  unsure (1)..(356): unsure at all n locations
  Clone ID: LIB3040-044-Q1-E1-C11
ggctccgccatttttcgtagctgctgttcttgcgcgtgaacaagcctcaggtaagccaaaaccatggttaagcataacaatgttatcccaaacggacacttccgtaagcactggcagaactatgtgaagacttggttcaatcagccagcacggaagacaaggagacgattggctcgtcagaagaaagctgtgaagatattccccagacctacggctggacctctcaggcccattgtacatggtcaaactttgaaatacaacatgagagtgagaggtggaaggggattttctcttgaagaactcaaggcagcanggattcccaaaaagcttgcaccaaacataggtattgctgttga

SEQ ID NO: 13476 - DNA, 373 bp, Glycine max
  Clone ID: LIB3040-044-Q1-E1-C12
gagggttgggctatccatttgtttcgagaatgcggtctctctcagccaacccttccttactgcgacaagctgttccagttttggtcaaaccctacaaatccattctctctcgagcattcctcttcagctcccctgcctccacatctcattctcacaatactcaatttcttagatccgtcacgtttttctctactacttctcttcgtaattttaattcacgcgccacccatctcaacgatgctggctctatcgactctcctcttatacagtccatgcagaacaagataaaggaacaactcaatgcagaatcggtctccgtcaaggatgcttatggtgatggtcggcatgttagcattgatgtggtagctactgc

SEQ ID NO: 13477 - DNA, 365 bp, Glycine max
  unsure (1)..(365): unsure at all n locations
  Clone ID: LIB3040-044-Q1-E1-C2
gtctccacacaatttctctctcctctctctctctacaaatccttctttctttcttctcttcgctgctcactgtagccatggctttcagagtangaggagcgggagggggaaatgcctcttctggcatgggtgttgctgagcatagtgtaaacaccttcctggaattgcagaggaagaaagttcatcgctatgtgatttttaaaattgatgagaaaaagaaagaggttatcgttgaaaaaactggaggccctgctgagagctatgatgatttcactgcatccttgcctgaaaatgattgccgatacgctgtctttgactttgattttgtgacatctgagaactgccaaaagagcaaaatctttttt

SEQ ID NO: 13478 - DNA, 363 bp, Glycine max
  Clone ID: LIB3040-044-Q1-E1-C3
gaaggttttgcgctgttgttgctgctcatcctccgtaacctccgagctctgcaccgaagaacgaagccatggggaagacacatggaatgggatctgctcgcaagctcaagtcccaccgcaggaggcaaaggtgggctgacaagtcatacaagaaatcacatcttggaaatgaatggaagaaaccttttgctggttcatcccatgccaagggaattgtccttgaaaagataggtattgaggctaagcagcccaactctgccattcgtaagtgtgccagggttcaacttatcaagaatgggaagaagattgccgcttttgtccctaatgacggttgcttgaactacattgaagagaatgacgaag

SEQ ID NO: 13479 - DNA, 359 bp, Glycine max
  Clone ID: LIB3040-044-Q1-E1-C5
gaggcgaggtagtgagatagtgatacaacacagagtgcgttgttgctcattcgtcacaactcacagccaacatgggtaacgccagagattcgatgcacaagaagcgtgtcaatgatggcaagaagatggcatggaggacgacgacatggtatgagcatggtctccagcctgctaacactaagcagtctagcggtaagacattcaggaggatcctggttagaagtggaaatgtgaactggagggcactcatattggattctggaaattactcctggggaactgaagctgtaactcgcaagactcgtatactagatgtggtttacaatgcctcaaactcctatcttgtgcgtactcagaca

SEQ ID NO: 13480 - DNA, 385 bp, Glycine max
  Clone ID: LIB3040-044-Q1-E1-C6
gaaactcaattatacaaaaccctgaagaaagacacagccattgtttgtttactttccattgattgagcgaaagctttgttttttctgcgatcattttccattgggtggaagaaagtctcaacctttagtcgaaagagcaaggatctgagtgagtgagcgatcatgtgtggtggtgcgattatctccgacttcattccagcgggtcccgccggcggggcgcagcgcgtgaccgccgacatcctgtggccgaatttgaggaagcggttctcgaagtcgctgctggacgatgatttcgaggcaaggttcagagaattcgaggatgactcggaaatcgaggatgtcgatgatgaggacgatgaagaggaggaggagttgaagaagaaga

SEQ ID NO: 13481 - DNA, 359 bp, Glycine max
  Clone ID: LIB3040-044-Q1-E1-C7
gactctgttgttttccaaaaccctaatttatcgaaaggtagggttttgcagagcctcctcctccgttaccagtttcttcttctttatcctctctcctttcttcttccattcctctaacctaagatgggcaagtcaagcaagaaatcagctatcaaggttgacgctgctccagctgtggttccgccatccaagtctgccaagaatggaggcaagcgacaagctcaagatgaaattgagaagcaagtgagtgccaaaaaacagaagatagaggaggttgctcagaagcaaaagaatgaggccaaggtgcaaaagaatgaagccaaggtgcaaaagaagaaggaaagtagttcagatgattc

SEQ ID NO: 13482 - DNA, 375 bp, Glycine max
  Clone ID: LIB3040-044-Q1-E1-C8
gatccaaagcttcttcagttattcatctgcttactaaaatttcttccattcttagctttgttcaatcaaagttttttaagatggcccagagaaatgttactgctaattcttcttttgaaaggactagcttgccttccctagatcaaaagttggccatggccaagcgctgctctcatgagggtgtgatggcaggagcaaaagcagctgttgttgctactattgctactgccataccaactctggctagtgtaaggatgcttccttgggcaagagccaatctcaatcactctgctcaagctctcataatttccacagtggcgggagcagcatatttcatagtagctgacaagactgtcttggcaactgctagaaaga

SEQ ID NO: 13483 - DNA, 375 bp, Glycine max
  Clone ID: LIB3040-044-Q1-E1-C9
ggagagagagagagaaatggagaagacaggagtgttatcggcgaaggaggcattcgagaagcttgaaaaggtgggagaagggacatatgggaaggtgtacagagcaagagagaaggcaactgggaagatcgtggctctgaagaagactcgtctccacgaggacgaagaaggtgtccctcccaccactctccgtgaggtttccattctgcgaatgctctctcgcgatccccatgtcgttaggttaatggatgtcaaacaaggtcagaacaaggaagggaagacagtgctctacttggtatttgagtacatggacaccgatctcaagaaattcatacgctctttccgtcaatctggggaaaccaatcctccccatat

SEQ ID NO: 13484 - DNA, 331 bp, Glycine max
  unsure (1)..(331): unsure at all n locations
  Clone ID: LIB3040-044-Q1-E1-D10
gccaccagtacagaaaacgcagttctcaccatttccctctcgattgtgagacttgttgttgttaactgaacttttctgagcaagaatgtctgggcgtggaaagggaggcaagggtttgggaaagggaggagcgaaacgacaccgtaaggtgctgcgcgataacattcagggaatcaccaagcccgcgattcggcgtttggctcgtangggtggcgtgaagcgtatcagtggtctcatctacgaagagacacgtggcgtgctcaagatctttttggagaacgtgattcgtgacgccgttacctacactgagcatgctaggagaaagaccgtt

SEQ ID NO: 13485 - DNA, 357 bp, Glycine max
  Clone ID: LIB3040-044-Q1-E1-D11
gacacaaactttattacagttgttgtattgtaattaagcaagaatattaggcaatggagtcttctagaacttcaactactcttgctctttttttaaccatcaatttgcttttctttgtcatggcaagtggctgctacacttgcacacagcctaagccaaaccctatcccattcccttaccctaaccctagtcctgccgcgaagagctgccccagggacgcacttaagctcggagtgtgcgcaaacgtgcttaatggaccaattggtgctattgtagggtcaccaccggaccacccatgttgctcagtgctagaagggcttcttgatcttgaagttgcggtttgcctctgcactgcca

SEQ ID NO: 13486 - DNA, 378 bp, Glycine max
  unsure (1)..(378): unsure at all n locations
  Clone ID: LIB3040-044-Q1-E1-D12
gaaacgattctccgtttattcaaaaacgaaaaacacatctctctgattaatacgcactctcgctgtgagtttgaatttagttgggagactcgaaataatgtcgtcgacgacgcagaatcgtcgttcgtcgtttactccctcgacggcgtcgtctttggcgaaagcgaaacgacatccatcgtcggtgtcgtcgtcgtcgtcggggaaggcgaaggtggtttctactcagaacttggctgtgaagagagcgcctctcgccaacctcactaatcaaaggaacgcgccttattcttcttcttcttcttctttggtgcaaggttcanataaagttgccaagaccaagaaagaggctcctgcaaagaacagcgtctcaaaatc

SEQ ID NO: 13487 - DNA, 217 bp, Glycine max
  Clone ID: LIB3040-044-Q1-E1-D3
cctgacaacattcacaaaactgaatccgccatagcagctgcaaagacttgataattaattgcaagtctgtctctatgctcaaaccagagttcccactatccatcaagctaggaacgcattggctatcactgcagcagatgataactaacttgtaatttaactaaggacaacaattcaattcttctagcaggtttttagggaaaggaaacttgttgtt

SEQ ID NO: 13488 - DNA, 450 bp, Glycine max
  unsure (1)..(450): unsure at all n locations
  Clone ID: LIB3040-044-Q1-E1-D4
gtacgtccagaattcacggcgaccacgcgtcaagccaccctccgcccaaccctcccaacggcgccaaaaaaacacaaaaagggaaaattcctaaaaaaaaggaaaaaaggttttaaaaatgaagagcaaaaaagaaagatttaacgtttgagcaactaagttcccagaaaggcaaccaattggtacagcagctcaaggtgacaangactacaaagaaccacccccagcacctttgtttgagcctggtgagctaaagtcatggtccttctacagagctggaattgctgagtttgtggccactttcttgttcctctacattaccatcttaactgtcatgggtgtcaacaggtcaccctccaagtgtgcctctgttggcattcaaggcattgcttgggcctttggtggcatgatctttgcccttgtctactgcactgctggaatttcaagggg

SEQ ID NO: 13489 - DNA, 306 bp, Glycine max
  Clone ID: LIB3040-044-Q1-E1-D6
gattatcaataggtgttttcatttgggattcaaactcaccatggtggacgccttcaaactttgcatcttccttcttgcgtcgatctgtgctttcctagtcttttctaatccagtgctgtgtagtgataaggaggacagtgtattcaagggaatcaacagctacaggcaaacacggagcctggtacccctgagccaagtttcgaatgcaacatgtttggctgatgaagttgcagaagaaatagagaagatgccctgtgaaaacgtgtaacaatactacgcttcacctgttcctggtactgggaacct

SEQ ID NO: 13490 - DNA, 360 bp, Glycine max
  Clone ID: LIB3040-044-Q1-E1-D7
ggcagcgcttgagaccaagccccactcaaccaccacaccactctctctgctcttcttctacctttcaagtttttaaagtattaagatggcagagacattcctatttacctcagagtcagtgaacgagggacaccctgacaagctctgcgaccaaatctccgatgctgtcctcgacgcttgccttgaacaggacccagacagcaaggttgcctgcgaaacatgcaccaagaccaacttggtcatggtcttcggagagatcaccaccaaggccaacgttgactacgagaagatcgtgcgtgacacctgcaggaacatcggcttcgtctcaaacgatgtgggacttgatgctgacaactgcaa

SEQ ID NO: 13491 - DNA, 347 bp, Glycine max
  Clone ID: LIB3040-044-Q1-E1-D8
gaaggtttttgaatgctgtgctgttatcctaccattctcttctgcaactttcgccgtcagcttcattcaccaaggttgtccttcacgatagcgcatttttcctacaacgattattgtatctcagctcgaatatttctgagatcggaaagagatgcgaaaggggtgagaaccgcttttggtaatacactcgtcttggatttaagactcccagggaatccatctcacgaagatacattcacaagaagtgacccttcactgaaattgctcctaactgtggacgtatctagccttgaacatatcatagtgctaacatgtccaagtgtattaatgatcagaagaattatcgc

SEQ ID NO: 13492 - DNA, 373 bp, Glycine max
  Clone ID: LIB3040-044-Q1-E1-D9
ggcagttacagaaaccatgacgacggtggtgcccacctccgaagaagacgctgctctctctgttgtccgattcgcctctgaactcgcctgggccgatgccggtcccgaggttgctgagcctcaagttagtagactctgcatggaggctgaagagtttatcgttatgggaaaatggttggaactagcatcattgatgattacctctgctgaattggttttctcaaaggtttctgaaacagatatagagtccatcttcactatcatctgcaatcttgtgacaaagactgagaatccagatgaagtgatggagattgtaaaagttataactgcaaaaataattcagcagccaaacgaaaagcctgctgtgcgattg

SEQ ID NO: 13493 - DNA, 371 bp, Glycine max
  Clone ID: LIB3040-044-Q1-E1-E1
ggttgtcaagcctgccgagaaaaccctagttcgcttgcagtcacacaggaggccaatcctattcatagctcgagatgggtgaagaagtgaaggtagttgttccagaatcagtgttgaagaagcgcaagagggaggaggaatgggcgttggccaagaagcaagaactcgatgctgccaagaagaagagagccgagagccgcaaactcatctacaacagagctaagcagtacgctaaggagtacgatcaccaggagaaggaattgattcggttgaaacgcgaggccaagctgaaaggtggtttctatgtggatccagaggctaagctgttgtttaatattcgcattcgtggtaataatgccatggaacccaaa

SEQ ID NO: 13494 - DNA, 376 bp, Glycine max
  Clone ID: LIB3040-044-Q1-E1-E11
gggactcactcttcacactcactcacactgaatggcttctgaaggcgaccatcaccaccaccaccaccaccatcaagatcacgatcatcatcatcatgatcatgatcaccatcatcatcacgatggagagggagagaccaactcatgggtaggtaaggatgggaaggtgtaccatagccacgatggtctggcgccgcattctcacgaacccatttactcccccggctacttcaccagaagagctccaccgcttctcaacagaaacttcaacgaaagagccttcaccgtcggaatcggtggacccgtcggtactggcaaaacagctctcatgttggccctttgtgaactcttgcgcgaaaactacagtctcgcagct

SEQ ID NO: 13495 - DNA, 194 bp, Glycine max
  Clone ID: LIB3040-044-Q1-E1-E3
aattgagtatcaaggagttaaagaatttaagacaaaataccaaattaaagtagatcaattttttttcattcccgaggaagtgcatattttaccagaatcttcttccataatggtacggaacaatagtatcgttgaagtagatacactaatcactttaaatataagaagtcgagtaaggggattggtccgattgg

SEQ ID NO: 13496 - DNA, 385 bp, Glycine max
  Clone ID: LIB3040-044-Q1-E1-E5
ggagcaaaaccctaatccctatttttcttcctcagtagtgtcatttacgcttctcttctctgcagcaactatgcctaaccctaaggtcttcttcgacatgaccatcggcggtcaatctgctggccgcatcgtgatggagctctacgccgacgtcactccccgcaccgccgagaacttccgcgcgctttgcaccggcgagaagggcgtagggcggagcggcaagcccctccactacaagggctcgtccttccaccgcgtgatcccgagtttcatgtgtcagggtggcgacttcaccgccggaaacggaaccggcggcgagtcgatttatggcgccaagttcgccgacgagaacttcgtgaagaagcacaccggtcccggcatcctc

SEQ ID NO: 13497 - DNA, 394 bp, Glycine max
  Clone ID: LIB3040-044-Q1-E1-E6
agacgggtgccaaaaaaagaaaaaaggggacatcagtcagtcattacgtattattcgtctacagtagtgtcaattacgcttctcctctctgtaacatgtacgaatacttataaggtcttcttagaaataaccttcagcgggtaatcagccagccgaatcattatagatccaggttcctacataactcaccacaccgtcaaaaatgtccacttgatttgcaggatctaaaaagtcgtagggcagataggcattttgatcaatacatgggctcggtcctcgatcacgtgatccagattttcatgtgtcacagtagcaacttcaccgtaggaaagatacctcgtagcgaatatatttaaggctccatgttcaccgacgagaacttcttaaaaatcca

SEQ ID NO: 13498 - DNA, 363 bp, Glycine max
  Clone ID: LIB3040-044-Q1-E1-E9
gacaactccataacacaaggcagaaagcaagctcatcctagagttttaaaaatggcagcagcctcctccatggctctctcttccccatccttggctggcaaggccgtgaagctgggcccatcagcccccgaagtcgggagggtcagcatgaggaagaccgtcaccaagcaggcctcctccggaagcccatggtacggcccagaccgcgtcaagtacttgggcccattctctggcgagcccccgtcctacctcactggcgagttcccaggtgactacggctgggacactgctgggctttcggccgacccagaaaccttcgccagaaaccgtgagctcgaagtgattcactccaggtgggccatg

SEQ ID NO: 13499 - DNA, 238 bp, Glycine max
  Clone ID: LIB3040-044-Q1-E1-F1
gacattcatattttcctttcgtttcctttcattttccctcactttctcgctccccaaacgcccctctctctcctccaatggccgaccagctcaccgacgaccagatcgccgagttcaaggaggccttcagcctcttcgacaaggacggcgatggttgcactactaccaaggaacttgggactgttatgaggtcacttggtcaaaacccaactgaggcagaactgcaggatatgataaa

SEQ ID NO: 13500 - DNA, 386 bp, Glycine max
  Clone ID: LIB3040-044-Q1-E1-F11
agagacgacagaaggggaaaacagagagtgatttcagtgagtgatcggtgttcacttgatctcatcataatcgtcagcgtcaattgaagaagatgccgatcagaaacatcgccgtcggaaggcctgaagaggcgactcaccccgacacgttgaaggcggctttggctgagttcatctcaaccttcatcttcgtgttcgccggctcaggctccggcatcgcctacaacaagctcaccgacaacggcgctgccacccctgccggcctcatctccgcctccatcgcccatgcattcgccctcttcgtcgccgtctccgtcggcgccaacatctccggcggccacgtcaaccccgccgtcaccttcggcgccttcgtcggcggcaacatc

SEQ ID NO: 13501 - DNA, 376 bp, Glycine max
  Clone ID: LIB3040-044-Q1-E1-F12
gataacacaacgcaacacaacgcgcactctctcttttctctcttaacacaaaaaccctatcgttcttcgcggtttcgccgattctcgccatgccgaaagccaaatccgacgccaaagccgccgatagccggttgaagcgcaagggcgctggtgctggaaggaagcaatcgaagaaagctgctaaggatcctaacaagccaaagagacctccaagcgctttcttcgttttcatgtccgagttcagagagcagtttaagaaggagcatcctaacaacaaatccgtcgctgttgtcggtaaagctggtggtgacaaatggaaatcgctgtctgatgctgaaaaggcccccttcgttgccaccgcccgaaaagaagaaac

SEQ ID NO: 13502 - DNA, 359 bp, Glycine max
  Clone ID: LIB3040-044-Q1-E1-F2
gacagactacagtaatattttatttgcactactactactactttatttaagcagaagcaggcgagtgaggaagagcgaagagtgaagagaatggctcccaagggtttaacctttctggctgtgttaatatgcgtttcagcactgtcactgagtccttctgttgcgggggaagggcaaaataatggccttgttatgaacttctacaaggaatcatgccctcaggctgaagacatcatcacagaacaagtcaagcttctctacaagcgccacaagaacactgctttctcctggctcaggaacatcttccatgactgtgctgttcagagttgtgatgcttcactgttgctggactccacaag

SEQ ID NO: 13503 - DNA, 387 bp, Glycine max
  Clone ID: LIB3040-044-Q1-E1-F4
gccgctcaaacgcaaaggaccagaagcctaagcctcaaacatggcaaaagggttaaagaaacacctgaaaaggctaaatgctccaaaacattggatgcttgacaagcttggtggtgcctttgcacccaagccatcatctggaccccacaagtcccgggagtgtcttcctctgatcctcatcctacgaaacaggctaaagtatgctctaacatatagagaagttattgccatcttgatgcagcgccatgttcttgttgatggcaaggttaggacagacaagacataccctgctggtttcatggatgttgtttctattcccaaaacaaatgaaaatttccgtctactgtatgacacaaaaggtcgattccgtctccactctgtaaagga

SEQ ID NO: 13504 - DNA, 336 bp, Glycine max
  Clone ID: LIB3040-044-Q1-E1-F6
atcacgacatcacatcgcagagaagaacagagagagatccatccatcaattccaatggccgatcagctcaccgacgaacagatctccgagttcaaggaagccttcagcctcttcgacaaggacggggatggttgtagtaccaccaaggaacttgggaccgtgatgcggtcacttggccagaacccaactgaggcagagctgcaggacatgataaatgaggttgatgctgatgggaatgggaccattgatttcccagaattcccgaatctcatggctcgcaagatgaaagacactgattcagaggaggagctgaaggaggctttccgcgtgtttgac

SEQ ID NO: 13505 - DNA, 105 bp, Glycine max
  Clone ID: LIB3040-044-Q1-E1-F7
gaagaaagctgctagcagagggaagttctacacttttttgtttggattgatcgagtgtactttttcttttcgagattggcttggtgtgcagtggaaagagggtgc

SEQ ID NO: 13506 - DNA, 408 bp, Glycine max
  Clone ID: LIB3040-044-Q1-E1-F8
ggctattgctaagagtaccaaacaatttttgttcattcagagctttactcactcctttgcacgtctcaatctgagtcttcacttcatcgtttttgggattctctctctcaataatggcagcacgctttcaatctgcagctgtactatgctggtgttccctatagggaaagatgaaattgaagtctaagaaaggatggaaatctattgtaccacttcatttgaaaggaaaatccgcaagccgtttttctttatttcgcaaagtcaattctgctggctatggacctggcaaaacaccagtttatctgaatgtgtatgacttgacacccatgaatggttatgtgtattgggctggtcttggtatctatcactctggtgtagaagttcatggtgtagaatacgcgtttggag

SEQ ID NO: 13507 - DNA, 374 bp, Glycine max
  Clone ID: LIB3040-044-Q1-E1-F9
gactcagccgctgcgaggcgaacagagagacccgaagccagatttcaagatgaagttcaacattgcgaatcccaccactggttgtcagaagaagctggagatcgatgatgacctgaagctacgagcattttgggacaagaggatctcacaagaggttgttggtgatgctctgggtgaggaattcaaaggctatgtcttcaaaattactggaggttgcgacaagcaaggatttccaatgaagcaaggagtgttgacccctggtcgtgttcgcctcttgctgcatagaggaactccttgtttccgtggttatggaaggcgcaatggagagcgtaggaggaagtctgttcgtgggtgcattgtcagccctgacctct

SEQ ID NO: 13508 - DNA, 367 bp, Glycine max
  Clone ID: LIB3040-044-Q1-E1-G1
agggaaagtagacacagccatgtccactactggtactgttctggcttccactccaacacaaaggctattatgcaaagtggcattggttactggtggagcgtctggaattggagaaagcattgtgcgcctcttccatatccatggtgctaaaatatgtatagctgatgtgcaagacaaccttggaaagcacgtctgtcagtctcttggtgatgaagcaaatgttgtttttgtccattgtgatgttacagtagaggatgatgtttcccatgcagtggacttcactgtgggtaaatttggcacccttcacatcatagtcaacaatgccggaatttctggatcaccttgttccgatatccgcaatgcagac

SEQ ID NO: 13509 - DNA, 381 bp, Glycine max
  unsure (1)..(381): unsure at all n locations
  Clone ID: LIB3040-044-Q1-E1-G10
gacgttcacattcaggaatcgttttcttcagaaaatttgccatcgttgagggaagcgcgagagccttcgttgttcaagatgagagctaagtggaagaagaagcgcatgaggaggttgaagaggaagcgccgaaagatgagacaaagatctaagtaggtgcttgaacaaggagtggagatgatgtgcttttccatctgctaccagcttcatgacattttatgctgtcatggctcttatgatgatcttgaggtctagtggcgaggggagcttccatcttgactttagtttagctttactggtctaaagattgctgttttagtgtgggttaagttatgatattgagagttttgtngtatctaattatgtactggtacgttttgt

SEQ ID NO: 13510 - DNA, 329 bp, Glycine max
  Clone ID: LIB3040-044-Q1-E1-G12
gacacagcctcaacagccctaacgcgtgcagagcagagagagacgcagccatggggcgaagacccgcgaggtgttataggcaaattaagaacaaaccataccccaagtcacggttttgccgtggtgttcctgatcccaagatcaggatttacgatgttggtatgaacaagaagggtgttgatgagtttcctttctgtgtccatctggttagttgggagaaggaaaacgtttctagtgatgccctggaagctgctcgtattgcttgcaacaagtacatggccaaatttgctggaaaggatgctttccacttgagagtcatggtgcaccca

SEQ ID NO: 13511 - DNA, 366 bp, Glycine max
  unsure (1)..(366): unsure at all n locations
  Clone ID: LIB3040-044-Q1-E1-G2
ggaaaagaggcgaaggtagctcatgacatgttccttgaaggaaaaaaaacgcagttgaaagattgaagctcgagatgtcggggaaaggcgcaaagggtttgataactgctaagaacccttcttcctctaaggacaaagacaagaaaaaacccatttctcgctcctcaagagccggtcttcagttccctgttggacgcattcatcgtcttctgaagtcaagggtgacagcacatggaagagttggggcaacagctgcagtttattctgctgccatcctggagtatttaactgcagaggtgttggagttggccggcaatgcgagcanagatctgaaggtgaagcgtattacccctagacatctacagc

SEQ ID NO: 13512 - DNA, 386 bp, Glycine max
  unsure (1)..(386): unsure at all n locations
  Clone ID: LIB3040-044-Q1-E1-G3
gacttctcttcacacctttgttcactcttcttctcttgcggctagggttttagcgcagcttcttctagatttaaggaagatgggtaaggaaaaggttcacatcagtattgtggtcattggccatgtcgactctgggaaatccactaccactggtcacctgatttacaagcttggaggcattgacaagcgtgttattgagaggtttgagaaggaagctgctgagatgaacaagaggtctttcaagtatgcctgggtgctggacaaacttaaggctgagcgtgaaagaggaatcaccattgatattgctttgtggaagtttgaaacaacaaagtattattgcacagttattgatgcgcctggacatanggatttcattatagaatatg

SEQ ID NO: 13513 - DNA, 320 bp, Glycine max
  Clone ID: LIB3040-044-Q1-E1-G4
tgggttgcaacgtgtactcaaacatgtcctagctaactcattaagaaaacacctttcctgaactttttccattgccattctacgagaacgttaaagttgatgtcgttgggtggagcctcccatagcattgtctattaatacgtctgaaataagtgccattaatgtaaaaatatacttgtgcagaaaccaaacttcagaattcagtttgttaggaggcaaataaatatcgttgctcacactcttccagggatgacaacttcttacgttatactcagttttttattatataccctcttgtatcttccaacttagaatgaaaa

SEQ ID NO: 13514 - DNA, 372 bp, Glycine max
  Clone ID: LIB3040-044-Q1-E1-G5
gagggttttatctcattaacgtttcttctcttcactctgcccgctgcatcaatggcttcagagaagaaactttcgaacccaatgagggagataaaagtgcagaagctcgtcctcaatatctctgttggcgagagtggagatcgtctcaccagagcctccaaggtgttggaacaacttagtggccaaaccccagtgttttccaaagcaaggtacactgttcgttcctttgggattagaagatatgagaagattgcatgctatgtcactgtcagaggtgacaaggcaatgcaacttttggagagtggtttgaaggtgaaggaatatgaacttctcagaaggaacttcagtgatactggttgcttcggctttggt

SEQ ID NO: 13515 - DNA, 97 bp, Glycine max
  Clone ID: LIB3040-044-Q1-E1-G6
gatgtttagttgaatcatttgcctaagctaattgaattattattatttttgttttctttgggattatgctatacaaattactgatctttgaatttag

SEQ ID NO: 13516 - DNA, 358 bp, Glycine max
  Clone ID: LIB3040-044-Q1-E1-G7
ggcggcttggtttgttctacttgttcttacactgggattaggacgagacgtttctacactaacaataatacctttccctctttctcctttaccttcccccaccaacctcaatcattctctttccctaaacctctcagactcatgtctcagcctttgaccaccaactctgctgatggtgattcctccgtcgccgcacctcccatcctcttcgattatcatcttatcgaccaaaaacttctccaaaacatagtctacgatgctcttgtctggagcaccctcaactgcctccttgttggtgacaaatcagttcagagatcaggaacagttcctggtgttggcctggtgcatctcccgcttt

SEQ ID NO: 13517 - DNA, 378 bp, Glycine max
  Clone ID: LIB3040-044-Q1-E1-G8
gacaacacaaatcgtagattgaaaaaaataataataaagaatcagaaaaaatgggttctgagaacaaagaagccgcaggtggagaacttaacaattcgtctccttcgccctcttcttctcatgcttggaaaagtcgaatcgttattccaacccttctcgcaggagttgctggtgctggagctgggttgatttcaaagcatcgaagaactcttggtcttgctactgtgtgttctaactatgctgtgaatttcaccattgtcaccgggtgctattgtggggcacgtgaatttgtggctgcaactagaaaaacgggacctgatgacatattgaattctgcagtagctggatttggaactggtgctcttctaaggcgtctcc

SEQ ID NO: 13518 - DNA, 363 bp, Glycine max
  Clone ID: LIB3040-044-Q1-E1-G9
gcttcagctacatagctccatcactgcagcattagggtttatcatctgcttcaatggggaagggaacagggagcttcggtaagaggaggaacaagacccacactctctgtgtgaggtgtggccgccgcagcttccacctccagaagagtcgctgcgccgcttgtgctttccccgctgcacgcacgcggaaatataactggagcgtcaaggcaattcgcagaaagaccaccggaactggcaggatgagatacttgcgtaacgtgcctcgccgtttcaagagtggcttcagagaaggtaccgaagctgcaccaaggaagaagggagcagctaccactgcatagacctttcaaagatcgttctcgt

SEQ ID NO: 13519 - DNA, 325 bp, Glycine max
  Clone ID: LIB3040-044-Q1-E1-H10
gatccacacctctctctctctctcagaatttctatctatctcttgtttcaatttcaacaacggttactcctttttcgttttgagtttcaatcaagccatcatcatgtctaccgcatcgcaacccaagggcaagaaaacggcgtcgtccaagaagcccctctcccaacctcccttcgccgtgatgatagcagaggcgattgcgagtctgaaagagagaaccggttcgagccaatacgcgataaccaaatacatcgaagggaagcacaaggagttgcctgcaacctacaagaagcttgtcctcgttcatctcaagaaatctgttgct

SEQ ID NO: 13520 - DNA, 399 bp, Glycine max
  Clone ID: LIB3040-044-Q1-E1-H11
agcccacgcgtccgcccacgcgtccgagacgacagaaggggagggttttgcgctgttgttgctgctcatcctccgtaacctccgagctctgcaccgaagaacgaagccatggggaagacacatggaatgggatctgctcgcaagctcaagtcccaccgcaggaggcaaaggtgggctgacaagtcatacaagaaatcacatcttggaaatgaatggaagaaaccttttgctggttcatcccatgccaagggaattgtccttgaaaagataggtattgaggctaagcagcccaactctgccattcgtaagtgtgccagggttcaacttatcaagaatgggaagaagattgccgcttttgtccctaatgacggttgcttgaactacattgaagagaatgac

SEQ ID NO: 13521 - DNA, 242 bp, Glycine max
  Clone ID: LIB3040-044-Q1-E1-H12
gaataatacaaaagaaaataatagaagaaaaatttttgaataataattaaaaaattccttcatatttttagagataggagacaaaatttacatggatatagtaagtcttgcttgggctgctttaatggtagttttttcattttctctttccctcgtagtatggggaagaagtggactatagggatactcaaaattgagttaagggatcaaagtacccattttgttttctacttgggtttttc

SEQ ID NO: 13522 - DNA, 350 bp, Glycine max
  Clone ID: LIB3040-044-Q1-E1-H2
gagagtggtggagtgtgcaaaagagcgtcgtagtcgcaaccctaatcagaagaagcgcagcttcaagcgagtgacagccaccagccatgggtcgtatgcacagccgcggtaagggtatatcctcttctgctttgccctacaaaaggacacctcctagctggctcaagatctcttcgcaagatgtcgaagaaaatatctgcaagtttgcgaagaaaggtttgaccccgtctcagattggtgtcattctcagagattctcacggtattgctcaggtcaatagcgtcactggcagcaaaatccttcgcatcctcaaagctcacggacttgcgcctgaaattccagaggacctg

SEQ ID NO: 13523 - DNA, 395 bp, Glycine max
  Clone ID: LIB3040-044-Q1-E1-H3
gcctccctttttaattgaaaccaaaccaaaccaaaccaaaccaaacctctctttctcagtttctctctcttaaggttttctcctcccccattgacccaccgtccatcgcaaaggaagtcgcgcccaatttccatggtttgtagattaaatcttaaagcagtaagtcatcatggataaatcagagcagactcagcagcaacatcagcatgggatgggcgttgccacaggtgctagccaaatggcctattcttctcactacccgactgctcccatggtggcttctggcacgcctgctgtagctgttccttccccaactcaggctccagctgccttctctagttctgctcaccagcttgcataccagcaagcacagcatttccaccaacaacagcagc

SEQ ID NO: 13524 - DNA, 399 bp, Glycine max
  Clone ID: LIB3040-044-Q1-E1-H4
acaacaaaaggggaattgaagaggttccctttccatcattttcagttccaccaaaattcacaaatctctcggcatggggtgcgtgtcttcgaatttgctgaaccaagacgaagacttcagcacccaacttggctcctccgcactgggccaccacatcgtgtccctcacctccaccacctacggcctcctcaccctcgaccctccttccacgcctccttcccgctttaccctcggatctctcttcccctccgaaccagaggtcatcaactcatgggagctcatgtccggcctcgacaccgacagcttccgcttctctcctttacctttacccaaacccaaagaaaaccgcctcactcgcccaaccggttccaaactcttattaaccccaactctggcgga

SEQ ID NO: 13525 - DNA, 373 bp, Glycine max
  Clone ID: LIB3040-044-Q1-E1-H5
ggctgaagattgaagaacagtcgtcggctcctcgctcgcccttcgctgctgcgccatcaccgtgctcttctcaaagcgattttaaccgaaccgcgttctttttttcttcagaaatcgagcataaggatttgaggattgaagtattgaacaccaaatcctttatacttgttgggcaagaagggagggaaaaaggagatacacaaaaatgtttttccacatagtgctggagcgaaatatgcagctgcatccacgctactttggtcgcaatcttcgtgataatctcgtttccaagctaatgaaagatgtggaaggcacttgcagcggccgacatggatttgtggtggcagttacagggatagaacacatatggaaa

SEQ ID NO: 13526 - DNA, 71 bp, Glycine max
  Clone ID: LIB3040-044-Q1-E1-H6
ggagtttggcaactggaaaaaaacttctcaccttctttggtggttgataatgatatatatgttctttgaac

SEQ ID NO: 13527 - DNA, 370 bp, Glycine max
  Clone ID: LIB3040-044-Q1-E1-H8
gaccacaccgccgctcgttattcacactgtgctgtgcttatttggcgtagcttaagagattagcaatagaaagtgaaagaaaatgagtcgaggaagtgcaactgctgcgaagggcaagaagaagggtgcgacattcaccattgactgcgccaagccagtggaggacaagatcatggacatcgcgtctctcgagaagttccttcaagagaggattaaggttggtggcaaggccggtgctctcgccgacaccatcaccgtcacacgtgagaagaccaaaatcatagttacttcagacagcaacttctccaaacggtatctcaagtacttgactaagaagtacttgaagaagcacaatgtgcgggactggctc

SEQ ID NO: 13528 - DNA, 365 bp, Glycine max
  Clone ID: LIB3040-044-Q1-E1-H9
ggaactcataatattcatcactagaagtgttggatgcatttctatttctaactaattattgtgcttattattattgttgagaaagaaaagaatggcaaagttaataaaattctttgagttgaacacaggggccaagattccttctgttgggttaggcacttggcaagctgagcctggtgttgtagccaaagctgtcaccacagccattctggttggatacaggcatattgattgtgctcaagcgtataacaatcaagcagagattggttctgctcttaagaagctttttgatgatggtgtggtgaagcgtgaggacttatggatcacctccaaactctggtgttcagatcgtgcttcagaagatg

SEQ ID NO: 13529 - DNA, 382 bp, Glycine max
  Clone ID: LIB3040-045-Q1-E1-A1
caagtcatagggtatttggatcaatttggcactggacttcctattaagtctgatgtggctggagaagtgttgaaactacttgttgaggatggagagcctgttggttatggagaccctcttattgctgtgttgccatcttttcatgacatcaagtgagatagccttttcctgttaatgattaatcatgcggcattttttttattaggggagctattcgcgtattcgcaaaagtttttaataggttacaaataaatgtgactaaatatttggtacggaggttccttattgaaaatcatactttgtatatcaattgcttaaattgtaccggataagctattctgagaccgcctcattatgtatcttacttgctggagtttgatta

SEQ ID NO: 13530 - DNA, 398 bp, Glycine max
  unsure (1)..(398): unsure at all n locations
  Clone ID: LIB3040-045-Q1-E1-A10
ggcaatcagcaaccaaaatgactcaagcccagattcaaccagttaaacttggaacccaaggctttgaggtttcaaaattgggattcggatgtatgggccttactggagcgtacaatgaccctctccaagaacaggatggcatatctgttatcaagtatgcgttcagtaagggaatcacattttttgatactgcggatgtttatggagccaatgctaatgaacttttggttggaaaggctttgaagcagctgcccagagaaaagattcagatagccacaaaatttggtattgcttcacgaggttttcctgatatgaagatcganggttcgcctgaatatgtgcgatcatgctgtgaagctagcttgaagcgtcttgatgttgaatacattgatctctat

SEQ ID NO: 13531 - DNA, 400 bp, Glycine max
  Clone ID: LIB3040-045-Q1-E1-A11
gattgttggcttgtgctctgctcgtgcctctagggttatcatatctccatttccatttcctctctctcagtttccaagaatcttaagctatgggaaagtcttacccaaccgtgagcgctgattaccagaaggccgttgagaaggcgaagaagaagctcagaggcttcatcgctgagaagagatgcgctcctctaatgctccgtttggcatggcactctgctggaacttacgacgtgagctcgaagaccggtggtcccttcggaaccataaagcacccctccgaactcgctcacggcgctaacaacggtcttgacatcgctgttaggcttttggagccactcaaagcggagtttcctattttgagctacgccgatttctaccagttggctggcgttgttgc

SEQ ID NO: 13532 - DNA, 404 bp, Glycine max
  Clone ID: LIB3040-045-Q1-E1-A12
ggtccaaaatcctcactcgagccacacgcctcagtagaccatggcctcattgggtgggttacaaaatctaagcggcatcaattttcttatcaaaaaagagggtccaaaagtcaatgcgaagttcgagctgaagccgccaccatatccactgaatggtttggagccggtgatgagccagcagacacttgagtttcattgggggaaacaccacaagacatatgtggaaaatctgaaaaaacacattgttgggacagagcttgatgggaaatcactagaagagattatactgacatcatataataagggtgacattcatccagctttcagcaatgcagcacaggtatggaaccatgacttcttctgggagtgcatgaaaccaggtggaggtggaaagccatccgggg

SEQ ID NO: 13533 - DNA, 355 bp, Glycine max
  unsure (1)..(355): unsure at all n locations
  Clone ID: LIB3040-045-Q1-E1-A2
ggttgtgtgagtgaagaagcagagggagtagcggcattaaaaatgcagatcttcgtgaaaactctgacagggaagactataaccctcgaggtcgagagcagcgacaccatcgacaatgtcaaggccaagattcaagacaaggaaggcattcctccggatcagcagcgtttgattttcgccggaaagcagcttgaagatggaaggaccctggccgattacaacatccagaaggaatcaacccttcatctcgtcctcaggcttcgtggtggcatcattgagccttccctcatggctttggctcgcaaatacaaccaggacaagatgatttgccgcaagtgctnatgccgtctgcatc

SEQ ID NO: 13534 - DNA, 380 bp, Glycine max
  Clone ID: LIB3040-045-Q1-E1-A3
gagggttacacgccgtcgtcgctgtttttgtgtgtcgcttcttcgtaggtgcagctgcaatggtgaagggactccaaggagaacgtgtcagactctacgtgaggggtacaatccttggatacaaaaggtccaagtcaaaccagtatccaaatacatccctgatccaaattgatggtgtgaatgccaaagaagaagtatcatggtatgctggcaataaaatggcctatatctacaaggctaacgtgaacaagaatggaagccattaccgctgcatatggggcaaggttacaaggcctcatggtaacagtggtattgtccgtgcaaaattcaagtcgaaccttccacccaaatcaatgggagcccgagtaagagtattcatg

SEQ ID NO: 13535 - DNA, 378 bp, Glycine max
  Clone ID: LIB3040-045-Q1-E1-A4
ggttcactttcttccaacctctaacctacctctttttcttctctctcaacaacttcaccttcttcctcctcgatcatgtctcacttcaagggcaagtaccatgatgagcttatcgccaatgctgcgtacattggcactcctggaaagggtattcttgctgctgatgagtcaacagggacaattggcaagcgtttggccagcatcagtgtagagaacattgaatccaacaggcgagctcttagggagctgcttttcactgctcctggtgttcttcaatatctcagtggtgtcatcctctttgaggaaaccctctaccagagcacagctgcaggcaagccctttgtgaatgtcttgaaggaagctggtgtgcttcctggc

SEQ ID NO: 13536 - DNA, 369 bp, Glycine max
  Clone ID: LIB3040-045-Q1-E1-A6
gatgtcatagtattatcattcagtctcatctttctctcttctctctccacccaaaccctaactcccgaccctgttcccctctcgtatccgtcatgaaaggaggaaagtccaagaccgaatctaagagagccgatcccaaacttgctgtgaataagaagggagccgccaccaaggctaggaaacccgccggcaaggggaaggcagcgaaagaccctaacaagccaaagaggcctccaagtgctttcttcgttttcatggaggagttcaggaaggtattcaacaaagaacatcctgaaaacaaagcagtgtctgctgtgggcaaagctgctggagcaaaatggaagaccatgtctgatgctgaaaaagcac

SEQ ID NO: 13537 - DNA, 378 bp, Glycine max
  Clone ID: LIB3040-045-Q1-E1-A8
gatacctaaaaattgtaccgatatggcttcacttgtgtgtctccttttttccttgcatttcatggttatcatgtcaggttccttaccagcaaatagtgaagtgtttacaaaagagtctcctatgtctctatccacaaaacccgtggaaagactcacccaactccacttttatttccataacaacaaaatgggggaacacccgactgctatgaaaattgttgagcctcctaaggcgtccatttctggttttgggactatttacatgatggatgaccctctaaccgaaggaccaagtccaacttcaaagcttgttggaagatgtcagggaatatatgctgaggcttcgcaacatgaacctgcgatactcatggtaacgaa

SEQ ID NO: 13538 - DNA, 388 bp, Glycine max
  Clone ID: LIB3040-045-Q1-E1-A9
gttgttgggtttctgttcaaatcatgagacaaaccttttggtctatgagtacatgcccaatggaagtttaggtgaggttcttcatggaaaaaaggggggtcatttgcattgggacaccaggtataaaattgcggtggaggctgccaaggggctttgctatctgcaccatgattgttcgccactcattgtccatcgtgatgtgaagtcaaacaacatccttcttgattcaaatcatgaagcccatgttgctgattttgggcttgctaagttcctgcaagattctgggacatctgaatgcatgtctgctattgctggttcatatggatacatagctccagagtatgcctacacattgaaagttgatgagaaaagcgatgtgtacagtttt

SEQ ID NO: 13539 - DNA, 339 bp, Glycine max
  Clone ID: LIB3040-045-Q1-E1-B1
ggtgaatcagcaccacattcacctgagctttttgtgaggattccaaagcatggcttcccttgcagcatccactgctgctgcttcccttggcatgtcagaaatgcttggaaaccctatcaacctcagtggtgccacaaggccagctccatctgcctctagccctgcctccttcaagactgtggctcttttctccaaaaagaaggctgcacctccaaaaaaagctgcagctgctgctcctgccaatgatgagcttgccaagtggcatggtcctgacagaaggatcttcttgcctgagggtctcttggaccgatctgagatcccagagtacttgaccggaga

SEQ ID NO: 13540 - DNA, 365 bp, Glycine max
  Clone ID: LIB3040-045-Q1-E1-B10
gcttctgaatcgtcttttacttctcagcagcttcggctagggttcagaaacgaaaaagggttcggtgttctgttcgcgatgagagccaagtggaagaagaagcgtatgaggaggttgaagaggaagcgccgaaagatgagacagagatccaagtagtgcgttaaacctagtttgtttctgttgcttttacaattgcttatgttgtcgaatgggacacccagttgttagtggcactggtttctcctttttgatgtttgatacattttgttggattcaagtagtttatgttcgtcttatgttattagctcaaaacaatgttgttactgcttttgctaatcaacatgatctcctatttgcatctctgc

SEQ ID NO: 13541 - DNA, 389 bp, Glycine max
  Clone ID: LIB3040-045-Q1-E1-B12
ggtacctaaaattccgaagttctttttcttataatggggctcttgtggaaaactcacacgaggatacacgtgattagaacattttttgcaatccttttggttgcactgctgagttcagagagagtagagagcagaaaagccaaagttgtgaccacttccttggagtacaatgctataaactgcagagctcacagtgctgcattgacagattttggtggtgttggggatggaaaaacatccaacacaaaggcatttcagtctgcaataagtcacctgagtcagtatgcttctgaaggtggctctcagctctatgttcctgcatgaaaatggctcactggtagcttcagcctcactagtcactttcacctctatcttgacaaagatgctgt

SEQ ID NO: 13542 - DNA, 359 bp, Glycine max
  Clone ID: LIB3040-045-Q1-E1-B2
ggtagttccaccgagtagcaacaatgtcgaagcgaggtcgcggaggatcggcgggaaacaagttccgcatgtcgctgggtctgccggtggcggcgacggtgaactgcgccgacaacaccggcgcgaagaacctctacatcatatcagtgaaggggatcaagggtaggctgaaccggttgccgtcagcttgcgtcggagacatggttatggccaccgtcaagaagggaaagcccgatctccgtaagaaggtgctgcccgccgtcatcgtccgctagcgcaagccttggcgccgaaaggacggtgtttacatgtacttcgaagataatgctggtgttatcgtgaatcccaagggtgaaatg

SEQ ID NO: 13543 - DNA, 364 bp, Glycine max
  Clone ID: LIB3040-045-Q1-E1-B3
ggcaacgagcagcggctaacaccggaatctgcaaactcaaaagttccatctcttcttccacacatccatcgttaatcattttcccgcaaaatattttctttctctgttctgtgccttcttctccaccgttggttcaaaaatcgcagccgttgatcagattgagcctccgtgttgatcttcatcgccatcatggaggtccgttccaatcccgcctccgacaactcctccgaccaccttcgaccgcccgccgtttcgtccaagcagccgctgccttctcctaccgccgtcgacacctccgccgtttctcagagactccagaaggaattaatggctctcatgatgagtggaggagatctcggggtgt

SEQ ID NO: 13544 - DNA, 335 bp, Glycine max
  Clone ID: LIB3040-045-Q1-E1-B4
aacaaagaacagcgttgggacccacaagatctacatcttcagggtgttgcagcaagtgcaccccgacatcgggatctccagcaaggctatggggatcatgaacagtttcatatacgacatcttcgagaaactcgcccaatagtcatcgcgtctcgctaggtacaacaagaagcccaccattacttccagggagatccaaacggcggtgcgtttggtcctccctgcggagttggccaggcatgccgtttctgaaggcaccaaggccgtcaccaaattcagcagctcttgattggcttcgtgtgtttatgtcacggttttctgtgagcccgatttaa

SEQ ID NO: 13545 - DNA, 337 bp, Glycine max
  Clone ID: LIB3040-045-Q1-E1-B5
gactcaccacttcaaaacactcataacacaaagcacaaagcaaagctcatccttgagttaaaaaatggcagcagcttcttccatggctctctcatccccatccttggctggcaaggccgtgaagctgggcccatcagccccagaagtgggaagggtgagcatgaggaagaccgtcaccaagcaggtctcctcaggaagcccatggtacggcccagaccgagtcaagtacttgggcccattctctggcgagcccccgtcctacctaaccggtgagttcccaggcgactacggctgggacactgctgggctttccgcagacccagaaaccttcgccaag

SEQ ID NO: 13546 - DNA, 368 bp, Glycine max
  Clone ID: LIB3040-045-Q1-E1-B6
gatagcatcagcccatcaactagcaaaaaggagtttgtgtaagggaagaagatggtgtcaggttctggaatctgcgcaaagcgagtggtggtgggacgctcgccaccacatgttgggtcggctagcgtccatcgtggcgaaagagcttctgaatgggcagaaggttgcggtggtgcgctgcgaagagatttgcatctccggcggtctggtgaggcagaagatgaaatacttgagattcctccgcaaacgcatgaacaccaaaccctcccatggccctatccacttccgcgccccagccaagatcttctggcgcaccgttcgtggaatgataccacacaagacaaagcgtggggaagctgctcttgctc

SEQ ID NO: 13547 - DNA, 357 bp, Glycine max
  Clone ID: LIB3040-045-Q1-E1-B7
taatttgggaattattgctcccatcgccattggtttcattgtcggcgctaacattttgttgggtggggccttctccggagcggccatgaaccccgctgtgacatttgggcctgctgtcgtgagctggacctggaccaaccactggatctactgggccgggcctctcatcggtggtggaatcgctggccttgtttacgaggttgtctttatcagccacacccacgagcagcttcccaccactgactactagagggggggaaatgaaaataaaaaaaaaaaattgtgtattattgaatttctctggaatcttcttctgtgtatggttttccttccttgtgttttcttcctaattcactt

SEQ ID NO: 13548 - DNA, 383 bp, Glycine max
  Clone ID: LIB3040-045-Q1-E1-C1
ggatccccccctctctctctcatcactacctctgcatttttctctcgctctctgccttccatcaccctcgccatttcccttcccaagatagtagaagatggcagacgctgaggatattcaacctcttgtttgtgacaatggaacaggaatggttaaggctggttttgctggagatgatgccccacgtgctgtgtttcccagcattgtaggtcgtcctcgtcacactggtgtgatggttggcatgggccaaaaagatgcatatgttggtgatgaggcacagtctaagaggggtattttgactctcaagtaccccattgaacacggaattgtgagcaattgggatgatatggaaaagatttggcatcataccttctataatgagc

SEQ ID NO: 13549 - DNA, 404 bp, Glycine max
  Clone ID: LIB3040-045-Q1-E1-C10
gacttcacaactcaaactgcttcattgcataattgcagataagatcaacccttctaccttcagattcgcgggaagatggcatcacttcatgctaatgtgacatcagttgtttacaacagtggcaaccgtgtttctcaatcgaaatttgcaagctcttccttcttgtctgggttcgatgttgttggtcgtgcttcaagtgcttggaagaaggaacttgtcccatcttccatttccttggtgcctagagccaccctaacatttgatcccccaactaccaattcagacataaccaagcaaaagaagcacactcttgaccctgcttctccagattttcttcctcttccttcatttgaacagtgctttccaaagagcaccaaagaacacagggaagtcactcatgaaga

SEQ ID NO: 13550 - DNA, 398 bp, Glycine max
  Clone ID: LIB3040-045-Q1-E1-C11
ccagggaaaaaaaaaaaaaaaacatgacgtttacccagaaaaatgtaaagtggaaattgtagacaagcaaagttacctaacaaatgaggattataccctcttttaatgtgatggaactgaaattttcccagccatgaaaaccttgggaacccacatggccacaaaactcattaaaatcatgtgggacaaacatatgaaaggacatgagttacaatgtcagactttgtagtttaaaatctcttttcattttctcatcctttagatctagcctcagtgctctgaagatcctctgtcaaaaagatccaaaacccttttcttatccattgtcttgtttcctttcatcactcaaatcttagaccaactctgccatatcgagtcttttatgtgcttttacagct

SEQ ID NO: 13551 - DNA, 401 bp, Glycine max
  Clone ID: LIB3040-045-Q1-E1-C12
ggtgtttgcattgcagagagagagagaatggcgaccacacccggtttgtgtggcagtgtgttgttgagcacctcgttcctgaggaagcaggcaatggcatcagtgaacatgagaatgctgaaggctaatgctggtgtttttggcttaaagggagggcgtggagggcgtgtgagtgcgatggcaagttacaatgtgaagctgataaccccagaaggagaacaagaatttgaatgcccagatgatgttttcattcttgaaaaggctgaggaatttggcattgaccttccctactcatgcaaggctggtgcttgctcttcctgtgccggcaaagttgtttctggcaaagtcgaccaatctgatggtagttaccttgatgatacccaaatcggtaacggatttgt

SEQ ID NO: 13552 - DNA, 373 bp, Glycine max
  Clone ID: LIB3040-045-Q1-E1-C2
gggagttcatagttccaataccatatgtcaaacaagtaaagctgtcaaaagctggtgggaggcttgtaattgcctctgatggcatacgggatgctctatcatcagaaatggctgcaaaattttgccgtggtttgcctgctgaacttgctgctatgcaggttgtcaaggaagcactaagaacgagagggttaaaggacgatacaacttgcatagtagttgacattatcccacctgataatgaattgccaccaacacctccccccccaaaacggaacaagctgagagatcttctttccttcaggaagaggtcccgtgattctgccagtaagctgtcaaaaaagctttcagctataaatatagtggaagaactgtt

SEQ ID NO: 13553 - DNA, 364 bp, Glycine max
  Clone ID: LIB3040-045-Q1-E1-C3
gatcgtacgatcgttaatttcctctctttgtttcgcagacctcaccaaccccttttagctcaccctctcactctcagccaccgcacgccgccgtctccggcagccactgtccgttttcacttgtaatttgtcaactcagcataaaaggggtgggttaggctttgcaaccattggaagttccaacaatggcaggcatagctatacttttagatctatggaggaaaaatcaaaacttgagctctggattgcactcctctcatgcttttcagtcttccagtgcctttttttctgcctctgctgcaactgctgctgcagcgtcttttgctgcagggactggttttgcctcaagggcattgtttgggtc

SEQ ID NO: 13554 - DNA, 372 bp, Glycine max
  Clone ID: LIB3040-045-Q1-E1-C5
gacaccatccagtactcttcttttcagcacaacctcttcatctctcccaggctttcttttctttgcaacaacactaccaaaaatgtcaccagatttcacacttttgttctccccggaactcatgcagtcccctatcatcactttccaagccactttctgtgtccttctcttcaccctcatgttcacgccgttcttcactcctggtgggcttccttgggcctgggcccggcccagaaccatcatccctggcccagtaactgccctgctcggggtcttcacgggttccacacctcacagcgctttatccaaactggcccgcacttatcacgcggaaaagctcatggctttctccatcggtttaacccggttcgt

SEQ ID NO: 13555 - DNA, 252 bp, Glycine max
  Clone ID: LIB3040-045-Q1-E1-C6
ggtaacagcctccgcattccaaacaactccattgtccgtctcatgcactgcatacgtagcatctgcattggcattcccctctactgaatgaagttgtggatcttccaaagtccactaatctactgctcctcgtgcgttacattgcgtacctgctgcatggaaccaagtctgtaccttagattcggttgtggaagccattccacaaattgatgtgatactcggcgtcactcacacggcctaacaatctgactc

SEQ ID NO: 13556 - DNA, 379 bp, Glycine max
  Clone ID: LIB3040-045-Q1-E1-C7
gacgttcacattcaggaatcgttttcttcagaaaatttgccatcgttgagggaagcgcgagagccttcgttgttcaagatgagagctaagtggaagaagaagcgcatgaggaggttgaagaggaagcgccgaaagatgagacaaagatctaagtaggtgcttgaacaaggagtggagatgatgtgcttttccatctgctaccagcttcatgacattttatgctgtcatggctcttatgatgatcttgaggtctagtggcgaggggagcttccatcttgactttagtttagctttactggtctaaagattgctgttttagtgtgggttaagttatgatattgagagttttgtgttatctaattatgttctggtacgtttt

SEQ ID NO: 13557 - DNA, 354 bp, Glycine max
  Clone ID: LIB3040-045-Q1-E1-C8
ggaacctttgcattctattcattcaagattcagcaagtgcgttttggaagcagagaccgaaatacttcgagatggcccgtacaaagcaaactgctcgtaagtcaactggaggaaaagctcccaggaagcagcttgcaaccaaggctgcacgtaagtctgcaccaacaactggtggtgtgaagaagcctcatcgttatcgccctggaactgttgctcttcgtgagattaggaaataccagaagagcactgagctcctaatcaggaagcttcctttccagaggttggttcgtgaaattgcccaggatttcaagactgatctgcgtttccagagccatgctgtgcttgcattgcaag

SEQ ID NO: 13558 - DNA, 349 bp, Glycine max
  Clone ID: LIB3040-045-Q1-E1-C9
gcttgcttgggttaaaatatttagaaccctaagccactcaccgatagagaagccgccgccaccttcactagtcaccgtcgccgccgccgccgccttcaccagtcaccgtcgcattcctctttcagcaaaaccccttcttctcactcacactctcacacccatattctcaaacacacaaaataacaaacacaacacagcaccaacctcggtgataacaattcaaagaaacacagaaatacacagacacgaacaatggctggtcgattccgtgagctgatgaagaaatatggaaaagtcgcactcggcgttcacttgagcgtctccaccgcctccatcacgggtctctacg

SEQ ID NO: 13559 - DNA, 354 bp, Glycine max
  Clone ID: LIB3040-045-Q1-E1-D1
ggactcggctaagctgaactgcgagaggagctgcgtccacagggaaacgcatagcatattcgtattccggggaagaaagaaagaaacatcatgtgttcttcggagacgatcaacatcgctgcgagtacacagaaacttgatgttgataatcgaattgctcttcgcttctactacagaattgccgataatatcctcaaacaggctgatatctttcgtgcagagacaaatatagttgatctgtatatcatgctcctaagattttccagtttggtctctgagacaatacctcgtcaccgagattatagatcatctcctcaaggcaagaaagaagctttgagaaagaaattgttacat

SEQ ID NO: 13560 - DNA, 400 bp, Glycine max
  Clone ID: LIB3040-045-Q1-E1-D10
ggattctgattctgtccatccaaatcgtacaaatattcagtgaagatcaacctcaatggcatctcttggcgtgcgaccagttcttccccctccattaacttccatctccgacccacctcctcttttcgatggcaccaccaggttgtacatcagttattcttgcccctatgcacaacgtgtgtggatcgctatgaactacaaggggctacaagataagatcaatttggtccctatgaaccttcacgacaggccagcttggtataaggagaaagtctaccctgaaaataaggtgccatccttggcgcagaatggcaaagtgttgggagacagtcttgatttgatcaaatatgtagatgcaaactttgaagggacacctttgtttcacagtgatcctgccaag

SEQ ID NO: 13561 - DNA, 401 bp, Glycine max
  Clone ID: LIB3040-045-Q1-E1-D11
gaccgcctctttcgtaaagcagagtccgcatacgcagtttgcattcgtttgaactctgttctgttgcctccacaaaccaaaccaggcccaagtagtacagtgaaaacgaaattgaagtatagctaggtgaaaggaagtagtcaagtacaagagaatggcgaagtcattgagatcaaagagggagaagaggctgagggctattcggagggagattgttgaacctttctatgacaagaaagaagctgctaagctcgctgcccaagaggccgcccttgccgcacctaagctggaggttccttcgaaaccaaatactgccatggaagcgtccacttccactaacaacaccaacattgatgtggagatggctgatggcagtcaaagcatggcttccttaaagcctg

SEQ ID NO: 13562 - DNA, 400 bp, Glycine max
  Clone ID: LIB3040-045-Q1-E1-D12
gaatcggagacaaagctagctcgaacgaacgaagtacagtagtgtgctacgaaaaatgtggcggtgcatcgcacgtggtctccgtggacctgcttccaccagatccacctccaatcactcacttggatctcaactttctagattcttctctagtggggcgaactcctcgtacaccgtggtggatcatacttatgatgctgttgtcgtacgagctggtggcgcgggattgagagctgctattggactttcagaacacgggttcaatactgcttgtattaccaagctcttcccaactcgttcacacactgttgcagctcaaggtggtataaatgctgctttgggaaatatgactgaagatgactggaggtggcacatgtatgacactgtcaagggaagtgat

SEQ ID NO: 13563 - DNA, 382 bp, Glycine max
  Clone ID: LIB3040-045-Q1-E1-D3
agggttcttccttgtaagagtgaagtgggtgaaggtaatgattaacctgtatcactgggcttgggacattggtggtctcttcgtccccatcgttgttgttgtaagcggcgggcatggcctgtggttctaataaatctaaagccttgctctctgaaaccccatcgagcttaggatcagtgagggattgggtctttggtttcttcttgtcttgttggaaataggtttgggggtggtgtctgtttcagagagagagagagtgaaggcatggcgatggaggcatggagagaagaaagagaaaggaagtgatagattatcaaactccgtgtgtggtcggaaaatagtgcaaatgagtagaataaaaacttgaacaatttgaagttgt

SEQ ID NO: 13564 - DNA, 384 bp, Glycine max
  Clone ID: LIB3040-045-Q1-E1-D4
gccgaaaagtagtaccaagatggcttcagttgtgtatctcctctttggcttccatctcattgttatcatgtcaagttccttacccgcaactagtgaagtgtttgcaaaacagtatccatccacagaacccgtggaagaaaaactcacccaactccacttctatttccataacaacataacgggggaacacccaactgctatgaaaactgttttgcctcctaaggggtccattcatggttttggggctacttacatgatggatgaccctctaactgaaggaccaagtccaacttcaaagcttgtgggaagatctcagggaatatacgctttggcttcacaacatgagcctgggttgctcatggtgacaaattttctcttcacttt

SEQ ID NO: 13565 - DNA, 382 bp, Glycine max
  Clone ID: LIB3040-045-Q1-E1-D5
ggccgaaaagtagtaccaagatggcttcagttgtgtatctcctctttggcttccatctcattgttatcatgtcaagttccttacccgcaactagtgaagtgtttgcaaaacagtatccatccacagaacccgtggaagaaaaactcacccaactccacttctatttccataacaacataacgggggaacacccaactgctatgaaaactgttttgcctcctaaggggtccattcatggttttggggctacttacatgatggatgaccctctaactgaaggaccaagtccaacttcaaagcttgtgggaagatctcagggaatatacgctttggcttcacaacatgagcctgggttgctcatggtgacaaattttctcttcac

SEQ ID NO: 13566 - DNA, 178 bp, Glycine max
  Clone ID: LIB3040-045-Q1-E1-D6
ggagatctcagattgcaattgcctcttctcttctcccagaatcggtgtaggttacaggtttaagggttttgttttcatttaggtcactaatccgatatcatgaagctcgatacgactagtctcgaatcgtttcccacactgattgcacctcaaaacgacgtcgccggagaactctccg

SEQ ID NO: 13567 - DNA, 376 bp, Glycine max
  Clone ID: LIB3040-045-Q1-E1-D7
gattgttggcttgtgctctgctcgtgcctctagggttatcatatctccatttccatttcctctctctcagtttccaagaatcttaagctatgggaaagtcttacccaaccgtgagcgctgattaccagaaggccgttgagaaggcgaagaagaagctcagaggcttcatcgctgagaagagatgcgctcctctaatgctccgtttggcatggcactctgctggaacttacgacgtgagctcgaagaccggtggtcccttcggaaccataaagcacccctccgaactcgctcacggcgctaacaacggtcttgacatcgctgttaggcttttggagccactcaaagcggagtttcctattttgagctacgccgattt

SEQ ID NO: 13568 - DNA, 361 bp, Glycine max
  Clone ID: LIB3040-045-Q1-E1-D9
ggtcgtcgtttatctctcctcgttcgcatcttcaccctttccctgtctctcagaaagatgaaggtggtcgctgcgtatctgctcgccgtcctcggtggcaacaacaccccctccaccgatgacatcaaggaaatcctcggctccgttggaatagaggcagatgaagataggattgaatcgttcttgtctgaagttaagggtaaggatatagttgagctaattgctgccggtaaggaaaagctggcctcggtgccttctggtggcggtggtgccgttgccgtcgccgctgctcctggtggaggtggcggtggtgctgctccggctgctgaggtaaagaaagatgaaaaggtggaggagaaag

SEQ ID NO: 13569 - DNA, 385 bp, Glycine max
  Clone ID: LIB3040-045-Q1-E1-E1
gactctcatcacattattctatatcaattttggttaagagtcttgaaaaagcaagagaaaaaaaaataccaaccatggcaaccatttctgatcaacctagagggtcctactcctatggaacctcatatggagcaccctatggaaccacgtatgagaccaacaccagcattaacaacccaccttcacgccaaacagtgaagttcataactgctgccactattggcatcacactcttgctcctgtctgggttgaccctcacaggcactgtcataggtttgatcattgcaacccctcttcttgttatcttcagccccatccttgtccctgctgcgtttgtgctgttcctagttgcttctggctttttgttctctgggggctgtggtgt

SEQ ID NO: 13570 - DNA, 396 bp, Glycine max
  Clone ID: LIB3040-045-Q1-E1-E10
ggcagttcaattccaatatattccattctctctgtgtatttccctacctctcccttcaagatgcagatcttcgtcaagaccctcaccggcaagaccttcacccttgaggtggaaagctctgacaccatcgacaacgtcaaggccaagatccaggacaaggaaggaatccccccggaccagcaacgtctcattttcgccggaaagcaacttgaggacggccgtacccttgctgactacaacattcagaaggagagtactcttcacctcgtcctccgtctccgtggtggcatgcagatcttcgttaagacactcaccggcaagaccataaccctagaggttgaaagctccgacaccatcgataacgtcaaggccaagatccaggacaaggagggtatc

SEQ ID NO: 13571 - DNA, 379 bp, Glycine max
  Clone ID: LIB3040-045-Q1-E1-E11
gaataagatttgtgagagaaagggagaaagggtgtgagaatggagagcaaagaggaagatgtaagggttggagcaactaagttctcagaaaggcaaccaattggtacagcagctcagggtgacaaggactacaaagaaccacccccagcacctttgtttgagcctggtgagctaaagtcatggtccttctacagagctggaattgctgagtttgtggccactttcttgttcctctacattaccatcttaactgtcatgggtgtcaacaggtcaccctccaagtgtgcctctgttggcattcaaggcattgcttgggcctttggtggcatgatctttgcccttgtctactgcactgctggaatttcaaggggacacatca

SEQ ID NO: 13572 - DNA, 402 bp, Glycine max
  Clone ID: LIB3040-045-Q1-E1-E12
gaccgtaatccttacgctctctcactcacaaacgcacactgaattcaaaaacatcgaaagagagaggcatggccgagcaaaccttcatcatgatcaagccagatggcgttcaaagaggccttattggcgagattattagcagatttgagaggaagggtttttacttgaaagggttgaaactcgttactgtggaccgtccttttgctgagaagcactatgctgatttgtctgcaaagcctttctttagtggtttggtggattacattgtctctggccctgttgttgccatgatctgggagggtaagaatgttgttacaactggccgaaagattatcggagccacaaacccagctcaatctgagcctggaactattcgtggtgactttgctattgacattggaa

SEQ ID NO: 13573 - DNA, 341 bp, Glycine max
  Clone ID: LIB3040-045-Q1-E1-E2
gaagtgaatgggaaggaagttgtcatgtcaaatgtagaggagtatcttggagtgcttgatgtttagatacatcaagccagggacattcaaaacatttgcatataccacaagcatgatgtttatgctaagatttgtctgaccagtaatcctgagacaactgtgtctaccaaatccatcactggaggacgaaagaaccctgtgttcaacgagaatcttcgtattgatgttacgactgttgatgcttctctcaagtgttagatatggatgcctaccagggtgaagaactatcatgaatagcagttgcttggttgtgctttggtaaccttgtctgaagtactagt

SEQ ID NO: 13574 - DNA, 388 bp, Glycine max
  Clone ID: LIB3040-045-Q1-E1-E3
gacatataacactgtcactcttacaatctcagctcatagcattcttcttcttccaacgagaatcagtctttgtgttccaaatggctcgtacgaagcaaacagcaagaaagtccaccggaggaaaagctccaaggaagcagctcgccaccaaggcagcacgtaagtccgctccggcgacgggcggcgtgaagaagccccaccgtttcaggccggggacagtggctctgagggagattcggaagtaccagaagagcacggagcttctcataaggaagcttcctttccagaggctcgtaagggaaatcgctcaggacttcaagaccgatctacgcttccagagcagtgctgtctccgctcttcaggaagccgctgaggcctacctcgttgg

SEQ ID NO: 13575 - DNA, 356 bp, Glycine max
  Clone ID: LIB3040-045-Q1-E1-E6
ggcaacaaggcttaacctctctcattcccgatttcgtcacctccttcaaccgctgcgaaattctagggttccgaaatggacgctggcggaaagatcaagaagggcgccggaggtagaaagggcggcggcccagagaagaagccggtttcaaggtccgtcaaagccggtctccaattcgccgtcggaagaattggccgttatttgaagaaaggaaggtacgctcagcgtgtcggtaccggtgctcccgtatacttggctgcagttctcgaatacctagctgccgaggtgcttgagttggccgggaatgccgcacgtgacaacaggaagaacaggattattccaatacacgtgctttt

SEQ ID NO: 13576 - DNA, 190 bp, Glycine max
  unsure (1)..(190): unsure at all n locations
  Clone ID: LIB3040-045-Q1-E1-E7
gaatagcacagttaccccttattgatctagaaatacaaactgaaaaggagattgaattgaggctgctgccctcacttgatacactgaaggtgaaagataagaaggatcgaggaaccttaacagtaaaggtcatgtattatcagtttaacaaggaagagcagctggttgcactagaggcgaaaaanannna

SEQ ID NO: 13577 - DNA, 373 bp, Glycine max
  Clone ID: LIB3040-045-Q1-E1-E9
ggccgtcacacagagagagaagagacaatgaagtttaacccaagggtttcctcaagccgtcgaaagagccgcaaggctcacttcaccgctccgtcgagcgtgcgtcgcgtcctgatgagcgcgcctctctcgaccgatctccggtcgaagtacaacgtgcggtccattccggttcgcaaggacgacgaggtgcaggtggtgaggggaacctacaagggccgcgagggcaaagtggtccaggtctatcgccgcaagtgggtcatccacatcgagcgcatcacccgcgagaaggttaacggctccaccgtcaacgttggcattcacccttccaaggttgtcgtcaccaagcttcgaatggacaaggaccgcaaat

SEQ ID NO: 13578 - DNA, 385 bp, Glycine max
  Clone ID: LIB3040-045-Q1-E1-F1
gactcgccgctttgtgctgctgttgcaacacttaaggctgggcctttttttgaggttttcagcgcttctttctcacaatggatcttcataatgatattgatttgctgaatcctccaactgagttggataagacaaagcagaaactcaagcgtcttgttcagtcaccaaactctttcttcatggatgttaaatgccatggatgcttcaacataacaactgtgtttagccactctcaaactgttatggagtgcggaaactgccagactgttttgtgccaaccaacagggggaccgactatgttaaccgatggttgctcatttaggaatatgggacattgactggtttgttaaccagacgttgccttgtcaaataattgacattttcg

SEQ ID NO: 13579 - DNA, 370 bp, Glycine max
  Clone ID: LIB3040-045-Q1-E1-F10
ggtcaaacaatcaaacaaactcatttagcatagacagtgaagcaggctttctctagcagctagagatggcagagggaagagggtccactctcgtgcacctcttggtcgtggttctgtgcttggtcgctttcgggttcgccattgccgccgagagaagaagaagcgtcggaaccatgcacaaaattgaaggaacaaatgaaacattctgcagctatagttcagatgttgccactggttatggagtgggcgctttcctgtttcttctttctggtgaatcactgctaatgggagtgacaaagtgcatgtgctttgggaggcccttaacacctggggtaaatcgagcgtggtccattatatattttctttcttc

SEQ ID NO: 13580 - DNA, 106 bp, Glycine max
  Clone ID: LIB3040-045-Q1-E1-F11
gaattggattgagtcttggtatggaaacttaccaagtgagaactttcaaattcagagaaaccctggaattcacaaagggcaatcctgagccaaatcctgttttcct

SEQ ID NO: 13581 - DNA, 59 bp, Glycine max
  Clone ID: LIB3040-045-Q1-E1-F12
atagaactggccaggtaatgctgaaaatgaagagcagacatgttgcaggaaccattacc

SEQ ID NO: 13582 - DNA, 381 bp, Glycine max
  Clone ID: LIB3040-045-Q1-E1-F2
ggctcttggctgatatttcctgataagtggacagacgcttaaacagagaaactaacacagatttgcatgcatggggaaaataacgcacattgtagtaattcccagtgcagggtacagccacttcgttcccgttatccacttctcaaagagacttgttgagcttcacccagaaattcacgtcacatgcatcattcccattctggggtctctcccaagtgctgcaaaacccattctccaaacccttccacaaaacatcaacacggttttccttccaccggtgaaccctaatgacctaccacaaggtgttcccgtagttgtccaaattcagctagcaatggctcactccatgccctccatccaccacaccctcaagtccataac

SEQ ID NO: 13583 - DNA, 379 bp, Glycine max
  Clone ID: LIB3040-045-Q1-E1-F3
gaacgccaaactcaaagtggagaagaaacgtgaacacattcaccgttttttctatcttcttcttttaaattccttccttttcttttgattccgctcttctaatcgtcgttccaatttcacagttttctatacatctcccaaccattccatcgatgcttcaagttattacaggaataggttccttcgccatagcatatgcaactggaatgtgcttctgcttgactcgaaagaggtaggtggaagaaaagaaaagttaatatataacttcctaaaagcctgtaagagtttgaaacactgcagttttcgcctaagatttttctccattgtccatatggataattagaatttaatggataagaacttgggaccatgattgtga

SEQ ID NO: 13584 - DNA, 384 bp, Glycine max
  Clone ID: LIB3040-045-Q1-E1-F5
gatctcaccatcactctcgctcttgcaattagtcctcttccaacaatccgcacctaaactctagggttctgacatggacactggtggaaagatcaagaagggcgccggaggaagaaagggcggcggcccaaagaagaagccggtttcaaggtccgtcaaggccggtctccaattccccgtcggaagaattggccgttatttgaagaaaggaaggtacgcccagcgtgtcggtaccggtgctcccgtttacttggccgcagttctcgagtacctagctgctgaggtgcttgagttggctgggaatgctgcacgtgacaacaagaagaacaggattattccgagacatgtgctattggctgtgaggaacgatgaggagttggggaa

SEQ ID NO: 13585 - DNA, 362 bp, Glycine max
  Clone ID: LIB3040-045-Q1-E1-F6
gacggaaagcatgatataggagccaacattttttgtgctaagtgcaaaccacgccagaatttcattatttccattaactcccgattcggcttaaattggaacaccaccaattttcgtgggaaccaacaaaacaaaaaaagggtccaattttttgaaaattattaccatcattcatattcatcaacgacccctcttctgtgcccacttccaaatcttctcctctcgctatgggttgcggctcctcccttccagataggggctcaaggcagttgggtcgacccaattcagagaatggtggagggcaggacgccaagaatctgagggtcaagcttgttctcttaggtgattccggtgttggtaaa

SEQ ID NO: 13586 - DNA, 348 bp, Glycine max
  Clone ID: LIB3040-045-Q1-E1-F8
gagggtttttgtcgtcgctactaagagttgctgcttcttcagccactccgcacctcgcagcctctgtgccctcaacaaccatggctgaaatcgaaactaccgttccagatcccacccaaatcgacgtcaaactcttcaatcgctggagcttcgaggatgttgaggttaatgatatgtctctggctgattacattggagtgtccccatcaaagcatgctacatatgttcctcacactgctggtaggtactcagtgaagaggttcaggaaagcgcagtgccccattgttgagaggctcaccaactctctgatgatgcacgggaagaacaatggaaagaagctcatggctg

SEQ ID NO: 13587 - DNA, 326 bp, Glycine max
  Clone ID: LIB3040-045-Q1-E1-F9
cgggctcgtccgacagctgcgaaaggggtacagaaggggggtggagacaggggcaatgaatcatacccaaagtattcgggggcagcttcagattgcatccggattgtcgcctactcttattgttctcttcgcctcggatcagttctaggtcttctatctcagttcgacattgcagatgagcaaagatcttttctctgcgacatgcacatctctcttcagttctgagctctggactacatctctgatttaaatatcgttcatgcatacgtcctgcacacttacccgttccttcattgcggtgtcacaacgtgaatgttaatggctgc

SEQ ID NO: 13588 - DNA, 364 bp, Glycine max; identical to SEQ ID NO: 12808
  Clone ID: LIB3040-045-Q1-E1-G1

SEQ ID NO: 13589 - DNA, 386 bp, Glycine max
  Clone ID: LIB3040-043-Q1-E1-F8
ggcattttgtatcgatggctagtgctgtcagtaaggtttccggcgacctgaagtcgtcgagtttcgatcgtgtcagagaagcaccgccgccgcctcctgattcctcccttcttttggctaccagacctcccagacaagcggtgtcatactggacatgctcaaagctttgtgcattttgttttgttgctggagcggttttcggttactcgctcaggggacgagttaagcgctgggcttccaagatgctcaagaagctcagctgaaactaacataattcaatgattctcgttaaaggtagtcatttggtttggttagacttcaccttcatagattacatgtaaaacaatgatatcaattttgtgaaatttttagacgctccgtcattg

SEQ ID NO: 13590 - DNA, 405 bp, Glycine max
  Clone ID: LIB3040-041-Q1-E1-D7
gaattgaaaagagcaaagtttggaaatttgggaaacttgaaagcatagcagagagatcacatcgcggctctctcatgtctcaacccaaccacccgctgaatctaaatgatgataacagagagagatgtaagaatacaatcaaacagcatgaagataatcttaagtttcttaattctcaatcaaatcaattagctgaatcaatatttgacttgcaagtgagtcttgcaaggtaccattcaactaatgtaattacgttagagaatggaaatggtgcctttcatactgaagaggaaacaatggaacaggtaatgaagaaagagaactctgctgctagtatatttagttggctaaaagttaatgcacagacatcaaatttgacattaacaaaggatgttgtgggagttg

SEQ ID NO: 13591 - DNA, 222 bp, Glycine max
  Clone ID: LIB3040-041-Q1-E1-D8
ctcggggacctgtgcaccgactcccctgacttacgctgctggaacccatcactggataacgttttcgctatacatattcctctgcttactctaacctgtcacaaacagacgctccacttcatcaatcattactacttcgcatacgtgccttaactttgctcatctctccaatgtcctccaccagtagcttcatcaacacagctttatcatgcaacccattcc

SEQ ID NO: 13592 - DNA, 396 bp, Glycine max
  Clone ID: LIB3040-041-Q1-E1-E1
ggcagatatctgtaatttgtgtctgctcactcgctcgtctccgccacttctgaatctattgaatcaacaatcatgtcggacgaagagcaccatttcgagtccaaggccgacgccggagcctccaaaacctaacctcagcaagccggtaccatccgcaagaacgggtacatcgtcatcaaaggccgcccctgcaaggttgtggaagtttcgacttccaaaactggaaagcacggtcacgctaagtgtcactttgttggaattgatattttcactgccaagaaacttgaggatattgtgccctcttctcacaactgtgatgttcctcatgtgaatcgtactgattaccagctcattgatattgctgaggatggatttttgagtctgcatactgaaaat

SEQ ID NO: 13593 - DNA, 344 bp, Glycine max
  Clone ID: LIB3040-041-Q1-E1-E10
ggatcccttgtattctattcttcgggattcacatggctcgtttcaagcacaacgctcttaagtccacaagaggatacgctctctacgaagcagcttgcaaccgaagctgcacgtatttctgcaacagctactggtggtgtgaagaccccccaccgttatcatcctgttaacgttgctcttcgtgtgattaagctgtacctgaagattaccgaccttttgatgcggaatctctccttccagtagctggttcttgaaattgctcatgacgtcacgactgatatgcgtttctagagtcacgccgtgcttgcattacaaggaactgctgtggctttccttgttaggct

SEQ ID NO: 13594 - DNA, 396 bp, Glycine max
  Clone ID: LIB3040-041-Q1-E1-E2
gactcactcatacaatagagaccagcttttgcttctttgtgaacatggagatgaggaaatcatgtggcttcttcttcttgctcctcctccttgtctttgcttcccaggtggtggtgcagacggagggaagagtgtgtgagtcacaaagccacgggttccatggtttgtgtaatagagaccacaactgtgctttggtctgcaggaacgaaggtttctccggtggcaggtgcaaaggcttccgccgccgctgcttttgcaccaggatttgttgagatctcatcaaacactactcttgccatgcaaattaataaatcatagctaggccaaataaattgcatctactcgttatccatttgggagctagctatcacaatcaactcatacttggtcaatgga

SEQ ID NO: 13595 - DNA, 364 bp, Glycine max
  Clone ID: LIB3040-041-Q1-E1-E3
gacatcacatcacatcgcagagagagagagatccatcgatcaattaatttccaatggccgatcagctcaccgacgaacagatctctgagttcaaggaagcctttagcctcttcgacaaggacggcgatggttgtattaccaccaaggaacttgggactgtgatgcggtcgcttgggcagaacccaactgaggctgagctgcaggacatgataaatgaggttgatgctgatgggaatggtaccattgatttcccagaattcctcaatctcatggcgcgcaagatgaaagacactgattcagaggaagagctgaaggaggctttccgtgtgtttgacaaggatcagaatggtttcatctctgccgc

SEQ ID NO: 13596 - DNA, 367 bp, Glycine max
  Clone ID: LIB3040-041-Q1-E1-E5
tccgtttttacgttatttcgcactgtattgtacaattcctttatttgtgggatttatttctcacacgataattcattaaattatagaatggatttttacctatgcctagatctcggataaatgaaaattttattgataaaaccttttcaattgtagccaatatcttattacgaataattccgacaacttcgggagaataaagggcattcacttattacagagatggtgcgatttgattctatttttttagcgatatcggtaaaaagtggaaaaaatccacgcttgctgaacgtgaaatttgtaaatatcaacgattaattccttctgtcgtgtatcctcgattaatgcagcctcatatgcttaaact

SEQ ID NO: 13597 - DNA, 400 bp, Glycine max
  unsure (1)..(400): unsure at all n locations
  Clone ID: LIB3040-041-Q1-E1-E6
ggagagggcgaggaagccacatagagacacaatacagagtgagttgttgctccttcgccacaactctctgccaacatgggtatctccagagattctatgcacaagaggcgtgccactggtggcaagaagaaggcctggaggaaaaagagaaagtatgagcttggtcgccagcctgctaacactaagctgtcaagcaacaagacagtcaggaggatccgtgttagaggtggaaatgtgaaatggagggcattgagattggatactggaaattactcctggggaagtgaagctgtaactcgcaagactcgtgtactagatgtggtttacaatgcctcaaacaatgagcttgtgcgtactcagactcttgtcanaagtgctatcgttcaggttgatgctgctc

SEQ ID NO: 13598 - DNA, 100 bp, Glycine max
  Clone ID: LIB3040-041-Q1-E1-E7
gaatgttaatgttcctcaagccatcgtaccgtgttgcctctcagacatctatccgtcatattgcctttcatcacgtacctttacatctggagggttgccc

SEQ ID NO: 13599 - DNA, 399 bp, Glycine max
  Clone ID: LIB3040-041-Q1-E1-E9
gacacaactaactaagaaagtcttccatagccccccaaaaatgaagagcaccatcttctttgctctctttctcttttgtgccttcaccacctcatacctaccttcagccatcgctgatttcgtgctcgataatgaaggtaaccctcttgaaaatggtggcacatattatatcttgtcagacataacagcatttggtggaataagagcagccccaatgggaaatgaaagatgccctctcactgtggtgcaatctcgcaatgagctcgacaaagggattggaacaatcatctcgtcgccatatcgaatccgttttatcgccgaaggccatcctttgagccttaagttcgattcaattgcagttataatgctgtgtgttgggattcctaacgaatggtccgt

SEQ ID NO: 13600 - DNA, 379 bp, Glycine max
  Clone ID: LIB3040-041-Q1-E1-F1
gactgcaactttgctctctgtgaggcttcaatttccaattagggtttcgcttagagtaaccaattaccatgggagtcttcacctttgtcgttcgcaaatccggcgccgaatggagcgccaagcaacattccggcgacatcgaggcctccgccgactccacctacgatctccaaaggaagctcgtgcaagccgctctcgccgttgattcctccggtggagtccagtcctccttctctcccgtgtctcctacctccgctgtgttccaggtgatagtgggtggtgctgtattcgttggaagtggcggtggtgctgttgcagctgcacctgcatgtggtgctgctgcagctgatgctgcaccggctgctgagaaaaaagaaga

SEQ ID NO: 13601 - DNA, 304 bp, Glycine max
  Clone ID: LIB3040-041-Q1-E1-F11
tcaggggctaaaaacaaaacctagaaagcttagggactaaaaagatagtaaaccctgaaaatttaaaagaaaaaggagcatggttccatagaatgacggaaattccgaactttataaccactatttggatatttcttcttgtgagatactacctccaatcctttttataagaaacaagtgatattgtaaaatacactatcacttgtaagtgacttcattccttgaatcagaatggttacaaggcaggtttaacctagagagaaatatttacgtcaatcagaatccagaaaaaaaaaggaaggac

SEQ ID NO: 13602 - DNA, 379 bp, Glycine max
  unsure (1)..(379): unsure at all n locations
  Clone ID: LIB3040-041-Q1-E1-F12
tggaggtccagacatagtaaggattgacagactgatagctctttcttgattctatgggtgatggtggtgatggaggctggagaaactaaggcttgatgtcctcaattacggtttatgattatgccccgtatttttagttgctgtggcttgagttctagtttccttaaggtttcgtgttaccgtggttcctgtttttgaccaatatatctgggtgtttaaagtcgacttaattaaattgataatcactaactgcagtatccaagagccaccgttgttgagctaagtgctggaacttccatgcctggcttggttgcagcaaaactcggtgcccgtgtcactcttactgatgactccaccagattanacgtgcttgacaaca

SEQ ID NO: 13603 - DNA, 400 bp, Glycine max
  Clone ID: LIB3040-041-Q1-E1-F2
gagggtttttgtcgttgcgactaagagttgctgcttcttccgccactcagcacttcgctccctctgtgcttcaccaaccatggccgaaatcgaagctaccgttccagatccctctcaaatcgacgtcaaacttttcaaccgctggaacttcgacgacgttgaggttactgatatgtctctggctgattacattggagtgtccccgtcaaagcatgctacatatgttcctcacactgctggtaggtactcagtgaagaggttcaggaaggcgcagtgccccattgttgagagactcaccaactctctcatgatgcacggaaggaacaatggaaagaagctcatggctgtcaggattatcaagcatgcaatggagattattcacttgctcactgacctgaac

SEQ ID NO: 13604 - DNA, 239 bp, Glycine max
  Clone ID: LIB3040-041-Q1-E1-F3
ctttcggctcaaacatcactacaggtgggaaggggccgaaaatctgggaatcaaaaggttcttcaaaaggactgtaaatctttactcctaggatccaataacggctttttggttttaatcttcctaattacataaattactatcctactactgtagtgtctactgactgaatcgtgaattacattggatgggccaatggagaatcaaattacgagttgtgcaaacgacttaagatacta

SEQ ID NO: 13605 - DNA, 375 bp, Glycine max
  unsure (1)..(375): unsure at all n locations
  Clone ID: LIB3040-041-Q1-E1-F5
gagtgttagtgttcctcaagccaccgtaccgtgttgcctctctgcaatctacagccaaaatgcctttcaagaggtacgttgagatcgggagggttgcccaaatcaactacggcaaggaatatggcaggctcgtcgtcattgtcgacgtcattgatcagaacagagctcttgtcgatgcccctgatatggtgaggtcccaagtcaatttcaaaaggctttccctaaccgatatcaagattgacattaagagggtccccaagaagaaagatcntgtcaaagccatggaagatgctgatgttaagaccaagtgggagaagagttcatggggcaggaaactcattgtcaggaagagaaggggatccctcaatgattttg

SEQ ID NO: 13606 - DNA, 318 bp, Glycine max
  Clone ID: LIB3040-041-Q1-E1-F6
gagaacgaaccagagaatgatttcagtgagtgatcggtgttcacttgatctcatcataatcgtcaacgtcaattgaagaagatgccgatgataaacatccacgtcggcaggcctgaaaaggcgactcaccccgacacgttgaacgcggctttggccgaattcatcccaaccttcatcttcgtattcgccggctcatgctccggcatcgcctaaaagaagctcaccgaaaaccgcgctgccaaccttgcctgcctcatcacaggctccatcggacatgcattcgccatcttcgtcgacgtcgacgtctgagccaagatc

SEQ ID NO: 13607 - DNA, 365 bp, Glycine max
  Clone ID: LIB3040-041-Q1-E1-F8
gaacagcgaaacagagagtgatttcagtgagtgatcggtgttcacttgatctcatcataatcggcagcgtcaattgaagaagatgccgatcagaagcatcgccgtcggaaggcctgaagaggcgactcaccccgacacgttgaaggcggctttggctgaattcatctcaagcttcatcttcgtgttcgccggctcaagctccggcatcgcctacaacaagctcaccgacaacggtgctgccacccctggcggactcatctcggcctccatcgcccatgcattcgcccacttcggcgccgtctccgtcggggccaagatcatccggggccacgtctatgccgccgtcaccttcggcgccttcgtcg

SEQ ID NO: 13608 - DNA, 370 bp, Glycine max
  Clone ID: LIB3040-041-Q1-E1-G1
gacttcgcgcaaccccagacctcatgcccaacatggcatgctaagtagggtttttgtgcttggcaaaagaaagagaagacaagatggagtctcgttccgggatctgcgctaagcgcgatggtggtggacgcccagcaccacatgctgggtcagctcacctcgattgtggcaaaagagctgctgaacggacaaaaactggtggtcgtacgacacgaacagatttgcatctccggtggtctggtgatgcagaaaatgaaatacatgacgttcctcatcaaacgcatgaacactaagccatcccacaggcccatcgagatccgcgcagtctccaagatcttctggcgcaccgttcgtggaatgataccacaca

SEQ ID NO: 13609 - DNA, 390 bp, Glycine max
  unsure (1)..(390): unsure at all n locations
  Clone ID: LIB3040-041-Q1-E1-G10
ggttactaccaatttaaagaaagagcgttacactccgaacaacactccctttctgagtttgtggaagatgccattgccatgacatgaagaccaaacccattattgccttagccttcttcttcttgtgctcaacctgaaagcaaaagaaacagatctgagataatgggttgttttcttcattgctttggttcctccaaaagcacaaaacctatgcgcaaggcacaacatcaccaccatcgaattgctagagacaggttggagaaagttgttccttgtggtatgtttcaccttccaatgatgtgattttgggagtgtantgtgttggggtgcattttttgattcttttgtgaatttgatagtgtttgttgtttgcttttcctttgtaatatg

SEQ ID NO: 13610 - DNA, 347 bp, Glycine max
  Clone ID: LIB3040-041-Q1-E1-G12
gacagcaaaacaattttcaaactcaattaccattccataacctaaatctcctctttgtttccgagtcagagagcaatggcacgtaccaagcaaaccgctcgcaagtccaccggcggaaaggcgccgaggaagcaattggcgactaaagccgctcgcaagtcagctccggccaccggcggagtgaagaagccccagcgcttcaggcccggaacggtggctctgagggagatcagaaagtaccagaagagcactgaacttctgatccgaaaactcccattccagaggctcgtcagagaaatcgctcaggatttcaaaacagatcttcgtttccagagcagcgctgtttc

SEQ ID NO: 13611 - DNA, 53 bp, Glycine max
  Clone ID: LIB3040-041-Q1-E1-G2
tgtagcaactgttactagaatatgtatcccatcaagtgccccaatcgaattct

SEQ ID NO: 13612 - DNA, 401 bp, Glycine max
  unsure (1)..(401): unsure at all n locations
  Clone ID: LIB3040-041-Q1-E1-G3
gatctgcgcctgatttctcagttctcacactcattccgtgctctaaatctcaaattctagggttagggttcccaatttctccgccaatcagaagatgagttccaccggtggttctaccaagggcggaaggggcaagcccaaagcctccaaatccgtttcaagatcgcagaaagctggtctccaattccccgttggaagaatcgctcgattccttaaggctgggaaatacgctgagcgtgttggtgctggtgctcctgtgtacctctctgcagtgctcgagtatctcgctgctgaggttttggaattggctgggaatgctgctanggataacaagaagaatcgtattgttcctaagcacattcagcttgctgtgaggaacgatgaggagctgagcaagcttt

SEQ ID NO: 13613 - DNA, 409 bp, Glycine max
  Clone ID: LIB3040-041-Q1-E1-G4
ggaggaaaagaaagaaatagaaaaagaagaaaaaaacacagcgtcctagatttcctcttctctgcttcggaagaaagagaaaacaaacaaaacaatggcgttcgcttctttcctcggcagagtcctcttcgcttctgtcttcatactctctgcttaccaacaatttaatgaatatggagttgatgggggacctgctacaaaagcactcagacctaagtttgatgcctttacacatcgggtgcattctcaagtgggctttcaaattccagagattaatctgaaatttttaattgctggggctattgctctgaagggtcttggaggggttcttttcatatttggcagctcttttggagctttgcttctgctcctgcaccagctgattgctactccaatccattatgatttt

SEQ ID NO: 13614 - DNA, 184 bp, Glycine max
  Clone ID: LIB3040-041-Q1-E1-G5
atgagtactgtattttgttttgatggtaaaagtctgagattttcaaattcacaagcaaccataaggttttagtccatttcctttgctgctgaagagggatgtcgtaaatttgcatttaatttacaaggaagttttgttaaaaaaagcatctcagaatcaaataaagaagatctccaattgaaaa

SEQ ID NO: 13615 - DNA, 348 bp, Glycine max
  unsure (1)..(348): unsure at all n locations
  Clone ID: LIB3040-041-Q1-E1-G7
gatccttcaccctcttggcttgtgaatcagcaccacattcacctgagctttttgtgaggattccaaagcatggcttcccttgcagcatccactgctgctgcttcccttggcatgtcagaaatgcttggaaaccccatcaacctcagtggtgccacaaggccagctccatctgcctctagccctgcctccttcaagactgtggctcttttctccaaaaagaacgctgcacctccaaaaaaagctgcagctgctgctcctgccaatgatgagcttgccaagtggtatggtcctgacagaaggatcttcttgcctgngggtctcttggaccgatctgagatcccagagtac

SEQ ID NO: 13616 - DNA, 316 bp, Glycine max
  Clone ID: LIB3040-041-Q1-E1-G8
gaccaccatgcggtattttacatgttcacaacgttagcattaaaaccggtgtgatctggataagaccgccatcaatcagtcccaacgtttgccaacaccaccaacaggtcttcactccatgatccggtatggtgagattcattaagagtatagatgacgagatttagaccgtcacggatttttatgtcttttgcagacttcttggcataaattttggatggagtcagacgtgacacaatattaagggtgtctggttgacctgtttttttaattttaatttcaatagaaatacggcctcctgataagattgtgtttg

SEQ ID NO: 13617 - DNA, 382 bp, Glycine max
  Clone ID: LIB3040-041-Q1-E1-H1
gatatccagtacttgcttccacttctgattcagaaactcttaggcattccacattctcaaccccgaaccctaagagcagagcgaaagtgacagccagcttcgcgaccgtcacaggactcggtggcgcattattgtcatccacctcatctcgtctcacctcagggtttgtgaaatccccagtgattgctacgaatcccttgatgcaagctgtggcaatgggaaatgggacgagtagatgccttgagaagaattggttgcgggcagattacagtgtgattgggtttgggttgactggttggctagcaccctcaagcataccggctatcaacggtaatcgtctgactggcctcttctttgagagcattggtgctgaacttgctca

SEQ ID NO: 13618 - DNA, 370 bp, Glycine max
  Clone ID: LIB3040-041-Q1-E1-H10
gatgtcatagtattatcattcattctcatctttctctcttctctctccacccaaaccctaactcccgaccctgttcccctctcgtatccgtcatgaaaggaggaaagtccaagaccgaatctaagagagccgatcccaaacttgctgtgaataagaagggagccgccaccaaggctaggaaacccgccggcaaggggaaggcagcgaaagaccctaacaagccaaagaggcctccaagtgctttcttcgttttcatggaggagttcaggaaggtattcaacaaagaacatcctgaaaacaaagcagtgtctgctgtgggcaaagctgctggagcaaaatggaagaccatgtctgatgctgaaaaagcacc

SEQ ID NO: 13619 - DNA, 350 bp, Glycine max; identical to SEQ ID NO: 13522
  Clone ID: LIB3040-041-Q1-E1-H2

SEQ ID NO: 13620 - DNA, 343 bp, Glycine max
  Clone ID: LIB3040-041-Q1-E1-H3
gacgggaaaggggaatctaacaaacgcaatttacaaatggcatcatgctgttcactcttgcgttcacacttagtcgctggcttcttcttccattttcgcttctcgtagcgttttcggaacagttatggcttccagtgccggatccaactacgtcgctctccgaatcgacaacttcggtgcctccggtaaccggaaaatctgggagatccggcaatggtctccgattcgcacgaagctccgtcgcgtttccggtcttcgtcaccgatcgaatactccgtttaactccaccggtgtgagagcatacgttgctactctggaggaagcacgaagcggagcaactcag

SEQ ID NO: 13621 - DNA, 379 bp, Glycine max
  Clone ID: LIB3040-041-Q1-E1-H5
ggtctcgtggaagtgtaagcaagcaaaaccctagcggcgcctgctttctttgttcgtgttttgcatcaggatggagtctcaggtgaagcacgcacttgttgtcaaagttatgggtcgtactggatccagaggacaagtgacccaggttagagtgaagtttttggatgatcagaaccgtcacatcatgaggaatgtgaaaggacctgtgagagaaggagacattctcaccctactcgagtctgaaagggaagcaagaagattgcgctagatggtctcttttttttggcttgcctccaaattcgaacaaaagcaatatttttcttgatatttatggtagttagtccgtgctaaaggggttatagcaccctatcttattgtt

SEQ ID NO: 13622 - DNA, 374 bp, Glycine max
  Clone ID: LIB3040-041-Q1-E1-H6
tgcggctcccatccccacgacttcacgagtactcgccgtcatacgactatccaaggggaatcattccaattaccatgccactttcaagagactgcgaaagactaaagggtatgttgagttccatgagtcgccgccggacaatttcgatcccggacagccgtataacgacccagtggctactcagcagattacggagcctatcgttctggacaagctaattcaaatcgagattgccaggatcattagggagaaactccaatagtgctaccgcatctatggcgtcacacacctccactaatgccgccatctcgtcaaccactatcacaagtccagcctcgtcatcagatgaggcaacgactgtcttcatccttctc

SEQ ID NO: 13623 - DNA, 71 bp, Glycine max
  unsure (1)..(71): unsure at all n locations
  Clone ID: LIB3040-041-Q1-E1-H7
nggacgacacacatccccagaaattcatcatgagtcccctgtcttcgacgtatcaccaaagacctgatttc

SEQ ID NO: 13624 - DNA, 309 bp, Glycine max
  Clone ID: LIB3040-041-Q1-E1-H9
gggtcccactaaccttgaccaagatgataagcgcgtggacttcaacataatttcaggtacatccatggcatgccctcacgcaagcggtatatcagctttgatcaagtcatttcatccagattggagcccagctgcaattcggtctgcgcttatgaccacagcttatacaacttacaacaacggtaaaaaattgctagacagtgccacaaatggcccgtcaacgccgtttgaggtccgtgctggacatgtgaaccctgttgctgcgcttaatccaagtcttgtctatgatttagcactggatgattatct

SEQ ID NO: 13625 - DNA, 315 bp, Glycine max
  Clone ID: LIB3040-042-Q1-E1-A1
gtgcttctcaagcctcaacagccatatgtctgagcatggatcaagcctcatgctcctcttccaacaccattctactcggaggccgaaccattgatcgccacaatcccattatcaatgactcaagaaggagcacttccaaatccctcactgccccatgttcctcttctcagtcccccatcaaccccaagccttaccatgagctccacaaggccgagaaaaactcttcttcaaaaaatgcaacaaagggtcatgataatcagaagaagagaagtacagcagaaagactcactgaacatgtcaccaacacttctaaac

SEQ ID NO: 13626 - DNA, 402 bp, Glycine max
  Clone ID: LIB3040-042-Q1-E1-A10
gacttcacaactcaaactgcttcattgcataattgcagataagatcaacccttctaccttcagaatcatgggtgtgaaactgcattatatacatccttgccccacagatacatgacctatatgataaagaagtagaaggaagacttgaattttctacgaaagtgatctcagattcgcgggaagatggcatcacgtcatgctaatgtgacatcagttgtttacaacagtggcaaccgtgtttctcaatcgaaatttgcaagctcttccttcgtgtctgggttcgatgttgttggtcgtgcttcaagtgcttggaagaaagaacttgtcccatcttccatttccttggtgcctagagccaccctaacatttgatcccccaactaccaattcagacattaccaag

SEQ ID NO: 13627 - DNA, 376 bp, Glycine max
  Clone ID: LIB3040-042-Q1-E1-A11
ggaaaattgattaggtcacgcgcttcttccggaattagtcggtgtaatttacatttatccattttttgaaccttcccttcccaccccagaactttcaaatttcaacaaaatcgcagacatggcttctgcggtgcccgcgacggggcgagagttgtcgaatcctccattggacggcatcaccaatcttcgattctccaatcacagcgatcatctccttgtgtcctcatgggacaagagcgtgaggttgtatgatgccagtgccaatgtcttgagaggagagtttatgcacgctggtcccgtcctcgattgctgcttccacgatgattcctccggcttcagtgtcgccgccgacaacactgttagacggcttgtcctc

SEQ ID NO: 13628 - DNA, 373 bp, Glycine max
  Clone ID: LIB3040-042-Q1-E1-A12
acctgatgcagatgcagcccatgatggcagccgagtaccccaacaacgtcaccactgatcacattcagcagtatctggatgagaacaagtccttagttctgaagattgttgaaagccagaattctggcaagctgaacgagtgtgccgagaaccaagcaaggcttcagagaaatctcatgtacttagctgcaatagctgattctcagccccaaccacccaccatgtctggtcagtaccctccgagtgggatgatgcagcagggagcacagtacatgcaggctcaacaacaggcacagcagatgacaccacaacaactaatggcagcacgctcatctcttttgtacgcacagcagccgtactcagcacttcaaca

SEQ ID NO: 13629 - DNA, 262 bp, Glycine max
  Clone ID: LIB3040-042-Q1-E1-A2
gcttttacgccggggttttggttgctcacaccgtgttctctgccgcacgagataactagggtttagaatctcgcagttacagaaaacatggcgactgtggtgccaagctccgaagaagacgctgcactctccgtcgttcgattcgcctctgaacttgcctgggccgatgccggtcctgaagttgctgagccccaagttagcagactctgcacggaggctgaagagttcattgttatcggaaagtggttggagttagcatcag

SEQ ID NO: 13630 - DNA, 242 bp, Glycine max
  Clone ID: LIB3040-042-Q1-E1-A4
gagggttttgtgctgttgtcgctgctcatcctccataacctccgagctctacaccgaggagcgaagccatggggaagacacatggaatgggagctgctcgcaagctcaagtctcaccgcacgacggcggatgtgggctgagaagtcatacaggaagtgccatcgtgggaaggacggcgggaaagggtttgccggttcatcccatgccaagggaattgtggttgaaaagataggtattgaagc

SEQ ID NO: 13631 - DNA, 198 bp, Glycine max
  Clone ID: LIB3040-042-Q1-E1-A6
gagtcagagatatagaaatggcttcgtggtgcagtgtgtcgaagcttccaggttccggcgatggaacgcagcgcactgcgcaaccgtgcgtcaggtggccgccagagtggggtgtttgtccgtggccggcacctccttctggcgttcctcttcgtcaccgaagcactctttgtcattcacatgcttgagcagttcgtc

SEQ ID NO: 13632 - DNA, 78 bp, Glycine max
  Clone ID: LIB3040-042-Q1-E1-A7
tgaagactgtctctaacgaggaagcgtctgccatcaaatctgctgggaaagcgggggatcgaggtatggtgtcggatt

SEQ ID NO: 13633 - DNA, 242 bp, Glycine max
  Clone ID: LIB3040-042-Q1-E1-A8
cgggtcaaatacagactcacaacacactttgtacactccgtccctcttccctgtctctcaagatcgcttccctgacgcaaactttcatgtccctcgcctctcttcccaatctagtagccgcgtagaggatgtcgcaggcaagttcagtttggctcgcagtggaggagggaagaggttgcccagccgttacattgcagcccagaggatgtcggtttcgatttagatgtgtggcaaaaccagag

SEQ ID NO: 13634 - DNA, 373 bp, Glycine max
  Clone ID: LIB3040-042-Q1-E1-A9
gcgctgtgagtgctgagaacgttacttcattcaaaagcagcaacagcaggttattctttgtttcttttcgttcttccacagccggtagattcggctttgtccatggccaccgaaccaaaagcagccactgaggaggtcaagattgatctcttcgaagacgatgacgaaattgtggagtttgtgatctccgacaagtgggatgacaaggaggaagggaaagaagtgactcaacagtgggaggatgattgggatgacgatgatgttattgatgatgtctcccctcagcagttaagggagtagttgagcagcaccaccaagaagtaatcacctgctagttattgttgcttgatatggcatgcgttattaattaggt

SEQ ID NO: 13635 - DNA, 363 bp, Glycine max
  Clone ID: LIB3040-042-Q1-E1-B1
ggagaagagaagagtgggggaggagagatgagtaagtggcctttcacaatatctcagtggcaggaactggaacatcaagctttaatttacaaatacatggtggctggtcttcctgtgcctcctgatctagtcattcccattcagaacagcttccactccatttcccaaaccttcttgcaccatccctctaccaccatgagttattgttccttctatgggaagaaggtggacccggagccaggacgatgcacgaggactgatgggaaaaagtggaagtgctccaaggaaggctacccagactccaagtactgtgagcgacacgatgcaccgtggccgcaaacgttaaagaaaacctgtgggatc

SEQ ID NO: 13636 - DNA, 385 bp, Glycine max
  unsure (1)..(385): unsure at all n locations
  Clone ID: LIB3040-042-Q1-E1-B10
tgggaaaatcaatggcatcatccttgggttttgagttcctgacgaataagccttacagtcctccatcctgggcatcccatctccaccctttaccttcccacttcttctctcttgcccatcttcccactccaattcacagatggaaccttcccaatctgcccaccaataccgagctgtggatcaagcgagacgacctttccggaatgcagctgagtggtaacaaagtgaggaaattggagttcctgatggccgatgccattgcgcaaggcgccgactctatcatcacaatcggaggcattcagagcaaccactgtcgcgccaccgccgttgccgccaagtatttanaccttgactgttttctcatcctccgcacttctgacctcct

SEQ ID NO: 13637 - DNA, 306 bp, Glycine max
  Clone ID: LIB3040-042-Q1-E1-B11
ggtgttggtggtatgcctattgggggaggtggacctggtgttggtgcccctggtggcggaagaggatatggtggtgggcctcgtgtttaagaactattttggaagacataaagtagagttattttggagtacataaagtacatgcttatttgaatacaaaatagtggaagagtgtgcaccttggattttacttaaataataatgattttttttaaaaaaagtattccagaaaaaattaagcaattgcacaaagagcataaacgatcaactctgacacaatgactgacaacaaaaaaaaaacgggcc

SEQ ID NO: 13638 - DNA, 306 bp, Glycine max
  Clone ID: LIB3040-042-Q1-E1-B2
ggctccgccatttttcgtagctgctgttcttgcgcgtgaacaagcctcaggtaagccaaaaccatggttaagcataacaatgttatcccaaacggacacttccgtaagcactggcagaactatgtgaagacttggttcaatcagccagcacggaagacaaggagacgattggctcgtcagaagaaagctgtgaagatattccccagacctacggctggacctctcaggcccattgtacatggtcaaactttgaaatacaacatgaaagtgagacgtggaaggggattttctcttgaagaactcaag

SEQ ID NO: 13639 - DNA, 312 bp, Glycine max
  Clone ID: LIB3040-042-Q1-E1-B3
ggttttcactcggatcgcgcattcacaaataaggttgaagaggtcactgccggaagaagggagcaacaccatctttcattttccggcgatctcttgtttcttccatcatcaccgttttccggcgatccctaatcctcgcaaacagaaatgacgacatcaaggcgccttgcggacaggaacgtggagaagtttgagaagaacatcacaaaaagaggatttgtgccagacactaccactaagaacggaaaagactaccctgttggcccaatgctgctcggtttcttcgtcgttgttgtcattcgatcatctctc

SEQ ID NO: 13640 - DNA, 239 bp, Glycine max
  Clone ID: LIB3040-042-Q1-E1-B5
gatgatcacttattggatagttccttgttccactgaacactcaaccctcaagcagcaatcagggatttagtatttggagaaacaatgatcagtgatatggagattcctgttgcctttgcgcttgtccacaggaacgctcatcactcggcaattggctatcgtatcgcttagtatgaaacgcgctacaccctacatagtacgcattacgcatgccgtgggtcatgaatcctgctctcgtc

SEQ ID NO: 13641 - DNA, 322 bp, Glycine max
  unsure (1)..(322): unsure at all n locations
  Clone ID: LIB3040-042-Q1-E1-B6
ggatgggtattgggccgcgtttggtagagaagagaagaacttcttgtatggttattataaataataaattggcgcggttgttgttcccgccaagtgtgttgcatcgtcggcgggcgcaatggagcaagagaattacaaagtcaaggcagtgaatttgctgcgaagcagaatctgtgatcccaaattcatcttcatcaatgaatctccagaaagcaaccacagcaagctgaagttcatgagtatcgagttcggtgacngaggcgtgcaggaggtctagtcgtcttctcggtccccgcgaggcgggcgagaatgcggttttgga

SEQ ID NO: 13642 - DNA, 100 bp, Glycine max
  Clone ID: LIB3040-042-Q1-E1-B7
gatttcgcttcgtttcctaacctaaaccctactcattctccatacctcaacgagggaggttagggagacggcaacactttgctgtccgccttgaccgagc

SEQ ID NO: 13643 - DNA, 379 bp, Glycine max
  Clone ID: LIB3040-042-Q1-E1-B9
gacgctcaattcattttcttctcctctctctctctcctagggttagggttttctctcttcatcactctctgtgtcgctccgtttcaatggctcagcaagacgctcaaaacggcgggtcggagaatgccgctgctgctgctacggtgtcgtttgtcgctgtgaagccgcagctcctcgtcgaagctcccaaagccaacgacgccattctgttcttcaaggctgcgtttggcgctgaggaagttggccgtacgctcaaccctaagcgcaaagctgagcacgagctccctctcatactctccgcagaactcaaaatcgctggctccaccattctcgtcgccgacctcgttgatgacacttcttcgccagcgaaaacgggggg

SEQ ID NO: 13644 - DNA, 229 bp, Glycine max
  Clone ID: LIB3040-042-Q1-E1-C1
gacaccatccactactcttcttagttccagcacaacaagctcttcagttctcgcacactttcttttctttcagcaaagatgtcaccagatttcacacgtttgttctgcccgggactcatggagtcccctaggatgacgttgcaaggcaccctcggcgtccttctcgtcagccgcatgttcacgctgctcttcactcctggtgggcgtccttgggcctgggcccggccca

SEQ ID NO: 13645 - DNA, 398 bp, Glycine max
  Clone ID: LIB3040-042-Q1-E1-C11
gggggttcctgaggtttgttgtcgtttgagaggattcgatcggcgaatcttgttttcgacctcaaattgaattcaacagtgaattgctggaaggaaaagggaacgaaccaaaaaatgggagacacaaaccacgcgtccaccgtcgatgacgatttgctcctcaaaaacttcttcgccgaagttagcgaagttgaaagggataacgaagtgcttaggattctctcttgttttaagttgaatccttttgagtatctaaacttatcatttgattcatcaattgatgatgtgaaaaagcagtaccgcaagttatcattgatggttcaccctgacaaatgtaagcatccgcaagcaaaggaggcttttggagcattagcgaaagctcaacagttattactgga

SEQ ID NO: 13646 - DNA, 380 bp, Glycine max
  Clone ID: LIB3040-042-Q1-E1-C12
gattattatcatagtagatattcattccccttatctttctctcttctctctccccgcccaaaccctaactccctaccctattccgctttctctcatccatcatgaaaggaggaaagtccaagaccgaatctaagagagccgatgccaaacttgctgtgaataagaagggcaccgccaccaagactaggaaacccgccggaaaggggaaggcagcgaaagatcctaacaagccagagaggcctccaagtgctttcttcgttttcatggaggaattcaggaaggtgttcaacaaggaacatcccgacaacaaagcagtgtctgctgtgggcaaagctgctggagcaaaatggaagacgatgtctgatgctgaaaaagcacct

SEQ ID NO: 13647 - DNA, 116 bp, Glycine max
  Clone ID: LIB3040-042-Q1-E1-C2
gaaaatcatctcttcaatggcttccctcatgagcaccatcctcatgcaaaggtcttcgtctacttcacatgctgctggcatgtttttccctacatgagaagtcaccactattgaat

SEQ ID NO: 13648 - DNA, 304 bp, Glycine max
  Clone ID: LIB3040-042-Q1-E1-C3
gacagcaaaacaattttcaaactcaattaccattccataacctaaatctcctctttgtttccgagtcagagagcaatggcacgtaccaagcaaaccgctcgcaagtccaccggcggaaaggcgccgaggaagcaattggcgactaaagccgctcgcaagtcagctccgggcaccggcggagtgaagaagccccaccgcttcaggcccggaacggtggctctgagggagatcagaaagtaccagaagagcactgaacttctgatccgaaaactcccagtccagaggctcgtcagggaaatcgctc

SEQ ID NO: 13649 - DNA, 293 bp, Glycine max
  Clone ID: LIB3040-042-Q1-E1-C4
ggatccccccctctctctctctcatcactacctctgcatttttctctcgctctctgcggtgcagcgggctcgccatttcccttcccaagatagtagaagatggcagacgctgaggatggtggagctcgtgtttgtgagagtggaagaggagtggttgaggcgggttgtgctggacgaggtggccgacgtgctgtgtttcccagcagtgtaggtcgtcgtcgtcacactggtgtgatggttggcatgggccagaaggagtcaggggttggtgaggagggacagtgcgggagggg

SEQ ID NO: 13650 - DNA, 122 bp, Glycine max
  Clone ID: LIB3040-042-Q1-E1-C6
aggcgtcagacagctacgacaaggtgacgctacgagaaaaccagcttctgggactgcgcagggcttgggcagagtcgacaagtgccactttcctcaatggctcatcatggtgatctctgcaa

SEQ ID NO: 13651 - DNA, 298 bp, Glycine max
  Clone ID: LIB3040-042-Q1-E1-C8
cgtcgtggctagctgcattagatccctgtgatggtatccatgttccaacctggttccagaaaggtttacttccgacaccatcagcgtcactccccctcatacttgttggacctggaacaggatgtgcaccttttcgtggatttatagaggaaagaccagtgcagagtagaagtaattccactgctccaattatttttttctttggttgttgggatgaagacggtgactttctgtatcgtgaggtttggttgagtcagtcacagaacaaaggggtgctttgaggagcaaacggtggcgg

SEQ ID NO: 13652 - DNA, 113 bp, Glycine max
  Clone ID: LIB3040-042-Q1-E1-D1
atgatgagttgacaagttcctttatttttaatgaatcaaagatatttttcaattcttaaatgaattttatttgtccccccaaaattttccattaaccatactagggaatccta

SEQ ID NO: 13653 - DNA, 378 bp, Glycine max
  Clone ID: LIB3040-042-Q1-E1-D10
ggcgcatcccatacagactctgcgcgctgtggtgcctgtgtgtgtgtgcgagagatagagacatcgatccctgacgcttccactctttctttggcggcggcgtcgttttcccaacgcattacccatttcatcactcagtctcaagttcggggcacttcaatctgattcactatggccaatggtccagcagcgttttctgagattgggaaaagggcaaaagaccttttaaacaaggattacaacctcgatcaacagtttagcctctcaattccaaactccactggattggggcttatagctacacgattgaagaatgatcaactttttgttggtgacataagtacactctacaagagtggaaatactacagtggatgtg

SEQ ID NO: 13654 - DNA, 392 bp, Glycine max
  Clone ID: LIB3040-042-Q1-E1-D12
ggcacccacagaggaggaagctttgagagagagagagggaggagggagagtgttgacgctccatcaagatgggtatttctagggattccatgcacaagaggcgtgccactggtggcaagaagaaggcatggagaaagaagagaaagtatgagcttgggcgtcaggccgcaaacaccaagttatcaagcaacaaaactatccggaggattcgtgttcgaggtggcaatgttaaatggagggcattgaggttggataccggcaattactcatggggtagtgaagcagttactcgcaagactcgtattctagatgttgtttacaatgcctcaaacaatgagcttgtgcgaactcagaccctggtcaagaatgctattgttcatgttgatgctgct

SEQ ID NO: 13655 - DNA, 240 bp, Glycine max
  Clone ID: LIB3040-042-Q1-E1-D2
ggctgcttccaggaaaagactacaacactgacttgactccttcatgcatgctccacgcggctcggggggatatagctcagttggtagagctccgctcttgcaattgggtcgttgcgattacaggttggatgtctaagtgtccaggcagtgatgatgatatcgtgtacctgaaccggtggctcactttttctaagtaatgggaaagacgaccgaaacatgccactgaaatactctactgag

SEQ ID NO: 13656 - DNA, 244 bp, Glycine max
  Clone ID: LIB3040-042-Q1-E1-D3
ggaaaacagagagtgatttcagtgagtgatcggtgttcacttgatctcatcataatcgtcagcgtcaggtgaagaagatgccgatgagaaacatcgccgtcggaaggcctgaagaggcgactcagcccgagacgttgaaggcggctttggctcggttcatctcgggcttgagcggcgggtgcgccggctcaggctccggcatcgcctagaacaagctcagcgacaacggcgctgccacccctgc

SEQ ID NO: 13657 - DNA, 278 bp, Glycine max
  Clone ID: LIB3040-042-Q1-E1-D4
gaatggtgaagaaggaggagttcttgagagaaaacggcgacaacgaaaaccgttccgtctcgcggagtgacttccctcccaacttcatcttcggagttgccacttctgcatatcagatggaaggtgcttgtaaggacggtgggagaggtccgagcagatgggatgcctttacacacgcggaaggaaaaattcttgacaaaagcaatggtgatgttgcagttaatcattatcatcggtacatggaagatattgatcgtatagccaagttgggatttgat

SEQ ID NO: 13658 - DNA, 274 bp, Glycine max
  Clone ID: LIB3040-042-Q1-E1-D6
gacactcactcgttcactcttcttcgtctcaaacctcttcgttccttcgattcagtccatgtcttccaaaatggccaaagacccagttcgcgttctcgtcactggagccgcagggcggattggagaggctcttgtccgtatgagtggtaggggagtggtgctgggtccggaggagccggtgatcctccacatgcttgacattcctccagcaggagagtcgttgaatggggttaaaatggaattggtggatgctgcaggggctcgtcgtagaggg

SEQ ID NO: 13659 - DNA, 242 bp, Glycine max
  Clone ID: LIB3040-042-Q1-E1-D8
gacaacatcatcatcaacaacaagcagatcaatctctgtctctctctcaaccataatagtcatgggtttgaaggaggattttgagcagtatgctgaggaggcaaagactttgccaccggctcagtcaagcgaagacttgcttatccgtgtaggagtgtacaaacaggccaccgttggacctgtcaacacgggccgtcctggaatgttcaacatgagcgacagagctaagtgggatgcatgga

SEQ ID NO: 13660 - DNA, 264 bp, Glycine max
  Clone ID: LIB3040-042-Q1-E1-E1
gacacaccgtttgttctattcttaactcaacttctgctacccactctcttcttcgaggtccaaccacgcttttctctacagtcatgggcaaggtcaagatcgggatcaacggatgtgggagaagtgggcgtttggttgccagagtggctcggcacagagacgatgtggcgcgcgttgccgttaacgaccctttcattaccaccgaggacatgacatacatgtttaaatacgacagtgttcaggggcactgggagcatcacgagg

SEQ ID NO: 13661 - DNA, 385 bp, Glycine max
  Clone ID: LIB3040-042-Q1-E1-E10
gatgaacgataacactgaactagctctcacgtttgtgcttgcacttgcacctctccaacgataacaacgacgagcacaagatccagccgaacatttttgtctataattggtggagttgttgctggaattttggggttcacaagcttgaaaggatttgtattttacttccttctcatgatggttacttcacttgggcttgtagccaaagccagattttcaatccactcctactttgactcctcgaatcgagttctacttgatggcttcctaggtggtctaatgtcattcgtgctgttctggacatttgcattcgacattgtacatatattttgacggaggatcgtgcacaaaatgtctctaaagaaggcaattgttggcttctgac

SEQ ID NO: 13662 - DNA, 354 bp, Glycine max
  Clone ID: LIB3040-042-Q1-E1-E12
gacacaccatccgttctagtctcaacttctgctcttccaactcctacaacgcttttctctgcactcatgggcaaggtcaagatcggaatcaacggatttggaagaattggccgtttggttgccagagtcgctctgcaaagagacgatgttgaactcgttgccgttaacgaccctttcattaccaccgattacatgacatacatgtttaaatacgacagtgttcacggacactggaagcatcacgatgtcaccgttaaggacgagaagacccttctcttcggtgacaaggcagtcactgtttttggacacagaaaccctgaagagatcccatgggggtcaactggagctgacatc

SEQ ID NO: 13663 - DNA, 243 bp, Glycine max
  Clone ID: LIB3040-042-Q1-E1-E3
gatccacatcctccacaacacaactccactcttagctgccattggtttttcttcttccagttcgcttcctttctaagcttttttcgattacccatttggagattctgtcctaatggctctggcggcggcgggagtttcctccgtgtccgggtgtgtctggcggggggagtgttggggatgggcggaggaaggcaagttgctcggtgtctctcagctttgggaatgtgaaacttggaagcagaa

SEQ ID NO: 13664 - DNA, 332 bp, Glycine max
  Clone ID: LIB3040-042-Q1-E1-E5
gagaacctctctcacacaatagcaaagaagggaagactaaaactaaaaccccactctctttttccgagtcttccagtgaaagaaaggcagcgatggaagaagacttcgacatccccggcggcgaggaaatggatctcggcgaagacgaggtcggcgaggagagggacatcggctctggcggcctcaagaagaagctcctcaaggaaggtcaaggctgggaaacccccgaagtcggtgacgaagtccaagttcattacacggggactttgctcgacgggaacaagttcgattcgagccgcgacagggaggtgcgcttcagcttcacgctcgga

SEQ ID NO: 13665 - DNA, 398 bp, Glycine max
  Clone ID: LIB3040-042-Q1-E1-E9
ggtcactcaccacttcaaaacactcataacacaaagcacaaagcaaagctcatccttgagttaaaaaatggcagcagcttcttccatggctctctcatccccatccttggctggcaaggccgtgaagctgggcccatcagccccagaagtgggaagggtgagcatgaggaagaccgtcaccaagcaggtctcctcaggaagcccatggtacggcccagaccgagtcaagtacttgggcccattctctggcgagcccccgtcctacctaaccggtgagttcccatgcgactacggctgggacactgctgggctttccgcagacccagaaaccttcgccaagaaccgtgaactcgaagtgatccactccaggtgggccatgctcggagccttgggctgcg

SEQ ID NO: 13666 - DNA, 368 bp, Glycine max
  Clone ID: LIB3040-042-Q1-E1-F11
gtcatatttcacttacaaaacaccctctcctaccttctctcttatcacttccaaccatgactgcaactgatattgctcgaacagcggtcggcatcataggaaacatcatctcgggcgctttgttcctgtccccagcgcccacttttgtcgaaatatgcaagaagggatcagtggagcagtactcggcagcaccatacctagcaacgctggtgaactgcatggtttggaccctgtacggtctacccatggtgcacccaaatagcattttggtggtaaccattaacggctctgggtgcatcattgagcttatctttgtgacactcttcttgatctactctggtgggaaaaagaggctcaaggtcctcctg

SEQ ID NO: 13667 - DNA, 377 bp, Glycine max
  unsure (1)..(377): unsure at all n locations
  Clone ID: LIB3040-042-Q1-E1-F12
gaaattttggaggtttcagtttaactccttccgatgagagccatggaggattggaatgatgaacagtgtgatgacaccctcaccatgaccaccgtttctcagcactttttcggcgatgattctgaaacgccaagcttctccatctccatcatcgagaacatgaaggaagactatggcctattcgtgtggccctgcagcgtagttctcgccgagtacatttggcaacacaagcatcgattttcaggagccaccgttgttgagctaggtgctggaacttccatgcctggcttggttgcagcaaaactcggtgcccgtgtcactcttactgatgactccaccagattagaggtgcttgacaacatgagtanggtttgtga

SEQ ID NO: 13668 - DNA, 232 bp, Glycine max
  Clone ID: LIB3040-042-Q1-E1-F2
ggatccaaattcaagttcgcaccaaattttcctcccaaaatgtcaggccgtggaaaaggtgggaagggtttgggaaagggaggagctaagaggcacagaaaggttcttcgggagaacagtcaacggagcacgaaacctgcgattcgtaggttagcgagaagaggtggcgtgaagaggatcagtggtttgatttacgaggaaaccagaggagttctgaagatagtcgtgggga

SEQ ID NO: 13669 - DNA, 141 bp, Glycine max
  Clone ID: LIB3040-042-Q1-E1-F4
gaggtttttagggtttacaccgagcagccacacctcccgcagcagccatggttctcaaaactgaactatgccgattcaatggtgccaagatctacccaggaaagggcatcagatttgttcggtggggggtctcaagttttc

SEQ ID NO: 13670 - DNA, 330 bp, Glycine max
  Clone ID: LIB3040-042-Q1-E1-F5
ggcccgaactccttcgacgaccgtcttccccaatcgcctgcgtctctctctgaattgacaagcttaaagacaaagtcttaaatggctggtccaaggattgcccatgctaccttgaaaggtccgagtgtggttaaggagatgataagtggaataacacttggcttagctgctggtagcgtgtggaagatgcaccactggaatgaacagaggaaaaccaggaccttctacgatttactggaaaagggtgagatcagtgttgttgcagaggaacagtgaaagtgttcgtgttttgttgcctatgctctccagttagaggctttttttcccatg

SEQ ID NO: 13671 - DNA, 266 bp, Glycine max
  Clone ID: LIB3040-042-Q1-E1-F6
ggcgtacacagcctcaacaaccctaacgcgtgcagagcagagagagactcagccatggggcgaagacccgcgaggtgttataggcggattaagaacagaccataggccaagtcacggttttgccgtggtgttcctgatcccaagatcaggatttacgatgttggtatgaacaacaagggtgttgatgactttcctttctgtgtccatctggttagttgggagaacgaaaacgtttctagtgaggccctggaagctgctcgtattgc

SEQ ID NO: 13672 - DNA, 99 bp, Glycine max
  Clone ID: LIB3040-042-Q1-E1-F7
gacataaagaggtacatgcattctaaagtgtgcacatcactgagagaggcaaacatgtggtcaagaggatcgaagtttaagtagccgtgtatgaaaagt

SEQ ID NO: 13673 - DNA, 410 bp, Glycine max
  Clone ID: LIB3040-042-Q1-E1-F9
ggatagatacctaaatccctaattctcctctcctcgcactccaccacgacctccacggcttctccacacctcgcaccctcgcactcgcagtctctctctctcatgctctcgccaccacaaaaatggtgcttccttgaaacttggtgaaacctagtttcatttttctaccattcttatattgattttgtgttggaagcagctcgaattttgtgtcttgatagagtagctatagtatccgattatgagagtaaaagtggtgactattctaatccatggagactttgcaccgtgacccaagtggaggaattgaaaatcttgatctgcgtgtttccaatttgggccaccaggatcatttttgctgcagtctatgcccagatgtcaacattgtttatggagcaaagaacaatgat

SEQ ID NO: 13674 - DNA, 342 bp, Glycine max
  Clone ID: LIB3040-042-Q1-E1-G1
ggacgaaattctccactgagagacatagaaaaccgagaaaaagaaaaaaagacaatatgtatgtggtgaagagagatgggaggcaagagacggtgcattttgataaaatcaccgcgcgtctcaagaaacttagttacggtttaagcaccgaacactgtgaccctgttctggtgtctcagaaagtgtgcgctggcgtctacaaaggcgtcaccactagccagctcgatgagttggcggcggaaaccgccgcggctatgaccgccaaccaccctgactatgcttctttggctgcgaggattgccgtttcaaatctgcacaagaatacgaggaagtcattttcgg

SEQ ID NO: 13675 - DNA, 384 bp, Glycine max
  unsure (1)..(384): unsure at all n locations
  Clone ID: LIB3040-042-Q1-E1-G10
gaccaagttagtttaatttgagtgtatattcagagagaaaaacgaagaaaacatcgtgaagcatgtctggaagaggaaagggagggaagggtctaggaaagggaggagcgaaacggcaccgtaaggttctgagggataacattcagggaatcacgaagcccgtgattcggcgtctggcgcgacgtggtggcgtgaagcgtatcagtggtctcatctatgaagaaactcgcggtgttctcaagatcttcctcgagaacgtcattcgcgacgctgtcacctatactgagcacgctcgccgcaagaccgtcactgctatggacgttgtttacgctctcaagaggcanggcatgaccctctatggtttcggtggttagagatttgggg

SEQ ID NO: 13676 - DNA, 381 bp, Glycine max
  Clone ID: LIB3040-042-Q1-E1-G11
ggttgaaaaggttaatgtttttgttggaggggttattaaggagcatagggtgaatagggagaagggtgactgtgtgaaggatgaaggagctgacgattttgttgatgttttgcttgatttggagaatgaaaacaggctcagtgaagctgacatgattgctgttctttgggaaatgatattcacgggaactgacacggtatcaattctgctacagtggattctggctcgcatggttctccaccctgaaatccaagcaaatgcacagcgcgaaatacacttcgtttgcggatcctccaggctcgtatccgaagcagacattccgaacctgcgctaccttcagtgcatagtaaaagaaaccctccgttttgcaccaccaagccc

SEQ ID NO: 13677 - DNA, 281 bp, Glycine max
  Clone ID: LIB3040-042-Q1-E1-G12
gaaaaccaaacctctcactcgccgtcgtagggtttctcctttcgtttagcaacaacaacaatggttgcagccaagaaaaccaagaagacccatgagagcatcaacaacaggctcgctcttgtcatgaagagtggaaaattcaccctcggttacaagacggttctcaaatcacttacgagctccaatgggaaattgattatcattgctaacaactgcccccctttgaggaaatcagagattgaatactatgctatgttggccaacgttggagttcatcatta

SEQ ID NO: 13678 - DNA, 272 bp, Glycine max
  Clone ID: LIB3040-042-Q1-E1-G2
gaggtttttagggtttacaccgagcagccacacctcccgcagcagccatggttctcaaaactgaactatgccgattcagtggtgccaagatctacccaggaaagggcatcagatttgttcgtggtgattctcaggttttcctgtttgcaaactcaaaatgtaagaggtatttccacaatcgcctgaagccttcaaagctcacctggactgcaatgtacagaaagcaacacaaaaaggacattgctcaagaagctgtgaggaacaggagacgt

SEQ ID NO: 13679 - DNA, 245 bp, Glycine max
  Clone ID: LIB3040-042-Q1-E1-G5
gaacgaaacagagagtgatttcactgagtgatcggtgtgcacttgatcgcaacagaatcgtcagcgtcaattgaagaagatgccgatcagagagagcgccgtcggaacgcctcaagcagcgaggcatcccgacacgttcagggccgcggtggctgagttcatcgcaaccttcaacgtcgtgttcgccggcgcatgctccggtatcgcctacaacagtctcaccgagaagggcgctgccacccctg

SEQ ID NO: 13680 - DNA, 265 bp, Glycine max
  Clone ID: LIB3040-042-Q1-E1-G6
ggatatacttttaaaataaccccaaactcaggagtacttgaggttaactgttatgatcctctcaaaatagaagtcccatcaagtggctcctcaaagggtaaagatgagaatgacaatagatctagtttcccaacagagtctgactgccaggctgcaattgtccattctcaaagacaaactgaagatccaatgcagaaagcaaggggactaaattttggtacgaatgaaagcagtaagatagattcgtcccctgtaatattaatga

SEQ ID NO: 13681 - DNA, 254 bp, Glycine max
  Clone ID: LIB3040-042-Q1-E1-G8
ggcgagattgaatcgtaagcagcggctaccctaatcctctcctcttcctctctactaatttcagctatggccgacgaagctgtggttgttccagatcccacccagatcgatgtcaagctctttaaccgctggagcttcgacgatattgagattactgacatttctctggctgattatatcggagtggcgacatccaagcacgccacgtatgtgcctcacaccgccggcaggtactcggtgaagcggttcatgaa

SEQ ID NO: 13682 - DNA, 57 bp, Glycine max; identical to SEQ ID NO: 12752
  Clone ID: LIB3040-042-Q1-E1-G9

SEQ ID NO: 13683 - DNA, 260 bp, Glycine max
  Clone ID: LIB3040-042-Q1-E1-H1
caccaaaggcagagaagaagccagcagagaagaagcctgtggaggagaagaaatcgacggtgggagacaaggctccggcggagaagaagccaaaggccggaaagaagcttccgaaggagggaggcgccggcggagaacgtaagaagaagaagagagagaggaagagcgtggagacatacaagatctacatcttcaaggttctgaagcaggttcaccctgacattggtatctcaagcaaggccatgggaatcatgaacagc

SEQ ID NO: 13684 - DNA, 374 bp, Glycine max
  Clone ID: LIB3040-042-Q1-E1-H10
gagagttgcatcgactgaaacccctaggaaaaaccccagtttctctctttcactagttccgttcaagttctaaccaagcactcacagtacttttgcttctctcgaagatgtctctacgagtgctgaaccctaacgccgaagtgctgaacaaatcggcggcacttcacatgaacatcaatgccgccaagggtttgcaagatgtcctcaaaaccaacctcggtcccaaaggaaccatcaaaatgctcgttggtggtgctggtgatatcaagcttaccaaagatggcaacactctcttgaaagagatgcaaatccaaaacccgacggcgattatgattgctagaacggctgtggcgcaggatgatgctagtggtgat

SEQ ID NO: 13685 - DNA, 364 bp, Glycine max
  Clone ID: LIB3040-042-Q1-E1-H11
gatgacattgagaacaggatacaacagatgaaagaggtgacaagccagacattatcacaccttgaagaggagaatgaatctactcttgctcagatggctgaactcaagaaaattttgtatgcgacgttcaatgactcgatcaatcttgacgaggattagtaactttcttcttgtcgatagatttctagttgttgttttcatgttaagatgaacgaatggacatttggcacttttgagtcagattgtctcatatgatctgattttatgatgtatgttaccttgcttgatcctctttcacaccctggtcacagtgactgctttctttggcttcatgtgtagaatacagcttcactttattgtgtcc

SEQ ID NO: 13686 - DNA, 331 bp, Glycine max
  Clone ID: LIB3040-042-Q1-E1-H2
gagggtttttgagtgcggtgcggcgatcctagcactctcttctgcagctttcgccgacagcttcattcaccatggctgcgcaaaccgagaaggcttttttgaaacaaccaaaagtgtttctcagctcgaagaaaactgggaagggaaagagacccggaaagggtgggaaccgcttttgggaatccattgggcttggatttaagactcccagggaagccatcgaaggaacctacattgacaagaagtgccccttcactggcaatgtttccatccgtggccgtagcttggctgggacatgtcacagtgcgaggagtgagaggactattagtgt

SEQ ID NO: 13687 - DNA, 334 bp, Glycine max
  Clone ID: LIB3040-042-Q1-E1-H3
gacactcaaaccaccccttttattgaaatccagagcttccattgtgctcactcatctcttaaaacgaaaccctcttcatcttgttccaactgtgacgagcatcatggcctcaagaacagtgttattgttggctatgtgtgtgcttccgggcgatgttgtgggcattcgcccagcagagaagcctttttgcgttaagggtcctgtctactgtgacccttgccgtgctggttttgagacctcagctaacacctacattgctggtgctgagattatgttgcaatgcgagagcagggttagcaacgaggttgtgtaggcgaagaaggggtacaccgac

SEQ ID NO: 13688 - DNA, 336 bp, Glycine max
  Clone ID: LIB3040-042-Q1-E1-H5
ggtccctctctcacgttaaacggcagagccactgcaacaagaagcagcagagttcgccgctgctccgcaaccttaccctatcaattttcgtccttgttttcgtaattgcagcgaagaatggggaagcgtaaggagcggattcagaacccggaacccttcgatccgtacggcgccgaccccgcgaaaacgaagaagcgctcgaaggcgccgaagcggcaccagcaggaggagcagttcatcgctcccaaactcagctccaagatcatgaagcaggcgctaatccagcagaaggaggaggagaatgaggatgcgccctagaacaacgccgcaaattta

SEQ ID NO: 13689 - DNA, 301 bp, Glycine max
  Clone ID: LIB3040-042-Q1-E1-H6
gattgcagtctcaaactgaaagtctcacaaattttgtagaaaactgtagttttatccccaggggcctcccccatctgaaagaaagagtatttgcctcgcatcatttttcttttcgttcgcgcgttctgtcgcgctctctgtcggtaggatgagagcaggacgagacccattaggtcttaggaatttgcccgatgagtactctaaggatggcagggaagtcctcgaagaccatacctcttcagccggttgcacggaaaaggaaagcggcggggaggagtggggaaggcgagtgtgggaaggt

SEQ ID NO: 13690 - DNA, 143 bp, Glycine max
  Clone ID: LIB3040-042-Q1-E1-H7
ccgggccgactcaaacgtccatccaggcgtcagacagcggcaaaaagacaatagaatgggaaatttcaacgtttacttattttggtggaaagtatagctgtagcagcggacgctcaccctcactgttgttaagagtggatcac

SEQ ID NO: 13691 - DNA, 54 bp, Glycine max
  Clone ID: LIB3040-042-Q1-E1-H9
gaagtccgtcctttcttttgttaaacaggctggctgtgacttcggctcccttac

SEQ ID NO: 13692 - DNA, 353 bp, Glycine max
  unsure (1)..(353): unsure at all n locations
  Clone ID: LIB3040-043-Q1-E1-A1
agtgatgattacctttcagttgttgattcagaaaccatagagggggaggaccaaggaactcaaatcactaaatttctcgaaggatacagggaaggaagaaccataaagaaaacatttagtggcccttcactaatgcgattcatccatcgatcctttgacattagaatggtgtacatcattgtttttgtggtggcagtactgatgctaattcagacattcagtaaaggaggtgatgaataccagagtgtacccaatcaagttcaaactgatcatgcaatcaagttctgtttctgaagctgaaaacaatgagtataaacctggtgacaaggaagactaanaattaacataataca

SEQ ID NO: 13693 - DNA, 373 bp, Glycine max
  Clone ID: LIB3040-043-Q1-E1-A10
gaggggtgatgaatattaagttagaataaaggatccgaacgtttggggggggttttgagaagggttttacattttattcgttctccggtgaaacagaaacagagagagagagtgagaaaaaacgaaacgatggagggaggagtctcctacgcgcgcatgcctcgtgtcaaaatccgcgagctgaaggacgactacgccaagttcgagctccgcgacaccgacgcgagtatagccaacgcgctgcggcgcgtgatgatcgcggaggtgccgacggtcgccatcgacctcgtggagatcgaggtcaactcgtcggtgctcaacgacgagttcatcgcgcacaagctcggcctcattcccctcacgagcgagcgcg

SEQ ID NO: 13694 - DNA, 298 bp, Glycine max
  Clone ID: LIB3040-043-Q1-E1-A11
gctaaacattaacaccttgggttggctgtagctcacagctcgctctcctcgccgtttctctcaacgctagtttcaagtctccttgtgacaatggtgagggttagtgtgttgaatgatgctctgaagagcatgtacaacgccgagaaacgggggaagcgccaagtcatgattaggccgtcctcgaaggtcataataaaattcctcttggtgatgcagaagcatgggtacattggtgagttcgagtatgttgatgaccacagggctgggaaaatcgtggttgaattgaatggcaggctga

SEQ ID NO: 13695 - DNA, 392 bp, Glycine max
  Clone ID: LIB3040-043-Q1-E1-A12
gactcaccacttcaaaacactcataacacaaagcacaaagcaaagctcatccttgagttaaaaaatggcagcagcttcttccatggctctctcatccccatccttggctggcaaggccgtgaagctgggcccatcagccccagaagtgggaagggtgagcatgaggaagaccgtcaccaagcaggtctcctcaggaagcccatggtacggcccagaccgagtcaagtacttgggcccattctctggcgagcccccgtcctacctaaccggtgagttcccaggcgactacggctgggacactgctgggctttccgcagacccagaaaccttcgccaagaaccgtgaactcgaagtgatccactccaggtgggccatgctcggagccttgggct

SEQ ID NO: 13696 - DNA, 334 bp, Glycine max
  Clone ID: LIB3040-043-Q1-E1-A2
ggaggctttcacgggtaccgcaagctccccaacaccaccgctgggttgaaactgtcagtgtcagacatgaacatgaagcagcacgtaacatcatcagatcacagtgcaatcgcatgagaggagaacgaatgcacggtgagggagcaagacaggttcatgccaatcgccaacgtgattacgatcatgcacaagattctccctccacacgcaaaaatctcggacgatgcagatgaaacaatccaagagtgcgtgtctgagtacatcagcttcatcacaggtgaggcgaacgagcgttgccagatggagcagcggaagaccataaccgcagaggacg

SEQ ID NO: 13697 - DNA, 365 bp, Glycine max
  Clone ID: LIB3040-043-Q1-E1-A4
gaacgtcatcaacattacacaaggcgcaaggtggtctctgtgatggcaacctctttctctccgacagcctctgtcggctccatcatcttccaaaaccctcccaaaggccttcttcttctctcccagcagcagcaacaacgctccttcgcctcttctgcaagctatgcaactctcaagctccctcgcgccttcgcactttctccaagacccctcctttccaaagggagaacaacactttttaaggctgctactatcgaagaaattgaagccgaaaaagccgcaattgaaaaagatgctaaaaccaggatgggtaggactattgataatgtccgtacaaatttcagttccataaggacagggagagc

SEQ ID NO: 13698 - DNA, 365 bp, Glycine max
  Clone ID: LIB3040-043-Q1-E1-A6
gagacctcaggtcaggcggggctacccgctgagtttaagcatatcaataagcggaggaaaaaaaaaaaaaaaaagaaaaaaaaaaagctggcggcccaaaagattcaagcttaaatacccctgcaagccaagtcaaaacccctccaaaatgtcaccgaaattcaattcaatgggcctccatttaaaacgtcctgactgggaaaaacctggccttaaccaacttaatcccctttcaacaaaaccccctttccccaactggggtaataacgaaaaagcccccaaccattggccttcccaacaattgcacaacctgaatggccaatgggaagcaccctgtaaccgggcaataaaccccgccggttttg

SEQ ID NO: 13699 - DNA, 354 bp, Glycine max
  Clone ID: LIB3040-043-Q1-E1-A7
tacagctgaggtaaggcgacacaaggggatcgatagcggcggttcaagcataatgggttccgcggtgaggttggcttcaaggtccttcttcgctaatcgttctagaagcttcgtcaagagctcaacgacgccgtttgtcttctcttcgtcttccgcatcatgcatctctcgtgcttcgagggttctgtcggttgtgataagcgttgagtcgttgatgcctcttcacagtgctattgctaatgctatgctcacctccaatatcgccttcgattccacctgctggagctcgctttctcgaggacttaaaccaacattgtgacaggcctgctggatccattcaagatgaaagaccaa

SEQ ID NO: 13700 - DNA, 398 bp, Glycine max
  unsure (1)..(398): unsure at all n locations
  Clone ID: LIB3040-043-Q1-E1-A8
ggtgtgaaattgttgagtctcttgtcttagtctaataaacaacacggacgcagagccttcgatccagaaaccatgactaagagaacgaagaaggcaggcattgtcggaaaatatggtacccgatatggtgctagtttgcggaagcagattaagaagatggaagttagtcagcatagcaaattcttttgtgaattttgtgggaagtatgctgtgaagaggaaggctgtgggaatatggggatgcaaggattgtggtaaagtgaaagctggcggtgcctacactttgaatactgcaagtgctgtcactgtgcgcagcaccatccggaggttgagggaacanaccgagggttgagctttttggttgatgttagattttgagcaaattaactggagaaatga

SEQ ID NO: 13701 - DNA, 381 bp, Glycine max
  Clone ID: LIB3040-043-Q1-E1-B10
ggacattgctaaaccttaaaccctaatttttacaatccgagggtgaagagtttgatgggtcagcgaaagaacgacaacaacatcaatcagtgctcctcaagcaaggaagacgctgacatgaataacaaccaccttcgctttgaagaggctgtcgacgagagttccaacctcgaccaatccatgtgcgacatcgaagaatccgatgataaaaccagcgccgactattacttcgattcctactctcattttggaattcacgaagagatgttgaaggacactgtgagaaccaagacatatcaaaatgttatttatcagaacaagtttttattcaagaataaagtagttcttgatgttggtgctgggactgggattttatcacta

SEQ ID NO: 13702 - DNA, 371 bp, Glycine max
  unsure (1)..(371): unsure at all n locations
  Clone ID: LIB3040-043-Q1-E1-B11
ggtctctcttgaggttgcagacttagaaagagagagagagagagaatgggtctcatctcaatgcaatttaggttctgaaaaccaaagcttttcataggaaaagttgtgctaagatgccagggaaacctgacactgatgattggcgtgtagagcgtggggagcagattcagtttcagtcttccatttactctcatcatcagccttggtggcgcggagtgggggaaaatgcctccaaatcatcttcagatgatcagttaaatggttcaaccgtgaatggtatcacgcggtctgagaccaatgataagtcaggcggaggtgttgccaaagaataccanaacatcaaacatgccatgttgtcaaccccattttac

SEQ ID NO: 13703 - DNA, 265 bp, Glycine max
  Clone ID: LIB3040-043-Q1-E1-B2
atcctttttggtaatttatttctatttaattattgattatattggataacttttcaatctaaaaaaaaaaaaaaaaaaaaaaaaaaaaaaaaaaaaaaaaaaagaacaaaaagaaaaaaaataaaaaaaaaaaaaaaaaaaaaataaaaaaactagcaaaaaaagcaaataaaagataaacacatggcacttcaaaaaaaacgtagaagaatgaaaaaataaatggtaatagacaactaagcctccatgaagaacatcgcgactg

SEQ ID NO: 13704 - DNA, 332 bp, Glycine max
  Clone ID: LIB3040-043-Q1-E1-B4
ggtctcgctctgcacaaaccggatcaccacaaccagaagcgaaatcgcaatcgcaatccagcgaatatgaaggtcgtcgctgcatacttgctcgcagtgttgggagggaatccttccccttctgccgatgacatcaaacacatcctcggcgcagttggagctgaggctgagaatgagttgattgagttgctcttgactgaagtctagggaaaagacttcattgagctaattgctagtggaagtgaaaagatgtctgcagtgtctggtggcggtgcagcggttgccgttgctgctgcaccagctggatgtgctggtgcatctgctgccgaagc

SEQ ID NO: 13705 - DNA, 373 bp, Glycine max
  Clone ID: LIB3040-043-Q1-E1-B6
ggttctagtgtatgtgattgttgtgactcgttcttcttcgtcattagcttcttcttatgttgtctgtgtgtctgttttttctctcatctgaaaatgtcttgctgcggtggtaactgtggttgcggaagcgcctgcaagtgcggcaacggctgccgaggctgcaagatgtacccatacttgagctacaccgagtcaacgatgacctagaccttggtcatgggagtggcatcagttaaggctcaattcgagagtgctgaaatgggtgttcccgctgagaacgatcgctgcaaatgtggagctaactgcacctgcaacccctgcacttgcaactgaggtgttggagagctaaagcttcaatcagaaatggccctta

SEQ ID NO: 13706 - DNA, 302 bp, Glycine max
  unsure (1)..(302): unsure at all n locations
  Clone ID: LIB3040-043-Q1-E1-B8
accattgcacatggtggtgtgcttccaaacattaaccctgttttgttgcctaagaagacggagagggctgccaaggagcctaagtctccatccaaggctactaaatctcctaagaaggcctagattatcctttttttttttttttttttaaatctagtgttgtatatcggtgcttagatgcttttggtgtaacaggaaatttgatgtgtttcttaaacattgtaattcttgtcccattgtgttgcttgtangagtgagtttgctttattaatgaaaagtggaaacctcttgttttcaatcgg

SEQ ID NO: 13707 - DNA, 291 bp, Glycine max
  Clone ID: LIB3040-043-Q1-E1-B9
gaggtttctctctcccgtatacatcttgaacctaccgcgtttccgtgacagagacatcgcagtggcgatgaggcctacgccgtgttagcggcagatgcaaatcaatccataccccaactcccgtttctgccgtggtcttcctgatcctaatatcagaatctaagatgttggtattagtatgaaaagtgttggtgattatcccttctgcgttcatctggatatcttggactaggaaaatgtttcaagtgcagctgtggcagctgctacaactgcaagcaccagctatatggc

SEQ ID NO: 13708 - DNA, 359 bp, Glycine max
  Clone ID: LIB3040-043-Q1-E1-C1
gggttcgaatgttggaatcaaagcaggagagaagatggaaaacagtgaggaacaaaagtacagagtccggagattagagatctcagacaagggaaaaggcttcatcgagttactgcagcaactcagcgtatgcgattccgtctccgacaaggaattcgaggatcgattccgagacctcagtgttctcggcgacgagcacgtgatcggcgtgatcgaagacgaggcttccggaaagatcattgcgacggggagcgtgtttatcgagaagaagtttttgaggaattgcggtaaagttgggcacattgaggatgttgttgtggattctagcatacgcgggaagcatttggggaagagaatga

SEQ ID NO: 13709 - DNA, 366 bp, Glycine max
  Clone ID: LIB3040-043-Q1-E1-C10
ggagaaatggagcattttgtttggagggtgttgcctttgctcacaatcctcatttccttagtagtattcttctacttgcaggattcttacagggcccatttgcatcctctcgtaaagttcccgcggaataagtgcagccttcttccccatcgtcatttctggataaccagcaaacgcattgtgaccccacaagggatcatttctggttcagtggagataaatgaagggaaaataatatctgtcatcgagggatatagtaagcaggggaagtctaagcaagaaaaaataattgattatggagatgctgttgtcatgcctggcttgattgatgtgcacgtacatcttgatgagccaggaagaactgca

SEQ ID NO: 13710 - DNA, 360 bp, Glycine max
  Clone ID: LIB3040-043-Q1-E1-C11
ggatttagaattaaaataaaatagtgagggaattgattgatactatactagtgagaaaagaaagggaagtcctccgcgccgccactcctcccatctctctgctctaaacgacaccgttttagtcttctcctcaagtcatggccacactcaagagcctctgcttcagaggaactgcctttcccgtttgcccctccaatgtcaccaacaatagaaactccaggagctcatattggaggcctgcacaagcagccgtgaagcccaatttccatctcccaatgcgcagttttgagttaaaaaataggacttctccagaggacataaaggctctgagattgataactgccattaaaactccatacc

SEQ ID NO: 13711 - DNA, 376 bp, Glycine max
  Clone ID: LIB3040-043-Q1-E1-C2
gaccacttcaaaacactcataacacaaagcacaaagcaaagctcatccttgagttaaaaaatggcagcagcttcttccatggctctctcatccccatccttggctggcaaggccgtgaagctgggcccatcagccccagaagtgggaagggtgagcatgaggaagaccgtcaccaagcaggtctcctcaggaagcccatggtacggcccagaccgagtcaagtacttgggcccattctctggcgagcccccgtcctacctaaccggtgagttcccaggcgactacggctgggacactgctgggctttccgcagacccagaaaccttcgccaagaaccgtgaactcgaagtgatccactccaggtgggccatgctcg

SEQ ID NO: 13712 - DNA, 372 bp, Glycine max
  Clone ID: LIB3040-043-Q1-E1-C3
gacggacgagggtttcgtttcgggtttgacgttgttcacaatcactttctgcgcttcactcactcccttcgtgcggttttctttctttgtcgaactcgtgcgaaaatgcgtgagattcttcacatacagggagggcaatgcggaaaccagatcggagcgaagttctgggaggtggcgtgcgcggagcacgggatcgattccacggggaggtaccagggggacaacgagttgcaactcgagcgagtcaacgtctattacaatgaagcgagttgcggaaggttcgtgccgagggcggtgctcatggatctagagccagggaccatggacagcgtcagatctggtccctacggtcagattttccgacctgataac

SEQ ID NO: 13713 - DNA, 380 bp, Glycine max
  Clone ID: LIB3040-043-Q1-E1-C4
ggaaaaagggtgttatgttatccgaagcagggtggattgaaaagcacgaacaggagcgatggccgcggcaacgttgtacttggcaaaaccgccttcgtcttttactcccaaaatcccgtttccaagagtgagggacagtggaattggaactgtaaagtgtcaagttaaaacccaagtgaaagcgggtatcctgggactgggtctgggtctgttccacttccttaacttcgtcgaacccggttcatgtctccaactgcaattccacgaaccccccaatgccctctctttgcccacatgggccattcacgtgtccagtgtcgctgaatggattatagctatggctttggtgtggcaatacggagaaaaatctggatacccag

SEQ ID NO: 13714 - DNA, 395 bp, Glycine max
  Clone ID: LIB3040-043-Q1-E1-C7
gattggcagtagtagcaacgtcgttgtgtggcggtgacaaccatggccgactcatctcaagaccttgaccaacctctcgatagtgctttggatgattttcagtccttcaacctcaatcctccccctccaagtggggaagcaactgcgaatagcaagaaggagagtccttctttgccgtcgggggttcaaggattgggcatgggtttacccgatttgagaacgaagaaaaaggggaaacagaaggcttccaaagacagccacgtgtcggaggcgctcaacaagctcagggagcagaccaaagaggctgtgaaggggctggagtctatatccccacccactgccgatgatttacgtaaggatgccttgatggaagattgggtcaaacatttgagcag

SEQ ID NO: 13715 - DNA, 399 bp, Glycine max
  Clone ID: LIB3040-043-Q1-E1-C8
gagcctcagcagaagcagaacgaggagaagcagaaggagcaaaagcaatggcgccgaagaagccgagaaccacgacaaggaaccctgatttggttagggggattggcaagtattcgaggtcgcagatgtaccacaagaggggcatctgggccatcaaggccaaaaacggtggcgttttgccccgccacgatcccaagcccaagcccgaggccccggcccagaagccgcccaagttctaccccgcggacgatgttaagaagcccctcgtcaacaagcacaagcccaaacccgcgaaactcagggctagcattactccagggactgtgttgatcctgcttgctgggaggttcaagggaaagagggttgttttcctgaagcagctcccatctggattgcttc

SEQ ID NO: 13716 - DNA, 365 bp, Glycine max
  Clone ID: LIB3040-043-Q1-E1-C9
gatacctaaaaattgtaccgatatggcttcacttgtgtgtctccttttttccttgcatttcatggttatcatgtcaggttccttaccagcaaatagtgaagtgtttacaaaagagtctcctatgtctctatccacaaaacccgtggaaagactcacccaactccacttttatctccataacaacaaaatgggggaacacccgactgctatgaaaattgttgagcctcctaaggcgtccatttctggttttgggactatttacatgatggatgaccctctaaccgaaggaccaagtccaacttcaaagcttgttggaagatgtcagggaatatatgctgaggcctcgcaacatgaacctgcgatac

SEQ ID NO: 13717 - DNA, 386 bp, Glycine max
  Clone ID: LIB3040-043-Q1-E1-D1
gactttagtttcgcaaagttgattctttctctctttatctttctttccccaatttgtgagtgttactgttgaatcgattggattggcattaggttgatctgaaatacgcaattgacatggcgagcgcgatggtagaggacgcgaacttcgaagatgaccaactagccaatatgaccaccgacgacatcgtcagagcttctcgtcttctcgacaacgagattcgcatcctcaaggaagagttgcagaggaccaatttggaattggaatcgtacaaggacaagatcaaggagaatcaggagaagattaagctcaataagcagttgccctacctcgttggcaacattgttgagatattggaaatgaacccggaagacgaagctgaagaa

SEQ ID NO: 13718 - DNA, 308 bp, Glycine max
  Clone ID: LIB3040-043-Q1-E1-D11
gatcaccatgacggtcgccagcaccaagagactcttcaagatcacgctctctctcctccgcctcggcttcaactcctccaaatgcaaaacggcagccaagatggccgtggccaggatcaagctgctgagggacaagcgagaggtggtcgtgaggcagatgcgtcgcgacattgctcttcttctccagtctggtcaagacgccaccgctcgcatcagggttgagcatgtcatgagagagcaaaatgttttggctgcaaatgagttcattgaactcttctgtgaattagtggtggccaggctcgcaatca

SEQ ID NO: 13719 - DNA, 348 bp, Glycine max
  unsure (1)..(348): unsure at all n locations
  Clone ID: LIB3040-043-Q1-E1-D2
ggtgtgagttgagtctgtgatgataatgatgatgatgatgtgttccatgtggatgtgggttgtccttgtggccattgctggtgcccttttagtcctaagatctatcctcaagaatgtaaattggtggctctatgaatccaaattgggtgtgaagcagtactctttgccaccaggtgacatgggatggcccttcattggcaacatgtggtcctttctcagtgctttcaagtccaaggaccctgattccttcatctcctcctttgtctccagatttggaagaactggaatgtacaagaccgtgatgtttggaaatccaagtataattgtgacaacacctganatatgcaa

SEQ ID NO: 13720 - DNA, 360 bp, Glycine max
  Clone ID: LIB3040-043-Q1-E1-D3
ggccgtcacacagagagagaagagacaatgaagtttaacccaagggtttcctcaagccgtcgaaagagccgcaaggctcacttcaccgctccgtcgagcgtgcgtcgcgtcctgatgagcgcgcctctctcgaccgatctccggtcgaagtacaacgtgcggtccattccggttcgcaaggacgacgaggtgcaggtggtgaggggaacctacaagggccgcgagggcaaagtggtccaggtctatcgccgcaagtgggtcatccacatcgagcgcatcacccgcgagaaggttaacggctccaccgtcaacgttggcattcacccttccaaggttgtcgtcaccaagcttcgaatggac

SEQ ID NO: 13721 - DNA, 400 bp, Glycine max
  Clone ID: LIB3040-043-Q1-E1-D4
ggtctcgctctgcacaaaccctaacaccaaaaccagaagcgaaatcgcaatcgcaatccagcgaatatgaaggtcgtcgctgcatacttgctcgcagtgttgggagggaatccttccccttctgccgatgacatcaaacacatcctcggcgcagttggagctgaggctgagaatgagttgattgagttgctcttgactgaagtcaagggaaaagacttcaatgagctaattgctagtggaagtgaaaagatgtctgcagtgtctggtggcggtgcagcggttgccgttgctgctgcaccagctggaggtgctgctgcacctgctgccgaagcaaaggaagaaaagaaagtagaagagaaggaggagtctgatgatgatatgggtttcagtttgttcgact

SEQ ID NO: 13722 - DNA, 376 bp, Glycine max
  Clone ID: LIB3040-043-Q1-E1-D5
ataactaataggtagagacaacgccgtttgagtcgcgtctgataataaaaatacacagtgagctctcgcttctagccctagggcgctgctcccgattttctctcttcggattgagtgaattgtgaaatgggttggaaagctgctgagaaactcattaggcactggaaagttgtcagaggggataatgttatgataataaggggcaaagataagggcgagactgggactattaagcgtgtcattcgctctcagaatcgtgtcattgttgagggtaaaaatctggtgaaaaagcacatcaagcaagggcaaggtcatgaagggggcatctttacagttgaagctccaatccatgcctccaatgtgcaagttcttgacc

SEQ ID NO: 13723 - DNA, 378 bp, Glycine max
  Clone ID: LIB3040-043-Q1-E1-D6
gacaactcaaactgcttcattgcataattgcagataagatcaacccttctaccttcagattcgcgggaagatggcatcacttcatgccaatgtgacatcagttgtttacaacagtggcaaccgtgtttctcaatcgaaatttgcaagctcttccttcttgtctgggttcgatgttgttggtcgtgcttcaagtgcttggaagaaggaacttgtcccatcttccatttccttggtgcctagagccaccctaacatttgatcccccaactaccaattcagacataaccaagcaagagaagcacactcttgaccctgcttctccagattttcttcctcttccttcatttgaacagtgctttccaaagagcatcaaagaaca

SEQ ID NO: 13724 - DNA, 399 bp, Glycine max
  Clone ID: LIB3040-043-Q1-E1-D8
ggttctagtgtgtgattgtttgttgttgtaactcgttcttcttcttttgttgttctgtgtttgtgtttgttttttctctcacctgaaaatgtcttgctgcggtggtaactgtggttgcggaagctcctgcaagtgcggcaacggctgcggaggctgcaagatgtacccagacttgagctacactgagtcaaccaccaccgagaccttggtcatgggagtggcacctgttaaggctcaatttgagggtgctgaaatgggtgtgcccgctgagaacgatggctgcaaatgtggaccaaactgctcctgcaacccctgcacttgcaagtgaggtgttgggagagcaagcttcaagcagagatagcccttaattaagaataatgataaactattaatgtgtag

SEQ ID NO: 13725 - DNA, 381 bp, Glycine max
  Clone ID: LIB3040-043-Q1-E1-D9
ggcagccaaagaaaagaaaatcctcaattttctgagcagccaaacactctctctctgtctctcgaaaattctcagtttgcagagaaaatctgaatcatgtcgtggcaagcgtatgtcgacgatcaccttctgtgtgacatcgaaggtaaccacctcactcacgctgctatcatcggccaagacggcagcgtttgggctcagagtaccgacttccctcagttcaaacctgaggagataactgccatcatgaatgactttaatgagcctggatcacttgctccaactggattgtatctcggtggcaccaaatatatggtcatccagggtgaacccggtgctgtcattcgagggaagaagggtcctggtggtgttactgtgaaa

SEQ ID NO: 13726 - DNA, 368 bp, Glycine max
  Clone ID: LIB3040-043-Q1-E1-E10
gaaggcctgagattcggttctttacttgttgggttgttctgatcttctctcatagcaatcaaatcacactcccatcttctcatctcgtaaaccctaaaccccgttttcagtgacatcgagatcgatcgaacatggatgaggagtacgatgtgatcgtgttgggcacgggtctcaaggagtgcattctcagcggtcttctctccgtcgatggcctcaaggttctgcacatggacaggaatgactattacggaggagaatccacttcgctcaatcttattcagctttggaagagattcaggggagatgacaagcctcctccacatttgggagctagcagggactataacatcgatatgaaccctaagttt

SEQ ID NO: 13727 - DNA, 351 bp, Glycine max
  unsure (1)..(351): unsure at all n locations
  Clone ID: LIB3040-043-Q1-E1-E12
gaaaaacanactccgaaagaaacagtcagaatcagaatcagaagaagcgagcaaagatgtcgggtcgtggaaagggacgcaacggtttgggtaagggaggagccaagaggcacatgaaggtgctccgcgataacatccagggaatcacaaaacccgccattcgccgtttggctcgcagaggcggcgtcaagagaatcagtggcctcatctatgaagaaacccgcggcgtccttaagatcttcctcgagaacgttattcgcgacgctgttacctacaccgagcatgctaggaggaagactgttaccgctatggatgttgtttatgctctcaagaagcaaggcaagactctct

SEQ ID NO: 13728 - DNA, 397 bp, Glycine max
  Clone ID: LIB3040-043-Q1-E1-E2
agggattgttgctgtcatcatccgcagctgctgttattcgcatcgcagactaacagtgagccatggccgtcggaaagaacaagcgcatctccaaacgcaaaaagggtggcacgtaagaacgcagctgatcccttttccaagaacgactggtatgacattaaagccccttccctttttcaactgaaaaatgttggcaaaaccctcgtctctcgtactcacggtaccaagactgcttctgaaagacctacccatagactgtttgaggtctccctggctgatcctcaacgggatcacgatcaagcattcacgaacactaagttgagagctgaacatgtgcaatggaagaatgtcctgaccaatttctggggaatggatttcacaactgacaagctgacgt

SEQ ID NO: 13729 - DNA, 403 bp, Glycine max
  Clone ID: LIB3040-043-Q1-E1-E3
gatgccgaaaagtagtaccaagatggcttcagttgtgtatctcctctttggcttccatctcattgttatcatgtcaagttccttacccgcaactagtgaagtgtttgcaaaacagtatccatccacagaacccgtggaagaaaaactcacccaactccacttctatttccataacaacataacgggggaacacccaactgctatgaaaactgttttgcctcctaaggggtccattcatggttttggggctacttacatgatggatgaccctctaactgaaggaccaagtccaacttcaaagcttgtgggaagatctcagggaatatacgctttggcttcacaacatgagcctgggttgctcatggtgacaaattttctcttcactttgggcatttacaatggc

SEQ ID NO: 13730 - DNA, 367 bp, Glycine max
  Clone ID: LIB3040-043-Q1-E1-E5
ggccgaaaagtagtaccaagatggcttcagttgtgtatctcctctttggcttccatctcattgttatcatgtcaagttccttacccgcaactagtgaagtgtttgcaaaacagtatccatccacagaacccgtggaagaaaaactcacccaactccacttctatttccataacaacataacgggggaacacccaactgctatgaaaactgttttgcctcctaaggggtccattcatggttttggggctacttacatgatggatgaccctctaactgaaggaccaagtccaacttcaaagcttgtgggaagatctcagggaatatacgctttggcttcacaacatgagcctgggttgctcatggtgac

SEQ ID NO: 13731 - DNA, 313 bp, Glycine max
  Clone ID: LIB3040-043-Q1-E1-E6
gaattccccattcccaaaatttctcattctccctttcctctccgaaccctcgatcactctcacgcgctcctatattcgctcctccaccgtcgctctctcgaacaaccacaacaccatcttcatcacatggcaaacgcagcatctggtatggcagtccatgatgactgcaagttgaggtttttggagctgaaggcaaaaaggacacaccgtttcatagtttttaagattgaagagcagcagaagcaagtcattgtggagaagcttggtgagcctgcccaaggctatgaagatttcactgccagccttcctgctg

SEQ ID NO: 13732 - DNA, 361 bp, Glycine max
  Clone ID: LIB3040-043-Q1-E1-E7
gattgtaaagcattcttcgcctttctctctcttctttttactctctctctgtctctctctacgctttctcgttcgagatccctcaagggatccactaactgaaggagaaatggggttgacattcaccaagcttttcagccggcttttcgccaagaaggaaatgcgaattctgatggtgggtctcgatgcagctggtaagaccgccatcctgtacaagctcaaacttggagagatcgttaccacaattcccaccattgggttcaatgtggagactgtggaatacaagaacattagtttcactgtctgggatgttggtggccaggacaagattcgtcccttgtggaggcactacttccaaaac

SEQ ID NO: 13733 - DNA, 267 bp, Glycine max
  Clone ID: LIB3040-043-Q1-E1-E8
gagcaacatggtgaagctggcggagagatttacttgccagaagcttacgttagaaccaagaggactacttaatggagcaaatcagttggaagaacttgtagctagcttcccaactggcttatctgagtgtggagaagcattatcaagccttaggagtaggagaacgagtactgtttgtgatgaatgtctatggtttaagaaatctgtctttagtcaacttgtgtgttttgttattcagttctcagcaataaactgctctggcaatct

SEQ ID NO: 13734 - DNA, 378 bp, Glycine max
  unsure (1)..(378): unsure at all n locations
  Clone ID: LIB3040-043-Q1-E1-E9
gatttgaagaaaaagacaaagcagtagcagatcgaagataacaatgtctttatttgctagaagtgtttccacactactggtgcttatattgttattaccaacgttgaacaatactatggcagagaaggcacttattggggttacaaataatttgggaagtcgaaacttaactgtttcctgcaagattgataatcatccacaccttctcggccccactgattactatgagtggaagttttctcctgaatataatgacgaatttggaactgaaccattattcagtaattgttcctttcaatgggaaggtgcccatcactcatttgatctctacgtacttgttanggatggtgattgcaacaattgctcatggcatattaa

SEQ ID NO: 13735 - DNA, 370 bp, Glycine max
  Clone ID: LIB3040-043-Q1-E1-F10
ggcactgcaactttgctctctgtgaggcttcaatttctaattagggtttcgcttagagtaaccaataaccatgggagtcttcacctttgtcgtccgcaaatccggcagcgaatggagcgccaagcaacattccggcgacatcgaggcctccgccgattccaccttcgatctccaacggaagctcgtgcaggccgctctcgccgttgattcctccggtggagttcagtcctctttctctcccgtgtctcctacctccgctgtgttccaagtgataatgggtggtgcagtattcgttggaagtggtggtgctgttgcaactgcaactgcaagtggtgctgccgcagctgatgctgccccagctgctgagaaa

SEQ ID NO: 13736 - DNA, 111 bp, Glycine max
  Clone ID: LIB3040-043-Q1-E1-F2
gggacaaaaggattgatcgcgaaaaagatttcttgttcttattagaagatcgtgattggatccacatatgtttggtaaaaagaaagaaaaatattcttctttgagaataat

SEQ ID NO: 13737 - DNA, 325 bp, Glycine max
  Clone ID: LIB3040-043-Q1-E1-F3
cgggatattgaaaaggcgcccaagcaagtttgttctttcgccgccgtcgctcaaaactcgcaaaccacaatgcctaagcagatccacgagattaaggatttccttctgacggcacggaggaaggatgcgaggtcggtgaaaatcaagaggagcaaggatgtcgttaagtttaaggttcgatgctccaagtatttgtacacgctttgtgtccttgatcctgagaaagccgataaattgaagcaatctcttcctcccggtttgagtgttcaagacctgtagaagtgctgagtgccgcagcgtgcgtttgtttatccttttgttgcct

SEQ ID NO: 13738 - DNA, 402 bp, Glycine max
  unsure (1)..(402): unsure at all n locations
  Clone ID: LIB3040-043-Q1-E1-F4
ggcgtacgcagcttcatccctaacgcgtgcatagcagagtcagagacagagacgcagccatggggcggagacctgcgaggtgttataggcaaattaagaacaagccataccccaagtcacgtttctgccgtggtgttcctgatcccaagatcaggatttatgatgttggtatgaagaagaagggtgttgatgagtttcctttctgtgtccatctggttagttgggagaaggaaaatgtttcaagtgaggccctggaagctgctcgcattgcttgcaacaagtacatggccaaatttgctggaaaggatgctttccacttgagagtcagggtgcacccattccatgttcttaggatcaacaagatgctttcgtgtgctggtgctgataggctccanactggaa

SEQ ID NO: 13739 - DNA, 356 bp, Glycine max
  Clone ID: LIB3040-043-Q1-E1-F5
gacagaaaagaaaaaggaaaccctagctggataggtcaaacatcatcatgtcggacgaagagcaccatttcgagtccaaggcagacgccggtgcctccaaaacctaccctcagcaagccggtaccattcgcaagaacggctacatcgtcatcaaaggacgcccctgcaaggttgtggaagtttcgacttccaaaactggaaagcacggtcacgccaagtgccactttgttggaattgatattttcactgccaagaaacttgaggatattgtgccctcttctcacaactgtgatgttcctcatgtgaatcgtactgattaccagctcattgatattgctgaggatggatttttgagt

SEQ ID NO: 13740 - DNA, 166 bp, Glycine max
  Clone ID: LIB3040-043-Q1-E1-F6
tcatgtcctaacttacgtgacgaaacttgagggacattattaaaactacaagagttgaatcttccatcaatgctctgacccctttccagatctcattcctctctcgtttcctcatgtgcaccatgtgcacactcataggcccactacaatgatagggctctccctc

SEQ ID NO: 13741 - DNA, 384 bp, Glycine max
  Clone ID: LIB3040-043-Q1-E1-F7
gatccatttctcgcaacaacgcttaacctctctcattccccatttcctcacctccttcaaccgctgctaaattctagggttccgaaatggacgctggcggaaagatcaagaagggcgccggaggtagaaagggcggcggcccaaagaagaagccggtttcaaggtccgtcaaagccggtctccaattccccgtcggaagaattggccgttatttgaagaaaggaaggtacgctcagcgtgtcggtaccggtgctcccgtatacttggctgcagttctcgaatacctagctgccgaggtgcttgagttggctgggaatgccgcacgtgacaacaagaagaacaggattattccaagacacgtgcttttggcagtgaggaacgatg

SEQ ID NO: 13742 - DNA, 377 bp, Glycine max
  Clone ID: LIB3040-039-Q1-E1-B8
caacataggtcatcgaaaggatctcgaagacccaccaacgcacgaaagccgggatctttcagaaaatggattcctattcgaagggtgcataaccgcatggataagctcacactaacccgtcaatttgggatccaattcggttccttaggaggtatcgggaaggaattttggaatgtaataatatcgattcatacagatacagaagaaagggttctctattgattcaaacgctctacctacgagatagggatagagaaagaggaaaaaaccgaggatttcacatagtacttttggtcgaaaaatcgatctgatttttttcgtacttttcgctcaatgatgaaatgggtcagattctacagggacaaaccttgtgggag

SEQ ID NO: 13743 - DNA, 270 bp, Glycine max
  Clone ID: LIB3040-039-Q1-E1-B9
gggccttcattcgggactttcactagccgcatcagcctcaggacgagaatcaggatgtctcacaagaagttcgatcacccaacgcacgggtcactgggatttctccccagaaagcttgctgcacgtcacaagggaaacgtgaatgcattccccaaggatgacccatccaacgcatccaagctcactgcattcctgggttacaacgctcgtatgactcacattgttagagatgtcgataagccaggatcaaagcttcacaacaacgaaaca

SEQ ID NO: 13744 - DNA, 361 bp, Glycine max
  Clone ID: LIB3040-039-Q1-E1-C1
gagcgaaacagagagtgatttcagtgagtgatcggtgttcacttgatctcatcataatcgtcagcgtcaattgaagaagatgccgatcagaaacatcgccgtcggaaggcctgaagaggcgactcaccccgacacgttgaaggcggctttggctgagttcatctcaaccttcatcttcgtgttcgccggctcaggctccggcatcgcctacaacaagctcaccgacaacggcgctgccacccctgccggcctcatctccgcctccattcgccatgcattcgccctcttcgtcgccgtctccgtcggcgccaacatctccggcggccacgtcaaccccgccgtcaccttcggcgccttcgtc

SEQ ID NO: 13745 - DNA, 350 bp, Glycine max
  Clone ID: LIB3040-039-Q1-E1-C10
ggagcataactctttgtttcccacttgacccctaaattcgtgcccattcccacaactgcacattcttctttctatatattccaaatcccttttccgatttccaccaaaatctaaaccgaaattcccaattacccttcccaattttcaccaaaacctaatactcccacaccaatcttcgatcatggacgccgattcacaacctcaacaactcgaagagagaacagaggagcaagaactgaagtacctggaattcgtgcaattcgcgaccatacaggctctgatgcgctgcgccatcctctactcatacgccaaggagcgcgcgggtcctctgaagcccggtgtcgacaccg

SEQ ID NO: 13746 - DNA, 297 bp, Glycine max
  Clone ID: LIB3040-039-Q1-E1-C11
ggggttattggacacattcttcagcgactgcgtttttggatcggaacctcttctgcggcgtagcaatgggacactccaacgtttggaactctcacccaaaaaaactaccgtcctggttctcgcacttgccgtgtgtgtgggaatccacatggactgatcaggaagtatggccttatgtgctgcacgcagtgcttccgtaacaatgcgaacggaattggcttcatcaagtatcgctaaaagagcagttgtcaactacggaccagtattgtgttctggcactaagatgttttgaggatg

SEQ ID NO: 13747 - DNA, 394 bp, Glycine max
  Clone ID: LIB3040-039-Q1-E1-C2
gagaaaccaaaaggctctctcacgcagtcgcagtgagtgaaaaggaaaaccctaattgcggtattctcagtgccttcgagagaaagaaaaaatggcagataatcttgttctccgtggcaccatgcgcgcccacaccgacgttgtgacggcgattgccactcccatcgacaactccgacatgatcgtcaccgcctcacgcgacaaatccatcatcctctggcatcttaccaaggaagacaagacttacggtgtcccccgccgccgcctcaccggccattctcattttgtccaggacgtcgtcctctcttctgacggccagtttgccctatccggctcctgagacggcgagctccgcctctgggaccttgctgctggcacctccgctcgccgcttt

SEQ ID NO: 13748 - DNA, 275 bp, Glycine max
  Clone ID: LIB3040-039-Q1-E1-C4
gagcaacatggtgaagctggcggagagatttacttgccagaagaatacgttagttccaagaggacttaaatggagcaaatcagttggaagaacttggagctagcttcccaactggcttatcagggtgtggagaagcattattaagccttaggaataggagagtaagtactgtttgtgaatgtctttggtttaagaactccgtcttatgtcaacttgtattctgttatacagttctcagcaataaactgctctggcaatctagtttcatgtacaat

SEQ ID NO: 13749 - DNA, 346 bp, Glycine max
  Clone ID: LIB3040-039-Q1-E1-C5
gaacagccacaacactttccacttgtctccgaattagttatcttgagaaacattattcccattgctatatattatggctagcatgaaggttacatgggtggttgtgatcatgtgcatggccgtggtgggtgcaccgatgatggcgcaagccatgacatgcaatgatgtgacggtgaacatggcacagtgcctatcctacctgatgcacggaggaacaccttcaacactttgctgcagcggagtcaagaacattcttggctctgctgtcaccaccgttgacaaacaaactgtgtgcaactgtctcaaggcggatgctgctaggtacaacatcaatgcacagtatgct

SEQ ID NO: 13750 - DNA, 324 bp, Glycine max
  Clone ID: LIB3040-039-Q1-E1-C6
tacggtttcgataatacggttttcggtgaacagtgcgcaatctatccactataccacaattgattatcctgtcacacattacactcagtgccataaataagttcgcgcataaaagttagctgaataggtctaatcacgattatatccgcttgacgatgcataacaacatcaggtagccatcaaatccccttcactgacgtcgcacctagcatagtttctaacgtatatgctctacctaggttcaccttatccacttaactactgttgtatcttcatgatgcatggctcttctgttgagttcgtagtcttttccacttgttccaa

SEQ ID NO: 13751 - DNA, 358 bp, Glycine max
  unsure (1)..(358): unsure at all n locations
  Clone ID: LIB3040-039-Q1-E1-C7
agcccaggcgtcagacggctgcgaaaggacaagataagggggagtacaacttcagagtttagaagaataccccctcttttgctgcatcagaggagttgtaaattaagagcatggctgcacaagctcttgtatcagcatcttctcttaccttctcagcggacgctgcaagacaaagtcttggaccaagatcactctaatctccatttggcttctcgagaaaagtctcctttcttgttaaggcagctgctacctcccctgtcaagcagggatcagacagacctttgtggtttgcatcaaagcanagtcgttcttacttggatggcagccttccgggtgactatggatttgacccactggg

SEQ ID NO: 13752 - DNA, 344 bp, Glycine max
  Clone ID: LIB3040-039-Q1-E1-C9
ggcggaagaccgacaagaaggaaacgttatcacaaattggattgttcctccgaacagtgaaccctcacctaacaatcagaacccaggatttggtgaaacgatgaacagtgataggaaaattggggttgccttggacttttccaaaggaagcaaaatcgctctgaaatgggctattgacaatcttatcagcaacggtgacactctctacatcgtccacaccaagccttccggaggaagtgaatcaggaaatcttctctggtccaccactggttcacctctgattccattgtcggagtttcgtgaaaaggaggtgatgcgtcactatgaggtggatactgatgctg

SEQ ID NO: 13753 - DNA, 345 bp, Glycine max
  Clone ID: LIB3040-039-Q1-E1-D1
gagctccattctgcacaattctctcttatcatctttgttattacctctttccaaagtccaaattttctagttccaccaaaccaaaccaaaccaaaatggcagcagcctcagcctcatccatgatatcaacaccagccttatctccaaccatccaaaagcaccatcatttgaagccatccaacgtgtgcttccaaggtcttagacccctcgcaaggttcaccaaagcctcatcaaccaaagtgagcaccaccaccaaaagggttattccaaagggtggtgttagagctgaactcaactcagcccttgtgataagcctcagcactggcctctccctcttcttgggaa

SEQ ID NO: 13754 - DNA, 359 bp, Glycine max
  unsure (1)..(359): unsure at all n locations
  Clone ID: LIB3040-039-Q1-E1-D10
gactctaaccggcaatcagattcggaagcctttgacttgtgttcactctgttattctcgcaatggaggttcagattccaaatcacactgttttcgacatgccttcacttctccaagctgtggtcgccgacactgttctcgccgctgctcaatctattgctttgattggatatctgcttactaatggcactagttcagtgtcaccaaatttgactgaagtggatggaatgtttcctttagaagacctttttgggatgaaacatgcttatctacaaaacaagaatagtgaaacagaggacgatgatgatggagatgaggatgatgaagatggacctgacgaggatgangatggagatgacg

SEQ ID NO: 13755 - DNA, 345 bp, Glycine max
  Clone ID: LIB3040-039-Q1-E1-D11
aaaaccaaaaaaagggaatgccatccatctgattaatgtggacagtattttgatcgcgttcaagtcactctctcaaaatggaccacgatacgctcaagcgcaacatcgattgcatataattcctatccgcaccactcacatgcaaaagcgtggctaagtgtgacatatcggcataattgagatgtgcgaggctgaagcctaaggattgctggtactggctagctggccagtgcatgaatccaaactgtgcatttagacatcatcgattggatgggcataatgcagcgtcagtgcaatctgaatttaagcaaacatcattacgtgcacacaatacacttgttcccc

SEQ ID NO: 13756 - DNA, 395 bp, Glycine max
  Clone ID: LIB3040-039-Q1-E1-D2
ggtcctaaatcctcattccagccacacgcttcagaagacatggcctcattgggtgggttacaaaatgtgagcggcatcaattttcttatcaaagagggtccaaaagtcaatgcaaagttcgagctgaagccgccaccatatccactgaatggtttggagccggtgatgagccagcagacacttgagtttcactgggggaagcaccacaagacttatgtggaaaatctgaaaaaacaagttgttgggacagagcttgatgggaagtcactagaagagattattgtcacatcatacaataagggtgacattcttccagctttcaacaatgcagcacaggtatggaaccatgacttcttctgggagtgcatgaaaccaggtggacgtggaaaccatcc

SEQ ID NO: 13757 - DNA, 265 bp, Glycine max
  Clone ID: LIB3040-039-Q1-E1-D4
gaccgaaaaccaaatccgaagagtgaacgttcgttgaatcccatggcgagagtgaagcacacgccagcttctcgcaaatccgctaaaaagcaagcgccacgcgcatccacttccacgcagccgccaccacaatcccaatcgcctgcaactagagagaggaggagagctcaacaagtggagccgcagcaggagcctgaggctcacggaaggaagaagaggcgcaatacgtctggaactgtggcgcttcgtgagattccgcattttc

SEQ ID NO: 13758 - DNA, 371 bp, Glycine max
  Clone ID: LIB3040-039-Q1-E1-D6
ggctccgtctccatcctaaatcgaatagatagataggtgaaaatggcgcagtgtgtgaccaacacattcatgcacggaaaaccctttcatccagttgcagcaactccgactaacaatgttcggagagcggttcatgtgcggtatgtggtgcaagaagaacgagatacacccgcaactctatcaggaatcgaacgtgtaccgcagcggcgaacttgtgctgacgacaggtgggacccagaacgaatacgtggtggacgtgtggtcggggaaccaccccttcgacctcagaagccagtcggcgtcaatggtcagcgacgaccagatcgagaagttccgcaggacgttccgggagcccacagagatcacggaca

SEQ ID NO: 13759 - DNA, 383 bp, Glycine max
  Clone ID: LIB3040-039-Q1-E1-D7
gatagtctcacatgctacatttcacagatatcaatctcgcatagcagtcaacacaggtcaccacacgactttcctccaaacctttcctgagaaacctgtcagtgaaacccttaattgtggaacgcaattcaggaacgagactcgaatggctagctccttaccgtagcttccaacatgaccttacagctgactaacactgaggactacattcagggacactttaatagatttttgccagatatttcaatgatctctaacatcgttcactaccttcggagaatgacgtcggatatgcagctcaagactatagcatgatactagatactgatggctactgcatatggctaagacatatttcgaacgcgaatgtaccaccgtatttg

SEQ ID NO: 13760 - DNA, 374 bp, Glycine max
  Clone ID: LIB3040-039-Q1-E1-D9
gatgccgaaaagtagtaccaagatggcttcagttgtgtatctcctctttggcttccatctcattgttatcatgtcaagttccttacccgcaactagtgaagtgtttgcaaaacagtatccatccacagaacccgtggaagaaaaactcacccaactccacttctatttccataacaacataacgggggaacacccaactgctatgaaaactgttttgcctcctaaggggtccattcatggttttggggctacttacatgatggatgaccctctaactgaaggaccaagtccaacttcaaagcttgtgggaagatctcagggaatatacgctttggcttcacaacatgagcctgggttgctcatggtgacaaatt

SEQ ID NO: 13761 - DNA, 343 bp, Glycine max
  Clone ID: LIB3040-039-Q1-E1-E10
gcgagctagagaagttattatggtttttgactgcggcggtccaaacactcttctctgcagcgtttgcctaaatctcgcttcaacatggctgaacacatcgggaaagcttttctgaagcaaccacaagtgtttctcagcactccgaatactgggaatggacagagatctggaaaaggtgggaaccgcttttgaaattccaatgggcatggatttatcactcccattgaagtcatctatcgaatctatattgacaagagttgccccttcactggcaatgtatccatccgtggccgtaacttggctggaacatgtcacactgctaagatgaaccggactattattg

SEQ ID NO: 13762 - DNA, 366 bp, Glycine max
  Clone ID: LIB3040-039-Q1-E1-E12
gaaggcatttcattagcagcgttaaagaagagagaagaaaaatgcgaaagttcgatccatggcccgttttcttcaagcgcgagtggaaacgcaactggcccttcctcgttggattcgcagtcaccggagctctaatcaccaaactttcccttggccttaccgaggaagatgctaagaattccaaattcgttaaggcgcacaaaaggtgatttctgaatcgtgacatctgcctggctttgcactttatgttaggtttgtcaagattactttgcttgtcttgattttatggattgtaataacagaagagagatgctctagatagtctctttaagtctgtatcccatgttcttattttcagttttgggt

SEQ ID NO: 13763 - DNA, 66 bp, Glycine max
  Clone ID: LIB3040-039-Q1-E1-E5
gcttatgatgatcatataattatcttagcggatttcagtgagatttctatcaatgatctgattgcg

SEQ ID NO: 13764 - DNA, 386 bp, Glycine max
  Clone ID: LIB3040-039-Q1-E1-E6
gatcaacatttgtctctcatctttcaatttcaatcaacggttatacccttttctatttgagcatcatcatgtccaccgcagcgcagcccaaggccaagaaaacggcgtcgtccaagaagcccctctcccatcctaccttcgccgcgatgatagcggaggcgatagcgagtctgaaggagagaaccggttcgagccaatacgcgataaccaaattcatcgaaggcaagcacaaggagttgcctccaacctacaagaagcttgttctcgttcatctcaagaagtctgttgctgctggcaagctcgttaaggtcaaaaactctttcaagctcgcaccgactaagtctgctcctgttaaagccgctgctgctcccaagaagcccacaaag

SEQ ID NO: 13765 - DNA, 368 bp, Glycine max
  Clone ID: LIB3040-039-Q1-E1-E7
gagaataatcaatggaagtaggaatgtctctgaacgcgctggttcgtcttcctctctcgaattcacgcttccacgacgatgctgctccgatgattattaggcactctctgttttcgagccgaaagcaacagcagcagcagcagagttataaggttccacagcgtcatcaagtgttcgtggttgaagccaagggcaaaaagggaatgatgtctcgtcaatttcagcgcaatgctcctcctcctttacccaagattgaagacgatggcaatcccaaattcgtcatcttcattcgcatggccaatgtatacctttggtaccctcttagtatcgtatcaggcggcaccactgctaagataatggttgcagct

SEQ ID NO: 13766 - DNA, 355 bp, Glycine max
  Clone ID: LIB3040-039-Q1-E1-E8
ggaatcgtcttttacttctcagcagcttcggctagggttcagaaacgaaaaagggttcggtgttctgttcgcgatgagagccaagtggaagaagaagcgtatgaggaggttgaagaggaagcgccgaaagatgagacagagatccaagtagtgcgttaaacctagtttgtttctgttgcttttacaattgcttatgttgtcgaatgggacacccagttgttagtggcactggtttctcctttttgatgtttgatacattttgttggattcaagtagtttatgttcgtcttatgttattagctcaaaacaatgttgttactgcttttgctaatcaacatgatctcctatttgcacc

SEQ ID NO: 13767 - DNA, 374 bp, Glycine max
  Clone ID: LIB3040-039-Q1-E1-E9
ggatcaaacacagagagcgcagtccaaccctcaaaatgcattcattcggctacagagccaacgcgttgctaacctttgccgtaaccattctggcgcttatgtgcgctatggcttctgtatccgacaacttcaacacccccactccctctgcacaagtccaggttctgaacatcaactggtttcagaaacaacccaatggcaacgacgaggtcagcatgacgatgaatatttccgcagacttgcagtcccttttcacatggaacacaaaacaggttttcgtttttctagctgctgagtatgaaactcctaagaattccttgaatcagatatccctatgggatggtatcattccctctaaagagcatgcaaagttt

SEQ ID NO: 13768 - DNA, 389 bp, Glycine max
  unsure (1)..(389): unsure at all n locations
  Clone ID: LIB3040-039-Q1-E1-F1
ggggttatcggaactgaagtgatgcgcggcaacatttgggaaacacaatggttgacagtgagcataaccgtaacagtcaccgccatttccatctctgcatacgtattaaagagaaaatggaatcatctgaactcgaaaatcgaggagctggaagcatctctcaagtcttgctccgacaaatgcgcctccgaaaggcaaggccgaattagggctcaactggccttgagaaaacaagtaacacagtcgcaacctaaatctcaaaacctaaacctcacttcttatcccatgataccaattggtgtcgtccactcatgcttctccaccaggaacgggaccccgaggcaaccgttactcgtcccacttgctanggcctgtttggttttcaacac

SEQ ID NO: 13769 - DNA, 328 bp, Glycine max
  Clone ID: LIB3040-039-Q1-E1-F10
ggccacataacacacattgaaactaaactccaacaagttcctaccatagtctgaggaaagtgagtgagagaaagagatcgcagacacagagcagaatggcttctacccaatgtttcttgcaccaccatgctcttaccacccctgccagtgccagatccccatcactacgcatcttggttagcaccaagcctaaccagcttgtttgcaaggcacagaaacaacaaacaccacatgaggatattgatgtcagcccaatctctcgccgtttagctctaactgtgctcattggtgctgctgccgttggctccaaagtccaacctgctgatgc

SEQ ID NO: 13770 - DNA, 368 bp, Glycine max
  Clone ID: LIB3040-039-Q1-E1-F11
gaaaaacgccacttcctcacgcatttcctcgttttcttcttcttcccttttctctcttctctctctttctccggcgacgatctcagattccggtcactcctctcgccggcgatcccttattcctccgtcctccgtcgagtcctttccgattcgaatcgttcccagccttgtgccaccatgaatcccgaatacgattatttgttcaagcttttgctgattggagattctggtgtaggcaagtcatgtcttctcctgaggtttgctgatgattcataccttgacagctatatcagtaccattggagtggactttaaaatccgcactgtggagcaggatgggaagactattaaacttcaaatttgggacac

SEQ ID NO: 13771 - DNA, 319 bp, Glycine max
  Clone ID: LIB3040-039-Q1-E1-F12
gagcgaaacagagagtgatttcagtgagtgatcggtgttcacttgatctcatcataatcgtcagcgtcaattgaagaagatgccgatcagaaacatcgccgtcggaaggcctgaagaggcgactcaccccgacacgttgaaggcggctttggctgagttcatctcaaccttcatcttcgtgttcgccggctcaggctccggcatcgcctacaacaagctcaccgacaacggcgctgccacccctgccggcctcatctccgcctccatcgcccatgcattcgccctcttcgtcgccgtctccgtcggggccaaacatctc

SEQ ID NO: 13772 - DNA, 376 bp, Glycine max
  Clone ID: LIB3040-039-Q1-E1-F6
ggagactgtgagcacttagcagagaggaagaaagatgatcatccctgttcgttgtttcacctgcggaaaggtcattggaaacaaatgggatacctatttagaccttctgcagtcagattacagtgaaggagatgccctggatgctttgggactggttcgatattgctgtacgcgcatgcttatgacccatgtcgatctcattgagaagttattgaattacaacactctggacaagtctgatcccagttaagaaggccttagggagcaaaggatgaccaagatgtttcagttgaattccatgctatctggccaatgaacaatcttttttccttttctgaattgttttgctacaagctggtcatggttgtgtgctggt

SEQ ID NO: 13773 - DNA, 383 bp, Glycine max
  Clone ID: LIB3040-039-Q1-E1-F7
gaacttgtgacaggaagtgctaagcaatcaaaggatcaaccagctgctcacaacaatggtagcaaatgcaaatcaagtggaaagtcccatcagtctgagtctcaggccaaggggatgaagatgtctgcaccacccaaagaagaggatgagagtggagaagaagaagaagaagatgatgaacagggtgcaacatgtggtgcttgcggtgataattatggcactgatgaattctggatctgttgtgatatgtgtgaaagatggttccatggtaaatgtgttaaaattactcctgctaaggctgagcacatcaagcaatacaagtgccctagctgcagtaacaagagggttagagtttgaaagctctaaacctttggatcaatcac

SEQ ID NO: 13774 - DNA, 61 bp, Glycine max
  Clone ID: LIB3040-039-Q1-E1-F8
gaaacaatgggcagtcaaacactccccgtgctggtcactgcactggcgaccgtattcatcc

SEQ ID NO: 13775 - DNA, 288 bp, Glycine max
  Clone ID: LIB3040-039-Q1-E1-F9
gactgcgaaccagtagggactcccattccgactcttagccgccgatctctcagggcttgcatcttctcaggtaagctgtgaagatgtacacatcaaggaagaaaatccacaaggataaggatgctgaaccaactgaatttgaagagtcagttggacaggcattgtttgatctggaaaataccaatcaggagcttaaaagtgatctgaaggatttatacataaactcagccgtgcaagttgatgtttctggaaaccgcaaggctgttgttattcatgtcccttacagat

SEQ ID NO: 13776 - DNA, 346 bp, Glycine max
  Clone ID: LIB3040-039-Q1-E1-G10
gatgccgaaaagtagtaccaagatggcttcagttgtgtatctcctctttggcttccatctcattgttatcatgtcaagttccttacccgcaactagtgaagtgtttgcaaaacagtatccatccacagaacccgtggaagaaaaactcacccaactccacttctatttccataacaacataacgggggaacacccaactgctatgaaaactgttttgcctcctaaggggtccattcatggttttggggctacttacatgatggatgaccctctaactgaaggaccaagtccaacttcaaagcttgtgggaagatctcagggaatatacgctttggcttcacaacat

SEQ ID NO: 13777 - DNA, 355 bp, Glycine max
  Clone ID: LIB3040-039-Q1-E1-G12
gtgtagtataggattctcttctttattccttttgtaatttcattcattcttaatctttgtgataaaatcatgttcatccataattttaaggttaaatgtcctaaagtgaagtacaccgatactgatcattcagtccgtgtataactactaaaccaccgagacttgttcacgagtaacacgaatggcaccgtatcagtggattagtcaaattaaatctgtcagatacgaatttaaaacgaacatccatgttcctaaattaagggtaatgcatgtcggttggggtggtaacaacggctcagtactcaccagtagtgttagtgcgaaccgagagggcatttcatgggctacaaaggac

SEQ ID NO: 13778 - DNA, 229 bp, Glycine max
  Clone ID: LIB3040-039-Q1-E1-G2
gaaaaaggcagaccatacttgttgcgagtaagatcatgaatacagtggaatttatggggctgtcgcagttactggtgctgctgatgggatgttgtgggtctgctactgctgctgatgacttgccaaccaaatgttctgcggtgattcactaatgtaagacagtgtccgaacttcgctacggagaatgaccaaatgcccttcaacgcaagttgcgacgccgccatcgcca
